United States Patent Application Publication US 2014/0057251 A1 - sequence listing, part 135

SEQ ID NO: 249792 - DNA, 883 bp, Cannabis indica
atgtaccaaatcatgtcttctaattttagtaaaaaaattgtaacatgaatgaaagttcaggaggatgatttagtacatatcaaaattcaaggacatgatttgctagatatcaaagtttggaaagtatggtttagtacataaataagaaacagtaaaattgaatgaaattagacaaaagtttttttttgaaataaattagacaaaagtttttaaatctaaccatctcaatagttcatggagaatttttaacagcaaaaataattcaaaacacataatttagtacatgtaaaagttacggttaaaaaaaatgctaattagtctaaaaaagacgaaaggtattactccacttatcccaaaaataatacctccagcagcctcaaacctcttcttctctctctttcgacttccagccgtggtgacgaagaaaccaggtgaaccttgaattttaggcttaagcatcctaggtcgaatttgcttaataagatgagtgttcctgagccatgtcgaaattttaggcaaagtttgttgtttcttgaattttgaattttcagatttaatgtggggattattggttttgatagaatataattaggaatttgaatgagactatgtttttgcccagattttgaatttcgacacagaagataccttctttttgaaaaaataaataaataaagtctttaacttttaatttgatcaaaacgaagactttagagttaaaggtaagttttttactttaggcataatggatatggacttgtgcctacgagaagaaaaacctgctgatcttactgactccagtacagctgccgagagaactcatcatgcacaatgggaaaagtcaagtcgacttagtcttcttactatgaaaagatccattcct

SEQ ID NO: 249793 - DNA, 1470 bp, Cannabis indica
tttttttaatattattagaaaattaatatatattatatattataattttttaaaaatatatataattaattgcggattggattggatcagttactttttgaggtcaaacaacatccaatccgcacaagtgcggattttagatttttcaatccaattcaatccgcgcaagtgcggatatctacattttacggattgaattggatcgtgcggattggattggatcagatacttagtgaacacccctactttgttagataaacaaaacttaacaaaaattctatattttaacagtgtaaatatttctaaagaatttttaacaaacaaaaaattcaaaaaatacgtacactttgataacacttataatcagtagacaaaatcaccaaataatttaattcatataattagagctttaaattaataaattttgtgttctaatgaaggtgcttaatactttatgcatgacgtcttataattaattagcggttatttataatttttattaaattaaaataagtataagatttgatattaaattacactaataacaatattacatctcatacgatactagaaaccatgagtatcatcctttaattttttttttttctatattattatggttggtatctaaattagatgagcatgagcatattccaacttgcttcatttaatgtgcttttatatatttgctttgcttatgagtaaagcctcttttttctattgggacaaaaatctatatatcttcatttatggttctcttcttatatacgtattccatccaaattccttccatattttctgatcacaacagaaaagaaaaaaaacgaataatcctatagtaatatatagattctgattctgatgtttagtttttcaaataaaacaataataatataagcattgttattgagtattaatagtatttaacactttttataggttacattctataattagttagcggtaattcttaaaatttattttcttatgagagctaatatttaattatactaatagtagtatgacaccgaaaaagattttaagcacctgtaatattttttagcatttctctaataatatcatgagaattgctaaaagatactattactatttagcaccatccttaatatcatagtgctatataatataattatgtattaggttcgatataaattagaaaaaaataattttaaaaatatatcgttaactataacaataccgagcatatatccaataagaatcctctaagattatagcatatataaccattactacttgttctttagtgttgtcatttgtggtgaggtatagtaaaaggaaaaggtgtttaatattcttacgtaccatagtaatactgacatatgtgtctatttatgatctaatatagatctagcttttgtcacgtatattccaaataaaatatatgccaatttaacttttgcttgtaatataattataatatatatacgt

SEQ ID NO: 249794 - DNA, 534 bp, Cannabis indica
ggataccctgagcatccagaatagtgaccggagaagccagggaacaatcccctctctggtgacctaggcgtccatagaggtaacaaaatttttccaacttttatatttaatttgaacccaaatattctcaccattaaccagtttgataaagcacccacagaacaaaggattgttcacatcaatctcaacttggattctaatccatttgtttcaagaaactagttttgactcacccagttcaataaacacgaccttccccgcttgagcacccaataagttagcattaaccctgaagtaaaagtcatgcggaaaatggtggaaaatggtgtatttggatccaaaaatggattgagttaaaagaaaaatcctttagatcgaacccagaggaccaagaaagcaacactaacatctctcccttaacggaccaaggtccatgattaagcacccattgtttgaaacctttttaaagccaaaactataaatattagaaagtgttcgacaagaaaatggggcatcgactttcacctgagtctt

SEQ ID NO: 249795 - DNA, 545 bp, Cannabis indica
tttattttcttatgttaatttctattgttaatttaattgtggatttgaacatggagattatgaactaatttctcactttaggaatatgacaaatgttagtagattttattccaagggttagtgttaattgctatttcatctttcttcatcgtgcatttttttatatttgtgcttaatacatatttaagattgatcaccttaggcatgatttatgatctcaataagatatctaaaaagtgcgtattgaaaatgctctaattgaataaacttaggttttgctgtaaaatgagtatttatatagcctttgtgacgtttagattattgcttaatgcaaattgtatgttaatctatctcaaaaatgcaatagataacatatagtttaggaccatactgatctgaaaaagagtttttctcaattttataatctatcatcacataaagaaagaggaatagtaattagaattaacaattaggtgatttatacaacaggattcgcatccctaatttctcatccattattaaaaaactttaattgctttattttt

SEQ ID NO: 249796 - DNA, 930 bp, Cannabis indica
ataataaatatttaataaaaaaaagaaatttcccttacaaaaataaaataaaatatgaaattttatataaatagtcacaaaattctctgatgtaaatactagaacttatctattctaatctccattgctgagggtgactacactacatttgatgtgttattattagaccaaactgaccttataaaattaaaactagccatataataactatacaaaaactaaaactatccatgtagcctaacaaaactaaaactagtcatactgatcttataaaatttaaactagccatactggccttacaatactaaaaactagccacattggtcgtacaaaagaaaaatagtcacattagccatacaagaaaactagccacattggccttacaaaataaaaaacaaaccacttacaaaactagacatattaattttgtttaattctctcatttgtttaattttttattaagtgcataaaaattaattgattaattaataaaaaaaatatttagtactttgaatattctataattttctatttttttttatttttactaaaaattaaagataaaaataaacaaaaaatacattaatatatattttttcccgtataactcaactaaaaaacatatcaatcaccatattttttttttatttttctatcaatattaattttaaatatatatatctaactaaaccttcaaatcattataaatatgttaaagtatactaactcagaattatcagttttttattagtcgtttctttctctctcagccactttccttctgagccgaatatggggctttaaaggccaaccattaacaatgaataaaaatcaatgcaataattgagtacattcatctatttgtgtaggttgttttcaaccgacccaaacttttaaaggtattagcatgtaaatcgcggatcattttcc

SEQ ID NO: 249797 - DNA, 978 bp, Cannabis indica
gatccaattaatttcagtcatcctatcgatctaacatccattagatgtcggattggattggttttatctgtattatgtatatatctattagtttaatttgggtctatctaatattttagacttaatattttttggatcagatcggatccattcaacatgttaggtccagtttgtattggattggaaccatccaatctaaaaaaaagagtaaaattttaatgtttatttttttatatatatattttatttataataatataaaatttaattactcatcaaaattaaataaaaatactaattagttcgattggatgttggatgtattcgatttttggatacctcatccaacatccgatccgatccatgttggatatttaaaaataacatccgatctgatccgatcacaattaaatatctaatatttggcggtcggttgttattagattggatcgatttatggacacccctacaattaatgatacccatcacaatactcttaaaagcaatttatcacttaaacctagaatcctaaactattagaccatctctaatacaagatgtaaatattaggttaaatttggcaaaaaaaaatgaacaaactttattataaactttaaatttaacactgcactagacataaaatttagttcactgcttgcacggcgaataccaataccaaaatatttacttcttgttttattttttaatctaaagactcgaagaaaagaaaaaaaacttaagatcacttcatcgaataatgtgattcaactcaaccattagaacattgttattgggcatgtgcttagcgttcttaaaatgtgtcgtcttgcgatttgctagacgtataactccttaaaaagctattataattaaactatatgggacccgatacttttttttttttgaaatgtgggacccgatacttaattagaccaatagcgatattgaaacgtaggaaagtgcttgtttgtcaccact

SEQ ID NO: 249798 - DNA, 697 bp, Cannabis indica
gtttcaagagcatgcccgcacctggtgggatttagtaggtcagtctcaagacctcagtacagatggaggattttgtgaaactagtttaaggtgataagttagtggctgaatatacactagagtttgatcgcttgtataagtttgccaatgatttggtaccaacaaatttcacctgaaaaccgattatattaatgggttggatgccacgatcagtcgggacttgaagattaccactaatcacgacactttgtataagaaagtggtagagagagcactgactgccaaagaggctgaacaacaaattaagaagcatactactaaggatgccggtacgacatcaattccaagtgctggtggtaattttagtaaggggactggtggttgtaattttgattagaagagaaaaactaagacattcagatcatccagaccaaacaagaggttttagggaagtaaaggcagccgtcaaggccgtggtaatccattcaaatcttacccagagtgtccaaaatataagaagaaccatcaaggtgagtgccgaacaaaaacatgcttctagtgtggtatggtgggccactttatcagggactgtcctcatgctaataaagaggaaccgaagaaaagcaacaatcagaatataggatgcttgttcacggtaactcaggctagcgctaatgctagtccatctgttgtgata

SEQ ID NO: 249799 - DNA, 765 bp, Cannabis indica
tttttgattataagtcagttgataaagataaagttctaatggaaaatgatcattcttgtagggtcattagaaccaggaaggtggccatcaaatagtatgatggcaaaattaaggtgttgacgaacgtaaggcacatcccaaaccttagacgaaacctcatatccctgggtgcgcttgaggacgaaggatacggatacaaatccatgcacgtgagcttgaggatcaccaaaggttttctggtagtgatgaaaggtgaaaagatcaatggtttatatgttctccaaggactagaatcagatatgaagttgtggcatcacagacatgggcatatcagtgaacagggcctcaaagaactgcacaaataaggtatcattggaaatttaaattcttttgccttaccattttgtgaagcttgtgttttggggaaacaacgtaagctgaagttcactccggcaaggcacacaactaaaaagatactcgaatatgtgcatgttgatctttggggaccacacaagatgtctactcactctgataagcaatattttctttcaatagttgatgattataatcggtgtgtttggacttacttgttaactccaaaaatgagtgcctagaacagtttagaaattggaaaactcaggtggaaaaccaaactgaccttaaaattaagagccttaggactgataatgggttggagtttgttaactctgaatttgacaagatgtgtcaagaatttggaatcactaggcatgaaaccataatgaa

SEQ ID NO: 249800 - DNA, 1131 bp, Cannabis indica
taaaaatgtattcttttttatttattttgaaataaaactaaatttttttctaaataaagatcaaaaaaatatattttttttgacccattaaattttagagcaaccctgttagtagcaaacatgacacgaaatcacgcaactgatgcaaactactaattttgtatgaggttttaattgaattgcaaattcttttaccataatatttccctaacttttatatactaattaaataaaaattgatttatatgattaatgactatgaaaattattactaattagtacaatttatatatgttgatatatatatatatacctggaaatttcactaagctccttcttatgcaaagattgtagtagattgaagtccaactttgcaaattgtagcaataccttgttatgagaaggttgtttctcatagattgaaatgtaatgcctagcataaagccctcactagggtttttctctaaaggcctatataaggcttaaggatatttcatgtgataatggatgttcttttttgttggccactaacttaagattggtggtagtgaaagcaagagcctcatctagtatattttcttcaacatagctcaagtatgaagcttcatacaagctaagcataccttcaatgtcacttttcaagctttccttaaacttaccactctcatctttgaatttctcaaatatatctgtttcatcgagttaaaattaattaattaattaatcttgtaaaaaaaaaattgtaactaaaaatgtattattattcttatcttagtacatgcaatatgcatagataatattatatatttgaccccactacacaatatagtactttgtccccttaatatgcaatcttattcctaatccagatgtatgttattgaaaattaaatatatagggttaatattattttaaatttattatttttgtaaaagttatagattggactctgtattttttaaaatagtataaaataaactttgaacttaatttttcgttgttttttaatataaccaatctgaaatcaatttctagcacaaatagatgtaaaaaaatgcaactattcttgtcataatacttccaagtcaagttgttattaagttttaatttgacaaaaattaaacttaaagt

SEQ ID NO: 249801 - DNA, 533 bp, Cannabis indica
tttttatcacagttttttttaaaaagcagcttttaacttttccaaaagctataccaaacgggccctaagtagagggcaagtgtatattaggtaatccactcacaaaaatagataaattttaatgaaatataatatgatagtatttttgattaatggattaaaaaaagagaggtaattagactctataacctttttatattgtcctcttttatttttaccctcttttttaaaatctatcatttttacatctttttttaaaaactataccagttttgctcctgttactttaagatactttctatgtgactctcttatgccagaatattttaagtacaatacatattaaaagagaggtatgtttcaattaaataaaaattagagagataaatttaattaattaataaataaataagatatttttcaacttaccaaaaaacaaagatattcttcgcctttcatgagagctatttgagtgagttatacctcagtggcatttttagggaaatttacacagtttactgtgttttcccatt

SEQ ID NO: 249802 - DNA, 595 bp, Cannabis indica
aatttctcaaaattttatagaatatctcaaataactataatttatatgaccatgagaacaaattaaattaaaaaattatttcaatactaaaacggatagatatgtatcggtgcatcttttttaagagggtaaattataaaattttctatttatatttactttttggaaaattctaagcaaccccgcacttttattaccaatgattttttagttaattttttctcaaaattttaagaaattcgaaaagaatttaatacgttaaaaataaagttcaaatagtgtgttccacagataattattttattttatacttaaatagatagtttaaaattattttgtaaattattctgattttcttaaaattttattgaatattttaaataactataacttacatgaatatgaaaaaaagaattggactaaaaaattattctagatgctgaaacaggtagaaaaagcattagtgcatccctgatcactactacaaaattggattttagaggcggtttttaagggctttcagtgtcggtactggggaaattcgctaccgacgctgttctaagtgacgctaaagggttaaaaacaaccgacgcca

SEQ ID NO: 249803 - DNA, 916 bp, Cannabis indica
tttcttatagttttgattaatataactaattgaaaactatttctcacaggttcctattgataagggtgaagaaaatgatttgttgaaatggttagcatatggacctaggaaacaagcaatatcttgcacaggattcatcatcaatggtcaaagattcaatgtagaagatgataaaaagacaacacagaatagtggtgtttctattgatgcaacaaccatgtgtagatccagtgctaaagatcaatcacaagttgcagatgtggtttcctactatggagtcctaaaggagataatcttgttagattatcacacatttcaaattccaatttttagatgtctatgggctaatgttcctaatggtattaggatcgaagatggcctcacattagttaacttagaggaaagtcaatcacaatttgttaaagaccctttcattttagcttcacaagctaaacaagttttctactctagagaacgtgattctagttggcatgtagtaatgatggcacgcccaagaggattttatgaattagaatattatgataggcatgagtatatgcctatcattttagaaaataatattgaaactaggttggatgatgtagttgaagaagaccaatatgtgagagtggattgtgaaggcacattagtttgaataatgttgttgtttttgtctcgtgtgatgtctttgtactgttcttttgggagttttgttatctcagacattttcataatgctattgatgcttatattgatgcctctttttttgtttatacattgtttcttgtgtatttatattattataagatatttttgtttgttttatatttatattgttcgaagcatacttcatatgtaaagtttggagttttgctacaagagaagatgaccatgaagctgaaaaacgtcaagaaga

SEQ ID NO: 249804 - DNA, 705 bp, Cannabis indica
ataattaatgggatttatcttatctatagccagtgacttataatatagatatatatatatgtacaaccaacccaattaaaacaaaatttgatttttcagaccataaattatgagcactttcagtgttaatgtggcccctattgtataccaatctattccatatcccaccaaatggtcataatcataaatatattaattgtcatgcatatagtgttagtgtattacgtcaaaagggtaaaaacgtcattttagtaagagtgtaattattatatgcatcctcctaacactacaccattatccactaaatagtagacagcatcacaaaatgacaaaactacccttcctggatgttcaaagagactgattacacagataatgcattcccctaaataatggagagaacaagtcttccaagtaaatagaacaggggcaattgggtcatttcattaaacttaccagaaaacggcgacactggaggagttgatccagctggcgaaaccggaggcgaaccgctcaggctcgctggtggtcttactatcataatactccgcgtaactctcgtcggctcctccggctgatcctcaccgtatgatcttacgtttccaccgtcagatcctaatcagattaaaaaacaccaattattaatctaacacaataacctcgtacttgaaatatagtttccatttaagttaaaattaaatatgc

SEQ ID NO: 249805 - DNA, 568 bp, Cannabis indica
tttatgtggttgaacaaaggaattggcagtttttgacaaaacaggaaactatcaatgtagtcaaaggaaagttggaaaagaaatctgaaaagtttaagtcttgtgggaaaggaaaaatgcatttaatgcattgaaaagctccagcaaaaaggatctttgggggataataatcatcagagacattaatatcacaattaatgctctgaacagaggaatgatgaaagagggaaagaggaacccatacccgattgccaccacaccatcgtggaaggtggaccagaaacccaacgtgggtgccagacggaggtagagaaacatgcctcttgagagttctagaattcgccattcaatccctttggaaaggaagaatatatatggatggatataatatgtatatattattacatataaaatataaaaataaatataattagacaatggcacaataataaagaattttaataaaataatacatttgatttgttcaaaaaattaaaagaataatacattttatactaaactttaaaattaaattaaaaattacacatacataaaaatttgatataat

SEQ ID NO: 249806 - DNA, 743 bp, Cannabis indica
cactccacagtcacataaaacaaaaatagatcataatatgaaagtcaaaaactcacctagttaaaattctaacctaggaaaaccagttagtaaagcaaaatcagttttttagaataatcaaaaagaaaaaattgaaacttaaaactacaataattaaaaaataataaaaaaatcaattataaaaactagttacttaaaaaaaatattataaaaatcaataaaataataagacaataccacaaattattttaataaatctatataaaattaaatcatagaaacttattatattaaattaccaattaaaaaatcatataattttttttttaataataagacataacagataaaaacttgtttcgtacctaaaaacaaaataatactaaagaaatttaaaataaaaaaaaaacaataacatcataatatggagcagtccctattaaagaaaccctcaaaaatctgtagaaacttgtttcaaacatgtgaactctgtgaaacaaacttgttggaactcatacaaattataacaatcttttaaaattaattgaaaatcagttacataaaaataaattaaaaaaattagttacattaaacagctaattaaaaatttaaaataaaaaaattagtttcataaaataaacaaattaagaacataatcaattacttgaaacaatataaagcttttttttcataaagtttcaaaattttacataaagaaaccaatgacaaaaattaaccaaata

SEQ ID NO: 249807 - DNA, 580 bp, Cannabis indica
cctcattggtaaactcatttacttaactattacacgacttgatatttcttttgtcgtaaataaactaagtcaatttttattcaatccgagagttacccacctcactgttgctcatagaatattacaatatcttacgggcacctctggccaagggctatttttttactcagcatcttcaactaacttatttgcttatgttgaaactgatatgtcaaatatagactttcatctcaatattttttagatgttgattgggcttcatgtagtgacactagaaggtccgtttctagctactgtgtctttcttggtagatacttaatctcttgaaaatccaaaaagcagtccatcgtatctcgttcatccgctgaagtagaatatcgggctatggccaaggccacttgtgagattacctagctgttagcattccttcaagactttggcatccatcacaaagattccaccatcttttattgcgacaatacagccgccatccacatttttaaaaactttgtattccacgaacgaccaagtacattgagattgactatcatgtcgtttgagagaagatccaagaaggcac

SEQ ID NO: 249808 - DNA, 566 bp, Cannabis indica
tgttctgacactggaagtaaaaggcgcggaactttggaagactgcaaaaaaaacaccagaaaaaatagttttcagatctatatatcacaaaaaattaaaaattaaaatattaaaaaattaaaagaaaaattaaaatattactggggccattgggccgtatattgggccctatcgagcccagtatcgggcctaaaaaattaaaaaaacaaagacccatcgaacccatatatcgctccttatcgaacccaatatcgggtctaaaaattaaaaaaacaaaggaccatcggacccatatatcgggccctattgtgcctaatatcgggcctaaaaattaacaaaaaacaaaagaccatcggacccatatatcgggccctatcgagccccatatctgaccaaaaaaattaacagataatgggggcatcgggccctatcaagccctatatcgaaccaaaaaaattaacacataatgggggcatcaagcccatatatcgggccctatcgagccccatatcagacttaaaaagttgacatataatagggccatcgtgttggatatattttaccag

SEQ ID NO: 249809 - DNA, 603 bp, Cannabis indica
cgaatcacgtaaaatccttcgtctcacttgcttaatattttaaaaaaattctgaagttttaatttaattagttttcaaaaattttagtaaacattactcttttgtctttcttactttttctttaccaagttattttacaaaatactttaccatcaaattttaataatattttagaaatacaaataaagtaagaatatttttgacaatataattctaaatacaatattcatcataaaataaaccagacatgataatagtattctaatactattaccattacattctattattacaattacattttgttaaactatttggtaaactaaacaccatttggtaaactcattggagatgcaaatgcaaaatatagttcactttgttaaaagtctacttcaacggtgttgctaaattatgatgcaaaaatctcacataattaaaagtgattcacatttcatcacaatatggcatgatgtaaaatttgcatcacaataaatactatgcttttataattaccattatgcaattttttatatgttattataaattttagttaactactcattttgcattgaatgatttacattatatttttcatttttatta

SEQ ID NO: 249810 - DNA, 897 bp, Cannabis indica
gaaattctacatagaaactcctattgcaactagcgttgcaacctaaattgcaacaaaaaatcgtacaaaaacctctattgcaagagaataatgaagaagggactgagcattggataaaacccaaagtaaatcacatcaaaataaatgttgatgcatctctttttcatcaaaaaggttcctatggctatgcgttggttgcaagagatagctcagcaaaactcattgaagctaaaacatgttttcaagattattacactgctgaggttgtggaggcattggagatcaaagaggcacttagctggataaagagagagaattggactaatgtgcaaatcgaaaatgatagcttgctctcggttcaggccattcgaattaaccaatttttttcctctaattttggtttacttattcaggatcgccaactttaattatcttctttacaatctgtgactttatgttttgttagacgatcagcaaatcgtgtcgttcatgctattgctaggcactcacgatttctttctggttgtagcatttttgagcataatgcttgagctgatttaaaagcccttttgtactcagaatgctaatatttcaataaagttgagatttcatcaaaaaaaaagataattcccctaaaatatatacacttgatatgaatatatcaataaaacactaatatctagtaatacaataataattattatttaagacttttttatacgtaagactaacaatagtactatagactcactaatcactagctctatataagtgcactgttaatgttactttgaagtagctaaatttcaaaaattaaaaaaaaagagagagagagtatcaaatagttatacaagaactcctttattttacatttttcttagggtaaattgcggcata

SEQ ID NO: 249811 - DNA, 741 bp, Cannabis indica
gcacactcctagtactttcaccaaccagcttcagacatctttcaatgagatttatagtcttaaagagttggttctctcaagcagaagctgacattcaaatgattttaactaccaaagtactccttgttattaagaaccgcgattgtcaaaatgaagcgttatatcttcaagcgaagaagcgatgaggtttacattatcaacctcggagagatagaggtaaaagctccaactcgctatcaaggtcattggaactgagttcttatcgagacatcccagaacattatgatttataatgtgtttaatatacgtttactttgacccagtaaaagcggactaatcgcagtgtgatattcaaatactaaccacattgatattacgtgatatgtaattaaaccccacgatttcaggggataattgttttaaagattacagtcaactctctcattaactgcctgacaatctaattataaatagaggtaagttagattgaaaagggacgaaaaattcataagagaaatggccctagaaaaatatcaaaaatctaataagattgactcgtggactgtgcagaattttaactgtaaaactacgtaaaaaaactttcatgttcattctactctttgtatttctttactattttcattattctgtggatgtttattactgtttaggctcaattttggttaacaaaaatctgtgttaacagtttggtgctttcattgagagccttcgtgtaaaagc

SEQ ID NO: 249812 - DNA, 640 bp, Cannabis indica
agggcataaaacccaacacgccacctattgatagtagttcagaagaggtaataattataataataatattgaatttaaaatgaaaaattataaatataatcaatttacccattttatttgtttcttgtttgatttagaaatgcaaaaatttctgtcttcaatgcatgtttagttggagccaagtggaatcactgaaagttgctatggggttcgttgtgatggagaatttttttaacaaaggcaagttctcggtccacaataatgagtacctgcagagcaaatattgtcaggtattcatcgaacaagcttgtgtagaaaatgctcttcttccatgtcccatcaatcatgaaggatacacaactgtaggtgaagcgatacgcttttgtgtagtatggccagaggactatctttggcatgaaaaatgggacttgtatatttatataagtttatttaacttattttttattgattagtgaaaattctaacttttaaatgttttttgatatatgtaataacctaaaaaataacttagggaggcaaaagagacaaaatgtgaaagatttactcggtccacggatacagtctctataacattgagaggccgaagaaacgacctggtggtgatcgttacatttcccct

SEQ ID NO: 249813 - DNA, 959 bp, Cannabis indica
gttcaagactcaaacttatccttccatacttagtagctcagaattaaggagaatttattaaaggcaggtttattgcccacaatattctgatttgctaggatcttattcaacattatgggaggaaatcaataaaagtaaggtgcataatcaagctggatttgcaaaaaacttatgacacaattaagtgtgattttctagaagaaatgatgagggcctttaaattttctaacaagtttgtactgttggttatgaactgagttaggaaacctagattctcactaatgtttaatcgttctttgcatggttatttcaaagaaaaaacaaggctctaataagaggatcctatgtccccacttctttttattctgggaatggaattgtcatggtgatttcaaaagtgtctattatctactacaaggcttgaagctcttttcatgtacatctggtttgtaacctaattcatcaaaatcagctatttattgttgtggaatgcaagctagtaaagtgcagctcattgttgatacttcggggtttagcaagaaaaagatgtcgttcagatatcttagcattcctatatgttcaaaaagaatctcaagcaaggaatgtaaagtactagctgagaaaatgacagcccgaatcaaagcatggagcactcaaaatttatcttttgcaggtagagttgtactcatcaattctgtgttgttatcctttcaatcttattggagtcagattatgatcttgctaaagaaagtactcaatgaaatagaagctatctgtcctgcctatctttggaaaggccaacatttgtttttagcttctggtcccattgcttgggataatgtatgcaagtctaaagcggatggagaagctggctttaaaaggaatgatgaatggaatattgcagccttatttaagtattttgggcagttgcaaattaacatggaagagaacttatgggt

SEQ ID NO: 249814 - DNA, 526 bp, Cannabis indica
gagagtaggcttttaccatcatcaaggggtcggacctctataattctgatattttttctattttatattatttatacttgttatttcaattattcttcattcgctttattttgagtcactgtcgttggctaaaagcgaggtcaacaattttatatatataattttaaaaaataaaaaaattaaagagaaaagagaagatatgtttaattattttataaatagaattgataattaaaaaaacgagagaactaaggagaaaagagaaaaatagttttaaaataattttaaagtgtcatgtcaccatctaaatccttacctttataaatatatataaatatagactaggtaatgaaggtgctctttgtgcgactaattaatttttttagtattataattagaagatattttttttttcataataattacttaaaaaataattctaatatataataataaaattatattatctaatttcttattattaattattattatttggagttatttattacaaagtttaaaattt

SEQ ID NO: 249815 - DNA, 567 bp, Cannabis indica
atataaagaatgatgtaaataaacttttggatgactggagagatacaaacaagcaactttgagattagaaaatatgctgaagagcaagagagaagagattcaaaggagtcatcatcaactatcatcattagagtcatttttttcttatacatttttattaatttgtttagttatttaattatgaacatgattattatggtaatcatatttctatataactaaactaaacattcttgctagagtgttgatggaactgttttagattataattaattaaagtttttagattaatcccataattgttcttgctactttgttaatataattttgtgttaattattattttggtaatgtttgattaccattaattaatatagagattttagattttacacttgagagaggtaatctaaaatcagacttagaattgcatgacatagaaaaaaatgtgagattgagagagtctactaattctatgagtttcatttaaagagaattatatatattgctttattatcgcttaattgtattacattgaatagagatatcttgtagttaattaaaatt

SEQ ID NO: 249816 - DNA, 1300 bp, Cannabis indica
aaaattaagcggtctttacatgtccattattcgatacaagcaatcttgattcagatcgctcatgtagtatgacatgacaccaacaaatagttaagtgtctttatcaaacattttgtttactataaagacctaattcatatcacaatgatgataattagtagatcagtatgaatcctaagtaatcatgaactcttgttcatgttattagttttttttattcactcgttaaagtttctcataggaagatgattcttacaacttttattttaggaagttaataatgtagatgactgtgaatttaatttacaattatggaatcttgtctttcttgggagaataccaagcgaaaggcctgaaaatggctaaatatttagggaaagtttggaagaacttgaaaaaatttgattattttataattgaacaaattccaagagagtaaaactctaatgcagatacacctagcatctcaatttgatttgataaattgaattttttcaagtaattataaagttttatttcctttaaaattacttggaagcatatatgtgtataataactagattctactttgaaatatatattgtattgccaaaaacctaaaaattaatttttttgtcataaagaaaggataattgattaaaattgtcttttggacagtataaagtcaggaattaaaaaactttttttttttaaagaaaaaattaaattagcaattgcaagtgagactctttctcataaagcgataaaaagctatatgttatttgaatatataacggttcgcatagttatagtatgtattgtaaacgagatacaaatgtatcttaaaaaataatacaaaaactaaaatataaatagaagattaactattcatataagcaatcaacaaatatttaaagtagttcttaaaagaattattcaaaatatttgaagtttgcttcaaatatggcagacaataaactgcttgcaaataacttaagcagattgtaaactgcttgtgaaagacgcagtagattatcaactactcatataagaagaatggtgaaatgggtttgccagtttcaattttatacccaattactgatcaccgtttgatcaaaagaaaactaatctaacgggtgggaaaatcgtaaaatgggaacagtcagagcattaaatgttcaatgatgtgcctcgaaattctgaaccgccaaaactcaaagcatgaaatttttcaaaaagatttaatacaattatacccctatgatcatttaaaaaggtctttttaattaaaaagtactttttaggaggcaattattttacc

SEQ ID NO: 249817 - DNA, 733 bp, Cannabis indica
atgaagatgctcatccaataattgcgaaacatgaacaacatagaatgaatcaattgaattctcctcgcataagacatacaaacgatatgtaatgcagaataaactgtaaacatatcaaaactgtatatgcaacgaaataatccagccattgatgtttgagcttcgatccctgcaatagctttggtatgggaattcggacttcctcgctctctcaactctctttagatagaattttgttgttttgaacagaatgagtgaagagctcgaggaccaagaccttatatttataggtgagatactccattagtttctgcgctacattaattgttagaatattttgacaattaattaaggaaataaaatcgaataatgaatattgaaatttgataatatatagaatattacgcaattaatattgtccagatttaataaatataaatattcatttatctcaatattaattcctttattttattccataaataaaactattttaatattctctcacttggttagtatttagactaaaacattaaaacccagtgttcctcattatataataaacacatgaatcatagcgatatgtcctcattataagtcaagtattatcttcaatatattacaaattatttactatagaataatttactttatgtggcaatgtacataagcaaataaaccctaaaccttatgtttatttaggtcctctaaattttctcaaatgtaaaattaa

SEQ ID NO: 249818 - DNA, 1271 bp, Cannabis indica
ttaagcaaacttcaagtgttatggtgaataagagttaggctgaacaagattatgataatgacaatagcttactcgagttttgaacctatcagggaactcaatctctctcccctttagacagtgactacaaagaggttccacttgaatgccctgtttggataaagcatactttgttggatgccatgagtgaataattttccaaacaaaatgctttatctttgacagaattttccaccaccattacaagttccaccaagctttagctttggaagagttagattggagtgatttctcttgcattgctatagccgttttgtatttgctctgcaccgaatactcaccatttttgcaaaagtgccacataattttatccttgataccacaccacttggcatggtcaaaataaggtcagcatcctcactattaaacaaagctctaataaagtcagtgtcccacgaaccattagctagtctcaagtcaacaatatgcatctgttctggcagaaatagcttatcatagaccttaaaggtgtgtggtctcggtagccacagatcctctagaaccctcaccatattctcatcccccactctctatagcccttcatgataatttctttaccccatatcaaactatgccaaaagaaggatgcaagagccccacttattgctgccaaaacatctttgttcagtaaataacacgcgttcaaaactctattacataaagagttagggaatcgaatgcacctccatatttcattagccaatagtgcttggttaaacaatctcaattccctaaaccctcattcatcctttctccttgggtttacacaaatatgtccatttacaccaatgaatttgcttgttatgttctgaagagcccaaccaaaatcttgtagccatacggtgcaggatattgatagtgcttgtagtaactttgaagtagctcatagtataagtaggcattacttgaaaaattgctttgatgacaacatctttcctcgccactaagatcatatacattttccatcctttcacctttttccatactctatttataattgactcaaataactctttcttgcttctcccaataaaagaaggcaacctcaagtacttcccgtagttatcctcaaccttaacttccataagagtagcaagtctctctcgatccctttcatcaaaagaagctccaaagcacatttttcgatttatggaagtttactatttgaccaaaagcaatagaatacatgtctaacaattctttgaaacacc

SEQ ID NO: 249819 - DNA, 615 bp, Cannabis indica
aagtaattttttagtttcttttagtttaactaaaaagcaaaatcaaaatttaaatttaaacaaaataaaatatatcaactaattttattggttattaaaaatatattttattatttaatatttaaaagttactaaattgtatgctacataaatttatattataaaacaatattgatcaatttcttattatattctttaagtcacaacattaataattatttgtgttaaaaaattacactattacgatctactcttaaaaattaaagatatatattttttccgactagtattaaataggtaacattttagttactaaattgtattctcacaaatttcttttgtagaacgttttcgattgtttttaaaaataacttacaagaaaagaactataaattttttaccgaataaaattttcagaattaaaagtaaccttatagtttcttaataaaaaaaagtaataagtaataacttaaataaaattcaaaattaatgtgtcaactgattaatattattaaaaattgtttgtaatttttttataaaagttattatatagtatatattctatataaacttattttgaaaagaaagttatacttattttgctaatataagcta

SEQ ID NO: 249820 - DNA, 654 bp, Cannabis indica
gatgttaatgaaacatacatggtagtaaatctagatcctggtaaaatatatttccaacacaaatttactgttctacccttcaatgcattttatccttaagagacttagctacctataaatgatatttcactaaactaatataattccttaaatgaggcctcaatcatttgtttctattaagccaagctcgaaggaaatcatcatttcacttctaaatacgcatagaagctatagattccatatcaatgattagcgtacccactcaattgcactattatattcccaagatgtaagtattctgtcgatcgagcattaacaaaaaactctaagaacatagacaatacatttaagtagaaccaaaccatattaagattaagatctattgacctaagattaacaaactgatattgaatatgatagatataactgtaagtttatgatatcttatccaagttcaatatcggtccagtctgatgtatactccatacattcgatcctagcatacttttctaatgccctggaaagacataacacttatcgaaggtgtaagtaacctctatcatttattatcatgtcagtctaaatctagtgtactgacaaatcatgagacttaaactttgaaacatataatcatgattatattctattgtgttg

SEQ ID NO: 249821 - DNA, 1668 bp, Cannabis indica
attttaaaattaaaaaatgaaaagtggggtcttagtattgtagatactcttaaggcaattctaatggtaaaacttaaatttagtattaaattaatattaaaataatactatttcagcactatttttgttttaattccaatcacattattaaaaaatatattctttattattttattaatataatgacttccataaaaataagttagcttttattgctcggttagaacatatatagcatgttaatgtttgattggagatgaccttagtataaaattttagcatatatttcattacattggattcatatatcattaatcttaaaagcatttttaattttcatatgttataattggttagcgatttttaaatatttcacttgttatggtacttcattattattaaattttgttaattaattaataaattattttttttaacgttgcacgtgtaggaattgatgacgtgtacgatccgatgaaaacccaaaaaacaacaaagaaaaaagcaaagagagaagcctacgccacagtcctccactcctcagaatcctacgtctgcggcgccataacactcgcccaaagcctacgcgcgagtggcaccacgcgcgacctactcatcctcatcgacaactcaatctcccaacccaaacgcgccgcactcgctagatctggttggaagattcgaaccataacccgcatccgaaacccgagagccgaaaacggatcctacaatgaatacaactacagcaagttccgtctatggcagctcaccgattacgataagctcatcttcatcgacgccgacataatcgtacttcgaaacctcgatgtactcttccaattccctcaaatgaccgccgtcggaaacgatttctctctcttcaactcagggataatggttctagaaccttcgaactgcacattccaggtcttcatggaaagtcgaaacgacatcgtttcctacaacggaggagatcaagggtttctgaacgagttattcgtatggtggcatcgattgcctagacgagtcaatttcttgaagaatttttggtcaaattcttcagagaacgagatcagtttcaagaacgagttgtttaaagcagatccgcctaaggtttatgcaatccattacttagggtggaaaccgtggctttgttatagggattatgattgtaattgggacgtggaagagagctttgtttacgcaagcgatgtagcacatcagagatggtggaaggttcatgacgccatggatgagaagttgcagaggttttgtaggttgacgaagaggaggagaacagagttggagtgggagagaagagttgcgaggaagaaaggattggttaatgggcattggaggatcaatattacagatccaagaaggtctcatttggttctctagactacttctttttcttcttttcttgatttttaatgttttggttataatatgaaaattcatttttggataatttatgtgtgaatagaaaaaatgaaactgaatttataaaattcgaggtataataataagtcatagcttcatcaaggtttttttagtattgggtattgtttagtagttatgctctttttttttcttactaaactatacaataaaaatgtgagtaatgattatgacacacttaagtctatgtatgccatgcaaaccacc

SEQ ID NO: 249822 - DNA, 708 bp, Cannabis indica
ttacaatagagttgtaatatcttgattttcttccattgtaataaaatctctaacaatccgaccccaatataggtatatataatttcttttttattcttaatagtatatatgattgataatcaaaattattttgattatcatccataatcaaaattatatatcatatgcttaaactatgaagatctaatgacgatagttaactgatgatcattgtggattacatgtgtaaagatattttcttctcgattctttatttcatctttgtttactttttaatttgttgagaggcttgaaagtatgagactatgaatgatcctatacttgggttatgatttttttgttttttttttcaaactttgtgacatatttagtttttattttctattatgttatgcttttttttaggtaggtttaccttttatcttctatgaattatgaatgcataataaatatttgtgagaatattggtttaatttattttttcaatttattttaatttttttttttctattttaccttaatggatacccaatgggttccccataaccgatgggtattcttctaccccgaattcgttggttattagacggggatggggcggggatggggggtataaagtaggtagcggggagtgggggcggggtagttgcgttcccgtacacttaaccgcccaatttccatctctagttatattaagtgtagctatat

SEQ ID NO: 249823 - DNA, 717 bp, Cannabis indica
ttattattacataataaaaaaaaaaaaaaaaaaaaaacagaaggtcgtctattgaacagtaatcgcacgcttatatcccagaacaaaaattataataatcagtacagtagaaatttattagaataacatgtgtgtcaatgccaataatgatcatcacatctatatttatatgtatataattctcacaaatatccatgcactgcaatacatttcaaatcaatcaaaaagattcatttcatactttatattatgttaggataagattaattttaatatgtttttgttttttaattcaggcataagagtcttactatatacaactctttttctttttctttttatataatgtacactgaatagttaatttatgaccattactattatatataatgtttaactaaaaatattttcatggaaattttttcatatagatctaattactgtgattcatgatctggatctatctggtcttcgatggttgatatataaactttttcaaaaaattattaagaaataagattaaattagggaatatatagatatgaatatatgcacaaaaactcacacactaactcctagatagagaaccactctagcctcaaaagtgacgatagaagggtgtgtgttggaggtagttcgagtccaaattatgtataattgtaatatataaacgcttaaatataaaaaaaaaaaaaaaaaaaaaaaaaaaaaaactaa

SEQ ID NO: 249824 - DNA, 2650 bp, Cannabis indica
tactcctttagggatactggattctttactttttggcaactacttttgtgtcagtcaggaagtaacactagtagttaataaatgttggaacaatgccaaaaatatatagaacattccttagaccgaataagtatctttcctgcaactttaacattcagtctaaatattatagtaaatttgatagcataatagctctcttgaaagattcaaattccttccccctaataatgattttgatccactatttatagggaaaattacataaaaatatattacatttaattaaaaaataaataattaaagttgattacgtcaatcccttgaattcctctgaattccttgattctcgcaattacaccattgtagccaagctgatttatctattcatgggggattcagttgaagagatgaatctagacatttcctcttgcaaggttcactagtcggatatacctcctacttaattatactttagttgctcggcaaggggtatggcatgctccgtccaacacacgcatgatattggacagatttattctgtgcattccttacttaatacctcatgagtagagcatttgagcaacacatatcttcttaacaccctttatcctctccatgtctcacattatttcatgccacatcaccagggaaatttttgagataacatttagtaatgaaaaatcaatattggcaagtaaaatatcatccacataaagaataagaaaaacataatgacttcaaacttgttctttataaaaccaaacgttatcacaaccttatcaaacttcaagtaccattagcaagatgtctgtttgagactataaatggattgtttcaatttgcacaccaaattgtcattttatttttcttgaaaccttcaagttgagacatatagacttgctctctcaattctccatttaaaaatgtagttttgacgtccatttgatgcagctctaaatcaaaatatgaagctaaagtcataataatgctgaatgaatctttagtggaaacaagcaagaaagtatcattgtaattaataccttctctttgagtaaaaccttttttaccactaaacgtgtcttatacctttcaatttgtcccttattatcctttttggtttttaacatctacttacaacctgttggtttaaaatcatcaggtaatagatctagctcccgtacatcatttttcttcattgactcaatctcatcattcataacttctattcattttgaagattgtggactattaactgcttcactataaatgacaggatccacaaaatgaccattatcatattctcttttttcaaggtaaacaaaatcatcaacataccttgttaacttcttgtctttgagatcttcttagaggaggcacttcaagaatagattttatttgttaatcattattttgaatgaaatcttccacaactggaatttttccaataacatgaccctcatcaacaacaagacctttttcaataataggcccccattaataataggtctttcatcaataataggaccctgtaatctttgatatcaagagaaatatgttcattagcaatggagacattatctctagagtaggaataagattgttattattatcatttgttgaaaagagaataggaataaaatttctcttagatgactctcctgtttcaagagatgttgaacgaatattttcagcaacattaaattcaaaaaagtcatagccctttgagtgcgagtaagacagtaaaagtgatagccctttgagtgcattggataactaatgaagccacctgacaaatcattgttataaatactgatgttccacatttttgatccatgaaaggcatgtgttccaatgcattagaggaaagtaaactagttggtagagagtggacgaatggaagatcgtttcttgtcaaggatctttagacaccatctatctccactttaggtatgatattgtcagttttgggcataagccctcacagttttgttcctgggagccttcctcatactaataaaggcaatgtccatccttatatacccatgatccttcccattctagccaatgtgggacttttattgcacacccaataattctcccctcaaataaaggaccaccttgtctcccctcaaacaaccttccatcttgcaccgccgctatcaccaaatggaacacgctgcctaaccttcattgtcaagaagactttcaacataaggcaccaaacaagatctccatcttatactgctgtaatcaccaacaagacacgccacctgacttatcaattaaactttcaatacaaggcaccatacagatcttgaatcgcaaggttacacagaggctcatcaccttaagaggattcaaaggattcattcacatggctaatattggaatctggctctaatacaacttgttaaggattttcgaaaaccatccatctccactccaagtatgatattttctgctttgggcctaatgttggaagttattttatcaggatctagatttattaacatgtatgtttgattattatctataatctagcaccctaaatatgaattgtcaaatacaatgaaataaacacatatacagtttagaaaaccttacattgatggcacagaataataataactcattccatttagatctctag

SEQ ID NO: 249825 - DNA, 634 bp, Cannabis indica
aaaaaaaataaaaaaataccgcctggcagtaattttgtaaaaaaatggcaaaattagtataccatgtaaatctcccttttattatcccagcatctacgtagtttatagacaaaattacactctataccctttttatatagtattcttctattttaaatctcttttttaaagtttatcttttttacctctttttttaaatattggaccaattttgcttttgtcacttcaagatactctccatgcgactctcttatgtcagggtattttagatacaatacatataaaaagaggtatatttcaattaaatataaaattagagacaaatttgattaattgattaataaaagtgatatttttcaacttatcgctagtttataccctgcaaatgaaattacaaaagtcataatagcctgcccatttggttcccattccttatatcatttttagtttgggcctttcataggctggccttttgtattgctagagcccgatttagattggtcttggtcattctttatagagctagagctcgagttaacttttttttatgacataaaaataaggggtttttcataaatattaaaaaaataataaagtttatatttatatggtagaaatgaataatgtaaaaaaa

SEQ ID NO: 249826 - DNA, 618 bp, Cannabis indica
agatcaccagcaaatttggacagacgatcaaattctagagtggattcgaccacaaacatttttctttgagtcaattttacaaagtcctccatatgagacgttctcacggcgatgttataaaatttttccttaaacagactctagaactcttcccaagtcatcacactaacatctcgagtctgcccccactatatcccaccaagcacgggcatgatcttataacataaaggtagcacagtttactctttcagttcccatcacccccatgttatcaaggatgcgggtggttgtactcatccactgctcaggtttgattatatcagtgcctcctagaaaagttggaggttgcagcttcacgaactgctcaaacactgaatgtctgtgtggaaacataaacccctagttacccacagttggcacaggagctggtggtaacacttgctctacatgggcagacggtgcccattgccttaaccgatgcaattgttcctcttgatgaagtattatacctcgcatttcctgaaacatctactgccagtcagcaggcggattagtattgccaaccctcgcattatcccgcgaattctacggaggtgcaggcaatgccagtggattggt

SEQ ID NO: 249827 - DNA, 1440 bp, Cannabis indica
taaccctaaatctaatccaaaatgcacatatcagaccctaaatctatcaataaacatcattttaaccctaaatcaataagaaaacattcaaaattaccatagggaggaaatcttaccttggccgacatttgtgagtcaagttttgtggtcgtctttatggtgggttgagtgggtggagtgggtggtgggccgattaggtcttcgtccttagttggtttgatcgagtggtgatggtgggttcagtctttacgtggtggtagtgggtccgagagagttcgagagaaagagagaaaagggcaaagagagagagagtcagtttttggaatgagaggagtgaaatgaaattttagtaaaagttaacctgtttcacaaatattggatagctttgaatagtggaccaattttaatccaataaatgcataaatattcaaatttccctatctattttcattatatagagaaattataataaattatttttataagaaaatatatattagtagacataaatagtcagatgtatatgtgtgtgtttttatacatgttcaatttgttattttaaattttattttcaatatcgtaaattatgccaaaattttaaaattaattaaatatttcttatgactgaaaatatggataaatttttaatggatattacaatgaatgtccatatagttacttctgaaattgatattttttttaacaagtttttcgacaactaattataataacatattaagctaatgaaaatacgattaagaagaaaatgagacataatttttacgtagttagagcgttaacgagtcttagtccataaagtagtgttataagaacttggctatggacattttacagctctttaatgtactttctggttgtgaaccaaaagattctgagccctttgcatgaaggcataatgacatatctataggcacgtctgcttaatgggtcgatggattcagaccccatgagggttttgtacaataaagctcactaatagggtaaattatattatttattattataatttgaataattgggtcaagtgggtaaggcccaattccaagttccagtctgtcatacgatatagtactgttgacaatgacaggttgaggcgcaagctatcgttttgaaaaaggaacgttagagtagtgggtgatcctaaaaaaatgattatatttttgtcatgtccttttcatagatctgagtggatacccttcaacttcttctcttggataacccttaagggtatgcactcccaatattccttctattcttaggttttaatcatagttgaattttttttggggaactcagaggatttgatttatatccggacatgtcgtttggatctgtgcccatttcaagagatgggccagtacacatatttacctactagttgatggccggttgatgggcccggtaccttagtgggcctcc

SEQ ID NO: 249828 - DNA, 511 bp, Cannabis indica
tctttgactgattttattcgtccaaccaaagtccattgtgtgttctttcttattattagtttgtcacaccacataatatatatatatatatatatatatatagaaaaaatttgtatatatataattttctttttcttttccttctgaattaattttcttacaatttgccctccaaattttaactttctattcctccgacataagattgccaccaattatagcgaggcctttaaaaatcattttttgcttagcacatgtaaaaatcttttgcgtaattagcttgttgatgatacatctagctagaaccaaatgatagtataatatacgtacgtagtggattattattattgttgatgatgcttatagtaacttagctaaataactccccatgcataatagtaataacaaaccctaaacactaatgaaacaataagagaactgtcaattatatgacaagaaattcaagatcgtagtaggagtataacaaaaaatggtgttgagggtgtggtag

SEQ ID NO: 249829 - DNA, 486 bp, Cannabis indica
acacaatcatataaaaaaaataattataattaataataaaattggaatttttactattattttaattgattataatttataaaaaatatttaatattattattaaattatcaaattttttaaagtgtcgtatatttgattattttttaaattataattagtttatttgtgtttatatgttgtatttttagatttatcgtgtcatacttacacatatattttgcatattaattatgtcgtgccattttgtaatattatgtcttatcatactcaaactcatatttttgtatcaggtcgtgctcatgtctcgtgtttgatcatgtggtcaaaaagtccggcccatatttataattatatagtctcatactaacaaagaattaagagcattaaaagtgatattttcaaatcaatattttaataaaataacaataaaaataaaattcttcacccaattttttttttaatacaacttttaccgtttacattt

SEQ ID NO: 249830 - DNA, 593 bp, Cannabis indica
aggtgaagaaattaagaactgataataatttggaggtctacgcaaataaacttaaacaattctataagaaaactggtattgggagacacttgtgctcccaacaatctacaacaaaatggcattgctgaaaagatgtaaaagaaaacacttgagagacttagatgtatgttgatctactttggacttcctaaatctttttgggaaaagctattatgacagcgtgctattttattaaccaatgtccatcatttgcaatttaattcatgactccaatagaagacagaacttgtaagcctgccaagtatgaacatctcaaaatctttggatgcatagcttatactcacattagacaagataagcttgagcgaagggcaaaaaagtgcatcttcattggctatctagagggtgtaaagggttacaaaatatggagtgtaaaacctggtaaccatcgaaaattcttcatcaacaaagatgtcaagttaatttgataaagaaagtattagaatttatgccctaaaagtaagtaattaatggataatatattatagaatatatgaaatacaattataaaataaatgaatacattaattata

SEQ ID NO: 249831 - DNA, 633 bp, Cannabis indica
ttttgttctgagggaacgttattgtcgttttttatttatattgtcgttcttcttgtaggatgttgtcatttattatcgtttttaattatttgtgtcgtttttcctgatggaattttattgtcgtttttctctagtgtcacgccttctttattttaaactcacttaaaaaaaaaaaatctgttattctttttttctttacatttttactcaaaaattatgtatttttttcattcagaatttttggttattgttgtttttctcattaatttgtataataagtcatattaattaatcattatcattaatttttggttacgtgtgtaggccctagtttattatcttatttttatttatttatttattttgactattttagagagaaatgagagaagaattctttttatggaaatgggccaagttttggaggaaccccatcaaaattaatgggccaattgttgggctccagtggtccaccctattgttgtcttgttaaactatggtcgtttctttaattattgtcgttttcacgtcggatgacgtcatttattgtcgttttacgttttattgatgtcgttttagtgaatcgtgtcgtttggttctcgttttcataactattgtcgtttttcagatatg

SEQ ID NO: 249832 - DNA, 576 bp, Cannabis indica
gttcattctcccgatgagctcccacagcccgccaagcactagatttcctcttcttctcattcacaggttggggaataaaatcctttgggtagagctcgtaatccacaaagttctcctcctagatcaacaaagtgatattctgggtagcacccggcagctgagcgattctttgagctctatccctgagagcaagtgtgaagggtgaacggtgatatatagggatctgctggaaccgagtgtaggtggtgcccgtgccatccaccatgtaatactcgtcaacaaacttcccaattttacgaacggccttgtccccggtgcccgtcaaccacttgaagtctggctaagaaaaatagaagtaccctaacttgccttgcttgggagtagacttgaagtcaaaaaaccagctaacctcatgaggagaaggcataccccactttcgggtggcgtagagaacgaatagggcagatagatacttgatgcccttgggagtgaattgggtcgaacagagacagaagaagtctgccaccttcctaaagtactggtgcaatagcaacagtgccccttgtttggaatgag

SEQ ID NO: 249833 - DNA, 621 bp, Cannabis indica
atggctgcgcacaaggagttaccaggcctatgaatgaacagatcgaggaaagaaattctttgtaagagaattactcccggaagaatattcttttacagcaaatcccctacagcaagcttgtttggaccgaactgaaaggtctgcaccatgttacacgataacagtaaaggtgcatacaagtctgccgagtacaagaacttgaagtcaaaacttctacccaaacactaaaatagggatcatcgtgcaggaacccataaaagcgctagtacccacgaccttcttggcatggtctcctatttttcttcaacggtggcttctacttttctaagttgtgcacggatagccactacgtgatttcaaaagcagacactagggtgtaagcttttgttacacgttaggccaaccgtgtctagactacttgctcacatgattaaattcttaaagtcactctttcagttccacatgaatactatagacaccaccccaacgaagaacccaggcaaagtctgtgaaacttactgaatagcaagtgaccaagacatttgcctgtatggtcggttgaggggaaacctgttgggttttatgccctaaataaaattctttacaatctgattagttatc

SEQ ID NO: 249834 - DNA, 903 bp, Cannabis indica
gaaaagttgtggaatcacctatctgcttggcaagaacaattattctccattggtggcaaagaaatccttctaaaagatgttgcccaatcaattgttttcgtctatctaaatctctagtcaacaaaattaagactatgatgaataaattttggtggggttctaattcatcatataatggaattaattgaaaaacttgaaaagctttgtgccaatcaaaggtggaaggtaggatgggttttaaaagctttgtctattttaatcaagcttcattagcaaagcaagcttggagaattttttctaatccttcttctctgctttgccgagttctaaagccaaggtatttccaaaataattttttttagaggctgatttgggttcttatccctccttgacatagaggggcattgtatggggtaaggaattgcttgctaaaggtctctgttagaaggtttgtaatggtgctaatatactttgtgcttcagactcttggctgccaggttacacttccttcaagcctttgatttttcgaggacaagacataacaatgaaagtctcagacttgcttttggattctcgacaatgggatcattctcttttaagaactttatttttggattcagatgtcaacaaaattcttagtatccccgcttactctatttgagcaacaagacttactcatgtggcatcatgaatcaaatggaatatatacagttaagtctggttatgctttggctatgcacttggaagatcaatcaccttcagctagcggtcatcaagctcttcaatggttgaaaaagttctggggactgtcattaccttcgaaggttcgaattttccttcggcgtgccatccatgattgtcttccagtggctgatattctccacacgagacacataattgatt

SEQ ID NO: 249835 - DNA, 592 bp, Cannabis indica
attattagaagctttagaaactgatctctattgcctcgtgaagccattctcccccaagtcgccctgagggccatgcctgcaccgggcgggtggtcaatgcaccttttaggttgagttgtcttgctctttctcttgcttcttctatggctcttgcttttctccccaatcttgaatgatttgggaagacatgcttgtatattcagcatgaagcttacgagagcttggcctttcatggccatgttagcttgataagtggccttatattggacgacctcgatggtctgggtggtacaggtttttgttacacctatcgccatggccagtcagcatgcatttctttgggagttttggtaggtgattgaagcatgtgcttttctcctacttatcccttagacttcatggcctaaggaaattgttgaatttcccttttttgccactattttggccaaagccatcattgttgcgtttgcctcaaatattctctttgttggagacttgatagacattgtttgtgctggctggcatgttggacaacagttggggtagtatgatgccctatgtctgtaatgaccgctttagtaatttggattag

SEQ ID NO: 249836 - DNA, 832 bp, Cannabis indica
tgaacaacactattgccagaaatttggtcttcaatgaacaacactatccaggaaattctcacaccaataaccgaactcaggtacactctgaacataccactagttttattcctactgcaaccttttcaacttctaatactagtgttatttatgtggttccaactggtgtttctgagacacatactctcccaatacaacctgacataatcacaaatacttatcctcggatcccaccaccaatgtctcaaccaacccatccgtcaaatcccaaacagtttcctaactccttcctccaactctgtccccaccagcctcttaactaggtgaaacagatccccaacctgtctcccagccaccttcccaggaccaaaatcaaccaaataccaacccagatgatactgttcctgttcaatctatacctacttccctcaattctagtctcattaacccacccaatgtctcagaaaatacttagtccaccaacactgctcacaggtctcatcttatgataactagatccaagaatggcattgttaagccaaaagcttatttggcaactaaacatccatttctagaatctctattaccatgtgaaccaagatcatttcaagttgcatttaaagatccaaactagtttaactcaatgcacagtgagttctatgctttaacaaaggctagtacttggactcttgtaccttaccaacagggtatgcacattattggcaataaatgggttcatcgaattaagctaaatattgatagttctttagataaattcaagtccaggcttgttgctaagggctatcgcaagctcctggcatcgcttatgagg

SEQ ID NO: 249837 - DNA, 857 bp, Cannabis indica
acgactgggtttgtggttgatagtagtccgtggttcgtggttgacgatggccatgaaacatttctcttcctcttttgtgtcctgcttgtattttctcttacatttttcattttttttttacatgtgttcttctgatctttattttcttctatctagttgtaatagagagattttgatggctgttgacaaggctaagaagatcctctcattcttcatctcgcgtaggaactgctattaggtttttggagccaaccaaggaacaattcctcattctttcttatgctaatttctctcaggtattgaaatcaatagtctaagtattttttttttttggataaatgaattgttcatgcctaatattatatgaatatttgttgaatcataagttattgtatagtatttcaatttcaaattttagttcagtaattgtagtatcactatttttctctctatggtttatgcattcagattttgtaatgataatatttttctttgtattttttattttctttttaggtttttcgggtccctaataatggaaaagaagttcatcagtctatggcaaagaagctcatctgaatatttcaagtcttgaacgttacccattttgatctataatttttctgaacactaaaattttatttctattgttaaattatggatgtattttgtagttttgatgctttattttttttttaaaaaaaaaaaagaaaataaaactaaaacaaatttgatataccatacatttttttttttttttaaaaaaaatatgatatagtgacgcactataagtgtggccattgtcaagaaaattattaaaaaacaaaaaaaaaaaaagtaagatacagtgacactct

SEQ ID NO: 249838 - DNA, 500 bp, Cannabis indica
tctctccctctctcaatttttttatcaaataaataattatgtattttacgggcatgaattttagaaaaaattaacctttcaactttaaaaataattactaattttatttatgaactatgactataattatattttgttttttaatttttacccctgttaaatcgtactctttttaactaacaaaatcttaaaatatattgtaaattaataatatttaaaattaatgagaaaatatttaacatttctaattatttgaggggacaagctaactaataaaaaaacacaaactcataaccaaaataccttatttattattaggctaatttagatttttactaatttcgacatttattgaattatttctctaaactttttaagttattaaaaaaatttctgaattattgatattgttaaatttaattttttttattctaattttactaaaaagaaattcaatctagcacatattaaagtttagagaagtagatatcaaaatttaa

SEQ ID NO: 249839 - DNA, 606 bp, Cannabis indica
cacttcccatttacaacaattctctaagaaaaggcatctagcatcatcaaacctcaactcattcaccattatctgcaagatggtattgaaagacatggtccaattcacacagttgaattctggaatattcttaaacagagaaaaagcttcatccatcaatccagctctagcatatgtcttcattgcagctacaaaaactgaatctttgcactcacatgagtcatttttcatctgattaattacctccttcatctcactgattctacctgagtttccaaggattccaaccatggtttgatagactggaccattatgacggtaacttgggtacatatatttagcttcattaaagatttggagagctgttaatgggtttttctgcttccttataatttgggagaggtctgtaggtgtcaaaatcctcggccaccttatacacatggcgtttcaacaagacaaaataatgccaataccaaatctcacctcagaagaacttaaatttatatgaaacaagaaataggctaagactcaaaattaagagacctagaaaaatgtaaagttccccccattccctaaaccctactcctattttgagtgatgagatga

SEQ ID NO: 249840 - DNA, 1082 bp, Cannabis indica
gtgtctgagtatgtgagcaaaattgtaaattatattatgttagacaaaaaaattatttttaaaaattgaaaactacattttgatgttttttgttttctagttttttaaaactcaatttttaaaaaaattgaccaaacgacccctattagtttttaaaagttatttttctattttttaaataaaaaataatttttaagttatgaagccaaataatacttttatttttgtttttgttttttttagagaaaaagaatgaaagtttatttatttattctgaagcaaatgtattatcatttaatggtttaaaggataacaataataattatacatttttatcttaaaaattaattggtgatgagattagggatggaaaaaatacctagttttttgggttggaacaagggctcgcctcgtcaaggtgcatttgggtcatttgccctaacactacaaaaaatagctacgtttagtggcaattttttaatcacaacatatattttttgtgactaaaggtgatttttagtcacaacaaaaagttacttgtgactaaaacatagtatttagctacaagttgtcactaatttaattttagtcacaataagtattgtgactaaaaacatatttagtcacaacaaattgtaaattttatgactaataattttagccacgaactttttaatcacaacttaggaataatgatttataattagtcacaacttttttacttttagtcacaagttttgttgtaactaaaagtaaaaaattttgtagtgtgacctgttacattttatccgagttggattttgacctgccccatttagcttctttttttttaaaaaaaaaaaatcatcaatctattgatatacttagtaatttttcgtgtttctctttgataaaagccatatcccaaagataattgctttcaatctcatcgtgaaataacacatttttgatctcactacaggaaatgatatcatttttttttagctaattaggatttttgccccctgaactttgacatgtacaaaatcatgcctcctgtacttttaaggtcgttaaaaataccccttgaactattgagattg

SEQ ID NO: 249841 - DNA, 2671 bp, Cannabis indica
ttgataaatgttcccacataattcccagcatgtttaaccacccattcagacataaaaccatacttcaaatcatgaagttgaacccacatatcaatcttatgcaacggaaccattctaggatcctctcctcttttcaaacgatgaaacacaagtggcattctgttaaaagtccatggactcccatcgataaccgtttggacgtcaatttcgtgatagaactgaaataggtatcgattagtatccagttctttgatgtaaactcccttcccaggctgccaaagtgaagccaacgtatgcctcatagcatcaaaatcaagtgtccgatttgtcaggaacttaccaaccaagcaccatcgatcatcaaatgcttgaacgtcctctgcctgatcgtcagaaattagaacaccctcttcttctccctcgatatccaaatgtgcgtactgatccatccaatcaccaccatgatgactacttgaagccataataaccaccagaaagaacaacaatccaagacagcaatagacaaaaacttagagacaaaagaacatactcaacatgtcacaagacaagactttcagcctgctttctaaatagtaaattaatttaaatgctttagtaaaactatttttggataagggaagctcacaataaaaaattcaaaaagtgaattgggtgtagtagtggtttttttattgcgtcaacgtttgcaaagaattttaaaatttaaaatacatttataataaaaatattaataattaaaattttacttgtattaacattaataaatggggatcctgaaatttagttacaaaatacatttatgttataaattaaatacaacatatttcaataaacaaataatccaaatttacatattaacacacacaaaacaatctaattttcttaactcatgcccactgtaaacgtaagctctcaatcaccttctaagtcattgttcggtaaatttagtacaaaagtatacgcaatcggatcaagtaatataatgataaagtagagtatcgtttctaagaagattgattatcaattaccaatctattaattcattagttctacttgataaataaaaattattgtaaaaaaaataaataaagcaagacaatgattaaaatttaaagaaataataataataaacacaaggattattataatacccaactgcgctttatttttcttcttaatgcaattacacaatttcacttcttcctattcaattgacaagttgaattaagtagtttataatctgattaaaacttacaaatccaatctatatgaaaacttcctctattcatctggtaaattttaatcacaaagaaagcattaagaaaagtaactcataaaaatcatacaaataatctaaatatttttttcctaaatcaatttgcatccataataattagagcatatttaaatctcacttttcaaaatattttttattcaaattcataaataacaattatagatggccagtaaataattgtaaaattaaaacagattgtatggaattagattaagagaagaagattaaattgaatgactacattaatccataaaataaatttaagtggttcacataatgatccttaaaagaaaattagctactagaagtcattctaaaacattagaaatttaattacaaacattaaagatagaaatagaggagacaaaatactgtttggagtcctccaatagtgccttctgctcctagccttccttctatgctcagaattttctaaattttcgaatgggtcttaaagtgtgccatcaaccctattcttataatccacaaaatcaagattccccttttccttcaaagttgcggtcttgcttagactattgcaggtttctaaacgagtttcccaaaattaatttccttgctgatttctttagttttctactttctactttcttctaggacccaaaggaatgccgcaaaaattcttagaaagtcgtggccttgctctatagattccctttttcttcattttttcactttaattttggaaagtgcccatccttgacttttgaccaccaaatttttagctgaaaatgcaatctttgacccatttgaggcaattagaaatacaaccaaacttatagaagtttcttttcttccttactattactcatttatatatgtctcaaaaaggcttaaaaaaaccaaaattaccaaatacggagatctccaaataatacttctcttgaaaaataaacaaaaataaaaaccaagtatgaatctaaataataaagtaataaaaatactaaaacaaacaataaaatagactctaaaaaatacataaaaatatacctaacagtcttatcattaaataacaacatcttagacttatgaatttactttacaattttcgtaactatcacacgtgcggaaataaaattagattttgactaaaaaaatctccgaattggccatattactatttcacaaattttttttagataatttaagaagctttctaacaatatcaagatcattgaaatcaaagttataactgtaatactcagtttaagtatgttatgaattgataaattgtttgtgtgatataactaattttatttgtctagatgagatttattatttatatacattatgtatatatttatctttgttccatgcatgtgatttgtgaagttt

SEQ ID NO: 249842 - DNA, 934 bp, Cannabis indica
gtcaacctgggctgggtccctcttcccttcaaaaattttgtttggtccttataaatagttaaatctcaatattatttgaaaaaaaagaagatgcttgaaagtgttcttgaaaaactccaattgaaatggcccaggttgacaaaatgtgaacctggtcatagggccagccctaggtgtcaacctgggcgctaagctctgtttttgtcacccagaaattgttgtttcttctttgaaagcacctatttccccattttttatgaagaaaaacaagatgcaaaatttggatctttgattggatacttggaaggcgcccagattaacagattgtcaacttaggtgctgggtgctcggggccttaggtactgaaaaatcaacttgttctaattctgattctaatgactcaaatatttttgtggtatgtctagatgatgtcccaatgcaagttttgacctctttgcactaagacggtcccagaaagttaaactctagttaaggatgtcaacctgggcggcaggtgaaactctaggtgcccaggttggcttccgagttgcaggttcatgtaatttcaacttccaagacttggattaggttgttccatgtcttcatggtacaaaatactgaaagatagtgagtttgattcaagttattgacgtctaaacttcaatttcggagttcccgaagtcaacctgggtgtagggctagggacccctcctaggttgacctgctatgactcgggactactcaactctgagatgtcatctttcttgctcatgtcaatcattgatgtccacatcattaggactactcttgctctaaacaatatgccaccatttatggtgtttagctcatatcttagcgttttccttatcactccaatgaatggtgtataatttaagctaaaaaaatgagtcaatattatattttatccaaattt

SEQ ID NO: 249843 - DNA, 797 bp, Cannabis indica
ctacctttcaattttttttaataaacgattgcacataaaaacgatatacaattgtgcaaaataactataccaaacatttaattattcgaggttataattgtaatttcatcatcaaacttttaatacaatagacattttgttaattttttataaaaatggacatttattaactttttttttttttgaataattgttagatttaggtcattttacatcttgaccttttttattattaataatatttgattattttaataatatattttaatttaaatttatttaatataaattaatttgttgaaataacgaaaaaagtaatagtatttttattaaaataatattaaaaaaataaaaaaaataaaaaaaatagaatcctttgaaagatgaatgtgaagaaagcttgtatcttcacgaattgccaacagatgtcaagggcggtgaagagttcaatctcccctcattagaaatactatttctctcttctcaaaattgcaagttgtcgctctattcttaataacagactaacagtatcgaatgggttcctacatctttcaataatgcacttcatattttggctaaacaagggtagtgaacaatgaaacttaacattttatcttcttttgaatgaacttgttgaggttttccaaaaaaaaaaaaaaagtaatacaactctatgtaaatgtaacaccaaaataaatgaaatagacaacacaacatgactaggcgtgagaacaaatggtaggggtgtacatcaaactgctcaaaccgcccgcaccgcaccacatcgcaaaaaaaat

SEQ ID NO: 249844 - DNA, 1379 bp, Cannabis indica
cggtcttgtggtctcttaaagatcgttcgttatataaattgaccatcaaagcaaagttaaataaaaatctcacacaatagccataataaaaaaatttatttcatattcattctcttactcaactcaccaaggaaaccccatcaacatctttcgccggcggagaccttgaggaggtggtttagacgacagaggatttgacgatgatcttgtcagaggtggtttaggctctgtatatagcgactgcaagaacttccccggttcgtttataagaataaaatttttgattgtgattaacataagaattcaataaaggcaagaaaaaaataaaagaaaaaccaactaaaacccatttattcccaatcgaaaataaattagataaagcaaagtagaagaaaaatgttgctatcagagtagtaacaagtgtagtagccaaggaagaaaatgaacaaatgaaagaataaataactcataaagtgttaaaatttggggataagatgaatgggttcatctcaaaactaattgccaatgagaagagtagctcattcattttatatatcacaatttatttccatacattatcaatttatataacgaacgatctttaagagaccacaagaccgaacgtgacatttgaaagaatcccacaaagctaaatatcccatatcaaagacccaaagtagcacaatttatttccacacattattaatacattattaatgagacttaactcttaatataaagagagtgcttacaaaatgatggtgtttgactctttgtatacccaaattaagcatagataacctaaaatggtggtctaaaagaggaatacgtgtcaatttcttaatttttttagaagtgataaaaaaaaaagaatttagtgtgaaattacaattgaatcctacgaaggagctcaaaataaaggctttaaaaataaattaagttggagaggaataagagacttattatttataagacatatatatggttaacgttaaaacacattttttcttttagtcgaacgttagatgatttttgaatattaatatattttttaaaagcaatttttaattagtaatattattataattatatagtaattaaagaagaaatttttacatgaaaaatctattttacacaatttattacaaaaaaactcctacacggctatatcaattttttacttaccatgtttgttttattacaaaaataccacttagtcatcatttcatgcacatacacgtgtgctatccccatcactcatcaatcaaatcccactctcttccctctcttttttcacttttctttcaatttcattttcgatttttccttctgtttctaagttgatttgaagatcaagtaacctccattcataagcttaa

SEQ ID NO: 249845 - DNA, 892 bp, Cannabis indica
gacaattctactgataagattaatgcgaggtcaagttggtgttctaaatagggattgcctctggtagcgattcaggcgagccactgctgccattaagcacagtgacattaccatcagaatcgacatccacaataaccgagtcaccctccttgatttccctagcaagcatcttctcagccatgctgtcctccaaaagtctcattatggctcttcttaaaggcctagcaccatagctcgggttgtaaccttcgtccaccactctatccctaaacctttctgttacttgaagttcaatttctttggtcttaagcctttcgaacacctccttcaacattatatctgctatctccttaacctccagcttagtgagttgtcggaagactatcatttcatccaacctattcaagaactcaggcctgaagtattgcttgagttcctctgtcaccaagctcttaattcggttgtaactgctatccttctcatcatagtcaaggtcaaatccaattctgcggccacctttctcaattacactacttcccacatttgatgtcattatcagaagtgtattcttgaagtctactgttcttcctttgctatcggtcaaccttccatcttcaagaatttgaagcatcatgttgaaaacatcaggatgagccttttcaatctcatcaaaaagtacaacagtataaggacggcgtcgaactgcctcagtcagctgaccaccctcagtgtaaccaacatatccaggaggagagccaataagcttggaaacagtatgtctttccatgaattcactcatatcaagccggatcatagactcttctgaaccaaagtagtaagcagccaatgattttgcaagctcagactttccaacaccagttggaccagaaaa

SEQ ID NO: 249846 - DNA, 1101 bp, Cannabis indica
atccatgaaagacatatctcaaaaagtttatctagagttcccaaacaatcaaactcaagtataatccaaaaaaaattacatcaatactatagtaaaatatttattctggtgtattttcgctgttttccaaatttctaatggtaaatttgttcatattaaatcataaagagacatgtaaaatagagttacatatgtgaaaatacttttctaattttcaatgttttacaatagttgcattacagttgcataaatattttggtaacagttatttcttctgattgaaaaccccatttgatgcaaccttcggccaaccacccaataaccacccaaaaactttcatctgattgaaaccttcgtctgatgcaatcttcggccaaccacccagcaaccatcctgcaaccatcgtctgattgaaaccttcgtctgatgcaaccactgcgcaaccacgcagcaaccatcctgtaaccattgtctgattgtgtaagtgataatgtaagtggtattttggtaattaaaatcatataaaaggtatagatgttgtctgtagaggtatttctgtaaataaagtgtcaatttattttttttatgtaataattctaaaaaataaacgagatatgtatagtgaatttaaatttaaattataatatttaaaaaaaaaatcacattttctgttagggaaatttgaatttatatgcatacatttagtttatattaaatttttgagcacaagcttactaaaattttaaaaaaaataggcacactttatattcatacccattatacccttctctcttctcttcacttctaatttcaccatattccatactctctattcctatctatactgatgctggtccgatgggggtgctttgatggcccgatgctacccattttttttttatatatttttgtacataaaaaaagtagcatcaggtgaccatcggactaccatcgaaccatatctacgtttatagatgttatgctcattcattaagctcgtcaagaaggcatcgggccaccatgggaccatcatcaaacccccattggaccatatcattaggatactatcggactatcgtcagaccttcgtcttcaaccttt

SEQ ID NO: 249847 - DNA, 516 bp, Cannabis indica
tattaataatagacaatacaataccttatgatgtgttattctacatgtcaaaaagttctaatctatgtatttacatgaactcatccataatctctctattatccatattgactactaaaaaacttataaatttcttatggcaaaccccattaaaatattattatggtggacacagttaatctatatattttttttattttgtattcattctcttaaaatattttaaactaccatttgatatatatactggaaatagtttttaaaatttcagtttcaagctttcttctcagagttaggaaccacgtatccaaacgctttaaaaatatatgatgactattaaatatttcgtccctatgaaatatatataaactagaattcaattgtggtaataacaataacaacaaatacatattaaaataaaaataaataaagagaataaaacttatcctgtatctttttggcaaaaataaattccaaaaaaaacttctcgcaactcttcaaagatttagtgaattt

SEQ ID NO: 249848 - DNA, 1605 bp, Cannabis indica
gtgtggtgaagggttacagtgggaagcgaagataacatctgtcgaatagcattgatgatggttccatagcttgaaagattttcattagttgattgtagatccgtgaggaggtttttacagtccacttctatatgttgaatgttaagtccattgtgacaacaccatttaagaccttccaacaaaacccagccttctgctacttgaggttgcatttgtcccattcgattgaatgctgttgctgcaagtacttttccagagtgatcacgaactagagccccacctcctgttctattctggtgagtggatacggcagcatccgtattgagtttgagggttcccactggtggtggttcccaagccaaaaggttaaggtctgtggtagattgggtctgtgtcctccgcttgtcctgagctgcttgataaaatttcaaatagtcttgagcttcttgttcaatgcgcattggcctagagtcttggttcctgaaaacagctgcatttcttgcattccaacacttccataacatacaaagaaaaaggctaaaggcatctttggaaaaattaagctgtatgtgtaaaatgatatctaacatatgcaagtgtttggtgtccttaatggaagagttgaaagccgtacctgaccaagccttcttcataaacctacactcaaacaaagcatgctgcaccgactcataatatagattacatctaggacaaacagaagagctaaggcagtgcctatgataattttcagcagtagaaatggagttttaagcaagcctaaaaataaagtgtctaatcttagggggtattgggagactccagagggacttccaccaacgggtgagggtttccatgtttgaggaggagggttgtgtcaagttggtggcttgttttgcaatatggtagccagtctgaacagaatagtgtcctgaaggggaatgctaccagaagtaggaatctggttgggaaaggtcaggcggagggagggacagtatgttattaatggtgttctgctggaagtgagtttgtagtaagggaatattccaatccccattgggaagaaagagatcagaaacatgagccagagaaggtgggatttgagaaggaatgaaatggtggttaggaatccaaggatcgaggatactggtgttagccccattccctattcttttgcaaaggccagttttgagaagagatttacctcaatgaatactgtgccagacataagagggagagtgccccagggatgagtctaagaaagatgttctggggaagtacttggcttgaaagagctgagtgagaagaggtgactggtttgtttgaattctccaagcctgcttggcaagcatcgcttgattaaaaggcttaagagatctaaagcctaatcccccaacacttttagaattacacaaagatttccaattcttccagtgaagtttgtgtttaccatcagcaactccccaccaaaagtttgccatttctttttccacaaagttgcaaaaagagtcaggaagtttgaaaaccgacatagcataacttggaatagcttggaccaccgccttaagaagaacttcctttcctcccttagagagaaatttgccttgc

SEQ ID NO: 249849 - DNA, 1361 bp, Cannabis indica
atcaccgtgtgttcttcttctctagcgacactctcaccagttggagtttcaccttgctctgcgcttctcacactctcactactaaagtaaagtggattctccgatagttttaaacagtcggctaatgtattattgtccgtctctataatcgtcacctatttaaccgttgcaaaacttagtaaaataagtgacggtttaaaacagtcggttaaaaactctattggctgtttaataccattggcaatagtaaacacaatagctgacagttttaaactgtcacattaaaaaaaactagatcgcctagtcaactcactcccctctcaatcacataataacagtccactactggactcaaaataccaaacatataaatagcaggcaataagcattaacattaatttaaattaaagaaaataaacataaacatcaacattatgtacaataacaaatccaaagcacgtaccagaaacgaaaaataaaagacaaatataaatattactaaaataaaaataaaaactaaaaaatataaacaaatccagctccgacgatctccaaccgcttctctaaatatccaccacatttgtgaactgatgcaacccaaccacttgcgaacgtgacgatacaaacaaatttgtcattaaaaacaataaaaattaagaagagaagaggacaagattgacaaatctttgcaaaagaagaaaaagagaagatcttcgatctcataagaaaaagaactgacctaaaaccatttgaaggagaatactcgtacatgggttttaaaggagcgagaatcttatatacgaccatcgtaacaagcagaaccactagacgacactacctcaaagattttgaatgctactcttccattcaagatcaatcttttactcctcgtcccctcaataaatttctttcttactctaggctagctaattcttgcaaagcttttatcatttcaatcatctcgcaaaaggaaccaaagacatacaaacaagcaatacaattcaaacaatggctcaatgccatggacactgaacttacagccctttgaaacaacaaacactataagaagtgtcacttttgccagcatatttttgtgttggcaagagtttggtattgcgctggtaaaatagaatttacttttgatgtgttggaaaaagaggttggaaaatcaacgttggtattagaacttttgccaacacaaaatgaaaagcgctagcaaaaataactttttccaatgcgtaaatgcactagtataagtttaattttagccactgtaaatgtacggtaaaatttaacctttttgccagcgcagtgtatgaaatgcactagtaaaaattacttttcttgtagtgaaaacatgg

SEQ ID NO: 249850 - DNA, 2605 bp, Cannabis indica
ttaattaaatagggaaaaaaaatgttaagacaaattttgttaaaacaaaatttgtcaagacaatatttgttgaggcaaaagttgtcaagacaaaagactccatatttatcctaaatagacaagggtaggcgcctagcatgtagtctatccctatggagtttgtctatttgagttaattagtcaattgtaatcaattaattaattcaattagataaatatctaaatttaaaaaattattatagatattttaaagttgttgagagattccttcataaatatcagtaactgaatttggttatagatatttattaacttaaataattaaatatgatttagttaaagggtttttgctactataaatagaagtctgatttgagaagttatatttgcacaattgttcttgctcatgtgttgggaattcaacaagaacaacaatataaactttatcctaatagcccacactattctttaagtgtggtggatcgatttggaagatactagtgtgagtccaattgcattatcatcatcatctagatcaagggatacaatatacaagatgttttaaggataccctaattgtcttcaagaggtatattataaacttattactattttatgttttgatttaatgtacacacatgtggagatccattggaatataatacaatgataattagtaatatgaaacccttcccctgcctatctaatttataccataaaaccaatagttagataccattcgacctgagtagattcggcctgaagatatcaaattggtacaagaatttatagatgtattcctagaggaactttcagggttgccaccgcagcgagaaatagattttgtcattgagttagcacctagaatgaagccagcctctagggcaccctacagaatggctccttcagaacttaaagaattaaagatacaacttcagggtatgcttgacataggatttacccgactcagtttgtcactctggggatctcttgtgttgtttttttagaagaaagatgggtctctttgtatgtgtattgactacatagaactaaacaagttgacaattaaaaataagtaacctctgcctaggatcaatgatttgttcaataagcttaagggaaagatagtcttctccaagattgaccttcactcgagttatcatcaaataagaatttgagaggaggacattctaaagactgttttctgtactagatacgaccactatgaatttttagttatgtcttttggactaaccaatgctccaaaagcttttatggatttgatgaataggatattcaaggattttcttgatacatgtgttatatggtatttatcaatgatatccttatgtactctgaatcagaagtggagcatgagtagcatctacggatggttttatagcgactacgaaacataaactttatgccaaatttaagaagtgtgaattttggttatcccgagtgtccttcctagggaacattattagtaaggatgggatcatggttgatctggaaaatattgaactgtcagggattggctaataccgaagatagtaaccgaagtcagaagcttcttaggtttagttgggtattatcaccgctttgtagaaggtttttccaagatctccatgcccttaatagagttaattaagaaaaaattagcagtttatatggatataaaattgtgaaacaagctttcaagagctcaagcaatgattaattacagctccagtattagccttgccatcagatcaagaaagtttgtggtctgttgtgatgcatccaaacaaggtctagggtgcattctaatgcaagttggcatggttattgcttacacttctcgtcacttgaaggagtatgagcaacgatatctaactcatgacctagaacttgcgccaatagtctttgctcttaagattttatggagaaaagtgtgagatctataccgattctaagagcctcaaatatttcttcttaggaagatttcaatatgagatggaggtagtggttgcagttaattaagattacgattttaaaattctttatcaccccgggaaggcaaatatagtgacaaatgccttaagtaggaaaggtcctggacaagtttacggtacagctatgatttctccccagttggcgaccaacatggtcaaatcaagtattgaatttgtggttggcaagcttaataatttgacaattcaatcagatttactaaaaagaattagaagtgctcagctggtggatctagagttggtgaaaactcaagaagaggtcttagctgtccaagctaaggatttttcagtgtcaaacaacaagattttagtttataaaacctgagtttgcattcaaaattatgttgaacttagaaaagagattcttggtgaagcccataacactccttattcattatatcctggtaccaccaagatgtactaagattttaaacccgattactagttgtgtagtatgaagaaggatgtggtagaatatgtgtccagatgctagacttgtcaacagattaaggatgaaaacatcaaagacctacgggaggatgccaccatagattttgtggttggattacctaggaccacgggtatgtttgatt

SEQ ID NO: 249851 - DNA, 714 bp, Cannabis indica
ttttttttatcagtgttagattcagttcccatttgttctttttctaaatgaaaccaaaaatagacttgtgtttgtaaattaataataatatgtcactatgattttgtatactacagatactatatgatagtgttgtagtgtgaggtacaaacttttagctctcatggacattagggagcatctctttgttacttattttacacatgtccaagttgaatttatatcaataacactattgtgagagtaatcctccattctaacaaatattgcatatcttgttgtcctcattgttttttaatgttgcaactgttttatttttttggcatgattttgctgcaagataatagattatacctcacaatataacaatatgactctatttggttgatcacttcttttgcgaaccttaatcatttctattcatttcaggttttaatggcaacaattgagaaatttattaaagatattcacccatcagaaacaaaatggagggtgaaagtgattgttctagagaaaggaatgccgaaaactgctcgaaatgctacaaaaagaaatcaaaacttgctactatctgattcgcaggttagctgataaacatattatctccttttcttgttcaattcttcttctctcaaatagtatttttgaagataatagatagctattttgaagttaatttttaacattttttactactaattttcgttcatttac

SEQ ID NO: 249852 - DNA, 527 bp, Cannabis indica
aagaaataaattagtataattaaaatataaattttatataaaatgaaaaataaagtgtatttaaaagttttgagagtctacataaaactctttgttaatattgctattaagtactttaaaatatccaacgttatatatccacgtggcacattatgagtgataatagttttttatattatttatcaaatcaaaatatgtgagacttgatattaaattacaccaatagagatatgtcactcttgtggtgcctagtaccttaagggaatgctaaaaggcaccagtgatgtctagcaccatccaatgtgtcatatcgctaatgatacaattaagtatcgagtttcatataatttaatataataattagcttttttactcctaaactaccaagttctgcctcctgtaacacaagactcatttaataatacccctcgaaatataactttttcatcatattttattcaattttaattatgaagcgagtaacgtggtgaatggtagtcgataaataatggatgcaaatcaaatat

SEQ ID NO: 249853 - DNA, 1326 bp, Cannabis indica
caaacaaacaaacaaaccattctcccaaaataatggctcaattagatcatcttggtgatgtaaaaattgaattatattttatacaaaagtaattttgtgatatttttatatcaacttttactattattgtccaatgcataattgtaaatattgatgtagaatttaatatgttatttaatactcactaaataatttattaaaaaaataatataaaataataataataatgcaaagttaaatgtaaaatttaataataaaataataataatgcaagtcatttaatgcaaaagagtatgttagctaaaatttaataataaatattaaaaatagtataatggtaaatataaaagcatagcatttattgtgatgtaaattttgcatcatgatatattgtgatgcaaatttagatcacttttaattatgtaagattttcgcattataatttaacacactattgaaatagacttttaataaaatgaactatattttgtatttgcatttccactggagatgttcttatgtatcaaacactaatgataaccattatcacacctgaccaaaattgtacctaaacaaacaagttaggcccgtgcttagggtctatattttttggggggctaaaataaaaaatagaatatctcattaggtttttatttaagtaaaattaagtgtattttaaacaattattcataacttagttgattagagtgtatcacatattacacaattgtgtgggttcaagtcccgtaacactcttttttatatatttttgaaagtgagggctctaaaatttaaatagtcttagactcatatattttcagggattgaccttgcaaggcagtggtggtatcaccatcatgctaaaaattgtcttggaaaatcattctcactttacaattggcaatttgtcttgagttaaatggggggtcgatatattcccatttcccacctgtggtgttccccacaataagattttactccgaaccagacatgtgggaggggattcctatctgggacattttctcaaacacatggaggtatcacaccaaatataatggaaagcaaaaaaacatcactatatgtggacactaagtgccttaattttagaaaattgccatttttgaattctggttacatcatcttgtggggtagcaaggatagcaatacttgctaagttatagatgaggacaagctattacaactctggagttacttttcactgtcatttttctaattgtacagtttgttgttgtgatcaatttggtatgaacaagaaaaactatgtaaaaaaaaaaaaaaaaatactaacaagtaagtggagtatgt

SEQ ID NO: 249854 - DNA, 541 bp, Cannabis indica
cccatgatcaaaacattggagactttctattttcttgaatgctgtaatcaaatcgttcaaattggaatcgtacggagcccatacgaaatccaatctcatcaaccttagtccaataatcgttttgcctcctggagagatcgtttttaactgactcaacagcttggggtttcattaccaaacccagaagcgatagagcaaagaatcgtgactgtgagtcaccggcgactacaacccatgacccgtttaggagatctgaagcgtcggctcatgtgagtttctgaaagtcacaggccgaaacatcgtcgtggaaggaccaagtccaagacttttcgtattgggaagtgttgggatgagtgtgggtgacattccaaatgatgtcatggagaagagagagagagagagagagattagtgtcgggtgtcgaagatgatgacggaagagatatgagtgttggagcttgcactttgcccatgcccagtaagtcgcttgatttttcaggtacgtttcgttttacgtttatattgaatggtttgtgttttcg

SEQ ID NO: 249855 - DNA, 362 bp, Cannabis indica
acacgagtttcgaacctgtaatacataaatagcgcagaagaggagcagcacagggtgggagtcggagtgggttcggagtcttcgggatttctcacttctcagttcgatttcgatttagggattactctcctcaaatttagggatttcctattctttccatttaaaatggtccataacaacttcaagtctttatttttgataaatggtgatgatccctggaccttactttattttctacaattataaaaaacaaattagtcaaattattataaataattaagcataataaattaaataacaatacaaaaatacaaataatatatgttatcagatcaaaaagtggataaagtacctctcattcg

SEQ ID NO: 249856 - DNA, 888 bp, Cannabis indica
gtctgcaatcacaacaatctatcaatatcttcccaaatatttcacattctcttaaaatattagtagcaatagcacttagatataaacagaccttaatgttaggcaagttcaagaagttcttagtgatgtggacaacaagtttgtccatgaaagctggcgcaatgtagaagccatccatattattgtccatattatacctattacaaaattcagtatcacttattatacaaaaccctcaaatgggatcaaaacacataaccaatatacatatataaagatagttttatatgtttacttactgacgaagaccagcactgatatagtcataggagctcatgacagcatcatgagtcccagaaccaattggagcttggaagagagagtccaccataccctttcctctggtgatgtcttgttgatcatctgacgtatcataggccaatccaccccatttgtccttcgaggtttgcttctcctcatcatattccgccgctaccttcaaattccccactgaaactttctcttgccttatcttacacctctgtatcttcttcaagttattgccccaaaatgccgaaacgctgccgtttaagtttaactaaaacagagagaaaagagagtcactacactactactcttttaagacccacttgaaataatagtgaaagattccatttttcataataatattaagaacgcaaaatagcccatgtaaacatgttcgatgataacgatgaaagttttatgatttgatgattttagtaacaaaagaagagcgggaaaaacagtttaccgttgctttgttcacagctcctccaagggttgagacagcagccattgattggttataagtacaaattttcaagttcaacggtggtgattagatta

SEQ ID NO: 249857 - DNA, 3095 bp, Cannabis indica
aaaaaatattaaattacagttttgattgttatattatggtagattattccatattcttctcataatgaaaacctaatagtcttcagcaaagaaaaaatcacagctgaaaacacagagtcattgctttgtccaaacaattgaaggttagtattctttaacttttttattctcattagaatttgaaagagatgtttatcaatacaattcctaactggtaacaatatagaattggacacaaagaattgtaaaagctctgaaaacttatgagctgaacctttcatttatatagagaaagattacaagaaaaggctgataacagaatgtaacaaactctatcaaaacagagtacaagtggacaaagaactaacaacatgtactaactgtaagaaataacagaatacagcagatttgaaaaagtttgttatttatcatcccccctcaagcgaaagggagtagaacacactttgagcttggatttgagatagagaaatcgatcagtagagagagattttgttagaatatcagccgtttggtctattgatggaacatatcgaacttcaatttctttggctagaatttgatctctcatgaagtgaagatcaatctctatatgcttcgatttggcgtgaaacactgggttcgctgcaagagaggcaactccttggttgtcaacccatattattggagcagctgggagattcacatgaagttcatgtaaaatagagtgtagccacttaatctcggctgatgtatttgctaaggcacgaaactcactttcggtgctagaccgagcaaccacttgttgtttctttgctgaccaagatatgaggtttcctcctaggaaaatagcatagcctcttatcgatctccgatcatctgagcaactagcccaatcgacatccgagtaggcttgtaaacaaagccttggagcaggtcgaatgagtagaccttcatggattgtgcctttaagatatctcaataatctcttgcaagcatcccagtgaacattagtaagggcatgaataaattgactcaatttattcacaatgaaagcaacatcgggtcgagttaatgtaagatattgtaaggcccctaatgtgctgcgatatagcgtatgatcagcaaaaggttctccattagtgagagatagaacatgagaggcactagttgggctgggacatggtttggtgccatccattttgagcttggtcaataggtctgtaatatatttagattgagaaagatagagacctgatggtgtcctatgtacttcaaccccaagaaaaatagtgtaaggagcccaagtctttgatatcaaattcatgattgagggctgttataacagcagagatagcagttggatttgggtctgttattagtatgtcatctacatacactaataacacaatgagactttgtcctgaaccttgaaagaacaacgagttgtttgattttgacagttgaaatcccttgctgtaaagtgtagatttgagcttttgattccaagctcttggagcttgcttgaggccatataattccttgttcagcttgaacacatgagtggggtattcaggatcaacaaaacctggtggttgtggcatgtacaacgtttcttcaagagttccatgaaggaaggcatttgaaacatcaagttgtttgattggcctttaaaagagactgcaagggtgagcaaaattcgaacagtagctagtttgaccacgggactaaaggtctctttgaaatcaattccaggggtttgggagtacccttttgcaaccagccgtgacttgtatttgtcaagtgacccatttgcgttgagtttaattctatgaacccacttgttgcctactacattcattgagggatggtatggaaccagagtccaagtattattcttgattaaggcacggtttttcagtttgcattgatgcaaaccatttggggtctgcaagagcatgttttaggtttgctggttctttaggcaatagggattcgggtaaagggtaagaggtggcatgataggcttttggcttagatatttcagacttggatcgtgtttgtatggagtgagtattgttgttgtgggaggatttgggacagtggttgataatggctcagtggaaatgattggtgtggggtggttgattagaagtcactgggagaatgcaatctgaggcatcgattgctggtgtaggatgagatgtactctggtttgatgtattctggacagtaggcaaagaaggtgtaacagcaggagggttcgtggtgatagtccttgatgctgcaggcataacagtaacagcagctggtggaattagtggcctgttgtctggtgcagcagctggtgcatgttgcacaccagagtttgatgtatggggtacctcagtaaatgtgggaatagaattagtaggcaatataggcgttgaaaagttgcagtaggcataggtgagttatgagaagaatgtatctgaggtaaagttgcagatggagagccaggaaattcttcctcattaaattcaacatttcgagctacatatattcatccatttttactttgacaaagatatcccttgtgaaccagagagtagccaaggaaaatgcatttattagacctgaagtttagtttatgaacattatatggtctgaggtaaggaaaacatgcacaaccgaatggtttgagaaaggtgtagtcaggtgctttatggaataagcactcaaatggagatatgtctcttataacagaggtgggcagttgattaatcacatatgtggctgtttgaaaagcattccaccagtaagataaatcaagattagcttgagcaagtaatgtcaacctagtttcagtaatgtggcgatgctttctttcagcacgaccattttgttcatgatcatgtgggcaagggtgttgaaagtgaaccctatgttggtttagaaatttggccaaggacctatatccacctcaacaatctgattggacacttttaatgggaaaattaaattgtttttcagcaagtagtttaaattgaagaaaggtaggataggcttgagactttagggtaaggggaaagatgttggaatttattttaccaggatct

SEQ ID NO: 249858 - DNA, 680 bp, Cannabis indica
aaaacttaacttgataatgaatgaataatggatctttattgaataggaatagtcagtagtacacaatagaatgagcctaaaattacaactcaacacagtaaagtaatacaaagaaatgcttcacattgagggaaatcacttcaagagtgatactcccttttacatcccttcacacacacttactatgatcttggactctttctctctcaactgaacctaaagtatgagctttggagattagagatcagaactcttcactcagaactctgaacaccactatatatagttgttggtggggtccccgatatcaaagccaactgagccaactgttataactaacagcagtatattccagattcatctgatgagcaaatagatagacatactaacttgatgaatttaatcctaacaatatagtatatacagtacctttgaagtaaatcaaaatctatggttacaacaaaataagactaaaaatgtggaaacattaaagttctgttctgttctggttgtgttatgttaactactttcatctccactctagtgagccttttttggattctgtaagttgggttgtgcaaaagattaaacctttcaagggagagagaaataaatatttagccaaggctctatataggttaagtatcatatatggttataatattaggtcaactagtgat

SEQ ID NO: 249859 - DNA, 883 bp, Cannabis indica
cgtcaggcagatttttccgtgcttttgatctggactacgttaggaggagaatcaaagagaccagcattttttcaatgcatcctcaattacaagtattatctgaatttttcttttttcagatttgccttgattttttcggagagtttgaagatggaattgagttatcaacgtctggagctccgctggacttgctggtttctgatcgatgcaatatctcctgggaacatagattcagatacaccggcttgctgctcgatcggtcagcaactgccttttctatattaattgcatctgccactgccaattctgcttctgcggttctacgaatgactggcagatttgctttcctaaaaagatgctctgtcaagcgataaagttgtgcctaaacagaagataaaagtaagactcaccaagaaaccaaatgtctagtactgtaaaaaaaaggatcccgtagaaaaagtaaatagagtgctactctctttactattttcatcataaaattcaagaactttttagcttatttattaagttgaaatccattattgtagaaatagttcaatatcacagtacacttggataattatagcccagttttacagctgtaatcatccaaggtgcatcacaaattaaattagaaaaatcttctaagttcttaatttcatgagatttgacagagagcacaaagtcttatgatgatggcaaacaagagtgacaatgaaccgaggttaagttataataatgatggcagtgatgtacaaaaatcatattatcagaggtatagttttccttgatgatatatagataactaggcttctatattaccacttactataaattagaaaatttgcctttcctaaaagcgcgacaagatcataaatattat

SEQ ID NO: 249860 - DNA, 728 bp, Cannabis indica
atttgtgaaattaaccctataaaagtccctaccaacatgagaaatgattaggcccggattgaacgataataaatccttaatactacaaattacatcatccaatacactattatggctacaaacttgaaattgttgaaagaaaccaaaaaaaaaaaaggcaaaaatgacccttttttggggtcaagaggttggaataaaatgaagactttgtaacatgcaatatattgagatgctgtcttgtcttatctagttcaaattagctctaatggtgtcttatagcatgtacttaaaaaaggtattattttgttaataaccatcttactcttatcttcacaaaataataaatgaagttaggttctcttttaataataattttaccacttttcttttcccactcggacaaggacagttttctgaaagtaattaaaatcacttaacgcatgatacagtatcatagacagaccgggacactctcccgtcggcaagtaaagtaaaccatttcacctaaagaaatatcaaaccaaaacgacaccgttttacaaccaccaacgacaacgagcctcgtcaaacacgaatataaaaacatgtactaacataacggaaggctcaaactgattcctaccgacacttggctcccgaatctacagcttcggattcttccgagcctaagctttgtgtcctctgacaactgacaatctctctatctctctctatcttctactaagcat

SEQ ID NO: 249861 - DNA, 987 bp, Cannabis indica
gaacccattcgggttcgggtctaggatccgagtatgtgaacaaaaatataaaatataatatgttaaacaaaaaaaaaagtttttgaaattttttgccaaacaacccctattagtttttaaaaactgttttctgtttttaaaaattgaaaattaaaaactgttttctgtttttaaaaattgaaaactagtttttaagttatgaagaccaaaaattcactgaaatgaatatataattgtagtgaactaccgatataaggatatatgtaaggatacatagtcaaatagtaaattattccttttttaggtaacttcattcaaatagatgaaataaaaaaaattactctattatgattataggtatttattaagaccatatttaattatttttaagtctatttagatccgatctaattatatattggatgttaaattttgtcatccgatccgatccaattaattcaagtcatccaatcgatcaaacatctattaaatgttgaatttgatcgtttctattcattggatgtgtttcatgtatataatttggttttaatttaggtttatctaatatttttaacctagtattttttggatcagattgaatcggatccatctaatatttcaaatccaatatgtattagattggattgaatccatccaatctaaaaaaaataaattttaatgttcattttaatatatgcatatatttatatatatatactttatttataacaacataaaatctaattactcatccaaattaaataaaaatactaattaattttatttgatgttagatgtatagaatttttgaacaccctctccaacatccgattcaatccacttgaatattaagaaataatatccattctgaaccgattacaattgaatatctaatgtttagtgatctgttgtaatttagtcgattagttataattagattagattgatttatacatgcccctggtctaattagttgggttgactagt

SEQ ID NO: 249862 - DNA, 534 bp, Cannabis indica
atgaatatctagaccaaattatttattattgtagattgtgcatgtaattgggtagtgttgtggtacaacgggataacgtgttgcttaatattttattggaccgtctaactataaacaaattcctttcaaagaacaagtgatctagattgcatctctactctaattgactttatttatattaattaattatcaaattaaaataaatataataagagctttagaaagttactacttaagtggttcagatattgaacttttgctaaatgcaacaaaagattcccgagtttttataaataaaataagagcatctccaagagagatacaaataaatcatgcaaatataaaatatagttaattttgttaaaagtattctaactgtgttaaattatgatgtaaaaatctcatataatcaaaagtgattcaaatttacattacaatatacagtagaatctctatctaagaatacacttgggactaaaaaaataatattctaattgagaggttataactaaatagagttacacttgaaaaaaa

SEQ ID NO: 249863 - DNA, 747 bp, Cannabis indica
gcttgaattgaaatatgaggatctccctaacctctactattattgtggacgtcttgggcacacttataatgggtgcattgctatattagtgtctcacttttatacttaaaatatatattttctattactttaattgatatttaatattgtttgtcttatttgataagtatgctatttttgacaataaaatattgtgtgaataattgcaataaattttctctaacaataaatagtaacaagaactcgactttttcttcgagtttaatttatatcttttttgctttctcttttcaattgtattcagtttctttgggcattttcttcttgttagttttttacttttatttttaatggttttttttttcttaacttgaacaatggtttttacttttattatttgctataaatcttattgttgacctatgttatattatacattattttattaaagtatttctacattataacaactaacaagtcgtcgtgacaaaaataatatcgttttattccaaccgcaagtctaagtggttgccatagattttcttgtacgagcaggaacaacctggaatttttgggttcaatgaataaaaattattaaatccgataagaaatatcattattaacaccgtattaactagatcatctataaatatgttattatcggcagtggcggacccagaatttaaagtgagggggcgtaaataaatttaaaaaaaaaactataaagtgtagttagtgggatttgaa

SEQ ID NO: 249864 - DNA, 1246 bp, Cannabis indica
ataattagtgaatcaatttaataacttcgaataaatgctaaatgcaagactcctttgaaaaaaaaaataaaaaaagattgctgtgacttcatccgggtcctatatataaatatagctttaagggtaaattaaattagggtaaaaaaaatagagttttccttttaaatattttgttttattaaaagaattgttcttacttttttttcttatgaaatatagctttcatacagatgagggtttgaaaagttttctagtaaacaatttcgtgtgagttttgaactttgcatgcaatgtgatttttcctaaataaggattaccaaaaagaaattttatatgcaaattaataactattaaattatatttgtgtttttgaactcatgacatcgatcctatatatatgcatcttagcttaataatcacaacaaattaaattaatattatgtttataaatatatgtcctaattaattaaattgcatatatatttttttttaaaaaaagtgattggcttgtctcgtttctatgtggatctaccctagacatatatatatactagtatattgttacgtgcgatgcacgtatgctatgttttatattaagtattatattatgagttcggaaggaaataaatgaatcaaaaataaataatatttaatttagagagatttgaataataaatttaaatttaacttttatgtccagtataatggagtttaaattaaactacaaatgttagtaaaaacatattggaaacaataataataaggttataatatatgttgcatttgttccagttcaaatattacaaaattaagaataactaacacttgaaggacattctcactaccaaggagaaatcttagatatggagtcaaaaacagagcaaaatcaaaattaatgtgtacaagtattcctaagaagctaccactgtcagcctaccagaagtcatgaattttaacaatgctaactgaaatctcatctgctcattataaagccaccgtcactcaaaatagcacacaaaagtacaaagaagtattaaaggtgtaatttttaaaaaaacaaatgaaaattaaaaacgaagaatgcaattctgacctttagcttggacactctgtaaaataacagaactgcaatcgatgagaaagaaataagaaaatctgagagagagaggcttttggttgtgtttggcctgtatgggtgatgaatgagtaatcgtaaagattgtttaattttttttagtttatttat

SEQ ID NO: 249865 - DNA, 1483 bp, Cannabis indica
ctgagttatgaagcattggaacttcagccagatctttcatacgaagagcaagaagtgcaagtattagatagaagagaaaaagtcttgtgaaacaagaaaattgcactaatcaaagcgttatggaggaacagtacagtagaagaagcaaccagggaacccgagacggatatgcagcagaaatattgagagctgttcatgtaaatttcgagacaaaatttctataaggatgggataattgtaatgccctaaggtttatgaaatcaaattagcaactctatttaatttaattatgtaataatgtctaattatattattatataatttaataagtgaaactatgctaataaattgcattttaagaccctattggtgtaccagtggcattttcataattttgacccaaaagggtaaaattgtaatttttaatatatatcgtgcttgtagactatattattatatagtgtgtttattgctatctttctttaggtgttttctgacaagccagcgcggtttagtcacaactaggtatattaggccaaaccgggtttagggcccaaaataaatttttgggatttatttatggcattatttgataaatatgaaaacctgaaaaaattatgcattgtttgttgtttgaaaaatgtgcccttacttatatatatgtgtgtggatataattacttataggggtattttggtcatttgactatttagtgtattattcatcaatataataatatttttagaaagtgagaaaaaaaaatatttttttctgtgaacctctcttggccgaaccccctctctccccttaacctcttcattttgttgaattctttggagttgaaagaaagctttgagtttggagtggattttgggtgaattctcccttgaacttatgaagattgtggtaaagctctctaatttcttgtgtatgaattaaatttaattttaccagccatgaaacttattcttgttgtcttagattttttgaatgcatatgtattagaattgaatgatttgtgttgttttatgcatgattatgtgggtaggattgtaagatatgcatgtaggttgttttgtttgtttttagggctgaaataaagaaggtttgatttctgggtatggccatgaaaattttgggtttccttggtagctttgagcatggatttttaagcttgtgagttatgtgtatccatattatttgtggtatatgttaagtaagctgctgttaattttgatgtgggcctttgttttaagtttctaatcataattgttgatgaatatgtttggtatgtattgaaatatgaggttatgtttggttttgggtgagttttgagaaggtttgtattgatttgcaaaggttttataaaatgaaaaatttttgcgttacagggcccttacttcgcggccaaggctgggctcgccgaggtgaggccctgtttttctcgaaattttttaggtttttgtttctgccataacttttg

SEQ ID NO: 249866 - DNA, 621 bp, Cannabis indica
gaatgctatcttaggtttccttaaagacaagttatgcaaacgaattcaaagtccggcccggcccggtttcagattttttttttctgcttgtttgttttcttctgcgtttattctcttttctaatcagtcaattcattactctccgttaatcaattcatccatcaatcatatgaggatgagttaatacagttcaaccctcgaagaaaatgcatttcgtaactcctccaaaaatggttttattctattaactgaattattttagttgtctatattattaggaaaataattaagaaaccaataatatatatggctttgggtcactggatagcttgttgttccttcaatgtggcggtttgtgatttattttctttttcttttggtcttgaagtgtaagtgaaaataaagtgtttgtttttattaaatatgcatcttaacttttagcttcattattttactctcttttttgggagtttatagcatggaatggatcactgttgttatagggattaggccatttcttttttaatcttcatcaagaaagtttggagtttttgaggttttttaatctctaatgttttggaatctttcatgggattgacatcttttcaattgatggttttt

SEQ ID NO: 249867 - DNA, 982 bp, Cannabis indica
attagaatatatattataattttttaaaaaaattataataaaagggggcaaaattttatattagtcatagttcaaggataaaattactattttctaacgttaaagaaacagaacctaacagaatggacacaattatgcaactgatatattttaggaggaatttttaacaagtcgtatattttaagaggtaaaatcaggttgtgccgaaagtttagggggataaaaatactaattattcttaatttagtaataacaatagggtttataagagcatcttcttgatactctattttttttagctaaaaaagctagaaagttaaaatagagagctattttattgttattgcttcaataatatttgttaaatataaattaattttataaaataataaaaaagtaataatagttttgattaaaatgctattaaaaaagtttagcaaaaatgtagtgagttccctacatttagagagctctttattcttttgctattatagagagtcattttttgtatggttcgagcttatttttcaagtctcactttctatttttagctaaggaaagtgtttaaagagcatggttggagatagttctataagttcgtgctggcccgatacatatttatctgtgctttttaaaaaacaggtcatgacgtgtcgtgccacaataaatatgaatcgtgtcgtgtcgtgccaatatttttaaagggtaggcccggcacagcccgtaggcccccccagtattttttgtgtcgtgctcggacttgtttcgtactttgcttgtgccagcctgaattttttaaaccgactagcctatttttatatgtggcttaaacgtgtttattttttcatatttttttacaattactaaatatatgtatatttcaaagttttaactacatttatataaattttgaacaatatttatagataatcttataaaatttattaacatcatttgattttgaatatttatttataaatac

SEQ ID NO: 249868 - DNA, 606 bp, Cannabis indica
agatcctggtaaaataattcccaacacttactgcccagaacaggttatccttttttatttctcaacaaagtaagataaagtggttaaagtttaattatgagaactctagctactttcatgctgccatgaggaaaaggaagttggataacaggataacaacctactccaaggatgattctattatagatgactttgaggaagttgttaaacactttgtgggtcattttgagaaatttatgggaagtaaaagctctgcaatttccaacattgatcaaaactgtattgcccaagggagttgcctaagtgtggagcagcaagttagacttatcagacccttcacaacagaggatgttaagaaagcaatgttcagtgtcccctctgctaaaagtcccgggttggatggctttggctctggattctttaaagacatgaggagtgagataggtaataaaatttctagagatgttcttgatttctatgccaatggatacatgcctaaggatctgaatgaaactatcatatcattaatcccaaaagttactgatccgagcacgacgaaagattatagacccatagcctgttgcaacacaatatataagtgtatct

SEQ ID NO: 249869 - DNA, 563 bp, Cannabis indica
gcaaaaataaaatttaaatatatgactacacttgtgtttcttttttgttttttacacgtgtataatcaattattttaatttttgaactctattttttgcatcgtgaattataaagaattaaaaaaggtgagtgagatgcctactaataactataatacataacatcgtataaaaaaatttaaacatgttatccctaaaaaataagtagctgtacttgtatttttatccaagatatacatagggaagctttagaagtacaccatccaaggacgtcttggagacaaccccgaagtacggtgttcgaccatagcttagccatagtcgagcgcctatgatcaaatccctatggtcgagcacctacaattagataatgggtctagctagggctgaacatcgagcaacttgatcgagtttcaggtgtacatattttgagttcacgagttttggactttaaaaataacactcgtacacgcccgtgaaatgaccaggttgggcgagtttttgggttgcaggtaaggcgggttcacaagttttttttctaaaaaataaatattaaaaaaagg

SEQ ID NO: 249870 - DNA, 537 bp, Cannabis indica
ataaagtggcactttttccagttaagtaccaagtttgacttctaacacctgattagtacttttttctaagttcctcaaacaatacatcaaaagatgaattgaaaactgagaagtcatcgataaagatctctatacaaccctcagtcaaattagaaaagattgtcatcatgcacttctaaaatgttgctggagcgttacatagtccaaatggcattctactaaaagtaaaagtgccatatgggcatgtagaagttttcttctcctgatcctccggtgttatggctatttgatgataaccaggatagccatctagaaaaaaataatactcatgtccagccaaacggtctagcatctagtcaatgaatgacaaaggggaatggtcttttctagttgccttgttaagcttcttgtagtcaatgcagattagccaaccagtaaaagttcttatagggatcaactcaatcttttcattcttaatcacagtcataccacctttttttggcactacttatactgagctgacccatttactgtctg

SEQ ID NO: 249871 - DNA, 633 bp, Cannabis indica
aatagaagaaaaataaaataacatagatgttaataaattattacaaataaacattaatactttaattatgtattttaaaacagcttgcatatcaattaacaaagaattataaaaaagtaagtacatagtaattaataataataaacaaacactaataataatagagaaatgtaaaactacaacaataataatcagacttctaagcccagtgacaattactttgtaaaaagaaataaaaaaagtccaatgacaattgaaaattattgacatattttaattgaaataagaatgcaagaaaaagagagtgtaaactggttttttgtgtgacatgtaacgacaaagcactaaagaatctaattagaatatatcatatctacgtttctatactaatagtatgatatatatactatatatattcacgcttattgccccttctcttccaaaaaaaataaaaatgaagttaatatatattcattttgggctgcatcatatttgatccatttgaatatcatattttgggctgcatcatatttgatccatttgataaagtaaaaggccaacattttatttgtcaacccactcaaaataatgactaattaatttggacttcagtgagtccaataaaacttttat

SEQ ID NO: 249872 - DNA, 1711 bp, Cannabis indica
ccctatttgtgaaatcccaagaaggtgtgactgggattactgacacatgctcaggaactcccaagaatttggaatctcaacatactttgattacatggtacagtaaactagcacgtagagtttatcatagttacgctcatgtatgttatttgaataataatgcagaaaatcaagactagggttattaacttaagttagccattaggtggtctagagttattactctataatatatgtgattattaatgcaatattatattatgtatgatgatataaagagttatgtagttaaggccttattataaatagatgtgtgagtataaaacgttggtctatgccatatagacataaatagatatgtgagcgtaatacgtgagtctatgcaatatagacataaatagtgtgggagcgtaacacgtaggactatgtcaaatagacaatagatgtagtggcatctataattaagtgatctttaattatagtgtatattgttatttatactatcttgctaggcttggctcatgggtgctctactgtgtattaaagggtaagttgtttgtgatcagccatgagtttgagggcttaacgctgtattgtacatgctaaggccaaactagaccacgagggttgggtctaccagaagaaatattttgtattctcaacttttgacgcttaggtcagcgtgtaaaaataacttgtaacattttgcaaaagtttttacaggattctgaaacaaaggtaatctcttggaatgtttataaaactaaataattacaagttatgtttttattctgtaattgatttaaagtttaaatattttccgctgtagctttattaatccctatttagcgggattagcttatgtttagccactatttgtggcatccctattattatggtgttacgattttgtatcagggcgccacaatttttaaacttcctgtagacccgctaaacatgtttaatcctcgtcagagacaagtttgactcgtggagcagtaagtattaagggtattaattatttactgctttctattgtaggcagcatatgagcatctagaaaatgaaattttatatgaaaatcatgattagtgtttaaattggaaaatgtatattctaaaaagagagaagtagaatgtatgagttagggttaaggcaataagtccgtaagtatgggtttagtgcctgactcgtcgaggtttttgattttagggctatttgaaagagagttgaccctccacaatcatctaaaccacaaggcgagcacgtagaaccttgtaatcaccaaacaaatccaccggaactgcttgcgtctccatagaatctgggggaataatgtagggggttaataatgctaatccacatatcgactgacagtacatgttccttgaaatttgaagcattatacttcgtcaagaagatgagttggttgatttaggcaaccgccccaggaagtaccagcagaataagtgttaccaccaactcatgttctagtggtgggtagcaaggatttattcggtcacatcgtgactgggtgtttgagtgttttgacaagttgcaatctctaacgtttctgagaggtattgatattattgagttagagaagtggatgggcattgttacccacattctggataacatggggagtgatgggaactgaatgagctaattgtgctgcattgatgtttcaagagcacgcttgcatctcgtg

SEQ ID NO: 249873 - DNA, 730 bp, Cannabis indica
acagatagagatgtatcggtgtatcccttttaagtccttttaagggggtgtattatagaattttcgaaagagatttttcaaattgatgacgaaaaaatatatatagttataatagcttaattaaaagatgtttaaccaaattaatgaaaaatatatatatatatatatatttatatataccttagcttggaatgtgaaaaaagaacaaaaatagcaactttaaaaaataaaaaaaataaaaaaataaaagttaccctctcacatcacatgcaaggatcactctatactaaactactcttggaaagtaataaaaacgcaccgttttgggtgacgttttggatcaatagtatatgtattcactctttttatatatgtaagatatcaaaataatgaattttttaggaatttttacatgaatttttcctaatataaataataaaaaaaaatacctccaagaattaggcaaaaaaaaaaagaattagtctttaaaacaaattgtaacctctttggttccatttttttttattatattacaatatataatttgaaacttgaagtcaaaattttcaacatacaccatcttcctacttgaactaatatgaggtggtactttccttccacttagtactgccataaaataattaacagtcccagacccagaacttgtactacttgactgactttaaagttctcttaacaaaaaaaaactaaagaaaaggacagacagaga

SEQ ID NO: 249874 - DNA, 705 bp, Cannabis indica
ggtgatgagtcaagtgattatgaagattatgaggtagatcccgagtatgcacaaagtgaagatgatttgaaggttgatgagagagctgagagtaatttgagaaggttagggaggacatatgtggatcttgacatagagaatggagtaaattttagtgatgacagtgagtacctgccaaagaataactcctccgacagtgagacaagtgaagaaaaggatgtgagaagttcaaatttacacaagccaaaataaaaatatgagaaagtgaagctatctgagttgccttagtttagaacatctattgacatggaaaaaccattgtttgagaagggtttaactttttcatcacctattgaatttagacaagcaatcagagaatatgcaataaagaatagaaaaagcatttggtttaaaaagaatgatcttcatagagttagggttcaatataaggctattggatgttcttgggtgtgttatgcttctaaagttgatgaaactcaaatatttgtcatcaaaacatgttttgatgttcacaagtgatctcaaaagtataaaaataggtatcatgaacatgctatattttattttgaataagaaaacatgctaacttatcctaattgaataatttattctttgatttctatggaataaattcaaccttatattttacatatcatatgattagcttttgaaaaattgatgtag

SEQ ID NO: 249875 - DNA, 649 bp, Cannabis indica
tcggccaaccacccagaaactttcgtctaattaaaacattcatctgatgcaattaacattcggccaaccacctagcaaccaccctttaaccatcgtctgattaaaactttcgtctaatgcaaccaccgcgcaaccacgcagcaaccaccctttaaccatcgtctgattaaaactttcgtctaatgcaaccacgcagcaaccaccctgcaactatcgtctgattgtgtaagtgatagtgtaagtggtattttggtaattaaaatcacataaaaaagtataaatattatatttaccatatggaagtatttttgtaaatgaagtgtcaatttatattttctatgtaataattctttttttattttgtcttaaaaatgttttacttttaatatttttaatattaacattctacatcaacctagagaattttatatatttgagtttctaattttttttttaacatgtgataaaaatataatttaaaattattatgattatttttatcaaatgcatattaaaaatttataaaactaaaaaatttatatagcataagtttttatataacaagtcaaattataacattatcattatcattataatagaatcttaacaactaacatcactttaatatttatattttaccaaacactct

SEQ ID NO: 249876 - DNA, 622 bp, Cannabis indica
cagtcaacgcagtagaaaactcaagcagaataaattttctaatcctaagcagaatatgttttttttcagcgttttttattttattttatcatttttttttggctataacagaagtggacttcaataattttgagcaagcaatttgggaggaaataaatagcagacgatatagtatgaatttcagaaatcaactgcaatactggaggcattcttcaaaggattttcaacattcttttattttcaatttcttctcttttctttagttagcatgtgtgatcttgcttccatgaacatgattgactaaacacttaattagggtttagatggatgttgtttacattgttttatgattttagtatatgatttattttccctcagtttctatgtattctatttcatttgtacttaatttcttttaatttcctgattactaattaactgtctatgattttgatacgagatctgaaaagtgagtgtcaattatgctatagtgagattgaactgaatttcgatataggagaagagtacctgtatagcttagataatttatagggtttttgtgtttaatgcttgttgctatgtttaatttatcacgagagtagaaaatttacatataattgag

SEQ ID NO: 249877 - DNA, 744 bp, Cannabis indica
atttaatgtaataatttttataaagagcattgttattggcgtcaatggtgtttaacaccttgaagacatgtctctttacgattagttagcgataattcataaaaattattatattaaattatgtgtcctgatacttaattgcaccaatagtgatatgatcctgaagaaaatattaggtaccactggtaccttttagcatttctcttttataaaatatcgctaactatggtggcctaatagcactgctttgttttaaacatggtaaaataatatattttggaaatgggaaactcattaaaaatgaatgtgatgagttgacatgatgtattgtgtgtcaaggtactaaaatgaagagtattgctattaagtactagtggtgtctagtactatttagaggtaacactttgtaaatagtttgcgatattctataatagttatcaaattaaattatgtcagccccgatacttaattacacgagtaacaatattaacctctaggtggtactttttagcatttctcttaaatttaagagtatttctattaggcatcaatggtgcctagcatacctaaaggtggcatcttgtaaatagtttgtaatattccataattgttattaaattaaattatgtgagacccgatacttaattacttcaatgacacttttagtggggtgctcttggtagtttggacattaattttgttttgtgttttttcaattttttgtatttaagggttcaatgtgag

SEQ ID NO: 249878 - DNA, 901 bp, Cannabis indica
ggcaggctttgcacaatgaagcttttagccgttctttactcaagaacattctttgcaaactctggaatttgagggaaaccgactgggatttaaaaatcaagaaaaccacggctacagcaatgttcttggttctcccgttcaaatcgaacatatctttgggaaggacactgggcaaatcgccatgggtgcttaatgctggttttctcattttggaaaggattcagggcataccgacggattgggaaacgactctatgcttattcactatctcaggccgaatactaaaccttccaattaaagccattactaaatcaaatatgtcgcgactggcaggaatggcaggggaaattattgacattcaagaagcggatgttaatcgaattgcagtcaatggttttttcaaattcaaagttcggaactccattcaatccaaactctttccaggctacctattcccccatgaaggacggcgaatttggctccaatttcaatatgatagactgccatatatgtgctttaattgtggaagaattggccatgaaatgcgccaatgtcaggaacctagagctacgggaattcacgaagaggaagaagtgagaccaatctttggttcttggcttaaatttgattcggtgggaaggatggaaacaattcacagcaatgaaccaagtcagtacactcatagagaacttcctggcaatcaaaagatccagtctctgaaagatgcagatcagagaacccaagagagaggggatgcaaataccaccaataactcagtacaaggtactatcaataaaatatctttcattaataattatgaacatgaagttctacatgttaataataccaatctaactgcttctttaatcgatctcctacaatactgaatgctatgaatgag

SEQ ID NO: 249879 - DNA, 753 bp, Cannabis indica
ctatgaatacgatatatcagttatggctaagcatacctcagccaaaatgggagtgtaagtagtaagtattgtgcatgaaagtttaatctttattggaaaccccactccaacgtcattttttatttgacagatcaacacattgttgcaaatagaaaataaagacaataatagcttcttccacagaacaagagtgaggtaatatatataaattaattgttacctcaatgaaaactatgagagctttaaaggaaggagcactatcagtgaggaagccaatagttgggatatcttgatcaataggctcttcagctccaaggtaagcaaatattggacctaatttaatattgttattccaatatttggaattcaccaaatacaaatagaaaataaagacaataatagcttcttccacagaataagagtgaggtaatttgaataaataccaaaaaagatagatatattacagaaaatctataacacccaattaatgattagattataaatgttcttactccaacatgggctaatagaaggctagcattcagggctcatgatgttgattcacaattgcaactatcaaagaatatttaccatataatatttgtttaaattgacaaagaaaaaattagtgctcatgataaataaatataggatctgcaagattttgcagatatgttaacaaaaaatttcagtcaataaatacaaccagagttaagagaccactaataacacctacaaacataagaaattttt

SEQ ID NO: 249880 - DNA, 1616 bp, Cannabis indica
agttggggtcttctccagcaagtacatatcagtctatctggctagcgaggtcgagtttcctggacatgtgttttatttcgcttttgcggattaaaatttatattttggatgtaattctgagtaggcaacttttgaaaaaattttaaatagggatccccgaagttaaaatttgtaatcttatgttttagtttatttatttaattaattaagttttaattaaatcatatgttttattaatttgttagtttattattataaactaatttgtagaaacatacacgtagcatctctacaagttagggtatttcaagagtgattaacaaaaagagtcgtattatcaactgcgtaatttatacaattactaatctttgttattcatcttgattcattagaaacatgttttagtttttcttcatttatttgtatgtgaaataaagaaaatacatgaattaattgtgatatgtataaagtattcttagtatttccaatattattattatcgtgatatagggagtgaactactataaattatcgcgtctttttagttacagtttattttcgataaccattgcaaattttcttaaatttaattaataaaaaattacgtcaacatttattattaaaaaactacaaagtttattaaaatttaaatatatgttttcataaaataatgtatatatttttatattaaaaaatttgtttgattttgttagtgaaaaataacattggtcaaaaataaaacaaattaaagtgataaatatacagcccaaacacataataatgacaaatttgtaaaccaaagcaaagcccaaagggatcagcccaaccccaccatgatacagcctcgccacgtggaggggagcttgtaataacgggtagtagttggtgaagaaaataacgggatatttagagcatcatattttggagaatgcttgatgagttgaaaagtttagataacaaaatatagggatactgtatcattggagataaaggaatgttattcttaaaatttatattaatgccacataatgatattgatgttatgttttttttttattacaaaaaaaattaaaaggtgcatctataatagtttaataaagaatagaaatatatataataatgtgtgagattataattatagcatttttaaaaaatattataccatttgaatatttttaaaaataaatgtaacaaaaataatgtaaaaaaaaaaatattaaatctcttaataacgtgaagacatgtgaagatacatagatcttcaaataatgctgaaggagatgctcttattacccctgtcagtttgactttaaaagcatatataataagaaatttaatcacaacattagtgttgtagttacatagaccactgtgtttgaaaaaagtaaatggtattatctatatatatatatatataggagaagtatgagtcggtgtacgttacactactaaattattactaaactacctattatttatctatttaccttaattcttctttaatttttaaatttttattatagtaaaattatttttatctatgttattttatttataataaaaaaacttaccgctatttcttttttttagttatagtaaatatactaacttactaa

SEQ ID NO: 249881 - DNA, 591 bp, Cannabis indica
agtaggattaggatttagggttcgatagatattattaaatttgaacgttactaggattaggatttaagagtctatagatattatattagaacttgagttagaagtaattaggatcaaattatctttatttattttctgaatactcaatttatctttattatgtagtaggttattaagatttcaacttaaatacattgcaaaaaaaaaaaaaaaaaaattccactcaaagatttccatatattatgaatcgaaaaaaaaggcaagttgatatttttcaataaattacattcgtcaaattctttgctaatgaaattgaatggtcgatgattatttttgttgcattgattggtcgataattaagtacatttaaaattgcaaaatatttctctttgctattattaatttttttaaaagccttttgttattataattcatcaaattcttaaaatcacaataatacttttttaattaattttctgtttttaaaattgaaaaaagtgaaaaatattttttaaaaacatgttttataaatctgctttcacttttcaatttttaattcaaaatcaaaattttaaaaattttaaaaacaaa

SEQ ID NO: 249882 - DNA, 764 bp, Cannabis indica
ggttggaattagttaaagattacgactttgagatcctgtatcaccctgggaaggccaatgtagtggtcgatgccctgagcaggaagggtctcaggcaggtagctagtatgagtcagatttcacctcggttggcaaaagacgtggtcagatctagcatcgagtttgttgtaggcaagcttcataacttaacgcagcaatctaatctattagaacggattaaagccgctcaattaactgatccagagttagtagaggtcagagaagagatattaactggtcaagcagggactttacagtgtcagatagtaggatgttgttgttcaaaaccagggtttgtcttcctagtaatgcagaactcagaaatgaaattctcgaagaggctcataccactccatattccctacatcctagcactaccaagatgtatcaagatcttaacccttacttttggtggagcgaaatgaagaagaatgtggtagaatttatatcgagatgctaaacttgtcagcagattaaggctgaacatcagagaccggcagggttgttacaacctttaaccctacctgagtggaaatgggaagatatcacgatggactttgtggttggattacctagagccacgggtttgtttgattctatatgggttgtagtagatcgattcacgaagtctgcacattttctaccagttaaaacaaccttttcattggatcagtatacagatttatacgtcaaggaaatagtaagactgcatggtgtaccaaagt

SEQ ID NO: 249883 - DNA, 728 bp, Cannabis indica
ccagtcgagccacttgtactggtcttgccactggccccctcagatgtctcacctgtaagacgcggaggtgggtaatagctaaattcaccagctcttactgacctaactcggcatactcgattccacaagtccttagtgaatcacctacgtagcccgagataattttcaccttcgattctattaacttggcctcaaatgtgacgttagaatcctggggagtcattgatttatgtggcttgggagatgttatttcaaagtccaagtcacctggttcaaaagcaattgtgactttgggtaaaaacaaaggtttagccaaaggaatagaggacacactgggaggttcaggccaagccgcttctcgcaagaaatggcatttgccttcagtgatttcttgcaagaagcgcctgtggcgactagcattgacttcttgatggattttattaagtgtccctaaccctttcgtcgtttaactctaattttgatgtgggttttgatatgttaggtttataagggacgacaattttggtagggaaccaaatttctaaatcttttggacgataaacttatgaaccagattgggacattgctgttagaaggaagcaatcccaatccctggaaagaattttatcaaaccagaacctgatcaattgaaggttctgtaaaacttacgtattgcctaaaacctaatatttacccagatacagttcagccctaaaagttactaaaac

SEQ ID NO: 249884 - DNA, 579 bp, Cannabis indica
acaaaaaatataaaatagcttacgtattacgagactccctctactcggagtcctcgtggggctcctccagattcgatgctaatggcccagcccaggggttgagaacttgctgaagaaactgtgggaacttgggctcaaatcatggcgtcaccctcctaaatgcacgctccataactacatcgcgcttctgcttatattcccacatagcgtgcaaatggccacacatgtcttcttgtcgttgatacatctgttgttgcacttgctcaaagtgagcgaagcgatctactggaggcttaatggctgaagtcgaagcggaaacaggagttatttttggagctcgtggtggaccaaaacttataagcccctgggggttcaatgctccctcctcgttccacatcgggacacccgcctctcgacatggagcggtgatagtggctggcagaaataattttcctttcccccgatgcgcacaatcagcaatctcttgggctaggacaacccttacatcgacatcccaccccatcttaatacagtacaacatccacgcgcgatctcagctgacagtggaatcatgtgagg

SEQ ID NO: 249885 - DNA, 1584 bp, Cannabis indica
aataatttccaacaacttcttctcttgctctggcttcttctccggctcttgcttctctcttgaatcttgagcgattttaagggatatgcctatacattcagccataaagttagtgagagcttagttggtaggtgatttcatattggctaagttttatttcccatttgagtaaccgaccagatgctttaagcttctatagtacttgtcgcaagggttggtcagtgtacacttttattggatgagcttggaagtaaggtcttagctttctcgaatctaggagcaagcagtatgttagttttttaataagtgagtatcgaattttagcatcaataagtcttttactgagatagtatattgggtgttgaacgccatttacttctctaatgagagccatacttacaacaaactctatgactgccaagtacacgcccaattctttattgtctagaggttttgacaagataggaggttgagctagttgtttcgttaacttttggatggcaacctaacactcctctatccattcgaaattcttatttcccctaagtatgttgaagaaagagacacacttgtctgtggactttgacacgaatctgcttagtgctgctatgtggcacttaagctctatacttcttctatttttgtgggcgacttcatgtccaaaagggcttgaatcttctttaggtttgcttctattccccgggctttcactatgaagcgaaagaactttcctgaacctactctgaaagaacacttaaggggattgagtttcatgttgtactcttagaggatcttgaaacattcatttaggtcctttatatgctcccaatctttctagacttgacgagcatgtcgtccacatagacttcaatggtttggctgatcaggtctttaaacagtttgtttactagtctttgataagtagcctctgtgttttttagcccaaaaggcataaatttgtacaactgttaagaaacttgtatgctcttagtctggtggatgcattttgatttgattataacatgagtaggtgtccatgaagcttaggatctcatgactagctgtagcatctactatgtcgggttctctgttgatctccccttaggcaccctatcccatgccttgttgggaactttaggcataaggggtaaattgatgtcacaactttcaagtcatacagggctggccagccaatcataacattgaatgtagatggcacatcaattactatgaaatgagccatcattgttcttgttttgggactttctccaattgtcaaagacaattggatgtatcccaagggcgcaaggccttggccaaagagcccatacattagttgtgcacagagtgctagatctatcagttggagccccatatatctcataggttgatttgaaaagtatatttgaagaggctccattgtcgatcatgcacctgacaactgtcatgttccctatcggtgcaattacgaccaaagggtcattatgaggaaatttgacatttgcagcatctccctttgtgaaggagttggcaggctcttcaagtgggccttcacaattggggtggttcatgtgagggggtgct

SEQ ID NO: 249886 - DNA, 631 bp, Cannabis indica
agatgctttcgaattacgatcttgaagataatgattggttaaagcgtatgtttgttgtaagagaaaaatgggctttggtatacggtagagaaacattttgtgcagagatgacaactactcaaaggtctgaaagtatgaataatgttataaaaaactatgttagcagcaagcatgatctattgcgattttttcaacattttgatagattgatagatgatcgtcgttatgaagagttacaagctgatttcaggacatctcaaagtaacttgtcattatcatttcctgctgaaatattaaaacatgcagcaaagatatacactccaacaatattcaaaatgtttcaagttgaggtatgtaatgcttatgattgtgctttatacatttgtgatgaaacgacaatatcaaaaaaatataaagtcactccttatagaaagtcagttgattatacagttgaatacttttctgataatggtgtagttgtatgcacttgtaagaaattcgagttcgcaggaattttatgtgcgcatgctttgaaagttctttctacaaataatatttcaaaaatacatgatcgttatgtattaaaaaggtggacaaagcatgcaaaggttggaatcaaagcaagctcatt

SEQ ID NO: 249887 - DNA, 528 bp, Cannabis indica
tccatctcccatatggaatcattgtatacaagtgtgggaggtggagctttggctttccccttcctttggattttacgactacccgaatggagcagttcccagagtagtctctaggacagggtcctgttgaagttcccaggcaaaggctgtagccggcacttcatcaatatttacctccccggtgagagcaatagttagattttcctcaatgaccactattggattttccttaagatccactgcttcaagatggaattcgtcgttgatatccatcactggaaaaacaaaaaggaaaggaaaaataaagaaattagacacccaatatccagatgactgtataggcatcgaggacgacctcccataaatttccaggagaggtccccaacagacccgtcactcccataaacccatcctcgccaggcaacttaaagcaacaagccaggaacttaggaaataaattaccagaacaagattcaagaaaattcctgaaatcaagctcatttggagtcctaataactccaaacaggc

SEQ ID NO: 249888 - DNA, 670 bp, Cannabis indica
ggcaacactgtcgcctgtaaatctacacaagctcaccatgcatggtttcaactttacatcctctaaccccatctttttcaatgtgtccttgtaaaggatgttgcctgaactcccattgtctaccaacacctttttcacccttttattggcgagttggactgttatgatgaggggatcaacatgtgggtattgtacgttttttgtatcttcctccaagaagataatcagaggttcatttgattttgcccttttcaatggctctggagcaaatgtcgattgcccattctttacttcatttatatacctcatttgggcattattaatattttttgcaaggtgcagtcctcccgagatgaccaggatatccttgcccttaacaagaggaggtttcattctctagttattcgggttattagggttgtcagcttggttaggctcgtttccttgatttttaacatactatctaaaatatccccgcgagatcaaactttctatctcgtctttcagttgtcgacattcctcaatagtatgccctatatctttgtggaatcggtagtattttgttgaatctcgtgttggaaatattttaccaggatctagatttactaacaagtatgtttcattaacatcctaatatgaattctaatataatgaaataaacacataaggg

SEQ ID NO: 249889 - DNA, 536 bp, Cannabis indica
tttattttttttccttttgtagaagtatatatatatatatatattaattatatattgagctcattctggggtgaaaaataaaaaattcaattctgaatcttgagggctctattcatcgtagtctgttctttaatttctttcattctttccttctgactataaattttatttctattcatgtttgactaaactgctattatagtttttctccgatgccacgtcaacttgctaccagcatttcatatgtggccctctatacattaacaaataattaattattagcggtgaattaaagtacattatataaatttctgcttcgtttttgccctccattaattcaattttttattgatatggcgattcaaatatgggacctcttgcctatgaccacaatatatatgagtacattttagtccttgttgtaatagaattataaaataccaactctatttacatgtcaaattcattaatattattcttgtgtacatatagtatgtaaattcattttgtaaattgttttaattaatttttttttt

SEQ ID NO: 249890 - DNA, 723 bp, Cannabis indica
attgaaagggtgaacatccagaacatacgtctatcaaaaaattaagttagtcctaacccttaagcgcactgattaacgtaagaaatgcatacaacataagtcacatttaaatcctctaatcaaggaaggaaaacaaaacatcatcctgctttcgtgaatgaaaagtgaggaaactttagaatatattatttttctttttttttttttttttgcattgtgaattttcctctcaattatggagaaattggttcaaagagttcaatctgcagtgggtatttcagcagcatacttatgagatttctaaagttatgggatgtggtacccatggccatctgttggttcatttggctggagcagaacaaaagaatttttggacatgcagagaagaattttcccatgttgcgagataaaagagtttaagggctcaatctttattttttcgctaagttaacaaggattgaattttttaatgtaaatttctgttgttcttgcataaaggtttcctgttataaactctcagtatgtgttctcgggcttactttttcttgtttttttttatttagtgaaagtattttgaaagacatgattaacaaattattttaagcattcaaaagaacagaaaaaatagagcaaaaatcctttttttgtttttttaagagagagagagagagagagagagagagagagagagagagagagagagagagagagagagagagagag

SEQ ID NO: 249891 - DNA, 393 bp, Cannabis indica
ttaattttcgataactttttttaaacaaatataatcaacttgaagacaattcttaacacgaacagatatagaatacataaatagttttgtataacacctttggatcagattattattaaattttattatgacaaaaactatgttcaaagttctatttgtactattttaaaaaatgcatagttcatcttaacagagggtttaaatgataacttttgtaaaatacagggtctaaaatagtatttacctttattattattattattattattagtagtagtagtagtattagtggtacttagcactttaaatatgtcgtcttgcgattcactgacaataaaaattattatattaaattatataagactaatgtttaattaaactaataacaatatt

SEQ ID NO: 249892 - DNA, 701 bp, Cannabis indica
tgaagttttccatttatgtattcccatgttattgttagagttattagtacatatagggaattttagcaattggatagatgtagaatgagttttgcctggataaaattctggtgtggacacctctcaacaaactactctttttcatatatttgaatggtaattagtaaatatagtccttatttatagccttttgttctctttcaagacctacaagtgcttttttttagttgaatgacatcaaagttagtttgaagaatgcaccaatgattttgatcaataagctttgttttatttttttcttaatcaactcattggactatccctaacactagtgagatcgaatctgctcatcaaattatgcagaagtcctatgttgtttgccgcttggagcgaaaaactgatgagaaagcgctgaagacaactagtcctgactatgaaacaggtcaaccaagtggtggaaacacgcctgatgatgattctctgttatcttgggtaagaaagaaaacattgctctccttttaaaacaaatgacaagagaatatgaacctgactatgtacgcttgtttatgtttcagaaattccagttccctagtgtcaaccaactgaatctcgaatcgttgttactaccacaaaactcacgaaatgacgattttgaatttctcactggaaaccaagactcatttggagatgttgaagatttt

SEQ ID NO: 249893 - DNA, 627 bp, Cannabis indica
tattattattattattaataaatgactcaaacaatagtcaacacaaccacaaatctttgttcttttagaagtccatgtcctttttttctttcttttttggaaagggggaaagatcatgatttaagttccaaaataacaatactatcaagtctcataaaaaaaatagatctaattgatactgtgcattcataaaaatacaaaaatgaatgattgatatattgtaccatactatttataaaaataaaaataatacaatacttagtaaactgtgagagagacgtgggctttacttttggtgaattaagattagaagacaaacttctttagataaacctcttagcaactgacgacaatgaagtttgtatcatcaatttatcttgttgaatattagtatgagacattcatcatttggataaataaatataactaaaaagaggatgagatagttggagaaaaaatcaacataggtgaaactctatcttgaatttctaaatacacaaatatttgccaaaattaattgaatgattactcatttcaatgtacatatagtataacaccaacaaaaaattaaagataatcatgaagactataatcttttttgccgtatggacatatgtattgtagaaa

SEQ ID NO: 249894 - DNA, 645 bp, Cannabis indica
aacaatacactcaaaatacattcaataatgaatctttgtactcatacagaaacttacgtaaaaatacataacacataaatcaatttcacttccatgacacaccaaacataattatttgtcactataattcacaccaacacattgcaagtacccatacgaatatttttaatgtaatatataaattcatacaaatactttttacatgaaattttactaaaacattatttattactaaatatacaattatgtaattatttatcaaaatcagaagttagcatatttcttaaccatttataaagatcataaaacatattcaatctgcttagaaatttgtgtgaaatactatccatgatttatgtataaatttattgttaaaaatgaataaaatcctaaataatgaacgaaaaatagcaaaacatctcaacatagtctcaaattaatttcagatactataattatatcttagcattatattaaaggttccccaaacagtaaacacaatttttttgctatttattctatttaaaaatctaattaaatagttaattagtcacaaataattataataaatacctatagaaacaaataaattataaaaacctttctatttcgtatcatagatagtaaatagcattacaaaaaata

SEQ ID NO: 249895 - DNA, 903 bp, Cannabis indica
gaatggagaaataagaaggagaattatctattttattgctgtcaacgatattacaatcatatttgagaattacatttgtgtaattttgtttattacagatcatagcagtaggaaaatgaaaatgagacttggactgagttgggggactcaatcttgaggcattggagaactatcctagcacgtataggccatctttaagggtacccttgagtagcaccctccttgttgctttgtcctttataaaacagcaggttttgtgaaattcaagatacacaggattgtcattagttaattgagaaatgctaacaagatttttggtaatagaggggacatgtaagatggaattcaacttaattggataagaattagaagaaggtagagtggctgaaccaatattagaaatttgtaatttcttaccattgcctacagcaagcccttcagcacccgtgtaggtggttgaggagtcaagattatctgtgccttaggacacatggttggttgctcttgtatcagcaaaccaccctaaatcatcaccaaaatctggtatgaacgatgtagaaaaggcctgtggatcatactcaaattcttgttcagcaacataagcctttggagaggaattatggacatttgtattggagggaggttttgagggcacccaattcttatcaaaccgataatggcaaactagtgcagtgtatccaaacgaagacagagttgacattgtggtattttgttggtgttaggacctcgaaagaatccacgaccaccagccttggatccctaaggtggtttgtacgcaccatttcttgaattcccaatggccatgttagcttgcatctgcatagtcagatctgtcaaggcactgtgatgttcaagacggctttcatgggagagcaagagagc

SEQ ID NO: 249896 - DNA, 985 bp, Cannabis indica
aaagaatcgattttgacagagtcaaaagatatatatataataataaataaatgataacaataatatatatatatacataaatgtatatataaaaaaaaaaaccctcaaagatctctctctctctctctctctctctctatctctctcttcagaccaaccataaagaaaaaaaaaacccacaaacccatcaccggcatagccctgacaaccattcttcggctaccgtctagccccacacactggaccattcgaatccccaagtgtgggagacctcacactactacaattttacgttttagtgacactatttagtgacatgcaattttgtgcatgtcactatagagttgagagtgatttttagtgacatgcacaattagactctaatcaatctttgttaatctcctacaatgtgggtcactaaatatttgaagtgtcactaaagagtaaaatctatttgtttttaatttttattaaatgaaaaatactgacttatagagacgtgccatgcgggactgcaaaaacatatcccaacatacatggggtgtcactaaagctaatttataaatttaaatattatttattttatttatttatattaaatatagcccacagcccaaggtgggctgaccataataataattaaattttattttttttctcaaacaatataaaatgttttttttaaagataaaatgcttaattacattgaaacaaaccctaacatttagctagaaaatagagaggtggctgttcatctttctccttatcgtccctcttcatctttctccctcttcgatcgtccctcttcttcttctcgttttgggccgcagctattcatctctcctccggcgaacgacaacttagctccacagatttctgatgtctgcgccagtatcctcaagctcatggactccaacctaattccctcagcctcttccagtgattcgaaggtcttctaattgaagatgaaggaggttgagaaagg

SEQ ID NO: 249897 - DNA, 556 bp, Cannabis indica
tattatactatatatgatataatctaaacctttaaacacataatatatattaatctcgtattaatgcataatatatcacatatcacaatttaatatttattatatttttgctaaataataaatatataacattcacccactaaattaaaatttctaacatctcattgtaacacttcacttaattaatcaaaacatttcatatatccctcactttagttgaataaatcaacacattctatagagactttagtgcataaagtaaagagcattttaacttaaactttaagctaattagaatttttaccccctaaactttaacatgtatcaaatcatgccccctgaacttttctggccgttaaaaattctccttaaactattgagattgttagatttaaggattttttttaatttcatttaatattactatttcagtgattgtttatgtactaaaccatgctccccaaactttgataactaccaaatcatgcccctcaaactttgacatatactaaatcatgcccctgaactttcatccatgttagaatttttttactaa

SEQ ID NO: 249898 - DNA, 901 bp, Cannabis indica
tttttctatagcttttattttttatgtgttgaattatcatagtgaggctgaaatatggttaatgaaaatctgcgttaataataattatccttttaattaagcaattatctaataatatatttaattaataattaaaagataattaactcaatttgatttaaaatattttaacttaataaactaattaaaataaattaatcatgggcctttataagtcaccctgcacgtgtaaaatgggcctacaggtgtgggccatattttaaggtcaaaaattaatttctcaattttgccacagataagagttattatttattctactaataaataataattgattaattctcattaatatcttatttcacaaagattaaaataaatattattttctgtaaaataatatatctctctatttaatattattttatataatattatatttcactatttgatataatattaatgatacaatttagccattattaattaaaataataatttcacaaattattatttttcccttaagaatttatttcccatagaaattaattctcactcaaaatccattcatcaaataaaatcttcccctatacactattgtataaaggtgactcggggatcatggactaatatttgaagctttaagaacttttatctaatttcattcaattttactgtttcaatgattgtttatgtactaaaccatgctccccagactttgatatcaaccaaattatgcctctcgaatattgatgtatgctaaatcatgtcccctgaactttcattcatgttagaatttttttactaaaattggacaaaagttcttaaatttaacaatctccatattgcagcgggaattttaacggccaaaaaagttcaggcggcatgatttggtacatgtcaa

SEQ ID NO: 249899 - DNA, 850 bp, Cannabis indica
atttcatttctacagaaagttgttgtatgtcctctctcacttggcaaggaatttgctggggtaaaaagctattaaagaaagggattagactaaaaattagagatggacataacatcttttgtgctactgatccatgggtgcctgggaattctattttcaccccagtatactacatgggttgtcctaataaccatgtctttgactatattacagctaacagagagtggaacttcgctaagttagcctctgatttttcaactgtggatgtggaacgaattctctctatgcctctttctaataatgcatcaccagattattggatttggcacttcacgggtggggaatataatgtgaaatctggatatcattttgcatgctccattgcagatgacactaatgtttatgtttccaacccaaatgtgtcatggtggaaatctttttggagccttaagttgccttctaaggttaaattttttgcatggaaggccatacagaactccctgcctgttgctgcagaattgtttaagaagaaatctctcacttcggcctcttgtagcttatgtctaaatgcttgggaatctgtgggacatttcatgtttgcttgcaagcatgcgagaaaagtttggaaacttgttggttttgctttcaataacaaagctgttgtatccatgaaaactgaggactttttgtttcagatatcaaaatgttatacaaaattcgagctggaaacgattttctgcacagtgtggtctatttggtctgatcgaaacagtgtccttcatggcaaatcagctcagtagccggctgtaattttggttaactcaaagctttcttcacagcttccaaactt

SEQ ID NO: 249900 - DNA, 512 bp, Cannabis indica
aatttcgtcataacacttttatatcaaattattattaaattttatttggataataaatcaactcaaatactatttagtactattttttaaaatacataatttaatttgttattttaccaaataaaaaatctaatcaataacttttataaaaacacaataatatttataaaaacacaacattcaaactaatatatattgtatatatataatatagaagttattcttaaataatagaggttattctattccattattttgttttacaacttcaactaatttttttggttcacatttcaataatgatcgtcacttctccaatagatgataaagtatattcaatgaccacgaaagaaaacaaaaatgtaatggagttatacatgcctaagtaaatgcatatgatgtcctctattttgtactggacgggagagttgcataagagacggatacataaccatgtgcacagagaccctattcatgacagcatacatgtcatttttctttttctttctttt

SEQ ID NO: 249901 - DNA, 1238 bp, Cannabis indica
gtaattgtgaataactatatgtcatggacttaacaaattttgtatatattaaaccataaacatgaaaaactacatgtaaacataaatgacttctaatcttttattgataacaaatcagatttgattgaaatgggttttatttagggcataaaatcccaacaactatttcttgttgatttttcctctttgcttttgatcttaatttcttggtatgtgttttcttgtctgcattgttttgttgcttgggtaatttatttttgaatgtttgaataattctagggctagaaaatttaaggttatacgattcgcatatttttgggttttatttgtgctctatttttccaagaattggggtattattatttataatcatgtcccaatttatctcagaacccttagattcagtttatcctcaattttctgccatagaatttaagcccaaaccttgaagacctcagaccatacttgaaataaatgatgcaaaaattaggacccacctcgttaaatctggtcagtaagaaacctctagttgttataagcgattcttacaagaggttattgagggtaggcatcattatttgcgagaagtagcttgggttgaaccctccgatttagttgatatccccttagcgaggtctatgtttttacctcctgtcactgttgctttttcaccaggtgacttagactttgagataatgactcagaaagctcgtaaatctaagaccccttaggatcccactgtcacctttgaagctgagttgatagaatctaaagtcaagtccattggaccttatgttggagacattttaaggtaatgcggcatcaggaatgaacaaggatgtcgcattaggtctattgcctagggggaattcagttgttatccccctgaacttctagttcgagatgaaggttgcagcaccagcgagcctttcaaaataggtgcttggagcctcaacacataagggttggagcagttcttcccctcaaagattatgttaaagatttatgtaattatctcggcgttactcattttcagttggcaccaaactcatacaggatccttgcctgtttaaagtctctctaccatatcttgaagtgggaatgtccaaccccattagagattctttgtttctagtctgtcaaggtttgtcctgcaagaaagcgcggagtaggaggcttttactaccttggaactcacactaatgaccataagatcattgtgaggttacccaacaaaa

SEQ ID NO: 249902 - DNA, 1783 bp, Cannabis indica
cctgtcagtaatatatactaaatccttaaattgcaataataaacatttattcaaacaaaataaaatacctatgtacgcattagaaaataattatcatatagacctcagcttgaaactctttgtagccttgagctgaagactcagaaagtattttgactgccacttgggcgtcgtttaagtagccatggaaaacagttccaaagcctccttttccaatgattttctcaaagttattggtaatgtcaatgatatcagcataattacattgatggtttcttggctgaaatgctgatgacccaattttgtttgttgagtggggaataatattgtgtgtttgcttcattcctactgttgttcctgctatcatataaatatatatttatatatctatatcagttagtacttaatgatatagatgataattggccagtgcaagcacatacatgataagtacctgttttatttcctttgataaatctccatccaataaagaatgcaactaagagaactaatagactagcaactgatgcgataactggaactatatattttttcttcttaactttttggcatgatagtgcagtacaaagatcacggtttcctgaaacactatagaacaaatattcataaattagttagaataaagtcatacactcctattagtccatacatcttatgtagaagttaatcttcatgagtttcaacatttgttttgtttgttgatcgatcaaacattcaacaacaacctattattaggaaatcttttaaataccagtccaactcatttcatttttaatgtaaaaaacagagtgcttgtacaatctagaaaaagaatctatagaaagaagctcctagtactgaaagctgaaattgaaaacttgggtgtaagggtttggggaagtgaatgagatctagagagatcctttccttgagagaagtacttgagagattcttgactgtaatacctgtaaatatgctatggattcaaaggagtagcttcattttatttatccgaactagtatataagtgcatgtttgacatcataactaaaaaaatactttttgaaaatgattaggcttgtttgaccttattttttgaaaacaattttcttaaaaacaaagtgacaaaagaaataaaaaaaattgagaacaacaaaatgttgttttttgttttgaaaaagagatacttgcagcataaatacttttcggtttcatacacttaaataccacttgtttgtttttcaacggattaaatacattaagttacaattctgttacttccgtcactactattatgttaaatcctattcaaacaagagatatttttttatgaatcaaagattttcattgcactaacaactgatttgtacaacctaaagcctcccatatgtatgatcatctatacataagaaaatacaataactcgaactaatctatgtctctatgatctacttgtttaggcataacacaagttatcctagtctagatgtgccatttagcatcctggattaacaaattaggactaacaatactaattgcgaaatctattattcctagcttgacatatttgatacaccaaggctactacagatgcaactaagaccatcttctggaatttactcctcttggatccatcaatccacctgacgaaaatcctgtaagacaacagcgtgtgcattccatcagagccaagattttagctgatggaggcattctcgagagataaacactcaaagaagagatgagtgatttttcaatatcattgttgcagagaatacaagtt

SEQ ID NO: 249903 - DNA, 885 bp, Cannabis indica
cgacagagcaccgaccacaccccaactgaagccacactaaaattaaactagaatataaaaatagagcatgctcaagagtttcagcttattctccacaccaagaacaacaaagaggtacccgaactttctgaaagataagttgtgttgctactggtaaagccaaatggaacataagccaaataaacattttcacctttggtggcaaattgagattccatactccattccaccagcaagtcaacctggatgaatctgcaacaccctccataacctagagcgaccaggccaatgagtagccactcttgacattataaaccccatctctatcgtagtgtcagcaccaaccatcttctgcctcacacctcgccaatggaatagatagaattatgtccacatcctttggcaaaaaaacttgttgaaactttcccacatcccaagtaccaaatagaagaataaattcatttacctggcagtcattattaatcctcttcatgataggctaaaaagacctcggacgcgagagccatgggtccttgaaagccttaacttgtgttccatctccaatagatctccgaagcccgcacttaagcaattccatttccttaatcaaactcgaccaaagatttgatgaaccaactttttctgtggcctcacggatagagcaatttggaaaatatttatatttcaaaatttgagcaagcaatgaatctggatatagaaataacctccaaacttgcttggccaaaagagcttgattaaaaaattaaaatctcaaaaaccaagcccacccatcgccttaggctgacatactgtttcccatttcacccaaagattcttcctttgatctccacatgaaccccactagaattgtcttataatatactt

SEQ ID NO: 249904 - DNA, 3635 bp, Cannabis indica
ctcgaggagaaaaatgaggaacagaaaagtcggaagcttgaatcccttttcccttgtcggtatgaacaatagtggatggctcattcaaagaagcctgagaaacagcacatagaagactctgaagaccactgaactgggaatcagaagtcactatttcctgagaggaaataggagacgtggaatgaatttggtgatcagtaggagccaaagtaagaggagaaacctgagaaccaagtaagcttgcttgaggaagaaactgattaacagcatcttgaagatcatgattttggcccaaggatcgaagattcatctcctcaaatggaatagagttagccaaatcgaaagggtcacgcttgaagtgtgatttgagaggagctctaatattctccttaaaaggcaaaacaggaggataatagccatcatcgcagcgttgcagaaaagagccacacttagaaaagatatgatcaaattttccacaaaaatatcaataattctgaaggccctcatatttaaacataagccatttggtcctaccaaggattcgaaagaacacctgcatcccccttcgaataggcttagagacatctaagagaacccgaatgcgcaggaaaggaccagaaatttccagcaaagtagttttatggatttcaatgagatctccaatatcatcaacaaccatttttgctaggagatctaaatccagaaggaatatagtggatttgcatccagaaaggaacaaacctaagttgttcaggttgaagaagatcaagaccttcagggttagcaaaaaccatcagacaatggtcaaaatgccatggctggttctcaataaccctacgtctgtctccatcacacccaaaatgagaaagaaagagaccagagtgatattcagtaaagttgacaggatatcttaaagtccaagcttccctcatagctttgtcaagccaatcaggtttgatacttttcagagaaaggatcttaacaactaaacagtacgactcggaagaaggaccagtacccaaagaaactccatcgaagttatgaataatagcttcctcttcattcaaagcaagatgactaggcgaaattctgctagaactcgccatgacacagaaggaaaagatttggcagacagaggaaaaaggacagacagatagagaaatacctagagaaacacttagcaaactaaacaatacataaaagaatatatatagaaaaagaaaatacttgtgaacagaaaacatctgagaaggaatggaagatgccaaatccatctccacattaatgagaaactagcgtgatccctcgatagaagaggtaataatcaccaaaatcctctgagttcttctactgacggcgcgttgagtagagagaaggaagaaaaacaaaagagatttaaataaggtctgtagaagtattaaatagaaatagatctttttgagattcactgaggtgcattaaatgcctaaacctaattagaaatgatgataaagaaacaaaactagagagggaaccaaaacgacatttacacatcatcacaaggaagaaggctggaaaaatccagaagaagagggaaaaaccctaggagagtattccagagctcactccattttagcaaatatgttgtactaaatgctggcacaatatttgctatgtggcaaatttgtattagtttttagcacaccattaaaacatatttttttgttaagtaagttatattatagttttatatcaatgtatatatgccgaaaattggaaacatcaaaggttttgatattttttcccaccttacagctgctcacaatgacgctgatttagaaatgattacatgtcttatgtggagtatttggtctgaacgaaataacaaaaattcatggtactaagcttaaaccagcagacctcatttgtaccttctctgcctctcatttggctcaatatcacaaggttacatcaaccaaagctgctgcaactgatgtggattcaaatagaagcaatggtcaagttcaacacccacctatacctgtgagatccctgtcggtatggcaaccaccggctgctggctgcttcaaattaaacttgaatgcagcttgtgataatgcaggagcaattattgggtttggagctctaatccaagatcatgctggcgctgtcattactggttttttaagcctttccgagggtgtttttctccaaaagaaatggaggttgcagcaattgtttcatagtgtgaaatgggcaattgagccttaactaccaatccattttatagagacaaattctcttttggtagccaatgtgattaataacatttcttctactagatttgtaacaccctttcatgatttggtagatgatatttgttatcttttatcctcttttcctagagcaaaggtatctcatgttaaaagagatgccaataaagcagctcatgctttagcaaaatttgctctttgattggatgaagatatttcttggttgggggaaattccctcccaatccactctcttgttattaatgactctcaattttaataataacagttttttctcaaaaaaaaaaaatcacgtattttcatttctattagatatgctttaagtttaacaatatttaaacttgtaaagtatatcaataccgatcttccttgaaatggccaactccatccttgcttgtaaaatgatatgatgtatttcatctttcttcaagccttgaaagcaaaaacctacgttgtcatatccagattcattcatcattattaagagcactaataactaattttttattttatctttcaaaatacatcatcgacaccttttttttttatgatctcatgttgagatttggatatttgagaaaatagttgcctaaatattttaactgaagacatgttagtttcaattgaatcataacaactcggccaagctgttatgacattactcgaaacctataaataggccagttgactctttagttggatgggaggttttgagacagaaattaagagaggatttgacttagaagagtgagtgtttatgaggattgtaaaagagttgtctcatgtgtttaattgagctctctcatggtgatgaatttccttaatggagctagtctcccaagatgaatcaagatcagtctatttgactgtttagtgtaatctgtacaagccattaaagttcaataaaacatcaaagcttctgacttccttctcctatggactaaacccaagtttacccaacttgtggtggaaccacgtatgtcattgtgttaagttttctcaattttgatttttgtttatttattcttgtttagttttgtgttcttgttgttggttagttcttgtttgatgctttcaagtatcaacaagtggtatctgagagctgggagaggtcctcgacaatttaagaatcaacattgaagatcaagatctcatcaagaatgttaagaacaaaatttaaggtggacaagtttactggtgcaaatgatttcgatctttggagaatcaagatgaaggcacttcttggttatcaaggagtttcaaaagccctggaagatgaagcactcaattccattgatgaaaaaaagaagaaaattgagatcgagtcaaaggctcatgacaccattgttggaaattattttac

SEQ ID NO: 249905 - DNA, 643 bp, Cannabis indica
tcacttgtatttaatcctctaagttcaaatttttttagcgataaaatctttcaaattactaaacagttagtaaatttattgtgccattcggttaagtgtcaccctgaactgtttatatgcacactcttatacatgtgccacttttatattagtacacataatattattagttcaaaattattttaaattaaataaaataacaaaaataaaaaataaaacataaaaaaaaaaaaaaacttaaaatttttttataagtttttaagtaataatattaagtgtaccaatacaaacgtgacacttgtacaagattgtacaaataaacaattcatattggtagttaactctaaaaaaatagatgacaccttaaacttaaatttgctatcaattcaataatttaaagggttttaccactaaaatttgagcttagaaaattaagtgcaagtgaaataatagtaatgagagtttagccataaaaaaaaactctttttaaaatggtacaaatagaatttcaagattaattttaaatatttttttaatataattaatttgaagataatttttaacacgaacagaaatatatattataataatacttttagattggattattattaaattttattttgacaaaaaaattagttta

SEQ ID NO: 249906 - DNA, 501 bp, Cannabis indica
caatcgcagtacaaatattcgcagaacctactataatattatggatgaatatttaaaatatttaatttttttctaagcaatggtaattaattaataacaaaagttaataaatgtatacatgtagctagctaaaagccaataaacactaaataattcagaatcttgcaattacgtcacaacttacaatataaagaaatactacaaaattaaatatttatttaatttttaactacttattagttatataatatatgagtacttagtaaatatctagttaaattagtaatttattactgactagttactaatgagttattagttattaaaataagtaactagttagtaataaaattacacatgaatagaaataaaaattattagtacctagtagcaactaactattagttactatatctaattctcaatgtgaaaattacatataataatggggttttgaaaatatttacttaaatatggcaattttaactttgaccactatta

SEQ ID NO: 249907 - DNA, 575 bp, Cannabis indica
tcacactatatcctttttcacattgttgttgcagtaagcatatatttgatagagaagagaagtgggaggaaaaagagttatatggtagaaaagtggaaataaaggaaaaaaaatagtgtttggcaagaaagaaaaataaagagaaaagaaaagtggatagaaaaaatttaagtggggcaccaaaaattttctaacaaaaagtaagagcttggctgatttaatcacatgtaatttggtttgggatattacatttctctaatttgaatatgtagaagtagcaaaaagtttatttttagatttcctatttaatgagaatcccacgttgatttcagcctctttaaatttaataaaatttatcataaattattcaaaaatatatatatatgataagaaatggtaacattttctcccactcacacaacaatagaaaggataaatatagtagaattacacaatctttaatttgctcatttaagcaattcatttgctttgttcaaccaaacaaagtaaacctcttcaagaaacataacaaagtgtacctgcaaagaacaaattaaccttaatatttcaatttc

SEQ ID NO: 249908 - DNA, 538 bp, Cannabis indica
caccttgctgtttctccagagagtctttaagggtccaaccattcttaataagatcaaacaaatcaggttcaagaaaccaatggttttcaatatgaaaagtggagtcatgcctgaatatcattggattgccatcaaagacaactttaatagccctatgatccgagccaagaaaaagaaaggtggtgaagggaagcagtgtggaaaagagtgttccacttgtgattaacaatggcccaatccaaacgttctaaggatgtgccatgtttccaagtgaaacgactgccagagaaaggtaaaggagaaagagagtatttgtagagaaagttctcgaaatgatgcatggcatgagggggaggcaaacaatggctgttacggtcattaaagccaagataatcattaaagtcaccaacaataatccacggtgccaaaggggcaacatcaaagagacgagataaaagagtccaagaattatgtttatcaacaatgtaaggagaaccataatagcaagacaaataaaaaatattattatttatagtaa

SEQ ID NO: 249909 - DNA, 750 bp, Cannabis indica
ggaatattatgatctttcaacttagactgaagattcataattttcaaaataaaatatctcactcctttgatttatcatactgaatggttgtcattgcatccataagatgtccagctcagcgttctcactagtagcatatagtttttctacaacattgaaaaattctttgacatttatagtattaggaaaacaactcaatagatgttcaagaattaaaattttcatagaaatgagattaagatgatttgacttttttcattgtgcatgaagagttttctaggcaacaatactgatatcagtatgattagtagatttttcttctcgcaagcataacttcaaatctgttatgcctaatgtaattttcacatctcgtttacatgcctcaaagttggagcgttcggaatttggattgaaacattaattgttgttcacagaaaggagaccgaaaaattaaaaaattaaaacttgatcaagatatatgagcaatataattagaaaatattgtagagtcaaatggtcattataaacttctctttagggtgagaatataacacacacatgatctcccttcatgaaattaacactacagaaaaaaatacatatcaattaagaatttattacctttggaaaaataaatttattaaaaaatatatattaattcaagccaaataataataataaatatatatttaaactattatttttgagcaaataattaaaacatacacatttaatattaactcacttcat

SEQ ID NO: 249910 - DNA, 721 bp, Cannabis indica
cgtcgtccagtgaagaagaagtcaagtgttttgcctaaaaaaatttcaacttcgacgacgagaagggaagaagaagtcaactttaagacagctgtgataaagctgtaatgcaactgttatatctgttgcgagccaactatacaacagttatatctgtttcgagccaactaacataaaactacaaaacaactaataattccacatatttaatacaaataatattacatcaatcgtgttttatctatccaggtctcgtatttgataattctgagccctgattttataattctataatattatagtagcaaaactactattcaactaacgtgtaacttaattgcaactacaaatgttaaatgtgaatatgtatctataagaaactatttatgtacttttttgtcattgatcgataatagtaatatgtggagaaacaactattaaacctctgtaaactaactttatatcaactaatttaatatattaataaaattaaatatgttaaaaaagtttcttataagagctttgtattatattgacgatatgaaacacttgcaaatatgataaaattcattgtatcgttatcaatttataataattgatatgtcaagtttcagagagttagaaaaatatttatgcaactataatgcaaatgttatgaaatattaaaaatcataacagtgtttctacgtacataactttatttacatgtctattcgtgatt

SEQ ID NO: 249911 - DNA, 794 bp, Cannabis indica
agatcctggtaaaataattaccaacacggtcttcaccaaaaattggccaagttaggcgaccctgtctcttggcctatggtggtctttgtcttcaccaactttccatccaaataaaccttttgtttctatgtacatttttcttgagatcgatgcagttggtgaaaggttttgtcattaagtcgttcattttttgaaactatttttcaatttggtgaatatgagattgggcttggcatttttaaatatggatgagattatgaagaagaagatatccagtttgaggttccttttggtaatcaaagtgtactacgatagcatcaaaactccaagttttttcgttgctgactttgtatccttaaattcttatttttataaattcataaaaatctattcttttcatgattatggtatgtatttacaatatttttattttaatctaagttgagatttttttttcatcgtacacaacattgttttctcctcttcttctaatccaatccatttatttttaatgagaacttccaatccaaatctagagagtttgtaaataatttggaagctatttatttattttatatttttttggtcagatttataaaaaacaaactagacaaccgaagccaagacaagactgtgcagattttgcgggattcattacaaaatatatcatcaaaaattaaaatttttaaattccatttcaaaaatatatatctaaaaaaaattaaacatacatttattgtatttaacatcacttaattaaaaaaaactaattatacgtccattgcacgtaacat

SEQ ID NO: 249912 - DNA, 550 bp, Cannabis indica
taaacaatcttttaaatattaataatctctttttaaattaaaaaaatcatcttcaccacatctctctaacaaacttttctcaggagaatattaataattttttttatttattttttaaaacagaaaaatactaataattctacattgatcatggttaatttagccgccgtcaatatgtgccattgatttgctgctttgattggctctatcggatcgtgtgttcgtggccattcttccatccccattcgaatcccaaatatcttgtatcctgtttttcaagactccaaaaagcgtcctaaatatctaattatgttttggtattctaggtacaatcaactcttatttaagaaatttcagtaccagtattagaccaatgatctacatctttgattggctctatcgctaatttgggtcgtgtatatatttagttttgaatgtgtgtgatgaatatttttctttgatttttgttcacgaattatatatttatggctatagacatcttttttgcattttgagtgggtgtaaaacatcacagaatattttttttctt

SEQ ID NO: 249913 - DNA, 592 bp, Cannabis indica
tggtaaaacatattccaacaagtctggcacaaagatgagggtgatcttcgtacagaagttggagcaagtcctgatcaattcggcgttcgcttccccaaaactcaccagggttcatctagaaaagacaacacacgagatgagtgtttggtcgggatatcgaacaataaacaggcaaatatgccaaccaggagtactcaacagatagaaaaggaagaaattcaaaaaataagtcaaaacccaaaagtttgaaatttttgggtttagggcaaagtttcatgaagctttgaataagcaaggtgaaagacagacaatgtgcgatcaaaaggccaacgtcatgaatcgtgaagtttcatagattattacaaagaaaatcgtgaagttctatacctagattttctacctatcttctacagcgagataaagaacgcatacatgaaacccagaaattaaacatgcaaagtaaaaaagaaagagatggaaaacttactcactgttttacgtctaagttcagtccaaacgaagatgctcggatgcttttggtaaaaatctcaaggcagacttgaagcaaaaacctcttttttgctctgagttt

SEQ ID NO: 249914 - DNA, 425 bp, Cannabis indica
gagactgaatccacgaaatctctactgaaacatgagcaagtgcttgatactctgattctgtactagatttcgaaactacaacttgtttctttgaagaccaagaaacaagtgtatctctaagaaatacacaataaccggctacacaccttcgatcatcaggacaacatgcccaatcggcatcagagtatcctgtgatggcgagtctatctgagtttttgatgtgtagtctatgatacacagtgccctgtaggtatttaagtaccctcttagcagcactccagtgagctgtagtgggggcttgaaggaactgacttaacttgttgacgacaaaagaaagatcatgtctagtgtgagtgaggtattgaagccctcctatgatgctcctatattcagtaggattctatagtagtgttgggttttatgcc

SEQ ID NO: 249915 - DNA, 1405 bp, Cannabis indica
tgcgtgagatactacttgattgcgtatacttgcgtagtaaccataaaattcgtaacaccagtcatgtataatcaaattatacacaacacatttactacatgtctatctacaatgtgatctgaatcaaaatcacacacactagagtatagtgtatagtaaactataattagtagtttcatattaaagacccatttactttaatacactacagatttgttttattcatattgtataatcttaattctcttgtacgaccttacaagattatatcatctccacattaataaagaatttttagatatttattaattatacttttattatcaatgtattcgttaattttataattacatttcatatattctataatataatgtccattaattacttgcttttagggcataaattccaacaggtcaacccttggggtagctagggctcacgctcgagaccctagcccaaaaagctcccctaatgtgatctttaaaaatattatatttgtatttttactattatttattaaaaaaatacaattattttcttaaagaaaagaccaaatttattgtttacaatattatatttaatatttttttaagaaaaaagatccaattatatatattttaaaataatatttcaaaaatcctcaaaaacaacaaaaagtttatgtttttaagaaatactattttttacggatttttttttcttacacgtcattatttttagattgttttggaaaagacgtcgattacacgttttcatattgcgaaaatataatataatattacagcaacatgaaaacaacattgttttccctctgaaaaacacacctccgtaaaaaaagtaaacaaaaaaaatccatgaaaacataaaaaaaacgtacaattttaggtattttgtataaattttccaaaaacaaaaacataatttcttcaaaccccaattaaattttgtgataattacataagcccgcttccaattgatgactgactattatataagtgttgacctaagcccctgtgctatttacaaaaaaaattatatttttacgttcagagatttttttttatatttttacggtgttctataagacaacgcgaaaacaacaagaaaattacataaaagtaacagaaaaataacatccaaacaacatcaaaacaacaataaaaattaacaagagtacaatataaaaaatacatcaaaagactgtattttatgtaaataaaacttatgaaaaatcgtaaaaaaatatttaaaaattctgtacaactgtaattttctattttttattttttattttttatgtattatgaaataatcccttaaatttttgaccaaagcctccaattaacttggatttcatatataatcataataaataaaaaaaaaaaaaaaaaaccaaaacaac

SEQ ID NO: 249916 - DNA, 705 bp, Cannabis indica
tagtttgcatagtatacatcgacatcgagaggcccacaaattttataagggtggcccgacccgctttggacaatttttttgccttccacctctacagtttttttgagaggttgtctagaatgtaattaaaatcaacatccttttgtctggatctgaaaaggggaaggcccaagtatttaatgttaccatctgggcaaccaattcccagctcttccttgataaatcttctagttccgtcggaagtacttttactaaagaaaatggacgatttaagcttattgacttgttggctagactaagagcaaaatttctcaagacaattccagtagcctctagcctcagatatcgaggccctaaccactaggattaggtcatctgcaaataaaatatgagacagtatcgggcgccctctactaagtctaatgccctttatatcaccccttcccaaagcgtcctccaacaacttggacagaatttttgcggcctaaatgaacaagtacggggatagaggatcctcctaacgaaaaccacatttcggcacaatcctcccaaccttcccaccattaacataaacgtttagagtagttgtggaaatgcactagagatccaattacagaacttagatggagcaccatagcaggtcaagacatggttcacaaatgtccagctcagtttatcatagtctttcaacagatcgatcttaat

SEQ ID NO: 249917 - DNA, 918 bp, Cannabis indica
tttccaaagaaaagctctgcaaactgcttcaatgcctttaattattttctttggtaagataagaattttgctccagtatgcttgaatcgccattagaaccgaattgatcaaaactgttctccctgcaaaggacaagttcctcgaactccaacacctaattctggcagtcatcttctctatcagtatctcacattctcttcctgatattctctttgcattgataggtattcccaagtaagtaaaaggcaaattctgtcttcaaaaaccagaaagttttagcagcctctcaactatagcttgctccatgttactgcaatatattgcagtttttgtgggacttggttgtaatcctgaggtgacagaaaagagtttcagagcttgtagcaagtacctgacacttctctcatcccctttgctgaataatattacatcatctgcaaaagcaaggtggttcaacttgagctctaaacatctatcatgaaaacaaaagtcatccttgtccacaactttccccagcagtttagatagatactccattcctattacaaatagtaatggagatataagatcgccttgtcttaagcctcttttagattcaaagaaaccatggagagttccattgaacatcagagagaacctaggtgttgagatacattgcatgatcagtttgacaaagggagttggaatttgaagtccatgaagcatctcctctataaattgccactccactgtatcatatgccttttgaatatccaacttaatcacacatcctggtttgttggatttcctaccataatccctgatcaaatcttggccaatcataatattgtgcccaataaatctgcctttaatgaagcccttgtgaatgagaaataatatcagataaacaatttgattctagaactcaaaagcttagtt

SEQ ID NO: 249918 - DNA, 1529 bp, Cannabis indica
ataaatcttgtccttttgggtttcaatcataatattgggtttgaatctgaataaattattttttaggtttgaagaaagtgaagaataagtcaatcgcaatattagttttaaatgataataaataacttgtgtgtggttagataacttttcttattgtctttgggatacttgggtttaattggtttgagatttaaaaattgtgttttttaaaagagtgtttgggaaacaataatttgaattttgtatgtgaaaagttgtttttaaaaatgtgattgattgtagtgtaattttgtgtttttgagttttaaaaaattagattcgtgattggttgggaatctcaaattaaaaaagtaaaagagtatttaaagagttttagattcaatgaattgaaaacatagaaaatataaaattgttgttttcattttttagcttaaaactcaaaatcatattcaaatttagtttttgaaaatgctaaacctatcaagtatttttatgtggacccacattttaaattttcaaaaacataaaattattttcaaatctcaaaccaatcaaagttttttttatttttgtaatcaaacattctatttttgttcaatgatatattcattgttttcaaaataataataataataataattataataaattaacatcgttaatggtaacgtttaaaaaagatcgttaaataaaaaattattgttacataatcaattttaatatataaagaatataaagatatataagagcgcgcataaaaaaaatgattttatttattttaaaaaatagggcttaatgaaaaatggaagcttaccactctttctcatatactttcactactctgtctcacctatatacttttactacccacttacattcaattacagagaaaattgatgatcaatgtagttgagtaaatactaacaggtatgttttactttaattttgttatgatataatttctttctctctctctgagtatttattattggcataggtattgattgtatggctaataattaaattcatttgggaagctgtgattatgtttagactcgagagtttggggtagctattaggttaggtactgattttttagcataaatattgattgcttggttaacgaattcatttagtaagctataatagaaaaggtaaaactctaatgagattacgagatatatgcttctatgataattagttgttttattcattattcttttggtgtaattttgttattgtcaaatctaggaaatatctcatagacatgatctaaaaaattttaaaataattgatgtttattatttaagattacatattttaaaaaatatataaaagtgattagagtagcaatattgcttttttattttttttattcatttgattggtccttgttatataacattatggagcaagtaacaatttctgttgttctcataacatcatatttaaaattattccatacatgagaacttaaatgatgaaaagttaacagcaatttaaccaacttatcacattaggctttaaac

SEQ ID NO: 249919 - DNA, 552 bp, Cannabis indica
aacttttaccaaaactgaaattgttgctacaggtggagaaaagtttaatgtgagccagttgtaccgaagcatgctggaccaggatgaattctcggctgctggagcaatttggagcagattaaatatgccaaaacatgctttttaactttggcaagttactcaatccaagcttcttacaagggatatgttgtgccgattgaacatccctatcccaaacaaaaattgtgtggtttgtgacattgaaactgagagccaccaccacatctttttcagctacatcttttcccaacaggtgctgtctttgctttttaattggctggggtttgatggttggtcaaggaacattgatagctggactgtttggttgggcaatacaaggtcgagcatcttagacaatgtgagaacgcttatgttggcagcaatggtttaccacttatggggcaaccaaaacacttgcttattttctttttattctaactttatcagttttatagtgaacaaaattaaaagtgatgtgaaatataggctcttgttgatcaaagataggaaagg

SEQ ID NO: 249920 - DNA, 763 bp, Cannabis indica
attggatatccgattttattggatcggttgtgattggatcggtcggttgggattggatcggatgactttctgcacactcctaattttcaaggagaaattccaaaatctgttggggatcttcggtcattgattgttctaaatctatcaaataacaattttgaaggccacatttcactatcagttgagaatttgaaacaacttgaatcattggatctctccaacaacaagctctttggaagaatccctcaagaattagcaactctcacatttcttgcatatctcaaccttagtaataaccaacttactgggatgataccacgtgacacacaaatgagtacatttctaaaatcttcattttatggaaatgttgaattatgtggtttgccattgttaaaggaatgtgaagacagtaatgatgtcacaccaagtacgactcttgatgatcatgaatctcaatttgagagtggttttggttggaatttggaaagcagtagctatagcatatgcatgtggatttcttggtggaatgtttggtgaatatctcttcatttccaaaaaataaaaaaggtatcataaaaatttattgtagagacctattattttttttacggtttttaaaattttatttagataaaatataatttttggatgtatttttatgttgtacttttattattttgttgttgattttttgttatttgtatattattttttttattgttttgatgttatttttctgttattttcatttattttttttgtt

SEQ ID NO: 249921 - DNA, 619 bp, Cannabis indica
tattaaagtaatatacttgaatattttttatttttcgttctttatgcaccaccccatataagaataatatactacactattaaagtaatatattgacatgtgaatataccgcaatataaaaatctattagaaattaagatcccttcagtgcaacttaaaaaagataaaaaaaataactaaataaacacaatgaaaccattaaaattttactcaacatgataatttatagcttatttgattaaaaaaaaaaacaagacacatttactaattgtaagatgcgagatcgcatggacacgatagaatgagaagatagtaaaaagctaggattaattatccaatgttataattgtaattttatcattaaatttttattcaaatggttattttgctaaatgtttataaaaaggaacattactaacttaatctctaaatttagggtcattttatatctcaacctataataattaaagagacaagacttggtatctgtcaaaattcaggtgaaaaactccaaatcagcctttagatatttacgctaggcaaagaaatttgttatcgtttatatagatttattatcgggagaagttgaaaaatattcactttttttatacattaatta

SEQ ID NO: 249922 - DNA, 522 bp, Cannabis indica
gtttgagccatgtgtaatgctctgcatctcagttggaacaatagtagcaatatctctattgatattactgtttacaaggttacaagaatcttcacaaatttcaaagagattacgataagaagtttctctctctagtttagactctaccttatactatcacaatttttattcaaacaaatctggtctgatactcactcgggttacaaagatttacagccgctactacaaatttgagctctagaggcaatttttaaggtctttcaatgttggttttaacgaaattcgctaccgacgctgattcaggtagcatgtagggttgaaaacaacagatgctaaatgttaccctatggcgtcagttattatcaaagaacagacgtcatatgtacactatggcgtcggttatatacaaataactgatgctatatgcacatataaccgacgttataggcttaaaaattgacgccaactcaataataattatttttttcagttaaaaacttattataaatcaagaaatttaat

SEQ ID NO: 249923 - DNA, 977 bp, Cannabis indica
cttcaaaaatctttacgatttctcggagcaaataatgtttgggtattttagagtgatatcgatttcagagcaaataatatttagggtgttacagagtgatatcgtgtgattcggagccgaacaattcgtatatagaggttttttatcctgggaacattgtggttgatagactgtcgtccacactttgggcagagtcacaaaacgtcttaaagagagcgacatagtctgcgaacgcagattatgtcgccctctttatgatgttttgcgactctggccaggataaaacaaccactgtatacgaattgctttgcaccgaatgatatccctctgtaacaccccaaaaattatttgctataagaaatcattgaagaaaatatattttctgtgttgaagagatgtgttccgccattaataggatacgacttaaatagatgttaagttgatcaaaaagaacaatcaaaaaaatgtttcttcgatcatgagtcatcaacaattaaaacggatcacgtttactgtttttccataaaacgtgttaaaaaataaatataaatatatttattttataaaataacttttttctgtaaaaaaatatggataccacacaaccagctcgatcaaacgacgatgcgcattgtggtttggtatgtgagtcttcacccataagcacaaaaatgggtgacccttagggctcaaatccaaatctcatagttgcaccttatatacactttcaataaagtattcctatcccatatgggtatgggtgtcaatacactaacacacatttcactactcatatattttgtaaaattttaactagagttccaaccattcaagtgaaaaataataattacatataggaattgagaaattaattaggatcatgaaatttgaatcagtactcacttgtacttgtaagttgtagtaatatatactactcttttggtctctctttatatatatcaaaatcaaaataactt

SEQ ID NO: 249924 - DNA, 701 bp, Cannabis indica
tcgtagttgggatgatgacattatccaggatctttttgaggaaagagatcaggccctcatttattctattcagctaagcgatactactgtggaggataaatggtactggaagtatgagaaccatggagggtatacggttaatagtgcatacaagcacatgcaggttttgaagggggcttggcctactgatcagtcaacaaatatctggcgtgttctctggaatattaaggtgcctcctaaggtctgcaattttttgtggagagcggtttcgggatgtttgcctacttgtgttaaattgcagcagagacatattccagtgaatgcaacctgtcccgtctgcaatgaggattatgaaacaatttttcatgtccttgtcacttgtcccatagctttatcatgttggaacagatctcgggtggatgtgggaaatgttgctgatggtgatatagacttttataactggtttctgctggctgttaaccgtggtagagatgctgaattggaggaattggcaatgatagcttgggcaatatggaaggctcgtaatgaagttgtatggcagcaaaagagttctaatgcagcaagtatagtagcatcagcaagatcaaaccttgatcaatttaagtttgctcaggacagaagaggttactctctctctcatctggtggtagatgggaataaatctgagcaatggtctaaac

SEQ ID NO: 249925 - DNA, 580 bp, Cannabis indica
ttccttgaagcttttgagtccgccagaaatgcgatgcccagttggtacgtaaggttcatcgcttcaagccgtttgctagtgtcaaggagagggatgtgttcaggcaatggaacttgacaatacttcaagctggtggatttggaactgcttgagttttgggatgtgttggtctggctcgaggtggaggcttggggagctttgtgggcactagtgttgctcatggtagcattgagaagagttgtgtaagagggagttatggtgtcgtgttggtgtgggactggggtgcgggttcgcaagtcaactgggttccattgtccatcttcttgggtaggggtaaaggtccagatttgtaaagaccaactggttgggtttggccgtgagtgatggctttgttaggggaattataagtgggaaatggaggcataattttaggggggccaacacagactgtactgccagggttacttgtcatgaaagcggctaccggggggtagcaaaagcaagctgtttagagcacaacatagtgttagtggtaacctaactttaccagagatggtttgatatcatacctgagctccgg

SEQ ID NO: 249926 - DNA, 1783 bp, Cannabis indica
tttattggtatattttaaactattttttcaaaaattgcaccaatcagagatcgccacgtggcaatttacttaatacttaacatccaggtatctataaaagttccagaattataatttaagtattattactaccaaaagttaaatttagatatttatttataactagaaattaaatttgagtatttatgccgaaattgcattaatatttagagcattttggaccctgtgttttgtaaaagttaccgattggatcctctattttgttaaatgacaaaatggatcctgtatttttcaaaacgataaaaataagactctgagtttaatttttgacaactttttttaatataaccaatttgaagacaattcctagtacgaacagatacagaaaatgtaaacaattttgttatagcacttttagatcagattataattaaattttattatgaccagaaatcaatttagggtcatatttgtaccattttaaaaaaaatacagaatctattttttcatttaacaaaacaaatagtccaattaataatttttataaaatacagattctaaaatagtatttatcctaatatttataatatattttagtacaatttttgtcaacttgttttattattgtctatggtcggtcgtacgtgaaggagggcaaattagtaattttccaaatataacacataaagctatgagattgagaggagagaaagaaaagaaaacaaacacatggaccacccatttcaatgtccaacttttcccaatgatatatatatgttatatattctgtatttgccttccctaaaaatgaaaaaccaattaaaagtcttttgttttttttctttcttcattattcttctcaattctcatcttcccatgttaatgtctatggtcggtcgtacgtggcagcctcccattggctttcaaatatagaagaaaagaatcttgaccattaagtatcactttttgattactactcttaagtgctcaccatcacttttggattggaatttggaatcatcccaatagatttgtgtttgtgaattaaaaataccactaaaggagaatcactataatgcaagtaaagctatacacataacaaagtacccaatcccttttctatctctatatatcatttctttttctttctttcttaaaagttttctttgatatattttcttagtgcatagggaataaattgtttaattaattagtaagaattttttacaccctatatatgtttatgtatgcatgaaaattttctcattttggaaagtgtaagattagattaattgtgaaactagttaatacacttaaaaaagataatgaaaatgctagtctctatggctataagtgtggaaaccaaataatatattgataacaatttttggaagcaaactttctttcctttggcatacattattttatttattcggcactattagtgtcgccctataaatagtttgtgatattctataataattattatcaagcccggaaatagacaggttagacttgtgtctagagtttacctagccgaggaactcaaattttatcttcccttataaaattatacttttttttattgattttgaaaaatacaatattttttttctaaataagggcataaaaatatattttttcctatgacccaataaattttagaattggtcctaataattacgttaattatttggtattattttaattttttttaaaataaacacgttacttaattcaactaatgacaatataatattttagagagagtattacacactgt

SEQ ID NO: 249927 - DNA, 1231 bp, Cannabis indica
ctcctgatttgagccaatctaccctagatctctgctgccaatgttgctcctcattggctaaaagctcatccaaaatagcttcagccgagtgtactgacttagaaaaatctgaactagaattagaacaattatttaattgttgcactctggtttgaccctccttaatgtcatgtttcatgtgaccaaactttccattatgtcattgctataagttctttgcacaacaatgaatgcttgctgttaactcagagaaaatgtccacatccacatgctcatttgtattccaactagcagaaattatgtctgaactttatgcattatttaaccaaagcctttcaaaccgaaatcttgatcttcgttttttgatatccaactagtttgaaaagttaagctcgactaaaagtgctctatggtctcaaccataataacctaggtgagtaactgtaggatgaacgaaattatatatccatatggagttcacaaaacaccaatcaagcctttctttaagagcaacatggtttttctactcccagaccatgtaaaatcatcaccattaaaaggcaattcgttcaagcaacattgatttagagtagttcgaaaagcactcatgtgattatcttgtctcaaagggcccccattcttgtgagtatgtgagaaaatttcattaagatcacctagcaacatccatggatcaagtgtagagacatcatgtaaacgttttattagagtccaagtgtgctttttatttttcagtttccaaaaagccataaacaacagataggtgccattggggtccatcactacacagtaagtaacaatcaaaataatttatattcattgaaagaagtattacatccacattatccttccataacaacatgattccacccttcaaagcagtcccaggaacctctaagccattattgaaatttaaagactgcttaaagcaagtaagagaattaacagtaacttttacctccataagaaacaaaacatgaggagtttgctctttaacaagcaaacgcagacgacagaatgcactcgggttccccaaactctgtgcattctaactaatgatttccatggcgagtcgcgagagttactgagcaatcaccacggagttgtcttgatcatcagttgaatctacaccacagtagaaatagagtgattttgatcagcttcttctgacaaggaaaaagccatttcgaattggttggctctacatctttta

SEQ ID NO: 249928 - DNA, 940 bp, Cannabis indica
agaggcagctaagggcttaagaaagggaagaaggtcgtgattgacccagcagttcgagcccacaatatactgactctccaagagaggttcgtgagggacgatttccagtcaaagattgacaagactcctgctgaggagcaattgcctcgctctccggagttagcttcgcagttcatcgccatgttctcaaaggcttttgttactggatccaaggaggttgaaatcgcgaagagacacaacattcagcttcaagaagacattaagaagctgaaacaagatgcgacttctaaggacaaagagctcgaggaacttcgcaaggccaaggagcaagtcgagctcaaggctaagaatgctcagacgaaaatcgtggagatgtctcgcgatttggaggtcgagaaggagaatgggaagaagcagtatgaccaggcggtctcggactacatatacaccactctctccaaaattccagacttcgacttttcaatcctcggagcagaagccgctgaaatggctgaggctttttcgcgccatgtcgcccacacaaactcaaggcggtggagggaatcttcccgaggaggctgaggttgcggatgctaaagaagtcaagaatgaagccgtcagcaaagtcggggatggatctgctcctactgctccaaatgcttgacttttcccttaatatttgcttgcgttaaactctatcttttttttttggtttatgcggtacaagggtactcgcaccttgtacttagacgaatttacatttatgtttattttgaacgacatttatatcctcgcggggatatctatttatagtattttccgcagtacacgggtactcgtggttattatctataatatttttgattgtgatatttattataacttggtgcaataagtagaaaatttcagaaacttgaaaaatttcaaacttgaaaaaatt

SEQ ID NO: 249929 - DNA, 1606 bp, Cannabis indica
tgccatatagccatcctttcccagtcttttcctcttcaaataatgcataatctcaaaggataccataatattatctcatatcaatcgtccaggtaagaacgcactttgagtttcagagataacatcaggtaacacaagtttcaacctattagccaacactttcgaaatgattttatacagaacattacaaagtgaaataggtcgaagatcattcataatctcagcatttttcttcttaggaataagaacaatgctagtctcatttaaggaagggggaagaaaacctgaagcaaaaaaagacctcaccaacatccgaaaatcatcacccacaaccggccatagcttctgaaagaaagccggagtcatcccatcaggtcctagagacttgtcagggtgcatttgaaacaaagctttctttatttcttcatcaaaaagaggctcaagtagcattgaattttgatcatgtgacaccatgcctgaacccgtagcaatactttcaaggccctccacaacacccggcgtaaacaattgttcaaaataaccagtaatcaaactcggtagaccaccatcccaagtttcccaatcccccgtaggaggccgaagcttcttaatggaattattccgtcgacgagaagaagccattgcatggaaatattttgaattctgatcaccttctctcaaccaaagctgcttgcttcgttgtttccagaaaatttccttttgcaataaaacattattaaattcaatctcggcttccttgtacttgtctactgccatagggtcacgacccttcttccatttgcgcaactcagccttgcacttgcttaatctctcttgaaaattaccggaatagtctttaccccaagtaagtaacacttcaccacaaacttttattttttccaaaacatgactagtcgtattcgaactccaaacatcctcaataatccgataacaaagaggctccttgagccaagaattttcaaatctaaaattctttgctttgaccgcccctaaaggaggagagagaacaaggtgaattggacaatgatcagaagttgtaacttcaagattcaaaagtttgaccgagggaaataagttaagccaagtttggctcactaaagctctatcaattgtcacttctcaattctcaattctcactaaagttcgatatttttgtttttatcattagagattattattataattattgaagatttttttaaggaaaaaaagggaataagaaaataaaaaaaataaaaattaagaagagaatatatgaaggtacttgaagctattttagttgattttttctaaattcaaaaatctaaaaaatcatgtaaatgaaatacaaaaatatctattatcatttgctgcaacaatatgcgtaatgagatattaaataacaatattaaaaacctcaaagaaattataataaatgataatttatatttatatatgtctatatagatttattgagttgaaattatatttatatacttataattttgatattatatttcactgaaaattaattaaattataactattctaaataaaatgaataataaatatttattttttaataaaaattattttatttataaat

SEQ ID NO: 249930 - DNA, 1251 bp, Cannabis indica
aatcaccaccttcctgaaacacggtagcccattgtcaagctagtattatcttgtatatgtaactggagtatgtacttgtaccacactcatgaattttaagatatataggtgccaaagttagcaaaagataactcaaatttcttaggttgatacttacctcgtcaaaattatgaaaggtggtatcggaggttcttcaatcaccagttgcagaggataattattagcatgcaaacttaccaggtgacaagataatttgctcaattcctgcttaacctctgtcagctcaacaagtaagtctttcaacatcttgcaatttgtcaccaaagatgcttgtaactcaacaataatgtcatctacgaaacagttgtatatatgttgagagttatgagaataccaaggatcttcctcttgacaatatttctactcatataattatagtcgtgctcacgcttccaattataattatcatatttattggaccaaacattctatttttttggtattcgcattcttgtacaaagaataatattggaaagtttccttcctgtttctaaattctggtttgataaaataaataatacctttaatagcactaggatttccattgtttaatgaagctagatataatggatacaaatattcaaattagcgatgatcttcttcatttattttttttaatgagtatgaagttagtctttaaagtcaatctttcttaaacagaataatctcaatttttacaactttcaccattacacaattgttcttgacagcttggaagtgaagatcgaggaagaagacaaggaaatctacttcttgaattccttgccagctcaatatgactagttaactgtccctaaaatattgaggaaaggtttcaagaagcaactcaaaggcttaatactcaagaggaagagatcaacagaagggacatcatccactcaaaggaagaggaagaagtctgagtgtcaaggaaagtgaggtctcaatctagggatcctagaaccaatagtaaatgctatcactgtggaaaaataggtcatatcaaaaaaaaattgttatgaactgaagggaaattgccaagagggtaaagaattgacaatcaaaataataaagaacaagaaacaatagccaattatggagagcattgtgaagatagagaggtgttcataagacagtctgcaacaaaagcattggtcacaaatgaagtgcctcagaagaatgagtggatcattgattcaggatgcatgtacc

SEQ ID NO: 249931 - DNA, 491 bp, Cannabis indica
taactgctaccaactacatttggtagctaaacttttgttgctaaaaagttggtttcttgtagtgattgtcgaagaacccacggggatccaagaacaaggtcggaagctccaggacgaacaacaaaacctgaagtcggcagaggctaggggaaccttgggactggcaagatgaaagcaacgctaggatcggtggctgaaaacagctcaagatctcttaggagaggtgttattagatctattgattagggactaaataacacaaatattgctacttcggtagatgatattttttcgaaaatgtaaaatattattatactattctgcaagatatgtatattaattttcataatatattcttaattatgaacacagtgtattaaaatattaagtttggacttcagaactatgaccacgatataaataatgagccatgtgagtatcaatgcaatcaattagtcgaaattccagcttcattatagagtcaaactttc

SEQ ID NO: 249932 - DNA, 616 bp, Cannabis indica
tatattcataacaaaatagtgataataccttttaaaaaaaggaaattaccatataatttaggtggcatcctaaaaaaatatcaataatatttcataacaattttataaatttataattacgctgttgctaggaatgatgatgtggtacactctataacatttcctatattttctttgttttctcattttttttctatattatttcatttttatatttaacaataataatacaacatttaaatcaaaacaataatggccctctttgagctatcaaacagtcaaacttccttctctcgcgtgagaccaacagtagcatatatattttatactcatgttctccaaaggtatacaagttgaaaagccaaagctattaattaataataaaacttatattatgaatattaatattaattacagtaaatgtttttactttaattttttgtcgttacatttttgcatgtatatatatagtatacatactataggctatcttcattctcatgattatcatatccttctcttgcactttatactatttttttttttaatatccctcttaagctttttcaaatctttattttgattatgatattcatctctacatcatcttacttaa

SEQ ID NO: 249933 - DNA, 374 bp, Cannabis indica
cttgcagtatccctctaatggccggttcagcaacttgatgtttctaatgcatctcttaatgggacactcaattaaactgtttacatgcaacaacctcctggctttgtggatcctacaaaacctactcatgtttgtctcctacacaaggccctctatagcctcaaacaagccccacgtgcatggaatgacaagctcaaacaaacactctgccagaaaggattttctccttcaaagtcttgacaactctctctttgttcatggatctggttctgaaatgatctatctattagtttatgtcgatgacatactaattacaggacctaatcatgtgctcataaacaagttaaatcactgatctcaacactgaattttct

SEQ ID NO: 249934 - DNA, 645 bp, Cannabis indica
agtattaaactagtttataaaatcacagatgtggcgtccctataagttagggcgttacaacttctttccatcctagtttggaggggtcgaaggccaatcttattacggtgggaggagctcgggtgtgggatgatgaaattcttaaggatttgtgcaatgcttatgaccgacagttaattaagagtatcatgttgaatgataatcttggatcaaattattggtattggtttaaagatatttcaagggtttattcagtgaagagtgcttacaagcttctctaagttcttcatggtaggtggtcagaagataataattcaagcatttcgagggcataaaggaaactcaaaattcctcctaaggttaaagacttactctggagggcatgttatgggtgtttaccatcactaatctagttgaaaggtcagcatgttgatgcggtcgttatttgctcggtgtgccaaggtatgcatgaatcaatcctccacattttgattgagtgtcctttagccaaagcttgttggtagcgggttgatagcactatttgcaacctttcggctatagattttttcaagatggttttattaattgtccataagatttctgatgactttgatttgtcatgctcgttaatttattggtctcttt

SEQ ID NO: 249935 - DNA, 1034 bp, Cannabis indica
atacatgttagacttctttttttactaaaattagataaaagtccttaaattcaacaatctcaataattcagggggcatttttaacgaacttaaaagttcaggggcatgatttgatacatgccaaaacatgccaaaattcgaagagcaaaaatcctaattagccttcttttttttgcttcaaaaacttcaaaagaacttcaataagctaaaaaaaaaaatactgatgagtacatgcggattcacctccaactatcaaagctccagaaatataatgttagttttatagtactaaattaagcatgcagttgaagatttcttagtgattatcattgtactatatgcctaagatcaccatatgtatatatattaagctgaaagtaaaaagataaaaataatatttacctcttgaagcctatcagggtatcctagattcttttcgtatattgtattctcggaacggtgctgacaaaactcacaccttgatctttcagatctttcaccacatacaaggactagtgtgagcaagtaggatattagtgtatacaaagattttgtattctcaacacatgagcaagagcaatcttattgtagtgatagagagaaaaagatttactagttaatcctttttgaacttttacaaaaattaaatataaatttttatatttcaaaaactatatagaattttgtatatgcggtatattaaataaatctaataaagttttattcaattaattatttaagttcaaattcttttattaaatcacatttaattatttgaataaataatttaattgaattcaattatagatatttatattttataaccgattgaggaaatctcctaatcacttgagagaatatctcaactactttttaaatttaaatatttatcttttaaattaattaattagctccaaaagacaaaattattgtggacatgtgcatgcaatgtgtttagacatagtgcatgtggcgccttcctctgtcttaattgagacaagggatgtgtcctttgtcctgacaatttttatctt

SEQ ID NO: 249936 - DNA, 1205 bp, Cannabis indica
cagctagcatttgattcgataaaatcactaagcactccattacttcatgggaacagttgtcacaatattttaagaaacaattctcgccttcgagagataggagacccgatgcatcctccctgacgagcgtaaaacaataacctgatgaatctctaaaggcctttttgagtcattttaacacagttgtagccaagattaagaatttgaatgataacatctaattaactgccttgtaggctgtgataaaactagggagagaactctgggaagatatacaaaggtatccagaaaggacaataattgagttcaacgacagagcacttatatacatccaaaaggagcagacctgtttagaactcaaattgctaaagagcagctcgaagaataaaccaagcctgagcaatatgggagcaagcattgtaagaactagcataaacgagagcaaagataatgagtgctatggaaagagaaaggatgaatccaaggagtcatctaaagataaaaatatatagaagaaacaggaaaagtatgtcccaatttattctgtttatactgagttaaatgaagctcatgaaaatatatttctcgcaaacaaaaatagggccacttttcaaaaaccaatcccaagagaaatgcgaggaataaacgagatcagaacaagtattgctcattccataaggatatcgatccaaccaacaaccataatccaaatcaaaacatccagccaccaccagttaattaatggcgaggatatcttggtaatctctagaggtacccacctcgcaggaacaagcaatacttcccagaagcgatatgcttaccaagtaaaaatcagtcctcgacttttgtgtctgagacgttgaagcgcataaaaattgaagagcctcctattattttcctagaggatgatgcatcaaatgtccaattcccacacattgacccacttgtaataattgttcaacttgaaaataaagaatcaaatgagccttggttaataatgggagttcagtacatatcttgtacaaagagaccctaaggaagatgggattagaaaaggtttcctaaaatcatgcatggtaaacttgtgtggtttcacatgggatagtgttgcaagtttaggaacaacagaaatccctttgacaatgggagactcgcctttttcaataactcagatgcaagaggttttggtagtagatcttcgctct

SEQ ID NO: 249937 - DNA, 1132 bp, Cannabis indica
tgaacatgaagttaatagagtggttgcggtttctggtttcagcaagagtagtttgactttcaaatatctggggattatggtatgtgcaaggcgaattccagcttcggaatgtgagatcattattgaaaagatcgtgcagagaataagagtttggagctctcgaaatctatcgtatgcatgtcgagcagtgctagttaactcaatgcttatgtccatccattcgtattgggctcaattgatgattattccaaagaaagttcttcagagagtcaatacaatctatagaagctttctttggaaaggtttagccgaggctaatggtctaggactagtggcatgagatgaaatttgcagaccaaaaaagctaggggtttgggtttcaggagagttcaagagtggaaggaagctgcgatagggaaatatgtctgggcaattgaaacaaaacaagattccttataggtcaaatgggtacatgcagtttacttggaacaaaagaagtggaaggattacgaagcacctacaacaagtagctagtattggaaacaagtggtgaaagtgaaagagaaactcaaggcaatccccactattgattactccaagcagagctatcggatcaaagaagtttatgaggtattatgcccaactattcagatacaaccttagcaaggaggtgtttggaacaggctttcaattccgaaacacaggtacattttgtggcttactgtcattgatagattgaggctaaagaaagactatttagattcaagatggtccaggatgaaaattgtgtcatgtgtggctcacacagagaaagtaaagaccatgtgttttttgattgccatgtgagtgatggatgtttaaaagcaatcaaatagtggttggaatggggagcaaaaaatataacggtggataggctaatgaaaaggctaaccaaaagagagcaaattccaacgacaagtatatgcggctagttgctgcaacattatattagatttggccatgcagaaatgaggttctctggaatctaaaagtgtacacaatataagcaatggtcaaaaagattaaaagggatgtaaagtataggattagaggaatattgcctaataaaatttcaaagatagacagggattgg

SEQ ID NO: 249938 - DNA, 840 bp, Cannabis indica
tcgagcctttctttgagagtgttgacggttgttcgtttctttgcccaagtgaagcaatcaccttgaaaaggaggatcagagaggtggcagtaatcaagagcagaacgaaaggcagtcatttgtgattcacttcgtaaggtaccccctgatttattctgatttcccaaaatctcattaaaatcgccaataacaaaccatggttgcataggcgccacatccgaaaggcgacggagaagtgtccatgaatcagatctattctgtacagtaggagatccataaaaagcagagaagtgaaattgtggaccagcaatagaagtcatgtagcaatcaaaaaaacaagagccaaaattattaagtttcacatcaatgtcatccttccataaaagcatgagtcctccacttaaaccaatacgaggaacttccaatccatgactgaaattcaatgagtgacgaaaacgaggtaaagaattattgttgagccgagtctccataagaaagagaacatggggagattgctgagaaacaagcaatctaagatgtcgaaacgcattcgggttccccaatccccgcgcgttccagcttaggattttcataatcctttgcgggattgcaaagcaatctccgcagagtcgtcagagtcaccatcagaatccttgggaaacaaagaaacattttggtttgagcagtctccttttgacgaggaaggaaaagcagcagcagcagtgttttggtttcggcatcgcttgagcatttgtctcatggaaggagcatcagtatgccttttgaaaagtctgttaggatgtacattttcttgaccaacttctgaattgcagcagtttg

SEQ ID NO: 249939 - DNA, 2214 bp, Cannabis indica
ttaattaagttttactcttgtttggagcaattgtacgctttttatatcttttattttgtagatttaaaatagaagaaacattgaaaatattaaagaaatatgaaaagaaaatggtcaaataaattaattctcagggcaacagcacctacaaattaattcgagaaaaaaaatctagaatatacgatgtgagtggagcttttgaggtgaagaaaatataaaatttggaggagcgcctcaacattaaaaactcacgctaaggcatgaaagacttaaaatttgtcagagaaggtcgtattggaccaaggcatgggcgtgcctaggcataaattcacagaatgctcactgcccaaataaatgggtgtcatgcctaggcatgaaaatcccatgcctaggctcgtgtctaagaattactgaggcgtgtggctttgcatacacgggccgcacataggatctacatgtcgcggccgcccttagagagcaaaatcaattgcaaaggctttttcaacgtggttttcaacatttttttttctctattttcttcttccattctgaattaatatgtatgaatttgctacaatgaacaagagtagctaaacagtttattcggatttagatggatattatttagcatcgatttatggttttaatttgatttaatttttttcccaatttctatgtatattttattcgtacttaattattattaattgtctgatcactaattaaatgtttataattttgatacgaaatctgagaagtgagtgttaattatgttatagtgaaatacaactaaattttgatatagaacgagagtacctatatggttgagatagcttatagggtttctgtatttgatgccttttacatgtttaatttatcacgagagtagaaaatttgcatgtaattaagatttatatatctatgaaaacgataaattacttgagtaaacctgctataacatagaattcggtaataaaaattaaatcatgttaaaccataattgatagatacaactaaaatcgaaaactctaacctttaattttctagttttaattttctcttaaatttgatatagccaaatagaagcaaagatttaattttaaaatacttaactacagtctttgtgggatcgaccacactctttgtgagtctattacttgtttacgttacgtatacttgcgtgttgaaaattccacaacaagtttttgacaccgttgcgggggattgttaattaatattaataaaaattaaattttgttctaatttatttttttcttttaaatttattactagttctagttgtttcaaatttttctcttttctcaggaacaatttgtttatgcgacgtcaatgagcaactgtcagattacctatttaccatgaaattgagaagacttgctgactaaagagaaggaggaaaagattggaaaaagttataatatggatagaacaagaagtagctatggctgacaatgccaatgttggcaacaatggtaataatggaggtgttgtagaagaccaggctaatggtcgcaattaaaatgaccgtagcctgaaggactatttgctgcctaacttaacaggggccagatcatgtataaagccaccagctgttgatgctaacaattttgagatcaagccgaccatattgtagttggtccaatccacagtccagtttggggggctgccaacagaagacccaaacatgcatctcactaactttaaagagctttgtgagacatttaaggtgaatggaattagtgacgatgccatcagactaaggctgttcccattctcattaagggatcgaggcaagagttggttggtatcttttccacctaattctatcaacacttggaaggaattaaccctgaaatgcctttccaagttctttcctcctactaagattgtcaagttaagatctgaaataaacaacttcatctaacaagataatgaacctctttatgaagcttgggagaggttcaaagacttaattagaatgtgccctaatcatgggattgaaaagtggatgcaaatgcacaacttctacaatggattgcttggtactacccaaaaactcatagatgtcacagctggtggggcttttatgagaaaaaagtagaatgaggcttataaactacttgaagagatggccatgaacaatgaacaatggttaatagaaagaagtcaatcgaaagaagttgcaggtatgca

SEQ ID NO: 249940 - DNA, 770 bp, Cannabis indica
tattgggcaccacttttgcccagctacttttataggtgtcgtcccgcaattggttagcaatattttctaaaaaaattattttttaaaagtttttcttatatgatatcgaggagagtgctaaacagtaggcacaatggtgccttttagaaataatgtcattaagagtgatagttaatgaatgctcttgaataataaaaataataaaaattttcattgcaagagtttcatttattaataggaagagcactttgtccatgtcatgggatgtgaagcatataccacagaaaatactccttaagtccatattttgacaataacaacaccacgctcatccaatactaagtaaacaaagtgctttaaaataaggtaaaagaaacatgtatatagaggatataaaataaacagcatgcctaaaataataataatatataataattaaaataataataatatatatagtatctaattttttttttttttaatttgacaggttttgaaaacggggaatttgttttacatatgggacatggtttgcacttaaaagcttggcagttgctgggaagacattcaatactagtgaaactatttgtagagctgttgattttttacttggaacacaaagagaggatggtggttggggtgaaagttatatttcatgcctaagtaaggtaataaaaatattaatcaagtaaaataaaattaattaatagaatattatataataacttggtaacgttgttgttgtaggaatatgtatctcttgatgaaga

SEQ ID NO: 249941 - DNA, 979 bp, Cannabis indica
aaatgagatcacatctattttttaagttatatatttaagcaatagttgtaacttgtacatctaggtgatgcctgtgaattatgctggtagtatttgataatttgtaaaacagctgatagagtaaaatagttgtgatttgttttagctaggtgagagtttgtaatatgttttgtgactaatgtaggatgatgatgatggtagtaaggtgataacttgatagtgggttgtgtatatagaagagaatagtttggcttagaagggtattgtatagaaagtagtaagttttattgatagtttggatgttagttataatttggaactcttgatgggtatttatagttgctagccttcaagtatttaaggctagaattgtttgctcaaaggggtcattcggtatgcaggtttcatttcatgggaatatgtttagcattgtttggtgggtgatgaagggaatcataaacttaggaaagcaacaataatgtgtttggttgtgcacagtaatattttgatgatgaatatgcttggaaatataaagattaatttgttaggttaggctgacataggaatagaatgtgtaattaacttttttttttttttactaataatgagttttttttttttttacattttttttgaaagaaacttgtgcttcattaagatggagaagaaagaaacaaagcagcaagttacaaggaaggtagagaaccattccaaactaactcattatctaatccaagacctagcttagctactttatgagcaatcacattgtattctctatgaacatgacaaatagctagccttggactgaaggataacaagttcttaatgttacttaatatatcatccaaaatactattattccaattacaagaactaagtttatcaacaatcgatttgcaatcagccataagcacatccacaggtagtttaatcagttgagcccactggatggcctgatatatggccttggcttcag

SEQ ID NO: 249942 - DNA, 621 bp, Cannabis indica
gaaaaatactcccaaaggcctgcatgtggtaatccaaacctccagaaaggaaggtttgaccaaacctcagaggaataaaaatcttctgtctacaaaactctctatctcctctctgtccctctacatacaaatgaggacacgtattaattttttttagggtaaatagtggcataagtactcaaagttttgggtttgtaagcggcataaacccagtgagtttttttttagcggcataagtatacccaatgtttataaaactgtaattttcttcgagttttatcagtacagactctgttattgtcttaaacaggacacatataagacttaaattctagattatttggtctggacgaaaatatgtagtatcagttacttctaagtttttttttaataaatttaaaacggagcatgtactgacgaaatagagaaaaactacagttttaacaaacattgggtacttatgccactaaaaaatcattggatttatactgcttacaaactcaaaactttaggtacttatgccgctatttacgcttttttttataaactcatgtgatgattaaaagacgaaactttgattaaccacatctacactctgttattttttactttaccaattca

SEQ ID NO: 249943 - DNA, 756 bp, Cannabis indica
gatccaccatgaatctgtcaactcaaattaattaataaattgaaaaatattatttacatataattatataggaatatgattttatcccataattgtactttcacgaaatgtattctgtaatgtaccaccgtacgagggagttatttctttacataatgattcgatcctcacagacacacacctaatacgttttatatgcccttgagatagctggtttttacactttgatatgttacaattatatattcggcgtttgacataattaatcaaaatatagtaccataaaatctcggtccattttagtcaaaataaattggaaattatgtcaccaaatgagacaaactagagtgacatctaaaatataatttaataaattataaaatttgaacgattaattttgccaaaacaaattaagcaaaattatatttttcatgacgaaaaatattttttgcaattaaatcttctctattatcaatttacttgcacttaatctttcaagtttaaattttaatagtaaaatcctccaaattaaagaaacattagcaaatttaaagtgttattaatttttcccaattaaacttgaattggttaatatatacttttgtacaaatgacacgtttagattaatacatttaatattattattaaaaattatataaaaaaattgtaatatatttttattttttgaatattttatttaattttaaaataattgtcgaaataattttttaataataatattagaaatttttacat

SEQ ID NO: 249944 - DNA, 1834 bp, Cannabis indica
tagtgtgtaagactgtgaagaatccaacacttgaaggagaattgggctcaaatcttgataatactctgtgagagaaaggaacaagggttagaatctgagtgggaggagacatattattccgatgtaatcaatgtaaggtttcttaactttatatgtgtttaaattctattattttagagaattcatatttaggatgttaatcaacatacttattagtaaatctacatcctggtaaaatatatcccaataaggcattatcttctagcacgccatatcaagttcttcaccttcggaggaattttaaacttccaaaaattgtcccagaatctagtaaaagcattatcaaccgaatccaccttccatgaattttctgtaatagtttatatgcacttttaactgaatataatcctaaagcttcatggatccaagtcattatgtcatagccatatgcaatattcagtggaatttctaatataagcttcttatccctatcctcaaataagtctttcaagatttcaacatctcgattcccgccttcatcagtcattagattgcaccctttaacatgaaccaaaccaggatgtgtcgaaacaacaaaaggttgttcttcacaaggcagccaaggttcatgaagagcatcaatctcttagccattgccaacacaccaacacacacctttgccaaccagcacatgagcttcaaataaactacgctacacaaagcttgggttatttcccaactgagtcgtgagataggagccattaggatatttctagccttgaacacctttgccactaacgagtttggatgagaaattaaccttcatccttggttgcctaaaaggaataaattgaagtccctcaaatgatgaaagcccattccacccttagtcttgtgaagacaaagacggtcccaagaaaaccaatggattccattcttagaattattagagccttgccaccaaaacttagtcataactttttccatatcacttgttatctccaaaggcagtaagaaaatgctcattgcgtaacttgggagggattgagccactgttttaatcaaaaaataatttcctacccgagacaggaactttgtttcccaaccttgaattctcttacgaacccgttccttgagaaagcctaacactgtagatttgtttctactcaaagtacttggcaaaccaaggtacaaactgccttctcccataatagacataccaagcatgttgctaatattattacgagtagcaagatcggtatttgtgctaaaaaaatcaaagattttgagtaattaaccttctgccagacgcaacttcaaacttgatcaaaatctcttgtactctggtagcctccaacatagttgctttacaataaagataactgtcatctgcgaaaagcatgtgagaaatatgaggagctccattagcaaccttacaactgtgtattaagccaccattctcgtaacgatgaagtaaggtcgagaggcccttagcacaaaggataaaaagatacatagataggggatccccttgtctaatacctcgagagggaataatcggacccatctcccgattcccatgaaccactgtgtaacaagccgaggttacacatttcatcaaaaagcaagtccaccactcctcaaaccccaatttcttgagcatggcttccaaaaagacccactcaattctatcataagctttgctcatgtccaattttaaagccatgaagccttcttttccttttctttttctcttcaggtaatgtaatacctcaaatgaaatcaagatgttatccgagatgagcctccccagaatgaaagcactatgtgtatc

SEQ ID NO: 249945 - DNA, 569 bp, Cannabis indica
cattgtataatttaacacaacctaatacaattcaatgccaaacacagtattgtattaaaattatacaatccaatccaatacaatacaacccaatacattacaatacaatacaatacggcgtaccaaacgacccctaaatggtctatcaaatcttggatgacgttgataaattaacaatatattaaataataaagacattagaaacgggctaaaaagtatagaggcacaacagttttgaggacaaaaatcttaattgcctaacattaattttggtgaaaatatgcttgaaaatggttacaatactcggacatcaataaccctcaagctaaccatcttgccatcttgatataagagccttgtatctcatgggacataaaaaaaaatagcactcaacatcaccatcaaaatgatcacattgctagaaaaaaataataacatggcaattagccattagtaaacgaaacatactttaaattataagaaatgtactaaagcttactagaccagcttcactgttacctcagcaaatctgaagagccatagaattttttttattgagcagtataaca

SEQ ID NO: 249946 - DNA, 836 bp, Cannabis indica
ttggaattcaaaagagatttagcccacaaaaattcagtccagagattgatagtaccaacctaaccttaaaattcaaataacttagccgcaatatagaagcaattatatcacataccacaaaggttaccgtatagtcttgcaaatattacagatctcagactatactttgaatgtcaaattgaaaattcaatgttcgagacataaattggttgctatggtattcaatcttcaatgataaaattgctttgccacttacattttactatattgaaagactcgttaacttaatcgataacggctgtatagcatgtgttaaaaggtggaatcaatttgcgcaaacagcctccctacaatgccaaaagtgttcatcgacaagatgttacagaaattgagaacatgagcaccatcaagatacacaaacttgaaccaaagaaatgactaaaccttataagcaatattttagtaggaaatatcagaaaaataattgagaaacctaaccataaacttcttagaagaaatcaaattcttctataaaaagagaaagtaagataatcacaaaggcatcgtgaaattgagatactcaccaatatgatcaaaatttgcatctacagtgagccttcgttcaacataaaaacttgaaaatattttcaaatatcactctaaaagtagtacggaactcaacagtctgaaaacttaagtgtgcgctacaagccaaaattcatgtccaaaactggaagaataacaaataaatctctaacttaaactatggtttgcaatgatatgaagttatgaaaggcagcagacatctcattcccagcctgtaggagcagtttcgg

SEQ ID NO: 249947 - DNA, 912 bp, Cannabis indica
ttattatgatgaattattatgaattcattatttattcacttaatttttttaattattaaatttatttattatttttaattattatgaattagttttttatttaaattaattttttaaaattatttaaaattatgaaacttttcaactgaataattaatatatcatatattttttccattttcaataaattaaaatgacttttatgatgaattatttaattattcatatttttagaaatcataaattatttttacaatcatttatttatgataaggaaacttttagaaatattatattaatttgtatctcacttctcacattttcttcaatatcaagacttataatatgacaagttaattaataactattcatcatattaatttaaatataaatttcttacttattaaattgttaaattatgtaatcgtaaaaatattaatctaaaaaaatttaaattatttacttaagttttaatagttcaatttttattaaattaaaaatgaagttcaaaattaatttgtaatttatttttaattttctactacaatttgggcaacatagtatagtataaactgttgattgaatataaatatcacctttattacacagtttgtattctaatttctaattatagtcccaccactataggacgaaacccaaatcaaataaacataaaataaacccaaatcaaaacctaattcaaaaggaaaaaaatataaaatttattttatagatttaaataatataaattcattactcacattctaaaggattgaacttctttatacaaaatcggtcgtcttctgcagcctattgaaagactccatagtcaactcttgccatccaaacaagtgagagtgattattgtgatagagacgaaaatagaaaataaaaagtgtagggatttttggg

SEQ ID NO: 249948 - DNA, 538 bp, Cannabis indica
ctatcatattaattcttacctaattgatttgtccaatttttaataagaaaaaggtcatattagtatattagaacccaaaaaatactaaatctcccaaagtaatataggtaggtttcgtattttaatatagtatcataaattataaatcatggaatcccataagatctgcatgtcataatgtactgagtttgatttgacattacactgtgaaatccttgacgtacgttatttaaagtataggaaataccccatttaacgtcagtaattacacagtgggacgtacatagaaaattaaaaagtgataagacatcctctggtttattaagtgagtaattagattttaaaattagagtaaatagtacatacttggttgagaagattacattatttggacaatttttaaataattcccaacaacttaagaacggggacaattaagaatgggtagtagtaaaaaattagtacaacttctaaaaaaggaaatagtttaaactgtattaaattaagtattctaggaataaatatgttcgaaattata

SEQ ID NO: 249949 - DNA, 621 bp, Cannabis indica
tcctttgctacagtggactaagcagatcgtaatctgactgaaccactataattctttgtcttgtttacattttccagccttgttgtttgttcttgcattcccagtcgagtactcgccattctaggtcgaatactcacacttatcatttccgtgaaaattctcttttatatcaattagataatacattttggtgttgcgaaattcactcgacaacaacacgaagttcgagcagagtacctagacatttttagttactctcaactcgtagttaatcatgtcctaggtgaatacactacccgaaaagaaaagatgatgacctgcctatgtaagatacaagacttactaagtcatctcaaaaggtgcatcatcaaacagatcctcagagaagaaagtgccacagcagatgcccttgctcggctatccagtagcacagcagtgaacaagaccaatatggtccctattcagtacctacaagacccaagtaccgctattccagaagaattagatatgttggatgatagcccaacttagatgacacaaatagcagcgtacatccagtcaggagtcctgttagaaaacaggaacgaagcaagaaaattaatgaggaaagtttcctggtat

SEQ ID NO: 249950 - DNA, 1003 bp, Cannabis indica
tattttctttactaaactattgaaaaagttaacagaatcaacaataaataaactagtagtactccattggggggatgatcttgtggtatatgttttagggtagagtttttttaattatttttattatgatcgcataggtttgtagttatataaaattatctgtaaatttttaaaaaattctaactaatttacaaagttaaaagtaagatttaagtattttgttgcacactcgactattttttatacacgtagtaagtgattgtttaaactttatttttgacaatgtaaagtatttgaattttttttaaaaatttataaatgaccttaacctatctgatcatttaaaaaatagacttaaaaaattaatctaaatacggagataaaaaataaaaaaaaaactaccaaaatgacccataatattacagaaatttcctatattttatatagatgttttttatgtaataaaaaaaacaactaagcgcaattatgttttaagtttttatcctctatgattaaatcaagaaaaccaaattctaaaatttaggatattattacatttgatttgtagtacttaatttactcatgtttttttttcctaagtcaaaattacattgtatccatattttagagtagtaatctcttttaagtatgtttgcgacatgtaattgtgacaatttgcagatgaaatagtggcaccgactgcttcacattattacctgtattagaaggcatatatgcatatcactcgctatttattgagtctttttttccatatatcgctccctggagttaaacttcctttggaagagtatggaagctaaagtccttattcattagcttaccattgttctagttttatctttgtggatctgttgggcaagactgttttgttttttatagttgttgtgaagttctgtctgcagtgcgatagggtagaatggttgactcctaattaaatgagttatttgaagattaagtttaggttagggtgaacgacatcacc

SEQ ID NO: 249951 - DNA, 1042 bp, Cannabis indica
ttttttttttttttggtgaaaaaatcatagggctccctggagttaaacttcctttggaagaggatggaagctaaagtccttattcattagcttaccattgttctagttttatctttgtggacctgtttggcaagactgatttgtttttcttagttgttgtgaagtgctgtctacagtgtgatagggtgcaatggctgactcctataaatgagttatttgaagattcagttcaggttagggtgaacgacatcacctgggatctccacctaggcgaagtcgactcccctaacgaaccatataagattattctaggaaaactatacagtcacacaagactaggaaagaaggcaatacaagtccttgaagaatgtatgggccaccatttctggctggagttggaaagaacgtgatgatgggttgcttcagttttccttcaaaactagttttgatgctgaaaatgtccttctttggagaccatggctagtgtgcggatacttattggttcttatgccatgcccatcatggcttacaccagaagaggtcaaatttgaccacaccccaatctgggtccggctgaaaattaagcatcccctctttttattggaacaaaacaaatctataggagttggcaggaaaagtctcgagcttccccacttcattgaaaagaattttaaaagaggctcttttggaatgggtacgctaaggtttagagccctgtggatttatccaaaccactcttctcaggcttctttccttagacgatcgggtataaaggatctctatttacaatatcaatacgagaagctaccgatgacacatgaacaaagattctgctttaagacaccatcggtgattaaagctgataaaggaggcttcttcccaatgttcgggaattggatggccgaagatgctagtgaaaaatttccatttcattcccctctcctaaaatggatcaatgactggatcattaatcagaaggcagcgaaggaggagaaagtgcggcatcttctaagtaatcagagaataaacttgtagattgaag

SEQ ID NO: 249952 - DNA, 1025 bp, Cannabis indica
agatcctggtaaaataaattccaacaccttatggagtcggttattatgactccagagagaatgactacatgagaaccctatggctatggttatttcataataactgacttcgtaagggcttcctatgatttttttcttcaattatagaattttgtgtgataacataatttattattatttttttaaatctaatttatatacattattttactattaatatatttaattatgtattaattatatatagtaaccataaataaaaattaaattgaacagttaaatacatacgcatttacattactctaagtaaatgtattacattaaaattattctaaaattactcaataagtatttaagagttatctaaatatatgaagaaaaaaaattctcataaaagtatgtcaaagaaagcatacctcaaatcaaaaagcatatccttgacttccaataaattcacatagcatcacatgttgtacatcttccctaattatgatgatgagataatgagaaaaacaacaagatatatgaaataaaatgatgaaaagagcttaagctttaagtagaaaaacagaaatttaatataacaaaagttgaatattgtcatttgattacctttttggataagatcaacgtgataaattttacgagaatgtgaacatctttaatgtaaagatcaactggtaaacttgtaactgcatgataaagatcttgggttaatgggttatgactcatttttaccaaccaaaattttttgagacttaatctcttcaatgtggcgctgagatatttctgtattaatcgagtcagcaatagacatgattatagtttcttcttctcgcttgatatctctaaaaacatatatttttctttttagtgtgataacttttgcagtataacaagaacaagaaactaatacaatttatattcttagtctctctctatgtcactattaacccctatttatacatgtatttcctatgtatttagaatataactttaaaatcttaattagaataagattagtt

SEQ ID NO: 249953 - DNA, 1042 bp, Cannabis indica
ttctttaccgtcatcaattttctgcatgtacacttgacaattgtcgaaaacatgaccaattataccacactcgtaacagaaatcaagtaatcgttcataacggaaatctagccataaatcatctttgatccaaggaaatgctaccatttggctacgaagaagcggttttgacacgtcgaccccaactcgaattcttaagaatggaccccaaccttcgttaagtgaatcttcatgaacatcaatataattaccaattaatccaccaatattccgagcaagattttctgatttacttagaaaaggtaatcggtaaacctgaatccaaaagggagtaatagtgaaagactctaaagaggcattttgtagaacacttggaaggcaaagaaccaagtgttggttttgaaaatgccaaggctctttggagaggaccctgagaagatcaccttggcaaccaaacgtaaccatacaaacatcagaatcataagtagaagtttccactggaaatctacctgaccaattcccggtgacaaagttgaaaaattgcttcgggttatggccccttttggagaaaattttgtagaagactctgctacttttggttcgaggaagtggagcagagatgttggagaagttgactactgctctttccttttcagtgagctcttgagacatatctgtatgaaaagaatccataagtttcaggtagagtgtagtagggaaggaatggaaatcaattgaaagacaaaggagatgtaaaactgtagaaaaaactgaagagaagaagttaaaaagaaaaaactatcacaactgccacagaccaaaccttaagggcaaacaatgctcaatccattttcaagtcttacaagttcctttttataaaggtggttaaagttgaacttatatattttagtcattttgtataaggttaaacatataaattattttttattgaaaaatagggtgtatttatacttatagggggtgtaaatataacttccctaagatttatcaaggaaaattttatttgcatcccaataagtac

SEQ ID NO: 249954 - DNA, 1319 bp, Cannabis indica
aggggtgttgggtcagcaccattgtttagaacatcaaggacagcagccacaacagaatcacccacaatgttccagtatttttggtagaacattgccgacataccgtcaatcccaggacttttctcagcacccattgaatgcaaagcttcctccacttcaggacgtgagaaaggctgggcaagttcagtgttcatctcagctgttactgtagtaggaatagcattgagagtgtcttctaaagcagttatgtctactggctgtgattggaaaatctcagcaaaatagtcttgaatagccgccaacatatcatccttggaagtgactttaattctcgcttcagtagtgattgagtgaatttttttattagctttccatgtcgaagctttagaatggaagaatttggtgttacgatcaccaagctgaagccaatcgacgcgggatcgttgctgccagtacatttcttcttgttcaaggagatcatcgagaactgattcttggtgttttagtgaggaagaggtagcaatggaatgtgtgctaagattattaagtgttgtcacagtagcttgagcttcagtgattttcctcttcatattgccatactttcgtacatgccatcgttggagattagtagcacatatatccaattgttgaatcacatttaaaatggggtcagccactgaagtatcacaccaagattcagtgattatgtctgcactcttagggtcagcaagccataatttttcaaaacgaaaacgagtgtgctttttggtggagagaggagcatgagtcacggacttcactatagcagaaattgctcgatggtcagaactaaaaaagtctagatgagttactggtggtgattcaaaaacttggtcccaagtagcattagtgaaacaccagtctaaacgttccttgatagtggcagaggaagttctatttttaacccatgtaaactggtttcctacataaggcagctctttcaattgacagagatcgagagcttgatggaagtgttgaatttgtgtatcattgcgaagggcaccacctgacttatcacgttgtgataatatttcattaaagtcaccgatagtaatccaaggaagcgctggtgcaatgtcatgtaaacgcttcaaaagtgtccatgaatgcactctatttgatgtttcaggtgctccgtaaaaggcagaaaaatgaaaagatgggccatctgcaaaggacataatgcagtcaaagtatgtagggccaaaagtattgagagaaacattgacattatttttccaaagtagcatgagtccaccactaagaccaactcgtggtga

SEQ ID NO: 249955 - DNA, 762 bp, Cannabis indica
catagttaattattatgtttatagtattaagcctataattatattagtccacaataataattctaacatggactgggttgaagatagcgaggttgttaagatggattactagagcttgattatcccctctcggggagcaggtttatatggaaattgccacggtggtataccaggtgaggaagaaccgaaacattgttttttggatgtagaaagttacaactatttcacattcgatatattgcatgaaacaagacattaaaaagaagattgcaatgatcttacccaaattgttgaaacaacaagatagagagtggtttgaactttcgatatagttatattggtgatatcaatgtatagaagaagagatattcagatcaatagtattagtgttgttagggtgtaaagaagttttgttggattcaaagttcatacaaatgctgtgaaagattgctaaaccaaactgtaaaagatggacaaataaggaaagaggttcaatcacaagtctaagaaaattgaatgcactgctcatgaccaactatcttgagcctaattttattcaacaatatagtaactcagtttatataaatgatcacaaagatctatgcaccaagaatggtgtcttacacctacaaaacaactcaccaatgagagtaagtaatcaaatacatactgaaatcttcaacaaccctcctcactcaaactattttgatctaaagtctctctctaattcgtcacctagaacagagtacaaagagaccttac

SEQ ID NO: 249956 - DNA, 1054 bp, Cannabis indica
caaaaaagttcaggaagcatgatttagtacatgtcaaagttcgggggattgtgtcataatagtgacacgtaggaaacatgtctggactattctggaaacatgcccgaacggtttatgagtttccagggagtagtttgttcctggcgatatcttttagttcccaaacaaccatgaggagagttgactaactcagaagtagttttttgttatgaatctcggacctgaatccgggacgaaaataaggagccgactaccttgacgttcctagctaattgataatttaattcctaaatagttagcttttcgaccaagaatcaattgtggatgatcctgacctcattaaacaatcttcccatgatcaacttgatattatgatcctgagtctttcttcttaaggtatgggagaagtgacattttatttcgttatcagattgggagtgggtctaattctcttttatgggcttatttcccttgttgggatccacgtctcgtgattattaggagaaaatacgaacattaatattaattatacatttacaaatttttaaatatacaaaaaagtgtaaattgtattagattgattacttttatatgtaaattaacattcaatccgaagtgcaaattttaaattttccaatccatttcaacccacacaaatgtgagaatctgcacttttcatattagattgtattgaatattttatgagcacccgtatgagaaatatacatctgatggctttaattggtttttcattgtatgtgatgacctcagaaattggctaaccgatagcgaagttgtatttaatgctgatgcttgccatgtgttatacaataagaataataaagtaaataaatataagattttatagaggttcgatcctcttagttactgggtaatgacctactccccttttggttgtattgataccgaaagataatactactcagatcactatagtgatggaatctgaagtagctctcttaatattacaatgtatgaattagtaagaagatttctaatgagagagatagagccttagaggcgtgagagagag

SEQ ID NO: 249957 - DNA, 713 bp, Cannabis indica
tatttgaggcaccgaaatcagaaacagaacactttccctttttagcacctgaggcaccagggggcccgagcacacttaggttgacatattgtcaacctggggtgcttccaatcacaatattaaagaattatcctaagcattttattcatctccatccaaatcgggggatcaaatactttcgagaaagaaacagattgacttggaggctgaaattgggacccaacgcctaggttgacctaaacattgggcccaacacccaggttgacagtttgtcaacctaggccatttccaacagcaatttagaagagatctaacgaaacgatgagaaacaaagagatcccacttcttctaaaacaaatgatactttgaaaggaaaaagaaaaataaaaactttcaggaacgactttgcaacttctgataaatccttcttcatcggtatggcattcattttattttaaaaaaattataatcataaatgataatgaaaactaagttattaatattataaagaaaattggaatgcttttttttaggataaaattaaaatattaattattcctatgatactaaataattataaacgattaaaaaataattaaaaataattttataagattaaaaaattaaataattttagtttttatatcaaaataattttatacgatactaaaaattttacatcaaaaaaataataattgtaaaagagtataaaa

SEQ ID NO: 249958 - DNA, 598 bp, Cannabis indica
caacaccgatacgaagagtagtcttctccgttacctttattaatctacaataaaaaggtgaacatattttacaaaacaaaaaacgaagatttaattaaaatgatgattaaaatttcctcatatattattagcattaaactagaataaactaaacaagagactgaaaataataatgggttcaactacagaagattcaaagtgattttaatacttcatcaccttagaaaagctaagttaattaatgttcaaaactaagcgaaaaaacataaatccaaataatgcatatcagaattctctctctcttttggagcgtcttcggttttgagattcttaaaaagggtaaaagttgatgtgaaaaaatcgaagatcaccatttaatgaattgctccgcaatcatcttcaatccctcaaatttttttaccattatcggatcagcttcagcttcatgatcttcattgatcatcactaaatgatgatcatgattatgatcgtgttgttgttgttgttcatgttcatgttgttgttgttgttcatgttcatgttgttgttgttgttgttgttcttgttgttcatgttcattgttgttgttgttgttgtt

SEQ ID NO: 249959 - DNA, 614 bp, Cannabis indica
gaagattcattcttcttctttttttcagcttgcttttctcagctacacattgagaaattagatcattgacactccatactattacaagtattgtaggctatcttgataaggctaaaagaggtaggaagtacatgaagaggacgatgaataatgtaagagtgaggaagagaaatattatgatcttttaacttggacttaacattcaaaatttccaaaataaaatttcgcactcctttgatttatcatactgaatggttgtcatttcatccataagatgtccagtttcgatattttcaccagtgtcgtgtagttttttttctacaacattgaaaaactctttgacattcgtagtgtccttcaaaccactcaatagatattcaagaatgaatcttttcatagcaatggggctaagacgatttggcttttcccattgtgcatgaagagttttatggacaacaatgttgatatcagtaagatcaacatatttttcttctcgcatgcataagtctaaatccattatgcctgaagtaatttttgcatctcgtttccatgccttaaagttggacacattcataatttggacggaagcattattgttgttcacagaaaggaga

SEQ ID NO: 249960 - DNA, 565 bp, Cannabis indica
cccaagactcggccagcctaaaggtggttctataagaatcgaatagaatttcgatatggatctaaacaactgggaaaggactttaacagacccaaagtaccaggaaaggtccctaatcaacttaagtagtcgtatttgcacattcgaagctaaattcttcgtgctcttcgaaccccgaagttcagaatgtcaaaacaaagtgcaagattcaatcttgtcatcaaaaagtcatgcattctacttctataagctattgcatagatcacaatgcacaaagactactctaaaacttgaaaatcaagaaattcaaaaacttgaaaatcaagaagttcctgatatggttaggttcaacttagctgtattatttatgttcttcaaggtattcatggaagctaaccaatagtttgacaaatatttacatcttgggaacatggtaatataattgagtgggagcactaatcatagatatagaatctataacttttagaagtatttagaagtgaaacgatgatttcctccgagcttggcttgatagagataaatgattgagatctcatttcagtaa

SEQ ID NO: 249961 - DNA, 775 bp, Cannabis indica
ggcctgaaatctgcaagcttccacgtaaattctccaacttacccagctctttgatcctagatccgtcattttcactcaaaacaaaatcactcaacgtctgaagatttatcatatcacaaattcttggcggcatctcttttaaagaagcgcctctcatcattaaatggcgcaaattgattaactttgaaatgttggtaggtaattgtgtaagtttgtggcacatgttcaacaacagcgtttccaaattgtataacacacaaattgaagcaggcaattctttgattggtgtgtcgcttacatccaaatacctgagatgtttcaaatttccaatcttatcgggcaactctgtagtatgagattctgacaaagaaagtgcccttaagcatcctccatccttcaacaacatgatttcatctgttaatcttgtctttgttggagagaatatctttgacaatggtaaagccaaatagctacgcaagtttgaataaaagtcgttttcatcgtcaaattctgttgtattttccaagtctttcatgtatgatagatggcgagtcttgctactaggcttgtgcaagaccttacaactatcataaatgaaacaacattgacttgacacatacatagctagatcatgcatcagatcgtgcattgaaagagaaagatcccttgtgtttctttgaaaaaatgatcttgctattaaagcattcaaatagtcttctccaacatcttcaattctttttcctttttgaggttgcaaaagaccttctgccatcca

SEQ ID NO: 249962 - DNA, 885 bp, Cannabis indica
caccaaggaagctgagactctaagtgcaaggatcggaaaagattccaagtatttctccttaaagctctattgggttcaccataaattccagtcaatcgccattgcattcggtcattaacattgataattacatcaatatggttattagaaaaacctctcaacatggccatcttttgttctttccaaaataacgcaagcccaccactatgaccttgggcttccacaacaaaacaaccctcaaagcccaattggactttaactctctcaaccacatcttttctacataaagtttcacatagaaaaataacatcgggcctcttttgaacaactaagtcctttaggaattgaacagcccgtgggttcccaagcccacggcaattccaactcaaagtgatcatgatgaaaggcgggtctggaaaccagaacccgccaacttctcgttttttgaactcgtctccacccgaagccctcttgttccatatcttcataattcaaaacacctaccacaggcccaccaccacttggcccgatattaccaacaagcccacccactccattaacacccttaccatcagcccttttcctcttaggatccgaataggcaatataatcattgctattaatcacatgaatatcttccttattaccatttgaatctccccccactatctcctccctcaaatcacgcaccataactccccctcccccaattttagctgccagcccacgattacctcttccctcaatcgcctcctcatccatcaccgtctgtccagccccaaacatcgccggagtcactacatccgaactgccttcccctttctcgatcactcccccagcagcccctgaccggagccattttgctcgatgacgaccagcgccatg

SEQ ID NO: 249963 - DNA, 2738 bp, Cannabis indica
actgtattgaagacacaataaacaagaacatcaatgtagataaggatttagatgaatttataaatcaaataaacatataaaagatcacatgaaccaaatgacatactaaataagtgatgaaaatacttctgtttctttattgataattgaatggtaaagattacattgaaatagagttttatttagagcacaaagtccaacaggtgccccaccaaaagtttgccatcatagattcaacttgattataaaaatcaatcgacaatcgaaaacaactcatggcatatgtagggatagattaaaccacaaccttttataacacctctttacctccaacgaaaaatagcttctcattccaagcatgaagtagttccaaatcttttccttgacattgttgaataattcttttttattgtggcttgaataagcaaggagaccaaggtaagcttcatggcattcacatattggcattcttaatgtatgactgaaaaaattctttgccttatcctgtgtattgggagaaaaagacacgattgatttctgcgtatttagtaactgtccagacgtgcagtgataaacatcaagaacatgcttgatagccaaggctgaatttgaattttcttgatagaacaaaagactatcatcgacaattaataagtgtgagactgaaggggcacgtctagtaagcttcaaaccattcaaatgtcccaaattttcttcatgattaaggagtcttgaaaaaccttcagaacatatcaggaagagatatggagacaatagatctccttgtctaagtccctttattggccaaacattacccacaacctcttcatttaagagaaaagaaaagttgttagaggaaaggcatcgcatgatcaaagaagtccatcgttggtcaaatctcattttggtcatgacagcagaaagataatcccattccactctatcaaatgctttgctcatgtctagtttgagtgctgaaaagcctttgttaccttgtgtcttatgtttaagatgatgtacaagctcaaaaccaaccaagataatatctgtgatcagacggcttgaaagaaaaacactttgagtttcaaaaataactatcggaagcacttccttgaatcgcaagaccaacactttggatattagtttgtaaataacattacaaagactgattggtctaaaatcacccattgctgtaggttttttaacttttggtattagagtgattatagacttattcaagatgctcatgtcatggccttcatttaaaacaccaaggaccaccttagttacgtctgaaccaacatgcatccaattatgctgataaaacatagctgacatcccaccacttcctaggcttttgtctagactcatcaaattaagcacgttcaagacatcgtgttctataaatggcagtaaaagatattggttaaatcctctgttactgttattggaatggtgagtagaacctagtttaatgcctcatagtcagtatcagtagaagtaaataaatcagcaaagtaagaacaaattatctcgatcattccttcctttgtagttaatgcaacaccagatgaattttgcaaggattagatggtgttatttgactttctagaagaggcatgagcatgaaaaaattatgtattttcatcaccacaatgcaaccaatttatccttgacctttgttgccaataagtctcctcctgggctagcaattcatcaaagatgtcttcatttttttcagtttaaccattgcagcaattgatctaacaatagtattgtttaggtgagctacatcctttttagcctttgagatttttttcttcatgttgccatatcttttgttgtgccattgttgaagagaactagtgcaagcctgaatattatgacgaaaattctcaattgccgaaccagtcaactgcttattccaggagttttgaattaattttgttgcttctagatcatcaagccaacttttctcgaacccgaaccttaagtgcctatgggaacattgattttggctagctaatgcaattacattcactgaaattaccctatgatcaaacctaaaaaaatccaagtgatgtgttgtaagtagttcaaagttttcttcccatttatcattgacaaagcaccaatccagccgctcctttattgcatttcacattatgccatcccttgattcaagtatacagatcaccttcaaaagttggttcataaaggttgcactgatcaagacctttttcgaaaattatccatttgagtctcattgcgcaatgcaccaccaagcttattattgtttgacaaaattttatcgaaatcgccaattaccaacaatggcattaaaggagaaacatctttacaatgttccaagagcttccaagtgtatattcggttatgaacttctggtgcaccataaaaggcagataagtgccaagtaagtccattgtcaaacactatgtaacaatcaaaaagatttgcattaaaattgaggagagttacaacaacattgtcttttcataataaaagtaaacccccacttaaacctaccctagggacttcaagtccattattgaaatttagagattgatgaaaacgagaaacaacatcacattctaatttagtttccataataaataaaacatgaggagtttgctctttaacaagaaaacgaaaatggcagaatgcgcatggatccccaaaccacgcgcattccaactgacaattttcatggttggttg

SEQ ID NO: 249964 - DNA, 846 bp, Cannabis indica
aatatagcatggcacaaaggtggaagaatggtcgtggcttggaatccaaattccttctccatcaacataatcaaatgtacaagtcaattaatccatctacaagtgtctacttttgatggtaagaatttccttgttacttttgtttatggttttaatgatgaagagggtagaaggatattgtggcaggatttaaaatcaattgcttctcatataccttgggtagtaatgggggattttaatgaaattttagaaaaagatgaaagagttggctctaaagttaaggagcataatctcactttatttagagattgtgtttctttttgccaattggaagatgtaaaaagcagtgggaagtttttcacatggtgcaataatcaacaaggagaagctagaatttatgctaaattggatcgggtattggccaatgagagttggcaggatattttcccaggtgctgaagcaatttttttgagtgaaggtgtattcgatcatgctccagccattgttacatttcataatctactacataatgggaaaaaaccttttcggtattttaaaatgtggcaatctcaccctgattttgacagcaaagtgaaggcagtttgggaggctaattaccaagggactgctatgtatcagctcatgactaaacttaaagctttgaaaccggtcttcaaacagattaatcaagcagggtacacagatttgcaagcagcagtcacaagaacaaagttattgctggaggaatatcaacacaaattaatgtcagatccgatgaatgtgttgctgcaagtagaagagaaagctgccaggaatgagttcaccaaagcacataatgattaccaa

SEQ ID NO: 249965 - DNA, 978 bp, Cannabis indica
aaaaaaaaaaaaacaaatatggaatgtggacaaaactagaagaattatgtagcttgtaattttgatatgtataatagtttttttttatttatttaattatgtgggtgattgctaactagactaacaatttaatcaggcacagagtaatttgcgtgtctagtcacgcactaaaataataatatatattattaaaaaaaaattcatttatacatttaaaacttattgtttatttatttttaggatcttatgaatttgtgtgtccaataacgcatgttaatgttgatcttaattgccctttttgtaatttggtgaatgagataatatttcatgttctgactttcagtggttttttactctgctaaatggtaataattctgatgtcattttagaggcagctatggttagttggaggttatggaaggctcgcaatgagttattgtgggaacagaagtcttgttctgctaaggaggtagtttcttcggctcgaaaagctattggccaatggcagattgctcaatcccaggcaaggccggggttccctttttgttactgatgtaaataagggcatcgatcaatggcctaaactagaaagatttaaggtcaagataaatatcgatggtgctatctttgaagcacaacaaagatttgggtttggttgtatggcacgcggttctgatggtagattagtggaggctatttaatttcggatagtagttgtgggattgtcacaccagaaattgctgaaataactcgcatcaaggagactttgagttggataaagggacaaggttgggatgatgtggttattgaatcaaatgccttagttgtggttcaagaaattaataggtccattcacatgtcatctttattggtttgaggatcgtcaaatgcaccgacaaaagtgaatcctgaatgaaagtggaaatttaggctttgctttatgccggcacattatcggcgcatttgacaaaatgcgct

SEQ ID NO: 249966 - DNA, 693 bp, Cannabis indica
gcggatcggatgcactatgagcaaaatagtacggattggattggatgaacacccctaccatactaattgagacagtactatttgtaagactcagttaattgattttaattaatcatttataattctaaaattagtctatgtcttatttatgaattttcactaagcaagggcttaattgtgaagaaaagagattctagagtttatttgctaattacgagactttgttgagtctaattaataaatatattaaaaggcaattttatttgataattaattttaattataaaataaatagttttggcatttaagtggttgaattagaaaatatatcatttgtgaaagaataggataaatagttgaaaatggcaaatttgcaagtggtgggcccacatcctatggccggccacatgtgctctattttacaatttatttatcatttttctaatgccaaataattcaaacctacacctagaaggattcctataaatagatagtgatagactcaaactgaaggatgatgaaagcttatgcattcactagccttcagtcaaattttgagtcttctcttctctctctatttcgaacacttcctctctttttctctcttcaatttcgaaccctagagtgatagagtacatgcccatgcatagcaagttgctactcaatcatagtgtgtaagactgtgaagaatcc

SEQ ID NO: 249967 - DNA, 1046 bp, Cannabis indica
taaacaacggtcgaatacagccaaaaattacacacaaaaagtgacagttatctaacaaaacctagaacttaggagttagaagcgttcgcggtcgggatggtgccagcagagtatgcacagggaaccagggatcacaatagaccctcgaacaaccctcctcaaacagcgacgacaacctgtggggaagcccgggggtaaaaaggagcttcctcccttaagcactcttccatccgcttttcgttagctaaacgttccctctccaagtcctcatcccaagcccgccaattctgagcttgcatccgacgattatcccggcgtcgctcagcacgcaggcgaagggcatggaattcagcaggcacccttgtggcagcaaaaatattacgtccctcattctcaaagaaattctgcaaccactcctcatcaaaagatgaagacgcatcgttgtgcctagctctgtaagccctcatcatccttccaacaatagcttcaccgctgggccggtagtaacgtgagaaaatcgaagggcttggggggatcgatccccgacgtcagagtggaactcatctccgcttgaagattcaggaagaggagaaccggggggatttgacatttctaaagtaggaaagaagataataataataaaaaaaaacgtattcgtataaaaagagaaacttggaagctacgctaaaaagacactatgaacaaggggaaacgttggtttaaatagaacgcgaaaggtggccaaggaagggtaagaggaaggcggagaggtaaatccacccacatataaggcattaaatggcaataaatgtacattcccaggtgtcaaaacgtatcaaaagaaaaaataataaataataatataagaccccccccccccctctcccacgtgtaaacaaccataatgaggaaaataagatcaaaacataaatccaggggaaaaatccttacaaacctttgaacaacaaacgggacaaataaataaaaagattgttccttaaatttgtccttgaataaaaacgatattttaaaaaaaaaaaagaaaa

SEQ ID NO: 249968 - DNA, 748 bp, Cannabis indica
tgtatcttaagtctctcatctttcgtgccccataaaaaacctctgcataacctttccactctcatcttaagtcggcattagatttttgttctcttggaatttgttcgtttttaaaatagtcaaacttttccaagtttttttgaaccttctccaactattttcccatttttaaaccctttgcctagtattcgcctagaacttagtttactattaactgcgagtcactgtaacacgtaagattcttgatctttaacactttagctattttcaaagaagctaccaaggcttcatgctcaacctcgttttctgaagtgtcaaattagaatccaagggcatagtgaaacttaaagttttctggtgagatcagtatcacccctgcactcgagccattttcattagatgctccatccacgcacaacttccaagtttccacatctcactggtcgagtggattttcatctcaaactatcccttctattaagaaatctacgaaagcttggcccttgatggatgttggtgggtgatatgttatgtcgaactgcccctattcaatagaccattctatcaatcttccagaagcgtttggtttagacaaaacttgtcttaggggttggttagttaacacctttgttggatgtgcttggatgtaaagtcttaatttgacagatgtatggattaggcatagggtaagtttttcaagagggcgatatctcgattctaccgctagtaaccttttgctaacatagta

SEQ ID NO: 249969 - DNA, 723 bp, Cannabis indica
ggaggtgttgggaaagtggggtaaagagattactggtaattttcggaagagaattgatcaatgtaagaggcagatccgaaactcaaagtggggcaaagatccgatgtcactaaaacaacaccaggaagggaaagacaatctcaccgaagccttagctcaaagggaagctttttggaaacaacgatctaagcaatactggctcaactcgggagacaaaaatactaaatatttccattctgtggcaagttcaaggaagcggaataatagtatttctcaactcaaagatgatggtggccgttgggttgattgggactcgggattggacatggtcatcatagattatttccgaaatctgtttcaaacgtctaatatagacattggtacaattctgaatagagttcgtcctgttgtcacgcaagaacaaaatgaagacttgttggtgcctatttctgaagaggaagttagacatgctttgtttcaaatgcatcccgacaaatctccagggccagatggaatgacaccgggtttctaccagaaacattgggatattgtgggccacgacgtgattgaatttgttcgagctttctttgatactggggtgataccggatggtcttaatgatactcatatagtcttgataccgaagaagaaaagtcccacccagatgagtgatatgcggccaatctccctatgtaatgtgctttataaaatagcttccaaggt

SEQ ID NO: 249970 - DNA, 805 bp, Cannabis indica
actgatttcatgggatagattcgcattgataaaaattaagaagaaacccatctagtttcccatttattttttttttttgatcaaaggagaagggttctcattaatcaacaaacaatatacaaacaaagcctcacaaaaaacagaggcaaagcagcagcttacacaacaatttagcagcctacatattaaaccttggctaatggaatcaatcctcctttgtctatagctatacaatctatactttacattccttttaatctctttaactatatgactaattgtgtaagagctattatcatgtgtacatttgtttctatttagccaaatatagtagacaactgcagcaagcagcaagaccaccaccttatccttgaacctgctatctgttatagacaaaaaagttctccagcttgtgaactgcaagttccaagcctgaaagccgagccacttgaagatctcatacacaacctgcttagaaaaccagcaatcaaagaataaatgctgatgagtttcagcttcccatttaactttacttgtttaaggcgaaagtgaacaagtttcttattttaattcttattagttttggaaaactaatttgatgtacttcttctctatagatagtggaaccatttcactattcaaggggacgagaaaaattagagacaataatcatagattcaagagggcaacactcaaaaatcattgtaagaactttcaagagatattaagaacttcttacttctcttctcacaagtcaatataagtaacaggggaataggctattaccaccattacgggaccgaac

SEQ ID NO: 249971 - DNA, 944 bp, Cannabis indica
ttaaaacttagcaaagacaaagggacccctttacccgatccaactctttaccgtagtctaattggtaagcttatttaccttaccattactagacccgacatctcttatgcagtgaatcatctcagtcaatttttggcttgtcctcggcttcctcacttacatgccacaaatcgtattttgcaatatctcaaaaagactctcggacaagggttattctttccttctaatgcagtcccaaccctcacggcatatgcaaaaactagcttatctccagcaaatgttcaagtttccttcttcgctgatgccgattggggtagctgccaagatacccaaagatcaatctctagatattgcatcttttttggcaaatctctggtttcatggaaatcaaaaaaaaaacaggtagtctcccgctcctctgttgaagccgaataccgcgctatggcaaatgcaacctctgaactcacatggctccttgctttactcaaagactttggcgtctcccacaccacaccagccaacatgtattgcgacaacactgcagccatccacatccgtgaaaatcggtgtatcatgaacgcacgaaatatgtggaaatagactgtcacttcatacaggaaaaagttcagcaaggatctctcaaacttatccatgtgccttctcaatagaacttagcagacatcttcaacaagcctttatttccaaatcacttttctaccttagtctccaagatgggtgtacttaacatctacactccatcttgaggggggctattagactacttaatattagttggttattctgttattctattaaggcatattgttagagtttagttattttgggttgtaatttttagctaagactacttagctgtatcgcctatataaggcctctgtaaaaaacctttgttattcattcaatacaatttacaacaacagagt

SEQ ID NO: 249972 - DNA, 740 bp, Cannabis indica
acttctcgaaatataattattacagtaacacgtaatctttttattatattctattcaattttattatgaaatgagtgacacacaatccataatagttgataaataaaatactgaattttaagtaacggtttacaattttactgtcacacggattttttttttacaaaaatactgtctttttataaaataactgtaaaacaacaaaacaaaacaattaatacaatagtggaacaactaaaaaataatggtggaaaaacagtaaaaacttactacagtacacagtataaaaaatatacagtatttttgaaaaaaaaattccacccacggtaaaatagtaaaaaaattgaaaatttcaatatgtggtgtaaaattttttaaataaatacaaattaaatatctttcatcatttttactttaataattaaaaaagtaaaaactaaatatataaattactatgaaaaatatgttttatttatttcacaataaaaatgaataaaatttagagggtaatattgacaaacaatatatactataataagaccctacaaaaagaatacaatatactataagagacctaatttggtagtgtaaaaaattcaaaccaaaaaatgttaattcgttaataaactactattttaaatataagatatatatttttaattaattatatatttcagatatggatcgttgtttcgcactagcatagttgggcagaaagttatagtgtcgactgaccatga

SEQ ID NO: 249973 - DNA, 2217 bp, Cannabis indica
gtatttttggaaatcctctatggaaaattaagattaatggtgcacaattaagatgatcaaaattttaaacaatcaaataattaacaatgacaaaattaacaatcaagaacaactactagataaaaaataagggcaaacaaagtatttaaactagaaacggtaaagacaaaaaataaaaaaatcaacaccaagctatatatacttgtttaagtacgatagatcaatgtgatttatggttgtactccaattttgaaacaccaccgtaattcttctctattgattgagcaagaataggtacaatacaatggagaggagattctctgataagttctcactaagtgttttaactcttactctttacacttaagaatcttcttcatctacagaagattcttcttacaaaacacaaacccaacctatctcttttctctacatctttctctctacctctcaatcttttctctatcacactcttaatctcatatgaatagagttctcaaactcatatctcaatcgtgtctttaaattttgagtcaatgtggtatttataggcttaggatcaagatcctaaagtcgatggttgtaagaaatgaggtggttaagttagttagaaataagactgtagagtcgactatcccaaactactattccagaagagataactaggtagctagaactccttttcagggaagggctagctatcctaaagactggacccagggtggacatgatactcatctgaaaattgccttccgaacttgactattattctacacaactccttttgggatcgataacaacaagtgaatagtttcctagaaatgatgatcgcaaataccttttcatttagaggaattataccataaattctggacctagttacttcaaattaaaagaatgacaatgatgaagaaagaatgcaaccatcattggttggtattccaggaatcttagtatactgacttttgagattgatcaagttcaaacaatgcttgaacttgtttaaggttaaaaccttagtcccaacatcagtaggattatcttcaatactaactttctttaaataatcaaccagccctcttctatcttttctctaatccagtagattccgatgtctatatgtttgctttgtccatgataaatcagattcttacaaaggtggatggatgagtactggctatccgaatacacagtcactcctccattgatttgtttcaacacataaagtatttcctgaagccataatgcttctttaaacgctttcgagtcgccataaattctacttgactggtgaaaagagcaaccacggattgtaactgagccttccaaaatatacagttccggtttgctaagaaaacataggaattggctgattttctagtatctctattggaggcggagtccgcatccacgaatactttcaactccaattctcattttcctttctcataggtcaaaccataatctcatgtcgcccttcaaatatctcaataaccatttaagggttttccaatgttccatgctcggattagacatgaacctgcttaggatgcttaaagtttgacatatgttcggtctcgtactcaccatcacgtacattaaccatccaagaaccatagcatatggtacatccttcatatattctttcttttttgtattgctaggcattgttccttttacagaataaactgacctcgtaaaggaatggatgtactatttgaatcttccatgtttaacttctgaataatcttcttgatatacccaaaatgcttcaaactaatagttcattccttccgattccgcgagacttcattactaagtatattttgaattggcccaagctctttcatctcaaattctctcttgagcttggctttaatacttttgatcattgatttatcttttctcatgatgagcatatcctccatatagagcaataagaacacggctgtagattgctccagattcttaacataaaggcaatgatcatatgttgatcgtttgaatctaatttgatgcatataagtatcgaatcttttattccattatcttggaaactgtttcaaaccatacaaagatctattaactttacaaataactcaactccttttccttccacccgaaacccagatggttgcttcatatagatctcttcatccaagaatctattagaaaaagatatcttgacatcaagttgttcaacttcaaactccaaat

SEQ ID NO: 249974 - DNA, 677 bp, Cannabis indica
ttaaatcatattttgagttgtagaagatatgaaaaatatatatatatatatattctgatattataaaaagatgaataagatagaagtaacatttcattttttttatataaattattaacaaaagagtatctaaaatttatatttgaataaacctaatataccagttaattttatgggttactattatacttaaaattaattttatttacaaaactccaaaggtattataaaagaaatttgtgagaatataatttactattaaataacttttttttttgaaacgggaatcttatataaaagaacaaacattacacaggattcggctcataaaacaaaactacttgacgagcacaaggaggtataaccccaattcacatggcactaactttgtgaaccaaagcataattggctaaagcatgagcaactcgattggcctctcggaatacaaaagagataccaacaaaactatcttattatcataagaaatcaaagctctaatttgatttagcaatccatcaatgtcacggcagccatcctccttattttggattaaatttgaaaaaaaaatagtaaaggataaatttagttgttatattgaatcttatttaattaaattttagttaactagagaaggtataatggtaatttcatggttgacactagtaaaattgtgatga

SEQ ID NO: 249975 - DNA, 501 bp, Cannabis indica
gaaatgaaggatctcaggcatgctagaaagattctatgtagggataggaaaggaaagaagctaatgctatcttagaaggattacatttcaaaagtgctgcaaaaattggtttttcagaggtaaaaccagttagcacactaatgactcgcctaacaaaactatctcactcacaagctccctcaacagagtctggcctcaattacatgaaaaacataccctactcaaacttggtaggaagcctgatgtacataatggtcggtaccagacttgatttaagccaagttgtgagtgttataagcaggttcatgggaaatccagagatagaacactagaaggcagcaaaatggatgataaggtacttaaaaggcacatatgatatgggactactatacagctcaaactcccaaacaccataactcaaaggctatgtagtttctgactatggaggtgatatgaacaccagaagatctaaaactggttgggtttttcaactgggtaact

SEQ ID NO: 249976 - DNA, 714 bp, Cannabis indica
agcataaccgtctaatggataaatataaggagtgattgggtagttattagatattatccctttgtgaataaataaaacatggggaatgaccacatttcattactagttatagatgaattagtcccaaataaaataactacctacctattcttataaatagaggcagaatccatgagaaaagggacatcaaaaaatagacagaaatcctattattttaaatattaagatttgtattctgtatcccagaaaatattttaaataataaggactcgtggagtatataaattttaactacaaaatcacgtaaaatatctggtgttattaattatcatttaattctgtaatatatttattgcaaaacatattatttatttagttaataaaaatttgcattaaaaccttaattaaaaaaatagtaagaattaatgacctctaattagaggtaattttacactcattcttattttcaatactttataagtgccaaatcagtgtgtttgtccatgattaattcaagttatttagttatttatcctcttggtttaattgtttcagattgtgttagtcttatacgatctctttcgtttcttcatgtttcagttcagtttgttaaacggtctgggaaccaagcggctaattggttagctcgttcttctggttcatgtcctgaccgtctttcccgtagggggtttgtcccttctggtttggaagcta

SEQ ID NO: 249977 - DNA, 1129 bp, Cannabis indica
ggggtgccaatttgtgctaagaagatctcaaagaatgaatgtttagcccttgctgaatagatgacagcaaggatttgtgcctggagttcaagaaacctgtcatttgtagccagaactgtgttgataaactcaatcatgttagcaatccatgcctacttgtcacaggtaatgatcctacacaaaaacgtagtgaataatattgaagcaatatgtagaaactttttgtggaaagggcaggctttggcagtaggtcctagccttgttgcttgggataatctaagtcattctaaagcaactggatggcttggattcagaaaggttcatgaatggaacaaggcaactatgtggaaatacatttgggccatctcaaaaaaggaagatagtttgtggatgaaatggatccactgtgtttatattcgaagttaggactagtggagttacaagtctcctgaccaaggcagttggtattggagagacttgtaacattaaaagaccagtttagggagattattgcaggtcatgtcacttccattcaaccttaatgtgttgctaaaggttgtcatttactttggacaaattaggggaaagtaacctggagccaacaagtttgggggagatcgaatactcccaaacaaagtttcattagctagattgcaattcaaaataggatcaaaactagggatcggttacttcagattggattatcaggggatgatcagtgtgtttcatgctaccaacacagagaaacaagctgccatattttctctgagtgtcctattgttgtagaatgtttgaaggttttaaaggattggctgcaatggcatgctgcaactgtctcttggcctcgattaataagatggatcggaagagctaaaatgagcaaatttaagaatcaagttctggttgcctcaactacttgcctggtgtatgttttagggagagcccgaaattctagactttgggaagactctcatgagggcacagattgttttattctaccagatcaagcacactatctaaacaaagaatcactctatgttggcctaggaatgtcaaggaaaggcacaaagaatggtttcaaagtttgtaaataaaaagagtatagagtacaaaagaattatgctagcat

SEQ ID NO: 249978 - DNA, 1243 bp, Cannabis indica
agaatgatcttgtcaaaaccactatgaacaagatgcaaatgccatagatatatatatattatgtggttgtggtctttgatgacttaggtttagttacaacaaagagttcttagaatagtccatgttggttctggtcacagaatacaaagctcataatccatacattaacatagagattagatccattgacagatcaaggatattaaacttgtgaaagttatactgtattatccaatgtattctggaaattgaaatttaaatttctgttgaaatataaaatttaaaatcaaatacttaaatttataccaaatattccttgagtagttattctttcttggaccaccacttctaatgtaactctaattttaagttgcttatagtaagcataaagaagtaggagattctttaagatcgaggatttatatcattttgggattgaatatctgaaatatagtcatctacaccatttaatttcattgaagaaaatagaattatatcataagcaaatgacttagaaaccatttatttaatgatataatatctaagcaatttcttagtgaaaaagctaataggaaaaatataggataatttcaattaaaataagaatccaacgatgtcctctttaggcaagagtcaaaattattcttattttttaaacttcttcattgtttcatattgtaaacaatagtctaagctgtcatctttcgatgtataactagatgtcgcatttacaaatatttatctatcgagatctaacactactatgttgtttatcgaatgagaatcctctgggatttgtcaccttagaacaaccaaattaagttagaccaacaatgaagactcaaaatttataactacaataattaataataaaaaacaacatgaaggttcaatataaattcatacataatttagaaattatcatacatttagcacgtaactaagacatgtaaaaatacaaaactatcatatcttaaataatttcaaaggtttccaacaaactgatacagtgtcccgataggtaagagtcaaaaatatcattcattggatatagtagttagctcatctaaaaaggacatcattctagcaatcttttatttgatcaaataagaatccaatgttgtctcggtaggagagagtcaaggttattcttattttatgagcttccaccattgtttcatacctgtaaatttatctttaagtagtcagcgtagggggagtctaataaagataaaaacttaca

SEQ ID NO: 249979 - DNA, 537 bp, Cannabis indica
aacttattcacaaaatacacaaacatatatctgaaagcaacctgtatttgcatcaacattgatactcgcacagtatttacacaaactaagaccaaaataaatttaaagctcagaattgagtatcaaagcataaacaagaaaaacattctgtaagaaaaataaaaggtagcataatacgactagagaaaataaggaagaaaatcttatactctacagatccctaaacatctctgctcacctccatcatacatccaccaaatcttagttgatgtgctcctccacgagccgaacctgtgagacacgtatctgcgtctgctttcttcggcgatcccaagcatctgccgctcctccgcgagccctagcttcccgacggtagtttcacagatagagaaagggagaaaatttatgaagaaaaaaacaatcagaggaaacttgaagatagatggacctgaaagttaaaataaaataaataaaagagagagaggcatcggtgtaggggatgccgaagagtatttttagggtttttttaaaaaaaaa

SEQ ID NO: 249980 - DNA, 909 bp, Cannabis indica
taaccaatccggaaaagaattgtaaaaagaatgggtgaatttgttttcaaggcttctcttagctaagttatgagcacctacattatgagctctttttacatgaatgaactttgtacaagaggaaaaaccaaggtgtctcttaatttgatttacaatcggctgagcagtaccaagaaagctatcatttgctgagatatcatctaccaattgcttgcagtccgatctgatctcataagagttgtacatggtcatcggcctatcctgcagagcggcaacaacagcttttgcttcagcaactatcacagggcagcaaacagggagaaatttcatgccagtagagacaatgttgcccgaccaatcacgccaaatatagcccagccccacccctgcttggttcggttggatggctgcatcacagtgaacacagtaagtgccaacaggaggggccgaccaatgatctttgggaacaacagagggcacagtagtgataatccctctttcacaggtatactcatctctcgggtagctgctgaaaacccagtccagcaaccgagccccgttcatgtaaggttgattgttccattgcctattccgattttcccatatggcccaaagtactttgatcacgtcttcaaactcctccctagctagcttttgtctaaattccactagcaaatccatcatggaatgacctctactttctttgattaacttgtagcaaggcataagtttccacacttttttgactttctcacaagtccatagggcatgggatagggactcctcaaacctgccacaattattacaagtagggtcgattttcatacctctatgacataaatttgactttgccgggagccactttcgacaaagtttccatccaaacagcttcattcggggaggcaagtt

SEQ ID NO: 249981 - DNA, 580 bp, Cannabis indica
tattttatcattttaaaaaatataaattttatttattatttaacaaaataaaaaatctaaaataatatttattttttgatgttatggattactctcctcccaataaatataaaataagtctcaatattttttcatcaaataaataaaagatcccatcactattccccaacataataataataataaataatcatataataataatagaaaaactcaatttaattattttaatttaagtgtagaaaattttataaattaaaatcttttataaattattgaaaatgtaatgctcagtataaaacaaaatgaaataacaataaaaaattaataaaaaaaacattatactgtaacattttttttctattttatttataaaattacaagtctattatattttaattacgctgataattttattcattttaattacacaaataattttattcattgtcgttacacataagtacacgatgtttagttatatttgtggtttttccatattaaaacattatagagtattcatgtcctataattaataaggttaattaaaaaatttacctcttgaactttaacatgtact

SEQ ID NO: 249982 - DNA, 887 bp, Cannabis indica
aaaaaaaataaaaaagtattagaattgaaatttcatttgtcactaaaaattaattgttttaatgtaataatattcatattagtggccataattataaactaattataactgtaaaaactttcttatttattggtggattgtgttaaaagcagtttaaaattaataatactaacaataataatatatatgtaacagtaatatataattacttcattagtaaaaataatatataattgataatgaagatgtaaagtgtgtatagcaggccaactttctttaactcatttcgatcatgacaaaattgacgaaattagactatatattatgcctacgtaagtggtgagaaaattaaccccactcaggtcttaaccatttcttaattaattaattattttctttatattcatttctatgttttcttgtaattaattaatatatatatatattgatttctcttaaaaaatattaatttatttgaaggatttttttttattttacactttaaaatatatattttttttttttatattttaacaaaatttcaacaaactcctataataactaacggaacaacttaaattgcaaccaaaatttgtataacaacccatataaaactacgtccgaaataacctaaaccgttaatttaaaaaatatatataaaaaaaataatttccttttatttaataactataaaatattctgtgtgcccactagcttagttggagaaattaattaaactcctttataatacgtattacgtaggtagttcaaacttgatatgatctcctaacgtaaacttggtcataattttttgcattgaaaaaggtttggtagagatgagtttgttcttaacgtaaaagacattgaacataatattaatattatgc

SEQ ID NO: 249983 - DNA, 628 bp, Cannabis indica
gattttgctatccacagtttgttccaaagcttaggagcgacatcacaatgaggtgctctttccagggcttgggaaagataagcagacttactcgagaactgcccgctgctttccagagtccaaacccatcctatctcgacctacaccagaggggtgaccccctttcaagatggccgcaattgtgtcctgctcgaacaggagcttcaacttttgtaaatcccaacggccattgttaagaaccagctccgctacacgattgagattggtaggggcaccccttctacgcttcgggcaaaaacctttagcatgaggaatccaggggtccgaccagatttccgttgattctccattagcgattaacttacaagccccttttttcaggatagagttagccttgacaacactcttccaaaaccaagaatcggagtctttgtacctgcaagagaggaaatctttttcccccggaggtactttgcgatcaaaacttgagagcataaagatttgttaccagtcagaatattccaaccccatttagccaagaaggcctggttcatttctttagtctttcggaaacccaacccacctagcgatttagggagacaaattttgtcccaagcctttagatgga

SEQ ID NO: 249984 - DNA, 1647 bp, Cannabis indica
atatattaggtgccatgtagaaacgatggaaaaaaaaactaattagtaaaattataaaattatcattttaaaataaaaatttattattctttaacgttaattattatattttattaattgtatcttttatttttttacaatctttttaaatttgaagaaataagtttgtaaggttccaaagaagaatgtttccctttatctctcttcttcctcattctttctcagttatcaaataagagataaagtggtgtttggtttgatgtaatgtaatggtaataataatagtaatgataatataatggaataagaatggtaataagaattgattacaatatttgatttgtacttagaataaacattaattgtaatatgaattattgtgtttgatttgacataaaaatataataaaataaaatatgtattgactaaaataaccttattgcttttaatataaaattataaaatattttttaaaaaaaggtaacataaacttttactttttttattatatttttattaaaatgttatttattttttttttttcgtgtaatagagtgtaattgtaatgaagattacattgatattggtatgtaatcattatattacaaaagttaaaagaaaaaaacaaacaatataataaaactattcattattacaataaaccaaataaagtatcacctaaattactctctatttttatctctcatccagctaccaatcatagtctaagattttctttttaaagaattctcaatccacccaccactatcctcttcttttgcttagccacctaccgctgtcctcagtccaacatttatgactataatagagtgccgaaaagttaaggtttagtgttatattttagtacatttaaaaaaaaaatatattattctaataacgtttttaaagagtgctaaattatacgtgttaaaatttgtgttaaatttactacaaaatataacattgtggtaaatttattttactataatattgccttcagcccaacatttataactagagcatctataatagactaacaaaaagatgatctaatattatattttagcacattttttaaaaaattattattttaatagtattctaaagagtgttttaaatttggcaaatattaaaatttgtgttaaatttattataacatataaccaggccagttctaaagtatatggggcttaaagcaaaattaaatttcggaacctttatatatagtttaattattatcaaaatgatagttctaatattttagtgtaatggtaaaactttaaaaaactcttagaactctaaggttcaatcctccatagctacacaataaatataattttttaaaaaaaataaaaaagtagagattaggggttgatcccttgacctccataaagtaaaacattttaccactacactaaataatatttgttatattttcttcttatttaatattttatctatatattaataaattttttttcacaagtttcggggcctgagcggttgggggctcgaggcgcacacctaactcgcctaccctccagggctggccctgaaaataacattatactaaatttattctacagtaacattatcttagagcccaaccatttatgactagagcatctataatataatgacaaaaag

SEQ ID NO: 249985 - DNA, 500 bp, Cannabis indica
agcaaaaattacaaaaataacataatttaaatgtagctcaaataatacacctagagtttaaacaaattttcggaattgagaaattataactctaatgtccacttttaatgatgggacccatagttaaataaattcacaaataactatataaatacccataatcaatgctaattgcctttactaatccatattctaaaatgcgatcattacaatattagtgtaagtggaagtttgttcggttttctaccctacataaaactcatttcaatatcatcagatttactaattaataaaagatcaaaaatatcctatgttgcatggtttgaatgatttatttcatgattatatatttaatatataaattctcctaagtctagaacatatatatttgttcatgattatagtgttgtcagcacagtagaatataatcatgattatatgttagaaacgtttaagccacgtgatttgtcaatacactggatttagactaacaagataat

SEQ ID NO: 249986 - DNA, 545 bp, Cannabis indica
gtttatatttttcgtgccaatttgtaatattatattgtgtcgtgtccaaatttatattttttagaatcgtatccatgccaattttgtgtcattgtaaaaagcccaactcaaaatcattggagtccaactcccaattgactacaaatgcatccacaaactaacttattttagcaaatatattcataaggtgggtgttactttagtagggatgtgccttttgctctcatcgattggagtgtctatatttggacatgtaaaaaaattataagttaatttttctctttattaataatcgtgtttttaggacctcgtcgtcaatttttaagaaattttaaagaatttgttgtaccgaaacaaggttcaaaataatttatttcagacgtgtgtaaagtaaacttaaaacagcttgtttcgtattttcaatgttgtaacttattatttataatttttaaaaatttgtggaggttcaaaataactacaattctcattgtcatatgaaaaaaaaaatgggattacaattaattcgtgtgttaatactttaaaaa

SEQ ID NO: 249987 - DNA, 765 bp, Cannabis indica
ttcgtgtgttaatactttaaaaacatgtcattttgaagaatttttttataagcaatatttacgttacaaattattcaaaattttacaaaaaaaaattaatgaaatttcataataactacaatgtgtatataataaattatatatataataataactataatgtatcatatatatattagtataaacccattaaaaaaaattcaatgctgatcatgttgttttaaatattttccaatgaaaagataattgacaatattaatattcattatcaactattggcttaaaagtggtataaattgggcctacgcataaggcccccacccttgctcaaaagaatgatcaatgtaattttaaaagggaaatttaacttactataccacctaattagaaatagtatatatatatatatatttaatattttttccttttaaaaatacctttaaatttcaaaaaaacttctttctttaactctctcactctcaggcgttaaccccaacccatacccctatcgttgaacacacatacccaaaaccccggtcgcaaagcctcgccgtcatcttctctcacgacctctcttgtttttacattttttttctgttggttttccagttttttatgatattttacgatgtatatacaatgatagaataaatctgaggttagagatgaaatttagcaataattatagatacaggccggccttgaaagtatatgggcccaagacgaattaaattttagggccctaaaatatatatatataaaaaa

SEQ ID NO: 249988 - DNA, 521 bp, Cannabis indica
aataatgcgccggcaaaagtaaagcctaaatggaagtgagatttcagattttgttttatctcgacaacctttaccggcgcatttgacgaactgcgccggtaaaaatgccttttcttgtagtgagaccctccccacaccctcagtgttggactaatgatggagatcacatacttcataacagatgacaactctctcccactcactattttaatgcatgtatttttctcaattaaaattattctgaaaagattttgatttctaattttaatctttgtaatacatcaattaaattactaaatatagtcctaaaaataatttaattaataccatattacataataattttcaaatttttttagaataagttggttaaaaaatagtgactagctttagaagttaatcactagggtaaattaccaagttacttaaactatttaaagcgacctagcattttatgtgtattcatttcactaaatacaatacacataaattatataggacaatcctaaataattattttt

SEQ ID NO: 249989 - DNA, 777 bp, Cannabis indica
ttattttttatttatttttttatgttattttaatttattctattccattcttattcttatttacattctcattcttatgttttcattccttccaactaaacgtcaccttaaggccttactaatagaaacccgaaggtgattaaattaattcaaatttctttttgtcttagactcttattaggtgacatttagttgggaggaataaaaatatgagaataggaatatgaatgagaataaaaatacgaataaaatggaataaaattaaaaatgcataaaaagttattaaattttttatcatcatgcattggaatagtctttatctattttaaaatagaataggcatctaccaaaaagaccattctattagaatgatattctaatactttaatatgcaaccaaataaatgaataaaataaaagttgtttactttcaatttcattctatttcattacccacaaccaaacaccgtcttaatttaataggaaaaaaacagaaaaagaaaaagtatttttctatttctaactcattcctattggacctcattaggccgaaaattgtaaaagatgtggcccaattgaaagccggtggtgattgatgtatatacaaatgggctatggtacgttccttcatgtgcatctagttgcagagggcatcctcaaaaatagagggcatttacaaaaatactgaatttggggtaatacttttcaattttactgtcacacggcagaattaacatttatactgttctccctttttttttcttttatactgtcaata

SEQ ID NO: 249990 - DNA, 905 bp, Cannabis indica
atggtcaaaaaccgcaccacccgtaccacgaacacccatacttattaggatgaacattttttctcataggccaatttgtcatgagggacattgtacttattatgtgttgacttgcagatgtcacatgcatagactaagcagtcataccattctcttatctctttattaaatgaaaccagcaagatatacctggcacgatcattatcatcatatatgccattggttaaaagctctcctaactgggtatctaaaatgtttgcacaatttaatctaggaagtttcaacatatatagactagttgaaatagatggatctcttttcacgagagaagttctatattgattctctattcaaattggaagttatcatcaaatatagttactttataataggaattgtcattcacattttattgttgttctattttatatgttattagactgaaataaaaaataattaaagcaggaaataaataattagatataaatacaatataagtaatatatatattgggacacgattttgtcttttgatatactttaacaaaatgtattctgtggtacattagataaatctcaaggtacattagatgggtctcaggtacgttaccattttttaatcctaattacccttagatcaaccccaactctcaaatcaaataactttcctatctaccggctgccttacatcacagagtatattccgtgaaagtacattacgggacaaaatcgtgtccctatatatattatagtgtgttgttcaagcttactcttatttactttttaagatatatatacatctgccaatatatatgtaaatgaaaaagttatgcaggagtcattatttataatactccataaatttaaagggttctatatgttgtatgttgtgttggaaatatatgt

SEQ ID NO: 249991 - DNA, 586 bp, Cannabis indica
tgtcatgtgacaaatgcaataaagtcgcaaatgcttgcaacaaggttgtagatattaactacaatgaaatttatgaatgcatccattgcaataatgaaaagcaattgcagttctaaggtgtgcttttaacttttacttggtatatataatagtttatttaaattttatatttaatatatattactttattatccactttattataaaataagttgcattatataaagttttatgtatatatttgagctttattaactaatccttatcatttttgtacagtccgagcttttgttaacttagaagattcatcgggttgtatcaatacattcataattggagaacctgctgagattttatttggatgcacaggaaagtcgttgatggacatggactctttggtacatatataataaacaaaatttgaaaaaaaaatatatgtgaaatgtttgtttataataataatattaataataatatactttgaatgcagggccatgataagaaactgcttgatattatttacgaatctttaaacaatgactacattatttatctaagagctattaaaaaagactccactatagat

SEQ ID NO: 249992 - DNA, 1340 bp, Cannabis indica
ccatgcacatccactagagtgtgtcgtttgttgtttacgcatttcacacaaggacatctgattttaccgtcagagcccttgtgttgttcagccatttcagagaaggctaagatacctctccagtaagcaagatcagtgcgatcgcgtaaaaatatccaactcttatcgaccgtcatctatcttaaaatatcgagatggttaattttattgtcttatttttaaaaaataaaaattgaatgtattaagaaaatattatttaataattattatttataaattttactattctatttaaaaattaaacatattacatagatttattcatttaatttataaagaatattttatttaattaattaaattattcaattattaatttgttaaattattttctatttcaatttctaattttaaaattttttataattattattttttttttaaaatataaatgttactactctattgtaaaaaaaattagtttaacttaatttcttaatatattatttttatcagcaacataacaacttaaaaatcaaaaaaccccaaaaatttaaaatactacaaaaaataaagcaatcattgcagaacaatatgtgcacaaaaaaaataaatctacacatccggtcgcagtacatttaatcacagattctacttcactacggatgaatatttaagatattcaaactcttctatatcatgatgtacacatataaagtgctatgtatttttctaatataagaaatgtaaaaaataattacaaaaacctttgaaaatgcaaaaaagatattatagagactctactgggcagtagcgatccgatgcagtaagcaaatgaacatatatttatatacacacaaatatatatataaacttatcttatttaattatatttatacacacacaaatttatatttatatatataaatatatatattaacatatacacaaatataaatatatatactcacacattatatacatattcacatatatatatatgcacaaacaaatatatatttatataaataaacctaaatatatactaacacaaacatcatatacatcttcacatatatagtcaaactaaaaatatattttatatacaaaaatacatattcatatatacatatttttgtatgaaatcccaaaacatcactattctcaaatatattttcccaaaattaacataaactaatttttcaatattattcaatttgtgaaaaatttaacaaaaaaaaacaaacacacacacacacacaaaatttaaatcacacacatttcatcaaacactttctaagcataattaattttaccaaaattaataatataaattcatc

SEQ ID NO: 249993 - DNA, 1244 bp, Cannabis indica
ctccactgatcaagagtgatacgagccaaaaatgacaacgaactccacccgaatttttccacgtacccttcaccaagagttattttcatgcgaaccaaattacgtacccaaaccaacacaccgcctgaacaccttgttcctccccccggtcatgagaaaaaaaataaaaaaaccagtcctcaaacgaccatgcatcaattggaatcatagccaaacccgctaccctgccaacaattatgagcaaaatcacacagggaactaaacaatgcgaaattgattcacctatcccatgacaaatcggacacaacaaagaggcatccacatgtttagtcttcaattgaactctcgtaggaagacacccactaatcgctctctatacacaattttttgcctatggaggaggatttagtcgccaaaacttctttcaaaatgccacaacctctccgtccacactaccctcacagtttgcctatattaatttaattgcactcttattgtatactcactggaagattgaaatccccaataccagtactccttagtaatcgaattagaaagaaaaataccaagaatattgaccgccacttcctcatcaaataaatatttgacaatattaacatcccaaactttctcacccactacaaaaagactacaaacttttcattagccaaaccagtctaaactaccttgactcggaattgactctttggaagctacagagcattaaataaaaaaatctcctctccattaccaatttcctttcgcgccctcttataaatcaaattctttaccacaacaagacttttttaaatataactttgattattactaagttctgttaaaagaaagttctcattttttaaaataccgaacttaaaaaatgacctagttgactagttattatgttaattatgtaagatattattatatggaaaatatgaatctttacaatgtgaaaaaatcaagaaaatcaaatatatatatatatatatatgaacgacgaaaaagatcaaaatatatctttagttattgatcttttgtcggataatatccaacttgaaataaataataaaatattgatgagttataaataataatatgggctaatccacttatttctaattaattttaagatagaatactatgattctcattaactatttttttatacttataattttggctaattagcaatttttcctcccgaactttaacatgtactaaattatgtcccctaaattttt

SEQ ID NO: 249994 - DNA, 1416 bp, Cannabis indica
taataattaaaaaaaagtgagagattaaagatctaaccttatcaagtatagttaatgtattatctacattgtcattttgaactttagatcttaactcttttagttcagattctaaagcctctatatatttgctttgatttcgcttcttactggatttgttttcccacacatcagatgggcaaacaccaaaaccataagtgcgaacagaaccatatctttccttacccattatttcagaataagtgtcattcatgctcttttcttttgatatatctccatttatttcttctttctcttgtaattttacctatcattaatttcatataagtaaacaatatactaagaataatacatgaattaagaattactgaattataccattgtttcttgtgttgtttcatccattacactcttatctttttttgtgtagcatagattaaatatagcaacacgtgttggtgtacttccaccactttctttctacaaatgaacatattatttatagttaaatattaatcaaattatgcatattaatgaaacaatgttcaacctaaatgttgaaaataaattttgtagttttacctctgctgatctaatttgtgcaaaactttttgtaccagttgtatgattgtatatctttttagcacgactagccttgtttgtagcactctttttctgaaataatattgagaattacaatcaataaatataaaattcatgaaacatgataaaaataacatagtaaattaaatattaaaacaagaagtacctttgcatcatctgttgcccaatagtttattaattgctcccattgtttatcatatactcttttgtccttatattttttttgctcctcaaaagataaagtttctgaataataagttttcttaagataagctttccaattttaagttccttaccacaagtcctcatagtccaattttctgccagataaggaatatcaaatttttcctagaagattcaaagcatgcattaactattagcaattttaaatatacaaattatgaatgtcaaaattactttaactaatgatctaaaatgctaaattatgtaaaaacaaaaatattaatttttacctgtatgagtattcacattgtaactttgtatttgtctggtactttatttaaattttcatagttaattggagcattttttcctatctcgtactaatgtcccaatgaattttgcaagtctacttgcatttttatcatgtggttgtccaaatttattacatgtgatttgtatctttttaccatcaagatttccccaaatgtcacgcatttgtgtaggacctctaccattctttttgtcattattatttgtcaacaaatctgtaaatgattctacactatcttcatctgttcagccaatgtatattgcatatatcgatccata

SEQ ID NO: 249995 - DNA, 1020 bp, Cannabis indica
aaacttaagagttttgtttttcaaattgtagactgatgtatgctcctcatgagaattgttctttgttgacaaacttgctaaaaatgttgacaaaggggagagatcacccttacagatcccattcttctttcggtttaatctatcaagaactttatgttctttctaaaataaaaattaataatacaaagtgtagtataaagttgaaggttattagaaattagaattagtgttgtttaatttctgttttattttttctgctatttctgttatgaagtcggtaggctgagctgacacaagttagttgttccaactaagttgatcaccttctcaacctatataaaccaacttagccattgtacccaattcaatttagtggaaatatattcaagcttttctctctccctcaatttctctcatggtatcagaagacaattcccacatatccatcatggccagaccttcgactagatctcaagatgggattctcccatccaattctgatcaagttcagtccctacctgacgcaattcctaacatcgcctctgctctaaatcagcctcctcttgttgtggctcatcatcgatcttcaatacctcgatcgtagggcgcaccaaattcatcagctccttttctggctgatactcctcgtcccctccaagatcgtggatcgcttgaagacgcttccagtcccttcttcctcagctcaggcgatcatccaggcctcgtgttggtttcctcttacagggaaaaactatcaatcatggaaacatgatatcaccatggccctcgctgccaagaacaaaacaactttcatagacgattctcttcctcgtcctattgctggtaatctcctcaattcttggctccgctgcaacagtatggtaatgtcttggcttgtaaactctattttcccagatattgcgcaaagtattatgtactttgatatagctgctgcaatgtggcaagatcttgctgaaagattcaatagggccaatgaccctcgaatctttcaattgcaaa

SEQ ID NO: 249996 - DNA, 845 bp, Cannabis indica
tgaaaagaagtctttaccttctagcttgcaattctgtcaaagttgtcaattgggcaaggctcatcacaagccatatcctgctgcattaaaaaagtccaaacagccccttgaattgatacattctgatatgtggggtccttctccaactatatcaagacatggttatcgctactatattcattttatagatgactatagtcgatatacttggatctttccactcaagacaaaagatgaagtcttacctacattcaaaaactttcaactacaagttgaaaaacaactcaacacctccattaaaaccatccaaaccgattggggaggtgaatatcgcaagtttgaaccataccttcagtccataggtgttaagtttagacacccttgtcctcacacacatcaacaaaatgggaaagccgagagaaaacatcgacatatagtcgaaacaggactcactctcttagctcactctagcatgcctcaaaggttttggtaggaagctttccaaacagccacattccttattaaccatcttgtcacacccgtccttcactacaagtgtcccattcatttggtctttctcccaactacaaatttttgaaagtgcttggttgtgcatgcttcccttaccttagaccttacaacaccaacaaactccagtttagatctgctaagtgtgtgtttataggttatagcccaagtcacaaaggttacttgtgtcttcacagttccacacgtgtttatgttgcaagcagtgtctcattcgatgaaaatgactttcctttcgctgtggtttcacctatcctagtgcacacacagatccgtcatttcaacctagtcactatcct

SEQ ID NO: 249997 - DNA, 668 bp, Cannabis indica
ctttgaatgcttgactcaagcctgccaagccacggtaaaaacaaggcgttagagttggcctaagataaaagttaaaaaggcatatgtaattctttggtgtccacctaaatgaaggaccgtgcgtgaaaaatggagcctatgaagcaccttaatatttttcttagttaattaggaattttgccctgaattttaacatgtattaaattatgttttttgaatttttaagatcgttaaaaatattcctgaactattgagattgttaaatttaaagacttttgtctaatttcatttcattttactatttcagtgattgtttatgtactaaatcatatttctcggactttgatatataccaaatcatttctctcaaactttgacatgtactaaataattgcccttgaactttcatccatgttagatttttttactaaaattggaaaaaagtccttaaatccaacaatctcaatagtttcagggggcatttttaacgaccttaaaagttcaggaggcatttagtgcatgtcaaagttcagggagcaaaattcctaattaacctaatatatataataccttaataattgactttgttgtaggaaaaagaaacttaagagcatctctccaagtagtacactaaatttggtgttacactattactaaatgtagtgtca

SEQ ID NO: 249998 - DNA, 656 bp, Cannabis indica
tctctaaataaaattcttgtaaatgcaagacccacgaattaagcgagatttagcatctttttttggcaagagatattcaatgcaacatgatcagaatagacaattattttagatcctaacaaatgagacctaaatttctctaattcaaccataacaggaagcaattctttttcagttgtagacttgtagtgtaattcaattaagcttcatttaaagtttctctagcatagtatattacatgcggtaccttgttaattctttgtcctaaaacagcaccaattgcataatcataagcatcatacattatttcaaaaggaacattccaatcgggagggcgaataattggtgcactagtcaaaagggatttcaatttttgaaaggcaacgtggaattcatgatcaaagactaaagcattttcttttccaagaaaatgacataaagggcatgaaattttgctaaagacttttatcaatcttttataaaattcggcatggcctaagaatgatatatattcttttactgtcttaagtggaggaagttttgaaataagatctacttttgctttatcaacttctattccttgagatgaaatcacatgacctaagacaattccctttttaaccatgaaatgacatttttcccaattgagaattaaa

SEQ ID NO: 249999 - DNA, 1101 bp, Cannabis indica
tatgctttcttactgagtttgtcaactcaccgtgttgtttccatgtgtaggtaagggcaaagctaaagttgaggaatcgtgaggacgagcaaatgaaggttgtacattttggggcgattaggcctggagcgtacgatccttgggacatcaggacttttgttgtttagtccctgggcgacaaatattttgtaaatgaatagcaaacttttgtaactgtattttgtaaacgggatcccagaatcttataagtataatatattattttttaactaaaaagaaaaattttaatcattcacatttttccaataacctcgttgattagcaacgagctgcacaatacgttaaaaattaagctaacatgcctatgctagttagggtgttacatttttgtattagagtcgccaggttgtcttccaaagattgtcacgacatgtacaatcatcatcaatagtcagctcgtttcacggttcagtaagcttttattgctttagtagtttattttctatagtatgatctaagaaaagcctgttaggaagaatgttagtagcctgatagtagaataggcacatgtttttaatttccaaataagcggcattcgtaagtttttctttgaacacaatctgaccatactagctcttggttacgtaggctgttcagattagtatggtcactaggcgaaatactagtagccaatgcaattcggttggatctaatgctggtcagggagctcaaattcccctaaatgttcgtggctgaggtagaggtcgcagggggagggcacgtggccagggtgatgttaacctgccacaggttgcccaagctgctcaggatgcccaaaatttggataataggtttgcagaaatgtaagccaggatcgaggaacgagataatgagattcgatggttacgacagcagggtgctcctgcaattcctactcgagaaattccagtggcacctgcccttgctgtctaggctgaaccagtggtgtcagtgaatcggatggaacccttgtatgaaaggttctgcaagcaagcacctccaatttttttgagaggtccagatgtcatgaaagcccagaaatggctaacggtgattactaga

SEQ ID NO: 250000 - DNA, 925 bp, Cannabis indica
aagaagcgacatacaatacccggatcaagcactgaagcttgatataaaagtcttgcaatcacatgttctgagatcatctgcctgtattctatgcttttaaaattacaagttcatctaccaaaagtccatacaatctggtgtgataacttaagcacaatcatgttgacacttaatcttgttcttcatgctctctactttcttagggataagattcaacaagacctcattcaagtgaaatatgttcgtgctatagactaaatagaaattggtctaaaaaaagctatctcaagttcgaggttctctacttttagacccaaactcacaattaaattcagctcttgtccagtcgtaagtttgagggggcatgttagaattagagttagctatattagttggtttctgctagtatgcatatcaatcagtcagttaggtttgtcattgcttagctgtaaactagttgccttgtctctcattctgtaattctagtttgtgtaaagcattgtatgaatctttccaagcatgtgactgttaattagagaatctttcattcatctttgactctttttatctctcttttatctctcaatcttttctctgcttatcttttttattttattgctttccaaatacaatatctaagaaatttattattcttattcaccaaaaataaaatagctaaaaccccaagagtaactgaacaaggtgaactatttatatattaattattttgatggttaacaaagttcaacagactttttgtcctttctccaaagttttgtcttcatggctaaggaaatgccaacattttctatcacttaggtcatgctccgactttgagaatttgtaggcaagtatgctaggggcttatgtttgttggaataaatgtgttttgtggaatttattggcgttcgacaccataatcttt

SEQ ID NO: 250001 - DNA, 587 bp, Cannabis indica
tgaaccaccaaaaatcctgaccaggacacttaaccaaagcatcaatatgtccagctgtataggatttcacatacacctcccaatcatcattccataacaataacaaaccaccactcttcccaacacaatctacatgaaaactatttgtaaaattaatttgtctctggattccttccgcccaaccaccataaagtttagtctcagacaaaaagactaaacttggagaaaacttacgaaccaccgctcgtaaggcagtcaacgcatcggggttccccaatccctgggcgttccaacatcagtgagaaatggctcctggcgagtctgctccgcagactttgcgaatatattattcaaaatcccaggggtcatgtcggacatctcctcggtcctacctttttcacaacttcattagtataatcaccatccatttttcttttaccactaccgccagctctgggacttaacttattcatagcattagccacgataacatgggatagttttgggctaataggaaaagaggtcaacttagaattacctttagatccacgactagtagaagagttgacacgtttccaagtttttga

SEQ ID NO: 250002 - DNA, 759 bp, Cannabis indica
ttatataatataaaaatgatattttttatgaaaaagttactagttagtttattatcaacatcataagcaaccaaaaagttatttttgaaatgcagaaaaaataaaaaaaaaataggaattagttttatttcaaatatattattttagaattaaagtattttttaatggtgtaaagatattattataagagatttttacatctggagacgtttttctctatttaatattaattttaatgtgtatgttcaaattattaatattactgtgggtttttgccgttttcaattttaaagtatttaattgcttactgtttgctagtgtcatgattaattttcacattgcatttatcaacctatggggtttatagtcactctaggtgttgatatcaactgatgacgtcacatactatcatgtctaatagcttgcaaaaaaaatacatactttaccatattagttattttttatataaaaaattgtttattattgaaagtaagcaaaagtttattaatatttatttatttacttaagtttatttttcatgaagacatcacttacctattttctctttttacttaagttatatactggtttcttatcaacatcataagtaatattaataaacaatgtgaaaattaatcattatgtttgatgtctgaacctagaaaaaaaatagactaattagtttgttattgtataggcacgcattatgtttgaaaacaaaaaataaattgttgttatatacgaaaaatagactaatag

SEQ ID NO: 250003 - DNA, 1741 bp, Cannabis indica
gacggaggtgtacagagcaaaacggaatggaagtttaggtagtttagccgccaaaatttcagtttttgtggttaagtgttacaaaccgtaaagttcaggtggtttagccgctaatatcttttttttttttttttttaattttctactcttaaattttgatggtaaaattttttaaattattgaatcagtaacaaatttaaggagtcatctgctaccctgaactgcttatgtgtattttacatgtgacactttatattagtactgttattatttaaaaattattttcaagttttatttaaaatcaaataaaatatttttttaaaaaatatcttataaaatatgaaataatttttatattttttaaataataatactaggtgtatatatatatatcaatgtgctacgtgtacaagtgcttatacataagtaatttatgttagcaattaattgtaaaaaatagatgacacattaaatttgctaacagtttaataatttggaagattttactgtcaaaatttgagcttaaagtgttaaatgcaagtaaaataatagttaagaaagtttaatataaatatatatatatatttatattagataaaatgcttattatattaaatgaggagtcataatacaataagcataagatgaggaggtatttccaccaactatatgaacatttagcatctatcgaaataccaaacttagctaacaaatgaacagcattatgtacatgagagatctatgctctagaaaaatcaaatactaaaagagaaacattcaataacaaataatgaaaatcacaaacaagcacttctaaaaattacaatcctttaaccacttagagaaaatcaatctcaacatagtgaactgatagttgaaaacactttaaaaaaagtagagacatagcaactattatctctatctcccctataattacgtaggatagcacaaaaatcagaaatttaaatcattatgttaacaacaacatgaatatttaatttcacgcgacctaaagagggattcaactaatgtggatcctacgtagcagcctttgaagacgatgcatgaaaggaagatgcaaaaggcttcacgactcaagcaacatgatatttttccaagtaggtaattgcaaagtagagaagaacatcaggcggtttaggcttagtaccatgccttttcttgtttctttcactcaaaatgctctaaaggatagttccaaattgttcaaactgtacagaggtccatatatttgatacatgtaaaaaagtttatttaggttcatatgttttgaaagtatttcgtcgagatgaaaagtagaattcttctaaactcgtcggaggcgtttgcatttgaagagagcatgggagattgtctctttgtcacaatgacacaaggagcatctttcccagtcactgatatgtcttgtgtagaggatgtctacaaccgggagacaatcgtggataacacgccaaagaaaaatacggatcttcgatgggagggataacgtccagaatttttaaaccgttagcaattcccttttacaaatacatgggagtttttaaggcacgtttaaaaaccgttgcctataccttccgacagtttaaaaaccgtcgtctataccttccgacagtttaaaatcgtcgggaatatcctatatatttttctcgacggttcccggcggttttaaacacccacttaatttttttagcgacggttcaaaaaaaaaaacatttttggaacc

SEQ ID NO: 250004 - DNA, 1348 bp, Cannabis indica
ttatgtggagaaacaactgttagaactctgtaaattaactttataacaaccaaatgaatatattaataaaactgaccatgttataatcttttcttaaagagctttgtgttagattgtggatatgaaatacctgcaaatatcataaaaaatattataccgttgacggtttataatcattgatatgtctagttttagagtgttagcaaaatgttaatacaactataatgcaactacgtagaaatttaaaaactagaacaatgtttctatgtacgtggctctagatgaattcaaatttttatttgttattcgtgatttgatatgaataaatcaaccattaaaaatctagaaaataatattaatgcaattggagaaacattagctagtgtattaatacatttttcttcagtttatacatgacttagattgattagaactccagatctattttagacatatctacattttatgaatctaaaaattgatattaggagaattagttttttgcgattttaatcgtaattcaaggttgaattttagttttgtacaagtttttctgtctgattttgcataaattcgaaattgtatatgtttgaatttcttacggtcttcttctcaagtgaagtcgctaaaatttatggtgattatccgtctattttggtttctttttggttggcctgctagtttggttactaaaagttgtcgtagatgtgcctgaagtcaatgctaatgttcaatttatgggccagcaagtaactattttgtgtctaggtcatcattacaattgttttaatgtaccctaataatataaggataaagtgattaatcgaataagggtgagtgatgttcaattatctatagttttagttattttataaggtcatttaagaattaatataaacccttattttctttataatgcaattttattttgatattgatgggaactcacattgagatatactaatgggaacttttcatacgaagatgacatagagatatagtgagagaacgaccattagacgtaaatgatttaagcaatattactcaagattggaagagttgggagaaagttgttgaccctaccccctaaccacttgaataaggagagttagaaagctttatttgcgaactgttcatagacaaaagtaaatttagaatcgcaccacaaaaaaaaaaaacaaatagacagctaatgaaatatccaacaacgcaagacacaagatcgttggcttctaatagtcacacatttgtaagtaataatatttatcatttatttttaaaatataatttatcttaaaacacattctaaactctttcatttatttatttttaggctaattaggatttt

SEQ ID NO: 250005 - DNA, 577 bp, Cannabis indica
tcttggaaaatagtaatgcattagttgcacagataaatgcaatagaaccaatggaatacaatgcagcaacaacagaagactcaacaactcaacaacatacaatgcaagggacaatgctagaagatggggaaaaaaatttgacttcatagactacgtaaaacttgtggtagaggaaatggttgagcaactggaaaacaataaaaacagggaggtagaaatcacagattatgacaaactactaatcacagatccgcaacatcctgaaagagaagaatcacaaatatacaaggacaaagaaacacttcaaagtgtgcttggtttctatgcaattagaaacaatttccaattcaaagtgaaaaagtcttgcgcaagaacatacaaaatttgttgcttggatccaaaatgcaagtgggcactaacggcatctagaaacggaccaaccaagtcattcataattcgaaaatatgacagaaaggtgattcacacttgtgatctaaacataagatttgcagacaaaagacaagctacaacgaagttgattggaaactacatcaagccaaggtttaccaacataaaa

SEQ ID NO: 250006 - DNA, 1126 bp, Cannabis indica
ttccacacgttgggaaacaaactctccaaggacacacatgcggtgccacatgagtcatggaacatttcgtactccttcatccttaaagtacgcttccaaaagaccataattcctctgtaagtttggcctttggtctatctcccaaatagagttgttaagaactctaggaactagagaggttgcgagagctttgcctttcctttgctcttatgatgtcgtttaggttgaaatggttcaaaaggcccctcatctacaatgagatctccaggattctcctcagtaagaggtacttcaatagatgatgcctcgagaacctcctcaaaattcaccaaggcaaaatgaaagtcactgccttcaccagacattgaaaaaagtgaaaagaaaatccaagcagttagtaccctatatccaaatgacaaatagggtacctgggaagcctctcccagaactgcgtggagacgtccccaccagattcatcatcattatagtcactaccatatagcagcctgcatggtgacaaatcgggaaccaaaacttattatggtaacaaaatggctagatgttcttttcgaaggtagagcaaaacaaacgtatgcaacgggccaaagaaaaaataaacaaaagaacagctagaaactaaaaaaaaattcctacaaaattaaactctcataatcaagaagcgctcaaacctcgaatatgcatttcagtttgggcctaaaagaaaatacctctttaaaaaccctaaaaccataaatgctcagctatggacccagcaagcaaggctcagacacaattaaccctaatccctaaaattgtgttctacgcatgcaaaatgatcaattccaccaaatatgatgactacatttcaatcgaacattgaaaaaatggtctaaaagaggaggaacacttacttgtacggcgaggaaagagttaggggtggtggtgatgctctaggaatctgctgtgcgcacgacgacgataattttcctagctccaatagcatattagtttgtggtgacggtaggcgccgatggaatacaatggcagagttgggaggaagaaggtgttggaaattattttaccaggatctagatttactatcatgtatgttggattaacaacctaa

SEQ ID NO: 250007 - DNA, 1248 bp, Cannabis indica
gctttgatgtagcatctatacatatagatattttatagtatagaccgcgaggtactaacttatgattaatagaacgttaattttaaacaaaaaaaaaaaaataaacaaacaaaacacatatacctacaaataaaaaataaaacaaacaaaataatataatattaattaaaatattatatataccatattaacaaaattatatatcaccttttatatataataaaataaaacctaaacattcatgatctaaaataaaataatatgctatacaataaaatttattatataccatataataaaaaatatatacattgcagtagaaatatatatataataacaacaaataaaaataaaatatataaaatgctaataaaattatacatcatgtcagcaaaagtacaataaaagatagaatttaaatattatttaaaaaataataatataccgtataacaaaaaaatatatatcaaaacatatatactaacaataataataataaaaatatatattactcatatatatatggcgcccgattccaacctgccttgtatagcagtagatttagttatgctctacatattatgttatttattgttatatacagttctataaagtcatatacttattattgtacttctttcacagggtgtcatataattcagacccacgtacaattaaaaaaataagatttatacttattgtatctggtttttattaccggcttgtgttgttcgatttaatgacatatttattaataagcaatgagaatcaatagaaagtaagtcattcccttacatttatttatttatttaatttattaaattgaggaaagaaagaacttgattaaataaaggagaaaagaaagagacaactttgcctaccaaatttttaaggaatgcaattaatggtatggattttatttatttctattttatattttaatattaaatttataataacacttttattctttaaaatatttcttacaaaattactagcatatactatagtttaactcaaaaggataatttagtcaatttaagcatttcgatgacttttcctgataaggtaaacaagatagatcactatcattccatttataaaaatttttagtaaacaacatattacaaatattaattccaattattcttcatttattacgttatatttttcaattactttatttcaattctgaatactgtatagtaaacgtgccataaaatattatgtttttgatggggttacaat

SEQ ID NO: 250008 - DNA, 674 bp, Cannabis indica
acggttcagtaagcttttattgctttaatagtttattttaatagtatgatttaagaaaagcctgataagaagcatgttagtagcctgatagctgaataggcgcatgttctaaatttccaaaataagcggcaattagtaagttttacttgatcacgatctgaccagactagctcttggttacgcaggctgttctaatagtatggacgccagacaaaacaccaggagtcaaggaactcggtcggacccaatggtggtcagggagttcagattccctcaaatgttcgtggttgaggtagagatcctagagggagggcacacggccagggtgatgttaacctgccacaggctacccaagctgccaaagaatgggaaaatatgtttgtagaaatgaaagctagaattaatgagcaagatgaggaagtcagacgcctgagacagtagggtgctcctacaatccatgctccagagatgcaagtagctcctgcccctgctgtgcagtcaatatcagtcactgcagtgaaccgaatggacccgctgtatgaaaggttctgcaagcaggcacctctagtatttttgggaggacttgacactatgaaagctaagcagtggctaatagttattactagaattctaaattttatgggcgtcaccggcaatgatagagtggcctgtgc

SEQ ID NO: 250009 - DNA, 956 bp, Cannabis indica
caaaaactagcgcacaaattgaggttcttgtttctgctatcataaccaatttgattgggattatttcacaaacacacaaaaacaaaaaaataaattacaaaaatacagttgtataaaattttaaatatttttattgcttttgattttatttacaaaaaatacagtcttttaatgtatttttatgccgtattcacgttaatttgttgtcaatttttcgttatataagttgtttttttgttattattttgatattatttggacgttatttttttttttattcttttggatttttatagaacaccaaaaaagtaaaaaatgaaatatttaaaaaataacactttacctaattatcccaattaaattctcatgataaggcccaaagaaagttggatcggtgatacaccatatggaatagaccttctaccatggactttcggggtctgctgacattttataattttactacatttgaagtaattctttattgaaatcagtatctaaaaacagtactcgcataaataaaacaaaaaatgctcatatctctttacataataataaaagaatataaaaatataatttttacataatccttacactatttattttattacataagaaataaaaataaataatagaagggtgtgtggtttgccaagtaaaataaataaaaatggtgtaaactaattataagtagtaatgatagtataaattagggttatttgcggcataacctccttaagtggtcagcattttgcaattaactcctaattctaaaaattttgcggtaaaactctttaaactcaagttctattagcacttagccctttccgtccatttttagctgttaactgccatggtggaatgtccacgtgtacacagtgtacacgtggcacaaattttatggtccacgtaaataaatatttaaaaaaataaaaattaattatttaaaaataaaa

SEQ ID NO: 250010 - DNA, 667 bp, Cannabis indica
tttgcccatctaacaccaagcctatagctactttctaagcaattcccacaataatctctaccccatatcaaaattccttttgcccatctaacaccaagccttagccttcctgcaaccacgagcccagaaatccaccatccacgacgaactttaacggcgtccccctacacagagacattacttgagaaattttattttccttagcagatttgagagagtaaaatagatctatgtaagttgaaattagaaaaaaaaaaagtatacatatatatatatatcaaataaggaagaaccccttctactttgacccaaaaataatcacacatatatcaataaatatgtatatatacacaaattagaataaatgggtgaggaaaatcgtcagacctaaaccaccagaagtctccattacacataaaaaaatacaaattaaaaacaaagagagatatacctcaaaatggagctgccaaaaccaagcccccgtcaaacccaaaacggtcaagaaccgtcggtcgctggaggagggcacgacgctgacgagagaaagaaagggagtaggggagagtgagagaggaccactacgtgactaagaaggtgttcaagttaagattcgaagctctcccattcgccaactgcccaaagctacagcccatcgtcgcccgtcgtt

SEQ ID NO: 250011 - DNA, 1139 bp, Cannabis indica
aaataaaaatataattgtattaactaacaacaaatgagagaacaaaagaatttacaagctaaaaatatattagaatagtatatatatcatccaacttaagattgtatcaaacttacaaattcatatgtaggtactagtaaagagtatgctatcaaatttcacaagacaagcttccatgatatgaatcaaagacaactacaaagtacaacagtgttgcctattgatatggaaattaaccaagtgagaaccattagaaaattaaaccatagaagctcaaaatgatgacatctccatcttaattgctagttgcatcaaaaagttagaaaagttaagttaatctaaaagttgagttaatcaaaaggtcgtcatctccattaaattattatatattagcatcagccattcccccagcagtattctccctcagcctttgtttcctcagtctctctttcctcttcttggtttgttcagttgggttaatggatggtggccttccccttttctttggctgaacggtcgcctaaaaatcaccaagttttatcttattagttactaaccaatagcataaaccaaacatagatgcaactactcaaaatttcagaaaaataacgaacctgagtaactgttgctggacattttcttacaatatggcctgctacaccacaattgccacatttatgcacttgtccatatcttcttgtcttggttgcatttgcaggtggtggttcatcagcagcccttcttctcctcttttttggtctccctggcatatttgtttcctctggcggttcaattgggttaagaccagatcttggccaaagttgtggacctagcatagggtgtatcacacccgcataacccttcaacatcatatctttcttgtaccagtcatgaatgtaattccaaacttcatgacctacctcacatatgcatcctaatgcatgaccacaagggattccacttagttggtaccttctgcagcaacaagtcttctcagctaggttgactgcatagctgatagtgcctgggcagtccacttgaaaaatcacttctgttgcccttgtcaccaaacaatttctagcagacttcttgttctgctctatgatcttcctgatgttttttcctactggttcattcca

SEQ ID NO: 250012 - DNA, 1271 bp, Cannabis indica
accctacaacaaatcaaaaatcaattgtgattaaaatcaacaaaatgaaaaggaatttttacaaaaacattagattttgggataaaatttataattttatgtcacacaatttgttttataaaatattgtttttttatatataaaataaccgtaaaataacaaaatagaacagtagaacaactaaaattaaaaataaccatgaaaactttcttaaacggtatttttgaaaaaaattctgctgcacagtttaaaattaaaaatatcatggtgtaaatattctaaataaaaaattatgattttgttgaataaagaaaggaaatattaatgtacctcatatctgttgatttggttatagtcaccacaattaataatgtctactaaagatgttgagccattagcagaaagaacactcaataatgaatttggcacataattcatagcaaaatttttcattatgctcacaatgtcctaaaaattacacagaaaaaaccaataattaagtaatatttttccattttttatttatttatttatagaagaataaaaattagttattattattattacctgaccctcggttacagttattttaataataataataataataataataataataatataataataataacaaattatataagagtgtttacacatttggtactctgtgttttatctaaatacaagtttggtaccctgtattttaataatactttttggtaacttgtattttacaatcatacgtatttggtaccctaaattcaaatttttttaataaatttaatcaattgaatcaattttctaaagttttataaattctgaattcaaatttatttatttgattacatataattgagaactgtttggttaaattaataaaactgtattgattaaattttattttagggtactaaatatgtacaatttaaaaatatgaggtaccaattaagtattattgaaaacataaggtaccaaatatattttccataaaaacacaagtactaaatgagtatattcccattatataattacatgattaatttggttttcttggaaattaagattgagaaagaaaaaatatcattgttattcggaggtccatggctattgctattactcaaataaaatcgtacttacaatgctctaatgtacagtatatatactttttgtttttaaaaatataaaaagattatgatatttaaaaagaatataataaattaaattaaattaaaaaagaataaaaataagatattaagattaagata

SEQ ID NO: 250013 - DNA, 1329 bp, Cannabis indica
atacttgtgagtagatctaagttcctagtaaaataacttccaacagtaaatccctggggtctacgtggcacttcttgacgaagtgcctcgtcatctagttgttcatcttcaagtgcatgcccagtttccccaggttgctcctcctaagtgttctgggggttttcctgagtcgtttcgtgcctcctgactcgtgagccgcgaggtctgcctcgtggcctcctcactccaagatcaggttgattttctgtgttgttttcctgtgccgctttggcttgcctcccgttcctactcaacattgcgttaatttgcctcctctaggcgtcgccggagttgacaattttctaacttgaccaacggtacgtatcttgtggggtcataggcaccctcactcacatgcgtagaagcgccaacatttgtgttgggttcctcattcccagtttatgggttttggtcactgtcacgttggcttcttcttgaatgtgttgattgtgttgaacgcattgttcgtgaattgggtggcctccgtgagcctattggctcgtttctaggacggtgagtagtctcttcaggatgagtgttatcgttttccccattatcagccatggagaagaaattccttctttggttaggaggatttttctgagcttttatcacgtaggctctcaatgaaagcacgaaactgttaacgcagattttcgttaacaataatgagcctatttttgtaataggtttagcacagaaactattagaaatctaagaatgaataacaaaaacagaattaacaccgggttcttacatggtgttgcagttaactctgcacagtccacgagtcaatcatattcaaattttctaatacagaactagggttctttgcaattagagtattctttttcctctcaaggatttttcgtccccttttttgtataatctgcccctatttataataacatacgtaggaatttaattacattcagattcgaatcccacaacaatatttccccaaaattgcgggccttaattacggtccacgtaaataaatgcagtttttatttgaaaatcacacagctgtgatttaaactgcttttaaagggtcaacgctgaggtggattaagacacgccgcaaaacttatctcgttgaggtgtctcccctggtacacaaacgacttgatttattcatatgtccttcagcactggcatgagcaccagtgtactgagcaaacttaagaacttctctttgactataaggccttgcagactggacaatcatgtcttgggagttctcaatagcaacaataaccctggcagcgagttggagcttaccaggagtat

SEQ ID NO: 250014 - DNA, 610 bp, Cannabis indica
gctatatgtataagataaatatggactcatcaatacaccttattgactgcctatacatggtctgaaaaagatcccagcccactagaaaatttcttaaaataaatcttcaatcagccccggaatctgatctaatcagaatataccagctggttagataaaaaaataaattgtgtaattaaacttaccatttttacctcaatttctataaatagaaaagctagacaactttccttccaaatttaaatacaccaattatggacaccatgatattaaacattccagttaaaaatatacaataaataataaaatatttttatcaattaaatatatcaaaaatagaattaattattatcaaagtgttacaattacaaaataaaagagaagtatatacaagatgtaagaaagttagttacaaggaaaaataagagagtaaactaactaaacagaattaactaactctctcatctaacattaaaaatttataatatttaattactattatatatccaaacacacattttattttaaaatttattataattactaaattatgtaattactattctaataattaaattacctactagttacacacacatttccaaaaact

SEQ ID NO: 250015 - DNA, 633 bp, Cannabis indica
atttaacactaaatttggatttctttattggaattgcccttagtaaaattgagcaaaaatcttcaaatctaacaatttcaatagttatatttttaacaacttacaatattggaagacacggttagacaaattccattttttttaacttgatctaacattttctttcatatggaaaataaaatattttaatgaaattcatattataaacattaacaacgtatgaggttgaaaaagaaaaggaagaaaaaggacggtgcaatttggtaagaaagggcagttgtgactttttggatgtcactttatgatagtcctcacgtgacctatttacgtttgttgatagtagcgattagagagagcatatcacgggccatactggtactactggactacgctacccacatctatcaaccctttttctcattaattatttttacatctatattttttatttttataatgaaatgaattattatcatcatttattaatattaatagtctagtagaatcaatgtatgatatgacttattataattatacatgtacgagagaaatgttaaaagcacaacacaacgtccttaccttaaaataaaaacgtgacacataacaaatgaacaattagttgttgttgttgta

SEQ ID NO: 250016 - DNA, 800 bp, Cannabis indica
ataactgtaaatttaaagtgagtagttaactcattgtttatttgtttatttattttttctaatacaaatctaatttttttttttgattagtggttaacctgggaacgacaacccgaaaacaacaaacagagaaacagaccaaacaaaggccaaagaaactacaacaggccaaacacagcccgcccctgctaactaaagcaaagaaaaagagagacaaataaaagaaaaaaaaaaaccgaactaaaaaattagactaaactacaacatgatcatctgcattaaccagttgcagggagtcatcaaaactggccaaatcgataaccccaaacttgttgttacgattttcccattgagccacgagatgggccacacgattgcaggatctaggtgtccaaatgatttcccacagattgagattagcagccattgaagagaacctttgaaccaggtcctggatgttgtaatgcaggttatgtatctcaggggatgtgctttttaatgctgtgacaacatttagagaatcacattgaaacacaacatttttgtaaccgagatccttggctgctgccgcaccagcacagacagcgtaaatttctgcaggaagggggtcacaatgactcattctgcaggagagaattttttgctagtgatctcccaaattctaatacaaatctattggcaattatagttatgagcaaagtgagatactatgataaagatgagaacgaatttgaatgtaataatgatcacaaatgagatacggtaataatagtatttttaaaaatcatatgataatgagc

SEQ ID NO: 250017 - DNA, 709 bp, Cannabis indica
cagttaattacaaagttgactgtgatctttacaatgttcttctccctaaaatgatggtgtttgattacatatcacgtagtataattgcggttattacttgaaaattgcacaacagtgattctctcgcttttactgggtcaaaatgatcgtgtatttaaacatgtctttaattgtagcgttctgggatgtctcgacaggagctcggttccagtgactgtgagagcgagctggagccttttttcttatccttttgaggtcgatgatgtacgcctcatcacttctttgtttgataccataatgtttcatttgaaacaatcacggtttttttattaacaaagagtttctcgaggcttatttgaatattatcttctgactcgttgagattgtcagtctcgctaagaagatgtctgaagttaactagggggaggttataggaatgagtcttcctataatgagataggcacctcgtctattaggtctcaagccaactcgactgttatacttagttgtacattatttgataagtgttcacagtcgatatgtgtcgcttctgtcttcccagatgtaatggagttgaagcctcgccttatgcattcaatgacatacaatttctcattaatataccaaaaacagtttgcatatcttttccttgcataagaccctatagtcagcgagttacaagtatgctccactacttatgcaattaatg

SEQ ID NO: 250018 - DNA, 553 bp, Cannabis indica
ttaggcatgttatcgtaattttatattagttgtgcagttcgtttcaattgtgttgttggagtcagacgtggagtgttgtttttggctgctcctattgctaggaaatatcaattagagtcacttgggctcttatcattgtaatgatatgaggtctatttaaattcaaaatggcccatgtgtacaagacctgatcaaagggcaaaacaaagggttattataagggctatatatttacaaaaatatgggaaaataaagatatgttttgatatatatatatgacataaaaacttaattatattaaatataatatttttaaaaaaaaacttataaatatgggaaaaagtcatgagaaataccataaagaactttaaatttgtgtttcctttttattatttttttctttttttaaaaaataaaacactaaattaaataaaaaataatctcgactgtagaggttttttttttacaaaaattaaacttgtttttttatttaaactactgcttgttttttttctttatttttttttgttaaaaactaattatttcaataaaa

SEQ ID NO: 250019 - DNA, 807 bp, Cannabis indica
ctcatgagccggtatcttgggcccggctccacgagaatgagcatggaaccgggaggtagaagtgttcagctgcggcattgtcgacggagaagaaatcaggggcagggactgcttcagatcctgataataatgcaattacatgataaaaaggaaatctagatattagatcaaccaacttgatgagatataagttaaagaaaaacttgatgagaaataacaaagctatatttgattgaatcaaattttatgtttagataggggaggagcacatgcctatatgatttttgtgcatagtatgaatccacgttataaattacttttcaaataaacaaacttgatgtcaatcttgatatcaatgaggaaaagcctcttgaagttcatctgtacagacacaaaaaacagagataagaaaatcaatgtaagccaaaagaatagcaattgtcaatcaaaataaaattgatttaataattttaatgtttaacactaaacataagctatcaaagccaaattagtttaatggagattgaaccttaacacttgtaacagaatactacaaaagccactaaaatatctcagaatgtacaaataatatgttcaatcattggtaccaaattaataattcagatttattacaaaaaaaaaaaataaatcatcagaataccaacataaacaatctctttatcctttagcagtaaattgcaaggaataattaatttcataacacagtgagtctatctaaaattaatcaatttttattttaattcaaaggaaaaaaaatccatacccatactattaaatcaaagcaaa

SEQ ID NO: 250020 - DNA, 897 bp, Cannabis indica
aaattttcaattaacacccaaaatagaccaatcactaattatcctagacaagacaactattgttaatacatattacatcattcactaattagtaggtccctaatactagcaacaatttccaattaaataatacaagaacagaacaacatatgagataacaatgaaaaaaataaaatctcaaaaagaaaaaaaaaataacataaatcaacaatctaacaatcaaatattatactagcttgtttagaaataaaccatgaaccatcacaactatgtgagatccaaatcaagctaattaaacaggccaaaaataaaaagaaaatggaaattcattcaaaacataaactaacaataaattaatgtaagataataaagaactcagatgtctatggggtcttcaaacctcaatcctacaccctacagatagcataaataaactaggtcgaggctcaatggagaggataccagaaaaattgacatggcagactgagttgagccaccgttcctctacgagatgagtgtggtgattgaatattggtgtacacctgagatgtacaccacagactggccaaagtcgttgatcgcacacaagaggagcagaggagtagtgatcgtgtttctcgagaagaagtaattcaatatattttttcatttaacctaaataaagggtataaagggaacaatacctataaatgtgggtataaatgaatgattaaaaaaaaaaggtaaaaattaaaatggtttagttaaaaggggtatacaatgtaattttcccaagttctaaataggtgagggcttagtaaaacttccacacacaccaataactctaaatcaataaaatgtgcttgtagtaggaagtctttgtttcagagttaactaattgataactctgtttttggg

SEQ ID NO: 250021 - DNA, 4727 bp, Cannabis indica
tagcagtggtgagtgatgataatgatgatgagagaacacattttttgaatgagagcgctaccgtcaacctgttagttatttttactctcaatatatgttcggaattatttttttctaattttttttttttcatgagggtgttcgttatacttacaatatcatccctgttaaatttttaaaaattttcgaatagtgtacagtatcgaaaatacgtttgaagttttattttgaacgcacgtggtaaattggaatatcaagaactctgttttcggtattgtaaactatttggaatttttcaaaaatttacagaaatgatactgtaactataacaaataccgctatgaaaaaaaatatttcgacatgtgatttcagacgtgaaagttgactaagaagttgtaattagcattctcctttttataataagagatccaaagtattaaatttttttgccccaattaatcaatttcttcatataaagagaaacaaataatttttgtactaaaaaaattagtgaaattacaactaaaaccctcaattgcaaaaactaaataaaaggataaaatagtaaaaaaaaaaaaaagaaggcttattaaaaaagaaagctcgacacttgtagaagaagaagaacagctcaactcagttacatttcaatggcggctacactgcaattatgctatgggaagaccttcaagaggccctttgcggttgcaccacctaactccggctactctcctaagcctaacccaagtaggatcatcatgtgctctgcctcctcccaatccaagcgccgttacaccattactttgctccctggagatggtatcggtccagagattatctctgttgctaaaaatgttcttaacctcactgcttctctccaaggttcgacttttctcgttttattccatttgggtacatttgcaatttcctgaatgtgtcgaaagttttcaatcttttttgcttttgttgatgattttgagtttcgaattctattgggtttagtttagtttattttgagataatgtgcccacatttgcattttccataaagtattaaaagtttcatttttttttttttttcattgttgaatttaaattttggggacatttggaaaattagggattgatttgagtttccaagaaatggctgtgggtggagttgccttggatttgactggtgttccattaccagaagaaactctctcaatggctaagcaatctgatgctgttcttcttggagctattggagggtaattttcttttcttttctttttatttttttattgaaatgctttttgttgatgtatttatttttgtgttgaaatggtatggtttgtgaattgagcagcctttaatttcttgtacacacattgttattttgaaaagaagaaaatatacaaatagggaacaattaaacacatcaaattcagcttcacaaggcaaagctgatcaaacagcttgcatttgaacttcaaagttggtcttgtaaaacccttcaacttaactaataaacctctcacttaccaaagaacatcacatattgggagatgtatggttgctgatggtatttgatagaactgaattgagattagcccaccaccttctgttgcacctgcagacacgaaattaaggtccttggagactctcggtagaacttcttgatgatttatcatgaaagagtatcacgagaaagaagagagtggtgagcgaagactttcagctttaatccgctcagctctagcacgcttcagaatggcaagctcggaaatctccctgataagcttctgatcagctgcatctaaagatgggcctctaggggggtctaggaggctttggaggtttctccttcactgacgatgttttctctgcaagaccattagtgtcttctccatccaacatcttgtctgtcaccttgacactctcaagagaaactccattgacattcccacaactcaccccatcttcagctttgattaacccatcaacaaaaccaccacaaaacttagctatcaatatcttagcctgttgtttagaacctgaaacaggggtcttattaaactcttcataacttgttagcaccccaagttccagatcaactctaaccccatcgtcccttgaacctgtaagatccatcataccccgaaatcccaatctaattatcaactagctcctaaactgtccaattgaccaaaccaataatatcaccaagaacaccaaaagttcaacccgtaacacaaaacttcccttttggcgatgtatgttattcttaaatgtgaatagaagccacagaaatatctagcttcatcaagtgagcaacccttttcaatttaaggagtaatttattctaaaacatcaacaataactgaaattataacttgctttccaaggacagcacacttttccagtcaataattaactattaaaaaactcaatccatcttctatttcctcctccgagctatcaacagaagaaaatccttgtagacacattggttttgtgtttttctccaaataacaacatttgattttaattcaaatgtttagaaaaacagaattgattcaaatgtattcaaatacagtttatgttcaactcaacttctccacaaactaagcaaaacgaatacttaaatgagtttaagtcaaaagaacaagtcttttaacaaaattttgcttatttttcaagtaaacacataaaatttaaaaatgtgggatatgcaactcactacctctttatttaggtatgacttgatgaaatttccatatcgttcggaggtcacgttgttctggcaaagttactaaattgatatgtattttatttttgaaaaaaaaggtacaaatgggatgcaaatgaaaaacatttgaaaccagaaactgggttacttcagctaagggcaggtcttaatgtttttgcaaatttgaggccagcaactgttttacctcaggtaaaatcttttctatttcttcttcactgtctgtatttcatgtctagtacaagtacattgtattttctatgttagtttaagttctaaggattgtagaaacgaaaatatgcattgtacttttcttatataccgtttcgttatttgcagttggtggatgcttcaactttgaaaaaggaggtcgctgaaggtgttgacataatggttgtaagagaacttactggaggttagcctgagatttacatgtttggactgatgatggatcaaatgatctctttatttcattatagttttctgctaaattacaggtatatatttcggaaagccaaggggttttggcacagatgaaaatggtgaggagattggatttaatactgaggtgtatgcaggctatgaggtactacttatagttattattttcgtattgcttcaacaacataagttatgaaatcgggtttataagttgtattgagtcagtcgtggccatatggttgctagattgatcgcattgctcgtgttgcgtttgagactgctcggaaaaggcaaggaaaactttgctctgtcgataaagcaaacgtcttagaggtactcctatattaagcttgtttgttcctaaactttactccaaatcgaaactgtcctcgttgttgtactttaccattgatgtattgtttcttcaggcttcaatgctttggagaaaacgaattacggccatttcatcagagtatcctgatgttgaactctcacacatgtatgttgataatgctgcaatgcagctagttcgatatccaaaacaggtttggcttaaccttacataaactcgctcgttgcggttatgcatctcttccttatggtttacatatgtgatgttttgctatggtttaattgcagttcgatacaatggtgacaaacaacatatttggtgatattctatctgatgaggcttcaatgattaccggaagtattgggatgcttccatccgctagtcttggggaatcggtaaagagtcaatttttttcactttgttcaaggtttttgatctacgaggaagttttaattcatcgaaactcttcatgaatacagggacccggtctttttgaacctatacacggttcagctcccgatattgctggacaggttagtttactttagcctcttgaagttaacatgtcttataatctgtaacacgattgattcttttctaggataaggcgaacccattagcgaccgtgctaagtgctgcaatgcttttgaggtacggtctaggagaagaagaggctgcaaagagaatcgaggccgctgttcttgacacactcgataggggttttcgaacgggtgatatttattcatctggaacagtgagtaattatgttcgatatttgattgttgtcggtataagttttagtgaatactcgttaatcgttactatttgtttacacagaaactggttggatgcaaagaaatgggcgaagaggtattgaaatctgtagaatcgcgagttcccgctgctctatgaggcagtgaaacgagtttagcatcgagcaagttttggttacaagatcatgctaggattatctcttagttcattcatccttatttagaatatatttcaagtgagttggaaatttgactatgtaaaatttcattgtcatgagcaaaagtgagataagtgaaatgaaattcattgttgtattagacactaaatttaataatgtttattattggatttaatatgagtaaacatggattaataatctttcataatttatgtgcaacaaactaggaccacg

SEQ ID NO: 250022 - DNA, 635 bp, Cannabis indica
ataaaacccaacaattacatcatcaattattcatcattctagtttttttcctctctctaatctctttaattttcaattatgattataatggtgataatggagtagtttcttttaagttaagggttatttcaaaatcctaaaacatgatttcttgattagtgataatgaatgttattcttaatttatattaaattatttctatttttctatttgaatgctatgtattatgaatttttgttaggtgtacaagtaattaaggttttacattgttctattatcatcttagaatcacttcttacctaatagtttaggattctaagtagagtgataatttgcagttaatagtaatgtcaaaggtattatcgattgtgataaaaaataggacatgggttaaatgaattatatgcttcattgatttgttacctagattaacttatctctataagaaactaatatttttcctaagttaaatagattgcatgtttcgtggatctattgcttagtaaaaagatttaattattgagcgcttcgccttgattaattgtaatagggagactggaaaaattgtctgcttcttcattttctacggggttcatagtttattatagatttgaatattttttattattattgat

SEQ ID NO: 250023 - DNA, 1318 bp, Cannabis indica
aaaacatattatgtaatgttgaattggtctcctattgcacttcatgcattctttgaacttagtattagaagagccgacatattctctaaataatactatatattaaaataaactattatcatatttaactcgtgctaattaatttttataaaatattcacttttgtatgaagctactacagctaatatgtatatcatgtatatgtatttgtatactatatattatttgaaattaaattacttcatgcatatccttatggagataagatcgtaggataattctatctttccctaaagaaaaatatagttgaaaattgaagataatggaaatggaatagtagatcacaaattaatttttatttttgacatacctatataattgtattttttatttcttcaaaaaaaaaaaaaaaaaaattgtagttttatcgattagctcatacatcatacgtcaatgtcctaacaatattgtcaataccacttatttattattattattaattatatttatagcacataactagtgaggccaaatcatagtgggcatgttatagtactaataatattttagtgcactgattaagtttatcatgaattggcatttttttttttaaactgagaaattccattaaaaggccaagccagaagatccagatacaaaagatatcatgaattggcaattggcatgtcatttaatttgtaaatatattttttgttagttattaattcttatgtgcgtaaaaagtatagagtaacccttaaaaaagagaaagaaacaagaagcatatattaacacaaatcactttctctaaattgattaattgaagagtgcagacaatttttgtgtgatttggtttttactaatattcagtttgtaagacgttctgctaacaaggcagcgcattttcttgcgcatagtgcttgttctttgtcagatcgtgttttttattccaacaactgcctttcggagttgttaagtattgtattggctgattccttaagttaataaaactgccaaacttccattcaaaaaaaaattgattaattgaatgattagttttagatctattgacgaacctaaaaattttactttgtggaggcttatttattattaaaaaaatatttatacttacattataattactcttaataaatttatttaattttgtggagtttttttgtaaagtaccgcctatgaatagtactttgtattattaattatttaaagtttatgtattaataattatggaatgcatatttaagaaatatattttatatatcatatatgtttttatgctattttatatttaattacctaa

SEQ ID NO: 250024 - DNA, 2405 bp, Cannabis indica
aaattcttctggatgccgaaacaagtcaagggtgtatcaatacatcccttttaaggggtgcattgtagaatcacccaattatttttgtaattaatttttctttttgaaataaaataacaaattaactaacaatgagagtcatataatacattggtcaaaatagaaggatgataatcaacaaagtatgaagatatatacattaaaaaaaaaaggtctaatagagaagttaattattgtcctacaagatctagtatgaagatgtgaagcctacgtgtaaattaattataaaaggttatattaataaattgaaaaaaaaaaggaaagtcgatctgcaaaaggattataatatttataaattcatttctatttatttttaaatattttttaatccatgctttattgtaataaggaaagtatcatatgtcaatttctcttttatatttattttaagaaaaatcatatatatctataaataaatgaagaaaaattgatattttgtttgagactacttagaagaacactaagcaaacgaggaatattaaaatagtaacctatatggtcagaggaagcatatgaggatgaggtgttaattaggagacataatttggattcaaggattgtaaaatgagctattgtatgtgtcgttttattattcttattacatatatatagagagagatatatagtatatatatatatttattatgtgtacgggttgatgaaataattattgacttgattttaattattgttgtaaattttaggtaattatagcaataagttggggtttaaatgatatacacgtcaaaatctttttgttgggttagctgttgatttatttccagctggtggtgatctttacttagagtaacagccacagctactgcatatatatatgaattaatatcataaattattaaattagataaattaggattacctaatgtttgacttattactttcctttaattagaaaatcctataataatatgtatgtactgctatatcttttacatatactcattttctttcagctctggtttattttatcccattttgggatttgcgaatattactaggattacgtacctaatcttaatttgggaaagtaaatttgtttaataaatatttataatctttctcaatctatatatttttttagtattggaaatgttttagaatcgggaattatacagtttaacagctaaacaagggctattaattacgtgttgaatataagatatacaatacacaatgataaagaaaagatggtatattgaaatttgcttaatcaaaacatcaaactattcatcaaagtattatttgttgattattatttagaaaaggttaatattaatgaagttatcatgtgctacttttggtcattatttcatcaatacattcttaaaaaaacaacactcatatatatcataattacataaagatgcatatgatgtaatatagttgtttggatttgaagaaaactgagaaaggaatgatacatacaaatataaataccaatgaaattggttggtaaagagtaccctcttcttattataaatacttttttttgtatatgtgtaagaaatggtataatttttttaataatggtataaattgttttaaatgaatgaagaagtaatatcttcttcctttgttttatgaagaaagtatttcacattctaaatttaaggacacatgatgagggtgcagttttgggtccacgttaatttatttgggcaaataccaaaattaccaaaaggaatttgtctcttatttcttttgttgtcttgctccttggaagtttcacatagtcatagtgttttttgtcaggtaataagtttgagccactaaataaataattaaatgaatttatcttaaaaaaaacagagaggaagatgaaaaaatgtgcaaggacagatgtgattggataacttaaaagaaattgaatttgttcccacttgagaccgcgaaatatatagagcaatagcacaatctgaaaatccttaacaaccaatatttttaatgaatttggctaatataacataacataacactttgtctccaatcttattctctcaaacacccatcaccacaccaacccaactcatcattttcttaaacaaaaagactccaattcaaaatcccattatattattgacacctcactctcactataataacagttctatatatatatatatatatattccttttattatcatgtaatcagcctggcaatatgtatgatatatgtacatctagagaggtccacccaccttagtattatttggtaatgcatgatttatgtccgcttacaagcgtcaatatggacaataattacttctaagatacaggtattggtaggtatagattataataatcaatacaatattagctttctt

SEQ ID NO: 250025 - DNA, 532 bp, Cannabis indica
agagtgatcagagattgttatcaagaaccttaaaggggaagactctatttgggggattgagaactatgtgcgacattgcaagctcctctctacttttatgactaattgcaatttttcttgtatttttaaaaactgtaactacgcggcccataatgtggccaaatgagtgttttccaacaatattacgggcatggtagagatatctattatacctgttaatatcttttgtaatgaccatgaggtctaacttcagttttatttataaacgcatttttcaaaaaaaaaaaagtgagatacaggtgcaagcagagaaggaattgctttgtctagaacaacaattgaattcaaaatggacattgtcaatctatagattgagtaatagcaaaggatgtggactcgagatagtattcacaaccccaactggagacattattcaacgatcaatcaattgtgacttcaaaggtacaaataatgaagtagagtaagaggctttgatagctagacttgatatagctaaggatctcaatgtaaa

SEQ ID NO: 250026 - DNA, 627 bp, Cannabis indica
cagaactcatcagcaaactgattctgttgtagttcttcccagggtgttttgttactcacagagttattggatcaaaattacccaaaaaagatttaattgtcagcttttatctttacacaaagaagaagggttcgtgtattctccctagtgtacttggttacaaacaacattttgctctattgaaagccataccaaactatttcttaatgtcacatgaccaatttcatcaaattaagaaagagctcatagaagtctcatgtgccaataatcatgccgaattcctgaagaaatgtgtccatccttgagggaaaaataaatagttcttcataagccttctttttaagcttaataaagatataaaccctacaaaagctagtcacctaggcatgaattcagaacatcaacaaatggcgtctgctgaatgcaaagagttacagtagcagggtttaatagagtcaacttcctctccatgggcatgtcatgcattttatgtcaataaacgatcagagcaagcttgagaaaagcaaaggttggtcatcaactacaagcccctaaatgagttcttagcaaatgatacatttcctataccaaataagaatttatagtttgccaatttatccaaagccc

SEQ ID NO: 250027 - DNA, 1025 bp, Cannabis indica
taattattcttgttcttgttttgcttatttaaatcttcttgatgatatgaattaggttttctaccacttctcttatagaaataacattctcgtttgaagtgtgtcactttccacgatgatagcttccattagggtctttaggttctattgagtttaatcttcctctattatgattgtttccctttacttcttcctcgattttgccatggtttcttctaatttggtctccctctgcttagatttagatctccattaaagttggcaagtttcttcaccttcatctctaaatctttagacttcagagctcagattacttcttcaagagtaatctcgattctcccatactttattgcagtcttcacttccctgtaagactctagcagtgaattgagaataattatagcttgattatcatcactcaaagcttcaaattcctctgagtttgccaactctatgtgcatccttaagaactcatctaagttttgttccagactcatcttgaatataaagattctttccttcaagaaaacttgttggttaaagacttattctgaaattgttcctcgcttcttccaaattttagctagtgcatcctccttatcaaccaacttggttattgaattagataggctgaaaattatcaatcttgttgctgttttcagcattcttccttctaagcctttattgtatatgttggccattcaataggctcacttagaattttcagcatcttgttctggacaagtaaggctctaattttcttcttccagatttgatagtcacctgaaccatcaaatctattaatatccattttcatggaactcaatgtactgtgtaatatgattaaatcaagaaaggtaatagttaggtttagaaatatccagatataattttcaaatatatggaacacgatctattcttaatattcttgatttttcctttcccttccctgatttaattcttcttagtttatgttgtacttccctgccaagtaggaaattctgaagctatccctacacctaaca

SEQ ID NO: 250028 - DNA, 1341 bp, Cannabis indica
aagaatgttgccaaaggttagcaggtacttttatattggcttgttgatatgctgcttgcacaggacatggcctaaatctcaaaaagacgttgtggtgcgccttgggcatgagtactaacacgagatgacacgagtagtcattcgtgggctagtttacatacgcgaatgggacggatgcatcatgctggaaagagacagaggtctaacgtatgctactagtttggtggcttgtctcgagggcctgccagcatgcgtgcaggcatggtgccttgaggatgggtccatgaacatatggacagtgcgagtatcttggctagagaacctcgatgcatgggtgcttatgagcatgactctgcgggagttgttcgagagacgaaagtgtgcacgaggcacacggttgtgcaaaaaatgagcccattgttactctaatggttggaaggctaaccttggctttgagaagtcaaggtatcacacgggtgtttcgctgcctgaaaaggtgagcccgtgatagttggcatcaaagccaagttcatcttagtgggaggtgaacctggttgacctatcctaaaggggatgtaggcgtgtggaaggatgctagaaagacaactaccacatgaaattatagagaggcacagtaaaatatttcgaactcgttggcatagtaaaaggttgattgggtagtccatattgtatgcttggtacactaggccaagtttgctggagtttcatcgtatccgcaagaggcgctttttttgaaaaggaagcttgttggttggggtgtggaagtattgtaggggccgtcagattcttgttagtcatgacagtggttgagagttgatgaccatgatggttcaaattgggatagacatgtgatgcttcagtggctacacgtgtgtgtaaagagggacgcacatggagaccaagagggcaaatgccgcaatcgtcagaggatgattgtacttggaggtgttcgcatgtgactttgatttgatccatgtggaagcgccgagacagttgagtgggatgtgttggctggtgcccgtgggcgtaagtcacataaaggcatcgatagagatgtagagttgtggaatgaatgcatcaaagaagccagtagggctaagaagaccgagcgcaagcgttaagatggtgctagagattaggtggaggccagagggctgtgccatcgagacttagtagtcgtgtgagcctacgaaggtcaagaggggagctagagtttgcatgaagatcagagggctgcaataatggaacttagtacattgtgggggccgatacgatgtgatgctagtgcgaattagttagatggttgagtggacaatgatg

SEQ ID NO: 250029 - DNA, 584 bp, Cannabis indica
caaaataattagtaattacatggaaaaaatattttttaatagctaatgtttaatatggaaattttttaataattatacagtgtaattacattcaattctcatggggggccatgagaattaaagagtgtaattgaaactcctcaattacttccaattacacagttatagtgaaattacatagtcaaacgaacatgtcaaattgtgtaattatctcaaattacatacaaatccaattacattgtggctttcgaaacacacctagaatttgttttgagaaaactaagaaaattatagttttattattaatattaaatgcgcttgatactcttagtatttggtaattgagaaattttcttaaaaaaactaaattattaaatttatgttgtaacaaactcaaaatttaaggcagttattatattataaagggatattggcggctaaattacttaaattttacggtttgtaacagataaccacaataaaaactaaaattttagcggcataactacctaaattctggttccgttttgctctgtacccctccgtccaaaaatcacagttaagtgccacagtagactgtccac

SEQ ID NO: 250030 - DNA, 697 bp, Cannabis indica
aggcatggccctcagggcacctagagggccaatggctgcatgaggcaaaaaggtcagtttcaaagcttctaaatatgatgttgaagatgaagctccgattgctggcctcacggcgagcacaagaagtgcaggctaaataccttgacatacaccacgactctcaactagtcgtaggtcatgtcctatatgaatacacaactcaatgcaaaaggataatggcctatttgagctaattttaagacttgttaattatgctgaaaggctatactaaaaggcaagtccccaaagatgatgcagatgatgcaatagccaatacagtcgctcgactagccatcatctccttgataaccaaggcaaacttggtactcactcaattcttaaaagagttaagcatccctattttaaaagaaatagacatgttggatagccatccaacatggataacctatagcagcatacctccaaaaaaaaaccttaccagaaagcacagataagggggatagcttgtaggtgtctgattctggacaacgtaatgcacaaacgtgatatctcaatatctcctctaagatatgttaccacgtaagaagatgaacaattattgataggagtgcataaaggctctacgagaatcatgccgggggcaaagccaattgagtatagatgggatccaactgcagcacgacttagcctccaaaag

SEQ ID NO: 250031 - DNA, 1235 bp, Cannabis indica
ttttcaacttctcaagcgtcatgtggttattagccccatttgtcggtatgtcatgaggctgaggaatctacttttcatcctctggtgggttgctctttttctcgagcctgttagaatagatctttggttagtatttctagttggttaactgatagttttggctctttgtttcaagctctttcagcacggatcaattctcaagcattggaggaagcggggatggttgcatggagtatctggaaggcccgtaatgaggttgtttggcaacaaaaatctcctactactgcatcagttgttttttcggcaagatcactccttgatcaatttcgttttgtatagtcacggacgacttcaataggactgtcttcgcgtgtgcattggactacaccagtttctgatcagatgaaggtcaatgttgacagtgctctatttaatgatgttagccgttttgggacgggttgcttagcccgtaaccatgctggtcaagttctaaaggccttcactactagcaggaggggaattgttaggccaaagattgcagaaatcatcgagatcaaggagcccttaagttggatccagcgtcataattggcaaaatgttctgctagaaactgatagtctgctttgtgttcagcctatccagagtgagttgcatatgttgtctgagtttggtttacaggttaatgaatgtagaattattttatcttctttgagtcatgttgctattcagtttgttgaacgatctgtgaacaaagctgcccattgtttggcgcgtagctcttatttttcccaggtcatacttttcaggattatcagttaagtcctgaattgcgtaatactgtactggttgattttgtcggttaatgaaagtttacttttattaaaaaaaaatacatgtgaaaatacaaaacaaacacatcttaaataatttctaaggttttcaagaaacggatactagtgtcccttttaggcgagagtcaaagataccattcattgaatagagtagtcagctcatctaaaatgacaaacattctaggaaccttttattcgatcaagatgagaatcaaacgttttcctatttaggtgagagtcaagatcattctttcttatgagcttccaccattgtttgatactcttgtaaatcttactcttagcagccactattagggtgatttgtactaggaataaaacacttacaaataatacttatctttcgagattctacggagttaaatt

SEQ ID NO: 250032 - DNA, 1013 bp, Cannabis indica
ctttatttagatattttttcttttgagacaggacaatagagtcattcaacttttaactttccaaaagaagctttgaatagatctgattcttgctctcccaacattggaagtaatagaattgtatatttgccgtatggttcctcaaataaaaataaaggtattgtttcattgaatctttgttcaaaatgatacagtttgattggtttgcctcaggaggagttaggacgtgattggcgttgtttggattctagggttcatattggggtggttcgtgggaaggtgcgactagcacaattctatttgtataagaaaaaaataattatttgtttttaaatcatggaaactaattgatggggtgacaacgacgacgatgagacgtatagttggaatttggtgcataatcatgatcatatgatggtcctatgagtttcttttgccttgttgttcttcatcctgatgactgagtgcaaccagcgataccagtacaggttccatggacgcccccgccaattggtgaactcaaactgaatgtagatggagctgggatctgtgatgataaaggccaagtagttgtcgcctttgcaaagccgataattggaaatgtcgcatcacatgagattgaggctaaaacaatgtttcatagtctgacgggcccttgatatgctaattgctatttctcatattgagacagatatgctttgttggttgtatgccaatatgccttgaatacttcttcaacaacaattttttcattatttaaggatttaattgttgatattgtatcttgttaaatgaagctatcttttagttaaagactgtaccttcactaattatttaatcaaaatttataataacaaagtatttccctaaacaaaaaaatccacaaatatatatatatgggtgactaatatttaatggttacatttttattgtaaccatatggttacatttttctttaacctgtaatagcaggttaccaataggtagacttctttttagtattaattaattat

SEQ ID NO: 250033 - DNA, 545 bp, Cannabis indica
tgtgaaccattttagggagttttaatcctattctttaaaagtcttttctactaaatctctagttagtgactttataaacgggtgcgccaagttttcacttgatctcatataggatattaaaatgactcctctttgaatcaactcactcaaaatatccatgtgtcttagactaatatgtctagacttcccattttatactccactatacgctctagccaatgttgcttggttgtcacaatgtattaatattgtagatacatcctctttaattattgcaatctcaatcaagagatctctcaaccatctggtctcctttccaatggtagctagagctatgaactttgcttccattgtggaatgaaaaatacaagtttgtttcttagatcccaagaaactgcccctccacttagggtaaatacttagggctgcacacgagttgggttttcaggtttttgagtggtcgggttcgggttttcaaatttcaggtgttggaaatgcacaattgaacccgatttttggtggtcgggtatggcgggttttgggtc

SEQ ID NO: 250034 - DNA, 1039 bp, Cannabis indica
aatttatagtaaaaaaaaaactattacagacagattaatctattaataatagtgttgagtttcgaatctgacacagttattagtgagagggtgctagtctactgctattactcatcatttgcaataaattaatgtcgctagaataatagcggcggactccgtcggtattgtctttaactgtggattcgacaattatttgcaaaggaccccccacccataatgatgataagtgttgtagtgcaagcttcgtttaagaaattgtagcaagcaccaactgattctcatgtactaggtgtctaggcgattactatgcatcatttggtgcgcatagagcattactcgagcgaaagacaggtgaacatcttcatcagatctctaaatttgacaccaaatttaacaattcaccatcatatgaggattaggaagcattaacatcgaatcaaaccctaaacaacgtcttagcacaacacacttggcaaacaatgatgtaattggtccatctattgcgtcagttataactgacacaaataatgaatcaaagatacgtatgaacggatataaaaatattattttgacgtagttgtctaaaaataaaatttgaaaagtaacttaacaaatatactattattggaggatggcacttagataagtcaaacattacctaaacatatataggcaatgtatatgttcaatatcatatttgtgcctttgcttttggatttgaagaggaggtacaattttatagtgtagtttgggatgagttttaataactcagcaaatttggaggcaacatttgaaagttgcaataaattttgaaaacaaaaagtaattatataaatttataaaaattattttttaaatatttcaataattaatatatgtattttgatatttaaaatttaaatatattaattaacacaactaggtgtagtttggtcatattaaaagggaaatttcaatttttgaccctaataatacaagccatatcaaaatttataccctttcttaatttgtacaaatttagtccattaattacatg

SEQ ID NO: 250035 - DNA, 410 bp, Cannabis indica
gaattgaacgattcaagatgttgtagaaatcttagaacaagatatacaaactttatggctagtttcgagtttagttctgcatttaaagtcgttaaaattcacatttacattttccttagtcaaaccgagctatctgaatttcacaattttttaccaaaatgtgtcaaaacccctttaaatgactccaaatgaaacattagtcttccaaaagcctaccaaattaaaatcacgctaatcaataatttaaagaatcaatttaagaatattaagccaagctcgaaggaaatcatcgtttcacttctatgtccagatagaagctatagatttgatattgacttagaaagacacaacggtaagattataatatccttaccaagatcaatatcgattccagtccaatgtatactcca

SEQ ID NO: 250036 - DNA, 668 bp, Cannabis indica
tgttgttctttgattcttgcaggttggtgcttgaacctacgtgaatggtgattcagagttttgttgcaagacttgaagtcaagtagtttgagttgaagggagttcagctgcatcttggcaagcaaatctgaaggtgtttaaatctagagatttgttgaagggatttctacaaacaagaagcaatgggatcttactaatcttaccaagggatttcgtagttgagttatttcattactataagggaatttgtgaattgtataaaaattggattttgtatatacaaattatatagtggatgttattactttccctggttaagggacccaaacactactcgactggaatgtgtttctagtacagagaaagcttataaatttctggtgttgaatttttgatttggtttttaattatattcaagcatagatcaagataaaagcaatccaaatatgaaaaagataggttagacaaaaacttatggtgtacaattggtatcagagcatgtttgttttgtcagaattattgatccataggattcttgtaagttgtgttgtactgaaattcattgttgctgcaactcttgatttttctataattttttccattttgcaacttccagttagaactaaccccctctgagatccatctctggaagtatatactgtgttttt

SEQ ID NO: 250037 - DNA, 640 bp, Cannabis indica
tctttttctttttgtgacaaaacaccttttggttagattttcaaagagacattaaacagtttgtgtgcatttaacaaaatatgtaaagaatgataaatgggattgcaggcaacattttcatacactaaaatgatgtaaagaatccattaacgaaataatcgaccacatataaatgatcaattactcatgtatcaacatttgtaaatatttaaaatccctaaattgggcaaaatcatcgagcttagcatctacggcgagactacatatatagattttgaattttatggtttacagaaaaagaactttgacatagtcgaacaaatttgattgatgaataaaaaattgaatgaaataggaataatacaattagagggagagaaagagaccgtttttcggaagcttcggcagctctggcacgaacttcagcggcaactaacctttcctcttctttcctttgttgcttcttcttttcgtccaagcaagacacgcactgtcccaagcaagacacgtcggagagatcaatagtaactctgattcgacgagagcgccgattcaacggcgggcgctagcggtgggagttggggtggcagccggttctccagaggagtggtgacgaggagagggtgggtggtggattttg

SEQ ID NO: 250038 - DNA, 772 bp, Cannabis indica
gctaaactgggaatttaccctctagataagggttattttagtatgttttatccgtcttcaaaaaattgtggacacaacataaattttcagcctaaatcattacattgtttttcgcgggcctcgttttagataaatgttggttagcctgtaattttttgctgaatattttaggtgcacatatctcatgttttttcttactagtatctgtatttctgctcatggtttctagtatgatttgtggctaagttgtattaaattctttgcctattattgtgtttataaatatgcatctcaaaccaacttgaatttttcatattttcctcctatcatatccttatcagacaccacctccagcatcaagtcatccaagctccccactgctcctatccgcccaccatcttttcctcctgttcaccctcctctactaccacctcagccgcagggcaggcccaagagtggggaagctggggcccacgcccaagcctcctacctaggtttaaaaagtcctttagtaaaaattacaattattttttaaaaaacctaaatttattcatggaagaaattgataaattaaatactatttttttttatgtgagctaaccaaaatacctgcattttaaattcaattcaattaaattatagagaaatgtaagtaaatagtcttatttctaactttatagatagttaatgtcctttttttaaaataataaagcaaatgtcttttttttaaaataataaagcaaatgtcttttttactttttaatacttaaaa

SEQ ID NO: 250039 - DNA, 546 bp, Cannabis indica
agacatcccagcttcgagtagaacatcaaggagagaactaaccatgtactcatcaagacccgatcctgtagtagagacgtaggggttgataggatcaggaagccaaggttgtttgagaatgtgtgttgaaagcccagcaccgatagttattctagccccaatacaaaccaaatgttgtgcactccaaatactacgccagacgaaactaagattattgctcaattcagcatttaggaaaacagtgcgaggatagtattttgctttatagacctgactagcaagagaagatggtgaacataaaagtctccaaccttgtttggccatcatggcaatgttgaaatcatggagatggcgaaagcccatacccccagagtctttaggtgcaaccatacgaacccaagacatccatatgatgccttgaccattggaactttttgatttccaccaaaagtttgccataattttctcaatgtcttggcaaatacccaacgtaatgaggaatacactcatagcataaattggcagggattggatgacagttttaag

SEQ ID NO: 250040 - DNA, 1135 bp, Cannabis indica
atgatgaaaactatatccttagtcacatcatctttattatttattaatattaattaatttcttaaatgttttttttcttctatttttattaccaaattttgtattatttttaattggtttttttattttttattttgttttggggtatatattcttgaagtcgactctgagttccatatatttgcgcacaagattgccacttttgaaaatgctgcatgttttcatgtttgttattagttatgttggtgttttcttgcagtgcattttcaatatggcatcctcattttggttggatttgcaggcattgattcacttcagtgatgcggagattgcatcttccgcaaggaatgccttggatggaaggagcagaggtatgctctgtaacatacctttcttattatggaatttattgatattaaggagctgtttgaatttgacattactacgtatccattaacttacgcatcatgttggtattttattttaggtatctcctttcagatcatgttggttcatgccacttacgcatttcataatctgcccacactgatctaaatataaaattccagtctcatcgtagcaggtaagactgcaacaagaagatctcttctctcttcttcatcttttgtgtctaaaatagtgattcttttatctccttttgtatttgtttgttggcggttttgggttttgagatgcttctaattgatgtgtactttttgtcatctatggtgtttagtgaagcctgctagccagaacacagatgtgttgcaatttagtaatttccttgatcttctaattgtagtttaaatttaaagcgttctctatcaacttggcattatattctagaagctttaatgtcattctctttttgaccatagtttgtgcagtcttgttgctcatatatctccttttttgactgatgattttatatttttaagttcacaatagacaattagattgagttgtaaacttatgcacacatttatacgttcttttccgcccctgccttagtttcttccgttttggattgctgcatttgttgttaggtgacactacctagaattttcaagagaatgtgtagtctaatgcaaaatttgaatactacctagagacttttccaattcttatccctaat

SEQ ID NO: 250041 - DNA, 451 bp, Cannabis indica
atatcacaggttcagtgggagtaagaatatgatcctggtataatatattgataaaaaattgcttgccactaatgatatacttattttgtattagaaattcaagatatgttgagattgttcttggaatattcttgaattttaacaaaatagatatatcaataaagtataaaaaaaaaattggcatgaaagatactataccagatgaaaggctagctaaagaaaataagttatctaagtcattgctataaaagttaacattagaattcaagaaatataaaatataattaatttacattagaatttaatatatgatcaagcatgtatgtatttatacttatacatatttagaatgtttgatatgtatttaagtaaccatataagaaacttttggtatgcagcctaatgggctataaggaatttaaggagaacaaaatactgttggaaattattt

SEQ ID NO: 250042 - DNA, 795 bp, Cannabis indica
tcaacaatattaacaatatcaaaagaaaaattagactctaaaataatacgattaatatataaacgagacgctctagccataaggtgaacaactcgattagtagattatttgagaaaacataaagaaacatcactaaaagaagataaaaattatttataatcctcaacgataccacactaaaagtaaatgacaagacattcaaatttttaacaacttgtaccaataacagacaatcagatttgataatactaatcggaaaagcacgctttaaccacgaaagtacttccttgagagacacggctttagcaatctctagaagaactcgcctaatttgtaatctcaaaatcccatccacgatccgaccttggtgatcccaaacaaccccacgaaaaccatgcctctccttatcaaataatgcagcattaatattaccttgaattttttataacttggtgtaaaccatagcttagccccatccgaaaaatactaagtataaaatgaaggaaacaaacttctttcttgagcttttttctactgatcaagtgtgatacgagccaaactaacaacaaactctaccgaaattttcttacttttccacaacagttgattccatgcgaaccaaattgcccaaaccaacatcataggttgaacactttgttcctcacccagacgtcgtgggaacaagtgaaaaaaccagtccccaaatgaccttgtatcaactagaatcatagccaaacccgctaccctccaacaattttgcaaaaaatcccaggaaactaaacaatacaaaattga

SEQ ID NO: 250043 - DNA, 1054 bp, Cannabis indica
gattgattgtcattgatagatgtgatctatttcatgttcattcaagatggaaagacatgctttgtcaaactatgaactcctaaagaaagcaagcaacacggaataaaactgtccttagaaatttagacaataaagttataacgtcatctagtagcacaccaaaagagctagagcttctgcttgtaaaactaaaaaactacacgccaattaataccctatttaaacgtgggtcttgcaagaaattaaatataaatctaagctccttcttctgaacatttatttaaaagtaataaataaacaatggtgatgaacgggataaaattttaggttattttaattttacaactctttgaaaaattagaaattaaattaccaatctgaacatcaatgtaaaacttttatccctaccattgacagtatttcaaagtggcgatctgagaaccatggacctataattttaagctccaataaattagattatttattgaatctcatcaaccaaataatcatgtttattaattctatgattactccagtataaatatagaattgaactcttagtaattgtagaattatatttactgagttttactgcagtgtccattaatataatcaattctattgattagtcttccttgtgtcgtttcgtaattagttttggtcaaattatcattttacctttctaattacttctttatcatttagtactgttgattcactagtgaaagtataatttagatccaatctaaatttgtgcataacttttcagttttagaattaacacttgaaaggaactagcattcgacccgttagaaaagtcaggattccataattgtagattatgtttccagccatcagtattattaaattccctaaacagaagttgtaagaatcatcttctctaaaaaactttaacgagtgaatcaattaaactaataacatgaacagagttcatgattactcatgattcaggccaatctaatattgctcatctttaagatatgaattaggtctttattgtaaataatatatttcataaagacagcttaataac

SEQ ID NO: 250044 - DNA, 734 bp, Cannabis indica
ttgtgacttttgcctaattggcatgctttgcaaaatgaaagctggtttatggtgcctgtgtggggtacagtgtgtaagagtgtaagactttagttagaatggcattcgaaggatgccctagcttgttatgccaatttgtaatattggatttatgacagacattaacagtaggagagtaagtagacagatcaagagtgtcatttttattcatagtaacattgttacatgtgtatttacttattacattgtcataagcaaagttactagaacagattaaagaagagggtttacacacagaggcaagtggttgtttaagagagggtattgagtattcttcaagcacgtacaatccatccttaagtgttcccttgagcagcactttcccagtgtgtttgtccttgacaaagcaacatgttttaggaattcaagaaacacataattgtcatgagtaatttgagacacgcttaccaaattcttggtaattgaaggaacatgacgaactgagtttaatttgagaggtaaagaagttgatccaatatgagaaatggatagtttcttaccgtctccaacagctaaaccttcatgaccggtgtaggcagcagtagaatccagattctcagtagctgaggtgacatgatttgtggcaccagtgtcgacgaaccagccagaatcatctccaaaatcaggtaggaatgtagtagcgtaggcttagggatcatactcgacttcatgct

SEQ ID NO: 250045 - DNA, 613 bp, Cannabis indica
attttgagttattcattctttcagggtagtatatggaaaagaatcacaacattcaaatgtgattatttcaagaattaaatttctttccaatgagtagcagatttgttttataagtttcttaagatagctaattgttttttgggtttgtagtttttatagtgggtgttccatctaaaataatatattcttagtattttataccattgctttatcatatatagaataatgggtgaataataaaattttaatttgaatttgtttgtttaaatgaaagttgattttgtttgccagaacatggtgatacagatatattgattcttaaactcatattataaaggatgttaggccataataagttatctattattattattgcgtagtcattgcaaaactttacttctactgtttttttttttttactaagaaactgaaattcattaagctaaaacacatttggtgagcacatggggatgggactcatctaccaaaaacgcaataaaccgttacaagaatggtatagttacaataataataataataataataatatatgttcaagctatttcttgtgtaatgatttgatttgggaaatttgattttctatacttagaaa

SEQ ID NO: 250046 - DNA, 617 bp, Cannabis indica
aaaagtatttatctattttttttgggtgggtggggcgtgggcatttttaatcattttgttgttgtttatattttatgttttgtgttattttcaatcttatttttgcagttttgggtttttttgttttagggtttttgttcgtgcatgttcattgacgggtttcaatgtggaattttgttcatcactctctgatttttaaaattttatatgttttgtgttagagattttattacaatggaagaaaatcaagacattacaactctattgtaatacaatacaaggaccaacaaagagattaaataaatgttacaatacataatatacatatgggtgactattcaatgattacatttttaatgtaaccatgatagttacattttgttttacctttaatatcaggttactaataggtgatcattccttatatagaattaaattaattatcattaagtatatacttaaaaaattaatttattaatatatttaataaaaaaaatttagtaaataatatatgtaaataattttatttttatatttaagtctctactataattttttaatattcaaaccatttgattgtaatatatttgcaataaaatttctttttttttcttttt

SEQ ID NO: 250047 - DNA, 963 bp, Cannabis indica
taaagaatatttaatttatattaattatatatgtataaataaaggcttaaaatgtaccaatatgagtcttaatcagttatttacaaattatacagtcttttgatatatttttatgttgtactcttgttaatttcttattatttgtatgttactttttgttgttgttttcatgttatttttatgtaatttctttttattgttttcatatttttaagaacaccgtaaaaatagtaaaaaaaaactttaaacataaaaatataaaaaaaaattacaaaaataatactttatgtaattatcctaacaaatgaaaaaaaggaatccaccatcaaattatttttcattggcaaaaggttgtacacgggttataggaccatccctgaatataaaagggtctacttttttttttttttttgtgtatgctgtatttaagttaagtaggagcactattaagtctatttcacaaaattttacaaaattactatttttctcactacatataaatatattatgtataatttttggactcttatttggatggccttatgtacaggtctagcccatcttaatacagaactaaacttaataggtttggttcttgagagggtcacatattattttgagaaatgatagtaaatggccccaaatcataggactatgttagtttatgtcctcatttcaaaaaaatatagcaaatgaccctaaatcataagattatgttagtaaatgtccttatttcaaaatcattaattttttttttttagaattagaagcaaattatttaaatattatggtatatctatattagttttgttaaaatcttttttattttaaagttatgtcaatttttttattttttatgagttgttttgggttgttggtatatagattttgttgtacggtatatttttattttgttgtatggtatattattattcttagatgatatttattttttattatgat

SEQ ID NO: 250048 - DNA, 714 bp, Cannabis indica
aaaaaaaaaaaaataataagaactcaaaattgaaaataaataagcaacctatttttttttaattaaacaagctaattattaattataataataaaacttctcttttcttgtcatggactaatttgtttgacttaatactaaaattcctaaaatctcaagtacaccaacgaccaccgctttagaaacactttacctacttttgcttgccatttataaactaaactattattaggaaattggagtatttaagactaacaacaactacataattaagaatttaggaatattatttatgagaagattgactactaattagataccttattataatttactaaaacaaaacaaaataaaaatgtgatcagagatcctctttaagggagactaatcgatagatcgagtagggtctacagacaaacagtctaactaaattttgcaggaaccaagactgacctctccctgtcggaaggtgaataagtactgccacacagatccggtggcaggagtaaccaaactctggtaaccagcggcttgggggactggtcagagaattctagcacaacaacactcctacttggccaacctttggctggctagccccttagtggtgcacctttggtcggccaacaaggtgaacttcctccccagaacattcgggagcaagtcttccaaaggtcaatctttaaacggctaggtccgtgaatgggtagatac

SEQ ID NO: 250049 - DNA, 551 bp, Cannabis indica
ctatccatattgtggagcaaaattcttaaattttgagtatccaatattctattatagaaatcaaagaatttgttaatattatgaatgaaagaatttactttatatgtgctaatttgaattttaatcaataccattaaatgatatcttctcaaacttgtgctaaatatccgtacttatcagtcatacacaaaacaaaatactattcctaataatcatggcaaagagtccaatactgagactactcaatcaaacccaaccaaaaaaaaaatatcaagccaaaaaaataaacctaactgaatatatataaaattgcaatcaaaagattaaactaatagaaaatgcttatgtgggggtaactttcatactcttgaagaataaactaaaataaacaaagtatatgcaaaatgattagttaaattttagagtaagaaattagtaacaccgtaatatttctataagagtgttaacattatttacttaggaacttattcaaaatgtgtagagagacacttttagtattatttcataagtaacattaatattaatatgta

SEQ ID NO: 250050 - DNA, 783 bp, Cannabis indica
atctcttgttttcttcagtttacggtagaagttgagcatcggattgtgatggagtctgtccttccaagcattcttaacaacccaaaagcatttcgggtcgcgcccccacattagttcatactcgaactgcgttcttcggcaattgacacctccatcgatgtcaaggaggataggacggtggtccgaagtagccgaactaagtacttgtgtaatggcattcgggtgcaacattctccagtctatcgaagccaaagctctatctaggcgggctcttttcaggcggcaagctcccccggtgctattcgatttttgaaaccaagtgaatttcccaccatgggagaccagatcaaccactccagttcttgcaaccatccggcgtagatcaaaggagtatctagccgcgttcctccaatttgagtagttaagattttcatggtccgcaagggtgccattaagatcgccaataagcacataaggatgcgttgtattcaggagtaaatcaccaattccattccaaaaagcttctttaccagaaaagttaggaggacaatatatccccagcaaattccaaggagtaccaggtgggtcggattcgataatcacgtttattagattcttatctccactttgaaccacacatttaattccatttcgccaatatagaccgaagccccctgctaagccaataggggggatataaacaccttcaatgaaatgtaacttcagacacagtctatggaatttttcctcgatcaatctagtttcagacaggataatcacatt

SEQ ID NO: 250051 - DNA, 547 bp, Cannabis indica
taatatataattaatataacaaaaatagtttaatggattgattatttgtaatattatgtgacattatatatagccaatcgagttatattgtcaaatttcaatttcaattaatatacataagtatgtgcttgtagttcatatgatgatttcccaattaattaaattattacttgtggattgagttatttaaagttctaataattaattatttgataactatattttggcaaatttacacactaaacagtagctaattaattattaaaaaaataattaattatttgtatatatatcattgcaaattcatctagaaggttgaaaattagtccatctatatatcaagaatatatatctatatatattaatttattaagagtttgacactgtcaagattaattttttgtgagagaatgagatcatcatcatgtacttctttttttttttcaaaaaatatttaattataaaaaagtgttgagagaaattactaataggattaggagtggttaaaatggttaccaactcacaagaccatatctttggtttttgg

SEQ ID NO: 250052 - DNA, 814 bp, Cannabis indica
ttagctccgattttctcctcaagaaatctgatctaacaaatgggaaactcacacaagatcagaatataacagttggttaggtaagaaagaattgggttaccaaacttaccatttttaccttattttccataaataggaaagctagagaactttccttccaaaattgaattgatcattataaaagttaaatatacaaaatatggaaaccaatttaaatactccagccaaaattaataatatataataaaatatttttgtcaattaaatatgtcaaaaatggaattaacatgtactatagacataccctgtactatttataaacaagaataatgtttatatatgtatatctctttatatataaaatgtggctatctaacgattttaataatttaacataatattttaagatataagaatattctgttaatagggttagttttataaatatatataattaatattatttattttatattaattgatagatatataaatgttaatattatttattttaaattaattaaactattaattaaaatatatatataaatattaataaattatttataatattattatttttttaatattgagattatgttgaattttaatatttttaaattttatatttatttttctcaaagttttaaaactttaaacattatcttttttttttaaaaaaaaaaaataataagtagttttttttaatttactaaattttaaaatacataacaaaataaaaaataaaaatataattaagtattgcaaattacaataacccaatatatattagaacaataataatgtaattttg

SEQ ID NO: 250053 - DNA, 949 bp, Cannabis indica
ggctaggatgagaagaagtgatggaagggttatcaatattcgggagccaagggtccttagtatagaaatattcttccccgaacccacaagtaaacttccacctttgataattaaatccttagcttcaagaatgcttctccaaacatagctaggattatttcccaattcatcactaataaaagaaccacgaggatagtatttagctttaaaaagcttgccaacaagagaattcgtcattatatgtagtctgcacgcttgttttccaagaagagctatattaaaatcatgtagatgacgaaaacccatccctccctaattttttgcttcacacattcggtcccacttcatccaatgtatacccgatttattcttcgaagaagctttccaccaaaacttacacatcagttgctccgtaatcccacgattatctccctgtccccgatctccttcacgatgtgccatcaatgagtcgaacttccctgctgaaccaggagccgtagtcggacctccattattttcgacagagcaagaaccaggaccttcagtctgatcgcctctatccatcctaccacaccgaagccactgggagccaattaatttattttgcctttgaaccgtggccctcataaaggctcaatacggttttgcaatttgttcttctgggatgtcaaaaattttcggacaagttctatcagcatggccgataatcccacatataaaacagaatgttggagcatgttcgtatttaaaattcacccagaaccattccgaactatccaaccggcgaatcttcatgcgacgtttcaaaggatggtcaagcctgatagttacccgaatcttaaactattcacgccaaacacaagaaaaattgttctcatcggattcaataaacttaccaatatagttgcctatcctcagcagtgtatgttcagttgggaacccgtgttgt

SEQ ID NO: 250054 - DNA, 530 bp, Cannabis indica
gtgttggtgctgtagaaaattgatgactttgtaaaattcactttttgcccagacgctgcttcgaatttgtgcaagatctccttcattcttgaagcttccaacatagtggctttacagtattggtagctgtcgtctgtaaataacatgtgggaaatgcgaggagctccattggacaccttacaaccatggatgaggcctcttctttcatatttttgaagcaaggccgaaagatcctcagcacaaagaataaagaggtacggagataatggatctccttgtcgaataccccgagtgggaacaatcggtcctacctcgtggttaccatggaccaccacgtatttagccaaagttacacatttcatcatcagcctaatccgccaatcttcaaacccaagcttccttaacattgcttccaagaatggccattcaatcctatcgtaagctttgctcatatctagtttaagttccataaagccttctttgcctttccttttcctttttaaatattgaagcacttcaaacgagatcaa

SEQ ID NO: 250055 - DNA, 632 bp, Cannabis indica
ccatctggattttctttctccctaaacacccacttgcagcctatgccctgtcagctaaagtttatgctttaaaaaatctctaaagacattttgattataaatagtagttgaacattttgatatatacttgaatgttaaatattaatatttcatattgaataatttatatgtatagatatattagaaaattccttattcataactgaggttgtaacttgtattgtacagagaattaagatcacttagctatgaataaaataatcatcaacctatgctccaatatatgttcagttttctttcgttgttttactgttatttttttgttaatctgcttctttttatttttgatgccttctcttgcatttgctgcatttgttatgttgtttcttttcccaactctccacatttactgtatttgttatgttgtttcttttgtcagtcagcttccatctttttatttttggctgttgtgatattttgcacacgctagtgcacgtatcatgacaagtagtaaactcatcaagagtgaggtcgatcctagggctgcacatttggacccgcacacccgaaaaacccgaacacccgccccgacccgatgccaaaaaaaccgaccctcggaaaacccgtatagt

SEQ ID NO: 250056 - DNA, 562 bp, Cannabis indica
tatgaaacttataaaaaaacacattaaaaaagtaaaaaataccgcctgatagtacttttgtaaaaaaatatcaaaagttagtatacaatgtaaatttccctattttttatatgatgatgtacactatagttatagtaagtatgttgttcgtactcgagaaattttgagcaatttaaggtactgattaaaatatgattcaaatagtcaattgcatacacttattttatcttatacctgtgtcgttttaattgatgtatacagctactgtgatgcaattacttggttctttgtgctcaatgctagtggtaagtttattttcttcactcgtacattctggttggttagggttttaaaagctattttttgatttttgaagccccaacaattctttaagttctaaaaattcttctttgctcgttcaataacaagtacgattcaattttaactttaaaaagttattttaacacactctagtaacaactagcaaaacagaatcatactataatataaaatgtatatagtacaactaaagggttgtaatttttgtttgcagtctttatat

SEQ ID NO: 250057 - DNA, 1272 bp, Cannabis indica
taatgtattttttttttaatttttgaaatgagatttgagattttgatttaaggatcttttttagctattgcggctacattggtcatgtgccctttggatatgattatatatacttattttatatgtacaataaaactcaagtgagatatcatggtgaatcattgtgtgaccaattacgtaaaattgtctcttattttaatttaaagttaaaccaataaaattaaaaatgtaattaaaaatgtctacaatattttaagtattttaaactaaaattaaaattttttatataaaatatttatatgatttttttatatataataatattataaataaattaaaaaaaatattctaattaagtaatagtatattttattaaaattaatatacaaaactaaaaaataccattaaattaaaaaatttattacataactacatttaatattaaaatagatataacactttatgatattctattatcgtcctttaacaattattttagaacaaaagaatttttacctttggaattataatttgcttcatgaattattttttgtaagaggttatcttcgaactataaagataagtgtaaattgttcaactacattttatttatttttgtaaataattttttgatgtaagactaatctaggagctaatctattgtaattcaagaattcagactcaaataattgtatagaattgtactttaacaatcaaatatggatgtgtacatatttttaaaattaataatgtttaaatgtttttaaggtttattatcttaattttagctagcttaagtgagctaaaataaactctcgtgtaagactcataatcataataataaattatctataaaaaatgaatagattacaatttgaataagtaaatttataattatttctataattcgatgaaatattcttttagggaaaaatataataataattcatatggcaaatctctttagggtggtagtaaatttcatatttattcttcattatatatctaaattatttatttatttattttaatatataatatcacaacaaatacactatattattattaccctatcttccacagctatcttatatcttatataatacaagttatatatatatatttaattattagagcacctccaaggaggcagcaaatttaaaaactaggagtagttaatgctccaaggaggcaccatccatgcactgcaaatgaggatatatgtacagtgcacggcatagccactgctattttttttttttttagttttta

SEQ ID NO: 250058 - DNA, 1214 bp, Cannabis indica
agcaatgaaaatagtgaagactatacttcgcaacaagatgaaagatatatttttaagtgattgtttgttagtgtatattgaaaatataattgctaaaaaaattaacataaattcacttatatatgactttcatgatatacaagagagacgtgttgtactttaattttaattaaaattttaataatatattttgaactatttgtcacttaatttataatatagcttggcccccctgaattttgactatggctccgcccggccctattcataatcaccaattagtttttaagaaggaattttatgattcttgtcatagtatcaagaattatctcctaacagacattcgatccatacttatctagatagtaagctaagaaaaaaagtatgtcgtacaagattcgaacaaaacaagcgaagtaaatagttatttgtgatacgatgattcaagataggtaaagtaaaaaataggcactatcttgaggggagatattaaataatattgtcctacatgtgaattaagtattaaaatattgagcagtttataagaacatgagttactccactcatcaataattaattttaaaatgaaatcacataatttttctattgatgcaaatattttaaattgagaagtttaaaagatttattttccatccaactatctcttccctcccaaatttctctcttgccaaacaagaagacttgttgtcttctactatctctcccttacctctcccctcctctccatccaccgacctttctctcctactaaaaatagtgttagttcttccataaaaaagaaaaaacatagttagttcttggctccctcccggcatgccactcacttgcatcatcatatcatagcttgattagacgacgtattaccgaccttaaaatttagtgggcgaaaaaaaaaaatttgagctcttatttaaaataaaatgaggtatttttcaaattcaacaaaaaataatatgtaattttaaaacaggaatttttttgagtccctaaactaagtgagttttaaatacatgcctaacctaactataccttggaccgagcttgctaaaggactatatctaaatgtagattctctagctaatgcacctttagtaattaaaaggacttaaaaaaaacatttggggagttaaaagaagagtattactattgaatatgtagtgtataatactttttataaatattattttatgatt

SEQ ID NO: 250059 - DNA, 661 bp, Cannabis indica
tctttgtgtagaaaatttgaactcagaatgcaaaatgagcgaaaatagtaaaggttgattttcgccttatttataaagaaaatggtgatccacccgctcccaaatcaattatttagactgcatctcaggaaatataactatattgaacaatctaggaatcgaaagggttagcatttaatggatgtgtggaatcgaggtaattgatatgatgatattcgccttgaggtacttgctgacatgatcaattgccatttcacaaatacaggcctcacgtgctttccctatgcatgtaatcttcacaaactaagagaataatgccacgtgtaagtaatattgaaaaacgaagaagttttcctccataacttattggcttggggatttgaaaaggtccatactttttaaacatccacgtgtcctcatacaatctagaaagaagactgcaagcctccacaactctaaagtttcggaagcttagaggtcaaatgttatccgtgtttctgaaaaagggacacatgtaattctaagatccaaatttaatcatcatacgcctagttgcaggcccaatcatgataatggaccgagctcatcaaagaggtcagaccatccgagtttcggagtaacatctcatccaagcaaaagaagagtctagcgaagagaactt

SEQ ID NO: 250060 - DNA, 583 bp, Cannabis indica
acccagatccaggacccaaacctgacatggactcagacctagacccagacaaagatcaaaaaaacccgtactcagactcgaactaagactcggaccctaacccaacctggacccaaacccgaacttggaaccgaactcggacacggaatcagaataagaactgtgactaggacccaaagctaagacaagaatcgaacccgaacaagaacccaaacttagactaagaccttgactaggacaaagacccgagacttgggacccgaaccttcaccgggacccagaccgggacttggacctaggccttggaacccagacctagattggaactcaggactcggacccaaactacaccataaccaaccccaaaactcaagcccagacccaatcccggacctggtctcgacctagactaggactgagactcgaactagaacccaaacttgaacttgggattgggacaagtactcggactaggacccaggacaaggattgggacgaggacctgagaaccgaaccgtgacctataccccgacaaggtcaagacccgagacaaggactagtacagaactgttggaaattattt

SEQ ID NO: 250061 - DNA, 737 bp, Cannabis indica
gcggagccccaacaatactgaatgaatgagttgagtcgtaccagcgtacgaaagatgtctagttgcccaagtatgaagtctttgtttgattttcttaattatcacaccacaatcttccgttttccattttgttggtcttagaagcacccccaggtacttgagaagaaacaaaccttctaaaagagtcatttctctcaacatagcctgtttttcctcttctttcacccctccaaaatagagttgagatttgttagctttgattgctagccctgaagaggcactaaactcatctaaaatactcttcaacacctgtatcgagcttaagttccccttacaaaacaacatcagatcatccgcaaaacagagacttattatcttgagactcttacacatagggtgatacttaaaattcgattgattggctaccaactgcagacgcctagtcaaatactccataaccataatttaagatagatatttttatagaaaatttattaaaaataatagtaaaatattaatttgtaaatttatgctttaataaaatattaaaaattgagagaattaaggagaaaaaagacaaataactttggagagattttagaccgctacgtcaacgcttcatacttctcctttatatatatagattattcataaaattattttttaataatattcttaaattaaatagtaattatttaaatagattactaatttattcttacctcctccaattaatt

SEQ ID NO: 250062 - DNA, 689 bp, Cannabis indica
tatactaaccgcggaggtatagagggaggcagtcgcacatgttctgacatatgcgagttgggtctgccctgtatgatgaggattacggttatgcggtatgaattaagtcgcatccgcgatacctcgctggttttatcctgggcgaggtctcgacttcgagaagcctctccgatacacgtgtccttcaaggaggggtctggtctcgagtttctaggtgagagaaatctcactataacaactggacttgaaaagattgtatacaattttctactttggggttcaacaatttctttacaccagttcacaccaatttcattttaaatcttaatttctaaatactttgcagtttgattatatattcttttttaatagtgataatgatgatgatgttgagctcttcatgttcttccaatcactataataagttaattagtcatgtcacttatttactagacaagatatgccactaaataacttacaatgaaagattggaagcttctttgaggatggtatcttagaatatttttcttatatgaagtataaaatcattttattaatttatccgtgtatgcgagtaaatgaatatttttgataggataggatttataaaacactcaaaaattctaaaagtgctttaatataaaaaactttaaatcataaatccatataacctttgctaaattaaagaa

SEQ ID NO: 250063 - DNA, 706 bp, Cannabis indica
catgttttaagtgtggacttattggtaatttaaagaagacttggtcttggctgaaaaaatgaagaatagaagaaagaaggtatactcactttagtctgtgaggttgtcgttactcaggctaatgcagcagctagtttgactcgggtgacaggtcaacttcttagtataatttctcttgttcaagtattagttgactctaaacatttgcatgtggtagctagagtgagtaataaactgggtaggctttgtgataattataatttagggttttggggactctattacctagcgcagaatcagttatctccaacaagtggattaattaggtctatcttgttaagggttagaataggaatggaagtgttgatctggttaagatagcttaacaaactttggtattatttcaagaatggatttcttgcataagaaccataagtacgcagttactatggattagaagagaaggagttgacttttcagttagatgatgaagaaccttttggttttgaggaattggtttggaattagagtactgatcattttggtgttacagattcagaacctactgtaggatgatgcatagaattcatattagttgtgattgactccaatagatttgacgagagagcgaggatggagagagaggaggtggcggtggtggcggtggcagaggtggattgtcgcggttgagagtgagtgagtgtgt

SEQ ID NO: 250064 - DNA, 887 bp, Cannabis indica
atctcctgttaaccctattaactttggatggaactctggtagtgaaagaaaataagaaattatataacagaaaaattaaccaatgagataagaacaaacattgaacattcatatatggaaagaaaaagcacctttgacatattcagcaacttgctcgatggtatctctctcgggatcaacagagatgaacacaggtacaatttcaagccctgcttttttttctacacaggaatatttttattacagtaacattttatagtaaaatgttataactaagtctaacatggttacagagaaagaatatattttctcaaaagaaaaacaggagatttctaaaggcaaaggaggtgagaaaggagaagtcaagccttagatattcatccaaaccctaaagcatcataacataggaatgaatggaacacagatacatagcattacagatagagaatcacatgatatctaactggacattcataaacttacttattttatcaattgcagcagctaactttattaactcatctgggcagatatcaggacagtgagtaaaaccaaagtacaataacgtccattttcccaagaaatccttttcagtcactctctttccttgatggttgataagattaaatgggcctccaattgcagcttttccaacagctggtccttcttttacttcttttgaagcagtatatatatctacaacagaaaatttcaccataaatatactaaaatactgaagagaaacaatatttactcactttctttttgctggaagtgaaccccataaaacacagggtttacaaatatattgagataaagatctagtggacatagaaaaacagaggaaaaaaaccgaaaacaaaccaaattgagcagtgtaacaccac

SEQ ID NO: 250065 - DNA, 512 bp, Cannabis indica
aattactaaaaaaaattattttatggatttgaatttttattttatgtcgtgcttccgtgctaagaaatttgagttttcattttgtgcattcgtgctttccgtgtcgtgccgtgcttaagctcatattattcgtgtcatgcttgggctcatatttattcatatcatattgggcccaagcctatattctttcatgtcgtgacgtgcttgtgtcacccatgctcgtgttagtttcgtgtcgtgccaaaaagcttggcccaaatgaatagctttagtcccatctcatagacgagacacttatgaccaactcaaaatcactctctactccgggattgctaaatttgattgaggaactctgagaatagtcacaagttcaactcaaaatgtaccaggacaaaattgctagacactttaattctaaacttcaaagcagtacatttgacgttgaggatctctccttgagaagagtcttcctagttttgcaagaaccgagagtgggggtcttagggcctaac

SEQ ID NO: 250066 - DNA, 606 bp, Cannabis indica
tctcttcatcatcttcttctttcttctcatctattctatattatgttatagtatttataacaacaataaattttatagtagttgctcactccttgggcgataataggtccacgctaccacaaatcaagcttttaaaggtgttttttctcagcttaattaataataaacaagcgacactatagagtgtggctaaataaaattttaataaatacaccttatagtgtcagttattacaaaataacaaccatcatatggtgttaaatttttaataacaccacatatggcgtcgattatgacaaaataactcacactattcgatttatataactctatttagccctttgtattcctcacttcgtcttctccctaataaaaaaatcagcaaccccttcacgaaacccttgcccaactaccacctcacatcccccatttctccatttttcatttagttttactcattttttttaaatcttgcatttttcttacccacaaacatatccctaaagttttatcgtcttttgttttgttattcagggtaaaacaagcttagaggtggtggttttagctccgggcaccgcttttggtggagaaatcgttgaatctcaa

SEQ ID NO: 250067 - DNA, 616 bp, Cannabis indica
ccatggttcagatggaagcgcctgtgcattaggtgaagcagtagctgtaggtgattggtattttgctcttgctcgatggtaattctgcagataattggcagtaaaggaaaggctaactttgctagtttttcagctttcccatgtaccacattgtttctctcataccatattgaccacatagtacaaagaatgaattccatgtcagtttttgtgtagatggatgagaggtgcactaaataatctcctttgttcattgatcttgcaaggtttcgatcaaacacaaagtctaaacaacgccatacgactcgcgcgtatttgcaatcaaacatggcatgtccaatggattcccatgcttgtttacagatggagcatatggcatctgtaacaactttttgcctgaacagagctgtagctacatgaaaggcatcatggaacaatttccaagcaaaaattttcactttttgtggtagctgtaaagcctagaaaaatttccaccataattcttgtgaggttgaagatgatgtatcgtttatgtgctccattgattctgccacatagtatcctgttttgactgaataaaaacccgtgttattgtggtgccatatgagtgtatcag

SEQ ID NO: 250068 - DNA, 457 bp, Cannabis indica
tttagtctaggtgttgagaatgtggattgttgaaaagttatagtcagacaattttgtagctctataaaagatttactgctggtatcattttgttagttgtgtgtgtggatgacattgttaatactggaagtgatactaaaggcatctcaattcttaatactttcatttcatacccaatttcacacgaaggatctaggggtgctcaagtatttcttgggagttgaagtcactcagagtaaacaatgtatttttctatcttaaaggaagtatgtacttgatttgttaactgagacaaaaaaattaggagtcaaatcttatagtactccaatgaatccaagtgtgcatcttacaagtgatggggaaccatttaaagatcctgagaaatattgcaaattggttgaaagtttaattatctgactgtgactcatccagacattgcattctcaattagtgttgt

SEQ ID NO: 250069 - DNA, 728 bp, Cannabis indica
aaactacaattaatatatatttaatagaaaggtgactttaattggtgtgatgattgttttgttgttgagaataagaactaatgtatctgaagctgaaattgacccataaaagagaagaaatgactactgacttgaaatctcattgacaaaactacactattcttcaggtgaaactcaactgtttactgcttttaattttatcgtttctccatacaaccacattactatatttatatatatttaactttcatctcatttattataacataattattcaaatacctgacaaaatagtctatatattgagccaaatagaaaaaaaaaaaaaaaaacttcttttcattttctattttttttaagagaaaaaaaaatattagaagaagctataatatgggtgttagttttgagaaaatttctatatctttcagtatttgcaagagttttttagttaattttattttatgatcctatatattaatattttttagttattgaggactatctctaaatttttaaaaatttatcattagtttacactatcaaaaataagatttaaacaattattcaccacacgcataagaaaaaatagttatctgcacaataaaatgtttaaatcttatgtaaactattcgaaattcttaaaaaatttgtaagtaaacctaaatatttgtaacgtccccgcttcaagccttcattgggtccttacacccacggaatgaatgactctt

SEQ ID NO: 250070 - DNA, 725 bp, Cannabis indica
tacatatagaagtagatatatggctgtatgcacatctgcccctttgtagtacaagcagtgatcatagtagctccttaagtaaccttgttttgtcatgaaagtgtcaaacctcttgttccattgccttggtgattgcttaagcccatatagagacttttctagcttacacactaagtgttcttctcctttcttaatgtaccctttaggctgctccatatatatgtcttcttctaactctccatttaagaaagcagtagtcacatccatttgctccacttctaggtcaaattgtgtagccatagccagcattattcttattgttttgtacttcactacaggggaaaaaatctctgtatagtctattccttccttttgactaaaacccttagccactagccttgccttgtatcttgtaggttcaccaggtttgttcccttctttgtgtttgaacaaccatttacatgcaatgacattctttccatcaggtctcttaaccactttccaagttttgttcttccttagagaatccatttcatcatccattgcttttgaccattttccagaattcttatcttgcatagcttcttcataagaactaggttcagttgtagatatctccattgcacttagaaaagcataggccagaacttcattccatgcattgaaactaaatctctgagtaggcttagaaactctcttgcttctatctcttgtaagttgatact

SEQ ID NO: 250071 - DNA, 689 bp, Cannabis indica
aacataaaatgttatttctgatctttattaataagtaaatctgattatatgaaatgtgttttatttagggcataaaatccaacaattcattcttggtgtaacaaagtctttatcgaaacgctaatgacatacagcagcggtgtgacccaacttgtgacagacttgacacaagagtcgtggctgattgtacccagatcgtccatatggcctatttgggggtctgtagttagggaagttgttcgaaccacggccagagaacccagccggtcttgaagcaccattattgtacgatctttgattggacatagaaagatttacaaccattttggtggagagttccccaatattgtaatggcgttcaagacggctttcatgagtgagcagtaaggactgtatagattcgaaagaaagattgtcaacaaggctagtaacatgaacaactacaggatcaaattcgggacctagcccattcaacaaatgcataacaagatcactctcatctaagggatgacttgcagtagataaagaatcagcaagcaatttgaccttatcataatagtcagatatagaaagattgcctttggtgatggtggacaactgagatttgatctgaagaactcaagcctttgattggctggcatatcttttttcgagggctttccaaacggagtaacaagtgttgtgctggg

SEQ ID NO: 250072 - DNA, 669 bp, Cannabis indica
atttatattgggttggtaaaaatacattataacccgaccaaatcgactgatgtacacccctagtatggaacagtcgaagccttccgaatgagagatgggacacgtccagaaagagtactctaagaggtgcctcaaagcctagtataggatgatgtggttgcactctgacacccgatcccacaaaatcaggggcttgtcccccgtgtcaaagcataagtgtgtgcgcaccacaataaggagactaccctcttcgtccaacgacacaaatttgacataacattacatacatgcgacacacacaaaacatttgtcaaggatcgcgtggtcctcagacgtacacaacaccttcgccccacgaattggacatgagccagtgggcccatagtcacttatttaatgtatttaccccattagtgggctaagttgatacaaaaatcctagcgggtcgcgggtaaacctagatatgattcctagcctataaatattgtactatactctcatgcaaagggggaacttccagagtgtgaaatgaaagtgagaaaacactatagcaagaaactagggttcttgaacttgtatcccaattgtaatacatcaaggtcattcggccaagtataagtgactcatggattaggattaatttataccgaactatgtaaaaaatttcta

SEQ ID NO: 250073 - DNA, 707 bp, Cannabis indica
attctcaacatcttcaaagatgatcctttacatcgaaagttattaaatcaaaacaatgtgccggaatacttcatagcacactgaattccttttataactaacacaaaagctatagggaaattttgtttagaaacaaatcattcatcgattgtcactcttattcccaatatccaagaagttagagttctttatttggtttatacttctgtaccgtttcttcaagttacttaaaaattaggttcggcttaaaaatcgcatgtagaatgatagaaaaaatagaaacaatacaatcagactcatgaaaatagaaaatgcataatcttagacaagtgtacccacggtaaagaaccaataagatttccgttcaatccagaatatagatcctttaagattattttcccgccaacatgagccacctaaaaaatgaattaataggcacacacacattgtaagcacagttgtttaaagaatatacagcacagaatatcaagaaatataaggtgattaaagttaattaaaaaacagtaaactctgcaatttagtaagtgagctgctacaatcattgaaaaactgtaaacaacaacatgcataaaccatattaaaatgttaagctagtaatattaccctgagaaaccaaccacctcccaaatatattaagatgagaaatctcactctcacaagaagcttaatattccacatattacccc

SEQ ID NO: 250074 - DNA, 695 bp, Cannabis indica
aacattatttagtacatgtcaaaattcggggggaaaaattactaattagcctgaatgttaaatgacagtattattattaggggcactatattatataacaatagtatttttaaataagagtagtttttatttgtacctaaaatttatgaatgcatttaatttgaataacttttatttcacataaaatatatattatcataaaaaaaaaatatatatctatatttaattatattagtttttttttttctattaatttaaattcttaaaaaatatacttatcaaacaaaaataaaatatatttcaaatactataacaaaaaaattaagataaaaaattatgttaaattttattagaaaaaaataaaaaattgtgaaaataaaattaaaataagtattgaaattaacacaaaataatatgagaaaagtatttaaaaatattaagagtgattttctaaaaattattttaagtttaattttttctaaattttaaagtatacttattattttgtgaggtgcaaataggactttctataaacaattatattcatgacaattttgaatgaatcacatttattaaaattagaacttgttggtttaaaaacaataatattacaatagtataatattttgttactaatattttggtatatatatcaaatatacatatcattaatttattacaattcgaatgttcat

SEQ ID NO: 250075 - DNA, 733 bp, Cannabis indica
gatgatcacctcgcatcactaatccaaataaagggatataacgagttaaagtattttcaacacttagcattttttcctattaagatggacaagaaagagatatcatgtttgatgagatacaatcttccaagttagcataaccgtctaaaggataaaaataaggagtagttgggtggttattagatattatcccatatgtgaatagatgaaatatggggaatgtccacgtttcattaacagttgtaaatgaacaaatcccaaaaggaataactgccaaccttattcctataaataggggaagaatctatggaaaaatgaacgataaatttgagagagaaaatcttattattcaatattgatattgtactctgtattccaaaaaatatccctaataataaggacttgtggagtatgtagattttaactacaaaatcacgtaaaatatctggtgtcatttattacttatttatttctgtagtgtatttattacaaaaaaggctattaatttggttaacaaaaatctgcgttagcggtttggtgcttttattgagagccttggtgatagaaaactcagaaaaatctctccccataaacacaattaacccatactaaatggctgataacgatcaacataacgataattgccctgaagaaacaacccatcgtcctggcaaagaacctatgggacctcaaagacccaacacatttggaacaccacgttcagggaggaatg

SEQ ID NO: 250076 - DNA, 701 bp, Cannabis indica
tgaactagtgtatctaccacctgaacgaaactacaacacgaggtacattttcaatcatcttttcaatatatttgattatgtttaatttatattatgctaatgattatttttattttctataacagccgaagtggtttaataaggaggggaattgaagatattggaaggacttgaagaaacaatgcaagttttctttcagctctctataataagaaattttgtatagttttctgtgcatagtactactggccattcatgttaggttatgcttatattgcctattggatgcactgtagtagctaggaagttgaatcaggtctagcaaaactattgaagttgacattttattttcgtcggtatttttggtccttgatactgctgcttagagagattatactgttaaaattgttctatgcatacattttattgtcattgttaaaaagtaactaaatacaaaaatattaaagataaagactagtcgtgcgtcctaacttagtattgaatatactcttcagccggaagcttgtgtcgtctgtgacttcttcgaactattggtctagcggtcttgttattcaaagatagtttgagtcaaaattgaagctgaatttttagtctgtcaagtatcttgtgctgtgcactaaggaattctactattttttttgttcactaaagggatttagctagatgactatcgttagctt

SEQ ID NO: 250077 - DNA, 926 bp, Cannabis indica
gattccttttccaattgtaattcgaaattcttcgatttatgtgcggcaagaacatcctccaatgcagttacgtctctaccatacttaatagctttcttgacttcttgatatgcaattggaagcaaactcaacaagatgatggtcttgcttttttcatcaaccttgtgatttatattagccaatcctacaataatctcattagatctatcaatgttatcatctaaagaaaatgaataaatcattctaaaatcgtataacctttctagaaaattaatcttgttaggaattgatggccttatatgtatagttcttccaacttgttccaaactcctttcgttgtcttttctacgataagttttcttcgaacactgtttaacagatacatgatgatcgtgtagtacggaatctcctccatttttgcgatttcctctagtttcttctcggccaaaaatttctcatctccaagaaccttggataacttctggtgcactaggattcctttcaaattttctttccatagtgcaatgtctcttgttccattgaacttctccaatttaaatcttgccattgatgacattaaagttccttcaagaattgcagcgaaaagaatcttgattctacgttgttgatcgattaccaagctctgatttgtggaaaaattacaactaatggtgcaaaatcaaaatcaactaaactttaaacaatcaaacaatcagcagtgagaagattaacaaatcacaaccaataatcagagaagaataaggatgaaagtatagtataaatttaagaaatgattaaagcagtaaaatattaaagttaacaccaagatatatattggttcaagtttgatagatcgatgtgatctatcgctctactgtagatctagaacaccaccaaactcctctttattcattgagcaagaacat

SEQ ID NO: 250078 - DNA, 976 bp, Cannabis indica
aaaaaaaaatagtgttgaaatagcattttttttttgtgtttatttaataccaaatttaagttttaccattggagataaccttagttacattttaaccgacatttcatagtaaaaaaatattgaacaaaggagacagtcaacaataataatgatttaaggaaaatttaaaacaacattaaaaaaattaagaatcacgattaaaaaatggtaatactttgagtttgagggagaaaaattataggcgggaaccattttgttttttattttttaaaattttacttaacaaaatcttgtagtttcttcataagttttgattaattaatcaaaaattgatttctaaaatatttgttcttttattcttcttaaaattgaaggggcagttgtatttagtatccaatcctaaatttaaaatcttgtattttttatttattcgaattaagtaatgtggaaaattttgacaaacatggttttttcttttctaaaaaaaagataaacatgatttagttattactactactctcatggaaacattaaaaaaaaaatgaatgcaatgtttcccacattcattctctattttggggtcttgctttggtgtactccatgtcctacctagagtgtttttggctattgggtcccaattaagacgagtaaatgggcaatgtcacactttttctttttcttttctctttttcaatatgcttctgtttttgtttttgtttctttcctttcttttcaatgatttaagaatcttttcttaatttcttttcaatgactaccattcccatgaatcaatgatgacttttatttatattttaaccttctaaaaatatatattatttatttgtgaaaaaaaatatagtacacctaaagagatattttggtaaatcttctatctaattttatatctaatagagtttttttagtctattttttttttataattgtgtacgttgtaattatttaaaaaaataaaaat

SEQ ID NO: 250079 - DNA, 695 bp, Cannabis indica
ggtgatttgagttcttacaggaaccattcgggagagaatgtcgaactcacaaagcaaatagtattcttgaaatgtgagaatccagcagtagtagtagtgaataataattatatagacactgctccttactgcaatggttctaattattatgtggtggatggtgggtttagtgtttccgatatggcgatggggtgcaaaacagagctaagcagtagcatatcaaatgaggtagtggtgaataagaggaatacatcttatttcgacattcacaaccaccttgctcatggctttgagctttcatggttggaaacagaattgtataagagaaaatataactgctccatcgattattccaacgagtggcgatgtggtggtaagtaggtcttatgttgggtttagctttgaatatatattgaaacaactttgttctgatccgctaatgtcaatattatcttccatcactgcagataggagaactgaaagtgaaagcattgttagaagaattgttgacataagtaataattctctatcttataaataaaccagcatatattagtattttcattacatctatttttgattcatttattattgccttattgcagtaatgatgtactctaaagctgcatatgatgtgcttggtaagagattttacttttaaaattaatctacattagaaattttatttatttatt

SEQ ID NO: 250080 - DNA, 636 bp, Cannabis indica
ttgaagaaaaaccacttacatcctatcaccagctcgagctcgcttgagcatggagcgcaatgaaccccctacagtagtttgacaagcttgaaaagtgggcctcttgaccccagaagcacacgccaaacctttacctcgaacctgagaatcaggcaatgaggtttccaccacagaggcagcaggggtctgatttgaattgagaattaaagagggtaaagcttcagcaagagagcgagcagcagaattcaattctggattggtgaaactcggggaatcattaacaatgatagagtcagtatgcatcggggcagaccaagatgaacccgacacagaaaaccccaaagaaaagttaggatttacaggcgtagggatcatcacattagaagattggcaagtaccagttagattagcaaccgaggcaacattagagttcaacagaggggtaaagctaaaaggatagttcagaaaaggattagggaattgattcccctgaggaaaaccaggaagatccatatcagtgatagttatggctggggggtgaggatattgaaaaggggactgcctttcagtaggcttttctttacctctaagagggagatcataaggacaaggaggtggggaaatagactcatcaca

SEQ ID NO: 250081 - DNA, 987 bp, Cannabis indica
aggtgtgttctgacaggttggcgcggtatagttacaatcgggtatttcgggccgaaccgggttcgggcccgaaatgcaatttgaattgaaatattggcattttatttaataatgattaatccgaaatttatttgagtttaaatgagcatgaaatgacatttttgcccttaagtgtttatgtgtgtgcattttggccctaagggcaatttggtctttttgacctttatgttatgttgataaaagaatggaattttgggaattgagaatttaatttttggttcgtttccctcatacctgaaccctcttcctctctttctaacctaattcttttcacttaaaatcacttgagaattgttgagaaaattgcttgaagattgagtagctttgtaccttgaattgaaggaattgaggtagttcttctcttgctgattttagttgatgaaaaagcatggaataggttgttgatgatgttttgttgtatgttgatgttctttagttggtatgagcatgtttttacttgaatcttgtggtttttgtgtgggattgtgtttggatgagccttcgatgaattttagggtgttctccatacttaatcctagctgtatgtattgtttgattgctgggaattaaagtttggagctagtttatgagctctagattttgagcatgagattgaggtttatgtgattattgtccaatctgaaattatggggtttattgttggattttgatgcataaatatgtgttttagaccctataatatttgctagcagcttaattggtaaatggagaatttggttgtgaaaagcaagcttgagttcatggaactcaagcttggagctttaatggcactttttgatttttagtgaaattattgtgtttgagctatggaatatgtttaatatgtcatatgttgatgctctggaaagtttggtggtgtttggggaagatttgagtaggttatgggggcttaaagattgaaatttt

SEQ ID NO: 250082 - DNA, 584 bp, Cannabis indica
aggaaggtcaagttgatccattaatgaaagtacaaatagatcaacttaagagcctctttcaaggcctgatcggcccaaaactcacagatctagaacttgaccagactagaggatcaccattctcactagaaatcaatgctctcgacctattgccgaagttcaaaatgccaacatggaaaatgtatatgggcaaagaagatcttttgtctcacattaaatattttaaaatgcaaatagacttacaagtgatgagaggtgatgtatagtacagaatcttcccagctacctgttaaaaatattttataatgatctagatttactaacatgtatgtttgattataagactataatctaacatcctaaatatgaatttctttgggggagtggtgatctttgggaatatactactttaccagtacccagcccaccaaaccaacaccaacaacagcaaaaacaacaatcacatcaaatcccacaacagcaacaacaacaactaaaaatccaaccacaacaacagatcacatctaacaaaaacaacaacagccaccaacacagctacaacaacaatagccgcaagtccaacc

SEQ ID NO: 250083 - DNA, 939 bp, Cannabis indica
atgttgggccggctctctcttctaatgggccggtctctaaagtgggccttagtaatggagcttcatcacgtgggcctaataataagagtattgtccctaacttgtctattcatgggaccgagccctatttggagaacaacaattcaggtttgcttttgattaatgaaagtgggccgtgtgatatttttgggccgagtgggctccctggtttgaaaggtaaaaatactactagttgtgataagtcaaccaagactatgtccattgagagttcaacttgtggccaagaagtgaattttcttcaggatgaatcccttgctctatccaattttttccaggctcaagaaactcttattcatgagctcaagaagtttggaaacatggacttatttgagattaaagccataggtggtgacattggggtcccaactgcctcggaggttaatgaaagaaccactcctttcaaaaagcgaaagtttgcggggcctcggcgtctctttgttctcgtccttggaagcttccccgacaccatcctggggttgtcagggattttccttgggactcagctactaaggctaatgctaccaatgaggtggaggaggagcccactgaagatggctccttatctaacagtgccttcctgggatcggatgagtggtgttccaatggtaaaaatgtgatctcatcaaggccgatggtcggtacatttgtggttgacgactctggatcgtttgggtctgcccattctcattcccctgtggaggaggctactactcctccacaggagccatgagaggcgtcgcttggaactgtagagggttagggcagacctctacagttcgggaattgaagtccctgattcggttgcgctccccggatttcatctttctgaccgaacttaaagtagatgcctcttctgtggtacgtattcttaactcgcta

SEQ ID NO: 250084 - DNA, 1480 bp, Cannabis indica
ttaagctattagactccataatccgattggttgataaagaaaaaactccaactaaaatatggaagaaattagaggaagaaattcaacagaaatcctttacaaataagatattcttgaaagaaagaatattcagattcaagatgagtccattctagtgtcttgactagaacttcgataaatttctgagaattcatattgaattagcaaattcgggggaaaatgaggccttaattgatgagaaccaggccatcatgatgctgaatgctttagtagactcctatagggagttaaagacatccatcaagtatggaagaacatcaatcactctggatgaagtgatttttgccttaatgtcaaaagatatggaaatgagaaatgaaaaacctagaagttcagggctgaattgcactttggtcaaggcaagtacaaaggcaaaaatcctaaccctaattgaggaaaaagccaaggcagggggcctacaaaaggatataacaaaaagattagaggcagattacaagaacctaaagaccctgatggatgcttctactgtggaaagcaaggacacgtgataaaggattgttattttcgaaaacaattaaacaagtacagaaatggaggacacaattcaaatactcagagatcgaatcatcactcaaataaacgcaaggacaaacaggttgccaactactttagtggctgtgatagtgatggggaaatctatttggcagcatcatctttgaaagatgactggatcattgactcaggttacattttttgtgtcaagacccgagcagtaggttgtggcagatatgtgatatatcatatatccataacttggatggtcaaaggtcactctttaacccttgttagaaaataatacttacaaatgatcccttaatttatattaaaaagttatacataatacatattaaaattatagaataatttctataataaatagagaatgattataataaaatagtaccacttgttgatatatatatctataaaataataatatccccacagttatgtagtcaccaaatgattagatttaataatttgtgaagcactaaaataatactatgcattcattatttctcattcctaaccattccacgacaattagagtgatacagaccatccattatcaattagctaggtatataatcaatctttaagagaaaaatttaataactaagataggactaagataatcacaccgttctccatccatgattctctcacatccacaagtactaactgagttgttggaagggaaatatagggggtgagcttataaagcccaataaaaaaacaactaatatcaaaagaatagtagtctaataaaaatctatgcatggttagcttttaaaataaaacatcccatcatcatcatgtacgagcaaaatagagagaccacaaataatcacaagagaaaaactacccatgcatatcacaccgtccactagacccctag

SEQ ID NO: 250085 - DNA, 547 bp, Cannabis indica
caatttagttacaaattcgggcaaaatcacaattttagtcttggaaagatctaaatagcgaagatgtttcagttcaccaattgaatcatggaactcagtcatatgaagaccacgaaaagataacactttcaaacatttcaacgttgacaccaaattctgcactacttctgtagaaaaacttattttagatgaccttgaacctaataatgtcaaaaaggttcgcaaacgtgtatctccaaaaccatagctagctatcttattatcagtattatgttctgtggcacatctgaggtgacgtgtcattttctcaagcctatcagtgttgccattttgatccaacaaacaactgtattttcctgaaatagttctagccaaatcaactaaaagatcatgcatggcaaaacaagacaccctcctcttactcggttggaaaaatgaaaaagatactaaatcatcaaaatactcacgaccaacttcttcgattctcctgttcctcttggaacactgcacaagatttgccatccatatgaacaccaactcctctctt

SEQ ID NO: 250086 - DNA, 549 bp, Cannabis indica
attactttcctaaataaagagaaacaaaatgagaaactaagtagttttcctcttctctcctgtcagtgtgaatatattctccaaaattagggatataatcgtgacttgaatacttcgtatagaaaatatttctaaagatatactatatgcacgtactctgctcgatgtatgcaaactgaccaatggtcgaatggcgcagcatactctatctagatatttccagcttcctcttcgagttggttgtttataagtaacaaattactcaggatggcttatcatcaagcgtgttgttctcctaggttatgaaatcttctacacgtgtcacttagatggatgttacatcaccctatgcaaaaactgggataacaggtttattctgtctcaaacacacttcgagtgcaacttgaattgttgagtatgcaactctattgtataatattcaagtgatcatgtttaatgcacaatgtaacgccctaatgctaaggcacactacagtattttttgtttaattacagtgcaatctttgctaatcaaagaattttcttgaaa

SEQ ID NO: 250087 - DNA, 592 bp, Cannabis indica
gaaaattctacaatgcactctttgtgtatcgatgcatccttatttattttgatatctaaaaaattacttagtctaatttttttttatggtcgtatacattataatttaagacatctgacaaaattttgagaaattttttcaaatttctcacgtcgaaaacagtgtttaaagagtctgttctacgcgtgacttttttttattctatacgcgtgtgaaatagacggtttaaacattgatttttatattgtaaattattttaaatttctcataattttgcagtatgtattaaataactataacgtacacaaccatgaaaaaaattagactaaaaaattctgataaatactgaaaaaattaggagttgtatcagtacacccatcttgatggagtgtattaattgtagaagcaccttataataaatattaaattagcattgattaatgatagcctaatatcatcttttaactcgtcttttatagaaattgttgattggactttttgttttattaaataataatttagaccttttatttttttaaatagtacaaaatagactatgaatttaatttttatcaaattaaaacttaataat

SEQ ID NO: 250088 - DNA, 722 bp, Cannabis indica
gcacagtatgtttaaaatcacgtaatacgcttatgctagttagggtgttacactaaaaatactaaaagatgattctaatagtcaaacgctgcgttctaatattgacgagcacaaaatatgcaaaaatatgaaattccatatatgacatataacatgcattctgaattcaattaaatctccgtaaactgatgattcataactaataagaatgtttcataattaaaccctaattatatgctaatttcctaattaaagttaagcgatctttgcaataagattagaaatataatatcataaatatctcaattttcaaattaagatattatatcatattatcttattaaatatttaattaatttaaattatttaataaattaaaaatttgaaaattagttggatatttgaattttagattttaggagatttattagattttaatttttctttaaatattttctaacaacctaaatttaaattctagttaagatatattttgttaatatttttattttaaaatacaaatatcttaacctattttccatatattttgtttgtttgtttgtttattttaaaaaaataataaacaaacctattatttattttatctatacttctatgattaaattattgacagatccaataatctgaattccaatcatagttcaattgtgaatagatcttgtaaataatttgtaacaggtaaacctagaaacttgataggg

SEQ ID NO: 250089 - DNA, 1954 bp, Cannabis indica
gttatttacctatgctttgtacttgtatagttcccctcaagtgaccgagaaaacttatgactcttggtcacttgtaattcacaagattgatttttttctgtttggctttatgattcgagcagaccccttgtacacatttttaatggtaaattcatgacttgctatagtaagaaaaataattgacacaattagaatgataattaatatctttattcatttattggtctgaatgatttttttaccgtagtaacttatatttactgaattataaaagctattacgtgatctaactgatctttagctaattaaaacataaaacaattgtactttagagatggtcatctgacctaagtgctagttgtttttttccaaacctttgagcgaggtctgctctgaaggccatctacttaagagtagatatttgagcatcttgtactttaatgaggtcatcagaccttgtacacttactggtagtattttctcaaatgtcattcattctaataccttggtactagaacaagttccatgtttttgtcataccaacccaatttgtatgctccaaaatccgtgacttcaattacttgatatggtaattcccagttaggtttcagaacgtcaattgcattgtgttttgtgtttatgaacactcttctaaggaccatatctcccacaaagaatttcctttccctcacttgcttgttaaagtaccgagccaccttttgctgatgagctactagctttaggtctgctgaggatcttttttcttcaattttatcaagtaattctgccaggaggacacgattagcttcttgattataggtcactctcctatgggacagaggttctaactctacgggcagcatcgcttcataaccataagccatagcgaatggtgttttcccggttactgttctttccgttgtttggtacgaccacaatacctcaggtagttcctccagccaattccctttagcttattctagccattttttcatggtgtctttgagtgtcttgattactgcttcgacctgcccatttgtttgagggtgtgccactgcggagaaactttttatgattccatgtgccgcacaaaaatttgtgaacatctagctatcaaactgtttgccattgtcagagacaatctttggtggaattctgaactaacatatgatgtttttaactacaaaatcaagcactttcttagatgttatcattgccaagggctcggcctttgtccacttcatgaaatagtccaccatgacaattacatattgtactctgcccttaccttttggcaattgtctgattaggtctgttccccatatggcaaaaggccaacgactttgcatctgtattagctcattggggggtgcatgggggatctttgaaaatctttggcatttatcgcatttctttacataggcctttgaatcttccatcatggtcgcccagaaatatctttgccttagaattttctttaataaactttgtcccaccgcgtggttaccacataatccttcatgtacctcgaacaagagtcgtgcagcctcctcttttgttacacataagtaatggcatggagaaacctctcatatacattacaccttcaactatgatataccacgcagcttttctcatcattttctaagctttgttcctattgtttggaagttctccagtgttgagataggctgctatgggtgtcatccaatttggtgttgtatctatcatttcaacttcttttgcacagttgatgctgggtttttttaggaattgtatggggactaaatttgcattacatgttattgtgcttctcgcatgccataaggcatcacagtttttcttcccttggaatttgcttgagggtgtaacccttaaatagtgcgaccaggtcttggatctaacttagataggccttcattttttctccacgggccatgtactctcctgagac

SEQ ID NO: 250090 - DNA, 791 bp, Cannabis indica
ttctattgaaacttgatttagacacacatttaaaggtctttactacaaaatgatgtcactcatacagatatgcaagttcaatctgacaataagagaataagaaatgtgttgttaataagaattcttctacattatagaaccaaatattatggaacatatctccataaatagaataaatgttagtaaatggtggggatattcattacacttgattttactaactttatttagaacttgtgtgaatttcattaagaatatgtattccaacaagtcaaaatcggtgcatattagaattctatcatattagaaatcatacaagtcaattaattttgaagacatggactcaaattttgcatctcattttttaacgattactcacataaattatatttctacaaaagtatagatttatatgtttcaaagacatttaaatcttaagtagagaaatagtgcattttgcatattaagatagtgagatcaaatataaaatggagaatactacattaaaattcgtgagtatggataaactcccagtccatttgcaaagtttctttaaaagcatgggttcattgcccgatacatatgcttggtacacccaaattatagtgtgtgacagatttaagaaactaagcattttttggacatggggtggagcctacatagcaaactccaaactttcctaaatctttgtctattgatactcttcaatggggtgtacataaggtttaagggttacatattttattatccatctcacaacactaaaattgtagaattaagaattgacttga

SEQ ID NO: 250091 - DNA, 928 bp, Cannabis indica
caatttcatatttataatggagtgatcatggaattaataaataggattattttgttggtgagattcaataaataatctagtttattggagcttagaattataggtccatggtctctgaatcgacaccttcaaacattgttaagcagagggaaaaaagttgtgtatggaagttcaaaaaaatctattttgaaatgtcaaaataacaattatttattttgtaataaataattatttttcaaattaattaattaaataaattggtaaaagttaaaagttctgaggagaaaagacaaatcccttgtcttaattaagatagacggaggcgccacctacactgtgtccagacacagtgtacgcgccaccgtcggttttacactgtcggccaaagaattcccgacagtccataaaactgtcacctatacgagtgtcgcggatactgggtagaatagacaacagttttaaactgtcgagaaaatactataggccacagttttaaaccgtcacctatagtgacataagcacggttttaaactgtcacctatagtcacattatcaatttaattataaattttgtatttttcaacgacggttttcgctagtcgttttgttgtaaaaaaaagagaaaaaaaatgaaaaaattctgctatttttcccttaacaaatacaaattaaaaaaaaaaaaaattaaaaatatatataaactacgtactctaatgaaagtaattggtcatattataaagtataaacttatccaattaaacaatatatagcaaatctgtccaggaaatatatcaatcaaacacagttatttccatgatcagcaataaatttaataacatcaacaactcccatctgcccttcataagcaatagcatattcttcttttcagctggaaatagcatcagagcaggataagcttccatctgca

SEQ ID NO: 250092 - DNA, 716 bp, Cannabis indica
ctatccctagcggcctgaaattgtagaagttattgaatgacaagtaaacttattaaactagctactcgctgctccaacaagcatggtacaagaaagaaaaaagaaagaaaagaaaaaaaaatatataaaatattttttataatttatttatttttaattttttgaaatatttataattattttttaaaattaatattacgtggaccactaaaaatttgccacgtgtacaagtgtgtacacgtggacagtccaccgtgacacttaactgtgatttttggacggaggtgtgcagagcaaaacggaaccatggtttaggtagtttagccgccaaaaattcagtttttgtagttaagtgttacaaaccgtaaagttcaggtggtttagccgccaatatcccaaagctatatattcaaacataaacataaattgtttggatcctaaagaaaagcttcaaaaagataaaaaaaacaaaaaaaaagggccttgggacgggccataagtgtctccccttaagaataagaagataaattatcttgaagaagggagaaggattggatatgtaacaaaaaaaagtgaagataatgatggtaatggtggtggtgaacaactggtttaatcaatatggggtggaagacgagggcccctgcgcctccaacactgcgtctagcctcttcttcttttcctagaagcaggcaaggacctcttcaggcttaggg

SEQ ID NO: 250093 - DNA, 591 bp, Cannabis indica
aagcttgggggtaaatgttatcggtgtttttaagcaggagacatgtggtacaattagaggaaaatatttattaacctctcggattaacaatgacgaccattacaatcctcacagagatgtgtcattaattttggaagggcttaatgaaagcttgatgtagcgagctatctctggcctagttagcatctttgacacacaaaaggatcatactgtcccctgactccaagaagtcgtggaacaatggtttgactacttgacatctggataacgactctcttatctgatcacaaattttgactcctacacgaatgtggatgaccacctcaaatttacatggaaatcaacctacagatggtttcacctttttctgacacaaaattagatcttgtcccttgtgtcaggccatggtagtgtgcgtacatacctctggacacatcttttttcctgatgggtcatctaaagggtaatttataaatgagaacatttgtgcgacacgtgtccctgatctagacagtactactcaccatccctacacactgcacgatcaaaaagcttcttcaaggccaggcggttagatttgaagttgtattt

SEQ ID NO: 250094 - DNA, 1074 bp, Cannabis indica
agatcctggtaaaataaattccaacagtgacaccttttacacctcgggcattcagggaaagtttgctagttttcgttcccacctcgacggaaacattggttaccctgcaaccttttgtttgggcctgcagttgatgattcactaggtcttttcttgaggtcaccaagattagtacccctaccagaaccagcacctgatgtttgattccatgaatctcttctggcaatatttttctttcgtatataatcttctgcaccctcagaaactagggccagttcaattatctaggcataagtttgagcaaccgccggttgtttagaagcaacaatcacacccgtgcgatatgttcatccagccctcgaatgaactttgctttcctagcagcttcagtagccacctcatctaaagcaaacttttccagtcgatcaaacttagtggcatactctatcatagtcatgctgccctgagttaatcgtataaactcttttgcctttactgcctgaaaagactcattataatacttctcataaaaaaaggcccggaaggcttcccaagtcatgttattcaggtcatgaccccgtgacacaatctcccaccaaacacgggcatcatctcccagcatataagtagcacacctgactcgatcattatcctagacccgcataaaatcaaagatggatgttatcatactcatccactactctgccttgagtgaatcagcaccaccctcaaacacttgcggattctgcttccggaaacgctcatacaacggttctaaacgattccatgcatctggtggcactaccagaggtgctagaggatcaggattaggatttagagcaggctgagctcgttgctctctcaattctctaatttgctcacgctgctgccggatagtcttttgcattgcagcgtataactcttccaagtttggtgggggtgaagggttctcgccctcaacagcagacccgagcccagctagctcgcggttacccctaccagtccgcctcgggtgcataatctatacacatgcggtcacattccaagtgataacaatactgataagtatttcca

SEQ ID NO: 250095 - DNA, 865 bp, Cannabis indica
aaaaataaatatatcaagaaaagttacaaaatgaatattattgctattgaaaagagaagtagaagcagtttttttttttttggcacagttccgaaacggtttcaaaggcttaatgatgtcaggaaagagacatacgaaatggcagaaacacagaatcgaatgatcgccgccataacacaaaacttgaaaacagtagagataacgatgactcaatcgaatctcattataaaacgacgacgtctcatctatatgcatacatatatataaatttcatctgtaacatatatatgtacacataaaaatctacaataataacaataattattattatggtattgaattttcaagtgacggtacgcttgccaggacgatcggcgaccttgagagtcttatcgatgagttttctggcttttctgctacggatctcgaccttaacgcttgagctcttgtccatcttgatataactcttcttcggcttcttactctttaaagctctcaccttcgatttgatcgattccacaagattctccagctggttcaccattgataattatatctagagatagagagaaaaaacaaaagagaaagtaggagtggtgttattgttattgtgatatagtaatttggaacaattaggagaacagtctgttattactccacaatatatatagcattcaattcaattgaattcgttacttactctctctctccttctccttctcactcttacatccacatgatcaaccgtttttattggccttccctttcccattttgccgccttcttcttacaaaactacacttttgccattcgcgcgcgtgcctatttttatttgacttattattattagaataattatcttttt

SEQ ID NO: 250096 - DNA, 1001 bp, Cannabis indica
aaaaaaaaaaacaatcaaaatttaagtttaaacaaaataaaatataccatataatttcattagctgtaaaaaaaatatttaatccaattccctgtggttcgacctcacttgcgtgagttttactacttaattacgtatacttgcgtactgttcataaatttcgtaacaaattaccaccttcgtaattactctacctagtaattacacagttactttcaaaatattatttatatttcagtagagttgacactgttttaactaaaaattaaaattacttatgttatttttataaataattatgtattcataatatttatagttaaatttgtttagtacccattaataggtaatacccattgagaagtatttcatatatatatatgaaaactcccatttttcatatatcatcttatgcttctctatctttattgtcaaaaaaaagcttcaaaaaataggtcataaattagttgttaacaaggctaaagggaaacgcctagtcatcgacgatgatgactccgatttcgctctccccgtggctaaaggtggtcgttgtccagtgaagaagaagtcaaaggtgtctttgcctaaaaaaaatttcaacttcgacgaccagaagagaaagaaaaagtgaaattcaaggtaactgtgatgaaacagtaatgcaacaattatatctgttgcaagccaactaacatgaaactacaaaataactaataatttcttatatttaatacaaaaaatattacaacaatcgtattttatctgttcagatcgcgtatttgacaattccgagctctgtttttataatactataatattgtagtatcaaaactattattcaactaatgtgcaaactaaaaatattaaatgtgaatatgtatctataagaaactatttgtcagtactttttttttgtcactaatcgataattacttgtaacttaatagtaatatgtggagaaataaccgttagcaaaatgtttatgcaactgttatgaaaca

SEQ ID NO: 250097 - DNA, 645 bp, Cannabis indica
ccaaatcagccctaacatccttagtttgtgccacattatgctgaaaattcctgaaaaacacagcgtacattaggagattttttattgaaataaaatacaaatatagcacaaaacttatggaaaagaacacaagtgtgactgtagagaaacacttaaatatatatcctaaacaacccactgtaagagaaaaaaaaatcccaagtttaacgttcagttctaccagttattctcttaaagtatccatgttcagttcattgcaaaatcaaatctaaactagaagttatgttttacttgggaagtatcgatggaaaaattacacacaaacaagtagcaaaaataatagactaaataattaggttaaatttttggttggagcaggtaatttgttatttattggcacattctcttttacatacacactaaataattatagctatattcatgcatatatacacatcaatttccctttttcatattacctacttattattctaaaagaaagttctaacttttaacagtagtttaggacatatatatggtttttaaaagtatagtgtctgagactgagagtgaactcaatccattaattcaactcagttactaatgtaaattaatagaaaatcttattccactatctctattaac

SEQ ID NO: 250098 - DNA, 3645 bp, Cannabis indica
aaatcttataaatgatgtggaaagtttcttttaagttgtgaagagaaaagattgttgcgtttcaatattaaaaaagacaagtacatgaactaattgagtatttttctgctgctactattttgagaatctgttatgtaaacatggactttaatttttttattttgtttcctttttctgcaataaataaatgcaatatagtaaaaacagatgtgtgacaagtattttatttaatgaggcagatggtcagtcagagaatattgtgcaagacattgagaatatggttcgtgcctacattgaaaaggtaatataatattgcagaagcatcatttactttcattttaccatctttcctatttggctgattcagttcttgataaaactatattcaaactatgacttcattaataattttggttcttactagtcttccatgtttctagtttctctatgtattttttgatggatgttgcagataaattatcttactcttttgcattattttgttcaccacccttgcagcctaattgcattattttagcagtctcacctgccaatcaagatcttgcaacatcagatgcaattaagatatctcgtgaagtagatcctacaggtaacattatatgaatttttaagcatcaaaagctggtgcacttagagcatattttgtgctatatttatatatttttattaatgatttttaacttgtttatttttttcccatgtccttaggggagaggacattaggtgtcttgacaaagattgatcttatggacaagggtactgacgcagttgaggtaaggtaactttattatagaagatagatagaaattgacatttcctttacagcttaagatatttcgttaactttttgtgtccaatttttttctcttcttttgtttatccatttctcaataatctgtggctgttattttgttgcaaagattttagtcttattgtatatattttctgaaccatttatgatcatgcattggatttgaagtaatattacagattacagttaatattgcattttttctcaaactgtctttaacgcatggattcaccttggacttctgttttcatatttaagaacctgaaattactgtaaaaattgctattgtctatggtttctagatgtcagatatgattgaaattgtatgtgatatgtgtagctactagctactcagtgacatgctgatttgttatttttaaaagcattttcgttatgtcttctgagtcatttcccttttgctctgcttagattttggaggggaagtcttataggcttaagtttccgtgggttggagttgtcaatcgttcacaacaagatattaataagaatgttgacatgattgctgctcgacgtcgggagcgtgagtactttgctactacaccagaatataagcaccttgctcacagaatgggatctgagcatctagcaaagatgctttctaaggtaagcacagggtcatcatctactattcatttctttgggattaaaaatgactaaggtgatcgtatatatgctatatttactgtttgaatggtgttaatatttcagcatttggaaacagttatcaagtccaaaattcctggcatccagtcccttatagctaagacagtttctgatcttgaaaccgaactgtctcgtcttggaaagcctattgctgctgatgccggagttagttttgttcattgtcttttatttttggatcttacacaacattatacaagaagtagtaactctaactgcttgcgtttttacctgcagggaaagctatactcaatcatggaaatttgtagaatttttgatcagatatacaaggagcatcttgatggagtgtatgtgtcacacttaatggtcctaaattgggccttttgcttcgatgtagtttacattaattacaagttttttgttcttctactgacaaaattgcattggttttatacctgtaatgtttgctcacaggcgtcccggtggtgataagatctacaacgtatttgacaaccagcttcctgctgccctaaaaagactgcaatttgataagcagctcgcgatggaaaatataaggaagctcataactgaggcagatggttatcagcctcatttgatagctccagagcaaggataccgtcgactcattgaatctactttaattaccatcagaggtcctgcagaggcagctgttgatgcggtatgtatttttaagtcattaagattaaataaactcttttgacctttcctgtaacttctttctgtcgtatattaatttatagctttagctttgtgaaaaaacggagttgattacttgtagtatgatagattcgagaatgtaggcttttaagtgcccagaaactttctttatgtgaaccccaaggggtgctggaaagtgccagtagatgttccaagtttgaatcctcaaactggaaaatggccattgggaggtctctcggtcaaagtgccaagccaaaagaaaaaattatgtgccagacttttcaatatgtcttgtgaaattactaagaaatgaataatgaagaattttttgtcattttctactccaggtccattccctattgaaagacctcattcacaaggctatcaatgagactctggtatgtgtggccttgactaaatttattgctttcattcatatatatatatattgatatagatacatactgtgtgtagttcttggcttttcagataacaaaactgacattatcgtgtcgtttgaaattgtgcaacctgcctaataaatgtttgtttttgactttggaatttacaggagttaaggcaatatcctggtcttagagtagaggtgacaaatgcagcgattgagtctctcgagagaatgagggacgagagcaagaaagccacgcttcagcttgttgatatggaaagtagttacttgaccgttgacttcttccgtaaacttcctcaagacgttgaaaagggtggcaacccatcacattccatcttcgacagatacaacgattcatatctaaggcgaattggtaaatttttcaactcaaattccgctaaaataaaatatctcttgtcctctcttactgatcataacttacccttcacataaacaggaacaactgttttggcatacgtcaatatggtctgctcaagtcttcgtaactccattccgaaatccattgtctattgtcaagtccgagaagcaaagcgaagcttactcgaccatttcttcgctgacttgggaaaattggaggtaagctttagaataactcactttctttcttgttctgaatcaggtgagggtctaacttgaatgtgtttttacagcaaaagcgattgtcgtcattgttgaacgaggatccagctgtgatggagcgacgagcggccctcgccaagagactggagttatacaggagtgcgcaagctgaaattgattcagttgcttggtccaaatagaaagatgatgatgatgatgaagaggctttgatttataatatcattcattccccaggttatatatatgtgtacatatatgtacatatatatatttctagggagaaaggagtatttggggtatttgtcctggtaaattttttgtgtactaatgtaaaaattggtaagaggaggagggttgggtgaaatgggggttgtgtcatcgt

SEQ ID NO: 250099 - DNA, 797 bp, Cannabis indica
aagtcctcaactaataaaaaaaatacacaaaataagtattgcctaaaattaaaagtctaaagttaactagtacaagtatcgtgtcaatttcgataaccattgatgttgcagtggtagcaacatcgtctccacatcgtatgtgtccatctttccaaactgtaaaattaaagtgtaaattagttatatgtatcacttatttataagctatagtatcctatttacgggtatacataaatgaactaattatagcttaattaccttttctcttataagaacgaatgaatttagagctttcacaatgtcattaatgtacctaagtacataaaaaccacattcaattcccaatgtttgttttggacacgctgcaacggttactcctggaaatgttccaagtaactcgttggaacctccgagcagttcatatgccctaattaaattcaatgatttatattgatttaattagcaatagttggtataaatttaaaagaaaattaataaaattataactttaaaatgaaaattgaaaagtaccttttggagtgggaggtcaatagtcatcttagggcgtttatgtctaaacaaagggtccaagtgaataattttcccagcacaaacgatctcaagcatctaatgatttgtactaagaaattaataagaagaattaaattatacttaaatagtccttaaatagtacctgtacacacttgtagttccacggtatgaagaacatctgagatttgttattcattgtattcaaccattcaaccaatttgataacaacttcttggtcgacaatt

SEQ ID NO: 250100 - DNA, 662 bp, Cannabis indica
ttatttcttagtgggaaatatttttgagaaaataaaatactgaggttgagaggggttatggtttttgaccattttacccctagtcttaaaaatacttaagtcttaagtaatgggcatttcggtaattacctttggtttggggttaggtggctgccttgtttgagtgacacctagcattcgtaatttcagtaagggttagttaggaaaatcctttcccttttgaagaaaaatcaaaatttaggaaaaaaacctttttttttccccttgaagctctctctttctctctttcggctggggcaaaaactagaggagatcacctcttttcagctcatttttctagaatttcagtaaggattcaaagttttctgaacccaaggtaagccctagtagcacccttctttaattctcaagtttcttgttggtttggttatgtgattttgtgaaatgggggctgttagggttaggtttgtttatggtttgatttttagggttcatttgaggttgtttcaagttcttgcaactgattttaatgtgttgtactggatttatgcaagtttgagctttgagttcaaagctttgatctctaatgacataaattgattttgtatgtcttttgatgaaatattggttggattatgttgtatataccctaattaggtact

SEQ ID NO: 250101 - DNA, 623 bp, Cannabis indica
tttttttaaaaaaattaaggtggatcaattccaaaaatactaaggcataaatataaacagaactagttccataacaaaataaataaaataaataataacacacaataactcaaaatataatataacgaagacagttatatttatcaactagttaaaaatttgagatagaaactagtttcgtaaagaaattaagataaaaacttacacaaaaaaactagttaaaataaaataaataaatcaaaaaccggttacttgaattaactaaataaaatatcagttcctaaaataactaaattacaaactagttccttgaattaattaaattgaaaaccaatttttaaaataaataattcaatttttttttctttctaaaatgacttatataaaaaaccaactgtgatataaatttaaataaaactggtttcacaataaaataactaacaacaaataacacacaataacataaaaatcggttataattaaaaaataataaaataagagtgaatcaattccaaaaaacactgatatataaactaaaacagaatcagttctacaacaaattgattaaaaataaataacatataataactcaaaatcagtagttctaattaaagtaatcagtt

SEQ ID NO: 250102 - DNA, 1336 bp, Cannabis indica
tctaattcaaggtcctacgtctttgtccaagtttaggtttaggttcgagtttgaatctcgagtatcgatccgatcctaggttcggatctgggttctaatctaagtctaggtctgggtttgggttaaggtcccgggtttgagtccaggtctgagtccgattcttgggttctgatccaggtctgggttcaggggctcaagtacacgtcccccatccaactccaggtcctaggtcccggtccaggtctaggttcgggttcggttcaggttcgagtctgggtcctagtcccagtcctggtccagttcttgttccggttcaaattttgggtctctggtctgggttcgagttcgggtcctagtttgagtcctagatctagacaccaactatgagtctagtctaagcgttgattcctggatcttggatcaagatccaaatcctggtcacgggtcccagtcttattcaagttcaagtcttgggtcctagtgttggtctgaggtccgggtctgggtctaggactgagactgaggtcaaactttggtcctagtcccggttttggttccatgtttgggtctgatttttgctccgtgtttgagtcttgtgtcccggtccatgtttggatccaagtctgggtcccattctggatatgggtgagggttcgagactgggttcggttctgattatgttctaagactaggtccaggtcccagtctcggtcttgttcttgaaacctaattcacttctagttccaattccaatttgtgtcacggggtaagggtttggtttcgggttcgggttcgggtctaggtcttactccgagtctgagtgcaggtgcaggtctgggtttgggtctgtgtcctggtctcactctaactctggctctgggtcaggtccgtgccctgggtccagatccgaatccagtctcgggtcctagactagttctagttcgggttgcggatcccaagttgggtcctaggttcaggttcagctcttggttgcggtcaggtctggggtctcggtcctaattccttatttaggtcacgaacttggttgcgggtccgggtcccagttcttgtctgggtttgggtctctgtctgagtcccagtttgggtttgggtcccagttcaagttcgggtttaggtcctgattcgggttctagtctgggtttgggtgctagtccttgtcatagtccggttgcagttccagttaagatccttgttcgattaaggtccaaattcgggtcgaggtttgaattctggtttgagttcgggtccaaatttgagtctgggtctgggttcgggttcgaatcccagtcggggtctgggtttgggtctcgagtct

SEQ ID NO: 250103 - DNA, 626 bp, Cannabis indica
agaagataacttgggccaagcccaagtttggcaagaccttataagaaagtatctttccacctcgttcaggtgagcttccgccaaggaccacccgtacccagaagcaatttcagtaccgcgctttcggaaggccagacaacgtattcttggaagcctagaataatttccttttttatcaaatccacaaagtaaggagctaactttccataaatctcggccaaaagattatatcaaattaaaatgggaaactacttaaaataaagatcaactaattaatttacattaattacccacaattatagaacacagtaatgacgatttgatcgtgttcaattttcctagtcaacacacctaatatctcatgggttgggcctcacgaatacatccctaacttgtgtattttttttttatgtacccattagaaggaagagagaaactaaatataattccatgtaaacactaagggtgtgtttggaagtaactgtgtaattactagggtcgtaattacacagtttagtaattacactatattttaaaatgcaaggtgtgtttgggtatgaggtggtaattacatatgaattcataatatcttgtttggcaaaatagttagtaattacataggaaaa

SEQ ID NO: 250104 - DNA, 564 bp, Cannabis indica
taactgatattgtagtactctttgtgctgttgtcatatggctggttttaggagtaacaagaaactggcttagttagttttctgcataggacaaatctggtcaagtgatagttagatattggagtttgctaatgattttcttatacagttttggatttgctagtcctggctcaacttcagattagtctccataagtgtagtaacaggtttggatccaagatatccaatgtcttcaagcaattgaagagcataatgcctttgcgacacaaatattccttgacagatcttgctatttccagtctaagaatatacttttaagtcacaaagatcctttaacttgaacctattattcaacctgtttttcaaatttttaactgatgtaaatcatttgatgctagaataacataaataagtagaaagatgaagttgttaaccaaaaaacttcataaagagagagtggtcagtagcagaatggtgaaaacctttttaattaaagcattggaaaaattttcaaactattgcttaaaggcttagttcaagccatataaagacttgttcaacttgc

SEQ ID NO: 250105 - DNA, 520 bp, Cannabis indica
tgttatggccttgtaggcatatacaacataagtctcatacgtggttccctaagaaactctatatgaaatttaatagtgagtctattatagtcgaatgttcaacttaagactcaaaatttgtctaagttattacacttgggactgtactttgctgatacccaaccttgtacaatgacacttttggcgagtacccttgggtacggttgcccaaagtttagtctatggcttggaacctgcaaggaactctgccttttggcttggaacttgccaggaactttgccttgccttagagatttagcccggtttgtgcttcctataggaactctattcggttcttctctggctatacgattcttgcggggccttggacttatgtatttgaaataattttttattcatattcagccttgaggctttcatggtcttgcttttggcctatagacactctgtcttcgaacactactattatttagccttaaagccttttactatggaatatgaccatcctggctatcttctt

SEQ ID NO: 250106 - DNA, 2550 bp, Cannabis indica
aaaaaaattaaaataaaatcatatgaaaataattgcatcaccgttaaccttaagaacaactatattctatttcatccaccactcagaagacacgacagtagaaattattgcagttgattctacctcgtagctgagcactcaactattgtgtaaggtgtgtaactgcactactaacagctccttcagtcgcaaaaaacttattattctcaaccactaacaattatttaataatggcgagtcattgaaaaacaaaaaagaactaacaacgaacaaattaaaataaaggaaaactatgtcgcatagataagactaaaacattcaaaactatatcacacacacaagagtaaaacactcaaaagcatgtcacaaagacaagaataaaacactcaaaaatatgtcacaaagacaagactaatcgtagtagcaaaactcgaatcacagtagcaaaacacaacctcgaccaagccatacctaagcccagggaaggtcgacaggcctgaccaaagaaaaaattacaaacttcgatagctattgatttagaaacgagaaaccttaaattttatattgattaagcacaaaatacagttttaggtatacatataatatttttttgggtaatagtctatagcacacccctaaaagaaagtttaggtacatcttctatttatttcgataaagagtagaactttttaatttaattattttttttgattatttattttgtagttatttaaaattacttataaatttagtagtttatattgctaaacataaagtataatagacgttataagaaaacatatatataccacacttataataaaaatatttaaattctatttttgacggtataaattattcagaatttcttaaaaatttatatattattttgaataactataagataggcgtttttttttggtactactacaaatattttctatactctttttttaagggtattatagacttttccccatacttttataaatacaaatggtaaatggtgtaattttcactaaataaatatcatagtacaacacaagttgtaataaaaaagttgttgattaggacccaacactaatatgaactcttcctttcacttaccacacgtgtatcttgtgacaactagtgtccttttttgaaaaataaactaaaattattttaataaatttataaaacaaaaccttcataaccaacttgaataaaaatcttcatcaatcctcaaattatttgaggatagaaattttttattcaaataattaaaaactatttgagtagtgatatttgcacaattgtgaaccacacttgaatatgtaatatttagattttttttttttgagaaaaatggaaattttgattaatagacaaattggatatataataatctatttcatgatgatatatcattcaaaataacaaaatcaaggagataggcaaatcatgccatttacaaaaataagaatggaaaccctaatagcgtgcgtttaactaaaatactattaagccgttagcgttgaagtattaaaaaagcgtaaagaattgtagatcttcaaccaaaatgaatatgtgacaaatcaaatttgttaatgactatcagtcaaatatcttttaatgaaaattgagtaataacaaccctattattcaatatagaacaaaaggaaataacaaaatgaccaccccataacgataacaatcataacaaataatcacaccataaattatggggccaataaaaatttgagaatctctaaacatggacaaggataatcatgctaacacaaacatgctttgagccaattgagattctctcaatgtctcaaaaagaaacaagactaaaatctcccgccatgaatgaataaagtcctactaccataacaatagcaaggtggtgtagcaacactattattgaaaataaaaattaacataaaaaaacaaaaacatagcaaaacaccagtgaagatccaatccatagccaataaataactcaaatctccgagacacatttctaaaagaagacgaagaagaaaagaacactcaggtaaaagaataaccccagcaaaatcgaaaatagtgtgggaatcaacaagacctgaccaaagccacattgtaaggccaaaaaatggccgacgagccctagttaggcaaaaaaatcaagggcggctaagaatttctacaaagaaccctaaagagtagagagaaactattccttggattgtcatttactgtaatatttaaattttgctgctaattggattggatcatgttaattaattttaactatataatgttttttaacactacactcatagtatttaattgaaattaaacaaacttatccatagatcacaattttttttttttttatatcctacactatatattttttatatataagtcaacttaactcgagttaaggaaatgaaaaaaaaatggtatagaaagtattcaaatgacccaaaatacttctaactaacaagcatagaagtaagggtaaataccattttggaccctgtgttttacaaaagttacagattggaccctgtgttt

SEQ ID NO: 250107 - DNA, 1358 bp, Cannabis indica
aaagaaaaaaaaaagaaaaatattggttgagactcaaaaattctccaatgtccaaggcaaagaacaatacaatattttttagttgatatgatctgagaggagatagatgtacaaaaacttccttttgcattatatgttggtttcgtcattggtttcgtcgttggtttgagaggagatagatgtacaatttctaagtctcaacttctatttttcttttaaaagcaaatattaaaatccttagttttgatatatttttgggtcctaatttgagaacttttagagagggagaagaaaaaataaaaaaataacgagaagaataattttttaacaactaattatgtaaaaaaaataatattaaaaaatataaataaaataaaataataacaaatattaaaaaattaactacataaaattatttttaatgcctcttgtaaaacattaccatattataaaaatatattatatcataatatatatatataaatatattaatatatttatatataggtgaagggtgtgtttacactttacatatatttaaataacagcagtggcagacaaaggtgggttcatgaaaatcacaactgacccactttgttagacacaatataatatgatcaaatataatttagaaatttttcctttaaattccatcagttctcttattttcttcatcaggtctcccaaattaagaaagtgctccaaactttttttctttaataaataatgaaattttattgatgatagtcaattaaaataaaagcttggaatttaattgggatatcttcccgttaaagacacatcaagattaaaattagaaaaacaaaataaataatcaactacttaatttcaaaatcatttgacacacaaactaaaataaaatctaatgaaagaaattacaacatcacaattataacattaaaaacatttatattctattttattcagccctcagaagatacaatagtagaaattgttgtagcaagttcattcaactatgtatcttaaacactcaattatcgtgtaaggtacgtaactgcactactaacaacatttttagtcgcaaaaaacttgttattctcaactactaacaatgatttgatggtgagccatcgaataacaaataattagaactaacagtgaaataaaacaaaacaaaatcatgacatacagacaagattaaaacacttaaaattatgtcatgtagacaaaatgcaaatgctcaaaactactatgtcaaaaaaataagactaaaacaactatgtcacagagatcatatagtagtaaaataaaactacgaccaagccacacctaaatccaaaaaaaaaatcagcagactataaatttaaaacaaaaaa

SEQ ID NO: 250108 - DNA, 1437 bp, Cannabis indica
gtgtaaataaaataatatcaaaggtaaaaatataagagtagccttgtcaatgtatagagataatattgttaagttttatttattgtctttaaatatgtcttttaaaattctatcattattttgaattatccttgaaactaaacgttttatttgatgcatataaagtttgtgattgtttcaagatatataaaaccttcactaattactacaccatctaatagctttgattattattattaatttagtactatttgatgtattacttcaatatgttccaagaaattctataatagttaacatatcataaacttatcgtaatatattttctaagcaaatatcacttagttaatcttagatcaatgatctcaatcatgagatggttaagctctggtttaagtgtattacttgtattctttgacttatttgttaaagctaactaattggattggcccaatacttacatcttgagaacacggtagtacaattgagtgagaacactaatcatagatacagaatctataaattctataaatatatatatatataaaagtgaaatgataatttccttcgagcttagctaaacgattttaaatggtggagtactcatttcagtaattatattagtttactgaaatattaagtacaagtagctaagtattttaaggataaaatatattaaagggtaaaacggtaaattttttcctactcaatggagatcatcaatagaggatcattaattatttagattaaaataatagataacttatagcgtatctataattggtataaaacgttctatataatcaggagtgcaattttgaatctatagtggagttaggaagaattaaagatagtaaatttactcagtaaattctaaaactacttattgggagcttgattatatagacccatagtcctcacactagttgtgataatattatcttgtagactcagttaattaattttaattaatcgattagacttctaaatgagactacatcttatttatgagttttcactaagcaagagcttatttgaaaagaaaagagattttagggtttgtttattaattaacagactttgaaaggtctaattaataaataagttaaatggtaattttatttaataatcaattataattattaaataaatataattgatatttatagagttagaattaaaagatgccatttgtgaaaaagattagtttcaataaaatgacaaaattgaaagccaataggcccactaaggaatttggccatagggttttaaataaagccaatttatctttcttttttttttattttttttatttcatttaaattctaagcctaaccctaatagctatcactaaatagaaacttatagctcttgttttcataaccttttgccagacaaattagaaaataaaaagagctcttctattttcgaattcct

SEQ ID NO: 250109 - DNA, 883 bp, Cannabis indica
actaatagaacttattcttgatcttgtagtgttctaattaacatgttactatcgtaatagtaacttgataccagtaaaagtccttggacatagaatcacagtacctcatcttagtaggaggattttaaaatttcagcccattattatttggatgacactagtgatagcctactatgatatgttcaaaaaaaaaaactttagaataaaactaagaaagtaaatctagccatccatgtggatagtaatgacttatctttattataaggataagataggaaattatgctcagatcttgataatactctgcgacagaaaggaataaggattagatatctgagtggaaggagacatttaattccgctgcaatcaatgtaaggtttcttgaactttatatgtgtttaaattccgttattttagaaattcatatttaggatgttaaacaacatacatgatagtaaatctagatcctagtaaaataatccccaacacatcgaagatccagagtgatgtgcgacttctcagtccactgtgaggagtggaacgagagagaggttgttcagtcgagggtgccaaaatgtgtgtggataaaaaaaaaaactgataggcctcatattctttattttgaaaagactatttctataatatttttttggttactgttataggtgggtattatagaaagtccattttcttgtgtcttagaacttggtagcatcgtcgggagaggtgtcggtgctagaactggaaccgaagtcggtgggaggtcaaggtaattgggagagagtttgactggagcaacgtcccaaatgtgttggaggtcaaagcagctatggtattcacttgtttgtgcaagaacataataggaatgagagagagagagaga

SEQ ID NO: 250110 - DNA, 759 bp, Cannabis indica
ttgtctaaaaatttatatttttaataatatttttcaatttttttatattctataaaaataggctgatcccgggaacatctaagtgttgtggatacttttgtaaagttccactgcaaagacaacaaatggtgcgatgaacacacacaataactacatgtaaataattttatatttttagtaaactcattctatattttaatttctattcaattctaacagtttgttgaaattttttgtagaccaaaatggttgagattcgtgaaactcaactagcgccaaccaatgtcctgcgacggtataatgtcgaccccaccaaatttctcgtagacatgcatgttatgacacaggcgctgggtgagtgatcacgccatttgagaggaataggccagttgtcgagacttaggacatgagcaaaaagagcaactctcggggtaagttcctccgggcagctcactatcacctaagaggaatataaggccatgaagcgaagggtggaagattaggaagcacagaacgagtggcaacaacaaatgatgcagactcataatcaaatcatgagcgtgtttcaacaacaaatgatgcaattggccagtgttgttccaggatttaacatgcccatgatgcctctgattccaccgattctaccatttcagtctcttggcgctgggtcctcttcacagactgctcatctcggtgatgacgacgaagatgatgttgttgtggatctgtagttttttttagtttgcagtgtaaataata

SEQ ID NO: 250111 - DNA, 663 bp, Cannabis indica
gtattattattgatattatatatcgatttttaaaaactggataataaagaaattaaacttaaagaagaataaattaaagacaatgcaacaataatttttacgtggttagaacattcacgagccttagtctacgagctaatattattaagcttgaaaaactatggtgtactcttatacaagaatattcttgccaaagtcttggaaccctaatttttagcccttaatttgtgaaatgagtttctaaccctttacttgaaggggtgatgttctatttataggctagaatcatgtttatagtgtaaaccgagacccgttaggattttcatgtattaactaagcccagtgatggggtaatacaatattatattgactttgggccaattcggtgaggtccaatttatgagaaataatccttcgtataggtgactacttgatagtgaaaaatgtcgtgcatcgtcgatcctacaaagtaaatgtcacagaagaaggcattggaaaaaaggcatgtcccttttggtggtgagcacactccccgaatctaacataggggactaacacccaattttacgagatcaggtgtcagaaaggggccacataggataacatctgaatgtctctagatgcctttttagtttccctttctagattaccccatgagggtat

SEQ ID NO: 250112 - DNA, 876 bp, Cannabis indica
acatatatcactatggtaataaccctagactattaaccgctcatgttaggctaataaccctaatcccggttattattactcacatatatcgttttcaatataagcgccaccgcgcataactctacgtgctaactactatcttacctgttgtcccgcaatagaagaaattccaaatccctgggtgctcttgatcagttgtcggtaatcctagtcacacaatccaggaaaatgtcatagaaagaggggaaactctaaccaatttctttagaatttgttaatgaacatattttttattatttaattaataagcatgcctagaaatttatttaaaacttttaaatttcttccagcttattttttaggaaatcactttttatttttcggaatagataaatagtgcatgaatgatagaagagaaacaccacaattttaagaagaatacaacaatctattagagttttgcctaaagaaccatagtgatccttaaaacaatttggtgtcctgtagtgatcattctatagaattgcttgatgattttcaagaagagtttattgacgatcctaagcataggacaaaaattatgaatcaaaatggtcaatattattttataacatggaacgtatagggtaattacacatttatttaacattcactataatattttactttcatattaattaacatggttattttttagccgccattggatgttggtcataggtataatattgagaataatcattttcttaaacccgcttaagaagccacccccatttatcaatattgaaagggtatgtttagagctttaagttactatgtacaaacttacattcgtaatatgtttcaatatttaaattctattgaagtcataaaaga

SEQ ID NO: 250113 - DNA, 1697 bp, Cannabis indica
gttatgggggtggaggatggaggggatcctgtaatcaccgagggtgataatgacactcgatatctggaggagatattacacgttgttgactacaccgtgtcgttgacagcagtggagaaatctttattagaatgcattgaggcagacaacctatttctaattaaattttctttggtggtgatagggacagtcctagcgccaaaaacgggctgcgatatcacttcggggtacctacactccctcacgattaccaaggacattcgccacaagaactgggcaactgcgaggttcaggtatctgatgaactcaatttttagattccgaaataagcatacaaagaatgtgtctggcttcaccgtattcctgtaggtacattgattttgttatctttcatttatgtgaatgtgtttattaacttgataatataatattttgatttattagttgaatttattattaatacattgtttgtttgtcacagttgctgtacttgactcacgttgagtgaaactttggatatgttgaccgaacagtgctcctcgttgatttttggggtggtaaacaatgtaagtccgcttacaaatttgttaaagacaatgggggtcccaacagcgacaaggtacatcgaattttggttatattgtggtaatgttattttatttcatattaattattttgagattgaaaaattaattttgtttaacatgttctgtttaacagataacgcttacttcaaatcctgtaatactgcccaactactactccggcccagaaggaagaaagagcattgaccacttttcaagtgctatcaatgagttgaaggagtactttttcaaggatttaaagtctcagttcaaatcattttctttgaaatttatggacaaaggagaaggtgtaggtggtattgaccgagatttggaggaggatgctgtaggggaagtggggaagaaggcagagtgcagccaggccgtggaggagtccccgtcgaagacacctgtccgttcgaagactaatgttgttgggcaatccgaggaaaatgtggtggaatcattatcaacgtctttgctatctctacaaaataggttgaagatgaaggttatccagagaagacaattgaggatgacgactttgatatactcgaagtggcgtctttctggaataaagggaaatccctcgtcaaatcgaagaagacacagtctgagaatgtgcctgtaattgaggatgactttaacgataaggcctatgacgaatttattgactcgggcagaactgttgttgggtcgttcaagacgaaggaagcgatcccccgtaacctgtatgggttttacaagtttgtttttagcaacacattagatccggggtaagtaaatgttattttggtatttgtgattatcatatacttataaaattttttaataacagttacattgattataattgaatcagatatgtgcttgcaaaattttgaaagtttgaagtggataggaggtgcatggcatcgttgcgacccttgcgagaagttcagggatccgtaagtgtgaaactggttactaaatatgtatcatttattgtacatgtctaaatcatatttcatgttgttgcagatcattgactgtttttctgtactaatgaacaagtacgaacgtgatagccgactacctgaccaacctcgtgtttggtacatgcccactcgcatc

SEQ ID NO: 250114 - DNA, 664 bp, Cannabis indica
cttggcaatgggaggagaattcccgtatgtctttttctctcttacaattattttttgctaaagataaatggtgtcaaataccacaaaactgtgtagtttgacattaggggttgttatatgtaaattcatggtttattttgatggtttttaggggcttgcggttaataccttttctcccaagaaacatatgtatccattaacggatggagctcattcagtcaatactagtgcagacttttttggaaatggcaggtaaagcattaggatgtaaatttattgcattttcacaaaagtgacggtgttgcaattcaatcatattgcttttaaatttctatacagtgcttgtgattatgggacattaagtcgggacaaggtgaagggaaagatagtgtattgccaagggaacaacggccaggatttcacaataggggaattaggtggcgttggaacaatcatgactcttgattcatttgtagacacagccttcaccccttatattcctgggacctatgctctgcctaaggatggtaacaagattagtcaatacataaactccaccaagtatgattttgcttcacactattattacatcatgaatattaattatttttgaaattgagactaactaatcaaccctttttttctttttgggaattaaagaaag

SEQ ID NO: 250115 - DNA, 1093 bp, Cannabis indica
tgaaaagcctaatcgtctcttctccctctcttctacatgtgtaagggctccccccctctctctctatcacacgtctccaaggttcgagatttgcctactgattcatacattgtaatattaagagagctacttcagatcccatcattatagtgatctgagtagtattatctttcggtatcaatacaaccaaaaggggatcaggttattacccgctaataaacctctataaaatcttgtgtctaaattactttattgttcttattgtgtaacatgtagaaaacatcaacattaaatacaactccactttcggttggccaaattttgaggttaaaagtttggtgctttcattgagagagagttgtcaatttatctgatcaaacgccatgattaacacaaggagaactctggttacaactttttcctcattgggtcttcctcaaaaccctgtgactacagatcttgatgttcgtgttccagtcacaactgtaatctccacgaatccgatggatgtggccaaccctaccatctcaacagacactacaaacctggccaacacaattggccaagttgacaccaccaatctggatggtctcaatggccaacctctgccacccaaggaggaccctccgctggcgcctgacactgaaggaatctggtccttgatattatgctagagagatgaggccaagaattggcgagccccatgtagactttggagaaattcttgagttagccagacttagagaggccgctgtcaagtcggtcaaattgaaaaaaccaagcatttttggctgcaatgtacttgtacaattgagacgcaaatttttgagatggatggatgaccaagagtacatcctctgatctcaccaggcagaattagactactgcaacagagaagctagcaacctgataaggcagttcaatgaaagaactgtcagatcgaggaactataaccttctcacactagaaggaggataagccttgccacgaagatctagtggcaagaacatcaagactttggcaaccattggtctgtggcccggctagggacctctagcacaataacaccctcaattgtccaacccatggtcga

SEQ ID NO: 250116 - DNA, 876 bp, Cannabis indica
atgacatgcaacccaaactggaaggaaatcaataatgaattatgtcaacaggaagagagccacaatagacctgatctggttgcgcgagtatttcatgcaaaactagaggaattaaaggacaagttattcaaaaaagagatatttggcaaggtctcagcatatgtctacgtatcgagcaccaaaatagaggtcttttgtatgcacattttttaattatattacaaagggattggaaagtccatgctcctgaatctttcgatgagatcgtataagcagagattctagataaaaactctaacatccatttgcataaggcggttgtaaaacacatgatgcatagaccttgtggagaattgaacaaaataaacgtgtgcatgaaaggggagaatccacgatgcaaaaagaattttccaaaatggtatgctcttgttacgtctgtcaaaaatgactgtttccctatttataggcgttcaaataatggtgtgactgtgaaggtcaggggggaaacattagacaatcgttgggttttccatacatcccatatctccttgccacatttgacttccacattaatgtagaaatatgctctacagtgaaggcggtaaagtatctctataaatacatttacaaaggccatgaccgtgttgcattcaacttgatctccaaatcaaacaatcaaccagttgatgaaatacatcagttccagatagctcgatggattgctgcccctgaagcaatatggagaatatacggttttattgtaaatgagatgtccccaacagtatatagcttgcatttacatctcaagaatcagcatccgattacattccgaggaaattctgacttgtcaaacattgctaatactaaatattataa

SEQ ID NO: 250117 - DNA, 1448 bp, Cannabis indica
tcttaaataatttaataaaaatttttcaaaatatttttagcaatagaccttgtaacatttaaatatcatctaatataaaatagggtgtgggttcaatgttacggtacaaggaccgattttcttagacagtctaaatatttcatactttttctcattaatttgcttcccttctttcattcttcttcttcttttttaatattattttcttcacataaaaagataaactattattataatgtatattttctctctcttattttttttctactaaattttaaaaaaaaaaattctaaccatattaatcattggttggacttaaaaagtgcactaaagctatatattttctaaaaataattattttaatatgtgtgaagtatagatttatttgttgaagtaattttttagtttcttttatgtttatttaagaaaataataatcaaacttcaatgtaaataaaatttaatataccaactagtttgataagttattataaagtaatgtgttaatttatatttaaaagtaactaaaatataaactttttttatagagtaattttgataagattctaaagaaaaaatatccatttgtttctcacaagtagtattattgggtcttattttttaagatgatcattttaatatgtgagaaacatatattttttaggggtttttttttatttttacacttcaaaacaattttctttgcatttttacgaaattctacatagaaatctctattgcaactagcgctgcaacccgaattgcaacaaaaaatcgtattgaaacacctattgcaactagcgctgcaaccactttaaaaatccaaaccgtaaatttaaaagaaaaaaaaaaagttaaaagaatagtatatggggtaattcccctattttttatcatcaatgaaaaaaataattgtaattaaaaagcaacattttaatttttttttttatattctattatcaaaaagtaattgaactataaattaaacaaagtttaattacaaacaaactttatgtgttattataaattattttacgattttatactttaaagttattcaagagtatactaaatatttaaataaacatttttagttataatttaaaagtaatttttatgtttcttttttttttttatcttggtcaatcaaaatacttataacaattcatatataaataatataagtatgtattgaaaaaaaaaatgttactttatagtatacaaaatagaatatggtaaattatcctattatatgacaactaataaatttttaaaataaatttcaagcttatcaaaatgtattttttttatttttctaataatgtgcaaaaaaaaatattattgtaaataataattgactcactatacaaaaaattaaacaaaaaataagggaaaaaaagaaagaaagaaagagatatacatatacgaatggttttttttttttttttt

SEQ ID NO: 250118 - DNA, 1073 bp, Cannabis indica
cttgaggaatttttttcatgggctgtcacttttgatttcttctttggaagagctcgcccacgtttcgacaatggagcaaaatcagagtcatcatcctcaacaacatgtcgtttacccttgtttctattagctatgaaggttattatttttttaaaaaaaaaaaactgaaaagaaatagaaaataaaaggaaaaagaagagaaaaaagagagaaatgatgtatagagtgattgatgtaatacatcaatcaatcacgtgtcaaaaaaggttgaattgtgtgtgcatgtggtaaaatagtaataaaatataaaagatgagtaaaaaagttggtttaaccgtgtataggtattaatgtaataaatttatcattttagatttttagtgtaaaaatttcaataaaatatatatatacaaagattatattatataaatacccaaataatgtatatatatacacatattattatatatatacccaaatgaataatacatatacagatctaacacaaaaaaaaaaaaaatccgatctaaatataaatatatacacagattataaatcaaaaatatacatacaacaataaaaattgtatatacaaatctaaaacctaaaattatataatatcaaatctaaagttaaaaaacaaaacttaccaaaaatagccggtggtggtggtcggtagtgcgtcaacggcgtcagggtggtggtgcgtcggggtggtggagcgtcggggtggtgttgcgtcggggtgggggtgcgtcggggtgttggtgggcagccaaggggggaagcagtcgggctgatggggggaaaaatgggaaatggggcttttgaattttgaaaagaaaaaaggaaaatgggggaaatggggtatttattaaaggtttagcggcggactatcaacgacgggggtccgccgctaatagtaaataaaaaaaaattaaaaaaaaacaataaatactattagcggcggacccccgccgctaatagtccgccgctaatagttttgaaatgtatgtcccgcccatttattagcggcggagcaattgcggcgggctccgccgctaatactaata

SEQ ID NO: 250119 - DNA, 610 bp, Cannabis indica
taatttcttaaccaccagataataaaagaaaaagagtatagtatatgatacatcattgagatcttaccagccgtgaacccgtgctttaaatgaattttgattaaagcccgtgcaagagttagcaatcgtcaatttgctaaaactaattagtagattttgaaagtttgtagtttaaacgaaacaaaaaagaagaatcaaatgaatagagaataatccctcacacaaatatttaccagcctgaataggtatgtaatgtatacttgaacaaaacttttgattttctccaagaagcgaagtctccaaaatcagaatatacaagaatgggtatatgggtcagttgttatcgatgagttattgtaacacaaaataggccaatttgagagcgagcttaagaatttgagacttcgttcccagaaggaaccacaatatcgtctcgcccatgtcgaaagttgttagaagaatctcaatcattgtagtagaattgttttggattgttcatttaagagagataggttgaaatttgagtcacaaactaagagaaagaatgtaagaaatacctgcatctcccagcctcacaccgtcatgatgtgatctacatggttgagatata

SEQ ID NO: 250120 - DNA, 864 bp, Cannabis indica
gcattttaatatgaataatgctacataaatttaaattttcacacattaattacacacaatatatattatggattaattacatataattaagcaaattttattttatttacttagataacgtttaccatttaattaacgcatatcttttaaattgtattcatatgaatagtggctcaagtggtagtccgcttttcatggggtggggagatcgtctcgctattttgtaactacttagggtaaatagtgacataattaagtacccaaagttttaggtttgtaagcggcataaacttagtaattttttttagtggcataagtaccatatgtttataaaaatgtaattttcttttagtttcatcagtacagattctgttattgtcttaaacaagacacatataagacccaaattttagattatttgatttggacgaaaaatatgtagtatcagtaacttccaaatccttatttaataaatttaaaacggagcttttactggtgaaaatagagaaaaattacagttttacaaacatttaatacttatgccactaaaaaaaaatcattggttttataccgcttacaaactcaaaactttgggtacttatgccgctatttacccttattattattattattattattattattattacttaactaaatgtagtcttcatgattttattttaaataatcgtaatctataattattttcctattttcgtcaaattttataaattaaatatttttgtccaaaataaaatataatgacttctttttaaaattcttttatttcaatagtataaaaataattgtattaatttctactcattttagtttactcataatgttaattttgatatcatatct

SEQ ID NO: 250121 - DNA, 663 bp, Cannabis indica
caaaaattagatttattttgttttcaactccttatcctatggtgagttaagacaaactacatacaattagtcgtgaataaatacttacttataaatatataaattaatgtgttgaatgaattatctttgtttttcagttattattagtaaaacattatagaaaatacgacgtgattatttatttattttttatatgagtgaacttactataattaattactattattatttttattaatgagataaattaggaagaataaaatctaataactataaaaagccatacatgaattcaaattttcaaaataaatttacggaaattctctattagaagaaagaaacattgagagatttataccttttgtaaactacattgacaataataaatatttgtaataatcaaactttatcattaaaggaaaattattttttatgtgcgacatcttttaacttcaaattaatcaatataatttataatctgtaataattaaataaaaaaaaaataatactgaaatgccaatctgtgagagcatttgatagcacaactaaattatccactctaatgccaactcttgaaactttgattggtttcctataatgattaacaatatctcgaaccttgatagcagaaaaaccaactacaccatgttggaaattatttta

SEQ ID NO: 250122 - DNA, 1074 bp, Cannabis indica
aatgagtaccaagataatagaagccctccccccccccccccggccgtcattcttcctcactggaacgaccttaaccgaatagagatactcgatttctattggtgtggggcattcccagtttataattttatacaagacgttcaaactagcgagaatcctataagaggcaggattcagctggaatggggcaaccccaaggtggtttatgtaatctttgaagtagtctcgaagagggagtatggcccctgtactgatatgctcgagactccaggtgcccatgccagtcgagccactagtactagcctcaccactggcccccggggtatcgcttgaaaagtgcgcagggggaaaaactcaactcaccctctcacactgacctaacttggcatgattgcccatgtttgattccacaggtcttcagtatatcacttgtgtagcctgagatagatcgcaccttcaattctattaactcagcttcaaaggtgactctggggtcctaggagtctttgatgtacgtggcttgggatgcattatttcaaattccaaagtcacctggttcaaaagcaatcgtgactttaggtaaaaacaacgacttttccaaaggaataaaggacacactaggaggttctggccaggccgcatgtcataagaatcggcgtttgccttcagagatatcttgcaagaaacgcctatatagcgactagcattatctttttggtgagttctcactacatgttccctaaccctagcatcgttcaactctaatttggaggtgggttgtgaaggggtgggtttatacaggatggctgattctgaaggaaactcaagttctaaatcttctggatgataaattcttgaaccagagtgggacattgctacaagcagaatgcggtcccaatccatggagagaattttatcaaacccgaaggtggtgagttggagattctgaaaaaacctatgtattgcctgaaccctaatatcgacctacaatacagtttaaccctaaaaagctatcaaaaccaaatgagatggcaatgatacaaacaaattaagcagcaattaaacacaatgtaa

SEQ ID NO: 250123 - DNA, 1014 bp, Cannabis indica
tttttttttttaaaaaaaggaatgaaagaaagaggaagaatgagataaaaattagcatgtcaattgtgtatttatataataattgcacataacattaacattaacgttatgttatgggcaactaccaaaaataacctttcctattttcaatattaattaacaactttttatattctcaaaaaaaaaaaaataggcctctattattttggggccctgtgcaactgcccatgttgcacaggctattagccgtggctgaccctaagacagaagacatatggtaagtttcgaactcgaagtagtaagtattatttgcagggccggtcctaaggtatatggggcctaaggcgaaatcaaattttggggcctctatatatagtttaattatcataaaataatagttctagtacttagtgaaatggtaaaatttttaaaaactcttaagaagtccaaggttcaatccctcataactacacattaaatatattttaaaaaaaaaataaaaagtaaaggttgggaattgatcccatgacctcttacttaaatgtaagaccttctaccaccacactaaacaatttttattatatttccttcttatttaattctttaactatatattaatatttttttttcacaatttcagagccctgagcgtttgggggcccgaggcgcacgcctagcccacctaccctcagggttggccctgattatctgtcttcccaaaagggtgacatgcggcccctcgaggggagcccattaactaaaattagagaacaaacacaacaactcatctctcaaatggacatgtatttggacaacatgttcgaatatgatccggatctttcaagttcctcaaaagatagttcaactctaaataaaggcaaatgacaaaagtatattgggaatagataccgtcaggggtcatctgagagtagaatcaaagggggttaatcagaacagtctaaccttctatatactatctcaagaaattcgacaacctttctcctctatcatacc

SEQ ID NO: 250124 - DNA, 827 bp, Cannabis indica
cccattcccttgcctattattgttgctggaacgtttaccgttcgagcttgaattgctcgggtaatgggggagctggacggatgtcccagttgaagaagctttcgacttgttaggtttttgctcaccttctcctcactgaatagtctcttcaagtttgataaaacctccagcccgttcgagaaaatcactcattgagtctaccggaccattgttccttatgtccttccaaagctcaccaaggacttcaatgccccccagaattgaggacaactttccatctttgtttactcatgaaaccttagtcgcctccgtcatgaatctgctgatgtaggctaggagaggctcgcctggtctttgctttacttcgacaaggtctcctaggtgcaacagaagttggcgagaggaggaaaattatgcatggaactccaaagagaaagctttccacgagttgaactttccaggtgcctgcttaaaatccattgttgggcggcttccgagaaggtggcaggaaaaattctgcaacatacgtctcctcttactccttgtagatccatttacatcttgaaatacttaaggtgggataatagatcttccttaccagtatacatgttccaggttggcattttatgttgggttttatgccctaaataaaactctatttcaatgtaatatttatctttgaaatatcaataaagaaacagaagtattttcatcacttaatgtgtcatttggttcatgttatcatttatatgtttatttgatttataaattcatccaaatccatatcacatttatattcttgtttattgtgtcgtcagcacagtgga

SEQ ID NO: 250125 - DNA, 638 bp, Cannabis indica
aattctgttattttttatataaatataatcttatatattattattattttcttctcaattaatattattaaatatttttttattaaaaaattaatactggcggataaatagcattggggtccgccggtattaatgtgtcagataaacagtttgacgagtttagtactagcggggtccgcccctaataatccgctggtaataatatttaatagcggcgggatgtcagtccgccactaaaaatggtaaatagcgaccctgtagtaccagcagagtattaccagcggatcccgccggtaataacttttaggggcggaaaacacagttattaccagcggacctctccgccggtaatgacttaatatgttgtagtgaatcacatcagtcaagaaggaaaaaggattacgtccattaaacccctacaaagcctagggattagaccatgcatttcctatgatgtatcctttgggaatgtgtgcctttactgagaattacaaaaagacatgtacctcaattctagggatcaccccacaaaaacactataaatacccccaaactcattaaggcaggggtcgagaattctgggtttcataagaactagagaggaaaaaccaccaagaacattgtctgtaataaatact

SEQ ID NO: 250126 - DNA, 830 bp, Cannabis indica
gctcatattccttttgtgtttcaatttctgaaagaatagaggctgcatataatgagtacaagacatacccattaagattagttataactattttaaggtaaagaacacattagtaatccataagaacttttataacattcaaaatgaagacagacagaacaatggcgcctaagctttatcagagagtaacttagaagcattttggtttgtgatcaaatcaaacttctgtctttcacctttatttttctaattacaaagatttagcattgtacaagaattaaaaacatcaaattgggccaaaaaaaaccaaaaagcagaaacaacatcacaccaattgaatcaaccaagcaacaaaaaagcttacttgaagcttttcttgtccaaagtttcagactttgcttctggggctccacattgaagctagattaggtctcaatttctttctgaaagattcagaggcagtatatggtgatgagtacaagacataataccattaaagcatgaattttgaattggaagaagaaactatacctgacttcaattatcagaatcagatagagaaggatgagaaggtttcagttcaggggttcttgaacggagcaggaagaaggtattgaagaggatgtgcttaattatgtctgaaaatagggtttaaaggttttttttttttttattttttttttaatatgaaaatagagtttacggttccaagggcaaatccaatagtggcagcaacatatgaaagttccaatagtggttattacgttagtcttacacactaaaggtccccagttgttgagaattatggggttctatctcaaaaccaattg

SEQ ID NO: 250127 - DNA, 685 bp, Cannabis indica
gctcatattccttttgtgtttcattttctgaaatattagaggctgcatataatgagtacaagacatacccattaagattggttataaatattttaaggtaaagaacacattagtaatccataagaacttttcgaacattcaaaatgaagactgagatagaacagtggcgcctaagctttatgagagagtaacttctagctagaagcattttggtttgtgatcaaatcaaacttctttctttcaactttatttttctaattacaaagatttagcattgtacaagaattaaaaacatcaaattgggcaaaaaaaaaaaccaaaaagcagaaacaacatcacaccaattgaatcaatcaagcaacaaaaaagcttactataagcttttcttgtccaaagtttcagactttgcttctggggctccacattgaagctagattaggtctcaatttctttctgaaagattcagaggctgtatatggtgatgagtacaagacataataccattaaagcatgaattttgagttggaagaagaaactatacctgacttcaattgtatggctctcagaatcagatgacagcgtgaagagaaggatgagaaggtttcagttcaggggttcttgaacggaggaggaagaagatgttgaagaggaagagagagaaggatatgtgcttatgtctgaaaat

SEQ ID NO: 250128 - DNA, 1022 bp, Cannabis indica
tttaaattttaagtatttatgaattcaagtttgtgttaaataagttatttcatttactttataaagtttttaaaaaatgagaattacaatttatcttttgaaacttaataacataaatggttagaaacatattgtaacaacccaacaactcaaatttcctattagcacacataaagctacatatttgtatgaggataaggaagtattcgaaatacatcatcccattttgaaatcttcaatatcccattttgaaatcaagcccaaatatttagcctataggaaaaaggatgtccccaccgaaataattagtgtaaaatcacgaaaccccctaataaatgccatatcacttgttaaatatcttggtccactcaaatttaatgccttcaacaaacacatgtatatgtaacgcctgtctaactttctccatttattatagagaattgttcaaagagttttgttattggggagtagtggtggtatcttttataggtgtcactttatgattagtcagtaaaataatattacttaaagtttattttttaagttataaatacaccaatagttagcagtatgacacaaaagaaagtgctaagcaccagtgatatcatttaacaattttcttgttagaagatattattagtatttagtactttctcgatgttatattgttattggtataattaattattgggttccgtataacttaaaaaaataattgaaaataaaataaaatcaataattgaaaatataaataaaatttataaaacacacttttatttttgtttttataattaaaaaataaatataatacatttttgttctttaattttttttttaaaaaaaatacttttattttggtggttaaaaatctaaaaacaaaattattacctaatgtcaccataacttttaatattttaagacaagtcaagaaataattttgtttaaccctaaaaaaggtaatgagatacgaaattgttatggcagataatttagatctacgcttaacatctattgtaaattat

SEQ ID NO: 250129 - DNA, 653 bp, Cannabis indica
gaataactttcattgcaccacaagtacatacatgttagcctaagatatgtttccaagagggggtgcattgaaaatttaaactaatttcggtaaattaaaatttttaacacaaaattaagtaattagccacttaatcaaataaaaacaattaatatggcaagcaatatattataacaaataatcaaatttataaagtaaatagtttaagggttaggcaagaaatatatttttatttcttacattattatctgctactgacacatctactatgatccagtccagctatggtgtgttatttgctcttctttatccgttgttcttcgtccttttctttcgagataaaatgtgtgccatgattgagttaagagctataatggggtgttaattatatcttttatatcatactttcaggctcatgtgagaggacatcaagttagaaaacagtataagaaggttgtctggttctgtcagtatattggaaaagttaatacttcgttggaggcgaaaaggttctagtttgcggggatttcgactggaaaaaacaactgaagatgcatcaagttatacaaaaaaaagtgatgattatgaatatcttataattgggagaaaacagaaatgtgatgtttgtagatgttagatgagagagtctgtta

SEQ ID NO: 250130 - DNA, 1129 bp, Cannabis indica
agtagagttaaaatattactaaaaataaggaaaacactccagcagaggactagatgtttgctctgatgggccctgataaccttgatacattaagaatggatgattatctagtccagcagaggactagatgtttgctctgcttcaaagacgtacacttgtgcaaaaaataaaatctgcactcacaaaagacctcaaaacctcatcatccttgactcatagtaattccaatgtcacatatgcatcagagaatatttcacatatcaaaaattatcatagaattatctatccaataagttggcatgttttccgactcaatactcctaacaaccccaaataaagcttgaagatttatgaaactttcgcctaacatcaataatcatttgggcaatgttgtaagttaccctttgttttactataacaaacaatagatgcatataagattacatcattattcttaaaattgaatagccactcaaaaaagttcattgtacacttccattggcattcttctattcaaattcccaagtgactattagacattaaggaaacacctcttattttcacaaacaactacttttattctcagttatgaaaacacacaacattaaaaacaaaaaccaatcttcaacaaaccccaaattttcacaattaaccaactatgccaaccaaatggttactaattaacttgcacaagtagctattaggaccttgttaaagttgacaaattcataaaattattagcaattgactaccatgagttactattggttccaaaatggtatcaagctataataaataatagtcactactattacttatgcaccaataattcccagagttattactttagtgaacattttttagtatttatgatataccaatttttctaacgagagtaacaagattactaagcaataatttagagcatgtttggtattattttttggtttttgtttttaaaaaattatttttaaaaatgagaacaaaaaatagtttttgaagtttttaaaacacaagtcatgtttggttagtgttttttaaaaacaatattgaccaaaagtgaattggtttttaaaacaaaaaacaacattgtgttgttttcaaaattcttattttttgtaactttatt

SEQ ID NO: 250131 - DNA, 858 bp, Cannabis indica
tttttattttttactttaattttaaggtatacaatacaatgcactctacatagataggtgacacgtgttctttttgttttgctcctgaatttcttatatttattaaattttgttttgttagatataattttttattaatgaatgctaatgtgatgattttttatatactagattatatcttttgaattttgacatgtattaaattgtgctctttgaactattgagattgttggattaaaaaatttctatccaatttcattcatttattaaagaatgcctaatgtgatgattttctatagaccattgttattgaacactaatactgtctaacaccttttatatatggtgtctcacgattagttatcgatatatcttaaaagttattttcttaagttatattagattcgatacttaattacacaaatagcggtatgacactaaggagagtgctagacacagtggtgtcttttaccaattctcttttccatatattagatcatgttctccgaactttgacatataacaaatcgtgcactctagattttgatatgtaccaaatcgtacccctaaacttcagccattttctaataagcagaaaaatttgtgaggtagaatttataacaattggtagcgaaaccttctcgaactagggtagcttatcgtctaactgaaatgcatgttttgccaaaccatgagctgcagagcgagctacatgggacaaaattgttcccaaaaatttagacaataaaattataattgtataacatcctcaaagagtactcctagctcattaaaaaatacattcttttgttgatagttgataccaaagaaagtaaatctaaataaacatctctaatt

SEQ ID NO: 250132 - DNA, 540 bp, Cannabis indica
tcccgccaaactagctcatttcgggcataccaaattgcccaaatcaccatcaataattcctcttgtgccatagtagaatgctgaagtatcatctgactaaaccaatcccaaaatgatgcccaagacactgagaccatatttaaactcgacctctgccaacatgatcttgcaaagggacacagaaccaataagtggatgatcgtctcagacgattggtgacacatgggacattcaattattaagattgttaatttaaggacttttatcaaattttagtaaaaaaaatcaaatatgaatgaaagttcagggaacgcaaagttcaagggacataatttggtagatatcaaagtttgagaggataatttagtacataaataatcactaaaataataaaattgaattaaattaggtaaaaattcttaaatctaacaatttcaataattcaaagaaattttttaacgagcaaattcaggaagtatcatttgatacatttctaagttcagagggtataacaacaattttctttttttaaaaaaaaaa

SEQ ID NO: 250133 - DNA, 611 bp, Cannabis indica
tttcgtatattggaacaacaattaatattttgtttcaaacaccatgtgtactataaaataacaaactaattagtctatattttttgaagtctagacatcaaatctggatgtatacaaattacatgaccgtagcatgtcttacatagtcaacctagataataatatatgcacttgttaaatataatgaaattccttacatgaaatttcttgctcataagtttatttgacatatatatttatactatgtctatactcatacatgcaaaataaaccaatcacctaaagaaaaccctaaatacccataaactctctcaaaccaaaatatcataccccaagtacaaaagatgactaataagaaaaaaaaaatcatttacaagctatatatatacccattttataaacttctaatattttaaaatttttgttataaaaaataaattttttccaatacactctattagaataaaatttgaaaaagcaaaaaaaaaaaaaaaaagtaggcaaaaaaaaaaaatttaatttactccatatttccatataagtatttaaaaataacaaaataattgaaaggataactaatactttatttatttatttttctaaagttttaa

SEQ ID NO: 250134 - DNA, 555 bp, Cannabis indica
acgaggacttggacataaattagtatcatagggcaaaatttagaattagtaaataattagagatttaattgttaatttatgattatataattcttagtaagaagtatgatttattgtcagaaacaaacagcccttagagatataattttccattatggagaatttattaaattctaagtgtattatatatgaaattttatatttttcatattttatgtccgataatagtggtttgcaatgatttgattattagagtcacttagatacagctgagtatctcaaaatcagcggggcaatttatttaaacatcaccaaatattgttaatcatcgctaaacttcatctttaatctcatatttggtttatcattgtaattatatcgctaaatatcgcaaaatatcacaaaaaactagaaaattagaaaaaaatgcaaaaaaacgagagatgtcgtgagagaagacaacagcggggccttgcgactgggattttgggtctgtgtgttcgataacaagagttctgggtcggggttcaacgccggagagtgagaaagttagag

SEQ ID NO: 250135 - DNA, 921 bp, Cannabis indica
tccaatccaatccaattgtaattggatatccaactttttgtaattggattggattggatcggttcggttcaattggattggattggatgatgcccacccctaagtgtgacactaaatttagtctgctccttaatgctataagtcatctcgtgtgtgagaattgtccaactctttgagttttacttttgacgattttttcttcattatgttttttattttaaattctaatataatttaattattaaagtttggattctaaatttttccagcaaaaaacaaaactgcatacatataaaatattctttaactccacctccacctccacctccacgaatagtaatttttttttttttttttgaaaatttccacgaatagtaatttgttactagttaattgtggggttttttctttcttaaataataataataataataatagtaataattataattattttgttttcagttaataattttcactccaaattcaaactaaaaataataatagtaaataatctccactgctgtcactctttttgttgttgttgttgttgttaatcaatgattcagcatttcataaccttttgaagccataaagtttctctagtctctccattctctagtcgatatatatgtaaataagacacttgagttttagaacttaagtaagagaaacagagtttgttccttttgcttcgatggatggcttcataaataaaatctttgtttctgcatacatttcagaacaaagtgtgcatgttttaataatatagaattaaattcactttgagctttctctttaaagtgattcttttacacacaattttgctcttttgcaagtcattttggaagttttggtatcaaagaatataaccaacacaaacgctttagtccaaagcaaaacatcaaattcctccttcct

SEQ ID NO: 250136 - DNA, 4770 bp, Cannabis indica
gaggaagacagttcactcagacaaagcaagccctagcagagctctagaatgtatttatctgtaatatgtatgttatatgtttgtttttatttctattagatctgttttcatgaacaagatctcgttctagttatggttgctcgaacctaattgaattcatgaaaaatatatataaatttttttatataaattttttagtattctcctcctcaccaccctttcgctgcacttacattatcataatcaaaaatcaacatctgacattatcatcgacagaggctgagtatattgttcttactgatgttgtgaaggaagctttatggttaaagggaatcatgaatgagttaggttataaccaagaacaagttattgtacacgatgattcatagagtcactacaaaaaagactatttttagtgacaattttttagtcacaattaatttttttttttgactaaatgtaacttttagtcacaacaaaaaagttacttgtgactaaacatattatttagttacaggttgtcactaatttaattttagtcacaataaattgtgatttttgtaactaatacttttagccatggactttttagttacaaagtaggaatgacaatttataattagtcacaaattttttactcttagtcacaaattttattgtgactaaaagtaagattttttgtagcgagtgcaatacacttaaacaagaacaccatgtttcatgacataaaacacattgatgttaagttgcatttttcagaggtattgttactaaaggattggtaaaagtggtgcaactgcgataaacctaattgacatgatgacaaatgttacactcattagcaatttcaatgatgcattggacttgcttggtatcaaatggtgataccttagagctttgcaatatattttcacatctatagtctattgaagtttaaagactgaagtcaaggtggagaattgtgaagacttgtaagaagatctatctcaaacttaagcccttagatcgatctactcagattgaggactcatctgttagttaagactagatttaattaacaagccagtacaatgacccattctgataggatctgtggggtttagaacacttaaacaactaactaactgccttgacagttggcagttatttcggttagtgtgtgtcctaactaacctactgctgtaaatagaaaacattgcaactaatagagggagagagatcaagtttgtgagggtgctacacaaagaaaaatgagagcttggttgagatgaattctcttcaagattggaggtgttacaaggctgttcatgttcgagtttttgactacctttagtgagctcaattttgtaactggtgtgaatcaccattagtgtgctttgtgtacttgattctctattgttgtaagttgtaatttttgcctataataaaatcatcacagccaataaagctgcttctacccggggattaggtccaagttttatccaaaacttatgattgaacctcgttatttcttgctgtcaatttgtatttctggttttacagtttgtggtttcatgttctaagcctattattgttcttgcattgtgtttttgtttgtgcttgagtgcatggatctttgtccggtcaggatgaatgtttcctctcttatatttctttatatatccctaggcttgatcaacctgatgatatatcttgatgtatcaactaccagtgaatgagttaacattcttgaaatagaatgagcttggaaaaactttgagggtataatcactttgatatactggtttggaaaaaggctctactgctgatttgtcatggagtaggaacaatcacattaattgtgtctgaaccaagtaactcttgtctcattttatcattgctttattttctgttttcattgtgtcttaaccaagtaactcttgtgtcattttatcatagctttattttcttattttcattgtgtttgatctattgttctttctcttaaactctttggtgttgcttgtctctgtgtttgactgtgattgcagggattgttcccttgtagccttgttatcacagagcaattttttcatgctcaatactcctttaagatagacaacaaccataatcacttcactcgcagcattagctattgctctatactcagcagatgactttgataagctttatttttatttatttattttttttttaatcaatcggccgcacacaaaattttcccaatgcatcatgtcgttcataatagtgatctttctttgacttaatataacaacaagttttgggcacttttttcagttaaaaaacacactgggaaaaatctcactcttgttgtgaaacaatataacaaatactaatattaagtggacttttatacaagcttcttttttatttatatttttagaatgacaatttatactctggtaatgaaatctttggcaacatgacatcaagttatcaaaactaattactgtataataatgagtctctctacttgggttttagaaaaacaagacagaagacataagtaggcaattcgtcttagctttaacataaggttttgctaaataacaatacatataacatataccctagatagaagttgcactacttctataggtagtactagtatgccgacttcatttcacccaacccttacctataatctaaataaattagataacaacaacattatttgtctactttgcgaagatacaaaaacaaaaataaaaagtagaaaagaaataaaaatgaaaattggatgataaatatccaccaatcgatgtgaccttggtggtctttgtggtctacctatgggatcattcccacacagatttggtgtttgtccatcgatttggatatttgggacatgagaaatcttatgccaatccactcttgggcctgcaatgcaacgttggctgacaattgtacaattattgatggttaaatgctgcagttgtgtcattctttggaggaagtctggtagttcaccaaggttgacacaatctgaaagttgcaaagaagcaaggcaaggcatcactactctgtccctgttattgggtgtttcccacgttccccaactaggcaaggaagcaaaatgtagttcttttaactttggaaatgatattgatctctctcctctactattatactctgttcccaagaactgaagattcacatttgccactctactcatgttttctattcgaagtgacacaagtgatggtaaatttcccaatgcaggcaatgtaggccaatttcggcaaccacatagtacaatacttctcaaacaattcagcgagtttatccaattcgggtattgtaagcctctagatcctctgatctctagagacatcaatcctacatgtggctgcagagtattgagtatgtcttcgtcggcatggtcctcatatcttctttggccgctgtcttcgaaattcaacttcacactgacaaacttgatatctcttaatctaggagcaggtacattttcaagatttccgcaccaatatatatgacaattcccttgaatacttggtaactggttcaaatcctcaagcatcaatgcctcatagttttgtagatactcaggggaaggtacaacaaacatatccagcacccgaaggcatgttaattttctaatctctttgggcaatgccgtcaatgtctggcatccttcgatatacaaatgacagaagtttaaggccaaatttcctatcttttctggtagcattttaagatttttgcatcctttcagtcgcaatgtttgcaaattaagcaaataacataatccattaggtaattttttcaaaggattacctgataaatttagatatcggagatgcactaagtctccaatcttgtctggtagtttcttaatgttgcaatgactcatgtttaatgtcctaagacaagtaagcttcaccaaaacatcacatctcagaggaggcggagcagaattcacccgatctattgttggcacaacaaagagtgttcgtaatgtctttacattcttccacggtgtcggacgtaaggtgtgatctagtgcttccaataccaaagtgtcatttcgctcaacatgttcacggtctatgagaaattgtacgaactcatacaccaacaaatgcatcttgcacttgatgatgtttccagcgtaatctcttgaacaatgttgaaacaaacttgcatctactagatcattgaagcactttagaccacttgatccatgaggacccatatctctgaaatagctttgtgacatccacaactccactacatcttctctttcaatctcgtagctttttggaaaaattgaacagtaagagaaacaaagctgttgagtacgagtcaaatgatagtagttgtgcaaaaacggaacaaatgcttttgttcctatttcactttgcaaaactctctcccaaccttgtgtagttgtttcgccgagcaatttgttagccaaaatgcttgcaacaagaggcgaaccgctgcatttgcgctctaattctgaacgaatgtctcctgattggctgttgatttccgcatctgaaagagaggctacagaatttattatagaccaacaatcattttcagacaacaattcaaggtgaatcattctgtcagctccaaacatgtttgccacctggtaattttgcgttgtcaccaaaattctacttgatggactactggtcataaaagcacttattagtcgccgccacggattcaatccagcactgccctctaagtgtaggcatacatcatctaaaacaagaa

SEQ ID NO: 250137 - DNA, 963 bp, Cannabis indica
atagaatttatacattaaacaattatgaaataaatcacgtgaaccatgcaacataaaacacgatttctaatctttattaattaataaatctgattatattgaaatgggttttatttagggcacaaaactgaacagttcacattgatgagcggtttcgcttttgcttccttagcatactgttcttgcgattttttagaatctccaccaatatggagtcctccaataatcgttaagatattgcaaggagttcgtgaaccactcgcattgtttgtgtcatcattatcatccgctttggggatgattttctccgtttttcttgtacttaccgaattttccttgtctgatcaattcttcaatctcgtcctataggaaccagcattctacagtggtatggccaatgtccttatggtacttgcataacttcttcggatctcttttgttgcaatttcctctaattgggagaggctttctaaagactccatttttctcctcaatcacgtaaatatgatcgtgagggactgctagttcattgtaattgacaaagcgcggtccccctctcctctttggagatgtttccttcttagatggggacttggcaagctttggactccgctgcctctaggggctgcgtcttctcgagcttctactctgggattctttcctcttggacttcgagatcatgaccgtggtacgggtgactcgcgcttctccttcacccattctagttcagctagagaattctcgattctcttatgctgctcagccatggagaagaattgtaccaacgattctagtcttcgagcctacaactcttttcagaaatcggttcttggcaagacacctgtaatcaacatacaaactaacgaagactcgggggccttctcgaccttggttacttcagtattaaaattcttaaaataatcctgtaaggactcaccgacttcctgcttgatgttagccagg

SEQ ID NO: 250138 - DNA, 673 bp, Cannabis indica
attattatttatgcaattttataatgggctttgaatacccaaaaagattgttaagaaaatgcatttaaaatcaaagtataagaataacaatgaacataactaatattatttaaacaaatgagacatgtattacttgttcatcattccctgcagatagaaattaaatttattttaaagaatgttcgtgttctatacattagtcgtgttattatacattgttattacttacaatgtttataatagaaattattgcatgtgacatacatcaaagatcaaattttgaatacatcttgaaaattaattatgcaaaaactatattcatatattctttgaaatattgtaaaagaaattaccgaataatttcttatatttttatagatgaattaacaagtatttaagtaatttataataatattcttcttgttcaataccatttccagaagtgaatgtaataattttaaataatcaatggaattatttactattgaaatttgaaacaacaagaagatgaaatgtcactcataatcaaactgtatgaaatctatatatcatgtggaattgaataatagtggtcacgtacctgtaaaacggaaacatttacaatcaaggtaaaattatatttgattattgaatagaatgtgagttgtacacatattttaatatatcgcaaatt

SEQ ID NO: 250139 - DNA, 766 bp, Cannabis indica
tcgattatgatcgaggtaatggggctttgattgttgttaagtggattaaagtcatgacgtcaagtgaaaccgttgttaagtttcttacttgttgattgtcttattatacaatgacagagatatatggatgtcgggttagggcatcggttttgcctcattagacaatgaatatatggatgtccggttagggcatcggcttttccttattatgcaatgagatatatagatgtcgggttatggcatcggccttaccttagtaggcaatgagatatatagatgctagagtagggtatcggcattgccttactaggcaatgagacatgtggatgtcgggttaaggcatcagggttgtcttattaggcaacaacagaaatagttattttatgaagtaacagatatggcttgtcttattatacatgtacttgagtattactatttaattatgttattattctgatttagatatctaattgttatttacttttattgtttacttttcttgttgagtctttgtgacttacaggtgctttgaggtgcaggtaagggcaagacaaaactagggcagccatgagacggtagtcttattcagaaaatgtacatatcgacttatccgactcgtatgatcgagttgataggagttattttgggttgtacctgatgtgcattttgacttactgttgtatgtagccttttttgtaaaacttttgtaacacaggaaccctgaaacaattttttaacgatgtcatcatgttcattgttatggttt

SEQ ID NO: 250140 - DNA, 844 bp, Cannabis indica
gaactatttctttttctttttatttttccgtttttttttttgaatggtttattttccttaattaaaaagttaaataatacaactccattaattaattgcttatttgtactgcaagtccttaaattctataattttggcaagttggtccccaaattttatttttagcaaattggtccccaaactatataagttttggaaagttggttcccaaactttatttttagtaaattggtacccaaacttttatttctttagcaacattaagtccccactattagatattgatattttatttgttttacatacattaatttattttttgtattaaatttaaataatttataatttttttttaatattaaaactttgataaaaataatagtattaattaatattttttaagtactcatataatatattttgtataattataatatttactttttttttaaaatatttaaaatatactttattcatatatattattaataacaaaaaaaagtataaacactagctatattttattattgatttatgaatatgtagtattacaattttaataattttttaattgtataaatatttattaattatttaaattttgcttcaatgatgtaaaacttcatgggttcacaccgtagaacataagtcaaaaataaattttaaaatataatttacttagtactttataaaaaatatattattatttaaatcttttcaattgttcttttctttttcttattttgacataattgaaaaaaatacatataaacaaaaattatatatttatttaatttgataatatattaatataaaactatttaaaattaatagaataatagtt

SEQ ID NO: 250141 - DNA, 1125 bp, Cannabis indica
aaaattaaacataaaaattcaaacttttttaatactacttatttatgggtaatatcccttaagagtgcaaaaaaaaaattacataaaatactaattttttctctaaactttacatatgtactttgataagagaattttttacatttacactttttcctacttaatttttttttctttaccttttttttttgtttattaaaacttcaaaacaacatttttttcccccctcatatctctttgtttttatttttcacgctaactttcttttttttttttgtttgatgacttttttttttttcttacctttgacttcttttttttgttatttttttttaggctatttaggtatatttaccccttcgtaactatgacacatgcataattatacttcctaaacttttacaacccgtttaaagtagtccctaaatttttctactgtgttgtataatggtacttccatccaataaattttatttttgtaactgaatgatcatgtggctttttatcttataatgtggcatgacaataaagtagccgacatgtataaataagaccacatggcaatttattaggaaaatatgaattgaaaaaaaaaaaaaattgaaaaacaatagcaccgtttaactttattttagaaaaaaaaaaagaattagaaacaatgataaaaatatatatttccataaaataaaaataagtaaataaagattaaaaagggaagagtctcatttttggaaaagacttcaaaacaaaaagaaagaaattgggggaagttttagggttgttcgctaaagattaccagaggaaaaattcgccagtgcaggttggtttcaaagagaatagagaagagtctaaaatgtttagcaaagaaaaaggaaagctccagtctaaaatgtctccccaatttcccatttagcagagctcattcttttcattgtgaaatttttcataaacaattctttgtaacaaataatcatgtatctcaactaataatagtaccacacccatcaacctcatgtctgaaaaaaaaatatatatatatatatatataaaattgaacccataatcaaaccaaaataaaatccataatttacaaactttatattttgagtagccataaaaccttct

SEQ ID NO: 250142 - DNA, 744 bp, Cannabis indica
gtagtagaagtatttgagttattgtcttttttttttttttaattttttattgatatgattgtgataatttatttaatagtaatttatagttggtatcaaatataataaattatctatcctagaattcttaacaaatcacatgtattgtatagtattggactatgtggtcttaatttttgtcaagcgatcggctaatattgttgctcgccatttgactaaaatttcgtagttaaatactggttgtacctattcaaatttcatgattccaagtagttcgagtagtttacgatttatgttaatggaattgtatcttttcattaaaaaaaaaaacatatagtatagtattgtctaaatgacatttgtttagttttatttagagaaaattattattttatttttatttccacttccaaattttagagttttcagctatcattccaacactatctaattagtgaaaccaaatttgttttccaaaagttataactaaaacaccaagatagtttgtaaaatttgtaataaattaaagctgtaatttataactaatcaaacaaatttataaaaattacaaaaatacgcattattttaaaaattaataatattacaagtttttattttaactgaaatttacaagcttataacaatatattgtgattttataaacaacatttagttactaaaaaacctagtacagaatatttaaaacagttatccatattttttgtaatgtttaaaaaaatttct

SEQ ID NO: 250143 - DNA, 1190 bp, Cannabis indica
ttttatcatgattctcacttcttatattcaggtagccgtcttgatctgcaagagtaaatttaatttcaatttttacaatgatcacacataagtgaaggcactttaagtgttgcatctataactgttaagacttttttttttaatcaaagtactatacgtaataagaactttcaaactcaaggcacttgcacgtactccattcgtggacagaggattaacatggtttactgtcaaatttaaatttgagtctcaaggcaaggtaacaagataaattttatcatgctctctttaagttgatacaaatgattatttttcacttctcatttttctttaaacatttttccaggcttccatggtgattatttcattttgtttaggacttgaactcttattatttttctctgtcacattagtttgggcttgaagctgtatgcatttttttttctttggggtctaagcaaaggggagataacaataaaggaattcatatgtaacgttggcatcattggatttatttcagatgctgtcattgtctaactcattggtgcttactacaggtcctgtagataaaattgtagacaaaaattggtgtctacttggttacttggttacctctatatgttaattatttcatgtattcctcatgtttcaaggaaaaaaacttcaaatttacacataatgatatcatttcatccacaattgaaatactgttgtcactttgacacattagagttaattgacagaagatagtgtaatatttgaagtatactctcctggcaatactcaacttggaatacaatgaccatatagtttaagaattttgaaagtaatttcttttaaagtgtacctaataggttaatatgttgcattatatgtatagttttataaataatatgattgttatcacattgcagcaacataatataatatggtagtaatatatttgagtatcccgtgcctttttttattctcattgtactttgaggtgtaagaaaaatgtatcctaaccatatctatatcatcttagttttatttgtcttattaaattattttgtatgtttcttgtgaatgtatgctgcatttgttgcaggcatgtaacgccccagtattttgccttattttacaaaaatactattttcatgcataatttgaaaagataaaaaaaataatttaaatacaacagtggattt

SEQ ID NO: 250144 - DNA, 593 bp, Cannabis indica
ccaatcttgaattgaatcctgccaaatactcatcccaagagagccaaggaatccaggggtattccagaggtcaatagagttgacaattcctgggatcacacaacattaactatgcatgagatctcaagatcccatgattccatttgcaaccttgaaggctaaacctagcaacaccaaggaccaaaatgggacacctctagagaagtacttactcttaaaaacttgacaccacaaagcattactcctcgaagccaaggtccaacccaatttcgcaatcaaagccaaattaatatatcaaaatattttttcaagcctaaaccccttactcacaggacaaacagagggaatcccactttgtaagagccaaaaagtgggatttatccatatttcctatccaccacaatcttctaacagccgcatcaagcccagaacaaaaaatctaaaagtcacataagctatgtgaatactctcgttttacatcaaaacatatgtctattcatttagagcattactcacttttcagattttgtattgagatcatagatcatgcataaggtggccaatcaaacacatgtaataagcacaaatatgaa

SEQ ID NO: 250145 - DNA, 1219 bp, Cannabis indica
atataccaacaaatcatcatcctcaccttgacaagtaggagtagttgaagatgaaaaatagggtgtattttccacagaggtaacatcaatagaaacaagatatttgttaagaggaggacaataacacctataccctttctaaagatgagaataaccaagaaagacacactttaatgccttaaggtctaattaggtgacatgtggacagacatcgcgagcaaaactaacactgccaaatacccgatgagcaactagatacaatgacttacaaggaaaaagaattttaaatgcgatctcactattaagtacagaggatggcatgcgattaataagaaagcatgatgtagaaactgcatcggcccaaaaaggtttaggaactttcatttgaaacaagagagcacgtgcagtttcaagaagtgtctgtttttacgttctttgactccattttgaggtgtagtatcaacacaagaagtttcataaagcatggcttatatcctcctgctcccagagttgcaggagcaccgagtgtcaatgggggcctaccttagagatgggtaagctcctgacttggatgatgaggtacatttatctcacattgcaaagaatctaaagaggaaggagagggctctctgccggcacctggctagtgggggtccagtaggtgatgcttctctatagattggtcctagaggcaaggattttgaggtacctactcaccccatgcctgtatctagaggcaagggtaaggcagttgtcgaggactctgatagttcctcttctgatgacgatggttttgatagttgagaacatcatactcttatattgtattgaacatttatgattgctttctaacattgctactatcatttagcaaatatgtcttccaggccgagagatcttactgggggacctccaaatgagccaacgggatgagtgaaggccaaggtggctaggacttctcgtggtggagatgttgtcgggtttgctagggcctacaccaactaggtagtctacgttacggcatgcagaccagggtacttgaaggcccgacagaggagcggggtctgttgttggatagggggctgctgaggtagcctgtagatgcacagagaaagctctccccttcatggatgaggatttgaaggagcttggcggtagtcagccaaacgggctctattctaccaatctttgggacttttctctggtaagttatactttc

SEQ ID NO: 250146 - DNA, 588 bp, Cannabis indica
acaatttatgttttgtaaaacgaactgcaaataagttagttcattgtttggcaagagactcttgtttctttatagatcgtgaaagtacgttctattgttttgaacaaatttcttaattaatagatcttataatttttattccaaaaaaaaagttatgtaacatgcagtgtaatatttactattatcacatattgatccataacgtcatcaattaatagaagagaaggccttgacatcattttgggccatatcatttccgacccgaaacgtatgtccaaggcccaagagaagcccatcaactggagaggagatgtacaaatgaattaaattcctattttattttatttttatttttatatccaaatttttgtgcccaaaatacatatttccaaaatattatcaagattttcaaaaataaaaaaataaaataaaaaaaatcaagattatatatctttgttatgacttacgactgtatggtagtaaattcagaaaaatatataatttctaaacttaattgtaagattaaaaaaaaatgaaaaaaaagacatggaaatccgatacaacttacaataaacaaaagtatgaatt

SEQ ID NO: 250147 - DNA, 463 bp, Cannabis indica
ataaatgaagaatagtttctagtttaatctactaaatagaacaacgtatgctacttttctagtgcgagttcgctgttcatattcttgcataagttcgcacgcttagaatgcatttgggactagtcgagtctaagatgtctgcgtctttgtaaagtccccttggcggaaatacatataacggtctgatagaaccaagacatgcgagtctatatcggtttatcgaggctgttgggtcatccggaccagctcgcaatatagagaattgatctctctgtttttgtcaggaggatcgcgaggatactcgcatatatcttgatatatgcgggctatagtcgttccttggtcctacataatgcaagccattcgaatgcgattagacttggtcatattcgcatcatctcgctgagtccgttcgagcgaggttagtactcgaggagtctctcattgtacaactcagctttcc

SEQ ID NO: 250148 - DNA, 758 bp, Cannabis indica
gcattcaacatatggatactaaattgtgagaacaactctgagtggcaaacaccaaaagcaatgtggcaaacaccaaaagcaatatctctacaatttcatttgtgttcctctttataaagctctagtgccatcaactttggacattcttctgtttcacaaattgatggattccaaaagaaaaagaaaaagaaataataattcataatttttggtaatgagtatctcaaatctatacatacatatctatatatagatattctttgtaattacttttatgtttgatttaataataataattcttttcacattcttgtaacttttcacattcttataacatatctatataaatattaaagagtaattagtattgtaataaaattgaaacataaataaatattaatgtgtaggaataggaataaaataataaatgattaaataaaaaattaagaaaaatgagaaagaatgagagagcaaataaattgaaagaaatgccatataagatgccatgtcagctctttaaagttttcctttatatatattgatatagatattgataataatataataataataataatagtgtaagttataataatagagactacataatagtgtaagttatagaaataaaaagacacattaattatgtgataatatataaaaaattataaataaattaaaaaaaattaaaaaattgagaaatcaaagaagaggatgaaaaactcatacaaattgccacctcaactccttaatgcttt

SEQ ID NO: 250149 - DNA, 598 bp, Cannabis indica
atatattattactattggtaactcttatgactacatccgaagccataatttatttatatatatatttatgtaacactactatttgtgagttatgagaatgaaaagacactaactttaattaaatactacattattctgaaataacaaaataattaataaaaatttaaaaattgaggaaaaaaatgaagaacaattcatataagttgtcatattatctttttgtatgtgaagtgccttttttttttcttgaagttattcatttttttttttagtaaatgagtgttctattgttgttattgtataattgatatgttttagatgagttggtaaaaagtataaaattactaattaaaatgataatataaatagaatattatcaatataaaaaattatggctattactataaatcttaaaacatcttattaaactatttctaaataaactagtagacaccttattaaactcattttatatatacaaagatatttaatttccaaatacgatttgacaatattattaaaagagtatttgtaaaaaaatttcattacatctataattaaaaaaaatgaacaaatagaaatagtatagttttaataa

SEQ ID NO: 250150 - DNA, 1253 bp, Cannabis indica
tcaaagatggtgtcttccataaagtttgagatcaaacattttgatggaaagaataatttaagtttatggcagagcacggtgaaagatgtgttggtacaacaagggctcctaaagacactgcaaggaaagaagcctgagagtatgagtgatgaagattgggaggagttgcaggcaaaagcggtaagcactattcatttaagtttggctactgaattaaagtacagtgtattgaatgaaacatgttcgtctgagttatggaaaaagttagaaaagttttatatgtcaaaatccctaataaatagattatatttgaagaaacaattatatgagttaaaaatagttgaaggagaagatattagggatcatataaataaatttaataagtgcataactcaattgttaagtgtaaaggtcaaaattaatgaagaggatcaatctattattttgttggcctttttaccaaaatcatatgagacattagtgactatacttttggttggaaagactacttcaactgtagatgaggtgtcaactgctcttttagagacagatagtatcaagcaaccaagtggtgtgtctcatactaatcaagcttttgtgacaaggtcaaaatcaagtcgtggtaggaatactttgagagaaagatatgatgatagaagagacaatcacgcttattcacgctcttcaaggaagtggagtgctactattgtcacaaaaagggacatgttaggcagaattgtgaagatttaaccaaacatcttgaagcaatgaggaatcaagagtgcaaagacacgtcagattccacaaatgttgctggtgaagggtttgaaagttactctgatgttctctctatcatagctgattaaaaaatttttaactcttagattttagattctggtttttcgttccacatgtgcccgtataatgagtgctttgacacttacaaggaatatgatggatgtactattttgatgggtaatgattctagctctaaagttgttgaaataggaactggtaagctaaagatgtttgatggtgttgtgagaacactggttgatgtgagacatgttccaacattaaggaggagcttaatctctttgggagctttggatactcgaggttgtgtctattccataaaagatggtgaaataattatcaagaatggtgacttggtagttgtgaagggtaaaaaagagcgaaatttgtataaattagtgagaagactattttaggtggagtcaagtcacaaaagg

SEQ ID NO: 250151 - DNA, 672 bp, Cannabis indica
tagtaaataattttctataataattattaatttaaaatatgtaaaagttaatactccatatgatgtgcgtagtaaataattttctataataattattaatttaaaatatgtaaaagttaatactccatatgatgtgcgtactatttcttttgacatttctattttatattcatttataatttcagtataaaccatattttcttatattatctttttctgtttaagaaaaatgaaaatattcattaattagtaaatcagagagaaagttcattcactgctataagtttagtactataaaccatatttccttatattatctctttttaacacccttttccagccataattttgatcgatccatctttctaacacaattactcaattgatatatgtatctgattaaataaaattgtttatacattttgttttcatggatggccttcttcatatatataggactattataataaggattgaatattttacctattaataaaaattataatttatagcctttaatttaatttaatagtttaaatcaaatctttaaaaattacaccataattaatatattttttaatttataattaatcttcaatattattaattataagttgaactaacaaactccaaacttattttttttttacttttattttatgtctatttaaa

SEQ ID NO: 250152 - DNA, 734 bp, Cannabis indica
gagactacatagtcaaaatgaatcaaaagaagcgagcgactatgtcaaatagaacgagaagaagctcggaaaatattctatgatttaatgatttcgaaaaatcattaaaaattatttttaataatttttaactatataattatcattaaattaataataaatactaaatggagtcaaacaattaattgaaaattatagaaaaattaaaaattaaattctaagcacgttggaaaaaagaaacgtcaaaaaatgactccaagaggtgctgcacgcgcccccacgcgtagaggctaagaatgggcttcgttggaggggttcatctttaaccttgaactgggtctgaaagtgggtcgcgtgactcgattctctcaagtcgggtcaagacaaaaaaaggccaaaaaataggcgaaaaaataatgctaaatcaatgggaaaatgggaagttttgttcgtatgattatctattctaaaaattattaattaatatgaatccacttacaaattctatacatagtatagatcatgatacatatttatccatcttaagtatcgggagatgtaccttttttttagaatagtaaaagatgagtaaaaagtatattttataatatataaaatgtatggtatataaagtataatatgtaaacgaaaagaaaatgttaatacttcatagaccaaaaaaggtaaatttttgggttgaaagacttaaaagtctggtctaggggagttgaagg

SEQ ID NO: 250153 - DNA, 756 bp, Cannabis indica
aaaacacacactactcctagttggcttgagatctagtcagtatatatgaaagaagtagtatgtaatttaatttatatgtaacttaaagtaaattcggtgaagagaggctcgcacgtgcccttgaacatctaatttatatataattataattaccaaacaatagttgtctcaaaaataaaaattagttttagaaaataaaatgtcatgtcatatataaaatatgtcaagcattgaggagtttctataagttggtttgagtaatgttaatgaatgtggtatgcctcaactgaggcaatgcacttgagtttcaaattaacaacacttataaactattttcaccacttaaaacaaagaaaaatgcaatacacaaaataataaataccaatgatcattgacatttttgaaccaaaaaaaacaaaaaaaaatgcaattcaaatgtgtcaaaactgctccgatttcgatttgttgttattgcatgataagggcttagcagaagaaaatgagttcaccacaaaaaggttttcaaattataatatcatttagcaaaatgaaaagagataataacagttatatcccaactcataatccacagttacaagattacaaaacaacccaaaatatcatgtaaacagaagaaaatggtcacataacctatgtaaacaatgacaacagaaacactcaaagtaggaggattaacaggagattaacagaaacaatgtaaacatgcaacttcatcacatattacaaaataggtct

SEQ ID NO: 250154 - DNA, 634 bp, Cannabis indica
aattagagttggtcaaaattactcttttatccttttaattatctcttgattttttatgtaccattaattcaatgtgaacaattaattaacttatacagatttggatccaactattagcactcctagaattaatattataatggaactaatattcaatccgttaggaaagcctagattctactattgtataacatgtttcgagccactcatgttatattaagctcccaaaacagaagttgtaagaatcatcttctttgagaaaatttaacacgtgaatcaaagaactcaatgaacacaaataagagtttatgtatactcaggattcaagctgattcactaatgatcatcattatgatatcaataactctttcatggtaaaagacacgttaatgaaagacatttattgcatatcagcctagtcatacataatcgaattatatacaacacttttactacatgtctatttacatatatgatctgaatcaaaatcacacacacttaaattattgtgtatagcaaaccatacttagtagtgccatattaaagatttctaatactttaatacaccaccgacttgttttattcatatcgtataatcttaattaacctgtacatccttacaatattatacctt

SEQ ID NO: 250155 - DNA, 561 bp, Cannabis indica
tgaaattggagaaaaattatagttttacaaacattgaatacttatgagctaaaaaaagtaattaaatttatacagctaacaaactcaaaattttaaatacttgtaccgctatttacgtattttttttattttatctttgtgtggagtgtaaattatatcttctttcttataattcactttaaatataccgaacaaaatatctttctactttttttcattgggcagtgttcattatagttataatagtattactataaattttataaaaaacatttaataatttacactgtcaaaaaataatttaaagtttttcaatcacatatggttaagttgaggaccaagaactccgatatcaatagaagaactctagtgtcagtaaagtactacatcgttaagtataccagtacaaaaaaaaaatacaagaattctctagcatgtgtttgtagacatagatatggagaaagaggatgaaataagtattgacaacaacactcctaatacttttacttttgcttaattaaagcaacattttatttctggtaatggaagaaattatagttc

SEQ ID NO: 250156 - DNA, 896 bp, Cannabis indica
taatataccaaataatcattctctattattataacattcataaatctccactactatattactagtgaccaaacaaccccattttctctgtagctatttatcttttcttgcaatctaagccttctgttttctcaattattttattacacatatacttttcatttatataaacttttacaacaccaaaacccatttaaagcaagccagagaacataaagagcgataaaaccctagagatagcaagagaaagaagaaacaaaacaaggcagagagatagaaagaccagatcatgacctcagtttgcatagcgaactgtgtgaacgacgcacgtgatccgtgcgtcccagtccggctccgagccacttacgtaaatctttacaagtggccggagtcagacgcggaatttgtgaggtctgtcagctcattgcgtggctgcagaccgggaagtcacgtgcgttatggccaccctagagtggttgacagcatttcatgcaggcaaatgtaccttcggagttatacattttccaggaaagagactgtccccgagaaaacccagaaatgttttggtcgagttaagaaaatggctgatgatgaagaccactctgatcgtgataatcatggggataagaagaataagaaccagaagaagagggaagagaagcaacagcagggaaataataatattaataaaaagtcacagagcagtagtaataaaaagaagtgtttgtttctcgggaaagttaaggaactttcttatactgctctttttggaatcttccaaacgtgtttgtcctgtgctgctactgtagatgtggttgatcactaagaggtactcgcagttgttgttgtttgctcttaatgtaatcgcactacttctttttatttatttataataa

SEQ ID NO: 250157 - DNA, 1037 bp, Cannabis indica
atgttgacatgtctatgccgcagctgtaccttagttggtagacaattcgaggcagctctccacaataaatctttcacctttggaggaactttaagacaccataatttatcccagaaatcagatcccaccagttgcaaatcatcttcctttctttgttgcaaatgccgatacatacttttcattgaaaaattccctgagctctcaaaagaccagaaccaaacatcatcaatacgacttgaatttaagggaatacttaagatgagttgagtgtccattgtattaaacaaatcacgcaccaagtcaacaaccaggccaaacaatcagtgatcataagagcaacaacattttgatttaacaaagcaggatgattcgaactaattctcagattctcaccacaagggagccaaggatctgaaactagattaattttagaaccgcctatgtgcccccatccttaccagctttgtttcaaagatactacgccaaacaaacctaggattagttcccaattctgcattcaaaaagtcctttcccacataatatctagcctgaaacaatcggccaacaagtgtgtgaggcctacagaagctctatttaaagtagttacttagtgttcagtagtgtaattaccaatagttgttatagctttttattgccaagttttgataaaaaagattaaatacaaatcactactacaaaaatgaatttttttgtcggtcaacgcgtttggtcaaacttgttaactgagggaaaactaaacccataattttttgcttcagttggccaccgacgcaaataattattaattaattagcgtcagttgtatatctgatgctaaaataaaaaccaaagcaaaagatgaaattttaaaaaatatatatccacacttttaatgtcggttgtgcaccgacacaacaaacaattgaacaaaaaaaagagaatcaattatgggcttcggctcatttaaaaaaaaaacctaaccttaataatataaaaccaatttaacctaacccttctcagtcgcccctctccttact

SEQ ID NO: 250158 - DNA, 616 bp, Cannabis indica
acgtttgcgctatttttctcattatcaattcgttaaattctattaaaatagactaagttgacacctgtcaatatattagtgctccactaatatattctcaataaaaattattaaataattaaaaaattttaaactgtaaataaaacataaaaaatgtatttttttgctaagtattattcaataaaaaaagttattaaataattttaaagttaagaaaataattaaataacatttatttaattataaaaataaaaaattagatttaatagttatatcttttcttgtttcttcatatttgtacaaataaatttgttgaacatatttttgtaaataaatcaattttaggtataatattgaaaaagtcccttgtaataagattcaagagacttgtagtgatgaaggtaatgtaaatgtaaatttaagtatttaatatgttaaaagaaaaaacatgtggtatgtaagtgtatgcaatttaaaacatcaaatatttatgccgcaaatactctatgtttgaatatgatttaacagaaaagtagtgacggaagtaacggaaatgtaacttaaggtatttaatccgtcgaaaaaaacatgtggtatttaagtgtataaaaccgaa

SEQ ID NO: 250159 - DNA, 675 bp, Cannabis indica
ataattgagtgctcaagttatgatgttgaaacaattcttactattatatcttctaagcagtaaatgaaatagaatataagtgtttttaaagttaattgtaatgttgcaattttttttatcaattttatttaatttttttatcaaacgatctaggaattagatagctgatttttaagctcacttttttaattctagtcatggtcgtgtctttaatgagaaaggtatctcaattgaattataaattattattttaattgattctcatatataaaatttcatgatttgttaaaaaaaaaagtagtttaaaattattgttttgttagttacatacaaaactcttgttaccacatgaaaaaaaaaggaagtgataacgtatattcttttatcatttttttcaatgtttacgttaattattttactatttcatttatatataatatttttgattaattttaaatttaagtataaattttattttccattttttacaatttcttcataaatctctttcttctttactaatttttttgtgtttttttttcttgtctaatgaattcttgttctgtccacctcaggtcccgaatttaggcataagcagactagacctgtgcctaggatctacctagcccaaagtacccaaaaacttttttttttaaaaattaactactaattttt

SEQ ID NO: 250160 - DNA, 774 bp, Cannabis indica
gcatggtttatctcaaggctagtttaatcatgtaagtggtgtcatcttgtttgatgtggatccttgaagtagtttattgatgactcaattaaagcaggttgagatataagattcttataatttgcacgtggtctcttaaattgtcaaaaagattgaaagagtgagaaaaagatttacaccaagtaatcttatatttttttataaaaattacactcaaactagaagatttaattatttatatttgtatatgcaatcacatgaaatggacctgtgatgattaacaaagtaagaaaaacaataataataattgaaaacagctctataattttttatgaaagggctttttccttgttaatggtcaaataaatacaaggtagaagtggtttatggtggtggggagtcataaaaagtgtttaatggtgttgtccaatcaaggggatctttctatatattgttatagcacttcaaacaaagtgaggcctaaaaagatagtccaatatatgaatgatatcttgatttttatgcttaagcaaattaattaacttattatttgttaatgggccaaacctaatcttgaaaagtttggttggtgtattgacatttttgatagggaaagagctttaatcctcattaccaggatgaccaaaaaaaaggcatatagcactatagtcaatagtcatcaaatcacttttctttatacttcatttgaagttgaaaataaatataagtagttgaatgaatttaaaaacccagaaattgtattattatggctct

SEQ ID NO: 250161 - DNA, 538 bp, Cannabis indica
tttttttttttttgattcaacatgtatattttaacttgatgaaagcactttggttccataaaattaaaaaaaaaagaccactctggttaaagaaataaaactaattcgacgttacatacagtttttagaaaaataaaatttatcctaaatctgcttcaatacaatagtataagtgccctttaaaaaaaattgtataaatgcacattgtcatttaatattccctctgttaataatctttgaacacttacgttaaaaaacatctccaatcaaaggtaggaaattgatgagcataattgtatttaaaagtatatgttaagagtgagactagtatagtaactcatatttactgaatgggaagggaagttggttcaataagcatgattagcagaaccagaaaaggtagtagtacaccaaaaaagaataaagaaaaataattctcttaatttcttttgaactgattagtttactggtgctcatagagtcatatgttagacatgaaaaataaagcacagcagtatgtgtgtgttgtcttgaacac

SEQ ID NO: 250162 - DNA, 529 bp, Cannabis indica
gcccttgtcacacctgggggcagcacttgcatagagaaatcaaatttgggttctaggcctccaacaacaaagtagagtataaagcgctcatatctgggctaaaacttgctcgggaggtacacgccaaacacattaaggtctgtagtgattcacaattggtagtaaatcttgtctcaggagagtacatggcctgtggagaaaaatgatggcctatctaagcaagatacaagacctgcttgcacaatttaagggttacaacctcaagcatattcaaagggaagaaaataaaactgctgacgccttcgcacggctcacgagcagcacagtaacagataaagccaacttagtcccaatccaattctgaaaagaacccagcatcatctatgcggaagaagtcgaaatcatagatacaacaccaaattggatgacacccatagcaacttatctcaacactagagaacatccaaacgataagaatgaagcttggaaaatgatgagaaaagttgcagtatatcatagttgaaggtgt

SEQ ID NO: 250163 - DNA, 710 bp, Cannabis indica
atgtttgcatttgatacttctggctagtgaaagaagtttactaacaaacttatggaataactttatggcatgtgttttaggtactgggaattactaaaaggccggtgtttaacacccttttcggtatcatatcgttagtagtgtgattaagtatcagattccatataacttaagaaaataattttttagagaatatcgttaaccaatcataacatgtcatctataaaaattgttgtataccactgatgcccaataacaatgctattgaagtaagagcaacgtcaatcattgataatgaccctaataaattatgataacgagaaaacaatatcatatcctaaaccaatagattaaggagattagttaatatatttatagatatttatattctaaacatgctgtagagcgaaactacatatataccgataacttggaacgatcactcaatttgaaattaggactagtcctaaattattttgagtcaattaggttaaaataatttgtttttagcctttatatataaatgattttttcatcaaataatattaaagttatttggtctagcggtaatttttcatcaaatattattgtggatataaattacctaacaactatgtgtaaggtgaaaattatataaaaggttttttttttttttttacattctaaaattagtttttttttttttacgtaaaatctacatagcaactaac

SEQ ID NO: 250164 - DNA, 1184 bp, Cannabis indica
aaatgatttggatgggccctatcatgtttttaggtttacacagatgaaagaaattgtaaaatttacccgttacaaattatttaaaaggtctattgacaattggattatgattaaaatcaaatcatcagatctgtcaacaagataatcatagcaatttagataaaataaataatagatttataaaaaaaatttgaataaataaataaacaaacataacaaacatgtaaccgatatctggaaagtaggtttagatatttctatttaaaatatatcttaactagaatttaaaatttaggttgttggagaatattaataaaaaatatttataatctaacaaatctcctaaatatctaaaattctaactgaaatttaaatatctagttaatttttaaattttcagtttatttaaataatttaaattaactaaatatctaataagataatataatataatatcttcattttaaatttagatatttctaatattatatttctaatcttataatttaatgaattaaatataacaaaaaataaacaaattgaaaaataagatatttgatggttaggagattatcaattttatttaataattaaataaaacaaaatatcctaagtttgaaaattttatggttaaccaaaccctaaaatttctattcaaaccaaaattaacaaacttttcaaaatttcatgttatttgacaaaaataaaattttaattaaaatatatatctaatatgataaaatgttaaaactaacatttttctaatcttataatttaatttaataaaatatatttcaaaaataataaattctaaaaatctggtatggttagcaaatttgaaactttaactagattatttgtaatttttttaatattttaatatcaaaataagatcatttcaattttaatgacaaaataagtaatatcttatcatataattaaaataaataaaatatacaaaaataatcaaagtttcaaaattaaccataagcctagtttgtggaaaaatcaaaattttaaattcaaaggctactaattttaattaattaaaaaattaataaactcaaaaggctactaatttctaaaactaattttaattaattaaaaaattaataaaaattagttttattctaataattagatttttatttaaaaaattagattctacacaaaattataccaaa

SEQ ID NO: 250165 - DNA, 739 bp, Cannabis indica
aaaaaaaaaaaaacaagaaatttgaatcatagtaaaaacttacaaacattgtaatttttcacttaattagttttttttttctttaatgcttgttttcttaatgctactttgcgacaaaacccaagctttatttagaagagtattttggaagctcaggggctagtcaaggctggtgtacgaaagtccattggcaacggtgataatgtaagtattctgttggattcttggcttcctgatccttctaacccttttgtcttatctgatcatcctggcttagtgaatcaaaaggtgtctagcttaatctcgatgcaatctaaaagctgggaccttgaaattatcaatgatctatttggtgagagggataagaatcttgtgttgtcaatataattgagtttacatgctacggctgataggtggtgttggaaggaagaaaccaatggactttacactgtcaagagtgcttaccgactgttacagatgaattctggtgtgcacacttcggttgaagatcagaaaatattcaaggctatatggcagttggcagttcctccgaaagtacagcagttcatgtggcgtgtgctagttggttgtctcccaacaaaggttcaactcagcattaagaagattaatgttgatttgtattgtcccttttgtaatatggcagtggaaactatcactcatactctgcttgagtgtcgttttgccaaaagctgctcgtgcgtctccattgttccgactg

SEQ ID NO: 250166 - DNA, 830 bp, Cannabis indica
aaaaatagacatttactaacttaatttttaaatttaagattattttagtaaatgttatctaaattattcaaatgagtaatatttttttttattttagttttagttttaattttaattttaatcaatattaacatgtaataaaaaaaacaaaaagtattaaaggagaagtggctcgttgttagtccgtcgctgctaataatatcagtttatgtgtctgacaccaatattaatagcgggggtgtcaataatactcatttttagcgattaaatattgtaaatttgtcagcaaattattattgacaaatcccgttgctattaacttttactagtggaatgaggaattattagcagcgaaattttatacttctaataatcataaatattgtaatgtgttatttagtttgagccatgtgtgacaaacaattaaagattttcacgtttatatttagacagaagacaaaaacatttaagcaatgaaatttatatcttatgtatttctcgtgattgatgaatgatgaagtaggtactaccactaaatataaatatatatatatatatatatataagagtatatactacaattagaggtatagaaatatgtaccaaatagataaaagcatgtactatgatagatgcattggaatctaatattaacacgatttatgcctctctcatatcttgctgtgtattggtcagtatgaccgttatttctgttagtggtttaggtgctttaatctgttcagttaggatatttctgttagttaatttttctgttttatttctttttttggttgttatcctctgtcgaggcctgggtatatatatacccc

SEQ ID NO: 250167 - DNA, 501 bp, Cannabis indica
atatattattgtaaacttccttaatttttaatatatatcatgcagtacttaattaagctccaggatcggtcctagacatagttgggctaagcccgtgcctaggatagtctacactttttgagggcccaaaataaaaaataaaaatatttcaatatgcttttatttaagtaaaattaaattattgtaaaacacaaatatttatagtttagttggttggggtgtatcatattacacaatggtatactttgaagatttttcaacctaaggtattcaattcaatcaaatgtgttgatgataaaattttgtgtatgtgtaattattttattttgttgtgatatcggttctatttaatttatgtcctagtatagttggaattgatgttagactatatatatagtatatgtaatatagcatatacaaatgatatgaaatgcggaaaataaaatgtaatcatatcaataatatatgcaataaaaggatcgatgtacctccagccattga

SEQ ID NO: 250168 - DNA, 1165 bp, Cannabis indica
ttgtacttgccttcaagcttggcaagcgatgagtttgaaccaaagtcagcaccaacaacataagactttggatgatgagcttggggagaagcctttcgtagctcgtaaaggatataatatggtgttgatgaaatatatggatccattggtggttattagtcaatatcattgatgaagttgaatcaaagatgccatgttcttcttcatcctccaatgtcacaatatctatactttcatctaacaacctttcttcttgttgctcactctccacgtggctatccataccctcacttgtgatttcatattcaatgatttctcgatcatggatgaattcattctctttcacgatttcattcacttcatgatattcattatttaccaagtaagaatttaatgtagccaaattttgagttaataccacttcaaaaggatcttgatcttcaattgtaggctcattatcttccttgtattcaaataatgacccttcttcattgtaccaacaactctcataactttcatcattggagttattacattctgaatcatgagtcattgaattatcacataaggatctcaccatgtcagttaagcgattaatctctcctggaagtgattgtagaagtgatagtagttgctcctctttttcagtttgttgggatgaatttgggcaataaggtgggtattggtgactccaaccctgaagtgatggatcccaatgccagtcgtaatcaaaatctgccatattattcaacagatttattacatcatagcctctcattaatagaggcgctccagtgacctctgctccataatcaacccagtttcttgtttcatcattaagtccgttataaaagagccacgtaaaacatccacttgagaaagtgggataacatctctctccaagctctttaaatctcctccaagcagaatagaatggttcattgtgttgttgggcaaaatcctcaagatatagcatctggatttatcttgcaggtcaaactcataagtaacacattagtaaaattaaaaaaaaaaataaaactaaattaatactaaaaagataaataaactaaataggtactaaaaagataaaaatttaaaacaaaaaaaaataatactataactgagaagaaaaaccaaattagaacaaaatttaatttttaat

SEQ ID NO: 250169 - DNA, 2177 bp, Cannabis indica
catcactatttatagggctgtgagcttggagaggaattatttctcttctcattacaatggctataagcaaaaagattgcatagtaaatacaaaatacactgatcgtgggatttggacagcttgccatatgtctgtaatctgaaccccaagttataggaattctcttgatgactcacgatgtgaaagattaattcgctaagtgtttgtcgtcctatgcgggttgctgatttcttcgtcttgagcatgcatatgaggtatcctgttcggactgtatcttgcgagcagatacctggagtcgattccacgtgtcaccatcgtgtgatgccacatcagagtgcagaaattgggataacagttctttttccaaaactctttgtttgtccccttcacaaccaaatgttaacataaacatatgatcatcctcaaagatcttgatagggaatcgaccatcccaatgctctgccacctgcctttgaagagtagataaccaaactttctttgagaaactcccttctcaatcttcttatgcattcaattcttcacctctataaagtctttgttaaagtttccatcaacttgttgagcaaaatatttcaccacagatactcgtagaagaattcaaggttgttaactattcttatcacaaaaggaggaactacagtcttcttctccttactagtgagtacgcccataacaaacaaggccatcccccacttatagacatcatcaacttttgtgcaactctcgaaaactttacacagttggccaaaactgatggatggatcatcgttgaagtactccacaatcaaccggttcgaacttcttttctcttcaatctcttgttcagtaggtccaggtaacaagttcaacaccgtcaccaacgcaaacttgacccgactgaatttgcacctcttcttcgcaaaataaaagtgtacctctctggcttctcagatttgatcttgtgcatgaataactgatggatcaatgctctccaaaagtttagtggttttctcttgaagaattgtttgaaagggaattccttcaccttatcccataaatggaattccttagattttgccttaattcttggatagtaataactctgccacgccaagtgacacagcctgggtaatgctctgagactggaattataaggcatggtcgtggtggtcttgaattctggaaaaaaacacaagaaaatataagttaaaaatcttgtagtaaaatatcagaacaatatcaggcatatattggaccaatattggactgatgcaaatgatcaaatataaaaatgctatagcaaccgagccccattgtccacactatcaaccccataattgtcctctatcggacctacaacattctaaaaaataaaatttgcaataaccagcggacataatatcgaacaccacattgtcctataacggacccataagcaatctataaaaaaataaaaagaaatagcaaaagaaaatccaattaacaatcgggtcagccatcgtccctatatcgagcctaatcgggcctaatcccatatcacatgggcatctagtccacatcggcctagcaatgggcctttgtcttcaacatctaacacatatcacaacacacacacatcgggcctcaatcgtccctacatcggacatgcattggacctgacctaaaaactaggtttctcgccaaaaaacatatatatctgaccccaattaaaccctaaatctaatccaaacttaccaaatctaaacataacttagatttcattatacacaaagaaagattcaatctttaacactaaaatcacaaaggaactcagtaaaaaaactaaaaaacataacacaaactcacctttgacatttttgacagtggtggtccgcgcgtcgagggtcgtaggtagggtctcgactttgattgttttagttggtctcgaggagctttgcctaaatgtctcgttggtgggagtgggtctgaggttgggtcgagttggggtctgttgtgggtcgattggagtctgccattggtcgagttggggtccgaggaggggtgcatggatggcggtttgtgaggcgaaggtttctggttcgatggggtctgagaagcaaggatgagcaagagggaaagggagagaatacagagagtttgggtagtttttttttttttttgaaatgtgagggatatta

SEQ ID NO: 250170 - DNA, 900 bp, Cannabis indica
tttaattaaaatttagctaaaaaataaagagagtggttgaagatgttcttagataccaagggtacctaacatcaccatgagattacgcgcattacgagttagttttctataataattattagggtgaatagtggcataagtacccaaagttttaggtttgtaagcggcataaacccaatgattttttttagtgcgataagtacctaaagttttaagtttgtaagcggcataaactcaatgattttttttagtggcataagtacccaatgtttataaaactataattttctttcagtttcatcagtacagactctgttattgtcttaaacatgacacatataagacccaaattttagattatttggtctggacgaaaaatatgtagtatcagttacttccaaatctttttttaataaatttaaaacggagtctatattgacgaaaatagagaaaaattacagttttacaaacattgggtacttatgccactaaaaaaaatcattgggtttatgctgcttacaaactcaaaactttatgtacttatgccgctatttaaatatgtcccctcatggtgttaagtaccattgatgctctctagcaattctctattattgaagatactattatgttacctacaaataaaaattgagaaatttgcggtcaaactccatttagtttagtttgtataaatttaaccctcttacttttttatgtggtaaatctacctgaagttcacttctgtttgaaaatttaaagtttcaattaaattttaccattaaatattaactaggactaccacggtgtatacttatgtacacgtgtcatgtgtttattggtccaagtaatcttaactatttaaactttataaaaattgtttacaaaattaaaatcaataaaaat

SEQ ID NO: 250171 - DNA, 583 bp, Cannabis indica
atgctctaagaaaagaatcttacgagtaaattttgaggcttgatatcccggtgacaaataccaatgcaattgtggatataagcaagtgccctgcaaatctgtacccaaaaaacaaaaatgaaatccaaacactaaccaacatattgtctagcaataaaattaattaatatattccatgatcttaaccgaagaaccaagaacattcagaaaagaaggtttttaatacaaacacaacagaattcaacaaaattacttttatacctgatatgtgtagagtttaacatatatcaggggcattcttaggttaatcctgctataatttctggcaacacggtgaacagtctcggggacatattcaagtacaagattcagttaaagctcttctttgtctgttgttgagaaaaaatagtgctttagtgcgacaatattaggatgatccaacatttgcataatctgcaattccctgttcttgtagcgcttgtcttgaagaactttcttgatggcaacaatgtctccggtttcgatttagcctggagaaagaggtttacattatcatcatcattcaatatctttggcgaaaaaa

SEQ ID NO: 250172 - DNA, 519 bp, Cannabis indica
taacttttttttttaaaaaatatatatataattattgtataatatttattgaaataattctttaaaataagtttatatagaatatataccatatagtaatttttatatataaaattacaaataatatttagtaatataaaattagttgacatattgaattttgtttaattaataattggttacttctttttttcattaaaaaaatataaaaggaactataagtttacttttaattctgaaaattttattcaatgaacaaatctatccacatattaaaatgatatttcgaaagaaaaaaacagactgtaatggtactactgatcttgaggtcaaatgaatagcggtgtagctagattattttcttaaagggtttctttataagttattttagaaatctaccaaactgttctataaaaatatgagaatataatttagtaactaaaatgttaccgatttaatattagtcaaaaaaatttccacttataaaaaaagattccttttaagagtagattattaata

SEQ ID NO: 250173 - DNA, 638 bp, Cannabis indica
atttaaaagtattaacaaaattatataattatttaaaggtattaacaaaattagataatttttttttatataatcttaatttaaatttaaattgaacgttaatttaattaattaatgatagtttatatcaaatttattagttttattgtttaaaatatttaaatttatttatttattttaagaaaattgacataaactaatgtttttggcaaactttttacacatttatatttaaagtattttttttttttttttactatttttatagtatttatagtatttttatagtatttatgtaatgtcatttacaagttggtttctaagatgattgcccttcgattaaagcatgttctaccaaatgttatctctgaaactcaaagtgctttcctacctaatcgacaaatcacagataatgtcttggtggctttcgaaatggtgcatagtctgaagcatagaacacgagggaataaaggttatgctgctttgaaactcgatatgagtaaagcttttgatcgagtcgaatggtcttatatagcagctgtgatgggcaaaatggggtttaatattcgctggatttctcttattatgacttgcctacacacaacttctttttctttcctcattaatggtgaagtcaa

SEQ ID NO: 250174 - DNA, 1296 bp, Cannabis indica
aaatatttatttttaaaaaatgtgataaatagaaaataaaaaagataatattttaagataatatgtattttaacaactataaatgttatcatattaaaaaggttctaaaatttagctagaggacattaaaactaaaaccaaacccactactaacaaagacttattgtgccctatctacatgctgtgaggattgatgagctatagagctaccataaaccattgattatgcctaatcatcacctccataagtgatttctgcaaacctacaccaagctgtctcattgataataacaattaacttcatcctattgaatgatactaattaatacaaaaattattattattggatggtggtgccattctctatgcatagattgccattatttttaaagtatatatcaaaatataaatgttgattggaaactatatatgcaaatcgctggcgccacctatgaaaaataaataaacttcttgttgctattttgaccaatacatgaacctggtttttctaataggactaattatcatcttaatttggaaaaattgaaaagaaaaagactatggtgagatattcttgaacaacgaaaataactttgaataccctacaagaaattaaaagtttgactagtcatgagtggtcctcaacagaatacttccattaccgtaataaaaatgacaatattttgggccttaactatgtaaattaccaaaaaatcctttgtttttacatacatacatactcacatattaatatccaaagcattttttgttttttgtttattttttttttttgaggtaacatacaaagtatttgggtgctttatattgtgcaaatcactttttacagaaaaaaaaaaaattgtgaatgtccatttttaattataataacatactttctaattttaaaaaaaaatataatttctaaattttatattttttgtaattttagtagacatgtaataattttttaaataatttatattttcaaaaataataattcaaattaataattaattgcacacttttgttttagttgaaacaaaacaaaccaaatcattagtattagtaatagtaaacacaatattttttagggcttgtaaacactattttttttttttgacaagaccttgtaaacactattaataaaactcattgttaaaaaaaaataatacatttttaattatgattatgttatacgtcatttattcttttaccaaattttttgatctaatttatttcatattttaataattgagttcatggactattgatatttaattatatgttgaaaatatt

SEQ ID NO: 250175 - DNA, 486 bp, Cannabis indica
ttttatttttaagtatattctgttaaaccaagaaatgccgttaaataggcacttttaatatataaagatataactaatataaacttgtaattagcttagcttattattacctcaccaatgccagaggaggctccagtgatgatgactacttttcccataaggtcttcagaaaagatgggtcgtaaaatggctaaaatgtacttgaagaagagatatggaggcaaaactacgatcaataatgttagggacacaagagggattataatgttcatcattttgttgatgaaatcaatcgtttttgctttgagttgaattgtttcgtcgttttggctatgtaagaaataaatatggttaaaaagagtatgttaggtttagccacgtagtaagtttgcatggcaaggtaactacacgtagatgaaagggtcaacaaaattactagctgtttatccacctgtcgtatttttgcaaatgcttgtttcttttttt

SEQ ID NO: 250176 - DNA, 1217 bp, Cannabis indica
gaatggggagttgattgggggatttggggatagtgggttggcagcaagattagtggaggggggagttattaaccgtgatatgagggagaaattggtggaaggaaatttgaatgagggtgataaggatatacatgggaataatggagaggattgtatcatttataatgatccaaaaaggaaaagaattgggggtaggataggaagtggggtgggcggcccaagtgactttaatgggccgaatggtttgggtttggctaaaggtggattgactattgttgatatggaacaagatggacatgtgttgggaatgggtccaaaaaacgatatgttggcgggttctgggttccaggcccgccattcatcatgatttcgttaagctggaattgccgtgggcttgggaacccacgggccgttcaattccttaaggacttggttgttcaaaagaggcccgacataatttttctatgtgagacattatgtagaaaagatgtagtggaaagagtgagagttacattgggttttgagggttgttttgtggttgaagcccaaggtcatagtggcgggctagctttactttggaaagatcacaagttggccgaattaagggggttctctagaaaccatattgatgtcattatacatgaagatgagtcgcgactttggaggttgacaggcatatatggtgaaccgaaccgtgctttacgaaggaatacttgggatctgttttgttctctgagtttggaaatacatctaccttggtgtttgattggagacatgaacaatcttgggggtcaagatgagaagaggggaggccgaagctatcccatgtggctagtggatgggtttcgtaatgctcttgaccaatgtgggttggttgatttacacttggaaggttatccatttacttgggaaaaaggcaaaggttcaagtaattgggtcgaggaaaggttagacaaggctctagtgtctcattcttggcttcaattattccctttggctaagctatataatgtggagatttcaacttcggatcattgcccaattcttttaatgcccgaagcttacgcttttgggacgcatagtcgaacgtttcgttttgagaatgcttggttgcgtgagcctatgtgcaaggaggtggtgaggagtagttgggaggggttgagtggccgtggcttagtggaaaaaattgaaggttgtggggtggcgttagaagcttg

SEQ ID NO: 250177 - DNA, 1638 bp, Cannabis indica
tttgacatgtagcaaaatacaaaaaagcaaagggtcaattataatgaatattattattattaatatataaattttcttttgaataaattattaataataattttgattgatggtgagggcagaatgggtgtgccagtggcagtgccacaatatgaatgtcatccattcacgtaaactattcttctagaaagagtagatcaattattattattattattattattattattattattattattattattattagctgtatatactatacatatactatagcattggcaggggcgtgtctctttgctccatccaaggcccaagcactcctctaaatactggtgtgcagggctggattgtgtcgtgtcggtccataaaaaataggaaaattatttcctatattatttaattttttttttaaatttgtggtttaagtttctaaagtaatttctgcgataatttctatgtaagttgcaatacaaattttggttgcaatttaagttgtttcgatagttgtaataaggatttctatatagaattccataaataaaaaaaaaaaaaaaaaccgtttagaaatgtaaaaataaaatagctcctaaaaaatatagactctaccgtgctgccaatttttcaaaagtaggttcagtacaatatgtaagcctaacatacatcgcttctccaattagagggatagagaagttaagcactttggaagccgcccacaaaactgtctccttatgactcctaaccaaagccaccatgcacatcgaatcacaaccaactttcatattaaaattgattttggcccaatcatccgggggaggggaccaagcaagagacttagatgtcatcagagaagttaacaaatataaccataatccacgtaacacatatagatagagtcaatataccgtttaatattacatatagaattattatgtaccttatcattatgagctttctagattgtgttgactgtaattgaagcatacaggaatagctcttgaatgttcacacctctagtctttagactcaagagaaatttaacccaatcccacattcgtgcaccagattccaaaactgaaaaaacaccccatgggaaagatctctaaaggtgaaaggcaaagttgcaatagagaaaaatgtgttccatcattttatcactctctccacaaaaaggacaggaaacatcctcaaatatgcaaccttttagccaaaatggagcgaataggtaaagctttagagagaatgctccaccaaagcaccttgtgacgctccaaaatttttgaattccaaattttattccacatattcagagcaacactacagtgaggagcccgattcagggccttgaccaggtaggccgatttagtagagaataaaccatttgactctttagtccaaattcacctgcccgtaccctgacctctaggtttacctcccttgataatgtcatttgtagtttcaggattaaacatagcttggagcttagttaatttccagtctccattttttgttagtaagttcgctactttctccaaaccctccacctgagtgcaattcggttgagggtagaaatcatgaccatgcataatccacggatctccccaggtattaatatctttcccgtctgtagtgatt

SEQ ID NO: 250178 - DNA, 684 bp, Cannabis indica
aattagggctatatatagatttagagtattcttaacaaatattttcaattttaaaaataaaaaactaatttaaaaaatattactaaataccacctttattaccttactttcaattcttatttacggtaccattcaatttaagttgttattagtagagaattttagaaaattaagaccctggaatttgagaagctaataatctagacattggcaagttataacaaatataaagaccaattgtcagataaatggtaaaatcaaaatcccatttgcaaatctacaaacaatattagagccattcatgttaataaattatattttctcaacataaaccagctatgtacactataatttggatacacttacatatacactgtaataattaaacgtctagtcctaccaaaataaaaattgaatgtctagaaagaccacaaaaattaagaaaagaataaacagcaacatataagaaatcaacaaatattttgacatttggatcggcgagacaattataggttagacataagtaatataatagttactatgcgtattaactttattatttttcttaaagttttgttatgatattcttaattttgtatgcaggaccaccttgataattaacaagtcttattttcacaaaagaatttttttttttttttgattgttcattgcaagagctatgta

SEQ ID NO: 250179 - DNA, 847 bp, Cannabis indica
tgtaggtaagggcaaggctagagctgatggaccgtgagcgagccggtgaagattgtactcgggacagcgaggctattttttgtaattagtcgctaggcgacaaatattttgtatagacagtaaacttttgtaaatggttttgtaatcgggatcccgagtattttgtataaatattttacaagtttaattaaaaagaaaaaattttaattaatcacattttccataaacctcgttgattagcaacgagctgcactgtatgtttaaaaatcacgtaatacgcctatggtagttagggtgttacatatatagtgtatacattcgtttattttgtatttttatatacacacatatattttattttatatatataaagctttaacagttggtatcaaaacggattatatatctctgccttaattttatttaattttcgttcatatatatatatgtatatatatacacggtatcggtttttttatttatatatattttatatatatacattcatattcatcaaatcatatatatatacatttttttatttacgtatatatattcatattcatatatatatatataattttatttatatatatatacacttttatattcatatttcataatctatataatctatatgtttacatatatatatacatattcatatttatattcatgtactgtgtgtatacatataattttcatgtatatatgtttatgtataattctcaatgctttcatatttttattgcataaaattgtatgtaatactctttttcatacattaatgatgattttatgcagtatatacattgtatacgagtatatatatacatgaaagttttta

SEQ ID NO: 250180 - DNA, 837 bp, Cannabis indica
ttttagattgtatttgatttaagtatttcttttttttgagtatgtcgaagatgcaatattatagtagtaaaattttattatcaataaaattttaaaaaaataagaataatgaaaaaataaaaaaaaaaatgtacaatttaatataatttttttatgaagataaatttttaattttatgagttaaataataaattaatttaaatttaaaatttaaaataatatttttttaaaaaaaaatagttaatttatatttattttagtttaaaaaataatgttagtaagttgttactttttaaataaattaaaaatgaataacttgaatattaaaaattaaataaataaataagaggaatttatcttattttttttttaaatttaataatattttaattaaatgaataaaatttttactttagtttttagaaaaatattttttaatattcataatactttacaaatatagttaataaaaaatggttaaaaagaatatattatagctttggtatacttacaaatataccataactttgttatatttacaaatataccatagcttttgtgtatttgcaaataaagtatagaacaaaattattctgctctttatttgtaatatacaagagcggtggatatacctttagctattgtcatacataaaacatgaaataatgtgatcatctttcataaaatattcataatattttacaaatatagttaataaaaaatggttagaaaaaaaatctaccatagctttggtatacttataatagcttcgttatatttacaaatatattatagcttttgtatacttgcaaataaagtttagaacaaaattgtttt

SEQ ID NO: 250181 - DNA, 863 bp, Cannabis indica
ttaattttacataaataaatttacaaaatacatatatatattttattaagatgtaattattcttatatagagacatactttgttaatacgggacttaaaatatgtataactaattacaatttagagattattcttatttataacaggcctaaatcagaacttaatttttttataataaattagaagttattcttgaatagagtattcttaaataaaatgatgattgcaagtgagtttgcaagtgagtaattgaataacttcaacctaaccaaacaaatttattacagctttgggttcgttgtaaagtaggcctaatgaggcccatcaagttatattgtaacacatgcactatttcagtgttgccgcgtgtaagtgtgggaagtgactaattacttatcatcatcaacatgggaccaaattgcatgttacttgaacttaaattgggccgacaatgggcacgttctggcccacaaagagaagtaacccaaacaaatgaacattttttggctccttaaatttaggacacaaaaaattattaataataataattaaaaaaagttttatttagattggagtcatattcaaatcgatccctatgaattaattcatctttgacaaaattgtttcctcatacatgtgctaactgaaaaggcccccactctccactctccaaagcaaaacaaattaaaagaagaataacaaagaaaaaaaatatattaatttaattaggttatatatattttttcaaagtagtttacttaataacagtatacgaaatttgtcggtaagatttagatgtttatcgatttgggaattattttaaaaaaatcaaaaaaaaaaaaaaactaaaaaaattaataaaa

SEQ ID NO: 250182 - DNA, 606 bp, Cannabis indica
atatttgtatttttatgaaattaaaaataataatttcaaccaataaaattagagaattagaagttatttttagaaactaatacttatattgttgaaattactactttataatattcccaatttataaatctacaataatattgaagaaccttataccttgatttttagtatatataccatgatcttaattgctgggattgtaacaaccgatccatcaagttctctaaaatctcaagtattatttagtttcttatttataagtaatgcttaagtttttttttaaatcttattcatgaccttgggaaaagtttattttttcactcagggcaattaaatctagtattatgtagtaattaattgccacctctcttctctagcattctgtagtaatggattgtcaatcttataatcaagttaaattgaagaaccaatgaataacaagagaagagattttctaaatttgaggatgcaaagctagttcttttaattaattcaaggtctgattttacaaaaattcctcagaaaaaattaattttaaaaactagttgatttcttatgataggatattattttttgaagggtgtagtctttattattattattatt

SEQ ID NO: 250183 - DNA, 1031 bp, Cannabis indica
aaaaaaaaattagcaggtacgagttgacctgccccttttaggctaacacgtatccgcctgccaaacagcatgttaaaactcaacccaacccaatttttacaggttttttatgggcggtttccatgtgggcaaattctaatgggttgggcggttcccacggtttagtggtttttatgttacggcctaaaattgagggtactaactatcaaacctatgagttatgcgatctatacaaaaattatcctaggtgtaaaagttatactggctatccttaaaggttactagcaaggtacgtgcggtcctaagtacagttggtgaccatccacattgattacctcaggatgcttcttcttaagcttcctgagggattactttcttgagatagtgggtgcaagccacataatcattgtcttcctcgtcgactggaactgagactttctgccacttagaatattttggattcttgtagttttaggtgaattgatcagaaccaaggaggttaacggtcctcagattggcctcgtttagtaggaaatcagctgaccgcaatcctaagggaagacttaacaaaatttaatgccgctcatccatcttgagggtagggatcagccttctaatagttgttgtcaacacaataagtgaaatgagtaagggaattcaaatttataaatccaaaaactcaaaaccaagcttttgagaaagaaatgagacttacgtgtaatgcaaatgcggttgtgttgatgggggagagaccagtagtccagaagaaatcatccttgaactcggtcttatttggtaatctcacaatgataatgcgatcacttgtgtgagtaccgaggtaataaaacctcctaaacaccgcttccttttggtaacaacttttccaaagtaaaatacgcaatttctgtaacgctctaatgctaaggcacactacagtgctttttcaattacagtgcaatctttgctaatcaaagaattttcttgaaaaacgtgtccaattaaaaattatatattaattaataaacttaata

SEQ ID NO: 250184 - DNA, 768 bp, Cannabis indica
tgagggtggacaagatcccatggtagctgaaaggtggttaaggcagataaaaaaatttcaacacaataggaagacctgaggaatatcaagttacttttgctatgtccaagttagagggcggtgcagcaaattggtgggagaccttgtccaggacaatggaaactgatgggatgacttggcaagatttttgagaaagtttttagggagcaatattttagtccatctcataggagggttctgataggagtattcgatggtttaagacaagggggtacgattgtgaatgagttttacatgaagtttgtagagctatcctcttatgcatatcctggtgttgttgaccaaccattggtgattgaacagttcatgggtcgtttgaggcatgcaatacgtagcccaatagcccctttgacctttcacaacctgactaagtgtgtgacaatagccttgcgaactgaggctcgtgtagaagggaatgagaagaagaacacaagcagaggaaaaggaaatgatcgaaagatgaccaagaagaatcaaggacactggtcccgaggacaacaatttagtgtgggtagcactagtagtggttcatctggaaagagtcgtagcggactatacggggtgcttcagttgtggtcaacaaggtcataagaagaaagattgcccacaacgacaacaaagatttcaagcatctcacggaggacccatagggagctatgtagagtctactccttttcatggacagcctaggacaaaccagtctcagtc

SEQ ID NO: 250185 - DNA, 622 bp, Cannabis indica
accaaacaagtccgggaaaatgaaatgacaaaagcgtacctgtttataggcatcggacagccggaaagtccaggcatgatcgatgaggaacacgtctgattccttagccatggcgtccgatgtgaggacgagcttccttcgaggatcttcctcgcatggctcgatttggaagaatgagccaccatcgaatgtctccgacgacagcttctcaaacagtttcccataaagggaagatggcaatcccgaggctgccagaaggataccatgaacttttacgaagtcttcgatggtttcaattttcccgacggtggttgacattttcggcggcgctggaggctcgagctcagtgtccgtgtcagtgagagttgggagcttggcgcgcgtgcattgagatagaagaaccttcgaggcctttctttttcttttgaaagttaaattgggcctcagcccacatgatcggaactaacgaagtaagctgggccaacacaataataggcctagccacaatgttggccaaatacgggccttatctatgtaacccaatcaaatcaaatagaaataatttgtagggaaatttacatatatactgtttttgcaccaaaattttacaaaaatactggga

SEQ ID NO: 250186 - DNA, 689 bp, Cannabis indica
gctctagaaattttccttgagcagactagtacaaccaggtatctaaatggcatggaatttctcttaaagtttgattcctccaggatcctattcacttcaacatcagccattcccaagcaatatatggctgttttctgatcatttggcgttagcaccgaagtagatgagaacaattttaggcctttaagcaaaagcattatggatatgaagtcaccattgtagaaaacaagcaagtcatccgcaaagcataagtgattcaacttgatttgtccacatctatcatgaaatttaaatccaggccactctcctacttttctaaaaattctcgagagatactccattctgaatacaaaaagtagtggggacatggggtcaccctgtcttagtcctctcctagtattaaaaaagccacacatagagccattcaacagaaaagaaaatttaggcgtgcaaatacattccaggataagagaaataaacttaagggaagccaagtgccttcatcatctcttctatgaatccccattctatagtgtcatacgccttccttagatcaatctgatcatgcaagtcggtttgcaatttttcctcccatatagtcttaccaagtcttggcacactagcacattatgcgcaatgaatctccaatgtgtgaagcctccttggttcgcagcaatgagatcaggaag

SEQ ID NO: 250187 - DNA, 613 bp, Cannabis indica
gacatttactaacatagttttatgatttagggttttttgctctaattttttaaaatgaggacatatactaacatagtcctatgatttggggccatttgctataataacccatatttatacagctcaataaaaaaaattcacaaaaatactttttgctcttaccattcagtactacgaacaaccttcttcaacaatgacaccttccagcaactaaaccagtaggccaaccaaaaagaaaccaagccagacaaagaaccaccattaattccggcaactttacctgaaaagaagaccagaatcaatccaaacacatgctgttcatattgatgaaaaaagtgtagaaaaactagttcgaaactaaaattcaaccttaaattttggttttattcgcagaaaactaatcctcctaatatcaaattttaaattcgtaaaaagtaaatctctaacaaatagatttggagctcccaatcaatccaaatcagatataatctaaaaaaatatcaatactacagctaaaagtttatcccattctattttcattgttttccagattttgaatggtgaatttgttcctaataaattacgaataaaatagtaaattcacatgtagata

SEQ ID NO: 250188 - DNA, 1363 bp, Cannabis indica
cgccatagccggactgctgctgaggaggaatacgagaggatggtccttgtaacgaatacgaatcgtgacgattctataattgaggccaggacggtggaggatgccattgctcacatgaccgtcgctgatagcttacctcctgatcgccatccggagaggaggctcaaggcttcgtttaaggtgcgtgcgccttcctgttatcattgcacttctattgattttgatttgtggtttttttgtttacatttttttgacattagagcctcattagaattttgtggagttctcttgactgaattgtgttctttttgcatggttgtgatattttctcagagatcactactctttgttcgacgttaacttttgtattgaaatcgcattgtgaaagtacagattgtcatattcatctatatctgaattaacattttgaataagagaagtgaaattaggtgtgaaaaattaaaaatccattatgttaactattgccacttgctgaattaaatgtttcctccagtgattgtggtatagcattagagattttattgttatggacgtgaatgttaagttgtactctctgcttgatttcggccattttattggtgctagcaagcccgtctcttacttgtaattgtgtgtctaagtttgtaatttgtaatataagtagacatcctttttgaacggaatgtatactgaagtctgtagctctagctctagtgggtgatgctgatatcacttcagtattgtacagtaacaacatacccaaaaattgttgttgtaattgttcttgatacttcttgtgatggatgttttactattctcacacgtgagttggttacaagttgactctccgattgattgcagttcctttcctttggatgattgctgataaatttgtgttagcaagttgttgagaaatttatttgtatgtagtatgcttctttaatgtctccactaatgatgatttcctgcaatattaataggcttttgaggacgttgagctccccaggctgaaggaggaaaaaccaggccttactcacaatcaatacaaagatatgatatggaagctatggaagaaatctcctgacaatccccttaaccaggtacattaagacttatccttgtaggcttgtaaactgtcgtggtttatagtcgaacatttctttttcttttttgttttggctgatctcaaattatatgtagcctttacccctcttgaagcaaagattttctataccaccttcccattggcatgttgatctgtcttttcttactaaaagtcttttacatttgcaggttgctgagtgatgacaattacgtttgtactttatgacgattaaggggtctttctcctggattatggtca

SEQ ID NO: 250189 - DNA, 923 bp, Cannabis indica
attaagctcagggtcctatttttactattttagaaaatacagggtccattttgtcatttaacaaaacacagggttcaatctgtaacttttgcaaaacacagggtccaaaatggtatttacccttatttttctcctataatttgagacatcaaccaaattcattcctctaggctaaactaaacactagacaacttcaaataaagatttagtaaaaaagtaactaaaataagacttttgcaatagtttatggaccaagtctagtcattttattagtaatatactaggacactcaaaattcagcaataacattctgattccactttgaattttatcagaagagtggtcaaaaatttaataccagataatttattaataggtaagtggatacctaatccaattgaataataacaaatattatctcatttaaaataaaaagttaccatttcaaaaaataaataaataaaaagttaccacctacacagaaaaaaaaatatagatgatatattaagtaatttattgttattattagtaatttaatacgtaggtatgtgtctcgatccatcactaattaattaacatttttatatatgaattattatacggtgagataattgatgagcatctaataatattttttatagctagctagctactatatagcttcatttctcatataaatatattactatctatacacttgccaatataggtatatatatcatcccaaaaaaacataaatatatattaatttatatatttatatatatattattagatgtagttataatattgcatttatattttgactataattaggaatttttttccccgaactttgacataaacgaaatcataccccctgaacttttaaggtcgttaaaaatgctccctgaactattgagattgttaaatttaaggttttt

SEQ ID NO: 250190 - DNA, 535 bp, Cannabis indica
agatcctggtaaaaaaaattccaacacgaagttgggattttgagatgtttcgggatatgttcaatgatcgggatgctaatctgactctaagcatacctttaagcttttatgcttcctttgatttctgaacctggtctaatgaaagctctggccaattctctgtcaaaagtgcataccgtattcttcaagaatccaaagacccaagaatcggtagtaacaattctggcttctggcacaagctatggcaattgaagatcccaccaaaggttagaaattttctctggcgcgctgcttctgggactcttctgacttgtgtcaatctcagaactaagcatgttgatatcccttcactttgccctgtctgtcatgcttcaccagagacaatctcccacatccttctctcgtgcagtttttctctttcttgttggaatcacatgggtttaccagctggggtctctcttgatctctcttttgctagctggttggatagtctctttgactgtcttgatgacgaccgtgtttgttccctctctat

SEQ ID NO: 250191 - DNA, 1108 bp, Cannabis indica
ctggcgacattgatcctccctttcatttcagcatagctaagatcgatgacaagtcttggtttgtgattttacagacttgtggcgaagaattgttcgatctggtacgtaactggttattttttgttttgtctgttattattttgtttagtttttttgtcttttcaattttaactggttattgtttttatttatggtgtgtagcatctgaatgtgacactctattatcttaggaagagcatcttattcgatgccagtgttaataagagagtgatgaccacatgcacgtattttgatgcaactattaaaggagtgcatgctgattttatcaaggtcaaacgtgatctgaatgtcatcaggtacgacaacatggtcaccgattacattctggggcaatataatttttgtttccagccttggatcagtgttgatgatgttgtcggtccgtgtcatgttggtcttcaacaacattggatatttcttcacttcagcattttaaggaggaagatcttcgtattcaattccatgaagaataaaaagacaaatcaaaagaagatcttgcctgatctccttgcgtactgtgagttaccgccatacttccttgatttcttaaatttttatgatggtaggaacgacattagtttggagtcaggcccttatgctattccgaaggatactccaattgcatatgagtttgtggacaagctccctcctcaaagcaaaaggtaaataactagttattttttatcttatgacttttgtgattttttattgtttatttttttgcttaaaaaactggttatgtatttgttaattatttttgttttgtgttcagtgattgtggtgtatttgtgattaagtatgctgatctattcatctagggcaagattagtgagatttctcctaatatggatgagatgattacgcactatagggatgacctcgctgtgacattgtataactatgcccagaagaagattaatgaatgatattatattgaagataggccaaagggaaagaagtccaagaagaagaagttagattcttgttaaatatttgtattattttttggacagatacaatgtttatagttttgtttagtgtttttttt

SEQ ID NO: 250192 - DNA, 691 bp, Cannabis indica
ggtacgtctagttgatgtcccaacgcaattttgacccatttgcactaagactgtcctggaaattgaaatcctagttgggagtgtcaacttgggcgctacgtgaaaccctaggtgcccaagttagctttcagggtataggttcgtgtaattttagctctcaaggcttggatttaattgatccatgtctctatgatacagaatactaaaagatagtgagttggattcaagctattgaagtctgaacttccatcctgaagctcctagagtcaacctaggctcagggctagggtcccctcccaagtcgactgctatgactaaggtctacttaacttcgtgatgtcatctttcttgccacatgtcaaacattgatgtccacatcaccagagaaagtttttggcttagcatttactccccaagttaacttcatacttgtgtggagttgacttgatgacgtaaaccgagcctgtttctcttgaaactaccatatggacatcaattttgacattcataggaaagtgtctttgttcttcaagcattcccaataaaattaggactttggattctcttgttttgtccttgggaatttttaaaaattaattaacgaagaaaaagagaatttttttttcctcacttatcttttatctttttctgtgaaaaattgaaattttcttgtatttattatggcattagg

SEQ ID NO: 250193 - DNA, 1718 bp, Cannabis indica
actataagtggaatatggtgatggcaactggtgagatacaataattaattgacaacgattttaaataattgagatataattcataatattgattgcgggaaagagtgtttacttaaataataataataataataataatctaatttttctttatactaccctatttattttattttatattaatacttttttaatacagaaatttaaaattctatgtatacattattcatataaattttaaatttttaataaataaaatagaatttttaaaattttatttttaataaataattcgatggtataattttaatattattatatattagattaattttttaagttattatttattaatttcttaagtaattttttgttaaattattatactaaaataaaattaaaatagtcgcgcgaagagcggctatattgcctaattaaaatataaaaagaataaataaattaaaacctattaatatgattatataattgacttataaattaaataaaatcaaaataattaacggaggaagacattacatgatatgcggcaatattcgaatactcaagattcacaagggtcaccatcaccaaccaaagcccaactaccatatcaatcgtctccacttcatggaaaaactgagaattggtaaaacactttggacattggagccaaattgtctcatattagaagtttcgaatccacagtattctgaaatgtcatatgtatcatatccctaattcaaataaaataattcattctaacatgattacaatttccaaaataaaacttcataaacgttaaacttaaaaaagaattcaaataccattttggaccctgtgttttgcaaaagttatcaattggaccctctgttttgttaaataacaaaatggaccctgtattttctaaaatggtacaaataggaccctgaattgatttttttatcaaaataaaatttaattataatccgatctaaaagtattatcacaaaattgtttatattttctgtatctgttcgtattaggaattgttttcaagttgattatattaaaaaaaaaaattgtcaaaaattaagctcagggtcctatttttactattttggaaaatacagggttcattttgtcatttaacaaaacacagggtccaatcagtaacttttacaaaacacagggtccaaaatagtatttacccaaaaacttatataactcaaaaaactaataagaccaacccaataaaatgaaagtaaagagataatgaaaacttatgtcttactatagcgtgaataagtttaaacttgaagtgtcgtccaacaaaaattcctgtaattatgatctgatacatcgccttcgtatggaaccccaaaagcaaaagatcacatttgtttctccaaaatggttacaaaatttgatacccattcttccgtcaccagcgcctgtgactcttcttcctcctcctctatcgatactctcttacacgcacttcatctgcttctgtacatctttctctggacaccgcgtctccgcctgaagtagaggcggagcacgacaggcgaagggtggttggactcattacacatggtgtgatattatacaaccatataatgtagtatttaaactgtacttttaatttattttcattcccaaaatatccttcaataaaaataaaaaaaaaattaccccctctctcccaccacccacctaaactagctagaccaccattc

SEQ ID NO: 250194 - DNA, 673 bp, Cannabis indica
tccatacataaatacccattaaaagcataccctaataatataatacttgatagttatattatagaccattgatacctattaacatttatctttttgtaaaaacaaatcaaccacaagagtaacaaacaacccaaaatttattttaaaaattgttaatgaatagtctcctaaaaactcttaaatcaactattgaaattctcagatatcttttttattaattgttaaaaaataggattatagtaaataattttttaaataacgagaactggtaaagtttataaggtttcttagaattcttggtagagcatggttttgggcctacctatacaagtgtgtttgtttttgataggacaattatagtaaatgattctaaattataggattatgttaataaatgtctttattttaaaacttatggaaaaatgacccttttagactatttattatttatattgtcttttgccacataaataaatcaatattttttttttagaattagaagcaacttacttaaagattatgtcatatctatattagttttgttaatttttttttatttgaaaattatgtcgattttttggaaaatattttatgagctgttgtgggttgttggtatatagattttgttgtacagtaaatttttgttttgttgtatgatatattattattttta

SEQ ID NO: 250195 - DNA, 554 bp, Cannabis indica
actacattcaaagtgttgtcattaccgtattttacttgtagtcactgttgtattcaaaacatttgtcatcatcgtattttacttgtagtcactattatattcaaagcatatgttattattgtatctcctttatgcatccaagctaatcaaatgtaaataattatataagttcactttcaaataatgcgtatttaaaaaattagagtatctttataaatttacactctaaattttatagacttgcataaatctttccatgaaagttagacttaataaataaatgcaaaaaaaaaaatagataagaagacaacaaagaataacctcatcaaaccgctcaaaccgctcacaccacaccgcacccaaaaaaatatgcggtttgaaattctttgcggtgtggtgcagtcgcggttgaaattttctaagagtggattcaacgaagaattaataagtaggaatttacttggtaaatttggttcacttattggaagctcagcatatagatccatggtccccattctagttgagaacattctgcttgtaagactcattaattg

SEQ ID NO: 250196 - DNA, 721 bp, Cannabis indica
gggaagagcctattctctataagaattgtgctgttcagattatcggaagatgtgtgacggaagaggagatgttctctattttaactcagtgccataacttgcaatgcggaggacattttagtggaaatcgtactgctgcaaaggtcttacaaagtggattcttttggcctactttatttaaagatgctcaccaatttgtccaagcatgtgatcgatgtcaacgaactggaaatatctcgagaaggaatgagatgcctttgactggaatattggaagtggaactatttgatttgtggggcattaatttcatgggacctttcccgtcatcatacaataacacgtacatattggtagctgtggattatctctccaaatgggtagaagcagcagaaacacacctgaatgacggtaaaacaatgctaaactttcttcagaagaatagtttcacccggtgtggaactccgagagcaattataagcgatgaaggaagccattttttcaacaagcaatttgaagctctacttgcaagatatggaattcgtcatagaactgcactccattatcatcctcagagtaatggtgtaacaccctaactagtataggcgtattacgtgatttttcgcctagcgactagttacaaaaatagtctcgctgtcccgatgatcgtacgctccaggcctaaccgccccgacatgtacaatcttcaccggctcgctcacgg

SEQ ID NO: 250197 - DNA, 6614 bp, Cannabis indica
tatgttatttttagtattaattttagatatagttttaatttagttttaatcttgtttgaagcaatttggaagcaattcggaagcaatttagagggaaaaaggagtacgaatttcagagaccaaagtcaatactggaggcattctgtagagagtgttcagcattattttattctctatcttcttctctttcttaaagtttttttttttagagcaaagggtgaatttaattaaatgaaaaaaacatagttgggaatcacaacaggggacccctcccttagtttgaaatcatgaacaagatcattacatctaacagactttgccaacttatcagcatatatattatctgatctcttgaaatgcagtaaagtacacttttggaagtcctcaagcagactccatatcttagtcgccatcgtcctggttttccagcaaggaggtaatctcctcattatcaaggcttgcaccagcagcaatgcatcagaagcaatggctatagaacggaagccacattccctactcaattgtaaagcccagaaaattgcagaggcttctgcctccattgctgaggctgcttctatcctcttagcagaccacaaccatttccccgattgcctgtcctggcaccccactgcaattccagctttcccctctttccaagaggcatctgtgatcaataggccctgagtatcactaggaatttaaccaaactccggctgttgggatcgtccgcccatggtctgccccctgcgcactccgttgagcagagagaaggtcatccattctttgcaacattttgaatcttgcctgcattatatcaactttgttactcttgaagatggctgaattcctagagtaccaaattgtatcaaacaagcacccaacaaacgtgaaaaagttcactcggtcttctcccttgagctgcactccactttcacacacaatatcactcaatccttgttgccccgaatccctgctccccactgggaaaggacctgaaaaccataaagctctagcgaaagggcaatcccagaataaatgcttgatggattccatttcactatcacacaaactacatcctttgtccgtgagaaagtttaactttcccttaacaggaatagctccactgaacactctccaaagaatcatggagaccctaggatgcaaattaccatcccaaattgtagcccactgcttgttcatttggcctcctactaactccattgcttccgcatatgctctttttgtcgtgaacatcccatcctgagcattcttccaaatgagcatatcattacaatgaataggaagtctattgagtttcccaatcaattcccccacatgagggccgaacatatcaataagcatttcatggttccactcgtttccattcacggatatatcagccaccgttttcaaggaagggaatcgtcccctaattccttcaaggagctctctgaattctgtgaagctcagccatggtacccacggttgtgaccagatgtcaatcgtgtctcccctccctggaatggtagttacagcagagcgaagtatgcctcttgattgcagaattcccctccacacaggggagtcacttccacggggctcaacactccagaaggattggcttctacagtatttctccttaaagcattgcacccaaggcttgccactattgctagccaccatccacgccaatttagcgagcagcgcttggtttgtatcctcaagtcgccgaaagcctaaaccgccaagacgtttcggcctacatatattgtcccagctcaccgttgcagtaaatctcccttttgagacatcccccgtccaccaatattttctgatcaaggcatctaactccctacaagtagagagaggcaccttacaagtgctcatggtgtatataggcagactcaaagctacggattgaatgagagtagctcttccagcaaatgacaaaagtttgagtttccacccttccaatctcttcatgagattctctttgagtctatggtaatcctctcttttccttcgcttgaagacaaacgggttccccaagtgagtttcagtcccattacactgctggactttcaacaaatcaagaatagcctttctcctcggagcctccaagtttggagagaataaaatacttgatttggccttactacacaattgtcccgaccatgcttcatacatgtctaagcacctcattatggccttagcattaccttcatttgctcgagcaaaaagaattgtgtcgtctgcaaacattaaatggcttatctgaggtgctgatcgggctatcttgataccttgcaactgtccctccatttgcgccttattgagcagttttgcaagtacatcatggcagaggaggaacaaaaagggggagagggggtccccttgtctcagccccctctttgggtaaattttcctttgcggaaacccattaatcaaaaccgagtatgataccgttgtcacacatttcattatcaatctgcagttgtgctcatcaaaaccgtttgcctgtagaactttagctagaaaactccattctagacgatcatatgccttgagcatatcgagtttaatcgccatcaaaccacccttcccctttttttcttctaatggtttgtactaactcttgagtaagaatggatgattctgcaatccatcttcctggaatgaaagcggactgcaccggagacactaatttatccatgactgacctcaatctcgtggccatgatctttgcgattattttatacccgaagttgcacaaactgattggccgaaacttatctaccgactccggcttcagaactttggggattaaacaaatatgggtgaagtttaaggatggatctaatactccttgtgaaaagaataattgaaccatttgaatcaccgcttcccccacaactttccaatgctttcgataaaaacaccccgggaaaccatcgggtccaggagacttaagagggtggagatttgctacagcattctcgatctcttcaaccagaggaactttccctaattcaccattttcctctcgtgtaatgactggctggagaagttcttccaagcattcgtcaaaatgtgggttacaagaagcgtataattcttcgaaaaaactgagaaacacccctgccacttccttctcctcatacacccaattcccttccttgttcctaatttcttgaattttgtttctacgctgtcgaataacagtggaggcatggaaaaacttcgtattccgatctcccaagttaagccagttctccttcgatcgctgcttccacatgctttctttccttacccataattcacgaactctgtttctcaactgttcttcttcataagctagatttggagagatgctttgattttgtatccaagccaatttaccttccaacaccttgatttctttgtcgcaattaccaaaagtcttaatcttccaacattggagggctctatgagtccttttacacctttgagttacagagtcttctcttgcacccggtctgcaacgccatgcctcctgaaccacttcttgacatgtgggatctctactccatgcatcaaagtacctgaagggtctatattttttccttctatcattgccagtctccacaactatataaccatgatccgatacagaaatggggtgatttacaacctccgcatactggtaatccatcacccaatcatgagacgctatagccctatcaagcctttcacgggtaagatccccactaaagcgattattctgccatgtaaagttacatcccttaaacccaaggtcaactcctcccgagtttctcaaaaattctcgtaggtatctcgtgtctttatcagtaatctttcgaccaccaattttctcttccggatccagcaaggcgttaaggtcacccaccatcagccaaggcttatcaaaattcgacacctctagagataacttctcccagaaagcccttctctcattctcatagggtgtaccatagacagccataagaatccacccaattcttttcccaggatcccacacattagcaataaacacactattatccaccttccttactgagattttaatctcatcattccacagcaaagcatatcctcttgcaatgcctaccgccggaacaacaatatagttcactaatcccatcaaattacttatcttctttattccttcctcattacatttggtttccatgaggaaaacacactcagatctgtgtttttgattccaagcaaagagcgcttgggctgccggggccctgagcacaccccgacaattccacgacaggatcttcatggcgaagtggggggcttgataagggccgcctcctcgcccattttgaagctttgaatttcctcaatagcaacttccaccaattggttatcctccatcgctctaccaccctccttatgctttgattcatcttttaaattaaatgatattggagtattcacctgattatgccctcttcctgttgattttctcctccccaggcttccacacttgcgttttccaggtctgaacttcgaagtagagctactgctctcacctactttactcccagccgagtagttcgcaacttccaagcatgggagcgtcgactctgaaccttcgtgtgttgagctcttcacaattggaattacccagtctgttgccttcctcttcttctgacccgataagctaggtccatttgaagcaagggtaatttcattgcaagaaattacttgttgggccgattcttccaaagttttatttgggtccaccacctcatttaccacttccaccaggcctttgttattgggccactccacaacgatgggctcaggaaaacaatgaggctttctagacttgcacacctcttcatgtggtatttctaccatttgatctcttgtgggccctatatcagccataaaactcattataataccttcatctctttttgcattgtttattctattcatggggtgggcccgaggcctgggtcccttcattcccccatgcaacgtactttcttttctcaaataggagcaaccatccaagcattgtttttcagccaccttcttttgcttctggactttccctgctgagccaccgtcccctttgctgttggtctgcttcctaacgttcacctgcagcttagtaccttgctctgccactaaggatgagtcattgtcaccttccgaaattacattcttgcccttatcagtcaatgggctcgccggtcctttcctcttttgcaggaacttcggtcgtcttctccgaagttgaggaagggacgtatcgaaacagttccgaatagggactcccaccttaatccatgccccataaagaggcaccgctttgccaaccggaggaaaggcatactcagtaggattttcacacttgaaattgagatgggctaacataccacagttaaaacaaatggcagggagcttatgatacttaaattgtatccattccttcctatctctggatatatttaaataaaaacctgctaccaacttttggtcaattcgcaaatctaccaaaaatttaagaaagcctcttttcgcgattgtgtctctcgctgcccgatcaaaatcaatatacactccaacctttctcgctattacatttcccacgttaggtatggagtaggcaggccatgtgcttctacccagtacctagctaccgccatattcacaccttgccattcaccattgcttggccagtttctgatgtttaacagcgcgccattcactagccatggtctctgtttaaggataaaagccttatcttcctcattatcaaagaatataccccaaataccatctctggcattcaaagttttcaacttccagttccctttcaatctccaaataccacccaaaacttccttcactcggttccgtgataggcttcttcttccaaaaactttcgcgagtatccctttcttagtaatctccgcactgagttcgaagtctgcttccagctctatggacatcgaatccagaaattgacgtctcacctcttccatttctgaatcatcgccctctccgtcctcatctgggatttcatttgattccatttgagggggttcctctaccatctccccttcagcagtcgcacccatggcctcttcttctcctagatcccgcgagggagtaccttctttattcccctcatacagccctttgcctttcccgtcctccatctccagtgacaacttctcgcaatctcagaaaaaggataccgattatatccactaagaaaccttagaatagttgaaagctcaacatctcacaacggagtaaaatctatattggaatagtataaagctaattcatagtaaaaagagtgagtgtgtattgtcagacttgttcatgttatgtgggacttgaaaaggtaaaaaatttcccaaaagaaacaccactcattctcaaacccataaataataataataataattaaaaaacaaaatactcataatttatcccacattagatttataaaatctaccacaatagactcaaaagaaaagattcctcttccaccttctttctttcttcccttgtcggtagccacacaaacacaagtattctctttcttaaagttaata

SEQ ID NO: 250198 - DNA, 604 bp, Cannabis indica
tcaaccgacttcacctatatatatttatattaattgtttattatatatgtacagtatatcataaaatttataaataaaaacttttgaaaatttaatgttttaatatcttagttaataatattcaaaaaaaccctctaacaacctattttttattttgttttgtagagtaccgttaaaattggtcacaatagaaagagacagtccaaactaataaacgaaaaggaacaatttaaggtgtaacaccacaagagataatataccattaaataaataatataggaaactgttgacaactaattagctctacatgattggtacggtattcgactggttattatagtactaatagtctaatattccaaataaatagtgagacttcagttaattttgtaagccttataattagaccactcacgtaggtccacgatccatttccatggtaaactatacccgtggaaggtaaaggtatttttgttgtacaaacaaagtgacgtttatatattattaatagtacccaaacaaaaccttacataatttgatcacatgcatatgttgtgtaatttattgcaacttggtgtggatactggccggatagggacatata

SEQ ID NO: 250199 - DNA, 713 bp, Cannabis indica
ccacttgtcagcaggagatcagccacacactgattatctggtatcacattaccatttggtttcgagatgaaacctttacaatgagaaatccaaggatccctccaaataccagtatctctaccatttgccaccaatttacaagccccttttctcaaaattacattggctttcacaacatttttctaaaaccaagaatcagagtctttatatctgcaactgagaaaactcttcccttttaagtactttgcttccaaaatcttacagcaaaacgattgacacccattcagaattttccacccccacttggccaaaaaagcgaggttcatttcttttgtttttcaaaatcctagcccattaagagatttaggaagacaaagtttatcccaagctctgagatgaaggccacggtttcctttctcgaagccccactaaaaatctcgaaccaaaccatcgattctattaacgaggcgattagagagttttgtagtttgcatagcatatataggcagagacaaatccactgattttatgagggtagctcgtcccgccttagacaaagtctttgccttccagccttgcagttgagaagtgaggttgtcaatgttgggttttgtgccctaaataaaactcatttcaatataatcagaattactaattaataaagatcagaaataacattttgtgttgcatggttcacataatttatttcatga

SEQ ID NO: 250200 - DNA, 1817 bp, Cannabis indica
tgatgttgtaagcataacgaatatcccgtagaaaaaaaaatattctgacatatattttcagacgtagaagttgactaagagattgtaacagaaagttgacggtagcacttctcacaaaataaataatataattttttgttaggtttgaataaaactcagctgctatgtagtgatgcacatgtcatgataatatggcatatttggtttacttcaaattgcagcaattaaaactgtcttgactgaacgaaagaaatataaatctatgatgaatacaaagaagaaaagagaataaggaatggaaaagacccgttaagggtaatttggtaatttcaagcattgccagcccatgagttgaaattcaataattacattgatgtaagcatagccctctccctcccctgaaagagaagcaaaaatgaacgagctccacgaggggtcaacaaaataaaatgacaattttaccccttttattatgtgattgcaaaattaacacacccatccaaaaacaccaaatatctgtcaaaaccatgatgtttcacgttaaagccactcataacccatgagggttttgaggctggctttggcctttgcccactcaaacaatacaattcattcctcaattactaataataaaactcacacacccttaatttaagccacaaaaaacacacacaataaaattacttgtgattattatgattacaataacggagaagaaaacacccttaatgatgcaagttatggaaagaaatgttacaagctttttgacaagtcatactaataataacaatatttggattaatatggtaacatatcataacataacataaactcttttctttatttggttttgttcaaaccattttaccagcttgataaagatttgaataacttgtatccaaaatgatatttttgggttcccattttgcccctatacttgtatatctttgatgtgacttattagatacaacacaagattatactcgttgcgaaatttgactaagaaaaaacccatgagagacattatggtaagagtaaagagagaagaagaaagaaggttgtttttttttttatgataattgccaaacagttcccaacacacaagaaaaatataaataataaagaaagaagaaaaagcattaataaaaacaaaatagtattgattatcattattatgtgtgtgttgtattgtataatattattattatatatatatatttatatgtgtgtggaagagaagaggtgaggtgatgatggttcgaacccaatccaaaccatcattgcgaatcttggaacggcctagcccaccatcatgcaagccctagccataagtcccataattgtccctctcttacccataatgtctcattttattcccaaaatacccctaacctctctgccaaagcccaaaaaaaccatcatcattcacatgacgccatatccaccatcacacaaccaaatacaactaaacaaataaattctttttttctttttttttaattaattttatttctcttacatttattttttctattctaattttaaataaaaataaaataaaataagagtcttaaccggccgccttccatgcttacacttgcatgattgttgtgtcagagtgagagaggcatcgtcccctcctcatgagcttcctcttgttttgcttttcttttttttttttttattctcattttttttttaatctcaataactctctctataaattaccaccattcttgttcactttgcatgctccttcttatctcttcaaaatacacactcttttttttactataatataaaaaaagctcaaaacg

SEQ ID NO: 250201 - DNA, 909 bp, Cannabis indica
aattaagcttagggttatttttaccattttagaaaatacagactccctgtcatttaacaaaacagaagatccaatcggtaacttttgtaaaacagagggtccaaaatagtatttaccctttatttataatgaatcataaaacatatatataataattgttaaaattatcattaattatatactaaaaactatttattacagctatatgtacattaaaatacattttattttatttttttaaaaaataactaatgtttaattagatattgtaagattataaattgtctagttactaagtttgaatattaaatttcagtttaatcctaataccaattggattatagagttaaagcatcaaatatataaagaaacaacaatcaatttacaagcttcctctgtcattggaattaaatacatttcaattgagtattgcttagattcctgaaccaaagtaagaaacttcactaaataatttacaaaaatacaacatcaaattttgtgagaataagatattagacatttgatatggttcctttgatttttttttttttaatttgttatatattataattatcatttagacattgttcaatttcaaaataataataaggataataataataaaatagatacttatgaccatcaacatcttaagttgaatttgtagtttctcttgtttatatcgatataagtacttgatagattaatacatatttatactagtgatttaattatatataaaattgtgatatttttggtaaattaatttgacattaataatttttaataatttgtataagagtactaacaatatataataaaaataaaaataaaaataatatacaaacatgttgacatactattttgttttttttttttttttttaatttttttgtttaaactttacat

SEQ ID NO: 250202 - DNA, 802 bp, Cannabis indica
agctttgagttccaatatcgagccaagttgacaagcttgactaacccttacaatcgagaaattttcatcaatgtgttctcaaacctcttacaatagtttcacactgccaaggactattgacctctttctcagattgttgtagtgacaatctcactataactggagtgtttacaaccggtgccaaccacaccccaatcacaatataaaaatgtgtttgaaattacaagcaaattcactttagaagtatgatcatacaatagaaacctagagtgataagcaagcacacttgaaatgaataaacacaagttttggctcaaagtgtgtgaaaagtgtttgttagatttttgactagggagctcattaatctcactttaatatgttagatatatgatactaatgctcagccaactacaattttttggaaaaaaaatcaagtttatatagtgttggggtaaaatatagccgtttataatcgttagcacgcattccaaaacctatcgtgaactggaattctagatgggaaccggaattccagattgatgacaactggaatttcagattccaaccggaactttgaatggctaacagtagcaaattttacaatttttaggactaaaatgtgcataactttttactcgattacctgatctcagaaattctaattttgttctcttatttaaatgaaatttgatttagaaactcaatcaaaaaacattttgaatcatctggggataaaacttgttgcacaagttagtgagtgggccaaaatttgaatttataaaccctagtgtactatgcaaat

SEQ ID NO: 250203 - DNA, 1146 bp, Cannabis indica
ccattggtctgcggatagcggggcgtggagaatatgagtttaattttccacggttcgcagaaacttctgaatttgttgctgatgaactgggaaccattatccgctacaatctcttgtggcagtccgaacctgcatattatgtttttccagacaaacccttctacctctctgtcttttatttgagcgaatgagtccgcttcaatccattttgagaaataatcggtgagggccaacatgaattttttctgagctggtgttgttggcaaggggcctactatatccattccccatttcatgaatggtcacaggctttggacggcggtcagttccgctggggggctaggatggacggagcatgtttctgacacttttcgcacgctcgcgagtgagttgaagaatcctcctggactgtgggccagtaatacccttgcctttgcaccctctgggcggtcactcgtccgccggagtcgctcccacattctccttcatggacctctactaagattagcttaccctcctgcttcgtcatgcactttaagtatggcccgtggtaagatcttttatataattggtcccgaagtatagtgtatcttgatgcccttactacgatttttctcgcctgcttggggtctggtggcaacttatcatccttcaagtattcgaggattggccatctctagtcttcgatcgtgtccgtcggaatttcagtgcactttatttcttcctccgctgaaatactaggttccggaataaagtcaaatggtatcgtcctcgtaatgtggaggggggaagaggaccccaagccggccaaggcgtcggcatgcatattggcttcacgagggatttggctaatctggaagtagtcgaaagtcgcaatcaatctttttacttcggataagtacctggccattttcagttctttagcttcaaaatctcctttgacttgctgaactataaattgagagtctgactggactagtaccctctcggctcccatttcctaaaagttttatcccgtggatcagagcttcgtactcagcgtcgttgttggtagctcggaaacctaactttatagattgctctatcgtttctccatcgggtgacagcagtactattcccattgcgcttcctctgacatttgaggat

SEQ ID NO: 250204 - DNA, 854 bp, Cannabis indica
ctaactagtaaatagagagaaataagctaaattaacccaaccaacctgcaagaaacgtaagatactatatccatagtacaaaattatatatattaggaaagacacatggaaaagtgacaaacaaaaatagggataaaaagagtgcatttttctaatgaacataaacacaaaaaaagaaaagtagttccagctcactattgacactccaaatgatatttcaagttggtgaattgtatttctcaatattgtaaagtagtagcatatttatgttatatatcaactcttcacatcatacaagtaacatcagaaaagccgagtgtgagtattatacaataaacattgaatcacatctttgaatgtaacgaatttcctcaatatacattcacgagtaattaattaaaaataaaaaatgtaagtataacacagaagcttcaatccacattatttttcaataatgagtgaaaaggttcgagtataagcatataagaaatcacatatgaaaacaaaagcaaaacataactaagacataaaactccaatccttttcaagagtggaaaacacaatactatcataatcttataaagctactagccaaaagggcaactaaaacctttgcaaatccttaagacctacacttaggatgtaacaagctaaaactaaaagaataagcaactgcagttttttgtccttttccgacatcaacaatttttttgtcagtagaatctaaagcctacattatagaacgaaaaaacaaggaactacatgccaaaccaacatacaaaacatatgggaaggaagctagcaatcacgcttttttcttttctttttcattttttatgaaaaagagacaaagg

SEQ ID NO: 250205 - DNA, 950 bp, Cannabis indica
taaatatttctattttatctttttatcttattttaaaaaaacaatcaaattccacctctggttttttaatcttattcttcctctgcacttagctcttcctctgctctggtttgtaaagcttcggatgagaactgatgtgcaccgaaaacattttgtggttcagcaaaatgtccgaatttcgagtggaaatcagagacccagaaagcaaatcgacctacctgaatccggtttgggaagggaacctagtcgttaacctaccggactgaataaagccccaagaagattaagaggttaatgaagaaagagccatcttttacagaccagcgaattggcgttaggattctaagaaggattttgtaggttgatttggtttccaccattcacatcgcggacaaagagtatgtctttgtatcttctttttgtttttcctatataactttgtgattatcaaactaaggagtagagacttatgtatgggtttcaattcaaacaaacatattgtactgaaaactcctcaaagccaattttaaataagctttatttcaagctttggtagcgaaatacttgatataaaaaggaaaaaaacaacttattcgattggcttgtggatactacatacatactagaatgctaacgatgttagactaatatttgatatgaatatgaggcacaagaagattaagaggttaatgaaggtctctgtctttaaagtgattaagatgattgttgaaatttatcactagggatcaattaggtttgccttttcttgttttgttaagttattccaaatactgtgttgtgtcaggtactttaagacccttcaggaggaggaacttgagtcctatgctatgattgtgtcctttatgagatgagatggtagccagcagggagagtttagagaatagaagaaattcagttttaacattctaggatgcattcagcgacaaatg

SEQ ID NO: 250206 - DNA, 612 bp, Cannabis indica
cagtctaaagggattgaggagcatgaagagacaattatcaggatgcagaaatagaaaagaggggagctcacatctttgtagcaattgttcctactattcaagtagagtctagtcatagttcaactcagctagatgacaatttaaataacagtaacagttggttcacccctaaaagaagagggactaagcaggttgtggttgttcctcacaaggccatcacaagtaatggttatgcagttctacaagaagctaaggatgggattttggttactaattctaacctaaaggattaatggaagtttttagtatgttgggttaaaatgtcgggggtatgaataaaaaaggaaagccaaaagcgatcttcgatgtttgtaaggagaataaggtaggatttggtactctttttgagactaagttgaagcatgagaaagttaaagaagtgtttgagaataatttcctaagttgggactttttttctaatactactttatcgggaaggttgttattgatgtggcaaaataaatttgtgaaggtgactatcttattagaggaacctcaaatagtccattgcaagattaaagtgtgttggtagcaaaatgatttctttgcaat

SEQ ID NO: 250207 - DNA, 534 bp, Cannabis indica
ttttatttttaaatatatctataattaaaataatttttttatataaatattctatataacttttatttttaaatatatataataatattataaaattaataaaaattattctcttaattaattgggatatgttgttaaaattgatgtaaaaaatttaaaaatttcgttaaactaaaaattctattaaattatgtctctcctagaagttggttagctacttctcattttattttagggttcttcctattcgtaggtcatttatggcatgcaggaagggctcgtgcagctgcagcgagatttgaaaaaggaattgatcgtgatttagaacctgttctttccatgactcctcttacttaagacaggagacccaatgcttgaagtaggaatcaattgaattccaccctactcttattaagtaagttaataaattgagcgagtcggtaatatttttaaagtcttctctttttctttctttttatatctaatatgttttcttttctggctcggctaagtggaatagccaagccatttcac

SEQ ID NO: 250208 - DNA, 1172 bp, Cannabis indica
atgaattttcactaagatatgacttgattgtgaagaaataggattttaggatttatttgttaattaagagactttgtgcagtctaattaataaataatataaatgacaattttatttgataattaattataattattatataaatggttttggcatttataggattagaattggatatatggcatttgtgaaattatagacaaataattaagaaaaatggacaaaaatataattagtgtagggcccacattgtggacggtcattaaatgttattttttaattattttatcaatttttattctatataattcaatcctaaccctaagtgaattagtataaaaagaaaaggatagtctcacaatccaaataatgactctatacctagtttacatcttatcagacaactacagagtttgagacttcttcttcttcttcgtattttcgaaatcttagagtgttcttcattaaatttttgaagcctttagtgattgagttcatgcccacccatagcaagtaagtcctcaattatagtatgtaacactgttaagagtccaaacatttgaaggagtgtcgagctcagatcttgatcatactctgatgtagaaagaaacatgggttagagatctgagctgaaggagtcatttaattctgtcgcaaccaatgtaaggtttctcatactttatattgttaacgcaaattttcgtgaaataaaaataaatatcgttttagtaagaaattatgtacagaaattaataaataataaatgatagaataactctagatatttttatgtggttttgtagttaaaacatacatactccacgagtctttattattagggatatttttagagtatagaatacaatatctaattttgaataatagtctttttaggattgattaaaatagaactgctaaagaaacgtggatattaccaagtttcatttaaatatatatgggataatatcttataactacctaactgctctttagtgttattctttagacatttaatcttgatgtgtaaggtttcatctcgctcaatatgagtttttctctttgttcatattagagctgttcaaaaaaattaacaaatcgtccaactcgaataaaccgcttaggcccctgcagggtgctccttgagacagcagggtgctcctgcagttccagtg

SEQ ID NO: 250209 - DNA, 738 bp, Cannabis indica
aaaaaattgattaaaaaattattgaattttttccaatcatgcattagaatggtttttccttctatttcaaaatggaattgtcttccattggaatgacattccaacattttaatatgcaaccaaacaaaggaatagaatagagatcgcttcctttcctttctattccattttattacctccaaccaaacgccacctcagttttaagaaacctttaggcagtggtaggttgcaacagcactatactctgatttgcatgctcatgtttcattcttcccattgatctaatctaagattccatgtaatcataaatataagaactaatccaatccgcagtgttaatatctttagtacgtattttcccaaatagagaatatcattcttgcagtaccaaatttcccacaacaaacccaaaaacaaatccaaatcatctttactaatatactgaaagcacacaaaaaaaattctttaacgtcacaatgattattcttactataaaactttttgaaaagtgaaactcttcatatgtatttagttttagaacaatctaggagaacatggatcactacagccccctgcaattcacaaggtaaagcaaatagataggaagtggaagatcatcattagtaccatcataacttgccgaccatcgatgaactgatcggattaaccaaccgcttcaatcattatatattgaagagggttagattatatagcctacttaagctcttagacaatcaa

SEQ ID NO: 250210 - DNA, 962 bp, Cannabis indica
aaggataggaataaagagttgtataaagatgttcagaaaattctatttcgaattcgcaaaatagtaattatttattgataaatataattctataattactaagagtgaaattccatatttatagtggagtaatcatagaattaataacaagagaatatttagttcatgagactcaataaataatctagtttattggagcttagaattataagtctatagtccctgaattgccaccttgaaatactgtcaagggtatgaataatgaattgtataaagatgttcagaaaaatttatttcgaattggaaaaatagtaattattaatttttctaataaataaatattttttcttcaaactaattaaatagggaaaagattaaaattgttaagacaaaatttttcgagataagatttgttaatccaaaagtttttaggagaaaagacaccaaccttatcctaaagataatggtaggcgcttatgcttgctcctatccctatgtgatttatctttttcggttaattaatttaataaggtaaatatctaatttgaaaagtagttatagatattttaaggttgttgagatattctctcaagtgtgttgacctcaaaaattaatgaactgacagttgggtcggatagatctgatgttggccacatgtcacacaaatagaatgaaaaagcaataaacatagagattttttatagaggtttggcccccttgtcatagcgggtaatgacctactcccttatactaagggaaatactatccagatcactatagatgggatctgctatacaacccttaggattataaagtatgaatcagtcggcagatctcaagtattggacaacctagggtgttgtcagcctagggtgctggccagcctagagtaggcgggtgagagagatgaagagaagagatggagagccctaatgggcatgtacaagagagagagagagaga

SEQ ID NO: 250211 - DNA, 600 bp, Cannabis indica
ttgagatagcatacatcaaactttctcaaccaaagtatagttcattcattctgccatgccattttgttgcggcgcacggcgcacggggtactgaaaaaatgtatgattatcccttcttcttgacacacttgtaagaaaggatctcatttgtattcaccaccattgttagatctaagcttcttgatcttcctgcctgtttgagtctcgatcattttcttccatttaaggaagacatccaaaacttcattgtgttacatggtgtatacccaaacatatctagggaaatcatcaataaaagtcacaaaccatctttacctcaaagtgaagcattcttggacggtctttagacgtctgtgtggatataatccataattcccttagtgcaatgcaaagaaatgtcaaacttaacccttattttctttcccagcacacaatgcttgcagaaatcaaaatttttgctcttggccccttttgtagacattacttcactaacccttgtaaagccttctctctagaatgccctaagtgcatgtaccaaaggacggggagtaagatgtcttttcttccaaactgctagagacaactactcttctggtaaca

SEQ ID NO: 250212 - DNA, 730 bp, Cannabis indica
ccacagtaaaaaagtaaaaaagttaaaaattttaatttgtggtctaaaatcccatttttaaatttaaagatattttgaatctcagcacattcaacaaacattcaccccgcccaatctatatatttatataatgctgttgtttggacagatgacgtggcggcatatatgaactctctttatatttatttaatttcttatattttctaatttttcaaaaattctttcatctttattttttactcaaaagtcatatacactatattgataaaaattaataagagatcattaatacaataaataaaagaattaatggcgttattataccatcccaaactcaatatattttttaattaaagagatcattaatacaataaataaaagaattaatgacattattataccatcagaaactcaatatattttttaattatttttaattaatattaatgttaaaaatattaacaattgcaccttatttattttttcagttttagtttttttttttcttgtaaaatacatttgtggtactcactatattaaatgtaatatattttatgataaacgttagtacactataaatattaattacttaattatgtacatgtttttaattctaatacaaaactcaaaggccacaaatagttatatacctatttctaattctaatacaaaactcaaaagccacaaatattaacaattctccttacatttttttattttcttatttttt

SEQ ID NO: 250213 - DNA, 598 bp, Cannabis indica
accctaactctgagaaagtcactccacgaaaccggtttgtctttgtctaattccacttgaataacttcacaatccaggctacccaagagcttaccattatccacagaaaaatactcatggggaaggttatgtatctgaatacaaagtttcaggtggttaaagtgtagcgttccttcttcccgcggggaccaagcttgcaaaatgaaggtgtacccactaacgcaccacggacccatctccaaagcccaagtacgatcctcctcatcattaaaaccaagttcaaaataattagagtttaatgcctcaccagggattgccacaatggacatatggttatgccatgttttttccacaaaatcattaacagtggcaacatccacactcataggggccacaactttaccaaaaaggcaaaaaatagttaaagctttgagtgaagaagcactatgagatagtgtgacagttgcttcagagcaagagtagcatttacccttagtagtgggtttgttagcaataactacttccattactgcaccaaagtcaaaaataccaacaagagaagaggccaaaaagaagaataaaacacacagatccacac

SEQ ID NO: 250214 - DNA, 1009 bp, Cannabis indica
aatcaaacttatttatattcatatactcatatctaaaaaataattaaaaatttaacaaaaaaatataatattattttagaaaaaaaaaagttataaatcaaactaaaataaatatatttttttaaaacaaattctttttttttttgataaaaacaaaatatactcaattttgttcccataaaatttagttcttacaaaaattaaatttttaatatatttttttaatgtctaaatgaattttctaataaaaataaataattttttatattgcttaattagttttaaaattttaatttattttttaattttctcaatcattcaaaatgtatttaaatgatttaaaaaaaaaatctatattaattttttaagatttactgaaaaaaaatattaaatctttcccatttttattttaaggggatatgatttgatagttgtcaaaatttagtggacaaaattgctaattgacaaaaacacgtcatcatttaaatagaataataggacagaacctaactgaaggactaaatttctctaaatgtaaaaggtcaaggaggattcttaacaagtcgtatattttaggggccaaaatcagtattgtcgaatgtttagggaacaaaattgctaattattcataaaataaactcctaatttcatatttttttattctagctccacaaataaaaatatgtgagattattctacaatatcccactaaaaaacaacatccaaataaatggcaaatttctaattttgcccttacttcactgttaagtaatcttaaggcttagggataaaatggtccacaatcataaccccatctaaaacttgatattcccaactaacccatgtgactctaccgaccatctgtcgcattttccatcattactgaccaaaaattataaaaatattaattttcacatatagcataaacaatacacctagagtttaataaaattctcagaattgaaaaattataattctattgcatttttcttaaaatttgacccacaac

SEQ ID NO: 250215 - DNA, 732 bp, Cannabis indica
ttttatgccacttgccacacacaaaaaatgatttgtgctatacataaatcaaatttatttaggtgattgactcgtgaaaagaaaactagtagggtagaaattagctgtcaacattatttagcatatatatatatatatatacaataatttcatctattttattttgttattaatttgaatttagaccacaaaaactaataacacactacaagaaaattaaaaattgtgactaaaagttaaaaatattgtgttcaaaagttttagttacaatttttttttttgtgatagccttgtaactagaaagtttatagctaaaattttattcacaataaaaataacattgtcactaagacttaatttttgtcacaactaatcactgtgacttatagttattaaaatgtcaaaacaatttgttacaactactttttagtcacatgaaagaattccacagttaagcgtgtttgacctgggataatttcaagatgggtgatctcctgggaagttctcctaggaagcgtgcgagtaaggacaaagcatgctgaaaacacgtgtgttgatttgtagggtcattcattaatccaggaagcaatcagagtggcgtacccatgtataagagtcattagtctgtggcggaaggcccaatggaggcttgaaacggggacattacaaatggtatcagagccttgacccagtcgaaagtgtggtcgaagaggacgtcggaccccataaggg

SEQ ID NO: 250216 - DNA, 569 bp, Cannabis indica
tatcttaaatattcattcatagtaaagtatgttctatgacatgtactgcgtttgtatatgtgaaaatatgtattatgaaatgttattttgttttaattgttattcttgtaagctgttgtaattgttagtttaatctttaaaaattttaggaatgtcgaattatagttgttatgttatccaaattgtggtagaaaaataaaaataattataaattaattttaaacttcatttttaacttaataaaaaattgaaatattaaaatttaagtaactttcaaaattttattaggttactatttttacgattatataatttaatgaataagtaatttatattttaatttgtatggtgaatagttattaattaactaaaagcttaatttgtcataatatgctatcatttatttataatgaaaaaaaatgtaagatgtcaaaataaaaactaatttataatcactaaatgtattaataattaaataatttatcataatagtcattataatttatttaaaatggaaaaatatatgatatattaattaatcaacttaaaaattccataattttgaataa

SEQ ID NO: 250217 - DNA, 557 bp, Cannabis indica
agtgatccagttactgatcccactttttacagatccatagtaggagcattacaatatgcaacaatcacaagaccagacatagcctttagtgttaacaaggtatgtcaatatatgcataatcctcttcaatctcattgggttgcagtcaaaaggattctgagatacttggctggaactcttgactatggactcaagctcaataaggtctccaatttgcaacttgaagcatactgtgatgcagattgggcatctgaccctgatgatcgaagatcaactactggtttttgtgttttccttggtgaaaacttaatctcctggcagtccaaaaagcaacctacaatctctagatcttccacagaggctgagtttagaagtcttgcagctgttgtttctgaactcacctgggttcaatctctgttaacagagcttcatattcctcctacaccttccccattggtttggtgtgacaacatcagttcggttatgctagcagccaatccaatacttcatgctcgaacaaaacatatagaaattgatctatattttgttcgagacaa

SEQ ID NO: 250218 - DNA, 914 bp, Cannabis indica
ataacgactataattgaacgtttctaaatatttaaagctattaataacagaatacaaatcaaaataatataaactaatctcaacaatatttagcaatacaaaaatttactatctatccgaccgcagtacatgtattcgcagtacctacttcaatgtggatgactatttaagatattcaaacttaatctaaactaacatgtatattattccacacacccgaccacagtacaatatatcacagaacctactaaattactacttagtaactaactatagtatactaaatataatatgtaactaactaataataactaattttactctaaattactaactatataataactagcactcctcacgcatcaattatttatccattaagaaaaataacaaaaaatcctaacaaacaactttaagagaaacttatatcaaataattttattctaattctactgaaattttgacaacataacaactataattgaatattcctaagaaatttaaagttattaataacaataaaaaacaatctaaaataagataaaaaaagtgatgataacttagatgatttctaatcatcatcgcatctcccattaatattttaattcgagttttctgagtcaagtgtgttctaggataatagaatatttagggttctagttctagaaacataattatctttactttaatttattttttatgatacatctttggtatgtttaaattttacgtgacattttattcatacttaggtattctaaaatattatatcaatctaatttgtgaggtttacgcgtcaaacgcctcgagacttgcaaaattaacaactagtaattagtatactatactaaattactaactagtaagtagaccaaattctatcgaaatttcagcagcataacgactataattga

SEQ ID NO: 250219 - DNA, 533 bp, Cannabis indica
ttttatatacttttaataatatttaatacttttgttaattttttttacacttaactatttaaagaggattaattataccttaattacgttggagcactgttataaaattttggccaattataatattggctcatttttttaactcaagaaaattacctaaaaaaataaaagaaaaatgtcaagggaggtgttaaacactataaatagtggcataccgttattagtgcatttcaatatcgaatttcacaaattttaatttagtgaataatatgacaaacttttaagtaattattaaatgtcatatctgtaaggtgtcaaataataatgttctattaataataattataataaaataattcaccaaaaaaaatatattatataaaaaattataaataaaataaacttatagaaattgttgtatgaaatttgtaaaaagaaaattatacaaaaaaagaatttgtaaaaaaaaataaattgttaaaaaaagtaaaatcattcataacaaaaaacaaatacatcaagttttgtaattg

SEQ ID NO: 250220 - DNA, 873 bp, Cannabis indica
ctttaatgaatgaaccaaaaacacaataaacacaaacataattcgaatcaaagtcacacagactactaaatagtgcttagtaaaccatattagtaatattatattaaatattacatacatttatgcattactaactaattttatttatatgttatgaacctaattctcttgtaatcttacaagatcatacatacactcttatatgagtaaagaattttttaatattgattaattataacaagtaattaacatattcttatataatatatttatgtttcatatatttataaatatattatccttaattcactttcttttaaggcataaaccctaacatatggagacctagagaagcatgagcctcaacaagggaataaagttgcaagaccccatcttgccaagggtagcatcttgccaggttcatgtggtgagcctcgtctcaccatagcacattctcttctttacttatcctctcctcttctcaccctctattctcttctccatttcactttatctattttcttatctttttgctctttctttgttagttttatggtactaaatcaggtacgcaacggaagaattatttttcattatcattataccatatgcctaagatcgctatatgtatatttattaaactaaaagtaaaaatataaaaataatatttacctcttgatgcctatcggtgtatccttgaatctttttgtatgtttcatcatttcaggttaattagaaatacacagtagtcttccaaatcgctccaccatacacaagaagtaatgtgggctactaggacaaagtgtatgtgaagttcttgttttaatctcaacacataagcaagaataatttcttttgtgataaatagaaaag

SEQ ID NO: 250221 - DNA, 618 bp, Cannabis indica
agaccccagttcgaaccacgacccgaacccggatccaaaacccgaggctaggctcaaggtcctttgtcgtgtccggattcgaggtctgactccaggtttgggatttggggtccgagcccgagttcgaatccggggtcggggtcgggtccgagtccaggtctgggtccagactagggtccaggttcgggttaggttcagagtaggatgagttcatgtcatgctatggtgtaaaatattaaatttttttagtaagaacaaatttaaaaataattttagaaaatttgtgtcacaccattaaatttttaaaataacaaaactgtttttattatcacttttgaaaacataattataaaaactgaaaactgaaaatacaaccaaacaactttttataatacaactcttgaaaaaagtagttttaatacactctttatttgttttatgtctaatttttcttttatttgtgaggctaaagtgatcaacacatgttttttgttgtgagattaggataagtgttataatgtggcacttgtttattagtagaaatcaccaacaattataaatactaataaaacaaatagatgagtgaggccacatgggggggagttgtaatgaatgcat

SEQ ID NO: 250222 - DNA, 621 bp, Cannabis indica
gaaaatgaaatagaattgtacctacaatacactgctatatcagacggactggtaaggaatcatttgtagagtattataattaaaataatataatcgtaactaaaggggtgagaacaagataacatctgcacagaaaacagagctgggtgggtcaaagagtatataatataatttaaatataaacagtcattgaaatttagattacaaaccgaagcatattcctgaaacattattatatatatgtcataatcatatggcattgagatcgagcgacaaaccaaaccattactattaaaaaaaaagaccctaaatgatattcatataacagtcatggcattgagattaataatgctacagcgaaagataaataaaccagacgattcataactgagtgaagtttcagacactctatgattaccaaccctagaccctaaacgaaattcctcagagagaagggttatggtgtgatacgagtctccatgattttctctatatagaataagcatcgtaataggaaacagttacttgtttcacaatgaacgtgaaacacttcaggagcaaatgggtagaagttttttaatttatttatttttaaaaaacatacataatgacaaagaggaa

SEQ ID NO: 250223 - DNA, 539 bp, Cannabis indica
ggttacggcccttgagtcatagagaaagccaatgttttctttcaaaaatctaaatggtcttggagatgtaaaatatgtaacaattttctggttatcattatcaaattacattaatgcgatacatgtatttatactatgatatatagtttcacattggtctttaaaaatttaagatctctcatttattctggacattaaccgatacatctttcttttagagtttccattaggtgtggatacttattacttatttagatagctatagggaattgattcaagatgtgagagaaagaactgtaaagataaggcaaatttttctagaatttatgcattaattgaacattttgaaatgggaaatttatgcacttgtatctactgatgttgatgcttagtactcgtggtaggtcttttgcaggctttaaaaatcttatttttatattatttttcagtttataattattttttaactatcataaactcaaagagaaaaaaaagttgaaaaaacaaagttgtaaaaacaaattctatgaaaaaaaaaa

SEQ ID NO: 250224 - DNA, 841 bp, Cannabis indica
catagagagtgtgtgttggaggtattgggttcgagtgccaaattatgtatggttgtaatatataaatgcttaaataaaaaaaataataataaagaaaaagagatacatactaaaaaaataaaactagtaaagttacaaaagtatcccttaaatattaatattatataaaaaattacaacaaataaatataaattaattttttgaacatataaactgtagaaatcggttacaaaacctattgctagaggtcaaaaaattaaaaagtaatttcgttaactatttttatacggactaaataagcccatatatatgtatgtatataacatttttcaatagaaaaaacttgtaacagctaggtggttttgattagttggtaggtccaaactgatcgtaggttgggtgcttgggcttaatatgttagagcaagtgcaaggaggtactaaactttggatttggtgtgtgtaatccctccaacgtaacagcaaatgatacatcatatatgccgtgtggctacagtgcacggcatatatgctgtggtactgtagctacgacattcttgtttgtttttttttttttgtaataattattattatttaatttatatttataaatattgatattatcatttgtatttataagattaaacatattaattctacaatgtacttttttaaaatagatccatggatgcattcttatttgttgcatctaagaaaattttttagcttaatttttatatagtcgtttacgttatagctatttaagatatctaataaaattttgagaaatttaaaaaagtttaacacgccgataataaggttcaaacaatctgttgcacgca

SEQ ID NO: 250225 - DNA, 1192 bp, Cannabis indica
tgtggtgagtctaggtgacaaaagaaaaagaattttgacgaggtaaatgttggtgtccttgcaaaggtattatggtacttacctccaatacctcatttggtttggttcttttgaaatgtcaatcatgctaaaaatttgatctggcatgctagcgatagaaaattagatggcaagatgagacatccagctgactcaaccgtatggaaatcaattgatgttaggtggcctgaatttggcaatgaacctaggaatatctttcttggtatttttgtggatggaatcaatccacataccacccttagcagtaggtatagtttctagcaagttttgcttgttatgtataacttgcccccttgattggtaatgaagaggaagttcagtatgcttacactgttgatatcaggcccttcaaaacctgggaatgatatttatgtgtatttagctcctctagttgatgatttgagtcaattgttgtatgagggtgtacctgcatacgatgcctttatgaaagaagaatccaatcttaaggccatattactgtggaccattaataatgttccagctctcagaaatctttctagagacagtgtgaaagggtacaaagcatgtcttatttgtgaggagaaaacatgtataatttatttaaaatactcaaagaaaatgtgtaatatgggacacataaggtttttgccaaacgaacatgtgtttcggactaggaaaaaagaatttaacggtaagcattaatttgaattgccatcgccacctttgcaagggaatgaatgttacaaaagttgaataaagttcaattcaaccttggaaagcgaaaagagactccaaagaatagaaaaggtcgccatgagaaaagtgacgttactacaaataaatcttaggggccatagaaaaagaagtcaatatttttgagctcgagtattggaagcattttttgttacatcataatctcgatgtgatgcacattgagaaaaatgtgtcagacaacttgcttaatatcttgttcaatatttttgggcagagtaaatatggaatcaaatatcgacaagatttgaaagggttggggattcagactaatttacactcacaagttttaggtcgatgaatgttcttaccagtagcttgtaatgctttaaataaagtagagaaataatctttgtgtggttctatctcccaggtgaag

SEQ ID NO: 250226 - DNA, 820 bp, Cannabis indica
agtgatccaatagataaaaaaaatgtaaccataatggttacaataaaaatgtaaccattgaaaccttctcctatataaataacattatcgtgttaagagtatctccaaccatgctctcttaatacactccttagctaaaatggggagtgggacttgaaaaaataaacaccaaccatacaaaaatgtgaaatttgtcaaactaataatgtaaaatgctaaaatttgcaaaataacctcatttaattttctttatgcgactatgatggttacacagtgtaaatttatggtcgttttacgactataatagtcgtttatggtcgcacaatgtaatttatggtcgttactactactataaaaagttattttgttaataaatttgtttgtaaaattattttgctaaaaatttttcataaagactattttttttacaaaaatactcatttttgttaaaaaaattttaatagtattttaataaaaaaaacaatattacttttttttcattattttataaaattaatttatatttaataaatttaaattataaaatattattaaaataatcaaataataactaaagtaaggaacatgattggagtaacaacaataaaaattttaacatttagttattttaactaaaaaaataaaaaaatattattggagatactcaaaaaaaaggggaaattatagtaaatggccccaaatcataggactatgttagtttatgtcatcattttaaaaaaatatagcaaatgaccctaaatcataatactatgttagtaaatgtccttatttcaaaatcattaatttttttttatttttt

SEQ ID NO: 250227 - DNA, 1379 bp, Cannabis indica
ttacctcaacagacaaattttttcgaggagtttcaaatcgtaaaaccactgtttacaattaactgtattaatcccgaaatcaaatgacggttctaatttggcttgatcatcactgtaaatctttctcctaaaataaagacaaaaagaaaaaaaaatgatataatatatgcattatatcattacgaatgcaaaatagtgaaaaggttacctattttttttcttgtagaccaatcttaaaccatctatcaaaggcaatttgatgcaccgtatttggtttctcaaacaaattggaagaaaacgggaataaacctttacgtttttcaattgtttttggtttccctatcctttcagctgaaccaaattcactagtgaatggagattgcaaatgctgtcctagtttcatactacgttttctcaaaatggttctttgattgttcaagtcagcttgttctatttcctttgaaaataatgacatggtattaataaataaaattatatatattaatttcatgagctagtagagaaatataaattatagaagctaacctcatttatcttctctttgtactttttatacgcctcatgctctttcttgtctagcatatcaatatccttttcgctaaaaacaacatcgtcatcatacacgactagagcagaagcacccacttcaatagcttcggaaatagccacatcattggagacatacttgcatatttctccatcttttgttgttttgctggaataaaagccactgccagtaattgcatctttatatgtcgagttaccacctttttgctacaacatataacttgaagcttaggaattacaaaatttaaagtacacaattgatttcataaaaagaaaacaaatttgctaataactagctaaaatatacttcatcgtctccatcctctccagagtcattatggttgtttcttcttttatactgattatgatcatctgctatactctgctgcataaaaaaagcaattaaggtttctattatttacaatctataataaactaagaaatattattttttgtgccacaaccttgttcttattatgttcttggtctacgctcttggcattatcattttccattgtcgtttgatgtgcctgatatttgatcatttttatatttttaaaaaagagttagtatactgattgttattatatgatcgacaccataattatgtattataattaaatatatatatttttttgaaaaaaaactttatccccatcgtgattatttttctgaccctcaatgaagtagttggttggtgtaatttcataattagataaaagctgactaaataaattaaaacttggtatatcatcatcacaattctgtagaaacaaagttaataataaaat

SEQ ID NO: 250228 - DNA, 627 bp, Cannabis indica
agtggccaagtcacagaagggcaggggtaacgtttcgaagggagctgcaccaaaggggccgaagcttggtggtggtggtgggaagcgctaaacagttgaaactgcttcatcgtctatttattactactcctaagtactagataggggatatttttgcagtttcaagtcaaagaaggtttgtaaggatttgataggccttctgttgtaggttggccaaagaatttttgtttctgtggttttttagttttggaattcttagtacttttgttatcttattatcaggatatgggagatgagtacatttatagttcttggtccttgattcgtattctattgaagaagctgcaattaccatcaccttcatcccatagaataatgtggcttttatgtttaaaagttgtttttatggtgttgtaaatggtaatcaaattgtatatcattcaatagaataacatatatttatgtacgagagatttgaataagaaattaagatagaaaataggcaactaagtaaaactattcttaatttttacaattaatatattctaatactccccttcaaagcttaatcatatatgttaataatgcctagcttctaacaaagatatttgataaacctccactcac

SEQ ID NO: 250229 - DNA, 810 bp, Cannabis indica
tattactatggatcagactcagattcagactcagactcaacagaatttgatcagtttagttcaaagcaactcaaaatttcgaatcaacacttgaaaagtctcaatgttaggcagtacaatgatgattatatgatcattacaatcgaatcagctccagaattaacatcttttcgttatgatggtgaaatccattttagcttatcactagagtcatccaatttgttgaatggaacatttcatgtatacgagcaccgtagtattgacagtgacacaagttttaccaatatgatgaaatttctatcgaatttaaattgctcgtggaacgttgtaagcctatgtgttcacaaagcaaaggtatctgtttctttggccttatttcaagttaattccattagtctctacatattgtatattaattagttcatatgtttattatgtttgtatgaaggctctcatctttttcggaaaagttgaagaacatatgttgttctcccttaattaattggaagcatctcaaactagttcttggtgaatatgatcctgaaagattatcagatttgaaggattcattgatgtggatttcaccttctttagaaacattatctattaacggaaatgagatattttagtttgcattacagcttttcttgttatgaacttaacatattattgagttttctgttttttcctgagtgaaaacttcaaacttcatatgcaacttaagaattgctttgaaatattcttaaggctacattagtttcactttgttttttcattattagtattatgaaagaagagatcataggactt

SEQ ID NO: 250230 - DNA, 1576 bp, Cannabis indica
ggattgctcccctggggggtacaacgtgtgctccaggtgcaccccctggttctccctgaggcaacgggccttctgccggaacttgattaagatggggtagccggttcttaatccactcatacaaatgacccaatcgaatcaagttttcgatctcaactttcaaattcttgcattcattggtactgtgactaatattgttgtgttattcgcatctcttgttgggatcccttcgcaaactgtccctgtatagggaggaggcttccggtagtgtgtattttgcctcgtggcgaaatacacttgctcttgcgtacccgttagctccgtgtattaggtatattgaggggtatacccccttcgttgtcgcttgtcttccgttcggttgctaccttttgaggacctcttgctccgggagctttgaggaggtactgtcaggcttgcggtaggagcagagtgagacggggcttgtccgctcatccctgaggggttacttaggggattcccaaaatgcgatgatgcaagagccaaggctaggctctaattatatcctggtgtagcggagaactgtatgccgctcatttaaggagtggccgaaggtagggctcccgagagctgggctccgggtacatatcgtgatactccagttggatagtatcctccataggctactatttgggattcctccaagttgatgtatttttggaccctcttctggaagtcttggagattagcagctccttcctgttgtaattcattccagaatggggtccccgtacggatcctagcttgaagaagtgcaagttgttgtccgtcatccactttcttggtttttgaggcttcctctttgaacctctttataaaattcttcaaggtttttgtgggtaatatctttatgttagtcaaggcgctgacttccagattaatctttctcactgcgacaaactgtctccaaaagctgacttgtaacttgttccagcagtccacagatcctgggtccaactttttgaaccattcctccgcggaactgctcagtgttagtggaaagcataaacatttggcgtcattgctaaccctcataaccgtcattacccagttaaaacgagataaatggtcgctggggtccgagtctcctgtgtatgctcccatctcgggcatcttaaaatttttggggagctccgcctccaatatgtgtagggtgcatggctctcggtcctcgcaatcaaaatctgggtcgtcccctttttgcttctgggagacccgagcaatgtctttgcacagtgttgccaactctgccaaaatttcttcattcagtgtccccgcagaaaccgctggtatatgtttcttcttgtccaggtgatctcgcagatcagcgtgtttttcattgattttttttcttaagtcaacgggagggtatctccagtttccccttcctctctccccgggatcttggtgcacagacacgctctttcgatcctctcgatccttagggccaaggctccattttgggagcatgcccctctgcggacctttctctttcgggaaatctgagaggacctttcgcggatcctgcacctttttc

SEQ ID NO: 250231 - DNA, 661 bp, Cannabis indica
ttttggtgatgcagttgaggaatatggtgtgggctacttcaaaacaggatgtcttaccttttgtgaaattatctcattaattattcattggtcaccgtttaatctcctctaagtttaaagttttcagtgtttcaggacatgtagcatcctctaaggttagtttttgtgtagggttatttcccttataattaatctgtagagcttattgttgcttgataaattttatgtagaattatacccttccttgtctcaaatcacttaagaattgttgagtttttctcttaaattttttaatcaaaactagaaaagtaaagagtcttgctttttggttgctaactaatataaactaatatggcagaaatcaacttgttgtaaatgaggctatcacaaagaaaccactctcacccctatcctgtttggtataatattattacagttagttgtgaccgttagtatagttaagacagttagttagttaagctctagagtcggttcattaataaagagctatattcatattgttgtttcataagcattgtaagtttgtaactggtttggttgtatggcattcgagttgtagactcaacagtgtggtatcagagctggacgggttcttgttgcttgaattggatcaagcttgcgtgggaacaaacgtgaagaa

SEQ ID NO: 250232 - DNA, 1770 bp, Cannabis indica
gatcatgcaggttggaaaggcttgtctaaaaagataatccgtcaaggataatactggccaactattaataaagacacacacaaatttgttaagggatacgacaagggccaacagctctctcatatacctcgagtaccacccaccgagttaagaatgatgacctcgccatatccatttgcaatatgggggattgacttgattgggtccttacccacaggtcgaggtggcacaaaatatgttgttgtggcagttgacttcttcacaaaatggacagaagccaaaccataagtatccattacatccaagaaggttcttgattttgttatcaagaacattatttgtaggtttggtattccaattaaaatagtatctcacaacggtactcagtttgatggagatttattcactgagttctgtgaaaggaataaaataattaaaagcttctcatcagtgttaaggcctcaagcgaatggaccacaagtgctctggggccatagaaccacagagaaaacatcaaagggacacactccattttcactgatatttggctcgaaagcaatgttacctgtagaggtaaacattgcgacccataggcatgaattctacaatcaataacaaatcaagaacctctaagcatgtccttgatctacttgaagaaaaacacacagagtcacaactgcttatcaacaccgtatcactagatactttgataaaagagttcgatttttagcctaagttacaggttaattttacaattgtttttgttaatttaacttttgaaatagttttatgcttgatttcctttgttttagatactcgaggtattagagttcaaattctatcaattgttgaaaagacagggtgaactggagaaaaatctactgaagctgacaagtatgctttagtagtcgcgaccaccattatccatggtcgtgactctttttaaggacaagccaattctaaagattctgggattgcaaattcagggataaattatgacatggtaataaaaaataatgtcccgatttctagaaaaatgagcaaaaataaaacccaaaaaactctgtgaattgtataaccttaaattttctagccctagaattatccaaacactcaaaatcaaattacctaagtagcaaaacaaggtagacaaagaaaaacacataccaaaaattgaaattaaaatcatgaagaaaaaattagcaaagagaaatgccacttactgatttgttaagatgtccgttgtaaaaaagaacttcgcgatgaagattctgatgatcgaaaagctgggttgtgatgattttgaagaaaaacaacataattagaggagattcgcaagaagaatatgaaagacagagagggcatgcaaattctaaaaagagagtggttgagatttcttcaaagcaggaaggttcatgggctgaaaaatggcaaaaatagtgcacagttttgaatttatatcaaaaaaaggtggcaaccgtttgatcaagtgtaatttgatcaaatgtataatgcccccgcttgaagccttcgttaggcccttacacccacagaatgaatgactcttatacacgagtacatcactctggttgcttcatggactgaagactgaccctacaaaccaacacgagtgtttccagcgtgctttatcctcactcgcacgctcctgggaaaacttcccaagaggtcacccatcctgaaattactccaggttaagcacacttaatcgtggagttcttttgtgataggctatcgaaaaacaagacgcac

SEQ ID NO: 250233 - DNA, 1150 bp, Cannabis indica
taatatatattttttttgaattattaattattttaaattattgttttaataatttaacaacaagttaagcaaaaaaagaatttgacaacaaaatatttttaaataatatataatatttgacacacatatataaacaaaatagtaagaatataacatttatattaagtcaaatatagttaaaagtacacataattacttaattagctcggttagccaaaaactaactattcttgttcataaaaactactatgcattcataattacatccacaaaatatatgatagctttaacatgagatctatctaaatattgaagccatatatattaatctaattgctactcaccacctaaagagtctggataaactccatttagtagttatataagcttacatattttaaaatattgacaccgcatataagatataagttatattttaatgtctttatagtctcatccatagttaataagggtcgtgacaaactctatcttggtagcctcatccatgttttcaaagccctcaccttccatggttgttcaacaaatatctttagagccttgatttgatcagcaacagagaggttcatctttgtgatctcttcccaaacaaagtcatacatcttgttattatctttatcttttagcgtttcaatgagcaacttcggttcctcatgtgatttctccatcatcttatccaaagactttgctagtttttctaacccaacacaaatatctgaacctggtctagctctcttctttcttccagactgggattgattaccatgattggttgacagacattggagaatatgatgattcttcttgcatttcattgccatcataatcatcttcaagatggtctgctttaaccatatcaactgaagttttagcggcttttccagttgcacgatccgctccaaagatgttagccaatctattgtagataggaaattgtttacccctccatccatcaacttctttgtggttctaaaataataagtgatgaattagaatgtagtttagcagtgttcatcaatttgaaaccaactaaacaaatttaatataggtacctacacgtatgcattccatacttcatcactatcaacctgaatgcacttcaatattttgttccaaccaaacccactcacat

SEQ ID NO: 250234 - DNA, 769 bp, Cannabis indica
ttgtattaaaacaacttaagaaagcctttagtgactctttgggttactgctttatgttggtcaacgacgaggcctctggcctcctatttctcccagcttgaaactattttttgaaatcttgtggaaactgctcccacaaggtgatggaatggtgcgtaaatttatcaaatcaattgctagctggtcttgttagggaagttagaaacaacatgcatcacaagttgttgccaatgttacttgcttgcattagggtattaaaattattcagatgagctactgggtcagtggtcctgtcgtagggtgtgacatgtggatttttatatccttttgggaaatgggaattgactatgtttgggtgtaatggcttggtctcttcgtcagaattatatcttaataattttccatacttcccatcttggtatctcctgaacttatgctataattttatttttaactgaattggatcattaacaagttgattgacttgttctcagagatttcttgtattgtaatttaattgctctcgtagatcttgggtattacggtttatcttctcacgcaagtcaagatgtcttcgattcaaatgttctcgaagatttagttcaggacgtcgctcataccttgtatcataattactaactgatcttactggcgagatgctttcagactgataactttttagattgctaatgatttctcgctcatcatgatagtcatgatgggtatttctgttgagttttgtgccgtaaataaaacttatttcaatata

SEQ ID NO: 250235 - DNA, 1208 bp, Cannabis indica
agaaaattagaaatctctcatttgatggtactgttgatatttatgagctatcaataaatcctcttatttctaatcaccctcttcttgagaatttgactttgagattcaagtatgcatatgatgaacatctcaaaatctcgggtcaacgcttgaaaagtttcaatttgaagaatcttcgctgtaaaccgtgcaatattacaattgaatcagctccaaaattaggatacttttgttatgaaggttatcttgatctaagcatattgatagagccatctaattccttgagtggaaaaattgtgatttgtaagggatacaatgatggatataatggctatgatagtaattggtttacagatatgctgaattttcttttgaatctcaattgctcttggaatatgattagcctacatgttaaagaatatgaggtacttctattttattttatttgactgtggccttatttaaatgtcatattattgatctattagctatatattatgtgatatgtttatatgtttccatgaaggctctaatttggccagaaaaattgaagagggtgtgtcgttctccattgcttaattggaagcatctcaaagttattactgattatggtaatccctaatatcagatttgaaggactcgttgatgtggatttcaccatcgttagaaacattgtctattaacaaaatgcagatattttagttgctttaaaatatttaagaatgactatcttttattagttttagattagaaaatggtactgtagtcctttatgagattatgtttattttcttagtagctttggatgatgaacttcactactttactttgcaaaagaatgagatatctctttcgtatatttttattgtgaactagttgatattgtcctacttattgatgatattgttatatgagcacctgaagaaatagtcttggaatattctaaggctgcagtataaacacattattacataattgcaacaattgatacacaagtataaagaagagaacaatgggcatggcttttgttctttttttttgtgtatgaatcaactttggataagaataatgcctctttatctgagaagataataggctctatattgatatgtttgtctatgatgagtttcatatcgatttgggttggcagcaacaattctcaattctcataacaacacacaaactcaaagatccagcttcggttcatt

SEQ ID NO: 250236 - DNA, 899 bp, Cannabis indica
aataaattttaatataataaaaaaaaaaaaaaaaaaattagtttcttgaaaagctaaagctccacgtcacctattccaacaacagaattataaatatacatagattttttccaatttatattatgaaaaattaacattcttatttgataataattaaataatagaatcatatcaaattttaatttaatatgttaattttttttataatataaatagttattttactaaattttatttctttccggaaaagattaaaaaaaaatatattgtaaatcttagtttttatcattttctttaaataatttcaatatactttatatttttatatataaaagaaatccaataaacttgatctcacatatacatcacataatcatttcgatgcatctccaaaaattagaaacttaagatctaaaaacaattatgataatcacttaatgtcgaaaccttcttatgatctacaacattataattaactaaaaataataaaataacaatattcaaaaccaaaattatcatattcatgcctttcaatatatacttttgtatatcacatgaacagtcaactcaaataaaattaaaatatgttgatgtgaatactcatcaatgataaaaagcaataagaataaatttacagaaatcatgaagccacatcaaattagaaaaaagaaaaattgaagctaagagatgttaagaaagagagtgatatattttacacatcaggaaaaaaaaattaaagtgatgcaaacttggttaacggtggtttggtgttcactggtggtaagaaaatgagtgatgattaacaaaaacatcaactgtgactgtgagataggtatatatatacacaaaaataacaataatgtgagagtttaagagacttcttaaaatgagtttgagac

SEQ ID NO: 250237 - DNA, 793 bp, Cannabis indica
ttcttcctcctcctcctcagaatccagtgctttgtttttttttggtctgctcacaataagccagcatctctgcggcttcatctttcaggaagcttaaatccatatcaggattggctagccacgctctgtagatagaagattttgcaacgttagtgcacctttctttggcatctgcctcgacaccctcaagctttttattggcttcattgaactcttctagaattttttggtgggcttcccgaagatctttggcttctttttaagcaccttcaagctcagccttgtggttcctctttagctcctcagaatccttggtcaaacgagtgttctccttttgggcattagtccattgcttagcaataacctcgcgttttttgatggatttgcgaagctcggattctaattgttagattttttgaaggcccctttgttgtgccacgtgagacagcaaagatgcctacaataaaagtaaatttagaagaaggatagggaagaacatataataaaatagaaaatgaagaaaggaactaaccaagagactaaggtttaggctcttctcaaacaactcctcgaagttgtcgttgttgatcaagtcccaatcaccagactgaaaggatttgaaatgacgccaacttgaggtggcatactgtgagcagattcgcaaaccagtaattcctgcatcttgatgcaaggggcaggaaggctccaaaaaaaccatctcaggttctgaaccccagaatttgacttggtggactgaacccaagactttctcttagtgccctcaatggttggg

SEQ ID NO: 250238 - DNA, 603 bp, Cannabis indica
tgccttcccaaagcttatggaggacttggagtcaaagaaggtaccaaatggaactatgctatgctttccaagtatatttgggccataatggaaaaaaaggatcttctttgggttaaatgggtcaatctcatctatctcaaagacaatcccttctggtctcacattcaaaaaccagactcgagctggtattggaagaagctttgcaagctgcggcgtatttttccaagggaggacataatgaaggcaggtaaaacaggtaacttcagggcgaccttactgtataatagccttcttaagcaggattgtgatagctactataaggctatttggaactacttgaatttgcctaaacaccgatttgtgttatggcaaattgtgaactctcatcttcttactcgtgacaatctcaggaagtttcatgttgagattgttacttggagctgcccggtttgtggtgatcatttgaaaactcatgaccaccttttctttacttgtagcctttcgcaaagagtgctgtccagaatttttgtttggctcggttacacggcctggccgatctctcttgagggctggaaaaaatggctcactctcaagcgatcgggg

SEQ ID NO: 250239 - DNA, 601 bp, Cannabis indica
gggctgggattgtgctgggaaaaagaagtgaaatgtgtgattgactactcctctaagtatgttatctctgccacaattgaattggaaccaaaaggcctcaaatggaccttgctggggatctatggaccgcctcatagagaggacaaagaagctttttggattcaagttggcgatatcgtcaacaactcccctagaccagtcctcctcattggagatatgaacggaactctcacggattcggaatgtttcgattacgctaaacagggcgactcttccaaatactcctttgacttccgtcgaatggttcagcgggtggggcttattgacttgggatttcaaggcccctgcttcacatgggctaaggacagaaataaccccaacaacggcggatcatcgaagagagcaaggctagaccgggggctggttaactccgactggcgcatcttattcccaaacgcaattgtcaagcacctctcctccaatggctcggatcacaggcctctcctgcttgacacttcggggggagctcgttgcaagagtcggacattcaaataaaaaaacatgtgggctagagacctaagatgtttttggattgtaaagg

SEQ ID NO: 250240 - DNA, 543 bp, Cannabis indica
gctaaatatagcataatttttatgtctcccattggcgatggtctaaaggcttgcccactcaaacctccataaatataacatccaactccacaaatcgggtgaaatatctcagggtccacccactcaaaaaaatcacaatcatgttacaaaaaattacataatcaaatcagtcccattaactgtgagattaagagggaagaattttttttaacaagaatcaaaactcatatatccattaatgtgaaagaagaagattaataataaagatacacaatctaaatccaaaaaaggtcaaagaaagaaaaggaagaaaaaaaggaaaaaaaaatcaaacattgaacttatgacaacacttgaatcttcgacatgggttcttcactgtctttaaggtgcgaaccacgacttcttgtggtggttcacaatcacatacccatacaccccatttatttctaagcaaaagtcgctaaatctcagcctgctcccttgattgatgctcgtggttggaagtgatgtaaattcaaatgatacccgtggttggagaag

SEQ ID NO: 250241 - DNA, 468 bp, Cannabis indica
ccagttcagcaaaaacgaagattgctggataaagaacgagcagtggccttgaaagatgaagttgaaaagctgtgcaacaacaacttcatcattgaagctttttacccgggttgggtcgcgaacaccgtactcgtgcctaagccgaataagaaatggcgagtctgtattgatttcacagacctcatcaaagcatgctctaaagactgttttccacttccaaggatcgatcagcttgtcgatgcaacacccgggcatgaaatattcagcttcatggatgcttattcgggctacaataatgcatctgccagaccaagaccatacaagtttctaaacagacatgggtctctactgttacaaagtcatgccatttggtctgaaaaacgccggagctacataccaaagatgttggaaattattttagagagagagagaaggtcggctatagagagaaagtggaaggctcagttt

SEQ ID NO: 250242 - DNA, 571 bp, Cannabis indica
gtattgatacctagagataatactatttatatcactatggatgagatttgatatagctctctgtaagattacaaagcatggatcaagtaggcaagtttctattgagagaatgggatagccttagaggcatgtgagagaggaagagagaaggccctcttgggcgtgtacaagagaggagagaatagagattagggtttcagacttagagtgatttggaggctagaattagacttaggttttctaggttagagttaaggcctttatataggaaaccctaaaccctaatttacaactgaaaccttagatttttacatattaaattgattaaatacaaaagactaaattcccatataaagtagggctgcacatggattgggttgggcgggttgaagctattttagcaacccaacacaactagatcggcctataaaatttcaacccattcacattatttttattacacaactcaacccaacccaacccaaatattacaggttgggttgggtttggttgaaaaccttatttcacataaagaaaattagatgttaatataatcaaatacatacctaac

SEQ ID NO: 250243 - DNA, 818 bp, Cannabis indica
cctatcgagaatctatcgataaataatcgagaacatacataaccgccaccaccacactagatcggataacaccataaccaccatataaaaccgaccataaattaagaaaaattcatcaaaaaaaaatatatttcaacacaaataatatataatctctctaaattaaccaaaaaaaaactaaaaacaaaatttttttttaacaacaccttgttgttgctgaaaagatcttgaagctcaagggctccatcacgatgtcatctgccaaatccgcttttgcaccggtgaagaagcacgctgcgaaaagctccgaaagcttgttacaagagaggaaacgcggctgggggacgcggggacgcgattgggggaggcagctgggggatggctagggactcgacttggggaggcaaagaagaaggaagatgaaagggggcgactagagagagaaattgttttgagtttatttaggttttaaaaataaataaatataagggtatttttggaaaaatgagaagttaatagattagtattgtacaaaatatttaagagggcattttttgaaatagggttttttttatgtacattaaatgaaatacccgcttttaaatcctaagggaaaaggagtattcatgatatctggatgatacagctcgagctcctcgtctgagtcgtatccagattgtctccctgattccccccacttgatatctcctgaacttgtcctccaactcgtctattcgcaattggattggatcctcttgctttggaccgagttgttggcgagatcagtttttcccgattcagtgctctcgcagatctgg

SEQ ID NO: 250244 - DNA, 931 bp, Cannabis indica
gggcaacatttatcccagccttgttggtagagtaaacgaggcttgcttaggtgccttcggttgttttattgacttcctggcacgtgccctgggctcgtggggatgcatttatgaccatcattactgcagttattcactttttgcagacaacgattcgtttcctatccatttaatgatacgatgcattaaatgggtgtcagtcgagtactcaaacattttctactgccttgatgaacgcttgtcccaactgttggatttgtagaatgtgaatcgatttctattctgaccgtacgatgagggtcgatcacagctgtctcacacctgttctggactataaaaaccagccttcccatttcatttgattactttcaccatttcaccaaattttctcagagctttcacagagaggaacaatttcaagcaccatagattacttgcttctcttccttcgccgttgccagccttcaaactccatgtaagttctcagtacactttacacttgcttactgtttgtttacatcgcatgtttatgatttctgggttgaatgtcaaacttccggggaatgattttgcccgagtttgctgtgctaagcataaaatctctctttttgcgccttgattgtttctttttactacgttttctttttgggaatcgctcttatctttcataacaacgcctttagggcttagagtggttcgtgctttctcaactttgtcttctttcccttttttctctttctttttgcaatgtcactgcctttgggatttttgcacccgatgcttgccaaggaaagtctattggggttttcttatttggcaagcattcggagggggcctctttttagcggttaggggacccccattcccttttaaacattaggatttggtttggggcctaactgctggattaaaccatagttctattggcttt

SEQ ID NO: 250245 - DNA, 866 bp, Cannabis indica
tgaaaattttatttttacagtccttgtggagatgatatcgttacttatcattgtattactgtttgtgactaagtgcacttgcgtatatcaattttagcacaacaaccatgaggtggaactgaggtggggtaggtggaagtccctcatttgggttagcatggtcagtgagggaagaaatggtgttttcagtatcagtgagttgaacggctaacagaaaaagaacgagctaagtcttccatatttggcaaaatagaatcaagcaaggaaatagtagatttttggaacgaaaacatggtatgcagaggaaacaacagatcattacttaaataggaaattcctagtacaacaattaagacaagtgtagaacaagttttcatatctcgaagtacacttgagttccaaagatagaaaaaaagggcaaagaattaaaaaattgaatcaggcaggggattatccaaatccagcccctgactaggtaggtagacacagcaattaagactaaaaaccctaataaaatcggaaaggacagtggtgattaaaatcaaatagggttcatcatgagatttgttcagggaagagatcaaacctgtaagggatgcattaatggttcgacacgtttgcttcaatcttgtcagcaaagatgtcaattctgatcgcagctggtaggggagagacggttggatgcaatctacattaatgttgagccaccacgacacggagaggggtggaaaaaggttttgggaaaaagaaaagaggaaaaatcatcattactattgaagttcgatgaagaagacgaagagatctgggtagagagcatgctggtttcagtggaagatactcgagggtgtggaaaggtcctcattaaa

SEQ ID NO: 250246 - DNA, 873 bp, Cannabis indica
aaaatttaaatagcatctcatttttttactaaaaaaaaaaagtaaaattaaggtggcgttaggtaatgaaatagagtggaaatgcaaatgaaataattttccttctatttctttatttgcttgcatattaaagtattagaatgtcattttaatattggaatgacctttctatcattttggtggaatgactattttattttaagataaaagaaaaaatcattctaatacataatgaaaaaaaatatcaatttgtttatgtattttaaattttattccattcatgtttctatttcaattctcattctttttcttatgtattcattcttccctattgaaacgacacctaagtgtccacaagaaaaaaaatataactaaaatgtataaaagttaaaacatagaaagaattttaccgccaattaatcaaattattattacttgttttatcggtatactgtatacatgtgttattttataatatttctatatttaggtggcgattggtaatatttttatttttaaatttttaattacaaaataaaagtaatttttatttataaaattttgatttttaaaaacaaaatgtgttttataacgatttttatttttcaatttaattaaaaacagaaaacaaaatatgttctgtaaattttattttcattttcatttgttgattttatttaagttaggtttgaatgcaaaactggtatcggggctgggtcggggtccagggtcgcggctagggttgtcaaattctaaggtctaagttcgtgtcagagtctaaaatattaattgagaaaaaaatatttaaaaaaatttagaaagtgattatttttcaaattttaattcttgattaaaaatttgataataaaaaaa

SEQ ID NO: 250247 - DNA, 860 bp, Cannabis indica
aatacaaaattgttatttaatttttatttaatgattaaaagacattttttatttcatataataattttaaaaaataaataaatacccgtcgcgaagcgcggattgtttactagtatatatataaaagagaagtatgagacggtaacatggtggtctaaaatctgtccaaagctatttttcttttttctccttaagtctctcatgtttttaatattttattaaagcataaatttacaaattaatattttactattattttaataaattttctcgcggtccaaaatctctccaaagctatttttcttttttctgcttaattttcttattttttttaatattttattaaagcataaatttaccaattaatattttactattattttaataaattttctataaaaatatctatcttaaattaattatattttaaaaaacacataataataaatataaatataaattaataattattcaattatttatttatacgtattcataactatatatatgtgtgaatttttttttactttgcagaatataaaaaaaatattttttttatagaaaaaatttattataaattgaacaaaaaaaaaagcatctatatatatgaaagtgaagtatgagacggtgacgtagcagtctaaaatctctcaaaagctattttttttctccttaattctttcaattttttaatattttaaacttaaatattagaacctcagtaaaacattaaaaacagactaaaacttaataaaattcgaactaagaacttaacacacagactagaataaaaattaaaccataaatgagaatttatgttactatttttcaaattttaatatttattagcaacaaattta

SEQ ID NO: 250248 - DNA, 651 bp, Cannabis indica
gctaatatggtagctcattgtctcgcaagagcttccattttatattctgatcgtagtttcaatttgggggatgtcccaactgatatgctaccttatttggtagctgaatttgctagctaataaagtttgcttttgccttcaaaaagaaaatctagtttatactacataaacctattcaatcctatctaattctctctccttgaaagattaacattttatgtatttaataattaataaattgaaaacaattaatgttggattctcctaatatggaagagtttgaaatagataagtactaataatactaatggaaatattgtagagctggctatttattttaattccaaaaaaatattataataaattataattattatcaagccataatattaattccagctatcaaaattgctatttcttaatatatttccatatggtttcttgtttattgttcttaaagaagagaaatgacaaaataagaaaaaaaaaatccaactaatttttattgagaaaattataattaactccaatgatctctctgtgtagctacatattaaccctacgaagacaataaaataaatgattgctaaagatgaaactaacaatacaataatttgatttagagttgactgaaaacaggataaacagggg

SEQ ID NO: 250249 - DNA, 795 bp, Cannabis indica
cttttaagtatcttggcgtatcggtttgctcaaaaaacatatatttagcagaatataatagcatctaaagaagatgactgccaaaaacaaggtatggaattcaatgaacttattatgtatagggagagttactctcataaagtttgttatgattgttagaattttattgggatcacaattgtatatataaaatgtgtgctgggtcatcaaataaataagtcaaatttatgtggtctattttggaagtttatgacttaagggcatgattgtcatgattttaatatgtggataccaattagacaatttctaatttgatgaggggccaaattagaaatagtcaaaaaggattaatttaaacaggtattggtccccattttttgcatcgcttcacatatcgtattcttgaatccccatcatcaagaaaactcaggttctagagaaaaaactttgatgcaaaaattggaagatcgaactattcaaaatcgattctatggactccggtacgcttccgctaatctatacttctattgtttgattctcatgaattaattaggggtatatacagatttacagtattcttaacagtgattaccatacactcttattgggctcaaataaaattttttaaccaagaaactcttgaaagatgtggaagctatttgtagggcctttttttggaaaggcttagcagatgatagtggtcgaagtttggtggcttggcaaaatgtgtgtttgccgaagaaagcaggtggttgggcttttgaagagtgcatgattggaatatggcagccatgg

SEQ ID NO: 250250 - DNA, 999 bp, Cannabis indica
atattcgatctccattgttggtcctacatggttgattgtttttgatataagctcgagatggtagacttcgtctcccatatggatggttatttattgaagcatttaacatcgtaaaggtctcgaaagataagtatttgctaagtttttctctctattagactctcccctacggtgactacttagagataaatttacaaagtatgaaacaatggtggaagctcataaaataagagtaaccttgactctcgcctaccgggacaatgttggattcttatttgatcgaataaaaggttgctagaatggtgtccattttagatgaactgacaactctattcaatgaatgatatctttgactctcgcctatagggacactgtatctgtctgttggaaaccttagaaattatttaagatgttcttgttttgtattttcacatgtctttgttatttctaaatgcttgataatttttgaattgtgtgtgaatttatattgaacctatattttttgttattaattgtagtagtataatttgagatcttcattgttagtctaacttaacttgttgttttaatgggacaaattccaaaggattgtcatccattgggcaaacataatagtgttcgatctcaacagataagtatttgtaaatgcaacatctagttgtacatccaatgatgacaacttagactagtgtttacaatatgaaacaataaagtagtttctaagataagaataactttgactctcacctactaggacattgttaaattcttattttattcgaaattatcctttaattattcctctttagctttttcaattagaattttcttaaaaagtatatcatggatagaaggattataaatcatctgcttatgatgtaatcctattttcttttatgaaattgaatggcacagatgactacattcccgatattctatcgtgaaatgatgtaaattctcgatcttagaaatcttttacgtgtatatgtttactttagg

SEQ ID NO: 250251 - DNA, 1055 bp, Cannabis indica
atgatgatggagatggagaagttgatgatcgtggagatccacctaatgatcagaatatttctgaaatcattgactgggctgaggagactttaaggcatttggatgatgatggaggcctaacaacatatgtaataccattgcagcgaatccccccacaaatcccccctctgccagatgtagcaccaacaacccaggttagtgtatatatttgtcaaaatgaataattttggctctgttttgttggcatatttctaatttttaatttgcttttcgtttacatgataatcatggttcaacaggttccccaaaggtggagatcactggttataaagaggttgaagaatctccaagagctaaaagacttaggcagaggaggaggttgagatttagtgcccaatcacacccccacactgaaccagaacccaacactcaaccagaaccccacattgaaccagaaaccattctccaaccagaaccccacattgaaccagaagccattctcccaacaccccaaaccctatttgaaccccaaccagaaactgaaacccaaccaaaaccacaaccccaccctgaaccagaaactcatagccaatctaaaatccaccctgaacttgaagaatcttcaagaggcaaaagagttaggaaaaggaggaagcttaaggaaccccaatctaaatttgaaaccccaccaagagccgaaagacttaggcagaggaggaactacaaattcccccacactgaaccagaacctatatcacagccccaacttgaactagaacctatatcacagccccaacctgaatcagatattataacccaacctgagtttgagtttccctcacagttatcccaacctaacactcaaacccaaccagaacctcaccctgtatcagaaacccaaccatagctgtatttttttttgcatgaggacgaatactatggtgagccagaagtagagaggcatggctacacacaacctgacaattatgaatggtggggaagttacactgaattggttcctgataacctctgtgaagatgaaggtgacattggtg

SEQ ID NO: 250252 - DNA, 530 bp, Cannabis indica
agtgaattttcttagaattctcagaagaaccctaccagaatctagccatcgaagctttaattcctttgcataacttgacaggcagtctaaaataagccttcacataggtaggaatagcctgaatgacaaccttgagaagagtctctttaccagccttagaaaaccacttggcagaccaatttgtgagaacagaaagaacttcatccctaaggaaagctaaagagtgatacttagatcgagaaagacactggaaaagatccaaatacttgctaatgaaaagtctatcctcaagatcaaaagtactgaaaaagagatctctaagactttgaggggtgttaggataaaacaaaatagaggatttggaaaagttaatgacttgtccagacgctttagagtaaatattaaaaattttcctgagagagggacaagaattcctatcagcagaacaaaaatgagactatcattagcaaagaaagaagagagatggaaggagcccttctagagatagcaatccccttaagaaggccctc

SEQ ID NO: 250253 - DNA, 819 bp, Cannabis indica
caatacttacattccaatatgatatgaaaaaaattattggagaatataaattcaattacccaaatcgttggaggttatttacattcaaatattggaaggttggagatcagtggttgcgattgtggtcgcagaggtgtagtgtcgattttgttggtggaggaggtggaaggacgcatgtgatggcagaggaggcggagcttgtgtgcattgggttaggttgcgatagggacaatctgttgggatatgttaagtaagggtatgtttggtataagacttataaaagtggttagatttcaatgaattttaatatgaagttatttttgattaattgataaaaaaaaaaagattgatttctcaatttatccctatttattatcaatagtttccaccgaaaatttgtgccactgataattgcatcgttgggcctgggctataagggctctaagctacatgcatagttcaagggaaacttacaaaaatactgtcacacgaattgtttttcaaaaatactgtgtttttacaaaacaccagtagaacgcgaaacaaaacaactcaaaacaacagtagaacaacaaaaaaaaaaacaccagtagaaaatagtgaaaacttaacacagtatactgtagtatgaaacttataaaaaacacagtaaaatgtaaaaaataccggctcacaatatttttgtaaaaaaatagcaaaagttagtataccatttaaatttccctagttcaatgtgttcatgagcacttcacccctgagatgtgaatcatcgaaggcacattagcacaacgtacatttttctatatatttcgtgttgta

SEQ ID NO: 250254 - DNA, 909 bp, Cannabis indica
attttgtaaatgactagtaaacttttgtaaagcattttgtaaacgggatcccgaaatattttgtatgtaatattataagttttaattaaatagcaaaattttaattaatcacgattttcattaacctcgttgattagtaacgagctgcacagtacgtttaaaatcacgtcaacacacctatgctagttagggtgttacaggctgagtattggtacaatacttcttttcactcctccttgggatgtaccccttttaatgtattgtatggaagagatcctccttcactagttcgacattcttctggtgccactgctgccattgcagtggatcagttgttagcagagcgagatttctttctggatgacttaaaaatgcatttactcagggctcggcaaaagatgaaatcttcaggtgccgtgtcttgtcaattggtggaatttaaagagggcgattctgtgtttgttaagttgcgactttatcgacaaaagtcattggctattcgcaaaaatgagaaacttattgctcatttctatggtccctttaaggtaagcacattggtgttgtcgcttactgcttggatttacctccatcttcaacagttcacccagtatttcatgtgtctcaactacaagcagccattggcacatcgcactcctctcctaccttgccaccaactctaacagcggatttggaattgattgttgaacctgcagcagttcttgatgtgcgtcgcagtggggcagactctaattctgttattgaagtgcttattcaatggaagaatctgcctttgttcgtagccacttgggaaaaatttgacaccatatgagctcaatttccaacatttaaccttgaacaaggttaaagaaattggggcgggggggtaatgtttgacctttggttagcttc

SEQ ID NO: 250255 - DNA, 524 bp, Cannabis indica
aatcagaaatttaaaacagaaaggctgcacaaaagaactaaaatgaaaataagcagacacaagtatagagttatgtgattttttctatatctgcacagcttttattggccagtgtaacaagaataaaattaaagtatatgccacgacagtagtttgtaatcaaaatcaacatgtttaacgaatacgtgaatagagaaagatggagagctgctggccaactaaactaaggagaataattcccttgtctgccatgtgttcaattgtctactgtctatttaacagaagatacaggtttctgtattgtaattatctcaatatttatttatgcaaacaatgtttcactttcgtttatctacgagaaacaaaagccttggaattggttacaactaccttaataccactttatgaaatctataaaaaaaatcagatttttaacagaggaaagctcgtacatttttggtaaaaaaaagaagaaagaaagaaagaaagatgaaacgtactgtgacttcaatgggcaaactagt

SEQ ID NO: 250256 - DNA, 739 bp, Cannabis indica
aataataaaaataaaataactaaacttttatatgtcactctacacatgtagggcttagccctacacgtgtaagctatattttaaagccaaaaattaattttttaattttgtcacaaataagatttattatttattttgaaacaaataataactgcttaattctcattaatctcttatttcattatgactaaaataattattattttacactaaaataaaattttctctctctctatatctatttaagaaatatattatatttaactaatcaatatagtttcatcaaataaaattaaatagttaaatattactttaattattcaattcataattgatataattatttaaaataataatttatacaaaattactattttatccataaaaattatttctcattgaaattaattatttctccatttgttcatcaaatcaaaccttcactacaatattgtataaatgtgatttagggaccatgaacctatatattttaaagctccaataaactcttgattattattgaactctttaatagaataatccgatttattaatttcattattattctactttaaatatagaattgcactttttgacaatataaaattatatttacagaattcttacttgtagttcattgctgtagtcaatataagtagttcacctccaattattagttcataattagagttggtcaaaattactattttacctttctaattatctcttgattctttat

SEQ ID NO: 250257 - DNA, 992 bp, Cannabis indica
atagatattacggtaagattatcatatctagttcaagttcaatatcggtcccttccgatgcatactccatacatcgaacccaagcttactttaaccaatgccatggaaaggacataacacttatccaatgtgcaagtaaactacgttgtagattatcatatcagttaaaccatgtgtactgataaatttaagaatacattaatcacacaatcttgattactttctactgtgttgacaacacaataaacaagaatatcagtgtgataaggatttggatgaatttattaatcaaataagtaaataaatgatcacaagaaccaaatatacattaaacaagtaatgcaattaaatctgtttctttattgataattgaatagaaaagattacattgaaatagagttttatttagggcacaaagcccaacacaagaatggccaaaaacacaataggaccttttgacccctagtttggtaggtagctttctcatcgtgtggtacttgatcaatgcaagatatctcataaaagtcttgacacgtgtcgctcaaaggtttttcccttaaaactaattgcctagacaagccgttggacaaaaagaactatagaggcacatatgcgcacaaccacagtctgacgcatgggataagatctgatttgatgttagaagatatacaaccatcgggcttagctctagattagggcttaaggagtttcagggaggttcggctaaggtcttcctggatcagccaatttgtaatcatcttggagcgtatgtgactctcattcactcccgatagcagaagcataaggtgataatctctagaatcatctcgaccttcgctggagaagcattctttcgggtactgcaacaccttccataaccttatttaggggaaggtctatgatatcggtatttaatctgatgtggcacccttccgtgacttcctcataaaattcaggaataaggataacaataatattgatagatttaataa

SEQ ID NO: 250258 - DNA, 419 bp, Cannabis indica
ttttttgaatacttaattaattttaaaaaattacatctaattattattttgcaacaacctcttgacctatcttcttcctttataagatttcggtttgtcccaacctaacatttgtgaatttttcatttcgatacaatctcctacatctttgccaaaaactcatttctctattcaacgagctacagttagatttttccttagtttttaataatttgcttgttattttcctacagttatgcttatttgtaaaaaaagaagcaacaaattcaattaattggtaatctactctgataattccttttacaatctttcgattgataaagatgatttcaacgaggagcgaaaaatagttaatgatcattgatttaatagttgttattgcattttgtttacttaattttttattttttaaaagtaaa

SEQ ID NO: 250259 - DNA, 691 bp, Cannabis indica
attccagaaagaagtcactgcctgaaatatgtcatctcccattatctcccagcaatcttggaagaaaaagctcgagtaaccatccggaccaggagccttgtttccaggaatgtcaaagagagcagctttaacttcatctttagtaaatttcaacatcaggtcttcagcttgctgtgtggacaaaactgcacccctgttaactattttcttgaggacaggccttctgttagccatgcttgttcccagaaactccttatagtaatcaacaaatgctgttgagatcagatttgggtcaatgatcctggaaccttgctggttttctatagagaaaatctgattatgtcttgctctttgcttgatacttgcatgaaaaattgcagtattcaaatctccattttgtatccaagtgatcttagccttctgttgcaggaatgttgagtagtcttactgcacctggattagcttagttctcgcagccaattctctatcaatcatctcaatatcaagagggtcctgctgtaattgttgttgcacagcttctagatcaccctgtgctctctggacagccgtgtgcatatcagagaaaccagctttgttaatctcttttagaaccggttttagaactttaagcttggaaatcacttgatacatcttggtcccatatacctgattgttccacacctcctgaacc

SEQ ID NO: 250260 - DNA, 769 bp, Cannabis indica
atatttttgtaaattttcttttatttatttattggattttgaagatttgattcctcttgtgcatgccatttttttttatataaaatatacactattgtcatctgcttttgcataattgtgtggtgagtttcatgtttgcattccatacaagataatttagtacaaaattatcaaccctaataatgtgtatcattaatttctttttttccaattggaaaaattataggaattatttcacaaatacataaaaacaaccaaaaaattacaaaaatacggtttcaccgaattttaaatatttttatgatttttttaattttatttatagaaaatacggtcttttgatgttgtactcttgataatttgttattaattttttgttgttgttttaatattatttttatgttacttttatgtagttttcttgttgttttcgtgttgtatctatagaaaactgtaaaaatataaaaaaaaattcttaaaacgtaaaaatatatatttttttaataaaaaatagtggcttatgtaattattcaaaaattatatttgatacatattctactataaaaaaaaaagaaattacactctatacttattttttattttaattttttactttcattttattattctttattaaaaactctaattttattatatttagtactttgattataaaagagaatatttatcaattaaaattattttaaaattatgtttagttaacgtacttaaaaatgagtaattttcaacttattccaaaaaaaaaaaa

SEQ ID NO: 250261 - DNA, 1564 bp, Cannabis indica
aaatctagctgcccaaaagagagagaagagggcgaatgatataacagaagagagcttgagctgagagaaaagttgaaaaaacaatcacaacacaaacaaatcaaaattgctaccataacatagataactttaaaaaaaaaacattttattgtttaagctattaaatttttcaattgctaggctttctaagtagaaattaaataagattaaagtattgtatacacgcttttagagttgtattttttttgtttttcctttacatctgacgctacgacaccctctaaaataatcatgttattgtttaagctattcaacttttcaattgctaggctttctaattctaagtaaaaaaataaataagattaaagtattgtatacacatttttagagtggtattatcttttgtttttcctttgcatctgatgctacaacaccctctaaaatatgcataacatacaaaatcgtgagtttccaacaaacaaacaaaaaaggagaaaaaataattatcatgacactatagattatttttaagaaaaatcaattcatccaaacataaaaaagagaaaccccaaataaaaggccatacagtctaccaataagaataaattgctaacttcaagtaatcccacaattatgcaaaataattatttttttaagctatgatgaacagtgtagttgcaacaagataattttactgttgataagagtcctgcttaccattctacgatcaattttagattggataacaggtatatgacttttacgcttgtcaatgattacacgttgttcctgaaggtccctatctactttatatacccaagaccaagcgagcttcttctttaactcccgtaactctagcgatgctcgttcaacatgtttcatgttattaatcttttcttgcaattcattgagttccttctctattggtttaactgcatcctctaactcacaaacagtaccatttgcagatttcaggtgctgatcaatcatttccaaaagatcatggactcgctgaagaagagtagccttgaaaaagaactgagtaaaaaaagtgtcagagtagcatagttggacgagtactataaatataaacactagaagacactaccttaaatttgtccttgtcatttccagaatgtaaaaactctctgcttttgtcttgactcattattacacatggatttttcaacatcaatctgcagaatacaaagcacaacagagtagacacccattaaacaagcagagatggtaccatctaactttaagaaaagatacaagaataatatttatgtagcttaaaaaattattgaatctttcatcttcctttgagaaaaagagtagaagtatgaatatcatgacattaaaatatgacatgctatacctgtgaactacaccacaatcataatgttttacttatgcaatacagccatccgtttgtctttgatcaacaagaagaaacaaaggctattattaataaggtatcatctgagttacagcccagaagctacttaatatctgataaaaaaataatagctttgcatcaaattacagccataatgacatg

SEQ ID NO: 250262 - DNA, 675 bp, Cannabis indica
tgggcttgctgtcctgatgacagtagatctgtggcaggttattgtgtttatttaggagacactcttgtgtcttggtcgtccaagaagcaagtcgttgtttcaagatcaagcactgaatcagaatatcgtgctttagctcatgtagctgctgaaatatcatggattgagtcgctattgaaagaacttaactttcctttcctgagtccatctgtgacatggtatgacaaccttagtgccagtgctcttgctgcaaatcccgtctttcatgctcgaacaaaacatatcgaaattgatgctcactatgttcgtgataaagtgttgcaaaaacagcttgagattcgatacattccctcacatgatcaaatagccgattgcttaaccaaaggcctatctccttctcgttttgccttccttgttgacaaactcggtgtgagaaactcaccctttcgtttgagaggggatgtcaaggaatagcatttcagccatgtattactacaccagcaatatacactgcaatcctcaccattatgttatgcctagtcattgtgtaatcattaggggaatatttaggctgaatattccagatctttattcttataattactgccaggtgtcatgcctaatgactgaattgtattctgaactttgctataaatgaattgctctggctcatac

SEQ ID NO: 250263 - DNA, 531 bp, Cannabis indica
aaacatagggaaaaatttatttatctccgtacgtacaaacatgaattaagatattattgccttatggaatctattaagaagaaagataacttgtgggttaattggattaactcagtgtacttaattaaaagaagaggaatgatgggactatgaagttccacttgatgttagttggtattgaagaaaaataataacaagaaaaaaattaaagcttttttctctaaaaatgagtttcaaaagtttaatttcaggtttgtgtgacaaaatgcaacaaactaatatggagaagtaatataaatatctgatttgggacaggttcatattgtgcctaaacataaggtgattaggtgcttaggtgattgtcccttcagaaagactccctacaagaggatcagttattcatgtttggtagaattcaagattacacttgtcttttgtgtggtttagataatgaatggcacaatcacttcttctttaattaactgctgctatagcagcaaaactttggaggaaattgtcatttggtgtggt

SEQ ID NO: 250264 - DNA, 992 bp, Cannabis indica
gttgaggaaaaatgtcaagaaaatattgaagaggtcatggaaactagaaatttcaaagaagatttagattatatttatgatccggaaagatgggaaagtcttgataataaactaataaacttgttagtaaaaaatggtcaaattagagtaatacttgattttagtttaattaaagatgaaaatggtagacacttttcaacttcttattattcaaaaatattgttaaatggagaaaaatatgatagaaggtggttattcaaaaaagtttgataaagtatattgtttttgttataaattgtttggtaaaaagtctaatatggtgagtgtgagtcaattgagtaacaaaggaactaaagattggaggcatctaggtgataagttaaagaatcacgaaacaagtaatgatcacatacttaacatgagtgcttggattgacttagaattgagacaatcgaaaaacaaaacaattgataaagatgctcaagaaagacttaataaagagaaagagcattggaggaatgttttagtaagaataattgcaattgtcaaaaatttagctaaaaataattcggcctttcgaggatgtaatgaaaagatctatcaagaaaataatggaaattttttaagcttaattgaaatgattgctgaatttgatccaataatgcaagaacatgttcgacgtattcaaaatagtgaaattcataatcattatttgggacataatattcaaaatgagttgatacaattgttggcaagtgaagtgaaaaatacaattttaaaaaagatcaaagaagctaaatatttttcagttttacttgattgtactcctgatgtaagtcatcaagaacaaatgtctctcatattgaggtgtgttgatatttcatctaatccaataagagtagaagaatattttttgggatttttgaatgtggaggatacttcggggaaaggtctttttgatgaacttacaaaagaaattgaaaatttgaaac

SEQ ID NO: 250265 - DNA, 947 bp, Cannabis indica
gagtggactattgtgatactttttctcctgtttctaaattgacatctgttcaattgttcatttccatgatagctactcatcattggccttggcatcagctcaatatcaaaaatgcttttcttcatggagacctataggaagaggtgtatatggagcaacctcctaggtctgttgctcagggggagtcagggtgagtctgtcatctttgcaaatctttgtatggtttgaaacaaagtccttgagcttggtttcataaatttaatcaagctgttaagaaatttggtatgttgaaaagtaagtttgatcattctgtattctataaaagatcaattgcggtattattatgttggttgtgtatgtggatgatgttggagatgatactagaggtatctcatcccttaaatcattccttcatatccagtttcacatgaaggatttgtgggtgctcaagtatttcttgggagttgaagttacttggagtaaatgatgtatttttttatctaaaaggaagtatgtacttgatttgataattgtgatagaaaaattgggagcaaaaccttgtagtactccaatgaatcctgctatgcacctaacgagtggagaaccatatgaagatcctgagaagtattgcagattagttggaaagttaatttattttactgtgattcgtccagatattgtattcacagttaccgttgtcagtcagtttatgtcatcgccaacaattcgtcattgggcagccttagagcaaattttgtgttatttgaaaggaacacccggacgatgtaatgtttactaggatcatgggcacaccctgattgagtgtttctcaaatatatattgggttggttgcaaggtagatagaagatccaattcaggttattgtgtctttgttggaggtaatttggtcttttggaagagtaaaaggcaaaatgttgtgtccagat

SEQ ID NO: 250266 - DNA, 503 bp, Cannabis indica
tattggagtcagatgatgatacttcctaaaaaagtactgagatctatagaagcaaattgcagggcattcctttggaaaggtcaggcactctttcatggggctgggtctgttgcttggaataatgtttgtcaacctaaagctgcaggtggtttaggaattaaaaacctggaacattggaataaagctgctatttgtaaatatgtttgggcaattgctaataaacaggagaatctctggatcatatgggtccatagtgtttacatcaaaaagcatgagtggtgggattactctgcctcgattcactcaagctggtactggaagaagatggttgctcttaaagatcaggtaaagagtatgactatatgcaaagtatcaaagtcttatactattgcagatggttataatctttttcatccttctccaaacaaacaacactggagtaatgaagtatgggggagattcaacacaccgaaacatagtgtcatcctttggttggctatcct

SEQ ID NO: 250267 - DNA, 623 bp, Cannabis indica
aatatctcgctttaaagatccttgaaaccaaggaagacggtctagtaagcaaccgccagccctgctttccaagaagagcgagattaaaatcacgtagatctctaaatcccatgcctcctccccttttatgcttgcaaagtttgtcccaagacatccaatgaatgcctttaccatcgcttttcgaggagcgccaccagaatttagtcatagcacgctcaatatcattactaatatccaagggaaggagaaaaacactcatcgcgtagcttggcaaagcttggaccacagatttaattaggacttccttcccagctcaagaaaggaatttgccttcataactttgaagtctcttatgaactctatctctgagatatcccaacacaacagacttgttccgactcatagtactaggaagccccaagtaaaagctaccttcagcagcctcctgcatttgaagcagaacagagttgctgtttaaccataggctccgtgttagtactgaagaaaatcgaagatttcgccagattaacttgttggccggatgccaactcaaaaatatgaagaagattctgaacatgagcggcctctgtaaccgtggccttacagtacaagtaactgtcgtc

SEQ ID NO: 250268 - DNA, 745 bp, Cannabis indica
cacatttgtttgaccatataaattgttgatttttcttagttaacttggttagtggcatagagatcttagagaattctttgacgaaacatcgataataccctgccaaactgagaaaacttcgaacttctgtacagattttgctctcggccaattcttcactgattcaatcttactcgggtaaactataattccatcttttctgacaatctgccttagaaaagatacctctgacaatcagaattcacactttttgagcttacaacttatgtctctaagtcactgtaataccattcgaagatgatgctcatgctactctcctggttgagagtatacgaggatgtcatcgataaacactatgatgcagttatcgagaaaataattaataattaataattaatgttaattgcctttactaatccatattataaaagcggtcattacacagataatattgaaaaatctttaaagtaaaaaggctcaactctaaatcctcacatgtattgaaatatttgaaaagaggaagggttgtcactcttggagttgaaaagatatattaattgactctcaaatggataaagatttttaggacgacaatgtaaacaattattgacccatagatagggtaaccaaaactattttgaaattcaaatgacaagttaacttttgggattttattacagtacctaaagccaaaaataagaaataaacaacgatttttttgtttggtgactaatatttaaaaaaa

SEQ ID NO: 250269 - DNA, 901 bp, Cannabis indica
ttctgtccttcttctttacaaacaaaaccggttcaccccaaggtgaggtactcggtctactaaatttcaaatccaacataccctgtaactgaaccttcaactttttcatctctgtaggtgccgtctgatacagagctttagatactatttttgcccctggtatcaaatcaatttcaaaatcaatctcccactttggtggtaaccctagtagctcctcgagaaaaatgtccaaaaactctcgaaccaccagaacgtgttcaggtcccgttggtacttctcttatggtatcgaccacactggctagaaaattgacacatccatctcacaacaaatatcttgccttaagcaccgagattattagaatgcgggatccttgagcccttcgtgcaaacacaaatgggtcctcaccctcaggttcgaaagttaccatctttcttttgaaattaatggtcgcgtcatactttgctagccagtctataccaagtataacatcaaaatcttctatatttagctcaattaaatcgactgataattatcttccctccacatacactggaagggacctcacccgcctgttgaagataaccaattctccagtaggaagtaaggaaccaaaacctcatcgtaaaacatcactaggtttatgtagatttgtaatcactctacttgacacataagaatgtgtagcaccagaatcaatcaaaacagtcaacatagtaccatcaatagaaatctgacatgtcacggtagaaggaccaacatcagcctctacttgggttagaatgaatactcaagcaagaactaaagtgtcatattttttgtattccgctccctataactgtgggcaatttcttgctagaacctgtagccggtgaattgttagatcttttcttacggtcat

SEQ ID NO: 250270 - DNA, 568 bp, Cannabis indica
tttgacatgatcaatcatatgcaataaattataaaaggattcgactaaattttgttaaagaactagaagattcttcttattgttaatttataatgctcaaaagaagaatgtgcatatcttttgtacatagaaaaagtgaaagtatattttgatatttttaattttaaaagtaatatatggaaaatttcatttaatttttcttctatacttgtttataagatgaaattatatttgtattgataaatattttgctaatataattcatttgaatatataagattttatttatttatcttagggatgttcatcaaaccgttcacactgcacaaaccatccgcaccacaccttaccgtacaaaaaatatggtttgaaattctttacattgcagttacagtttgcattttagccaaattgggcggtgcggtttggggtatcgaatttaataatcacggttcaaacaacaccgcattatatattacaaaagtattaaaactttacactataattttttatatataaacaactcatgtgctcacaaaactcatgtcatacaattaaatttaaggaa

SEQ ID NO: 250271 - DNA, 472 bp, Cannabis indica
tcaaatttccaagagataaaattgagtcaatcgagtttgagaatgagagagaacgtaagtcaattagcgaaaagattccatgattaatttgaaggagcaacagaagtggtggcatgggccattattttaggagtatgatcaatcattgaagagacatggacaatagtcaacactactacaaaattaggctttagaggcagtttttaaggcctttcagcgtcggttttagtgaaattcgctaacgacgctgttccaggcgccactataggggtaaaaacaaccgacgttgtaaggaccctacggagtcgattattataaaatatccgcctccgtagggtccctacgacgtccgttattatgaaataacacactccgtagggtccctatggcgtcaattgttatgaaataactgactctgtaggggcttcctagaactttttttcaacttcaaaattttgtgttttaacatttt

SEQ ID NO: 250272 - DNA, 1198 bp, Cannabis indica
aactttttttttaatataacaaacttgaagacaattcctaacacgaacagatacagaaaatataaacagttttgtcataacacatttagataggattattattaaaatttattttgacaaaaaatcagttcaagatcctatttgtaccattttggaaaatagaggatccattttatcatttaacaaatcagaaggtccaattggtaacttttgtaaaacatagagtccaaaatagtatttacccttattagagagttttgtcaaaaattctaaattaatatagcactacatcaccattttagctctcaattaaagatgctctaacagtatcgtttgtaaaagtattcttatcattaataagttaaatggacatttgatggtgctaaacatcctatgagatgtatcttattattattacaatagaaacaacaatcaaaaatattcttgtgaccaaataaattatattttaattgagatgttataactaaatagagatacattaagaaaaaataaaatacaaaatagtgaaaagtatcaattgtaagaacaatacaataaaaaggaattatcccatatacttgtttttttttaacttttttttttttttttcaaatttacagtttgggtttctaaagtggtttttccggtagtttctatgtgggttgctatacgattttttgttgtgatttaggttgcttcgttagttgcaataggagtttttatgtagaatttcgtaaaaatgaaaaaaaaaatgttttaaagtgtaaaaataaaaaaaaataaaaaaagccctacaataaatactttaatactatatcataaaaaaaaatatttttgagtaaatataatattatatatgtattataatattaatatacataaatatttattaatatcctactaaataaatttataaactatacatatattattagatgtatacttttttaatatagaacttataaaatgcataactagttataatttagagattatttttatttattattgacccaaattttataacttattttatatatatatatatatataatgtattagaagttattcttaaaaaaatattcttatacgatactttaattcaacattatcataatcctcattagaaaatcatgcagtaagtttaaaaaaatgaaaagaaattttttaacagttagttttataaggctaaacaatt

SEQ ID NO: 250273 - DNA, 788 bp, Cannabis indica
gaatcgcctgaaatcttggctgccaattcttatatgccctttgctgtttattggatcattcgaattattgtggtttctctaacacaaattttgagcttcacatacaagagaatcgtgtatgtaacatatctgtatacttttttacacaacttcatacataatttgctgcaaattatttatttatctgtgaaagtaattaaattattacttttgcaacaattaagtacccaattactttcattatcaaatctatttataatatagatatttttgttacaaaagagcaataatttattatatttttgaagatattctcggattgtcttcttctagtgaaaaaggtaagttgtaaagaatgtttttttttttttttaagtttagtattgtgcttcatgatattttcagtgtgtaggattctttttcttctattacattatttcattgtaagcaaactaataatgctaatactcattcgcttgtataattagctttctctcttgagtcactgcgtgtttggtagctgaatttgtctaactgtttagcataatgtgcatcttttgtttgagtggtttcctgttataatattgataaactttcttttaaaaaaatacaataataccaactttataattttggacacttttgccggaatatacatctatcttatcttatgtgttgttctaatgaaaacttttcttgttctattaggttgctaaaatctgagcaatcgaaatcagtgaaaaaactcaacgacataaaaggccgtcttctggagctaattgaaaacc

SEQ ID NO: 250274 - DNA, 814 bp, Cannabis indica
caatgataaaatgtatggagagagatttgaaagttgatattgtatgacattgttagatttggtgactaagtaatgtgtccatgccaacatttctttatgcttattatgtgtactctaatgtcattgtgttgtaatgagctgtcagactttgtcatttgttttagtaagagcaattcagattgtaataagctcattttaaaagagaataaaagcttagaaattcattcaattcttgtgtgtgtgtgtgtgtgtgttggtactgagttctgtgaaatgctttcgggtgtgttcattggagttttcttcctacagatatctctaaaaaaaaaaaaaaaaataaaagaatctagttttagtaccccattcatgaagatagggcttttcttcacccaagcttgagcatgaatttggtctgccagtaaggatttctaatgccacaactccaaaaaggtgaccaagcaacacaaatgaaaaagttcagtgaaaaaagaagcacaaaacaaagtcttatcttaaagaaagtcttacaaggttcccgcgagtcttgtacttatacgagtcctatcatcataaagttttgcaaaaccgaagtctgacattttggagacgagatcagagtcaagaagaatgttgctggacttgacatctcggtgtacaattcgaattcttgactccttatgacagtaagctaaacctcttgctatgcctaagcaaatgtcaaaccatattgaccaattcaaattcaagctttggttacctgattattgtatgatacatctctgcaagcataaaacatatatatcacaattaagaa

SEQ ID NO: 250275 - DNA, 632 bp, Cannabis indica
aaaaattatagactttcatctcaaatgtctttttgatttaaattatatactcattagaattttcttttgcgagaaactagaatatggtgatatgcaggtaagaagtatgatgtttccccttaaaattaaaattaattagcaagtagaatcagtgacagatctaaaatttttgatcagtggggatttaattattataaaattatttattatttactttactttaaaattataattattttgttcggggctttttattttgtctgtataattatttaattaaatagaaaatatttaatttttttttaatactattttttttttattgggggctatagcccctacactttatttactgcgtctgtctctgaatagaataaccaataatataatattacaagagtggtttaaaatacaattaaaaaaaattgaattaaaaaaattattaaattttttttcatatgtttcattggaatggtcattttttttattttaaaattgaatagtaattatactaaaatagtaaaattggtgtttcattagaacgacattctaatactttgaaatgtaaacgtacaaagaaatggaatgaaaattatttatcttcaattttattctatttcattatctccaac

SEQ ID NO: 250276 - DNA, 1849 bp, Cannabis indica
caattattgtccagtcacttgtcaacattcccaattcaatcctagcaaccctggccctaataacagcagtgaagactcgattaagagttggaccactacaagtggattttcgacctataaactagttatgggcattcccttgtacggacaaaaatggatattgggtgatcaaaaagatatcagcattggggcaccaactattgcctatgttggtcctgttgcgtataaagatatccctgatccagaaggtgggatctttgataaggaggttaccaagtgcatgtacaaggctgataaaactacttggtatgggtacgaagctacatcttctataactgaaaaggtcgattatgctaataaacatcttggtgggtatttcctatatgccatcggagatgatgatgatgatcgaaccatgtgtactgcagctgcaggtataaaatactatcgtagtcatattattgtcactacaaaaaatcttacttttagtcacaataaaatttgtgactaacgataaaaaagttgtggctaattgtaaattatcattattgtgttgtgactaaaaggtccatgactaaaagtattcatcacaaaaattacaatttgttgtgactaagtatatttttagtcacaatatttgttgtgactaaaactaaattagtgacaacttgtaactaaaaattatgttttagtcacaagtaactttttgttgtgactaaaagtctcatttagtgacaaaaaattcatgttgtgactaaataattgtcactaaaggtagcagatttttgtagtgtgtgcttactaaaaaatctttggttaaaattattaaaaattaatttacaaagtattttaaatttgtaatattaattatttttttatttttttgtgcatgcagagcaaatgggagcatgagaatgaagatcttgtttttcaattatgaatgatggtggatttcaatatatttaaataactgcaaagtacccataaaaactttgcaccaataaaccaccttgatcactttatatttttctgtattgtattgtataataaattaaaaggctattcgttagtcctcttttgtgcaagaaaggaatctcgaccaccttatcttggtgtaagagtaacttcattttgcactagtacctaataagattgtcattgtttgtgtgccttttagttttatgtatcatgaaataaatgaataagtattgtgtgttttggagtttttcttttcataattttgttccttgcactaaaatgtgatgaggaaacatgttaacttcattaaagcaaaacacaaatccatatacgtactataaatacgtaaataataataaatttaatagaaaaataaagcttaaagtaaaacattgaactacactacttacaatttatatatgttctatcttttaaaatacctcccacatgacagtggctcagctgttttctctatattgcaacattttaactataaattaatgagaatacaattatctcactttaatttgagctgagaaatcaatatatgccttatactaatttttgaatttggtatcagagcaaaaataggctaatctcatggcaaatccaaataatattactccagatcaatagcagctcaaaggctaggaactgttatcttttgaaagaactatccaattacaaatcttcttgcatctataaaagcatttaaaagaaacaaattcaggtgtcacctgagtgggaactctggcgggtaaccaatactccttttgtactactatagctaggtttcgggtgtcacccattcttgatacattatgatgcttttattaatatatgtattacaaaacttaaataaaaaattaaa

SEQ ID NO: 250277 - DNA, 593 bp, Cannabis indica
tctctctgagaaactcgaagctaaccctcaatcaacccagaaatcccagatcaaacacaaaccctagattagatctaacaagatctaatctatacacaaacacacacacaaaaacagtgagattagggttagaaaacaccagatttttctcgaagttcaccaaataaatttggctacgtctccgttgagctgctcctcagattgagagctcgattccactatgaaaatgatgttcaaagttacaaggatgagattccaagtcacaggtatgatattcgactggtaatctcttttttagtacataataagtgtttaatccctttctctctcactatgctaactccctgttgttttcttgtgcatgtgagagctttcaactcctccttcttcaagcttttcacctctggatcttgaagaaattctctcaatcgtacttggttgtgtttgatgcaggtatatatatagatctagggttctgattattacccgtatttagttagttacagaaattagttaggtgtggattaacctaatccattctaactaatttctgttagggtttttagaggccgaaggccaaattaggaatttgc

SEQ ID NO: 250278 - DNA, 600 bp, Cannabis indica
ttcagtagttacaatatatttaaatctaagaggagcatttagctcattaaagacaccatctgacataaaataagattcttttgcgacacaatgaacaaccctatttgcagaccgtttaacaaaggataaagaaacattatggagaattggagaccagtaagcaaagaacgacaatctctaaccaacaaaccaaactaagaaagcaattgaacagaactattcaccgcctgaacaaccaccaaagcatcagactaaagtatcacatcttcctatcctttccgcttaatccaacataaggcttccttcactccaatcacctcagcaatctctggtctaagagagccaaaccggctacccgagatagcctcaaccaactaccatcaccatttcgagccacacacccaaattttcgtcactgctcactgctattaaaaggaacatccatcgaccctaggggtgttcatccaatccaatctgcattattttgttcgtaatgcatccgatccgcactaagtgcggattgttagacatttatttgtataaactgaaacatatatgatttagtataaagtgcggaattaataaatcatatatgcacta

SEQ ID NO: 250279 - DNA, 3029 bp, Cannabis indica
taatatgactacgatagtattttatacctgcagctgcaatacacatggtttgaccatcatcatcatccccaatggcatataggaaatacccaccaagatgtttcttagcatactcgaccttttcatttatagattctgaagcttcgtagccataccaagtatttttatcagccttgtacatgcacttggtaacatccttatcatagatcccaccttctggatcaggaatatctttatacgcgatgggacccgaataggcaatagttggtgccccaatgctggaatcattttcatcagccaatgtccatttatttccgtacaagggaatgcccataactagtttacaggtcgaaaattcatttgtagtgagccaactattaatagagtcttcactgctgttattagggccagggttgctaggcttgaattgggaatgtggacaagtgactggacaataattgtagaggattatattgaaaatgtcaacataattttcgagttcggaagggtatttgatttcttgtttcgaagtagcatttggaataatgggtttgcaataaaccgcaattgagagtagtaggttctttctattatcattacatgaattcaaagaagatttccaactgttgaagagattgcttaggtttctcatgtcatttgccgttttaggatattcccaagcaagctcaaaaccatcaaagctaaagtctttagcgaaagctaaggtcgattcaacaaacttgttacgtttttcagcgctctttgccatcatagagatagcggaggaagggtcattgtcatcgcttgttttcgggcctccaatagacactagagctttcttttggttgtcatgagcactcttgacaaaagacttcatatcattctcaagttcgggagggataatcagctctccggtatcatttttaacctgaagaaaggcataatacaggtgagtaaatgaggatacaatagacttattttcagatgaaaataatttttctttggatgcaagccagtaaccgatttggtacttcggagatgccattatatggtacaactgttacacaagaaaaaatattattagttgttgtagccctaagaaaatatattacattttcatacatattaaacatgttaataaaataattagatcatatgaaatatttagttagagttacctataaaaatgatatataattaggttttttgtagtggtgtgtttgttcacttgaatatcccatgctatttatagagtttttcttatcatgtcaagtgcatggattacttattcttcacctaacaatatattgtcaagattcatgaagtatctaaactcttaaaacttatctaatgcatcagtaatttactcactttttattatttgattaaacccaaaccaatttttttgtccgatttttcatatgctatttacactacaaaaaacagctacatttagtgacaactttttagtcacagtataaattttttgtgactaaatgtgacttttagtcacgataaaaaattatttgtgactaaaacataccatttagacacaagttgtcactaatttagttttagtcacaataagtactatattgtgactaaaaacacatttagtcacaataaattgtaatttttgtgactaatacatttagccacagattttttagtcatgatataaaaataataatttataattagtcacaattttttgacttttagtcataaattttgtaatgactaaaattaaaattttttgtagtgttatattttaactgcgctctccattaattttttcttgatatacattttggttgttaattttgatctttttttttagttaaggtggcctcactttcaataatttttaccatatcttttatatggttggttttcagggcggaattaggtaaatttatttggaggggctaattttttttttcatctcaccgtaatactctttcggctggtaataatactctttgatagtcacatgcacccaaaggatattaccagccgaaatagaggcatccattaagtgggataaaatatgttggcatcaaagtggaaaatgtcgccattaaagaggtgaacgtttcgcaacgttctttcaaaaaccagctccatgcacccctatattgaaatcacgtaacgctggtcgaaacgcttctcgtttgcatgttcaggcgacatgtctagttttccagcacacatatttaatgtgttttgtaacttttcttcgtgtaaacttctctaaaaatattccaacactcaatttaattatataaatgaattgtgaatgtttataacagctatattatcaccattattaatcccacaatacctttaactcatacatttacacaattattcacatatggttcatatgagttacaaattctagctatttcagattttgtaacgcctttctgttacttttttttggtgcatgattaaactatatttatcacatatatcatatatattaattattcattaatatatatatatacataatctatattatattatatcaaattttatgtcactacaaataaaattatttttgttaataactttttagtcgcaatataatttttttgtgactatataatacttttagttacaggccttttaatcataacgtaagaatataatagtttataattagttataattttttaattttaattataaattttattataactaaaagtaagatttttcatagaaatgataggaatatactcctttttctttttatagtgtcacctacacatattatgatagatatattatagaacatactaaaatcttaatttttttttctacatggtttccttaaatcctatacaatcaatgaatattttaaaaaaaaaattaaacactgatcaattataaatatataaccatattatatttaatataaataaaaatatttaataagtttaatatgatcgatgtataagcatgcttttattgtcaaggacaaagagttgaaattgactcatgctagattaatctaaaga

SEQ ID NO: 250280 - DNA, 551 bp, Cannabis indica
tataatagaataatatttcttatataagtttatgtagttcaattattgtaatcctcattgatgatcagaatagataaagatggtcattagaaagggtaaaaacacaaactaaaaattgtaatggtaacttttatcccattccagttgattagagtgaaccaaaggtgctctgataaattttccattactcaagaaagtcaaaattcactttgcctgactcaccatggtcaagtcttaataagatatcagtaaattccactttcctaaaatcattttagataccacacaaggcctttttctttttgatctttggcaagctccagcttttcgtaggaaaacaccagttacagtaacagttcatatatatgaggggaagttaatcacggcaaccattattttcacttccctatggttttgtcactggatgttgtagaagagtttttaatgaggtaatttctcaaagcgcaaataacttgaatatggagatattgttttatcttacgagaaatcgtaggcctaacaaatgcaaaaaagttgctgtgtttcacatt

SEQ ID NO: 250281 - DNA, 1529 bp, Cannabis indica
atccgagttttacacttagtttgcttattgaaagctaaggtatttgtcacttttctccggtgcctcgctattcacctttagggagatatggtttctcattaatacactatatgtcgtttgtacattaattcctcgcctaagaccttacagtgagtgggttacaaatatactctgatacttatgtaattaatgagttattccataaaaagatattacaccaactcacattctctttatcttgacacgtgtcctccagccgaattttaggtataacaattgccgcttaaaaagttattttttagtaaaaacagctttttaataattacacagggcatttttgtcaggatcttttcttggaaaaatgcaccctttaattctggaggttgtacggtttcgagagtcattatgaatcatctcttcatattttgcacaacttccagccgttaaatttctcaatctttggatttcttgtcaatgaacttcgtgtatcaaagggcggctcaaacttgtcatttttcattaacctctgtcttctttaatgaaatccatttaaagaatggattatttccttcctgtcaaaatgtctcttctgagttcagtagtttatccttctagactcataatatccagatgcaccaaccattttccatttgttcctatagacttcaagccttaaccggagctagaaacgatggactccagggctgaggagcttccaaaaaatccaaaccaagggaccaccgtagccttccgtggccaatcctcacaagtgatcccagagggtacaaatcttgtgagcgatctcaaaggtcctcctcaagcggatgaagaattccagaggaagactggcatggtttcaggtagatctgggaaggaagttggcgtggtttctatcagagaatccaggcaacccaagatcctaacctatgccaagagatctttacgtcaatctctcttcggcgttgagaaattttcggaggctaggaaaaagatctcggcttcaagaaatgggatttgatgatgaggataatagggtctgtacagagatcaaggctctctacatgcagacggtctttctcgtctatgtgtagccggtctttctccaagctatgtgtagacgatctttatctctcatcctctgcttaggacaatgacttaattgttcgcccctagtggcatttttgtatagacaagtttataaccagtcttaggtttttcttatcttaaatgccttatactgttttcatttgaacttaatacaattgtatttgcttgcgtttttcttcacaatgtaaacaactatatattgatcaaatgttcagtacttttgggtttttccattactcttaatcttcctgtttaagtagttagtaaactactaaactttatgattttcgagcggttgtcaattctacctcccaattgtagttattgttggattttgtgccctaaataatttctgttgaaaaccttggaaattatttaggattgtatttttagtattttctcttgtcattcctacttgctat

SEQ ID NO: 250282 - DNA, 706 bp, Cannabis indica
tgtaagtatacttcatcgctgattatcacatgagtgtaaatccaaaaacactataaaacagggacttagtctttgaatcatataatcacaatcacattccactgtgttgagaatactgtaattgtgaataaatatatgttctggacttaactaattttgtgtatatattagatatatatattaaaccataaacatgaaaaatacatgttaacataaaccatttcaaatctcttaaattgataactaatcagattgtaatagattttatttagggcacaaaacccaacaactcatacgttcactgggcaaatattttctgtggatgttccatttggccttgtctgagtatactatttattcatccttcatccactcattgttgattatgcttgtcgagtgttatataacatcataccacatcgtcaaggcaaaaattaggataacattttcccccaagtctgtgtacagacttccagttgcacggggactccttggcttcttcctttgactagtcaagtgacgcatggctttacttggatgaaccgtctagtataggtgtcgcataaaaaatcttttatcgtactaaatctttgcattatgtgactcttcaaagctttttccttccaatacgatcaatatactaacaaggtcggcagtgaaagtttttatcgtcaccttctggggtcataaaggaatcagaggcaat

SEQ ID NO: 250283 - DNA, 1541 bp, Cannabis indica
ttgagctgttgctatggcgaagatgagggggacgaagcagggcaagccaagatcaccagcgaagaaaaagaaaaaacgtggacctcagtcttccttagatgcaaagaagactaagtcgatggatgaggtgttacgaatcgaacctatcctcttttcagacgaagaagatatcagaggtgaagatcaaaacacagggtaggaatcagaattaattaaggagcacgaggacttttaacgagaggacatacgattggaattagcacaattgatggaagcaaagcaattcagggaggcgcaacaccaatctgcaactgctgttgcgagaggtaaggttgttattccccctgttttaagatctggtagtgttattcgcaatctagaaccatgtttttctggtccatcctccaagcagaaaatcaaaattaccagggaagaccccgtctattgtttgctatgtgctcggggaaaatccccttatgtctatcttagatagttttcttagaagggtttggaaggaaaaaattgataaggtgggaatgatctcatatggggttttcttggtgctgtttaagacaattgaagatcgagatcaggttctaattgggggatacatatttttcaataaacgccctgtgatcatgaaggcatgggacccaaacaaaaacttcaaaaaaagaagacattaattcagtgcctatatggttacaattacagggactagaattgaagtattagggcgagcaagtgttgtacaagattattagccaagtgggagttcctgttatgttggattcatttaccaaagttaaggagaagttgaattactcgcgtatacttatagaagtatccttgcaacaagaattcccagagaaaatatgctttgaagatgaaaatggtgatgataccgtagtctatgtgaactatgaatggaagcctactacttgtgctcattgcaaaggaataggtcactctacaatagactgccgaaagaaagagggaagcaaagctgaatgggtggttaaaaaaccaacagaggagactcgggctaagaaaacaagtgatgaagagggttttttaccaccaaataaagtgtggaaagagaaggttattgagaaacaaaatgtttctgtagtggcagtggcaaattccttcgaaagtcttcaacggatcaatgaaaataagcaggagaatgttgatgggaatgtagaaggtgaaaatgaatctttgcttgtcctagagatgggcatagagaccattggggacacaagaggagggtgagaacctcctcttcccaatggataaaattgtaagttggaatattcgaggagtcaacaaccaacaaaagcaacaaatggtgaaacaatttcttactatacagaaggttggtttggttggtctcctcgaaactagagttaaggcctcaaaactagggtccttatactcaagtgttttcaatggttggtgcttcacttcaaacaatccttggcatccaggagggagaattgtagttagttggaaaccaactagctataatgttaata

SEQ ID NO: 250284 - DNA, 702 bp, Cannabis indica
acatggtttatgaaaactttcaattactctactcgacacataggaatgagtagctttcgagttaaacaatatagtataggaatagccatttatagataactgacctgtcaccattgatggactagcatcagcgttagcctgagtcatggtaaaagtcatcctgggttctgagtagtattctttttcggctactctttcttggcctgaggacaatctttgataaagtggcccaccatgccacactggaaacaagccttggcccgacattcaccctgatggtgtttcttgcactttggcactcaggataagattggaatgaagatccgcggccttaacagccacctctatttccctaaaaaaatttattaccccctgatgtttcggaagcatcagccttccgtttatgatcagggttaccactgccggtccccttattgatattaccactagcaggaggattcgatgccatggcgacatcctttgttgtctgctctttggttacatgtttctcagcctcctcaaaaattaaggctatctctaccaatgtcttgtacaaagtgtcatgagtagtggtaattttcaagtcccaactgattgtggcattcaatactctcacatatttttgttttttggttaaatctgtaagcactagatcaccagcaaatttagacagtcgataaaactctagagtgtatttggcca

SEQ ID NO: 250285 - DNA, 700 bp, Cannabis indica
aactctgaaatcaatctctttgttatcttgtactttatttttctgctcttattttcgggtctcctctcactaataaacaaagatcattttttatctttgttgttaccatttttctgttgtttattttgtgtgtaggttctgggtgaaagctcttgtagagcttgaaagagaggaagagaaacaaggttcttttctgctggtatgtattgcagcaagaagaaataaggaacaaagggggctgctgcagttcaagggttgaaggaggtgctgcagttcgaaggttgaaggaagaactagggtttcggctgctaggatttcaaagagaaaggaagaagaaagagggtgcggcagctaggttaaggagaagaagaatatgttatggtgttagggtttctgctgcattaaaggattgctttgtactgccaaaaacggcagtgctttgagggagaagactcttgatccgcacaagagggaaatgtcacttttgaccttggtttttttgactgttggggtgttggtgtaggggttttttcagaatgcttttatttcctacataaacaataagaaagataaattaatttgagaagagcatgttttaatgtgatgatagaaaatattagttaagtagtttataatatgccctaaaacataaaaattgtataagatattttgtatgctttaattttgaatataatttgtt

SEQ ID NO: 250286 - DNA, 649 bp, Cannabis indica
aacctctataaaattcatgtgtctttatattgctttattatctttcaatcgttataaactacttgtcgattatcaaattagattcactgttgttggctaaaagcgaggtcaacaaattctattatttttaagatttattaacttgaaagctataaactttagtgtcccaaatagaaaaatttaataaaaaatataatttataaaatttattatattatataatatatatcaatcgaatgaataagataaaagtatatatatgtgaaataataataataatacttattattataacaacatctatttattatagtgcatttaaaacaatattcattactgcgtatctttaatatattgttttaaacctactattaatataattaatgcatataagacttcaatataaatgtatttcaatataataaaattcaattcataaaagataaaacatcagaaaatagcacttcaatataaaagtatattctagtataataaaactaggcaacatacactacaagaaaataggcttatctcggcgggcctagcccccagttattgttctatctcgacgggcacaaaccgccgtgaatttgaatgccgacattgagaaagggcattctcgacgtgctaggccccccgtaatagatca

SEQ ID NO: 250287 - DNA, 819 bp, Cannabis indica
aacatgggaagaaatgaccaaaacattttttgttaaatatttccctgtccataagaccaacagtttgaaaagacaaatctcaacattttcccaaaaagacaatgaaacgttctatcaagtctgggagagatttaaagatctcttaagtcagtgtccacaccacgggtacgagagttggcgcatcgtcagctacttctatgaaggcctcacaagtcgtgagcgccagttcgtagaaatgatgtgcaacggtgagttccttcaaaaggaacccgaagaagctcttgagtttctcattgagcttgctgaaaaatctcacacatggactggtccaagtgctgctgaaagcaccaacagaaatcgaccagctgggatttaccaacttcgggaagaggatagcttaaaggcccaagtcgaagctttaaaaaagcaaattgaaatccttacgactaaagatggccaaaaagggcgcatggttgcccaagcacaaactagaccactcgaaccttgtttcgtttgtggagaaaatgaccatttagctaaggactgcttagtttacaaagaaatgaagggggttcatgaggagcaatgcaatgccttagggcaatataacaagccattctcccatgcgtacaaccctggttggagaaaccacccgaatttcagttggagagataactccaaccaaggtcaaacgtctggaggacaatggagaaatgagaatcaagctcaacctccaaaggcatatcatgcacctcaataccatgctcaacaacaaggaaactcccttgaaagcaccattcatgcattcattgaggaaca

SEQ ID NO: 250288 - DNA, 561 bp, Cannabis indica
acataaaatgttatttttgatctttactagtaagtaaatctgattatattgaaatgtgctttatttggggcacaaaacccaacataaatatgagcctcaagacaaagttgttgaggacaacgctgaggagaagcgttagcctgatgagttacacctcgtggtcatcatggcgcgacaacttcaactggatgaaaacatattaactcggcaggatcacttcaacgagttgctacttcgcaagatgaccagaatggaggctgtgatgactaccctgacaaaattatctcttgatgcactagctcctccagcaatagacgcacctaagaaagcagatccaaagaacctcgaaacctcatgcacttggaaatacaagggtaaaggaatcgctgtggaagaaccaaaaaaggctccttctgcgaaacagcctaagaagtctaaagttgttgaccaacctcaacagaagagaaaaggaaaccacgcctcaaggccttgtgaccaaaccaattctagaggcagagtctcgcaaaaagacaagacagaaactggagtatggaagccaga

SEQ ID NO: 250289 - DNA, 784 bp, Cannabis indica
ggcgatgttgggaggatgagagttgacgactcaaaagaaacttgttcaattctttcttgaggaccgttaattaagttggaacatgagtccagttgagttacgggcctaactttggtaataggaattgaatcatgttaaactataatcgatagatacaattgaaatcgaaacccctaacttttaatcatcattaatttacctattaatttacttgcttcctatttttaatgtttttattgttttctgtttttaattttctcttaaatttgatataggcaaatagaagtaaagatttaattataaaatacttaacaacaatccttgtagaatcgacctcactctttgtgagtctattagttgttgcatgttaaaatattacaacaaaagttctagccactgttttacctgttgtcaagtgtagttagtttgagttctgtgatgcttgccaaattggcaaaatgcatcactttagttttaaaaattccagcaataaaacttcaatgccttttgaacttgttcttactgatgtatgaggaccatcttttcatacttctaatgaaggatacaaattacataagtttcattgatgatttcactaagtttatatggctctttcttatgaaagccaaatctgaagttaatcatatctttcaacagttcaatgcctttgttgagaggtattttcaaactaaaattaaaagtgttcagtctaacatgggaaaaataatatgaaccccactataatctgttcaaaaatccaggcactattagaagaaattcttgt

SEQ ID NO: 250290 - DNA, 755 bp, Cannabis indica
aatatatttgtaagtatcagtatctgttatttctctttttagacatctcgtgacgcactaaacaacacttgtattgtatgtctataccaaaacccttttttgttttatatatctcaataaaaatcaaattttttctttcaaaaaaacaaaaaattaagagatccttttatatttttgaaaatgggaaacaattcatacctttgttttttgaaaatatcgatatccgataatatttatttgtagagatagggtttgaccttttattattatttatatttaaaagaagtataggcatcaaaatcaaatatcaaatcgaaatataagacggcgattaaaatatattacatacatgggcaactgaataagtagaagaatatatgtaattattaatggattttttccattgataaatataatgtatattcatttgaagaatgaagaatttatatgccataatgaaaaaattaaaattataaccatccatgcaagtatcaaaaattctaagaggtacggtaaaaataaattaaaaaaaaaaaaaaaaaaagcatagggcgagaaaggagtggaagaattcgtggttggaaagatgtgtgagatgaaatttgtcttatatatgtagaggtagtagttagtactagtactagttccaaggtttagcttggtcaaaaaagaccaaaacttaattatttctatatattttaaagaaataaaaagatctgtcaatattatctccacaattttcacaatctcttcct

SEQ ID NO: 250291 - DNA, 837 bp, Cannabis indica
ccagtttcgattcccaatccatgtttgagtcctatgtcccagatcgggtcgaggtctgggttcgggttcaggtccagattcgagtccaagtctcgatctaagtttgggtattggtctgggtcaaagtatgaatctgggtctgggtcttgggtcccaggtctcgggtcttggtccaggtctgggtcccagtcccgggttccaagtcctggtctgagtctatgtcccagtcacggttatggtttgggttcgggtttgggtccaatttcggtcccaggtctgggtcgttgtcctaatcctggttcagttttgattctagtttcaattttgggtctgagttcaggtcgagatctgagtcctgtctgagtcttgctccgggtctaggtctgggtccgaatctcggtctgggtctgggttcaagtcccgagtctgggtccaagtttgggtctgggtgatacgaaccacaccagcagttgtgatgaaaacccgacaccaaatatggcagtctctaagaattattaaattttggatgtggaaccgtgaccaattgcttagttatgcatgaaccttggtatgaaggaagatgccacaaacggtgatgtcaatccatttgataagttaggttgaacgccatatggaatactccttaataagttgaatagttctttcaagaactcgaagaagaaaaaacctctcaaatttttttcataacaatcttatttttcaaagtgtttataattctttatgtagccaacttacaaccaagaaaaaaggaaactaaaaacaaagacaattctaaataaacaaatacaaaataaaggaaacaaaataaaaaaggaa

SEQ ID NO: 250292 - DNA, 529 bp, Cannabis indica
agcataattgatccctttatttttaccacatgtaagcctagccagatgcaaatctttccaccatataccctttgagcaccttattattctaagatatttgtttgttgtgtcatgaaggggatgggaggattgtaatttttaagtggtaattgggtgagtgttttcattgtgctactttattattctcaccattaaggataatgttgaattttaagttgggaaagagttatcatattttgtgtatactgatattattatatttgtattgttagttaatttaaaaaaaaaaaaaaagacaaacaaaaagaaagaaagagtgtttaaaattaagtttggggtgtgccaccgattgcaagcaaaaaaaaaagtgtttaaagttaagtttggggtgtgccaccccttgaaaaaaaaagagcaagtttttgttttttaggagttggaagttccaggtgttatagcattgcttcagcattctggagcagagacgtaaaaaaaaaaaaatgctgtgctaaggcattgctataactct

SEQ ID NO: 250293 - DNA, 686 bp, Cannabis indica
tttgcttaatattctctctcattaaaaagttaaaaaccctaatatttccataaccagccgctcctctcaaaaccattctcttcacaggttaaaaaaaaaccatcgcagccagcaataatagatcggacaagagcagagcggagccgccccaaacgaaaccacgatctcgtcgtcagcctcaaaaaatcccattctcctccattcgtgttggtttctcttccaacggaggtgagctacgccgttcgtggacccaaacggagactgcaagcttcgttgctggctcctttctctcattctccatgttgtgaagccctctcacgctctctccgtcgttctctcagcccactctgatacatctccgccttccattgctttatctccatcggcttcatctagcaaggagtatctcgacgatgatgatggaggcaaatcaaagcacgacaaggaagccaccatcagccgtcgagaccgagaccaacaagatcgtctgttgccaccgtccgccgcccactgtaaaaaatgtattctttcgacatttgattcacttgctttatttatattatcattattttaggagtttttattatgtaattgatttgtatatgtttttggtatatttgagtatttaatctcttttttttaacttaaaattttgtagtgttctatatttatttattttttttgta

SEQ ID NO: 250294 - DNA, 1116 bp, Cannabis indica
aagtccattgagcttttgtatttaaatacgaacataaatatattttttgtttcaaaaacaatatatattatactgattcctttgagaaactcggtgaaattaatattatatatatgaattgtaattattgatattattataatgtaccgtcttgaaataacgtaacacaaaatctaacacatatctaccattttttttttctttcggtatgactatgtcaatatcaagtaggctgcatatataaatacaaattaataggacagacaaaagctaaaatcgaaaaaggccaaaacaatattttaaaaatcaaataaaattgaggggaccaaatatatgattatttagaaaatacgaactttaatataaaatgactatttttttctccaaaatattaggagtcttaagatttaattattgtcgcaaatcaaggcttcgcaaaatatgtaatatctataactttagcagtcaaaagtcacacttttactcttgtaggaagataacacttataaatgatcctttaatttatatcacaaaatatttatataaaaataatggattaccttctatatctataaaaaatattagtcacaaaatcaagaccattcattaatataaaagaacaataatattccgactgttatgtagtcaccataaataagttaataaaatacaaaaataatatctagtatccttcatttctaatttctaactaggacatagctaatttaagttatccagaccatccattatacaaatacaaattgagtttcattgaaagtttaataagtagaataagactaaactaataacgatttttttcctgaacaataccattctcatccactagcgtcaaactgaattcctaaaatgggaaaaatagaggatgagctgataaagcccagtaggaaaataactaatatcataggacccttggtttaataaaattcttgcatggttaactttttaaaaaaataaaacatctcattaccattatcaaaatgtataattaaaatagagagaccacaaattatcacaaaattaagtgtcaaatacatatcacactgtctactagatccctagctctttatgccaatcatggaaaatgacatccaaaat

SEQ ID NO: 250295 - DNA, 557 bp, Cannabis indica
tatttgaaaactaaaaaaaattagagtattgtatcacatatcataaaatttaagaacaaaaacttccttagttaaataagtaatgtaaaataatttttttgtaaatttgctcaaattatttgtgctactaatatggtatatgagttatattaaaaaactcgtattattttatgaatgtttgtatataatacgtaaatacatcaaattagaataaaataaaacaataaataattgagactttaaataaaaaagataagaagtaaaactagtttgataaaattataatttaaaattgtacaaaaataattatattatatatgtatagtgtataatatatatgttcggtcgattctcagtttaatcggttggtttgccattgatagtaaaactaactgtgcgaaggcagttttaaccgaaggcagttttttcggtttttggtttttcggtgctggtttttcggtgttcgggcggtcggtgtactcggttttgtcagcttcttggattttttgctcacccctaggcatcgggtcatgtactaccttcaataaaacaacaat

SEQ ID NO: 250296 - DNA, 1004 bp, Cannabis indica
tgtttgtctattctataaccattgtgatctcctccaaaatttcaaaaatgttataaaattgtttcccacagatatcgctaaatattgtcagaggaatttagacaacaccaaaagtacgagtatttgagcaaagcaagaactctcccttacagttatgcaaacacacataaaataaccagtagtcaaagtttaggctacaaaatagataaaaacaataacaggaaaataaagaagacaaaaagtataatagttcaatcataatttggtctgttaagtctacttttgcaataatttcagcttagtttatttgatatgaatcacctttttatatatagaaagtaagtatccattaatattacataactgattaaattggcctgtaaaaacaatagctgtacaaattaattaagataagcgtttaaagaaataaatacaagtacagtttcatttgtttttgtcttaactacagcaacgtctgcgacttgcaaagtcgtatattgtctatccatattctaaacacgcgagcttgaaggctctgtggtgttggattcgaataacgtgcctttgggtccattcagcttaatgaatgtctgagatcagcattgattgcatatttggacatcctgtgttgataacttagaacatgtgagttcattacgagtcatcgaacacattaatcattcagaccaaacctacatgtaaagaagcggtctttacttgtcataggagagacatactttctcatcacatataatcaatatgcgcggccaatgttaacttctcttgatgacatttcttgtcaattacagtacaactttgtattaaggctagaagactttgctaccaattatgcgttgatggatattaattaatattgaagatcagccaaatatcttgatattcattgaccttaatagaattatattaatttagcaatattattcaacatatatatatcaatgaaatttagatacagattcatacttaccaaatgataaactgaa

SEQ ID NO: 250297 - DNA, 1095 bp, Cannabis indica
ctttagattatgacgctggtaaagttttgcctcctgaacgtttctttattataagaatttttcctgaactataaaaattattgtatatgtcccttgaaattgcattctagtcaattatttaaacaactagtaaacgtaaccgcgctttgcgcggttttgtaataaaataaatataatttcaaaatttttattttgtaaaagttattggtgattatctttattttgttaaatgataattttaagttctttgtattataaaataaatcatgatgacactttgagattgattttggtcaaatatttttaattatggtcctaaaacttcctttcttaacctctctaactaactattgtgacccaaattttcacctggatatatttatattgtataccattttataaaatatattggattaagttgtcattcatagtgatcataggcatagtagaattcaagtttgaatccttctctctcaatgtcagaaaaattaaatttatcattttacactatagaagggcatccacttttattagaatttaaaaagtgcatattaataatatgacatcaaaaaaaaattagtagggtccaaaagttaaaaaaaaataaaaataaaagcatcacatttttttaaccaagtaaaacaaatatataaaagaattaataatttttattctaatcttccaatgatctgaaatgtgaattaaagtataattacaatgacataatattagaaaatctcacattgctaatatgtggaaaaataataaaatatatataagatcaataagttactctccattaccaattgattttgagatagaatctcattcaccttaattccgaattcaaatacttaatagtacaaacacttgtgcttggtattttcagtggttatgtatcattaaaaattatacacatcttagtataattaccagacccaaagttgaaaacactattatacattaacagcattactacttactgatttaagatgaatgaattgaccctacatgaaaaattattattaataaatttcatatatatatattttacatggcaacacaactaaagcttgtaacatgaaatccaaaaat

SEQ ID NO: 250298 - DNA, 1440 bp, Cannabis indica
ctccagatgggtctttcatatttagaagccccatcagcattcacttttgtccgttgtccaggaagtgtgtgtctcttccggaagcacctcttcttgtgttggtgtggagattttgttacaaagcgtttgttaagtttgttaagttgtaactaacttaacaacttaacggttgcagtcactatcttaggatctttatctcgagactataaataccaccaacacttatcatttcaatacgctggattgatgagttcaagagagtcttatgtttgagaagaaagagattgagaggagagagagaggtacaaagaaaagagagagattgagtttgggttatgtatgaagaatttttgtagatgaagaagattattcgataaaagtgtgagagttgaaacactttaagacaatccaacagaggtctttctcaactgtattgtacctgttcttgctcaatcaataaagaagaatttgcgacgttctagaactggaatagagctatagatcacataaatctattggacttgaactagtatatgtttttgtgttgattttgttgtttattgctttgatcgttttctatttctaattctgttcatctttgttttctttaattactgttttgcatttgttattcttgttactattaactgtttgatgattaaattttaattgattttttaattttaattttcccataaatagtttagttttttgttatgtcagttaatagttaaactcttatttactctgttaattaatgtaatagacttagtttagtctataaatactaagcattatgtaatcattcaattcattcattcaataaaagtttcagtctttctattttttctcttctcacaattctcaagtctcacaaaagcaaaataacacaaacatctcatatgagcattgaacttgacagctgttacgtgagaaaaaaccaaaaagttgttgtagggaaatagaaatagtactgaatactctcctgtagccaaaccatcggaaagggaagtgaaattcgatgtaattcttagtcatggaaaatattttaatttactagaaacatgttacttatcaaccaaaataatgtaataatctctacacatttgacacttcacttttaatgttgtaaggatgatgatgatcattataacatatttcattccttattttcctttaaaagaatataccaacaacattaaaatttgtctactttttcatgaaattttacttgccaaattacacttaggtagtgtttgcttggaggtaaagaaatagaataaaatagaaagaaaataatattccattactttgtttagttggattttatggcatatttacttaatggaaatgagaatgaatagtatggtatcgattctcatacaattgtttactaaattttagaaagggagaaagtagtgagtgttggaaattatttta

SEQ ID NO: 250299 - DNA, 1008 bp, Cannabis indica
aaataatggtcctccctaagaccattataaaggaaatagagtctatttgtagaggttttctgtggaatgggaagcacaaattgacaggtgtggctacggttgcttggagtaaggtgtgcaatacaaaatcagcaggtggattggggctgaaatcagtaggggattggaacaatgcagcaatgtttaagtacatatgggcggtagctaaaaaagaggataacctatgggtgaaatgggttcattgtgtgtatattaaaggggcagattggtggcaatatagtgctaacacaaatgatagatggtattggagaaaattagttgcattgaagggtaaggtcatggagctttttgatgaaaatgaaagacaaagctgctgtaatcagtataaagtatcaactggctatacaaagctggttcctgctggtgtgaaaaaacagtggacatctgtggtgtggagccgattgaattgtcctaaacatagttttattttatggctcgctatgctacaaagattgaagacaaagaatagagtgaagatttatagacctgagattgacagcagctgccatttatgcagcagtaatgcagaagagagtgttgatcacctcttttttgcttgctctttcacccgagaatgcttcgatttggttaaaaactggttggaatggaagactagtgtgcaaactgttgaaaaggctgtgttgtggcttggaaaagctaggatgagtaagctcaagagaggtgtgcacgcagctgctcttgctgccctgatctaccaactatggatctgccgaaacaataaactttgggagggtaaagagaataattgtagagtgatttttcaacaagtacaaaatgtaactaagaatagagtatcatgtatatggccaaagaaagtctctaatagtgacaaaatgtggttcgattcattgtaaaagtgtgatttgtgtccttgtaacgtgtacatagtatagatgtgaggtcctctctttttattttgaggatgct

SEQ ID NO: 250300 - DNA, 1163 bp, Cannabis indica
tgggacaatgtccacaatatttcccctcaagatgatggctattttttgctcatcaatcttgaaccgtatcagagtggacatggtcactatctgtataggtgcggatcggataggatcacttgcctgcaagggatatggctctgataccatgttgagaatcatggggttccatctcaaaaccaattggcaatgagtgaagtagcatatgttcttatatatatatatatggctcaatacttttccatttattccatgtgggacaatgtccacaatatgcagggtcacgtgggaagatggtctcccacaatgaaagattattctcaaaattgtacttgttttcagcttctaagaccgagttgtgtgtccttcttcatgatattcaaacttccattactccagctcaaaataataatttactttgtctagtgtctgaagagaaagtttgtaagatgctctttcaaatgcatatcctaataaggctcttgagcccaatagtatgagtccagatttttataaaaaaatatagcacattatggaggcagatgttgtggagttggttaaacaagtggttgcttcaggagtgttttccatgggtacactactaaaaaatagatttcttgacagtttcaaacaattagcttatgtattgtcgttggtctttataaccgtcaaatattcgactgttataaaattgggtagaataggctacagtttaaaacagtcggtgaaatttttactgacagtttaaaactgttggcaatagtggcactatagccaacggttttaagccgccacattttttacacacacattagatctgagatatatatctcaaactccgatgagtaaaaaaatacaaatatattaaaactttgttaaagatatttcaagttggttgagatattccatcgaagttagttgagagatttccttatcggaaatatcggtaacaaaattctgttatagatattgttgcccctgatttttcccaatatacgtggaccaaccagacagggacacgtggaccaaaagatcttaacatttgaattatttgctaagtctttatgaaggaaggcagtatccgggacttgcttcccggagaaggcacccggagccccctatgctcccggaggcctaaatagcatcaaagcatctccgcgagg

SEQ ID NO: 250301 - DNA, 500 bp, Cannabis indica
taaatgtatacaaattcattatatgagtttgatagtaaaaaaaatttagaaaagaaaaataacaacacatagacacaaaaagaaagataagtaggacaataagagctcgcatgttttattgtattagtattatttaatataatatcatgtttggtattgatttgtattaatagattgtgtaaagttataatatatttttaataaacttgaccaaacactgactacgggttcggggtctgagtcccatgtcttggtctgggttctggttccgtttctcggtccgagtccgaagtttggagttcgggtcattcttcgtaaatattataatataagctaatacggactatttattatgtattaaataatataatttacattgtataaaaaattttagtcgttataattaacacaataagggtttatttggtacgctgtattacattgtattgtattatataatattatattgaatgtatttcatgtaatatttttatgtaaaa

SEQ ID NO: 250302 - DNA, 682 bp, Cannabis indica
ttttttttttttttacaaaattcaatttataaattttagacaacttattttaagctttgtttagaatttggattttaccaagaaaaattcttaagacggcaaatagtagcaaaatgtttttacataagattatactaaacttaatttttattttttattttcaaataaaattcttaattcactaattcagtctaaataggaaataataaaatcctttggattcctttcttcttcttttttttttttttttttttcttcttgaaatttatagtcaagaaacgagcccttaataaaaaaaaaaaataagggtgccactgccacatgcaataaacatactttattaaatgactgctgtaaacaagctaggctggtgacttaatattttatttcttctctacaaatgaatagaattatgatgcatattttcaaaatttgaaagtcaaatcaaattagtagtctagtcgggtctggccaatggagaaaaaaaaaataaatattgcagtttgttgttggagatgcataatataatggtatagatttttatatataaggggttggtgagggtagttttgggtggggaagtagtggggtcaaactcattgggttggactagttttctaaaatgatataatatatattgtattcaccaaccacaaagatggaaaaaaaaaagaaaaagaaa

SEQ ID NO: 250303 - DNA, 1107 bp, Cannabis indica
tttaaaaaaaaaaaaactgattaaaaaaatgttaccaaacacacccttagctaagagttaaaaaaatgtcaaaaaacacattcaataaatgaggtaaaatagctcaaaattttagctcatgagtagtgcttagctaaatataggtttctaagttttatgcttaggctataattttttattgtttttatgatgtttttttatgtatttgtaagtgtaaaattaaataaaaattatgtaaaatatataatattttattatttctgtattataactatattatttaaatattgtagggaaaatataaaaaaaattaatgtataatataatgtaaattaatgtgagtgtaaatgtgaagtaaaataaaaaaaaattaaattttagtgagatattttaaaagatgaaataaaaaagttgttgggaagtatttttagctttataatcttaatgaaatagagttactccacgttttccccaataatctggttttatatatttatgggtttagcaattactattacttaattactctaggtcatttatatacactacccaaaattttgtctactaaagaatgtacatactgtaattttgtgtcagtacacgcaactctgctaaaaggtattagtggtggttagtacccttttatatgttaatatcgttatttgtctaattaagtatcagatcccatatagtttgacataacaatttttagagatatcgctagtcaatcacaaggtaacatgtctagaagtgctgagcaccactggtgcccaataataattaatgctctaatatgctaaggtaacggatcttctttttcaggcagggtaaatctctaaaatacacttttcgatattcgacaaattagtctttaacatgaaaaattggaatagttctatttggctaagtgggcttttgattagttataatttttagtttatttttaaactgtgtaattttgcggcccataatatagttaagtggacttttgccagtaatgtaactggtagggctgtacataaaatttgtaaactacccaacccgtccaaaccaaatcgagataacccgacgaaaaatacaaatcgaaaaatccgacaaaaatataac

SEQ ID NO: 250304 - DNA, 1833 bp, Cannabis indica
ttttcttctatttttttttcgaaggaaatggagataattcattaacatgcacaaagcctaataagtttcaaaatataaaaagaggcacacaaaattaaaaaacaaaatctatacaaagcccccgccaccaaatacgaaactcatctaaaacaagtgtcttctttgcaagagaatgggcaatggtatttggttggtctgtaattttggggtttcggtttgtaaatctagatttccagtaagggaattctaaagtttttcaatttacgtgttttgatatttttaaggtattttcatcgtgtttatcgataagaaaagtttagatttcaagtttaattaccaattagtatgtttaggtaatgtttactgagatttttaaaaactaaatttaataaatattaagctaaaaaaagtatgattaagaagaaaataagacacatttttatgaggttgggcattaatgagttttagtccacgagttactgttattaagctcttggctatggtgtttatgatatttcttgtttttaaacactataaattctaaccctttgcatgagggataatgccatattcatagacgaattgttgatgggctggactaatccaaacacactagagtattttttggtacaaaagatccactaacagagtaaaatacaatgtaatttgagttattgggtcgagtaggtgagacccaatttggattgagctgccctccgtacatgatcgtaccgttgacaatgacaagttggtgagccatcgtggggaataatgaatgtcagaatagtgggtgttcacccaaacatgtgatttcctttttgctgtgagtctttccaaggtctaacacaaggggacaaaccacctgatttctcaggatcttgctagaggagtgccatgcgggtcgatttttgggacagtaagtgattcagatgcccctttgtattctgttttcccgatggcccctgagattattcttcttcagttaacaccattttttctgttaagtgttgattgttgatatgagactcggtgtcttaatttgttattgaaaagtgaacatgaaaccggacccatccttgacggataggccgcacagttgacctatggacttataagtgaatgggcctctgtaatggccagtgtgctagctatctagaaacacatatagtaggtaaacatttatcgttgttattgctaatgtgagttaggctatcgagcaccaaattttttccactcgaatcggctaccacactcatttgaatatacaggtaagaaaactgaatgatgtacctagtatgagccatgtcctatgatataaaattaccatataagtgatataatttttattttataaattcattgtagggtatatttatatatagttgtctaattagacaacaatggataactggttatcttaataggtaacaaacgataattggtaatcttaatatgtgacagtaattgagttgcctcattaagcaacaattacatgatttaatgttaatatattatttggtgaatatagtgaattgtttaacatatgtgaatattaacttgtaaattgataatgagtttattgctatcttatgattatatcgaattgtttggattgcttctatatccattgtttgggtattctgatgctttttatactgagtttttgtgactcacatgtgctttatgatacatgtaagagtgagagtaattctgtgcaaccatgagttgaagagcaaggcagctggtgtatatgttttggtgtgctgggtctacgggtttgagttagtagttggaaattaattttcaagtctctactgtgtccaaatcaatatt

SEQ ID NO: 250305 - DNA, 945 bp, Cannabis indica
gcataagtacctgttaatctcagatttagccagctgacaatagagtcgtatttattactgatgtttgccacatattagatttgacccacttaattagcgggtaatgacctactccctttttggttgtattaatactagagataataccactcacatcacaaaggttttagaatctaatgtggctctcttaagattacaatgtgagaatcaaattgaaaaatcttaagagagtgccaagagcatgtgagagagaagagaagagagagtttgagtttcaaacttagctcgagagcttagagattttgaacttagggaattagggttaggccagtgctctttatatagtagagcttacatgaagattaaccactaatattccttaaaaataagaaaatatagcctcatttatataattaaacattaaatgggttaattatcccccaagaataaggaatttgctgatatttttctttatttttgtgggttgttgaagcccaaatcgcaacttagcttgctgtcctcagatgaaggctgcgcaccaaaggcctgccaggtgcaggttggccggccctacaatgtctagaggttggccgaccctacaatgtctagaggcttgccgacctatgctggccatggggtcgaccaggggtggccggctagcccccttatgtggctggtttgtcattttttttatcccttctaagtactcagacctctcgtttactgaagtgttgagtagatgacttggcatttttattgacaagctgtactcccatgtgattaatcttggccacgttgatatgccacgtgagatggaaaaaatcaggataataatttccccataagtgcccaatgcggacgtctgtacggataggaactttccagcttagtttggactgatgtagccttaaccgggaaaattttgcagtatatttagcctttgaa

SEQ ID NO: 250306 - DNA, 683 bp, Cannabis indica
ttataattttgtcctctgttgatgggtcaatttgctctttgttgactcgttaatttgtttttttaaaaaggattaattgttctgtgatactttattttcggtcaatagctcaatgcgagtccttccctttctccttcaagagctcaatgctcattcagtagctttgcttcaatatttatgtctcttcctagctttctatctcattgtttcagctatggcattcggggttaggaaccctaattttctctgattgattctctattatatgcctcctctcaatcatatctggtaaggttttcttcgaaaagcgatttgtgggtaatctctcaatttctccttgattctatttatttgaattatgtatacatgctcctgcttttcagtttatgaattttgcagtttaggtttcatttcttgtgaattagggtgttttaaggctacacgtttgttaggtttgtaaactatatgagttttgcgaagaatcaagaattttgtatgtctctttgtttagatttgatggtgtatgtgtttattttagctttggggttgatatataagcttactttgttgatttcaagtatcagtgtttgaatacaaaatggacaaagagtgtgagggatagttgaaattggaatgagaaaaatggaatcatataaaacttgattttgagggactaatgctac

SEQ ID NO: 250307 - DNA, 525 bp, Cannabis indica
taacaatttttacatctcccattaaaaatggtctaatgtgatcaaattatttgaaataggaatttggtgagtggttactggtgaacacgattaaaatagcttctaatttttgtcattgttcattctttgagccaatttttgtcacttttttattttccccgatgattgattattaataaccaatcaattaattttttatttttatttgattaataaaaattattgaaaaaaaataaataaagcaagacaataattaaaaattttaaaaaaaataataataaagacaaaaattattatgatacctatctatcctttattttacttcctaatataattactcaatttctcatcttcttattcaattgacaagttgaattgaatagtttataatctagttaaggcctataaacccaattgatgtgaaaactccttatattcttatggtgaagtttaatcataaagaaagcattaagcaaagtaaacttataaaatcatacaaataatctagatactttcgtcctaaat

SEQ ID NO: 250308 - DNA, 1879 bp, Cannabis indica
attgattcctctgcaacattacataatacacaaataagctccacaaggacatgcttgaggtggagttgagattgagttggcaagcatcccgaaagtgattttcacgcaaaatgcagcacattaggagggactttaattttccacagcactttccagaaatcagcctccatattagaacaccaattaccattaacagtttgtaagtaatggtaggagcttttgacggtgtaaaaaccagatgcctctttgttccaaaactatttgtcgtccatcacagtagaactcaaagggacctgcaatataagatcaacatcacggggttcaaacaggtcagaaacaacctccatatcccactgtttacagtcagttcgcattaattgggatactttacaattagctaatgcgggatatgttgaaataacacaaggattagcatcatctaacaaccatggagtgttaaggacatcagttgaagcacctgacacaattcttctcctggcacccactttgattagctcttgagactgaaagatacttcaccaaagaaactcgaattggaacccaaatccgccttaaggaaagaacatcgaggaaagtatcgagctttataaatttgacccacaagcaagttctgatgcaataatagcctccatccatgtttccccaataaagataagttatatagtctcgcaagcttcggaaccccaacccaccagtatttttagttttacacagtttcctccaactaaaccagctaacacctttacacagtgccaagattcaatctttttcaactaaaagctatacattcacctttcctaacatgctcgtgcaactgtagagggtaggttttccctaaacccgtggaatagaggtttccttcaccactaacaatggtgtaaattcaaaaaattatagaaacaaagaattcttaaagaaaaaagagagaatttaaagggacttactcactggtgaatcttaggtgaggttagacggtgaagaaagcaactgcaaatttcttcctgcacggtgagaagaacacaaggacgaagcttcaactttcttggagtgttcttattttttttctctggttttcttttcgggaaataaaaaatgaaagtaaaaggcttgaaggaaagggatggcctttatataggcttcattttaagtcccccaaaaattaatcaaatggaaatgaattcccaataaaattattatggggaagtggaaagagaaaaaaaggaccataatgggagtgcaactatcaacactgtttcccacaaaatatactttaaaaattgtcattatgagtattgacatttaatagtcagctgaagagatagaagtgtgatagttcatttttgcatggtacaatcgccaaaataccaaccacgtggggctcacatgcctgccagtacccgtataggtattaaaagtccccatccgtacagatatttttctggggacttggggggcaaatattatcctaaagttttcacagctaacggggtacttacacgtggcatgatccaatcaactctttgacctagcagagaaccttcgggcagaaatatgccagtaggtccatataaggagtatcaaccataagctgtagtagatgtcccatgaagcatctggctgtatcatctacctgctggctagataagatgggagcaacacctttcaaggctaattctacaagctaatctcataaataagacaagtcttgtagaaggcctgaccaagtagtgaatatgctggccagaagagatgctgctagggataccggacaaggatatgtgagacttgatttcatcttcaacaagcttccacatatctctaactgaatcctacagacttagatccaacaaatctatcc

SEQ ID NO: 250309 - DNA, 858 bp, Cannabis indica
cagcttgagcgcctagcctttcttaccatgaacctttctcttaagatagtgcataatttcgaaggcaatcataatgttgtcagaaatcaaacggcccggaataaaagcactctgagtgggagagatgatgtgatcaatgagaagcttcatacgattagcaaggacttttgcaatcaccttgtaaacaacattacacaaagcaatcggacgaagatcattcatagtactcggagacttcttttttggaaccaacaccaagtttgtatcatttaggtgacaaggaaaagagcccgaagcaaagaaatcacatgtagcagtaaccaaatccgaaccaactatatgccaatgtttttgaaaaaaacctggccccattccatcaggtcccggtgctttatcgggatgcatttgaaatagagccgtccgaacttcatcactagaaaccgcttttaacaactcagtattttgatcaatagagaccgaacaagaaataccattcacaacagtatcccaattagcattcccagcagaataaatagaggtaaaataatcaacaattacctcttttagaccactgtcccaagtagtccaaacaccagagttattttgaagagactgaatattgttgctgcgcttgcgattgctagccatagcatgaaaaaattttgaatttttgtccccactatgaagccaaaattgcttggacctttgcttccaataaaactcttgttgagcaagaatctcaaagtagttattttgctcataaccgaaattagcaattgaagaaggatcggaattacctttaagagaagtaaggatggctttgctttgtctgagtcgctttttgaaattgcaagttaa

SEQ ID NO: 250310 - DNA, 915 bp, Cannabis indica
ttaaaataatattatttaaacaacaaatatttatataaaaattttaatagagtaatatttgtatgaaattaataaaataattagtttataatattacttgacatatatttctttattattgaaatagttttattttataattttttgttttttttattatgttacattatttaattaatatattgatatttgttttacaaaagcttattatttaattttatgattcaaacttttactattaaaatttaaattttatgttataatcattattaaaattaatatattttacatttaattggtctttatttatttatttctttattatttctgtaaaaattaaaaatagtctagtccattctaagaccaaacacaagattacacttagcataatccaatccattccaattatttttagtctaatccaattcaatctttggccaaacgagcccttatatcatataacatatacaaagtacacattgtgaaaggcttggaggatgttttggctttttttttttttttttacttaatttttacagaattgtgttttcaaaagtgagaatagaaaacagttttttgtcattttaaaaatttgatggtgtttggcttaggttttttaaaactatttttagattttttttactaaaaaattcaatattctacactataccatgacatgaactcatcttatccctaccggggttcggacctggacttggacttggaccctggatcctaaccacagacccgaactcggacccggactcggagctaggttcgaggttcgagaccaggtctggtccagggttcggccaggtccggggtctgggtccgagtctagtttcgggccagggtccgggtccagggtccgggtccagggtccgaattcgggttcgggtcggggtccgatttcga

SEQ ID NO: 250311 - DNA, 512 bp, Cannabis indica
taaattccacttataaccagtctcttatacacataaatatccacatacagcaacatacaacagaaataagcaagttgactcaatcctaggtggcttcgcctctagtggatcaagatttagaagttagttacaattcgaaattgtaactaactcctaaacctttgatcaaccgactctacaacattataaaagcaggaaatcaaagcaaacaacctaagaatctacacagaaaacagatcagaaagtaagaaagaggagaagaatggttataccctagcctcgagctcccaaatccaagattcagagagaactggtccagatctgagagtaaaactctcgtggtgaggatttttagagtgagagaagtacatgcacaaagaaaagcacaaagttagattcagaatacaagaaaaaagagagagagaaagagacaaacttgtaaatacaaaaatcgagtcttacctgatcgattttgtgacaggaagctccaaatcgttgtatctcaccattgt

SEQ ID NO: 250312 - DNA, 1321 bp, Cannabis indica
ctagattaaatatgagaaaataggattatgtttagaatttggaaaatttagcgtaatttatcaattacagagattttattggattatttatgtaatataaatgctatatgtgaaataaaatatttttacgcccgacaacagtgaaaacccgattgatttgccaaaaatgtcacgacgatattagtatgtgcagttgtggtacgatgaagtttaattgatgtgaaaattatcggagttatacgagataattggttataactattttacttctagctttagagattacttctaagcaagagtattgtagtcatttttttcaccggagttagtggaattttgtgaaaagaagattttattgtcgaagttagataagttagaaataaaaaagaattaagattgtcatcacataaactaaaacaccctctctctcctaatctttcttcattcggccctcaaagaaaccccaaggaaagactaaatttttctgaaacttcctcaccaattcaaccaagaatttttgttagaagttagattttttttgaaagaggatcaaggtaacctatctctcttcctctccttgaattgctgtagaaaaagttagttttaagcttgaattggaaatttgtttctgtataggtttacatatgttagaataagtttctaggcttggattatgttagtttgtggttgattttaaaaagttgtggctgttgtaacttgagttgggtgagtttgagttttagaactcaaagctcactcaatggtgatttgcgatcttagtgtaatttttttttttgagagaatcttagtgtaattttagtttttgagctgtaatgtatgtttagaactcataataaagatactttagaaagttttattggatttgagtacgtttggaatggttttggaaatatcaaaattttgttttctacactgaaacagttcaccatttcaccagacaggccctgggtaaatggttaccaagcagactaaactctagctgaaccactataattctctctcgttattcaaatactcattgtttacatttaatactcgttaattttcatttgcgtattcaccattctaggtgaatactcgttactttcagtgtgtattcttgtttttactcgaatacttgcagtttattggtgttatttattttcttcccataacatagtctcaacctatatttggaatatttttaagttttgagggatgagataaaattattccaagtttttattttagagaaatgttaaaaaaacactagtggtgcctagtaccactattgtcgaagaaatttaaacaacaccaaaac

SEQ ID NO: 250313 - DNA, 616 bp, Cannabis indica
aaatctcgttctgagctctatatatttatgagtattgaaatgccaattatatgtttatgtgatagtggatttagggattaactctatttgtgaatctagaaaattatgactaggattaccgacacttgctcaagagcacctgggaatttggaatctctacatacttggaacatcatgtaagacagtagttagcatgtggagttaagtgcagtggcgctcaggttttatattataattcttattaaatgagaaccgggattaatgttattaccctaaaataagcgattatgtggcatagggttattactcttgtgattaaatgatttacaatactatgccatgctatatatgttgaagtaaagaattatgcgttcaaggcataatttggttagactcggtaattagaatttagataaaccattctaagtccttgttgtaaatagacgtgtgagcgtaacacgtgggactatgcaacatagacataaataggcgtgtgaacgtaacacgtaggtctatgtcaaatagataataagtgcaatggcatcattagttatgagatatttgtttattgtgtatattgatattttactatcttctgggcttggctcacgggtgc

SEQ ID NO: 250314 - DNA, 1484 bp, Cannabis indica
ataatattgttgaataaaatgctagcaaaataaaagaagaaccatattactgaatgaaaaattctgggatgaatcgcagactaagtcgctctctttaagacgttcgcggcattgcccaagagtgtacaagcagtcgaaatttgctggtcgtccctaggataaaacagtttagtcgtcgcactgtatcggaactccactgcactgtagagcatcgccgaatacacccagagaatttttatatcgcagatggaattttagtactatgaaaactgtattttttctaatacgagagagatgtgttcttcccatcagttcaatcgcattatatatgcaaatagattgaataatcatagaaaaataacgttttctgaatcgtggggtgagttgatttgaacgtgtcccattaactgatacgattgagtaatcagttccaattaaacacgtttcttaattaaattaaaaaaataaaaaataatatattgtcacaccacaccaaccaacccaacccggtccggatcggacggtgcgcacgtgtgtgtggtgggtcaagtgtgtgtcctcacccattcgcacaaaacagggtaccccttggggcccaaacccaaatgacaaggttgcactctttatacccttataaataaggattcacatcccatgtgagactctttccaattcacaaacactaagacactaatatattttgttaaaagattcacaaaatttccaacaaattataaatagagttttttctatcggacagtgccctaatacttaattgtaccaataataacataaaatctaataagaatgctatagataaataatatctttagtatttttgtagaataatatactgttaaactctctaaacttttaagtttagtacaatctaactgtcacactggaaaattataactagaatctccaacctctacaattgttttggtccgtatttcttaaagaaaggctaaaaaaaaaaaaactaaccaaaacaatttatcttaatttttggcatttcccgtattaatatactaaatcatacaatttcaccagctgtaaaaaaatcaccaaattataggaagataaattatttattatatatgtatgtgttttaggtgtgtgcatacaaagttatccaatctaattacaacagtcgattgatctaatttcaaccgatccaatagaatatctaatcataattagattggatcggatataaattttaaaatccaattggatcgaatcggttgttgataatacatccgatccaataaattaccgaccaaactgatccaattatcatccaatgatcattcaattatatttatatatttttaaaatacatttataattttatatatgtaatatattttatttaaaaatatatatatattgattgaattaatataaatttaacacatgagattaaagacaaaaaaaaaaaaaagtcttaaaatctaaaatattaattctcatcttcctaa

SEQ ID NO: 250315 - DNA, 706 bp, Cannabis indica
gcatccaatattgtaaaactaagtttgttctcacataatattaagaaagttattaaatgtaactcaacctaacaaaattaatgatctcaccttattttgtaagcctaataagcctacagtacactttttaattgttctactatttaactatttttttggcatcattaggattaggagaatgtttagtttattttttatttaaaattgtgaaagttataattatttaagattattaattcataatttttttctaaaaattaaataatttatacttcatacttcatagtactaaaaaccaaggccaaccctaagtataggctggctaggccagcgcttagggctcagtcattttaggggcccaaataaaaaaaaaatatattttaaaaaaaatacatattttttaataatttttaaaaatattatttatcgagcctaaatttttgtttttgcctatgactcatttcaactcagggccaaggttaaacctaaatatgtaatgtatatgaaaaaaaaaattaaactaaaatcttgttggatgttttgttagagggtataccataaatttttctctaaaatattataagataaacaagatttattgaagttaatatatcaatttttttttaatttaagcatttatatattacaatctataacctaaactcgaacacacttaaactagtctcaattggtttttattactacc

SEQ ID NO: 250316 - DNA, 738 bp, Cannabis indica
tgctactattatttggttataatgtttatgatctctttcaaatttgctactatctactattattgctccacatgaaactgatgatcactgctactatctactgctactgctactatctactgctaatttgcaatctactgctactatctaatagaagtaaaaacatatagtagttgaaccatatatactgaagttatgggagaaaccctcctgctactatctactgctactactactatctactgctactactactatctactgctactatctaatagaagtaaaaacatatagtagttgaaaccatatatactgaagttgggtcatttagctaaacatcaagtgtaaaaaactaccattttcatttccttgtttgatttattattttctttctatttctagttataaatgaagcaagacattcatgtagtaaatagatggtactgaatgaattaccttgagaagctcataaatgtagtagcgaatatcataatcagtgagggtagggtacaaaactttaaaatcggtactattcacatactcaaatatcaaactaggagtttttgagtgctgatctctaacaacacaatagataaacaaaaacatatgttttttttgtatctttgctgaaaacttcgatttttcatttggctctgttattaattatttgacacattagatatcacaaagataaatttgttatgtttatttttcctttgatggaagaacaagagcagt

SEQ ID NO: 250317 - DNA, 521 bp, Cannabis indica
cgaaccagcctagaacaaggggaaattgttgttgatttatggtgttttcagcaaggaattcaaggcaaatcaagccaaggtaagccctagcatctctatctctttattcttgaattttagggtttgattgaaaatataatttttaaaattaggggctgttagggtttactttttctgtacttcgaattgtagggttatttgagttagatttagcttctagcagctaattttggtgtgtgggattggatttgtgcaagtttgagctttgaaccctaagctttaatctttaatggcatattgtgattcagtgtgtttttttgagaattgttggttggattatgttgcatatacactgtctaggtactctagaaagtttggtggcaattgtatgaattttgtgcaagttagagcttgtttggggaaacctggtgcaaaccgggtaactagtttgctaggacctatgataactctaagatttagagttatttttatatctttaagcttgaattttaagttgaatt

SEQ ID NO: 250318 - DNA, 799 bp, Cannabis indica
aaaaacactataaatcccccaaactcattaagacaggggtcgagaattttgggtttcataagaactagagaggaaaaccaccaagaacattctctgtaataaatactctcataaatacatagactcgtggactaaggctcattaatgcccaaaccacgtaaaaatctcttgcattaactccttacagctttcttaaatactattattatattagttgccgaaaacctcggtcaacaggtataatccaaaaaaattatatcaatattatagttaaatgtttatctcaatgcattctcgttgtttttcagattttcaatggtgaatttattcattaatatttaatattttgtagatacaaatttacattaatatttttagttgcaattaagttgtacgttagttgaataataattttgctactacaatatcatagtattataaaaacatggctcgaaattgtcaaatacgcgacctcaacagacaaaacacgattgttgtaatttttgtttttattaaatatgtgaaattattagttgttttgtagttttattatgttagttggttcgcaacagatataactgttgcactatagtttctttaccgttttctcatagtagactaactataaataaattttcaaaatatcaggaaagggacgtaattctatttctcatattttacaattgacagtttgatcaagaaatgaactatgtaaattacaaaattagtggcgaattcatcttaatggattaaaaatatgaagaacttgtacgcaagttgaaacaagtattggaatgca

SEQ ID NO: 250319 - DNA, 633 bp, Cannabis indica
tgaaaaaaggaaagctaaaggcagacattgtattagtgaaagatcactaattaattaaaaattaaaaaaaaaattacatagtcatgaaaactaataaataattaaatatattaaaaaaatattaatctttatattaaattgtgttaagaaaaaacacatacaattaatattaactaaaaaatacataaagaataatttattttatgtatggaatgaacctattaaaaaggatattaataacgactacaagtaagatacgataatgacatcaactttaaatatagtactgaatacaagtgagatacgaaaataacagttgtaattatataatgcgttttctatagatttattatcttctttttgttatagatctctatttttgtgtgaggattatttaatttcaaattcactgtaaaatatatttggagatatttctttgtattttcttttttaagaaattgtataataatttttttttctagaattttttcgatttctctatataaccgcacgcgaagcgcaactcgttgcgactagttattaaataaaacatagaaccgcaagcatagtacggtttgtttcctaattacatatgaagaacccaaaattatggtgagcataatatactaacta

SEQ ID NO: 250320 - DNA, 1085 bp, Cannabis indica
aaagtcacaaggttgacttttttttatttttcgaaaatcgggtataacaggattagatcggttttgaattaaaatttaaaattttctcaaaaaacctattcaatccaactactcacattcaatccaatccaatggtaacttgatgttgaatttatttggtttggattagttcagtataattagatcataaatcggatcacaattgttattaaaggttagcaagaaaaaattttaaagttaggataaaaatatttaattacaattataattatagagaatgaacaataatttttaaaacgggactaaaatttatatttactctttcactgaaacacaactacatttactatatattataaatttgaaaactgtgttacaaataaaaaatttctttctacgtttcttttttatctgaccacatattaaagtttcatcattaataaatacaaaaataagttaaaacgccattcttttcttctttcaaaacgcccataatctgactagctactacatattttggaatctaagtagtaattactatgaaactgattcacaataatttcgagtttctctatcaaatatttttgcttttaatttggttttaaatggtgcaacttcaaaatagaaggttacaattaacaattaacctctcatcaatggtgtgtttctaataaaacgtttttcacttaaaacttaacataacatatatatatacacgcaaaagcatgtgtaaattgtatttatggtcttataataataattacatataagtttttaagcgtttatttgatacattttaccaagaaatttcgttatacatatcatatttttatttaatattagattaaatatttacttaaagtaaaatttatatatttatcaagacatacaagttaatactaaatatttatttaatataatactatacaatataatatcacttcaataaataagaacataaaatctttaaaaatatatatattatatctagtacaattaattatataataaaacaaattttgataattatcttaggaaaaaaaaaaacaaaatagatcgatgaactacttaaacaacttatctat

SEQ ID NO: 250321 - DNA, 512 bp, Cannabis indica
taagcatggatatattagctcaaaaacacggcacattaaaaagctcaataatttaataataataacaataataaatgtttatttatcaattaaaatgatagtaatattcaaattctaataattataattatctcttttatatgattgtgtgtaactattgttgaaaaaagatatcaaaataattaaaattataaaatacacataaattttagtaataagctcatcaattgtaataaaaatgtaaaaatatgaagcattaatttgagttagtataagaaaactgactgatctatctaagaaaaacaggccgactcgaataaaacacaatacaaattcatgcacaacacgaaactagtggacttgcaggtcgtgttgggcctaccctacaaaattattgcacagcttgataagacccatatttttctatggtacgataggacacgacctatatttttttagagaaattttgtttagtatgcttaaacgtaaaatatattgttttaatataccac

SEQ ID NO: 250322 - DNA, 633 bp, Cannabis indica
taggctcctaattctcaacttttgttactttggtcacaaataatagcataaaatctatgtttgatattgttgtcgtcactaaaaaaatgttcttagttggcgttctttcttaataacctttggcagaaccatttgcccctttatgtataaggaacaaatctcatatttcaaatcatacgccaacggatcaaccttcaactcttcatgtatggttgtatatcaattttatcgtcaacagcaaactgtctttggctttataaactcaattaaaacacccaacaccttaaacactatcgtatgatataacaagaaacacagtcgatactacaatttcataccaaaaaagtaggttagttaagaaaaaacaaaaaaaaataatcaaaaacactaaaaggcgacaaacatatatatcatcgattaacaagtgacaaacaatcgataaattatacgaagaaattaattgaaaagttccataaaattattgataaaatgtcgacaaacaatcaataaattcaagcaataattaattggacgattttagaacatcaatgataacatgtcgacgaaccatcgacataccatcgatataagcgttaaacacatggaagaaacaaattatttttaattatcgat

SEQ ID NO: 250323 - DNA, 2160 bp, Cannabis indica
taacagaatattcttttatttttaaggtatattctgttaaactaagaaatgccgtttacacttttaatatataaagataaagatatgctattaacttttattttaggatgcctccaacattatggagccgcctaaagcctaagcttctacaccctctctggccggccttgagctaactatagaaagaccacactattaagaaaaaaataataaaaaaagtactaatttttcagaggagaaattaagaaaaaaaaaatacaagattgatcctacctacctactgctcaaactctcaattaattcaaaacaacattgtgagtttaggttagtccaacaccaatcgacctctaaaaaccccaaatatgttcaacattggcactgtattattcgaaccacagggcaattcttattatttacagtttttcataaaaataatatgaaaacaataagaaaactacataaaagtaacatgaaaataatatctaaagaacaataaaaaataacatacaaataataaaaaatcaacaacaaattaactagagtacaacataaaaagacaatattttctgtaaataaaattaaaattatataattttccaaatttatttcagttcatattaaatttttgtcttgttcattttaatgtcgttttctttcactttgtcctctcttctcatgataatgttattgttgtttcaagatgatatctagctgaacagcaagataataaagctccaatcacatacataccaacagaatcaaacctatatttcctaacaaagtcacaaaaagtgggacaacaaaacaaaatagtttgaagagtccctcatactaagttacctaatctttaaaataaacaaagagctagtaaatcttcaagaaagtaggtaagtagtttatcatactctaatttgactcatcaacaacagttttctgttgttctgcctttttcttagactctttgagttttgccaccttatttacagcaacaaagtaggaaagaatgccccaattgagtaaagtatcaggcaatgcatttgctatgaaccattggagagagtgagcccagtaaggggtacagatttgctcatacccaatgcttcttacacttgctttgctgtatgtttcaggggatgctatgaagattgagctttcttttagctttgtcatctttgtggccacaaatactggaatctgcatacatacaaagttgttgtcaataatgacaccccaccaatatagtgaaactatttcaacttgaattacattaatatgagataaagacatatctctattttctcatgtcttggtcaatatatattttataggctaattaattagaattatgtaccaaatcacgcctcctgaatttttttagacgttaaaattttttcaagaactattgagattgttagatttaaggacttttgtctaattttagtaaaaaaaatctaacatggatgaaacttcaggggcatgatttagtatatatcaaagtttgagggacatgatttggtagatattaaaatctagggagcattgtttactacataaataatcactgaaacaataacattgaatgaaattagacaaaaatccttaaatctaacaatctcaatagttcaggaagaatttttaacgaaagaaaaagtttagggaacatgatttgatacatgtcaaagttcggggaaaaaaaataatcctaattagcctattctatatattgatttcaagagaaaagtaaaaaggattaacctggcactgaatgtcgattccactatgcttgtattctacactgatacttcttgacaacatggccaggtatctgtgatgaaactcaagatttatacataaaaaaagtgtcaccattgtcttaaattgaatagtttttgagagtatttatataagactatcatacattacataccccaacagttcaaaagagcatctgggtttcaaaattagtgttctaaaagagctaccatcttccacaattattaaaaataaggcaaaacaaaagattaatcgatcaattcatacaaacccagttatataatggcaaaagagaaagagatgagatgacatacgcttttgtagcagcataaagtgtgaacaaagggtaagaaggaacaatagtagaggaagcagagccaatgttga

SEQ ID NO: 250324 - DNA, 821 bp, Cannabis indica
tttgttggaactcggtttaatatgtacacggatatacttagctcagtccacaaggatttaggaaaattagagttgctactaacatattctgcgccatgtccattaatgttcggtttttcttttttgcaacactattttgcttaggtgtttagggcaaggtgtaatgggcaacaaccctatttttatcaagaaacctcgcaaatggtctaggtgcttgtccatcttttgtgtatctaccataatactcacattctctatctgatctcactatcttaatttgcttgttgtattgtttctctatttcagctttaaatattttaaagacatcttatgcttcacttttattgtgaagtaaatagatatacatgtacatctatgaataagataaagtattttcaaggataaaaaaaataaaataaagatatgcacttttttttttggttttatatgataatttcctatcgacttcatattgtaatatgaaaagttaatatgggtttctataaagagtaaatctaagagcgttttttcaagaaaataaataagtaaataacaaaatcaaattttagcatttttttaagacgtgaattttagctagcgtcataatagtattaagtacttttcatcaataataataataataataataataatgtacactatacactaactaatctttaacacaaattaataggtgtacgaaaaagagtaaaatttcttagaaaaaaaaaacagttaaatatatataataaaaatatatataatatgaatctaagctatttttttaattaatatatataattaaaaaataatattgaatc

SEQ ID NO: 250325 - DNA, 840 bp, Cannabis indica
ctaaattctatagttaatttttttaaaaacataacatatacatatacatatataatctaattatatatcacacaaacataattttaaaaactttaattctctagactaattaaatccctactatctcattctcattcacaacaaacatatatacaatacaattacacaaaatacacaaatattatatatatacacacaatgtatataaatacatattcaataataaaacacaatatatacatatatattatatatcaagttaataaatatttaccttataaactcaatttgacgacaaattgcaacaaaaatctggccacctatagcacacacacaatataatattaataaaatataaaaaatcccaaaaaaatttacaaaaatgaaataataacaatgtacattaataaaatgaatagaaatcatatttatacctgaatggacgttgagattcaatattttctccgctaaaatcagtggccggagttataccaccacttttttttttataatgggttcgggtacagtgcaaatgagtgaaaaaacaaaacttttttagtgtatgggattagatattgaaaataaaaaaatttaaaacaaaaatgggatgaaatagtgaagaaatgagggagatagggtgtttttcatggtggttggcaagggtttcggatgagttttttttgggttgttcttgctgataggaatgtcaatggggcaggtcggatctgatccgactctgatccgacctgatccagatcatgtacagatctgccctgccccgccccgctggcagggccggccctgaaaaaaaatgggcccaagacggttttaacaaattaa

SEQ ID NO: 250326 - DNA, 2470 bp, Cannabis indica
aatgacctactccgatccctttttagttgtattcactcttgagataatgtcaaacagagtacaagctgaaaccttataatttctagctaggctctcttcagtattacaatgagaatgtgtttggctagtgagaagtatgagaaaatagagaggacttattgctatagtgcttctgagcgtacttgaagttctaaacgtgagtgtgagcatgtgtatcttaccatttatatagtagtagcacttacaagctgtacatagagatatccctagaaaatagggaagttacaaagtatatttgaaatacaaaataaataataacaatcctgaaggaatagggttgttacttgttgacggagagtccctatctttgtgggcagtttgaactgttttgaagtcgtgggaatgctaaaggcgagttgaaaggtttgtgagaaaaatacaactgttggtgtatttttgtacacttggcaggctagccatgttgaacgctgcccggtgctttgaagttgtcactcttggctgtgtacggccaggacctctatggcaggtttgtacatctgtctttgcctgtgtccaccatgcacccatggaatcttaaagattgagaggctgcttgacattaatcctagcaagttagtgctgacctatcttcaacgtattttctacttttttccacgtggaggggccacatcaggtggacaaattttgggataacaaaatgcaatttgcatattaagatagtgagatcaattatagatagaggatattgcattaaattatgtgaggatagataaactccaagtccatttgcaaagtttcttaaaaggtatgggttcattacccacacacccaaatattggtgtgtgacatgtttaaaaaactaatcattattggacacgggatggagcctgcataacaaactccaaactttcctaaatttttgttggttgatactcttcaacggtagtgtgcatatcgaattgtattctaaccaaaattgtttctcaaacatattttgagtggtgataaggttggaaaccgatttcatgatatgcacacattttaaaaatacttgtatacagttagagtaaaattatcaaagaaaagatctggatccaaataccataaatgggcatttcacttagaacactataagatctaaaggttacatattttattatccatctcacaatactagaattgtagaattaagaattaacttgattagtgggagtaatcgatccatgaacatagtttttgagaaagataatctatattttctcaaacttccaacttaagtattaaattgactgtgatttataacaacccttaagtttaatggttattgagatttcacaattaatcattaaagatccacaagtcactgataaaattctagccagtcatattattagtaattgcttgcaaattgctaaacaacatacatgttgaaccattcgctttttaagagagtttggttcatgcttaagatgacttattagaacaaaaatatcaatggtttctagtgatttcataatgtacaataagagtacaactacaatattagtttaagacacacattaatggtataatatttcatgaatgaagaaatgaatatcctaatgagcaatgtagtctctttgtaaagttacgtaatggggtggagaacattaatcatagattttttcactaataaatactcattaagtaatatggagaaacataaagatataaaataagatttattgctaaaaagtttattttgaactaagaatcaataacaaatgagatttacattctcagttgtatttatcaaagattctattattttttggtcgtttcaattcattagtcgattccaaacagtgaattaaaagagaaggtatacagataattataaagattttcctctaatagtggtaaacatatgcaagcttaagaagtctacttacagagtaaaacaaacatctcacaaatggtattttcattatgtcattttttttgttaggtttaaaaagagcattatggaattaattacatgctagaaggtcagtgtgagtagtatttattttatatataaattatatgttacttgaaagtgatgataaaagttttctatgtaaggtgaaataattcatatctcaaattattattttgtgataaagaatataaataacatatataattttaattagttagaaagtagtcacatcatctctgattaaataaatttatgaattattcatcttgtgttacttttatctttaagagtgataaattcaattcaaaccaacgtctgtaaaataatctagaatgagaataaattaagaacattcatttgcttctattttagaatcctaatgtatgtctaagagtctgaataagactttgcattgcatttgtttcaggattgttaagtagtaacagaataactaaagttaagtctgctttattttttcatacaaagtga

SEQ ID NO: 250327 - DNA, 986 bp, Cannabis indica
gcagaacgcttaacaaacaaaagagatacattactcaaacttccaagaagtttcttgcagtcatccaccactgaaccgaaggaggaggcgaacacctctgcactacgaatggattcagcacacacaaggctatcggtctcgacaatagcttgggagaagtggtgatttttcagccaactcaatgcttcccgaatgcccatagcttcggccaactccggggacacgctgccagttttcacaccagcaaaggcagcggtcaatgtgcctgcagtatctcggacaacacacccgaacccgtgctttgaagaactttcaaaaatggctgcatcgacattgagtttgattcctatactcggcttcaaccaaagctccgcaccatctccatctttgagaggagacaacaagggaatgttaccctttccttgagctttcaaccattgatcaagactcgaattagcaaaattaaccacgtccttcacactacgagatcgctgctgccatatgagatcattacgagcacaccaaattgcccaacacaccatgacaactctgctatgaagatccccttgcaagcggctaaaagaatcactcagccaatgaccgagagaagaggcttctcggtttgcagccgccagaccagcaaattcccaacacgcccaagcgaaagtacatgtaaccaggacgtgcaattcagtttcagcaaagattccgcacatggggcaggtattttcgatcaaaaccttcttgatgcaaaggttggctttggtagcgaggcaattagaggccgctctccaaacaaggtccttagctttcggaggtgccttaagagaccataaaatcttccaactaatatttggttcagacaagcccggcggatgctttagagtttggagcaaatggtaagcactacgaactgaataaaaaccattcttctcagcgacccaataccaagtgtctgcatcaaccgaacttaagggaattccaag

SEQ ID NO: 250328 - DNA, 901 bp, Cannabis indica
gccctgctttagacaaagttttcaccttccatccctgaagcttagacgtgaggttatccaggataaaattgaaatcagcatctttctgtctagaacggaagagaggcagccccaaatatttaatacatccttcaggggattcaattcccagggcatccttaattccttctctcacattcaccggggtgttcttgctaaagaagatggacgttttaagcttatttacctgttgacccgaccaagagcagaaattctcaagacatctccagaatccgttgacctcagataagttagctcgacctactagaatcaggtcatccgcaaagaagatatgggacagagtcgggccacccctacttagtttgatgccctgaatagtgccctgatcaagggcaacatggaacagtctggatagtacttcagcagcccagatgaacagataaggagagagggggtcaccttgacgaatcccgcaagtagggttaacgctacccaccgggcccccattgagacaaatattgagcgaggtggtagagatgcactgcgagatccaccgacgaaacttcaggggtattccattacactccaaaacatgatcagtgaatttccagcttagcctgtcataggctttaaccaaatcaatttttattgcaaaaaacccctccttgcccttcttccgattgaacgagtgaataatttcctggacaatcacattgttatcgtggatatttcttccaggaacaaaggcagcttgagtcggacaaataagagtgggaaggcaggggttttattctgttagcaataattttggatataaccttataaaccacattgcatagagaaataaggtctaaattagagaggttctagtcggattttggtacctcggtagtgagcacaa

SEQ ID NO: 250329 - DNA, 559 bp, Cannabis indica
ccaaactcgatactttataaagcatccttaaccctcattatcaacgagtttctaatgttacgatcgttgcttaattaaacaaccgataagtaagaaacctaacagcagtttaaaaggagagtaataactctttcttaataacggtaattaccttatcttatttttgacatgctaagcggtacaattgacttttcttacctcaagtacaaagtcaagtgtccaggcagacttgagtggaataatgctcgacgatctcgggccctatgtcaggagaatggaaattcgataaataatctaaatcaatcctgaaccaagacctaaactcaaaactggaagaacccatatcagtaaaacacaaaaatctagctgctagaaacactccaaaatggtccattgtttctctaggttctgacctgttaaaacggtaaaaactcaagtttttcttgcaaaacagcccaaactcaagtttttcaccttaaacccctccaaaacttctccaaacctagtgaaactttcaagaacattttatcaacataaaattaacattaccaaacattca

SEQ ID NO: 250330 - DNA, 810 bp, Cannabis indica
ttgaaaaattaggttttcaacaaacttaaatatctattcaaaaatgtcaactaacttttcaaaatttatgttaatttaaaaaaaaaccaaaataaaataaaataataaataaatatcatttctctgattttataatttaatttaaataaaataacaaaaatttaaaagttaacaaaatatctggttatatttttaaaatttcctagattaaaatatatcttattttaaatttcaaataaagtcattttataaaattaattaaataatatataatataaaatatctgaccttaaatttaaaaataagataaaataatcaaattttaaaaaataagttaaccaagtaggcaaaatatcagattttatctattttcaagttcaaaatctactaatatctaaaattgattaattttattttgataattagatttaagatttgaaaactaaaaatctaaatgcaaaattgcacaaaaaatttgaaattaattccatgaaaagcatgaaaaaatcaaaaaaattgaaaaaaaaattgcattgggtgcggatggtatgcattgcataccatctgtgcgcgcaaggaagaggagttgctgaggattaccgcacacgcaccttgcattgcagaatgtctgcgcgcgtgagggggagttcggacaacatatgggcgagtaccttccgacaagcccctatctgaatgtgcgtgcaccccgagtgacactcgggtgtacgcgtgtgcatgtaggcactcgtttcctatttttttttcaatttttcaaaaaatcataactaattcaaataaaattgaaatcaa

SEQ ID NO: 250331 - DNA, 928 bp, Cannabis indica
taactaagtacccataactcgatgcaaactccccaaaatctcgatgtaaactttagatctctatctgaaacaatggactttgggacaccataaagatgaacaatttctctgacatataactcaacatactggtcaatggagaaattattccgaacaggtaaaaagtgagctgactttgtaaacctgtccactatgacccacacagagtcaaactgtcccgtggttctaggcatacctaccacaaagtccatagcaatgtcctcccatttccactctggtatgttcaatggctacagcaaccctgcaggcctctaatgctcagcctttactctcggactgataagacatttaacaacatactcaacaatgtcacccttcatgcctagccaccaaaacatggctttcaggtcttgatacatctttgtttaccctggatgatctgagtaaggagtggtatgagactcatccatgatctctcttttgatactctcatccatatgcacacaaacacgatttctgaatcgtatcatttctatttcatccactgaaaaaatcactagctttcccagccgaaaccctatctcaagttttcaccaactatggatcttcccactgtgcttctttgattcgctccaaaagagtagattgcagggtaatattagctaattgccttacaaccaactcaatcttagctcgtgtcatctcatttgctagctggtgggagatttgtttcaccgtatttatctaactttgtccctttctgctcaaggcatcaacaaccacgttggctttactagggtgataaaggatctcacaatcataatccttcaccaactgtagccaacgtctctatctcatattcaagtccctctgggtaaagaagtattttaaactcttgtgatcagtgtatatctcacatttctcgcca

SEQ ID NO: 250332 - DNA, 1273 bp, Cannabis indica
aaaaaaaaaaaaaacttaaaatggaagatgagagtatattagctaggcaactcactcaaaaaaatatctatattttaataaaatataatatatgagtatttttaattaatggattaaaaaaaaaaaaaaaaaactattcctcaattatcctcataaattttggctactattagtatttttagtaattgagaaattgcccgcacttatgtgtgatatccccacactgaagaaaatcaactattcaaaatttcaacaattcaaattcagtacttgacaatactatagtaactatactacagaaaagattcaaaaataagaatactgaaaagaaagagtcattattgtcattattctactgcgttaccaagagatcctaaacttaatgtattactttcaagttttagaaaaacatgttccaaatagactggtaattaggttaattattgaaatacaattttgataaataaaatcctcataaaacttttccacccatttatttcacctaattttcgaagtatggtagatttataatctatatataggataggctaacatgataacaaattggtgttgatattggatattatttttactattataaaagaacaaataaatactatgtaataatatatattacagtacgtagtggaatattacaagttacaacggaggtgtagtgtagcccatgaaacctatacaaacaagctatgttgtacaaaacaaaactaaaaataaagagcataaactaaactcgtacccaagtcaagtaaacagcctagaatagccaatgcttctttcttggagctctggttggaacatctgttaattgatagaatcagaaccaaagcttatttctcttgaaagttaacagcatggagaccaaatgaataaaaagaaagtaatatgaaaatgcaagtaatcctagttgagctaaatatatgtataagcattacctccagttgcatatagggaattgtagtgtacttcgctccaaaaactcagccaaacttctgaaaagacgcaaaactagaaatccataatccaatccaaacatgaacaagaaaaccccattttcattttgagcatttcgatatgtgggaaatggctgatgaaacactgaggtttcatgtaccaaaccagtaagtgatgtactatgttgatggattttcttgataatgccattacagattcacagcctatgcatttataagaaaaacccaacaactgaattttggcatcaccagctctgactgggtttaaagagtatggtgca

SEQ ID NO: 250333 - DNA, 838 bp, Cannabis indica
tagtgtgtaagactgtgaagaatccaaacacaaggaaggagtttcgagtcaacaatgtcatccaaaggtttaacctttaaaagtataggccacgtgttgcccaaagctttgtcctttgaaagtaggggtctgtaatacctgccttgcaaaaaggtggtgaaagtgtgtgcactaccatgcttggatgtaggagataagatctgatattcgtcaaaaaagcataatcatcacttggtggtctggcgtgcataaaaggtagacatccacgacactccaaggtggtcgacatccgcatcatgcctttaaagtgcctgtccgggtataagctggcagacttccatgtttagacccctccaagtctaggagaggaaattctctttctatgtttgggaagccaaggcaaagttaagtacgctttcgcgtatccttccatctcatcttgttcccggttccaagaggcttctccgtgataaggttgtattaggggatttcaattaaggaattattaagctaatccccttctttaaatatcacgtatcatacgtctagaaacacaagtaacaagtaatttgactaaaactaattacgaaccaacacaaggagggctaatcactaattgattatatcaatagacaatgtagtaaaaactcagtaaatataattatataattactaagagatcaattccatatttataatggagtaattagagaattaataaagatgactattcgattgataagattcaataaataatctagtttattagagcttaaaattataggtctatggtccctagatgatcaccttgaaatattgtcaaggataaagataaaac

SEQ ID NO: 250334 - DNA, 902 bp, Cannabis indica
tagtggcttggtggtggtgtggtggatagtgataatggtggtggttttggggtggttgtggagatgattttggggtgaattctttgggtattttcaaaagaagaagaagaaaataaaaataataaaaaaataaaagaaaagaatgaaaaaaaataaaataatatacattttttatcattttaaattattttttttattttaatattatgtggaccacttaaatcttgccacgtgtattttagtataaacttcagcagttcatcgtggcacttaactgagatttttggacgaaggggtaaaaagcataacataagtgaggtttatgtagttttgctcctaaaaaatcaatttatgtagttaactgttaaaaaaaataaaattcaagtagcttttctgctaatatcccttatgaaaatgtagtgttttgccattgttgactaagaaataactgcaatatagaactgtgggaattggagaggccaaaggagatgagcaattttctgtaataaaaaagggaaattttaaaattatttttttcatgttttatttataattttacggcttaatgtttttatttataaaaatacgtgatttaaaattacaaaaatatactctaattagcaaaaattaagaaaataactaaaagaaatcaacctcacaataactataagagttatttgcggcataacctccttaagtggccaggttttgtaactaacccctaattctaaaattttagtagttaaacctcctaaatccaagttctgttagcacttagccctttccatccatttttgagtgttaattgccaggttggaatatctacgtgtacacagtgtacacgtggcacaattttattggtccacgttataaatatttaaaattataataaaattaattat

SEQ ID NO: 250335 - DNA, 862 bp, Cannabis indica
tgttttcagctctcttgtccaacgtttttatcccattaaataccaattaaagtgctgataacatttatgtggtgaaaagactttgattttcatatgtgatcctcaaaacactataaatagaggtcttgggttctttttgtaagacaacaagtttttatcaagatagcacattgctataaacactttaggcttgataaatccagaaagctatttccattcttttcttttccctaagtgcttgtggtaggagaaaataagcttttggataaaggtgtaagaccttgttcaagtttggtgattcccctattatacacttgtattgtatgtgatattgagattactctcacatctcttatatatatttatgctatttatatattgtgttttatgtgtagcttattgctttgagttgtaatccctctctttatctctattctctattttatgtgtatattttgtttagtgttgtgacattattaattccatatttatgtcctttgtattatttgtcatagagttgtaatcttgttgatttgatatttctgttggagcacaacaatttccaacacagtatgattgcttggtctatgcctgtgacatcttaaaggcagtacataatgagttggtgctgcttatgaccaattggcctatgagagaaatgcccatccaaacaagagggatattttgacagatttacaaagttggagaggaaggtaaatatgatttgcttttttttttatcctatttttaataaataatagtggattgaaattattctaaaccattgacactatttctctcttgcatgcaaattcgtgaacaaacgacaaagatcatttgaggaaatgagacttctacaaag

SEQ ID NO: 250336 - DNA, 2069 bp, Cannabis indica
gagtttcctggtcggaacatttgcgtcgattccgatctcttctagttcttccactggcccaacatttgcatttcaaaatatttaagatgtgacaagggatcttccttcccaatatatatcttccaggtcgacatcttgaacttgtgaggcaactctagaacattgatctcttgagagaaaggggatccacctgctcgggccaactcgaggtcattgttcttctgaccagcttgaccttagaacatgtttttcagttcatctaactgtgcttgaatggatggattaacttgttcggtctcttggccgaccaaggtcacgtcaggatctctttaagcttaattttgagtacgggccccaggctgagtggttggtgagaagtactgctcgtctaaccctctcctcgtatttagatcatccctgagatcatgaactgttccctgtctattaaataaagatgcattaggttgtcttagcgactggttggtttgcccgatcatttggccagaaccgttaacttgggcagagttattaggtataacttctcctgacgaattactagataaggtctggccgcctaccgcttggcccacacgcggaacctctgaccagggattgggcggctgaccattcaaagtctgagaagcgttcccagctaaatcttcgtctgactcacccaacgggatgctggtcccaggttgctaattagtagcttgataggccctttgtattagtataatggcttgtcttgttccattgtcaatggctgcttgctgagccctcaacgtttcaacctttttatctatccatccagcgaacaggcacctctgctcttcaaatgcaaggttcactgcagcacggatctcttcctgatcatgatgtagagtattagtatggccttgcatgagtctaagagcatcacagaggttctggatctcggtgtcgtgtccaacagttattcggacattttttgctggcggaactccagtgttgggaatacctagattggctactgaactggtatttctagtctcttgcacatcagtgtgattccattcaaaggagacgtcacacaatgacccatgattggtgattgcgtgattggttattcaggattcgtggctggtggaacccttacatttcctggattctgcagtgtgggatccactgccgatggattcgagtttgtaccaccatcgtgtttatgattaaatttgaggtaaagagcgaatttacaattctggatctcaatgaaagcactaaaatgttgacctcgcttttagccaacgataatgagtcttaattgtaagcgataagtggaataagtaagatataatatgaaaaggtaaataaagaacacaaaggtcttaaagaggttcggctccgagcatttcagtaatagcctactccgattgatgtgtattgacttaagagcaaagaatacagagattcttctcttaaaactcttacaatgacatctctgagtatactctcttagatcattctctcgaccctttgcccagtgagaatagatcactatttatagggctatgagctagaaggaaggttttccatttgtttacaatgtctataactggtaagattacacattacatatatagaatacactgattgagggattttgacaggttgccatatctctttaatacgatccgaaatttatagggagcttttgtgcttcatgatgcaaatgctgaagttactaagtgttgatatgctattcgaattgtccactgctcgactaggaggacttcgtccgtgcagttatatgtaatgctctgctcagaatttgtccttcgggcaaatatggggagtcaattccacgtgtcactagcgtgtgatgccacgtcagagtgcaaaaattaggataacaccttgaaaggccataacccttatccaaggtgtaagtataccttatcgccgattatcttgtcagtctaaattcactgaattgacaaatcatgagaattaaactttttaacatataatcatgattatattccactgtgctgacgcactgtgatcatgaacaaatatatatatatttatat

SEQ ID NO: 250337 - DNA, 1270 bp, Cannabis indica
aatttatggctatatatatactaaacaggttacttactttggatgtggtggagtctgtctaagtgttggaggagcacatgttgtaatggatggaaattcagctttcaatttcgtaaatgcatggtctcaaattactcgagccaaacccaccattacaactccaccaattttcgataggactttactctctcctagaaatccaccacaaatattgtttgaccacactaatgatggatatcgactccttcatcaacccaatcaagacaacaatcatggtcttaataataataacaaaaacttcaaagtgattgtagtcaaaatcactaaggatcaactcaacgctttgaaactcaaagctaataataatttcagcacattttcgattttggctggccttatatggaaatgcacgtgcatggcacgtgaacttcctaaagatgaagagactaaattaggcttttcttctaatggaaggtcgaaacttaaaccaccacttccacttggttattttggcaatgtcgtttttagaaatacgacaatggctttggctggtgatattcaatccaaacccttttggtatgcatctaatcttattcatcaaactttgaaagtgaatttggataatgattatttgagatctgtaattgactttttgaaacttcatcccaatacaagacgtaggtttgaatttggatctcaaaccttgatattaatagttggtctaaattttcgatttatgatgctgatttgggtggggtccacctttcttagcacattgtggagctatatctaatgaggggagatcgtggatatttgataacaataatggagacatatcagtgtatatatctcttcactctgatcatgtggaaaaatttaatagttattttaagtgtgtggtgaatcaaatttgtgactaaaaatgttattaattaggctgtttcggctaattattattcacctaattagaatttgtattgtgtgtttgtcttaaattttttgttttattattatttgcattttttttatttctctaagtgtgggtgtgttactaaatattttgtattgtatttgtttctagttgatattttctttcaaatatttataataaaggcatgcgtgcaaaaattctgcaaggcaatactctacaaaaggatgtaccattgcatttttatttatttcggcatccgatttaattttttagttcaattatatttttatgatcttgtatattgtaactaattagtaaaatttaatatgtcaaaaataa

SEQ ID NO: 250338 - DNA, 650 bp, Cannabis indica
ggataagttagtaatagtgatttatttcttttagagaatgtttaataaaagatattattggtgtctagtactttttttgatatcatgttattattagtgtaattaagtattgagtcttatataacttataaaaaaaataacatttaggaaatatttctgactaatcgttaaacgcgacctatagaagctactaggtaccactggtacccaataataatactttttttttacctaatttttgtgtcccaccatttaaaaacaaacataatttattaatttaatattaattactactttatatattggcagctcccttattaaaatttaaaataacacttgtttttaaaggtaagaggaataaatcattcaagctagggctagaaagtcaaacaaaaccgtacaaagttattacaaaaagtttatttgaggccaaatttacaaatattttaacacttaattatgaagcaataacataatatttaattgaatcaactaattattaagattagaaattggcaagttatgaaaaatgaatgagcaaataagggaatactcttgcattcgctaaactatgcaagtttgttggtttctagatgatcgaattacaaaattacaaccctaaaaatcgcaacatttcaaattatacccta

SEQ ID NO: 250339 - DNA, 604 bp, Cannabis indica
aattttatacaagaccttcaaattagcaagaatcttgtaagaggtaggattcagctggtttatgtagtctttgaagtagtctcgaagagggagtatggcccatgcactgatatgctcgagactccaggcgcccatgccagtcgagccactggtactaacctcaccattggcccctggggtaccgcttcaaaagcgcacaggggaaaacaactgaactcaccctctcgtactgacctaacttggcatgatcacccaagttcgattccacaggtcttcagtgtatcacctgtgtagcctaagatagatcgcaccttcgattctattaactcagcttcaaaggtgactttggggtcctgcagagtctttgatgtacgtggcttgggaggcattatttcaaagtcccagtcacctggttcaaaagaaatcgtgactttgggtaaaaacaacggctttgccaaaggaataaaagacacgctgggaggttttggccaggccacatctcgcaagaatcggcattttccttctgagatttcctgcaagaaatgcctgtagtgttaggttttatgccttaaataaaatcgatttcaatataataagatttact

SEQ ID NO: 250340 - DNA, 948 bp, Cannabis indica
ttagaatgtgtgggtatcgtgaataccatttactagaataaatatttcgggcccggcgaccgtggaaactagacaaagtgatcaaaaatgtcacgacaattaaagttgtattgtagtggaattattccggaatggtttagaattttaaattgttggtttggcggggttagctagaaaatgaccaaaatacccctaggattgatttaaggtttaagggttataaggagggtaaattagtcattttggtgtttaatattaactttgttttatttgaaattaatggctggatttgggattttaataaatagaatttttttttattttattttattaagctttataaaactaaacctaataatggataacctaggataaagctaaaaaaaattctttctctttctttccttctgtcgagccctagaagaagctgaaaaaccaaggaaaagctcatctcacttcatcaattcttgatcaaatctttaaccctaggagctagccaagtttaggttttggtaagggttttaaggatttcagggctagagtaaaaactaaggttagaattggttcttagggtcgaattgaagcttgtttaatttaatttggttagtgataggggttgtttggtttgatttgagttagaagtggtaaattgagcttaacttttatttgagaatgtaattttgagtaattgatgagttgaggtgaattggtgatttggatatattttatttgttatattgaactgttctatgagagtatagcaagtttggtggaggttggattggatttcagggtgaaaaactaggtttcccatggctgcccagaaaactagtcgaccggttttccaggtaactggcaaatcggtcaactggttttgccagcaggggaaatctcgagttttctcctcgagtctgatttttgtttggggtatcttccgaagtgtaattc

SEQ ID NO: 250341 - DNA, 910 bp, Cannabis indica
acatgttttacctgagactcgaacccaagaccttcaacactcacacacccacctatggccacttgagctagcctcaagtagtgattactattattattatgattactatttatactaatcacatatatataagaattatatacatatattatacaattttaattttatgattaaaaaaaaattacgcatttgagttgaaattttattaataattaataaattatttttgaatatataattttaaaaaattatgaaaacaaagagcaggtttattttttagttataaaatataatttgcatcaccttttacatactattagatcatatttttttttctatattttagttttgcatcatctattagagatactctaaaattttttttttttatgaattaagaaaattatattcaaacactatttacaaactagcagtaccacttgagcctgaaaagactattttaagaacaagcaaattcaacctgtcatatacccctctttacaaatgtacaatccaatgcatatctaaattctaaagtattgatttttttggcattctaacattgtatctatttctaatttttcatgtttagcatctttagatattacaagttcctaaattttttgagaccaaaaagttagatttctgtttgttcaatggtaatgaaccaagaccacaccgtagtagcatatacacatattttttggtcttccggactttgcttcttctgagatactctatcatgttatattaatataatattggacaccttcttttttatttatttatttattttttgctcaatttcttaaacgtgtctaataacaataatctaaaaatatacaaaagaacaaaaccccacagctagtcaacatttttacaaggtttttcttcatattctctagctaga

SEQ ID NO: 250342 - DNA, 534 bp, Cannabis indica
aacatgaaacatgatgtgaaattataataaagaggcatagctgaaccaacgacattaatatttcaattcttgtaacatctcgatttaccgacataaataatttaccaatttcataacattcaaattataataaagaggcatagatgaaacattgcttcttttttcccagggtagggaaggacaacctctgccacatatatatatttatgtatatatctacaaggatacgttcattgttcattgtctctatatactttatttattttaaatattagctataccccacaaacccttgggacccaattcaagattccaaaacactttaacacaataactcacatgtgttctctgaccataaccaaacaaacaaaataaaatgactaaaaaccccatttcttacatgtataaaaactagtacaaacggggttttataaaaagcatatattttcttgaattcttagcattgtttcagacattcattatcaaaggtgtttcagaaagaagaacaaaaaggaagaacaagaaaacacgaag

SEQ ID NO: 250343 - DNA, 690 bp, Cannabis indica
ttggatggttggcctacgaatttcctcctctgctgccttatctcgggtgttgggaaagacgacctttgaaaaatttgcgtctttgacggtctaaggagccttcaagagacccaccctctggcaatttgtagtagtcaccaagtccctgaagttcaactcgttcctattgagggtttggaacaccgctttgcgatccttgaagagttgaactattcgttgttgtccaaaacttaactcgtatggttgttgtgtgaactattccaacaaatattatttataatgaccatgagatctaactcaaaataaactattttgctcatagtgccatctgatctgcgctaagtgcggatttcatattttagatccaattcaatctgtgtcatagctcaaatccaatccaatcaaattcgtaaaagtgtgaattggatctgttattttagatttgttattttttgatattaaattatttaatatttattaaaaaatattttttacacaactaacaacaaattaaaacaaaaaatttaaaggaaaaaagattgtatgtagaaagaaatatgtaattttgtttttaattatattttctttatatataagaatgtaatatacatttgatgtattaagtttttaaatatatttatatcatatgtattggatctttaaattgttatttttttacattaaaatatt

SEQ ID NO: 250344 - DNA, 1692 bp, Cannabis indica
gtaattgtaatggggattacattggttttgatatgtaatcaatgtaatgaacctattcattaccattaccattaccattacaatgaactaaacatcaccttagagcatctctaatggtaaaactttagaggatacttggtaaggtggacatattatgtagtaaaatattgaaatactatatcattaaagaaaaaaggatgtcattctaaaaatttgcatggatgctatgttgtagtattgatgctattattttttttaataaaaaattgaagcttaaaaattattgtagctaaaaaaattattgtagctaaaaattacggtacacattaaataataaagtgtgagatcataattatagaatttttaaatagtgttatacattggagtatttttagaagtaaaagtgtcaaaaaataatgtggaagagagataaaataaaatattatatttttagatgatgtgtaaatttttaacatccttaaaaatactactattggagatgcttttagtcgccttaattttaaggtacccaatactgaagtggtatgttgtaattaattaacagtttcttatattatttatttaaaagaattactaaaaaacattattggtaactagcatattcgtcggtgttatattaatattggtataattaagtacgagaactcatataatttaagaaatatttttaagaaatatcgatagttaatcgtaagacgctacttatagaaagtaatggcaccactaataccctataacaattaaatatattagatccgattataaattatatgcatttgcttctttttttttagtacttgaaggtattgaaggtatccattaacattaatttctcaaattttaattgtgttaagttggactatttagtatgttgaatttagactttattgtattagaatattttgtagcgacattttgaatttataatacaaataattttatattattcagattttcgtgataaacaattataattatcaacagacaagataatatatatatatagactattttaaatattttttcataaaattatgatgtgtattattatgtctttgatttttcaatccattataaatggttcatgaactattcacagtattataaattggtcattttattaattttgtcacacgtgacaaacaaaataataacataattgcttaaccaattgttacgttagtgccatgtcatgtaaataatttaattattttttaatttagttttacgtaattttcttctaattgatttttagtttaataattttttaaaactacataatttttattttttcaataataaattatacatgtgtcgctgatgtgacaattgactaagcaatcatgtcatcattttgtttgctacgtgtgacaaaatttcgcaaaaaaactcatttacaatactatgaatagtttatgaactatttgtaataagttgaaaagttcaaaaggcacaatatatattaatatatatgtcatagttcgggtcaaaaatctttaataaccatatatatttgtataagaattaagagtgataaaaaaatccttttaaaattaagcactatctctataaatcttaaagggattattttacaaaaacataaaaacaacaaaaaaattacaaaaatacggtttcacgaaattttaaacaattttacaattttttttgatt

SEQ ID NO: 250345 - DNA, 1721 bp, Cannabis indica
acatacttgtgagtagatctaggatcctggtaaaataattccaacaaaccagtcccaaacccaaacttggacccgaatccgtaccttgtgaccaaaaatttcaaccaaaaccggaagtagaccgggacccaggaacgggattagaaccgtaaccagaacttggacttagacctagaactgtaaccggacttaaacctagacccagaactgtaaccagacgaggtgccagactccaacgaagagctagacccgaatcgggacccaaacctagatcccatctcatacctagactcagtgctgaacctagacccagactcagacctaaacatggaaccagactcgggacacaaaattgtggccgggacctagaaccgcaccccagtctcggtcccgaacccaaactgggacttgggacccaagacctgaaccagaattagaccgggacaggtgaccgggactagaatcagggagtcaaaccaggacccaaacccgaacccggaccaggacccaaacgcggaccctgacccagactcaggagatggaattgcaacctgaacaagaactgcaaaaccaggacccttgaacaagagtaggactgtgaccaggacccggacccaaacttagaactgaactcggacctagccccaaacccaaagcgagacaaaaactcgagctcaaaaacaatcctgtacccagactgggagcgagagccggaccttgacctagccctgggacccgatccaagacctagactttgacctagatagggatccggatacgaacctagactcgaacccagacccagacgcaggtcaggatcgaaactcgggacctagatccatactgagactgtcacccaaacccagacctggacctgcacctaagaccaaaacttggacctggacccgaacccagacttggacctgcacctaagaccaaaacttggacctggacccgaacccagacccagacctaaacccagactcggacctagactcaaactaagactcagaccccaaccaggcccggacccaaactcgaactcagacactaaatcgaaatcaaaactgtgacatggacccaaacccgaacatggaccaagatctgtacctaggacccagaccatgacctgcggctcggaacccagacccagatccgaacacaggactcagactcaaactttgaccaggactcaaacccagatcctaacctagaccgagattggaaatcgaatcgggactcaaaccttaacgtaggacatggactgggacacgggcatcataattgggaccgagacccaagacctgaccctagacccagaccctaacctaggacatggatcgggacctgggacttggaacccgaagtggaactaaactgggactagagattgtgatccagatctggactcggggcttggaactgaaccgtagttagtatttggatttgggacccatacctagactcggacccaaacccaaacctagacctagacccatatcccagacctaggtccaagtctgagtctgggtttgagttcgggaactagaatcagactaggaccttagacccagaccctgatcgagacgcgaacccaaatcaaacacagaatggaaattgaaactgggactaggacccaaacacgaacatggacccagaccgggacctatgacccagacctgcattggggacctggatctgggcctcgaaacccagaccca

SEQ ID NO: 250346 - DNA, 1278 bp, Cannabis indica
gagctacaaaaatgtcaccgaaaaaagtagcgagttgggcaagatagcttagtgtaggttgttctcctcgacgagctgggtttagtggtgaagacggctcgtcaaatggacaccagaggtgaccgaaaaatctgttcaaagtttaaacccccaaactttgacttgcgatcccgagctaacgacgacgaaagaagcagcgccgcttgggggtgaggtcgcctacacttgggctttcaattggtccagcgagtggggccgggcggtggccggagatggatcgtaggagagtggtggtaatggtggttatggattctttgaagcttgaagagagagaaagagaaagagaaagagagagagtgcttatggtgatggagaaaaaaattatttatattatatatatttgtttatttatttattatattatatatatttattattattatttattactatatgtgcataaaacatttttactcggtcaaaaccgagtcttcacaacgtatatatatatatatatatatatatgctatactttatgagaggcgctctcacctcctaagtactcctagattttacccctttttttaaggtttaattagtatatttttccctatgtcgaagctattaattttttttgtacaaccagtttatattattagatttaaggatttttaccaaattcgttcaattttattaacagagacgctttacatggtgattgtctatgtatcaaatcgtaccccaaactttgacatataccaaatcaccccataaattttaacatttaccaaattactccttaaattgtaacatctatcaaattgtgcccttcaaacatttgtccacactaagcccccgttaaaattgaacagaaatccttgaattcaagcatttcaataatttgaagagaatttttaatatcttaaaatgtttaggaggcacaattagtagaggaataaatccttcttattattattattattattattattattattattattattattattaaataaaggcttaaattatgcatcatccttaaaaaaaaattcaattacattcttttactccttttcacaccatctttcttcaatacatgacccatgaatataatattatttctaccgaagaagaaaatatataatcattttataaaataaatataataattcaatctagacacaatgcacgtactttgggctgacaaacatatcatgcccatagattaggaatttaggatcgacacaaagggagttgtgcctattttttttaatt

SEQ ID NO: 250347 - DNA, 646 bp, Cannabis indica
atacttttcgcagggtcttttcttacatcgaccttggggagtaacccgagttatatttggagaagtgtgtttgaggctaaggagttagttggggctggggttcggcggttggcaggtgatggttctaccgtcaatattttgtctgagccttggcttcctgatgagatgaaccctttcattgaatctgtctatccaggttttgtgggaaagtcggtcgactctttaatgaaagtcgagcaggttgaatgggatggggaagtattagctgatctgctcactgctagagatcgagctttggtgtggaagatttcactcagtagtcatatgagtactgatttgtggtacttgttacatgatgcgtcaggagtttttactgttaggagtgcatattctctgcttcaatcaatgaaacccaacagagatagtctctggaatttggcggctattatggtagttgcagctccctccaaatgttcttaattttctgtggagagcttctaccaacagtctcccaacttggtttaatctttccacaaaacatgttccaattgatgcaacgtgtctgttttgccttgctgctcctgagacaattctgcatgtgctggtgcagtgcttttttgctcgaagttgctggagcaaggttcca

SEQ ID NO: 250348 - DNA, 796 bp, Cannabis indica
aataattctatatagccatagtcataattttttttgaggggaatatagtcacaatactatgtatatacataagcttagattttgggatttttacacttaggtgcttaatttggccattttttttacatttatgtttatttaacagttatttaaacttttttaaaaaattatttttcaattttaaattttaaaaggtttgttaattacaaaattacctgtgcaattacaaaattacctgtagcatgctgatgccacgcgccaatctttccctttttagttttctttcattcttttttcgattttttttctctttattctttggttttttttttctctgtccagaatccacgatcatcaaatcgtcatcaactcttttgccctaacccactaatttccaacctccatttcagctacgatctcccctctcttgcataactacatttcgtttttcctctttcagttttgttttctttttctatagatggccatcactaggtcgggttccaagtgcccttcacatgctcaaaaaatttcaaaaaatcctaagaaatctccttcaaagtcctctaaaggtgatcctaaaatgggtttgaaaggcattgcgaagaagggaatgactgatgttgcagagtcttctggttcaaaaaaaagacctcttccagctaaggttgaagctcataaggcaaagacaaatcttcaaaatctgttaaggatgtaagttgtctactgttgttttttttttttgattttttttagtttttttttcttattgtttagttttttggtttctgttttg

SEQ ID NO: 250349 - DNA, 768 bp, Cannabis indica
aaggagtctttgcgccttagcaactgacggagccgggagcttagtacgcccaaagtgctcccttttttgccaaagtgctcctctgtggccaaagtgctcctctttggccaaagtgctccttttgttggacttccatatctagaagaaaaattcatgcacaattatcttggaatttctgagagataacaacttcccttcttaaaattagggtttggaggctttatcctagaaaactaattaaaaggagttctctattctaacctccgacatccatatgagttgcgcgtgggccccatgcaccaccactatccaccatggctctctccacatgtcggtgcacgtacgtgtgtggtagtctccagcggcgtgttttctgagtcgtctctctcaggcttcttcatctctggctcttctccaactccagcgatgtttttccaatgttcactctctattcatctcatttaggattctatacttattttgtcttgttgtctttctccattgcagaacaaaactcattaagagacatctctttagttgcaagacaatgcaatactcatgcacttcaagttattcaaatccctcaagacccttagattgtggattctagtgcttctgactatatgataggtgatagatcactattttcttttctaagtaagaactatgatgaaaggactattcgcatagcagatggttcgtgatcagtaattgattgaattggaactataataatctcaacaattcttgtcttaaattttgtccttt

SEQ ID NO: 250350 - DNA, 879 bp, Cannabis indica
atttctaagtcaaagaaatgggtgaactaaagggtaatttttaattcattgtaacataacaactggattttgttttataatacattaagatttgtttggtacgccatttagatcctattgtattgtttattttattaaatttggttttatattatattttatatagaacattatttaccagtggtgtctagcactacttagaggtgtcactttgtgattagttagcgatattctatacaagttatatattaaattacaatgggattcaatatttaattataccaataacaataaaatacaaaagagagtgtactagtagtatcttttagtatttctcttttgtataatatttaaatattatatataatatttcttaaagaaaaataaatattattatataaaatattaaattagtgaattatattaaaatatttgtaaaaaacccaaaaacttcaaaactaaactttaaaacgcgaaaaataactaaacattgttggcattttaagaaacacacgatttaacaaaagtagttaacgtttcttccaaactaacttagttgacaatttggaaagcccatttttcaaaaagccagccatgtgttcactgttgggattttatgccctaaataaaaactcatttcaatataatatgatttattatcaatagaagattagaagtcatttatgtttacatgtagttttcatatttattgtttaaatgtgtacaaaatctgttaagtccagaacatatagttattcacaattacagtgatctcaacacagtggaaggtaaattgtgattatatgcttcaaaaagataatagtcccttgattcatcagtgcactggaatttcaactgatgtgatagtcaaacgataaa

SEQ ID NO: 250351 - DNA, 749 bp, Cannabis indica
caattatcagtttttcagaactaatctgtacgccaagatgcctcgtggaaatgttgttagatggtgttatgatgacatttggggatagattttgcatttcaaaatacatgttcataagttggctagccttaaagagccgtttgtctaccttggacagactttgtcagtttaatcataccaactcttctgtgtgcttggtgtgtggtagtggagagtggagagccattctcacctcttctttaattgtatttatatatagcattttggtggttcatcaaatctggctttggactggtatttctagttagaaaaaagagctccatgatgtcctaaagtggatttagaaggaaaaagtttctagaggtaaaagaaaggttcttttgagtgtcattacagccacaatttatttcatttggcatgctagaaacaaggtgctttgggagtaaaaactttctactgttaatgtcacttttaattgtattgctaatagtgtttgtgctagactgaactctttaaaaactaagaacttgagtaaaatagatagtgagtgggtgaaagttttaacaaaagctttgtaagttatcttgtaattgttgttgttgtagtttaataaattttctgaatcaaaaaaaaaaaataagtaaaaaaaatgtaaactgtaaagatctgtaaataactaaaattggaaacttagttattgcagaacacagatttacagtaagtagaaaagaaataaatatagtgcagaa

SEQ ID NO: 250352 - DNA, 1079 bp, Cannabis indica
ttttttaatttttcttaatttcattaattaccataaaactatgtttgaataaaatgatgagttaatagggttgaattaatttgattagagactttttttcaaaaggaataataagtagagacttttcttataattacaacaacaatacatacgaacattaccaaattatgagtacctactacctaatatataacaacgtattatatatattttgtgcatacatattttatggtaggagcatttttttttaatttatgttttgacactaattcaaaaaatcaaaatcatctaaattttatgataaagcattctttttgttctgtggataggagtatttaaaacatcacttatttttgagaaattctgattaatttacattgtcaaaaactaaactcaaaacaatttatttcaccggtaacaatttatttcggtgaaatttttcaaattaataatatgaaataataaaattataaataactttattaaatttactctatgtgaccataaaggttccacaatataaatttatgatcgttttgcgaccataatagtcgttgatgatcgcacagcgcgaccatacaaagtcattttactaataaaaatatttgaaaaattatttcaggttattttagagtaaatactattttagactctgtgttttataaaaattaatttgaataactacaatatagcacgttgcataatttttttggttttataacatattaatcacaaagtcaaattgttttgaaaccagatttataaattagtataatgtactattttgaaacatatttttagtatatattaaattatttagaatttacaaaaacactaatgagagagttataaaattatttaaaatatatgctcgcgacaccaaaaaaacctacctcaaaatatacaaacgtaatatatagtagcactgtacgtatttaaaatcttctttattattagttattttttttatttaattatttatttgttgtatatatatatatatatcttatatgaataaatttctgtacttattcaaaaaaaaattatttagattacttgtaaatttaaaaaaaaaatta

SEQ ID NO: 250353 - DNA, 673 bp, Cannabis indica
cccacatattttgacgggtattacgtgccaaaggcacttactccccaactagtatattaatataaaaggaaggaaaagtgtaggtagctttttataatttgtttttagtattttttaattttttaagagtacttaatgtactaaaaaaattatgattattcaattaaatttttttatattaatttgtccaaaaatatgtattttcttccttgactaattgattaaattagtcttgttcaattaatgagttataattttttttttaatttgtctcaaaatatatatatttttctccttgactaattgattaaattagtttattcatttaattagctataatttttttaaaaataaacacaaaagtgtatatggctttctataattataagatcacgcgattgcacaataaacttcatatggtatttatcattttaattattgcaaaacagtaagacaaataaatatttccatataagaagtaattagtcatatgaattgtgatcttcttttttatcattacaatttaaggcatatatttcacatccacataatttattaaaattaatcctcttattaaatattttatttagaccaattttatcattaatattttgggaaaaaaaataggaaaatacaaaaaatgagaaaaaattacaaaattactatgggccgg

SEQ ID NO: 250354 - DNA, 1158 bp, Cannabis indica
gggggttttggaggctaagtgtggttcacatgcttcgtttgtgtggcgaagtttggtttgggggaaggaggttattgtgaaggggtcacggtggagaattggggatggtcaacaagttcgaatcttggaggatccatggctaccaaggccacggagtttcaaaatttatgataagccggagctaccggctcaattgtgtgtggtggacttgactcttcctaatggagattgggatgagggttttattcgggctaattttaatggtgatgatgctaatttaattgtgagtctccctcatgttcgtgatggtgtggaagacaaactcatgtggcattatagtaagaatggagaatatacggtgcgtagtggctatcgtatggctgctgaaatcaggaaagaagtggccacctcggatgagaaggttacaatggattggtggactaaaatgtggaaattaaagctcccttctaagatcaaacactttgtgtggaagttggctaatggatgacttcctaactaactcggcacttgcttcaaggaaagttgccgttgatcctgaatgccaaagatgttcaaaagggctgagagaatctggctttcatgccatctggggctgtagagtaaataaagaagtttggaaattgagtggttttaaggatgtaaggcatcggcttggcaaggaggacaccatctcttttctcatgaggatatccaaaggtatgaatactgagatgtttgaattctttcttgtcttgtgctggcaactgtggtatgttcggaacaatacgaagcatggcggcaaggtgccgagagctgcagatgttgtggactggtgtggtcagtacctgcaagaggttcgggggccgaggaagatgggtagcagtaatgaagcgagacagcaagcacactgggtgtgccccccacgggatgaggtgaagattaacgtggatgctggtgtgcggcaaagctcggatcactccagttatagctgtgttatgcgcgatgtggaaggccaatgcatttttgcttcgactactgctctgccgcaagtgtactctcccctctatgtggaattgctagccattaaacatggcttacacactggaatacaacgccggatacaacggtttagtgttgaatcggactgtcaagaagctg

SEQ ID NO: 250355 - DNA, 550 bp, Cannabis indica
acataaaaacgggaaaaactagggcttgggaaaaagccccaaccggcaggccggatcccaaccggaagtccggttcctgggaccaaccggtcgaccggttgcaacagggccccaggaaccggaattccggttctgagctgggaacccaaaattttctcccctcaattcaaaacaatcccaaacttcacaataacttccagaacacctgtaagcattgcaataaactaaacccaagcaatggaacccaacaaaacacacaaaattcaattccaccattagagagctataattaagttctttaagctcaaactcagctcactctcaaatcaatccataatctcagctcaatttaacttaatcaacatcaaacaacctttagaataccaaattaaaccatcttaaatcatacagcaacttatcacacaatttcttcaaaataattaacttaggtttaagaaaaacttaaggaagaagaataggggtagttaccttgaattggaatcttggaactcaattagaattcttgatattcagctgaaaactcacagcc

SEQ ID NO: 250356 - DNA, 479 bp, Cannabis indica
atgagagattttttttaattagatagaaaaattaagcataaaactcaaattttcataatgttatccatgaatgtgtaatactcattaagagtgtacccaaatatataaatataatacatatatatattgccaatactactcacacgtttggaaacaattgatctcatttaggattcgtttaaaacatcgtattaggtcgtattatattgtattatattaaattaaattatacatcatatttttatatatactatgttaaactttaatttatactaaaatattatatatttaagtactcataaaagttagcaccacatatagttttacataaaatacaatttaatataatattatacaatacaatacaatacgatgtaatacgacataacaaacaaacccttattgatccaaattatgtcttatacaaccgtgtcactcttgtattcatcttgtgttttgtcaacctttttcatttggga

SEQ ID NO: 250357 - DNA, 949 bp, Cannabis indica
ggggttttgccaccaaaaaaaaagataagggggttaaatatataaaaattaaaacataagagggttttgccacaaaaaaaaaagataaaggggttaagtgtataaaaattaaaacataagggggttttgccaccaaaaataaagataagggggttaagtgtataaaaatcaaaacataagggggtttcgccggaaattgctctatagttttacataaaaatattgtataaaatacaattcaatataatacaatacgacctacctaatatgacgttctaaacgagggctaagagtattttttaataccttttaacaatactttagacaggaaatacgaatcttttcttaatagtggggttttagccatcctctctatctgtgttgtaaagcatagaaaaaagggaaaccgcgtctctctctctttctctctcttcctcaaccgggtgttacactgaatagtcagtcggtgcatcgacttatttcgatcgtgtgaactccatttacttgcaggttacgtcttacttacattctagccgcctttatatgtacatatacaatatattttcacttcctcttccttttacattaagaatcagcagagaaaccacctgaaactctctctaatataacccacttgtaaatttgcgctaaagatttgatttttgtaactgggatttacaggtaaagcgtgatgagttattacaatcagcagcagcaacaaccaccgatcggtgttcctcctccccaaggtaacaatgggttgtcctctgtttttctcctaattcaagatttttcatctgggttttcttggatttaggtgatgggttttttttttttgggtaggtgtgagaattataacatgggtttgttgcttgtttcttttacaggataccctccaaaggatgcctaccctccacctggttaccctgcagaagggtaccctcctcaa

SEQ ID NO: 250358 - DNA, 650 bp, Cannabis indica
ttttaaaaaatattactaacaaaaaaatataaattataaagcgtgacttataaaaaataacaaataccacttatgttgaattgaaataaatagaaatgtagagagaatgtattacaaacgtgtggcatattatttccaaaaatactctttgttttctcaaaaaaataaaaattagaaagtctcgattagccgttgtattatgagcgaaccagcctcagtactataaatggtataatcacagccgtccaatacacaccaacagacaaaagacttgccacgtcatcgatccgcaaccaaagttctcatccaatcagaatacgacttagttctatataaagagtttcttcccccaactctgatttcaccattcaatctctcattgctttacctttctctcttctccgattcgattctatcgaaagaaaccctccgaattcgaaaatggcaccaacgaaaggcgagaagaggccggcggcggagaagaagccagtagcagcagagaagacggctaaggtcgagaagaagatctcaaaagaaggaacaagtgacaagaagaagaagaagatcaagaagagcatggagacttacaagatttacctattcaaagttctgaaacaagttcatcctgatataggaatttctggaaaagc

SEQ ID NO: 250359 - DNA, 661 bp, Cannabis indica
gctgagctcaaatgggttcgttcattacttagtgaacttcagattcatctcagtcagcctcctgttatctgggttgataaccagagtgccactgccttggccgccaatcctgtctttcacgctcgctctaaacatattgaattagatcttcacttcgtgcgtgatcaaatactggataaacaactctttgtcagatatgtacctgctctagatcaagctgctgacttactcacaaagtctctcactacagatcgattcttgtaccttaaatccaaactaaaaatggtttctacaccatttagtttgaggggggatgtaaatactgttagtagttagttaataagtgtacaagtggcagttagttaattagtttaactgttttctgttagtttgttttctctaagactttgtgtatatatactctgaaatcaatattgaagataagcttttagctatattgttcatctggttctttgttttcttttctctgcaactcgcaaggctttgcctcttgctcttacaggatcatataataatacaccttaattcaaaataatattgtatttcagttgtttgctagggaagaaaagtccccaatgcttctcatattcagggctcttctgattctcattgaacatagcaaacacataagtctcaatag

SEQ ID NO: 250360 - DNA, 903 bp, Cannabis indica
ctctgtaatctgcataagagtgagaaatagaatcgatacattgtttcatattatccattctgttattgtgtacattgtcattccagacccaccagatcgtgtcaactacaatggatgcatagaggaaaacctcatctatatttgcattcctgctttttaggttccacaagaatttcacccaatcccacattcaaattccagttcctgacacggggaaaataccccagggagaagaacgccataaatggaaagccagattgcaatggaggaacaggtgctcgattgattcttcatcatcaccacatattgggcacttactgtcctctataaaaaatcttttaagtaaagttgccctaactgggagggcatttgagaggatgctccaccacatcactttgtggcgttccaggatcttgctgttccacaatttattccacagagaaggggcaacctcacagtgaggggagcattgaagattctggattaaataatccgatttgcaagagaaccggccagatccttccttcgtccaaatccaatggtctttaccttgggccgacgggttaccccctttcagaatggcagccacagtctcacgagtaaacaagttattcagttttgtagtattccagtttcctgattccgtcaagagttctgacacagtagagtaagggaacgcgtggttattagataattgttggtggaacccgatgccatgagtaatccagggggtcttcccatattttcgtgtctctaccatccgtgataactttacaggcccctttcctaagaatctcattggcattcactacactcttctgttgggttttgtgccctaaataaaactcatttcaatataatcagatttacttattaataaagatcaaaaataacattttatgt

SEQ ID NO: 250361 - DNA, 500 bp, Cannabis indica
gtgtggatggaaatcaacacagaattgatcaaagtcactcttcccatgtacgataaattcttgaactccaagaccggatcttactcaccattttctcaagaagttcctgacattcagctttactaatcctcttcgaacatatgggaactcccaagtacctgaaaggaagagtacttcttttaaattttgatgcatcaagaatcctgttcacctctccttctgccatacccgaacaatagatagcagttttctgctcattaggaagaaggccagaagtttgctaaaaacaatttcagaccctgtagcatcaacataatggagacataatctccattactgaatattaaaaggtcatctgcaaaacagaggtgattgagtttcagacttgagcacctatcatggaacttgaaacctggccattctccaagcttcttaaggattctagacaaatatccatgcctattgcctaagacaaagagcaaaggagacatgggatctcc

SEQ ID NO: 250362 - DNA, 661 bp, Cannabis indica
atcttggtaatatgtaattaagaagaataattacatatggagattatgaaattaaatgagaaagtttttagatgtgaaaaacggttacaaaagacatctatatcatatgaatgtgtattgggacattagtggatgagttggcacagagaggaacattgaaactaaaaaatgaataagctagaaatttgttctaggcgacttaggataaacatttcaaaatgttgagcattcaacgagggatgtgtctaaacttcactctaatatttttcacatccactaaatcctcttacacgcctagtaacaaccatgggagtgtagggcttgattttcaaaacttagtatacctacactataaatagaagtctttgggttcatattttgacactaaaattcttatcaaaaaaagcgtattactagaaatattatatgcttggtaaatttagaaagttatttttatttgggaaatttcatattttgtccctaataaaataacacatatcaaaatttagacccattattttttgtacaaattgattccactaatttaaaagattcctaaaatacccctaaaataaacttttcactctctctctctaactttcccactctctcgctctctctgacttttccctctctcccgctctcttcacgaactcacaaa

SEQ ID NO: 250363 - DNA, 1671 bp, Cannabis indica
tttttttacatttatatgtttatttaattttttataaaatataaaatgttattttttaaaaatgttcttccttcgtcacttacccttttgcacttcccctttgtttgtgtgagaaatattactactgaacgtggcagtttccccttccaatccttcctccaaaattgcctttcctttatcactattgctggtcttccctaatcgtcgatctctttcttccaccagctcctttatataatattttctccttttgtcgggttgagtcatgttcttctccactaccgtcaaaatctataaacttgtatccattatcaccaagacagcgcataacatttgtattatattcaatggtagtgattgtgccactcttattaatgataggcccaatcttatccactaaggaactttgcatgtgattggcatgtagtcatgtaaattgttagttgtgtacccattgatttcagaccgtccatttcccttctctcctacgatggagttagtaccaggagaaaccgtcgcttcttcgatcaggctctctgatcgagaagccatcctccccaagtcagttctgcctttgtgcgtggttgtctccaccccctagtgcacttggtcttgtgaatgtgccatgatgcaattcgaaattagatcatcttcacttagccatgttccatatcgtgcattagaccccaataccatcatcttccattaaatgttcccctacacactctggttgttcatgatcccattttccacaactaaagcatagcacaaacaaacactcgaattttagttgcacccaattattaaccccctcccactttaataaatcagccaacaaagataccaggatcatactccttcacatgggattgtaatgctctcaatgtccaggggttcccaattccttggacattccagctgatatatttattgctcttggcggccttgcatcgcaaggttcaccgctctctcaaaattagccaacaatgagaaattcgataattgagaaatacccaccgtttgattgaaacccactatccccaccaccccatcagtagaaatatcattcccaaatacaaaaccagagttctgatcatatattacctttgcttattcctgtcataacagtaatattctttgattggcctcgagctctgttattgatggagatgttcttccttcgccccttacccttttgcacctcccctttgtttgtgtgaaaaataccactactgaacgtggtggtttccccttccaatccttcttccaaaatcgccttccctttatcaccattgctggtcttccctaatcgtcgatctctttcttccaccagctccttcgtaaaacattttctcttttctgggtctgtgtcatgttcttctccactaccatcaaaatctatgggtttgtgtccattatcaccaagatagcccatagaatttgtattatatttaatagtattggttgtgctactcttattaatgataggcccaatcttatccactaaagaactttgcacatgattgtcacgtagtcatgtgaattgttagttttgtacccattaatttcacaccctccacttctcttctctcccacgatggaattagtactaggggaaaccgtcacttcttcaattactatctccgaccgagaagccatcctcaccaagtc

SEQ ID NO: 250364 - DNA, 959 bp, Cannabis indica
ctgtgtggagaagaaatagaaagtcttacttttcctctgtcaaagacccctcggatacactgttgctgcaagatcttcagtgttttcaagagtaaaacctgaagaaatgcttggcacatccttgtccaattttgatctgccaataagtctcccatggaatgctgttggaacgtatcccttttacttgtagaagaataaatttcatgggccttctcaaggccccaatggataagcccaattgttgaaatagataggacatgcacttgagttgaagaataaatggcgacatgggtcttaccaggatcccaaagggccggctcatacacttgattaattaattttggacttttgtttatgtgggcctggtctaggaagtgactccatggcttgggcctctcctggtaaggttgtaagaacaaatgagacaataacgtaatattgtagcttctctggtcagccgtcttcttcctatacgcgactttctgttcgtccagtgaaggcagcgattgctttctctccacgatcggccacacccgctccctcgacgtcttctcacgctgatggtcattcgacatcggcatcgtttcccttgtgctggtctttcgtcgatcaaccccaggtgcgatttcccttgtaagtggcaagatcgactcctccctgtccagcactggcaccgtctcaagcatcggtcgatcgatctttatctccgatgtagcatggcttaatatattctccccttctttttcagagagaaactccgattgaaaatcatgctttgatcctttgatttccaccatttccgttggagactcgagaagatcaacaaattgttccctattattttgcaactcttcctcctgtgtgctagtttgatgacagaacctcagctgtccttcaacgaagaatgctttggcgatgacttcagggagtgttctcagcttatattcacgaaccttctt

SEQ ID NO: 250365 - DNA, 658 bp, Cannabis indica
aaacttcagtttgagcaaggaggctttccaaaccttaagaaacttgcactgttttcattgagtaaattgagtttgatagtaattgaagaagaagcattatctaatcttgaaacgttggagatcttgtattgcccacaactaaaggaggtgtcatgtggattccaagaattaacaaagcttaagaatgtttatttgatggaattgcccacaactttcatggtgttccaaaattttaacatcttccaaagtgctggagcacatattcgacactattacagagtcgatggagaatggcagttgtgtccattgttattgttgacacctatctttgattcgatacgaggtaataagacagacgtacagtgttatttttagattttgagtaaaatatatgtttcatatatatatttatatttatttggtatctaataataactttatattaataatcaatttatttttatttcatacaggacttgaattggactgggactccattccttttgaaaacataatgagtaagattaattttatttggttcatttattattttaataatatacagattaattatttaattttatgttattcaatatatataggggagattatagagtgcgaatttgatgaaactctagtggttgacgagattagtaag

SEQ ID NO: 250366 - DNA, 634 bp, Cannabis indica
ttgatttcattccattccactcctattcatatccatattcctattcttatgttttcattccttataaccaaaggctacctaacatagaacacctctggaacaaggtgcattagatcacgttaactcatgaaaccacataacaaattatagtaatttatgcaaaaagatttgcactcacttcactttcatcatccaaaactctttccatcagatacagatcacaatatttcgttatctccaatagtacttccaaaacggaggacttcacagtcacttgtttctgacaaaaattaagaaaattatgtcagttctccccatgttgcaactacaaacacgtgaataaaaaattaaaattaaacgaaaaaaacaacgaaggagatcctactacctgaagctcttctggactggtttcctcaagaagtactccaagcaatcgacatgtcacctgtgaagaaaatttaatttgattaatatacgaaggatcaaggagatattgatgtgaagagcaggtactagaaagtgattgcattttcctcctttttttcttttataaataaagcactactgcccatgtgctatatttcatagaaacaattacctttcttccttcgctcaatttctgcctaactatttg

SEQ ID NO: 250367 - DNA, 1144 bp, Cannabis indica
ttattaaattgttttatacggactatcctatgtgacatctcgggaaatcggggtgttacacgaacaaatctgtttgtaacatgtaagtaagtctatcttttgttgttttgtggatgctgggttttgtagcatttgcttttgattaataaaattttctcctataataaaaataaaaatcttgaactattgtgattgttgagtttaaggatttttgtaaaatttcatttaattttactaatttggtgattgtccctcaaattttgatatatattaaattatatttctcaaatttttataatatgtactaaattatactccatgaactttcattcatgttaggctttccttattaaaattagacaaaagtacttaaattcaacagtcttaatagttcaaggaatttttaacgactttaaaagtttaggagatacaatttagtatgtgtcaaaattcggggataaaaatcttaattaaccacaattttttattatggtaatattggtattagctttttcatttataaacactcaaagagcttttgtaattggtaggcacttctcaaaagaagtgttttatataaggtgggagattttaatggttatattaaatatgtaactataatggttacatttattttgagatgttagattattattagatggttgtgattaatttaaaattaataatttttttaataaattaagaaattaaaaaagtatatatttaataatttacttgatgctaagtcgattttattttatttccttataaataaaaactaaatatatttataaatattaatggctaaagaagttatactagatattttaatttaaaaataaatttaattttcactaaaagtgtaactagagacaaatttaggtactgtctaaacttgttgagcattcagaacatttaatgtacctcacacatttcttttggatcagagattaagtgagtttaatcaagtggaattgttggaattaaactcacttaacctaccaggttagtaggtccatctatatgctcattagatttgaagaaagttactgttagttataacagttggctttaataccaacttaaaggagatcccaccaacaactagaaataggtgttcctctattcacaaagagaggtatga

SEQ ID NO: 250368 - DNA, 754 bp, Cannabis indica
ggtctcctctttgtttcatggaaagctcaatatccttgtaagtcacatatgtctaactaattttttttttttgtatttattttgtttatggtgcatcttatttgccaatttcatatttttaaaataatttatttcaccaaataccacaaattcaattcaatttaatgtgcaattcaataataatatgaattggattgattatttaatatttattaatatatattttatgttaccaaaacaagtcaagtattgataataaaatgtatatattaaattatcaaaaaaaatatatatttttgttatatgtcaaaacagaaaagaaaattttaattagttttaaatttttttaattaatatatatacataaattatcaagaagaataaacaaaatatcataaatcaagaaattgagaatcagaacatagtgagaagaacatagaatgataaatcaagaaatttttctatttttttagagccaacatttcatagaacttgtaccccaatcacattgattctacagtcacaaatcttcattcaaatttaattcaatgtatacacattgaacatatacaagaaactaattagatcgaacatttaacataattaatcaaacaaaataaaaacaagaaaaatttgttcagatctaaaatactttttaacaaaacaattctagtatcttgatcgtccaacaacgccaatagaaaaagtccatcatttaacaggtttgtcgtaaggagaagaagatcatgaagtt

SEQ ID NO: 250369 - DNA, 978 bp, Cannabis indica
agaaataaatcttaaggaagaaaagagtcctccaaccacaagagaatgaaaacagagcagaaagctagactaagcattcttagatttaagtagagaatggagaattttgatgtaatttttcatttggacaaacaagtacaatttactttgcgtcctgtcttgtttttgagcttgttttagtatgttttgtgctaaaactaatgtatccacggttttcctctgccacaagtgagggctttcaatataaaacggtaggggccagtctaagacaatggctttctttttccaaaaaaaaattaacccattacaaagaagttaaaagtaaaaacaaaaaaatccttgcacccctttattctttctttgataaatatggtaagacttctaagtaaatttcacattacttcactaaatagggcagtcatatgtttataaaatgttgaagagttttaagaaaaatatttttcccatatatttgacattggcagaactttatgtaattttttggcttctgatgttaaaattggtttctgtttagtaggtttctttcacttcactttcccttgtatatctttttttttctttttgaaaaaagagacaaaggtcgcctgccttagactgatccccactcaagtttattcataaacttctcgtggtggaggaaaaccgtgctaacagagatattttgatataaaacaaaatatctacatcaggattgaaagaactccagcaaaggataaatctaagctatacagtatattacccctaatccctacataaatctaaaaatgacaaatcctcaaaatattttaacttaaaaatccaagttgctacccaaaattttcttttctcccatatttccttctatttctattgttcatacaactttgaggttttccattttaaaatactaataaaaaaatgcacacaaagtgtactaaaatcacaaccattttataaatcttggttatgaacctatat

SEQ ID NO: 250370 - DNA, 2115 bp, Cannabis indica
acacactaaaagaggaaactgttgatttggaaagttgtgctcttcccttttcttatatatagcctcccctctcttcactcttgcaatgtcttggtgtgcattcactatacacgaaaataagagagaaaagaagagagaatttcgaaaatccttgtgagagagaagttcccacacacatcactcagtacctcaatcatagagtggaaggagacacttaattctgctgccatcactgtaagttattcttaacttttatgtgtttaattcatcgttttagaagttcaattttaggttgttaaatcaacatacttgtgagtagatctaagttcctggtaaaatataattccaacagaccacgaggtagacctcggggttcaagaaccaggagacaggaagcaaatcaaggaaatccccaaaacaaccaggaagagcaacctggtggtactagggatattccagtggatgaacaacaaaataaccgagaacaacgttgagaagttcctcaaggatcccaaggatttattaatcaaaggaatgaacgtaatgatgtgccagaggcttctcgcaggaatgaggacacaaggcaaccccgaactagggaacatgaaatccctcgtaataacgagagaaatcctaggactcaaccttggacaagtgggctaccactgagacaccccaaacgtccttctcgatccaagagggaaggtgtatacacgtacctaaatggggaacgtgtatctaacctcttccaaaggagaaggacggtacaagacgaggcaagttctagctttggacactcgaggtctcgagggaacaatcgatcaggaaggcaaacaggagaaggaagcagacctcgacgttatgctgatcaagaaagcatgagcgatacacgaagctatcagtctaagagttactcagatacgagatctgtgagcaattatgaacgaagacaacttgatctttgtgagcatttgaatcgaagacaactcgatcttcgcgggcgactaaatcagagtacacctgacttatgccatcaacttaatgccaaccaacagcaagtggatcccatccagttgcgaatcattgagttggaggataagtttagaaaataccaggatgaaaagcatgggatattacctagctatgacttggatgaggaaaccaagccatttcatcctgatattatgaattctgaattcccttagggattcaaaaatccacacgtctcgcagtatgatgggactacggacccagtcgctcacttgaataacttcaataccataaatatgagccagtaacatttcgaatattttgtgatgcatttcattctaaacatcattgactggagcagcgagtaactggttcgataaattcactcaccatttgataacttcttgggaacagttctccaaggactttaagaaataatttcaagctgccagagataggcgacctgaagcatcatccctaactaacataaagcaacaaccaggtgagtcaattaaggcttacctaagtcgcttcaacactgtcgctgcaaaagttagaaacttgaatgatagtattcaacttactgctcttcaagcagggatcacaactgaccttttaacagttgggagcgagttgtgggatgaaatggctcggtttcctcatcaatgaggacatttcgttggtaaaaagtcgttgggaataattcatcggtaaaaacgattattaacgacaactttttaagtcgttgaaaataaaaattatcaacgacgacattgtcgttgggaataatattttatttatttattttttttaaacctgagtgcatcacaacgacattgtcgtcattgatattattatcaatgacgacaatgtcgttattgaagagcttttcgaaaaaaaaaataaataattatattaaaattatttgtaattaattataaatatataatattatattaaaattattaaattaaataattattaaataattttatattttaaatttgaaacaaataccaaaatttatttaaatactacaaaccaaaaatctttaccaatatgtaaatacaaactaaaaatctttaccaataaataaatatcagatattaacaaaaaaaaaaaaaa

SEQ ID NO: 250371 - DNA, 923 bp, Cannabis indica
gtgttttttatttatcttttcatattatatctaaataattttcacttatcacttacaaattaagactcatttgtcgttaggctaaaaagcgaagtcaacataattaaacacaaacatggataaattcacaatcgagaaaggagaaataggaattatcattaacttaagaaataatatcaatcaacattcaacatctccccaaataagagtttagttcataatatccatagtcaaatccataattaaaattgaaaccgtaaataacatagaaaaatgaagagaaaagaaagaactggttggagaaatcaatccagatcgccacaagctgctcttgaagttttctcttttgtttctagggctcccaatctctgtcctcctcaaaaatcatgagatccccttttaaatgagccaagttttctctttaaaagtcgtgaaattatgaaactactcgtggagacaccagtaaggcttcaccgcatccacgaaatcctctagtcgtagcagctgggtcatctcaaattggcattcgttctgccaatccccgtcgcgacttggaatattgcccgtcgcgacaggcttcacaagaaaatagcttaatatattttttcctcaactttttaatcttttgtcctctattcttatgaatacttcctttaaacatctgagcatcttaaacaagagaatcaagcgtaaaacatggtcgaaaactaccttaaaaagtgacccaaaacttagactaaaattagcctaacaaccctctaggaacaacaactagatttcatccccaatactatgcaaaacaaagactagaccaagaattggcaagccccttgtagacttgagagaagatctcaagttagcaagacttagagaggttgtttgccaagccaacctaattggagaaccacacgctattgattgcg

SEQ ID NO: 250372 - DNA, 1207 bp, Cannabis indica
agttcctggtaaaataacttccaacaattggaacttatgttgttggtaaggcctaatacatgggaaacaacttgtaccaaaaaccttcaaaaaatgataatcaggttttctaccattgacaacctcataaggacatttgttacctaacacaggagtaggcaaccgattaataagatagaccgaggtttggaacgcgtcccatcagtatttttgaggcatacgagcttgagccaggagtgccaagcccatctcaactatatgcctatgtttgcgttcagctctgccattttgagctgaagtgtgtgggcaagggtgttggaaattaattccatgagtttggacaaagtcatagaaggattgaaactcaccacccgaatccgtttggagtgacttaatctttttgtcaaatttgttttcagccaatgacttaaaatgggagaaagctgcgagggcatctgactttgctttgaggggatatatccatgtgtatctactatagtcatctacaaaaaggatatagaacttatagtttttatttgaaataataggtgctggaccccaaacatctgtgtgaacaagttctaaaggatttttaacatgatatggatttgttttgaagggcaaagcatgggatttcccaagttggcaggaatcacagaaagcattttcttcattcttccaattccttacattgatttgacttaatacatgacttaagactcgactggatggatggcccaacctttgatgccatctatctttgattgaaatagaagattgcacaaccataggctggcttacatgactcgatgaaactgaagacagattagaaacaaagcaggaatgatttaaagaaccattgaaggtgataggagcagccgattttgtagttgctttctcaagttgataaagaccatctttaagcttcccttccagaaccaccctccttgttgccatgtccttcacaacacaacaatcagagaaaaattcaacataaacattattgtccattgtgagtttagaaatactaatcaagttctttgtaatgttaggagcatgtagaacatttttgagcaacaaaggagtgtttctgtatgtattcagagaactcaaaccaacatgtgagattaagagtttattaccatcaccaaccactaagctttccttaccattgtattcactcttttgactgaggttacttgcatct

SEQ ID NO: 250373 - DNA, 491 bp, Cannabis indica
gtttcttgtcctcatgcatgtgttgcagctcagtaacggagtattagcatgtacgcactatgatcatcatattacacaacaaaatattgggggaggacatatgaagacacaattatgccaatttgtcacgtggatgatttggaattatctgatatcataaagagcttaaacgttggaatgcttgttgagaagcaaccagtgggacgactaaagaagcaaaaggttggaagaattaagtcatactgaactgcttgaatggggaaaggttgtggtaaaatgaacttgtagcaagtgtggtgccaaggggcacaacagagcattttacacttaccgaggttaaaaataaatgttgaatttaatattattatgtgttgtactattatgtattcttgttgaattattattgtactttgttaaacatttttggcataaacaagttttcatatagttctataaatttttgcatggaaaatatgttagaaattatttta

SEQ ID NO: 250374 - DNA, 705 bp, Cannabis indica
agattatgaaaacaaaacataaatgagaatcattgaagataattgaaactagcttcttcaattaattaaatggaaaacgcacacacacacaataaaatacaaaaataaattaaaaaactctacaaatatatttcatacaatgtacaccaatattataaaaataaaatgtaagtgtgaaaaattaattttgaacctagaaacaaaataataaaaagaaaattataattaaaatatacaataacattataaatagagcaaccccattatgaaacccttaaaacctctgaaaccaatttcaaaacccttaaaacatgttaaaccagtttcaaacttgtgaatagtgtgaaccctgtaatactagtttcgaacttgtgaaccttgtcaaaccattaaatgaatgtgtatgacactgatgatttcatgttttcattacaaataaaagatttcagaaacaatattttatatgttagatccaatgatgttattgcttcagctcagaaaatagctttaccctatattttttatcattggataaaccaattatattattaaaagtagcagaaaaaaaaaaaactagagttgatttaagcatacaatatgggggtaaggataagaaaataaaaccagtttcgttaacaacataaaaatacaatgcaaaaaatataatctaaaaaatggcacaaactataaaaatcagtttccaac

SEQ ID NO: 250375 - DNA, 1098 bp, Cannabis indica
tacaaaccgtaaagttcaggtggtttagccgccaatatccttaaaaattattacattaagcgttaattaaggcaaaactcttaatagtttcattttgcttgcacttaatctttaaaatttaaattttggcgtcaaaacccccaacactcggtgttctaatagcaatttaatatttacgtttattttaagtgttaagttttatgttacactatccatgtatgtatctacatgaacagagtttatacatgacacaattttattgattaattggattgcattccataatttatgtcgtttcttttctgctgttgagattgtctctttacttgaggatctagactttctcgtttgaagtttgttttaatttaaataaaaaaaaaaatctaatattgtattgtgttaggctatttgaagatttggtaaatgaaaaattattattaaataaaaataaaaattgttgttctttcattgttataactaatttgttgttagtatttgtttaagttattacttggttgttaatttccagctgtataatttgtttgttaatttccagctatataatttgcttttctctgttagtagagttgttagctttatatgcttgctataacagaacaatattacattccatacaagagattccttcacacaaaaaacactttgtacatcaattctacttgtaacttttatggtaattatttagcggaaataaatcatggtttttatcaatatcaataaatgcacagcaataacttccacaattacaaatggtataacctaaaaattgaaaagagatagtctcaacagcagaaaagaaattatgcaggaatttgaatgcttctaaaaaaaaaagttatgcagttacatatttttttaaggatatttagtaatttgaatgcttaacatgcatttggaagttagtaacagtgtaattattagggtgataattacacaattaaagtgtaatgatattgtcaaataaatatgctaaattgtgtaattatctcccattacacacaaattcaattatattgtaactttacaaacgcgagttatcaaaatcaataaagagatttcaaattcaaatctcatttc

SEQ ID NO: 250376 - DNA, 2708 bp, Cannabis indica
cgccctcgctaccttcatccgacgtactccgaggaagaatccaccaaatcctcatccttcttaaactcggaatactttgcaaaaaactcatccagatcccaggtagcagatttgccttccttaaactcggaatacagtttaaaagacgactgataactctcactaaggaacgccttcttgacttggcttgtcaggactttgatctccctagtcagggattccttctcatccaccgaagccttttgggcctgagctgatgccttttcagcttctgacaacttcccacccaaggaagagagtttgtccttcaccgcctcagcctcagaacggaaggcattgcgttcttgcaacaaagtagccttctccagattcaccgtcgacaggctagtctccagggaagccaccttgtcacttagaacccccttttctgactcaagggctgagcgagtaagatcccaacccctcttctccgacttaagactgtcggccttactcttcaaaagcttgatgtcgacctccaaggcgctaactttagtaagagcagccatcttcgtggcaacagctgcttcataattcttcttgtagcgagaatagcccttagccaagctctccctctccctatcagtctgtggagcgaacttcatagcgtgggcacacctcaaagccgtctggcaaaaaaaggggttttttttaaaaaaataaaatatataaataaaataataataataataaaaaataaatatatgaatgatgacaagcgaagcaataactgaagtaaaatgagatacatgcaaggaccagattacctttatccccgagatggttgtatccttcaaaatagaatcacgcccatgagagatgtaaaatcatcattaggttttctgacgacatccagaagagttttgaaataattctcagtcgactcctcgaacggaacatcctttttgatcctgaaagcagggatctcgtcccattcggccgaggcccgcgggggatgactggatagaggcggggagccccggctggaagaaaaggttgaaggatgcgccagagcaggagaaagggcaagatgggaagtctacggcgctccaaggagagaagcagaaatccgagcacgagaggtggatgagagccccggattttggcccagcatgaccgccgaaaggttctcgggctgagaaggaccttcttgatcaagaggccctagattggaaggtcccgtcagggccaaccccccggaattaccctcaccctcgcccacaccagacgaaaccttagggagggcgctaagcagggccccaatggcgtcgtcagtggccgagtcatgctgagatgacatgccaagattcgattgagtagtttcttcaagcctcgctgtcttccttttcttggccttgattttttgcttaggagactacgacataagcctcttccgacaggcggcgttctgggcctcgatctcctcaatggtcaactcaaatagcctcattttgggaagatgacggggataggtctctgcaaggcgggaatgatcctcagaaaactctatcaagagtggctcgggtgtttgatccaagtgtcttaaagcacatttcaaaaaatcaggccaaataaagtaaggaggataaggagtggggataccttgggggattctgagttcgcgaggccaggcggaggattcgattaaggcttcatgggatagaaggaacttgattgatcgaagcttggggtctagggctgtgaccttccgaaccttttcagaaaaaatatcaccgataacagtctcctcgttgtcagcaacggctgcacaggaacacctccattagagtcagcatcaatacgtccacaacggaaaaacacgaaaatacacacaatatatataataataatagtaatacacccgaatacccaaagataaaagaaaaggggggggggggagaaggaggttgaataagaaaaagccccagcgatagaggtaaggaaattaccaggagccccccagctctggttaataaacggggctgtagggtcgtcagaaacaaactcaatggggcctcgggcgaaaaagaacttttcctttcaccctttatgagaagtctctaagtcagtaagtaggtaacggttcttcctggggcgaagatggtaacgccccaggctctttttccatcaaagaataaaagtggatgacgtcggatacctcccactcaacgcccgccttatcccttaacacaatcagacctaaaagaatagcccacacattagggagtaactgggcaggagcaagcgaataatgtataagaaatttcttgatgagcctaggaatggggagcctcagcctaattttcgactcaaaccaatacgagtgtaggcacacccactcattctgagaggaatctgccctctcatgctgtttgggaagcctaacctcaacccccgtcgggaaaccacacgacaaaaccagggagtcaagttcacgctgggtgagaactgacggacaacttgacttaacatccaaataagaactacccagcgcatgttttttcttttttgacttcttcaacgggggaatcgctagagtaaccccctcagacggggctgcttgaccactaacacacgcctcgcccccagagcgagagcggggaataacagagacactacccagacactcaacctctgagtcatcggggacttcaacattctcagcctcc

SEQ ID NO: 250377 - DNA, 1708 bp, Cannabis indica
ttttattattttttctttaatttgttatagtttgagatcttcatcttagttctaggtcttacatctaagttttgattttttaactacaatttaattgacgaattttcaccatcaacacctttcaacacagaaaaataggaggaaaggagagacagagagagtgtgtccaaagaataagagtattagtaaaatgaactatccttggtggattttcgttttagtaaaatgaactgaaatgcattagttttacacacaagaaaaaatcaaaatacactcagaaatcaatgtgaaataatagtatcatcaactcatcaatcaagctgggacaaaaaggaaagaagctacaccacaatatttaatattcccaccaaatacacaacaacataaatacaacattgcgctgatattatcatcttctttttcttcatcttcatcttctgtgtccacatcaccaacaaagcttaaaatcacaacaaactgattccagcaggaccaatcatagctttgaacacagctccagtcttctggaatatatatattatatatataatattggcacggagcataaaatataaaacaaaattcctcttaaatctttcataaagtaggtacctcctcatgattccgcacgcaagcagcaaaaccatttcttctgcaaatcaatgcagtttcaaacatcaacaaagctatttacaaaattaacattacatgatcaacaagacactcatatttatagatcctaaaacccaagttcccattgaatatttgtgacttcttttcttttcccaattaatggcaataacacagcaacaacgtattccccatctcccacttagaaatccctcaaacactgatgctatccatgtgataatgcatacaaaaaacagctataaaacactttacatagtttggctgatttagtacttgaacatcagccaaactaacatggagaagattggtcaaaaagaacaaattgcaaaaatgcctacttttggttgagtgagtacttagtaacattattttctaacgtaaatcccaaaacaaaaggtaaatacactttcacgttgcttgacaaaagtgaaacataattacataaagcagataaatataaccgtttggtaacacttttgttttctaattttttaatcacaaaatgaaagtaaaatttttgtttttaaaaattttgcttttgaaaaataaaaaaaaacgttctataactacttttgtttttcaattttaaaaacaaaaaacaaaagtgtgttctgtaaagtttattttcattttcattttttgattttatttacgtcgggtctaagtctgggttagattttggttcaagtcagaggccgggtccagcgctagggccgtggggggatttgggttcgggtcatgatcgaagtccaaaatattgaataaaaaaaaaaaactgtttaaagaaatattgaaagtgtctttttttgtttttaaaattttgattcttaattaaaaaattgaaaagtaaaatagttttatagaacatgtttttgaaaaatattttcattttttcaattttaaaaacagaaaactgattaaaaaagtgttaccaaacgggcaccataagaaaaaaaaaacgttctacaagtttctgagctaactgaaagtgtgttgtttctaagtacaccaattcagatcaagattacaatgacagatgcaatttgataaaatttaa

SEQ ID NO: 250378 - DNA, 1776 bp, Cannabis indica
agttgccatatcaccaggagtaacagggcagtaaaacataataaaatttaatcgaaatttttctgttaagaaatttccatttttaaacagactggatcatcttcccagtcacatcaatgactgtcatgtgtttatcaattaagtcactactacacatgtacatgattctttcattaccatatacgttaaagcagcatagcgttcttcgttcaggtacaaaggctttcctctactcatctccatgtcctgcaaatgaaaaaacaaactgagactcaaaatgtacagcggcggccagggataaagcgaaaaaaccacaattcacaaaatatatatatacttatatataaaacatatacctcttcaccaaaggcatccaaatataatgatggccagggagcctggcgagcagacctctgaaggagtattgttgttctctattataaattaataaaattagccaggcttagaactacgatcaaatataataaaatatcaaggattcaacagaagggttccttatttgaaagcataccttaatcaaagaaatattccagtaccagcaccgcagcccatagcatgagtttgacatccactttcccttaccacaccaacaacaacatgtcaacttgtgatacaaggataaaaatattgtccatgagaagtacgcaaatttttattgttaatatttttgagagaaaaaagagaagagaacaaaagaatagatagaaaacaaacctgcaacaggacttccaattgggagagcataatctaccacaaaacaggcacaatgcaggatcctcaagaacagaattgcaggcaggacaaggctgttttatgcacctgataaaacacgttatgcgtatgaggattaaattgcaatataatttctagcaaacaaaatgtgaaagaatacatagaaataacctctgcagtagatcatggtatactcgtggcaaatgcatcaactgaaacggtactgcagggttgcaatgcatgtttttctgaaatctactgagtttaaactccatgtgaaaatgttggaaccatttcaaagaaagggagcgtagcagttcatccttaagaatcaaatccaattgggggatcttaaacatattttccagcctttcaatttcattaaactccatgtggccaccgacagtgttttccatcaagtcattgataaattgtgatctatccagagtgttatccctatcgtagaatggtgctcggaacgaggaggttagtagtttccaaagcaatgcacacctccgcaaatatgggaaactcaagctcctaattacattccttatattatcagatttaccaatatagtttgaaacaaaataatcctgcacacattcagattctcccaagagtttcaatatgtctgtaatcaagcaatcatcaacacctaattcacttgtgttggattgatgtttcccacagtacgtaattatagcctgaaatcaacacattacatcagaggatactcactagacatatcatcatcatcatcaaattaaaaataagcaagcaataagagtgtatacctgaactacagtgactgcatagaagacatgtatgagatgtaaaagggagtcctcacatgctaggaaagggcgtggaagacaaaaaagtacccacatcaatgatgaaaagggatcacgagcaacaataggatcagaagctcgactccaaaattgaatatcagaaacagatacacccgtatcaatattattgaagatatgtagcatacagcctgcaaagaacagcgtt

SEQ ID NO: 250379 - DNA, 741 bp, Cannabis indica
aaaagtaatatttattgtggtgtacattttgattcatgctattttgtatcaaatttggcacaactttatataaaatttaaaaaataattaattacattatttagtggcaaacgagtaaataaaaaagtaatatttattgtggtgcacaatttgatttgtgctattttgtgtcaaatttggcacaactttagcatgttctaaatttagagcactttatacactattattggagttcacttttgtgaagatgagagttaaaatatgcatatgcatcacacttaattttagctctccattacagatattcttaatatgtatatatccttattcactttaattggaattttattttttttgtttggttatacttaattttgtaagttcttttgttacttgttactgccgttgaggtaatattttttttataattcttgctcttttgtattttttcaaattgaataaaattatctaaataatttgtattttttttaatcatgtttgaatttgtgtgtttcttactaattattaatgttttattattttcttatttttttaactattcatttttccctttttctaaaaaataaaaattctcatcttttactctatttctcttttaaaatatattttttttatatcttttcctacattttttttaaattagtggtttttttgtcttatgttttaaaaaatttctttttttttattcgtttattagtaattatataatagtgtaaaaga

SEQ ID NO: 250380 - DNA, 501 bp, Cannabis indica
atgaattatctttctaactaaaattttcataattttttacaatatttttatcaaatgaccaggtaaaaatgagaggatgaagcaccataccgcatgcataaacccttggaaaaaggtaccctctcaaggaggaaatacacttcttgccccatctcgcctccatatacatatacgagtgccaagtaatccaacaatctatgaaacacaaacaatgtcactaacataggaaagaaaatcatgaactacaatgatttgctgatgtattcaagttaccttatattcatcaaaatcgaagtcaactacagaggttgagtctggtgttgaatattattccaaacatttatagtttcctaacgaccagagacgcataacctaccataagaaacatatagaaaaacattaatttaccaattattaagggtaaagatttataagaaaataattgcatatataagagctctaaattaataatttactctggaggctaatgactaatgtgac

SEQ ID NO: 250381 - DNA, 1421 bp, Cannabis indica
ttaaactcattaaaaaataccttttttttttctagaaacgtaacataaagctacatactaatttcattaacaatcatcaatataaatattcaaatatgaataaatcataacaatttaaaatcagaacaaataaatattaaagtatttcaataaattcataaacaaataaatcagaacaattcaaaatctcaaatcaagaaaattaaaagtttaaatttataatctttacaaatatgaaaaacttaaatagatctatctaccattgttgttgttgttgcttagttactgaattcttaaacaaaaactactagaactcatataaaactaatatttacgtggctcgccacgtaactctcatatagtacatacaaagctgtcataagccacacaagacagcaaggaaacaaatcttaatagaaaaataactaacacaactaactagttctaacaacctaactgtcattctccttaacagcccccttcaaactcaaggtgtgttgagaaacaacattgagtttggctcttagatcaggaaacttagaactagaaacaggtttagttaagcaatcaacaatttgagcaacagcaggaacatggcacacttgaagttggtgttgcagcactttgtcacgaacaaagtataagtcaatttctatgtgttttgtgcgggcatgaaggacaaggtttgcagcgagaaggactgtgctttggttgtcacaccacacagtaggaacactggtttggttgatgtgaagctcagtaagcaggctttgaatccagcttatttcacttacagtgcttgcaaggcttctgaattcagcctcagatgaggatctagagatggttacttgcttttgtgacttccaggcaaccaaatttccacctaagtaaatgcaataacctgttgtggacctacgatcatcagggtcggcagcccaatcggcatcacaaaatgcctcaatagaaaagtcaggtgctggttggagatgtagaccatagtctagtgtacctgctatgtatcgaagtattctttttacaaccatccaatgttgttgcaatggagtttgcatgaattgacataccttgttaacacagtatgaaagttcgggtctagtgatagtagcatattgtaatcccccaactatggatcgataaagtgtgacatcttccattggctcacttccatagttggacaattttaatccactgttcataggtgtgttttgagtcttagcattctgcatggcagcccttgtaagtaagtcttgaaggtatttagtttgtgtgagaagaaggccctgctcagttttagttacttgaattcctaaaaaataatcaaccaacccgagatccttgagagcaaatgtattgttcagatcagtgatagtgctgttgatagctttgtcattgctgcccatgac

SEQ ID NO: 250382 - DNA, 1249 bp, Cannabis indica
atcccataccaccaaaagtagggttttaggtcctaatacattttggtggttctcggatgcagtgaataaggtgtggtgtgagcttcatcaaggatttctttcttgagttcaacaacactaggaacacaaactcgagctttacacagttacattcaattatttgagattgaaatgtctttaggtagactagccatcacctcatctcgaatcttgactagctcgggatcttttaactgtgcctttatgattctctctagcaaatcagattggagtgtcaagttgtgcaactttccaactaaaaactcaattcccacattaaccatctctgaagctagttgatgggctatcgtaacaatagtgaaaacatgcccgggacctcttctacttagtgcataagccaccacgttggctttcccgggatgatacagaatctcacaatcgtaatctttaaccgattccagccatcttctctacctcatatttagatctttctgggtgaaaaattttttgagactcttatgatcagtacaaatctcgcatcattcaccataaagatagtgtcaccatatttttagagcaaatactacagcaggaagctctaaatcatgtgttgggtaccatttctcataatcttttagttgacgagaggcataggctataactttgtcagcttgcatccgaacacatcccagaccctgtctagatgcatcacagtaaacaacgaacttttctcgatctgatggcaaagctaaaattggagctgttatcaaatgttgcttcaactcctgaaaacttgcttcacatttgtctgaccatacaaatcgctaatttttcttagttagcccggttagtggcatagagattttagagaatccctcgacgaaacattgataataccttcctaaaccgaggaaacttcgaacttctgtcactgattttggcctcggccaattcttcactaactcgatttttcttggatcaaccataattcaattattctcgacaatatgccctagaaaagatacctcaaacagcaaaaattcacactttttgaactttgcatacaacttatgatccataagtcattgcaataccatttgaagatgttgctcatgctcctcttctgactaagagtatacgaggatgtcatcgataaacactatgatgcagttatcgaggaaatccttgaatactctattcatgagatccataaaggatgcaggagcattagtcaatccgaatgacatta

SEQ ID NO: 250383 - DNA, 1634 bp, Cannabis indica
ttcataactcaaaacatgggacgggactaacacatatttttgaagcatagaaacacgaaacacatcatgtatagctgtcagcactaggggtatagccaatatgtacgctacttcccttatcctcttaaggatctcaaaaggtccaatgaacctcaagctaagttttcctctcttaccaaagcggttaatacccttcataggagatatttgaagaaataccatatctctaacttgaaaattaatatctcgtcactttagatcagcataacttttctgtgtactttgagtagcgagcattcacactccaatcttgtcagctgcctcacttgttctctaaacaacttcgagacccaagaactttctctcacctacttcatcccagtgaataggggatttgcactttcttccatagagtagttcataaggagccatccccgattattacctgatagttgttgttctacgagaactcaatcaggggaagacactttacccatgatccttcaaagtctaatacacatgctcgtagcatgtcttctgaaatctgaatggttctttcaaattgtccatttgtctgaggatggaatgtagtactaaacttcagttgagtacccatagctcaatgtaaactcttctagaatcttgatgtgaacttcaaatccctatcagaaataatggactttgggacaccgtggagacaaactatttctctaacatatagttctacatactaatcaatggagaaattcactgaacaggtaagaagtgcactgactttgtaaacctgtcaactatgacccacatagaagtccatggcaatgtcttctcatttccaatctagaaggttcaatggctgcaccaaacttgtaggcctttggtgttcagctttcacttgctggcagattaaacactttgcaacatactctgctatattgttcttcattccaggccaccagtacatggacttaaggtcttgatacatttctctcttaatatcatcatccataggaacataaacacggttcataaattgtagtaccccattactatccactgtaaagtcattggtctttccagctaaaatcttgtctcgagacttcactaaatttgggtctttatattgcgtttctttaattatttccaggagagtagactgcaaggtaattataataccctaagattaagaaaatggattagcaaactctaactagttaaatatgtattattatggaattatattattatctaatttattatatgtgaattaatcggatgtatgacatgttaagaccccgttggtgagccgagggcattttagtaattttgacccaagaagggtaaaattgtggaatttatattatgatgtgcttatggactatattattatatattatacttgttttgtcctttttcaggtgtgttcggacaagtcggcgcggtatagtcacaaccgggtatttcgggccgaaccaggttcggggatgaaatacaattttgggattatttattggcattttattgatgtgtgactaatctaaaaatttatttaatagtgtgttatgagataatgacaattttgcccttgtatttgtactgatgtgtgtgtatggccctaagggcatttttggaatttt

SEQ ID NO: 250384 - DNA, 1206 bp, Cannabis indica
catcatccttttctgcttatttttctttttttagcctttgtttttgaagtgtatttgtctgtcagtatggatgagttcttaagttctgtctctaatgctttagccctcccccctgatgaatccactattttcacttatgaggttggttcttcgagttcctcctctgctcctataagccttattcttaagcttcataccattaggccctataatcgtccctctctaatgaaaaccttgtctggtatgtggtcatcgctgtgtcgattccccgttgtagtctctgaacatgccgacggtatgtttcttgtcacctttggctgtgaaggtgataagggtcgagtcctagatggtcagccttggcattttgctcaaagcatcaccatatttgctgctactgatagcagttttccccttacccctgataatctacactatgttcccttctgggtgcaagtttatggtatcccttttatgtgtaagtctcatgatctggctaggtttatagctatggaagtaggtgatcttatagagattgacaaagataccattaaggagggtactggtccctacatgcgtattcgtatactccttgatgttaatctgccattaaggaggggaatgaatatcaagttcattcgtatgggtagggaatttgtcaagtggcttgactttaagtttgaaagacttcctgatttttgttttttctgtgggaagcttgatcacaccaagaggtaatgtgttgcttttcttcaaaactgcgatgagctttactctgaacccctgtgcccttattctattctccttcgtggtaaggaaaaaatcattgacaagtcccagcctttccaatatcctcatccccctactataactatgatgaattaccaacctgtcaacctcaacttacctccccaaaattttactggtcaagccataaacttcccctctttcttgagccttaatgataacttttctggaccctatgcccctccaacatctaatgcggttgtcatgatgcctactcctttaaatcctaacctctccaatattgcccacccttacaatagttccacttttaatatctccttacgaccttcagccttcacctcatactctactgactctgttattgtggctgctagccaacctgcccctggtgctgctctatctgttggtctttcttccccagaggttgctagtactgttagc

SEQ ID NO: 250385 - DNA, 500 bp, Cannabis indica
cattattaatccgcttataatgagatagagtaataaaaaaatcataaaaaataataaaaaaaatctcacacacaaaaaatatcataaaagataatatcaagcccaaaaaaaaaaacttgtttttactacctacacttcttttcataacttttttaattggtattagctgacaaaataatcctttaaataattataagaaaagcttgtgaagtaattttaaattttcatttccaaaaaataaaaaataaaataccaactttctgcatcatttattatttgatagaaaaatatcaccaaaaaataccatcatttgttatttttttgactattgcatgttatttattatcgattcaaaattaaaaaaaaaaaaaaaacgttaaaaaaataagtgtatagaataattttctaaaaaattaaattaaattttattatatttttaaatttataaatataattctaaatttaatttagatttatatataaatatatatatatctatc

SEQ ID NO: 250386 - DNA, 668 bp, Cannabis indica
gagaaaaagaaaaaggtgcaggatccgtgaaaggtccgctcagatttcctaaaagggaaaggtccgcagaggggcaaactctaataagggagtcttggctctcaggattgagaggaacgaaaaagcgtttctgtgcaccaggaacctgaagagaaaggaacaaggaaccagagataccctcccgtcaatctaagacatcagatcaacggaaaacatggtgacctacgggatcacctggaccaaaagaaacatacaccgacggtctccacgggaacgctgagcgagggaattattgctcgagtgtcccagagacaaaaaggggatgacttagactctgactgtgaggaccgagaaccgtgcgccaaacacattttggaggcggaactccccaaaaactttaaaatgcccaaaatggcagcttataccagggactcggaccccagcaatcacttatctcggttcaaccgagtaatgacggtcatgagagtcagcaatgacgccaaatgtttatgcttcccactaacattaagtggatccgcgaaagaatgattcaagaagttggaaccaggattagtggactgctggaacaagttgcaagttagtttccggagatagtttgtcaccgcgagaaagattaatctcaaagtcaacgccttgactaacatcaa

SEQ ID NO: 250387 - DNA, 634 bp, Cannabis indica
cccaataccattatctatcatggttcgtagccacgatcttgttgcctatctggacttccatgaccaacggaaaactaatcttgacagcatcttcatcactaaatgttatggtgggctcccctgcccgtggtattttcggtttcctctcttcgacagccagaactacttcttcttgctcatgctgtactgttcgggcatacctttcccgggctttgcccgaatctccagctatctacggacctccaataataacttgcagatgtccttctactggtggtggtagtaaatcttggttgttatcgcccctttcattttcatcgaccttgacatatttttgcacatccggattactctttcttatcaaaaattcaattttccgcttcagattgttgcgttcgttggtgtcatggcaataatccccatgaaaacaacaaaacttggtctgtctctcttgcttacgtcttttttcatgggtgcggcttcttgtacaacgctaatgattgagtagccatgtaaacagtttctaaatcttttgtcaggacagagaaagcagtaaacttggtaggattctccataggagcctattcgattttgctagcaagctttcccttttcccattgccttgcctattgtt

SEQ ID NO: 250388 - DNA, 537 bp, Cannabis indica
agatggatattagtagtatttaacactttatcaattaattcttatttatttaaggtgaaataataaaagatggatattagtagtatttaatataataattcttaggaaatattattaactaatcctaggtggtaagttacatgtcatctcacttgatcaactagttattttctacgaacttttaaccagattatcatatttaattatttctccctatatatataggtactcaattatgaaatgtcaaaatggtcctgatgagtatgtgaaaataaaattacaaattgaaattttttaatatatctacaaagtgtatatatagaaagcaatggattcatatataaaaaatctaattccaccaatgatattcccttaatgtatgttactgtttaaagaacacatgggtttatataattagccagaatatatatcgaggaaacatgaatatataatatatatatatacaattaataatattcaaagtcttatatatatctttagaaagagagaaatggggtaattatatcacacctgtat

SEQ ID NO: 250389 - DNA, 1112 bp, Cannabis indica
ttatgtatttttaatgaaatttatcctaattcgaccgaaatttcgacagcataacaactgtaattggacgttcccaaaaattttaaacatgcaaaaaacaaaaaacaaacacacaaaataatacaaaactaacaaaacaatattaaaactatccacccatccgaccgcagtacatgtatattcacagaacctacttcactacggatgaatatctaagatattcaaactccactaaattaagaatttaaagttttagtgattatacctttctccgataaagttagctacttgtgtactcttcaatcaacacaaagcactcgatacctaaaaattaaatttaaaatatgcatcaattgttaataaacatgtttaattgagactaatcaatttttcaaattctttaacatagaacgtaactattccaattaaataataatataccaagaatgaggagattactcggagaaccaccgataaaagagaggactaagagtatagtatatgtaactatgtatttttttgtatttatccatttagcaccttttctcttaactacatttaaatatctataagtcattctagtttctctttggaacacaagtatgatgtaccaaaaatcatggaaaacaattaagtatgaataaaatgaaatgaaagttaagaatttttcaattaaagatttatcttatctttaagagtacactaatgctccactaaaagagcaagtaatttatcaactctttgagataggcttaatctccaataacaaaaatgatacaccaaataggatgacagttgtacaataataaggcttcgagggcataaatgttggtatctagtaactacaaaataccaaaagcaaaggacaagtatggccaattttaaaacatatatgcaaattctttttgattgtacgtgtaatttatgtactgtaacaatttgtttatacacaatgaaccaaaataattacacaagaaaaacttgtaagctcacatacataacatgtaactaatactgataatcattttcatactaaagagtttgtcttaacgtaaacaaacctcaagaaatttctttctaagtttaggagtaagcactgcaaccgattctgc

SEQ ID NO: 250390 - DNA, 788 bp, Cannabis indica
ttcatctccgctattctcaagcgctatgatgtgtccctttttcaactgaccccaaatagctatcgcatagctttgggtttttatccgatgtatatggagtacgcgcatagggagccttcgatggaggagtttagttacttttatgatataaagaacgtgggtctccacaacggcttctactgtttcagcaagtgggccacttctgaaatcaacggggtggaaggcatggtttccaatatgggggattggaaatctaagtggttttacgtgtttaaagtctcaggaattaggactgattttaatggttgacctaacacgtcgcacatttccttagttaatttttatgttaccttgtgattttgagctaatctgcttttccttattttccgcagatagaccggctcgacctgtgctagacgtaactcgcagagaagccgcaaaaattctcagaagcctccctgttcaagatcgtgactggcaattactgtgcacgaccttgaaactacgggaacataagttgattccaaagaacgcgagccttcaaagggacccagtgtacaaggagccgtctaaaaagcaaaaggagcgaatagacaaacgcctttccaagcagacttctcggccgacatcatgtaacatatcgcacatatagactaatgcatctaaatttattgttattttaacttatcttttcttgtcctcgcagagatgactttcttaaaacaagcacccgttcttaatgacaaggcgaagactggaacggtgacgacgtctcccatcgctcccca

SEQ ID NO: 250391 - DNA, 753 bp, Cannabis indica
ttgtatttgtattcagaaaatatcttaaataagatagacttgtagagtatgaagatttaactgcagaaccacgtaaaaaatatctggtgttatttatacattatttattttttattattttttgatattatatttattacaaaaggcttattattggttaataaaaatctgtgttaacaggtatcagtagtaaaatcctaatatccaaaccatggttcagacatgaggaaccctacgcctctctcctgccaccgccaccaacccgcctccatcattcgctgctgctcctgatgagtccaccgtttctcaggattctcttcttcctcctttcgcaccaccatagattagtgtcatgacgtctccgctagattttgtagatttgttaatgaatgtttcagctctaatgttctctcccgatgctctgacttctccaacaatcatcgtcagctccaccgtcacatcttcttcaatgatcttggatccaacagagcatatgaacgagatctctgacattccttcttcaacattcttatggctgcattattcatcgtcgtctcatattggtggatctttcactcttccaccgttctcctccttctttcagacaaatcattctcatccagcgatcctggtattttctagtctatctactgttctttcagtggctccaatgacttttcctcactttccccctagtttttacaacttcgatcctcctggcgctaatcttgatcgaccttccatttatgaatg

SEQ ID NO: 250392 - DNA, 1156 bp, Cannabis indica
cctccatcattcgctgctgctccagttgagtccatcgtttcttaggcttctcttcttcctcctttcgcaccaccatagcttagtgtcgtgacgtctccgctagattttgtagattcgttaatgaatgtttcagctctaatgttctctcccaatgctctgacttctccaacaatcatcgtcagctccaccgtcacatcttcttcaatgatcttggatccaatagagcatatgaacgagacctctgacattccttcttcaacattcttatggctgcattattcattgtcgtctcatattggtggatctttcactcttccaccgttctcctccttctttcagacaaatcattctcatccagcgatcttggtattttgtagtctatctgctgctctttcagtggctccaatgacttttcctcactttccccctagtttttgcaactttgatcctcctcacgctaatctggatcgaccttccatttatgaatgcaatccatatcaccttggaattagagacaactcgaatttccttattgttccctttcaattgactggtgaagacaactttcagagctggaagcgtgctgctaccatcaacctggctaccaagaacaagactcccttcattgaaggtactctccctcgtcctcccattagtcatacttatcgatctgattgggatcaatgtaatagtatggttataacttggatattacaatctattttacgagaaattactgccagtgttatgcttaaagattctactatggctatatggaatagtctccacgatcagttcaatcaaagcaatgaccctcaaatctttactctcaaaatgtctcagagtcgcatcaaacagggcgccaattcctgttggaaattattttaccaggatcttagatctactcacaagtatgttgattaacaccctaaatatgaactttctaaaacgatgaaataaacacatataaagtttaggaaaccttacattgggtgcagcggaatataatgactccttccgttcagatatctagcccttgattcctttctgtagcagagcattatcaatatctgaacctggatctctttctctgaatctttgatgctgaaagtctttcttcacgatcttcctcactatgattgaggtatcacttgct

SEQ ID NO: 250393 - DNA, 1179 bp, Cannabis indica
ggtaatgaaattcatgttcaaatgagtcatcacttaataagtttacaagtaagttaccttattccttgtttattctatgttgtcatgatagacagctagattgcttcgaaacatgggtgtgcaaagcaggattgtgggaagttctgcaatgtacgttgaagacgagcgatcgcgctttcttcgagcaggtggtgatcattatgttgagaagccctttggtccacacctctttattccaatcctgcaacaacttgacaaccaataaaactcaatgatgaaccaaccaaactatactctgcagacactttgaaagtgtcttttatgtttattttttgttatgttttttttcataattttgagacaattttttcatctttctttttatttctgcaatctgataaactcgaattcctatacctatgatggattggtgcataataaaattgtgtaattgtgtttattgttcttgcttcaattgacacaaacacaaatacacatttatttatttatatgataataatcaaataaaacttagttctgttctaaacaaacacttattttcttcaacataggaagaaattattaacccaaagagttaggttcctgatgaacacaattcaatcaaaccccacaaaactcagaacactaaaattttacatcaatttattttgaagaaataaaaataaattatgttatacagaaacaaataatgatgtaattaaagagattagcttacctctgaaatttggcagtgagtttccaactgtcattgtcagcaaatacaagcttttcttctgaggatggaagtatgaggaggattgaatcagtaagtttgtttcgttatttatagtgtccaattaatgtgttagtgtttgataaaaggatttttatccctaaactttaacatgtaccaaattatgattcttgaacttttttgaccattaaaaattctccgtaaactattgagatagttagatttaaggactttcgtttaattttatttaattttactattttagtgattgtttatgtactaaatcatactcttgagactttgatatctacctaatcataccattcgaattttgacacatactagataatgctccttgaactttcatccatgttagactttttttactaaaattagacaaaaatccttaaatccaacaattttaa

SEQ ID NO: 250394 - DNA, 773 bp, Cannabis indica
tgtcaactaacttgcaaaaaaagactttacaaaatgatataattgttagatatacaaaacaagtataagatatagaaaattgaaatgttgtgggaagttttaactaaaatagagtataaaacaccttcaaagaactaaggtggtgtttgattggaaggaatgaaaacataagaataataataagaatgggaattgcaataggaataggaataggaatggatttgaattaaatttaaaacgcataaaaaaattaataaaaaaattattaaaatttttctcatcttgtattggaatgatttttctttctattttaaaatggaatagatatttcaccaaaataatggaaatgtttctctattagaatgacatttcattactttaaaatacaattaaacaaatgattggaataaaaaatatttgtttattacatttcattactttcaaccaaacaccacttaaaatcaaaaaattagtattcaaacgaaatgtaaaagaaaaataagaataaaaacaccagaaattatccctggttcaaaaaaagctcaatgagaacttgctcgtaatccagcttggaacatcatctctcttctttatttatttttatctttatcagtacaatacaatttagagttttaatcaaagacctttcattctctcatgtgtttatctgtcaagaacactaaaactcgagcttatactttcataaagtcgaatagctctttacaattctccatacactcccaaactctctttgtattctctctctctctctc

SEQ ID NO: 250395 - DNA, 1102 bp, Cannabis indica
gatttttgaaatgattaccccttttcaccagtttgcctattaataaggctggaacttctttagaaattactttcaccattttctccacgaagcaaacccagagcaaacaaggaattttcttcaagtctgttgtgagatttctatcagagacatcagagcagcttcatctagactacatttaggctttaaacagtgagtaagttttcaatctttttcgcttttaactgtgtattttgaatttctgggtttccattgtagaaaatacatttgttcttgtcttgttgtagaagatacatagaaaatctacgatcgaaactttgtagttttctctgtaacagttcgtacaacttcgtgatttttgacattgtgattttaatctcgcaatgcttgattctcaccttgcttattcaaagcatcgtgattttagcctttaacccaaaaaaattcaaactcctaggttctggcttaatctttatgagttatttacccttttaatctgttgagtagtcctggtcggaatattttcctgtttattctttgatatcccggccaaacactcatctcgtgtgttgtcttttgtagatgaaccctggtgagttttggggaggcgtacaccaaattgaccaagatttgcttcaaattctgtacgaggatcaacctctttcagtaacggacttactaactcgagctttgaagatttggaagtgagtagtgatcattctcctactccagaacccgaagtgcaacaccactcttactccgagaagatcacaggagaagggtacgatcgcttcatttgggaattgaagaagggctggagacattatattctgtctaattggacgtatattgtctgaccaggtgatgctgacacttttcccgttggccgtccaagttctggtaacttcggcatccccatagctatccctaccattactgttgcatggcacacacatcaattgttggaattattttaccaggatctagatttactaccatgtatgttatttaacatcctagtatgaatgtctaaaaaaatttaatataaacacaaataaagtttgagaaaccttacagttggtgtagcagaattaaatgactc

SEQ ID NO: 250396 - DNA, 1095 bp, Cannabis indica
ttttagaagttcatatttacgatgttaataacatacttgttagtaaatctagatcctggtaaaataatttcaacacgagccgcatgagaaatccgcgaggatcaccttcaagctttcgttcaacagtcagggattccctcatccctacgtgctcctccttgcttcccccttaagtagaaaaaatgatatttacattatcaacctcgaaaaaggcatgggaaaagctccagctctatcccagcgagatacactttatagcgaatctaaatccacgttagcattgacccagtaaaagcgaataaatcacaactatgtgattttccaataataaccgtatttattttacatgggacgtaatcaaatcccataatttcaagggattattgttgtgggatatcaaactgattgtaattaactgccctcctatgtaactataaataggggcaggatacactaaaaaagagacgaaaaatcttttagagaaagaacccttgttttgtaccagagaaatctaataagatagactcgtggactatgcaaaatgttagctgcaaaaccacgtaaaaaaaactttgtattatgttttcttcttttactgttattatttctgtgcaaatccatcacgaaataggctttaatatagttaacgaaaatctgcgtaagcatatatataatgttataaacaaaccttttaattaatcctttaaaataaaagataatatctaatttgattcaaattcataatttaaatttaaatataaatatcatataactaattaacagaaattagttaaatccttttattttattatatctttttaattaaatagattatctaacgatatatttaattcaataatcaaaagataactaattaatataatttgaattattttaaaaataaaaaattaaacaaaattaatataggcctttatatatcgccctacacgtgtgggtaaacatacaggtgtgagccatattttaaggtcaaaaattgatatctcaactttacaacaaataagatttattatttatttctgtcaataaataataatctattaattctcattactctcttatttcataaggattaaa

SEQ ID NO: 250397 - DNA, 568 bp, Cannabis indica
gatataagtgatctcactaattagtgataacttagatataattacatataggtttcattacaggccatctttactcctaaattgtcctcaagtgtaatgttcaacttctacaacactactcttttaacaagtgttctacttttataaaatattaatcttttctttaaggtgcttgttgcattaatattcagaaatatgtaagcatgaaatagaaataaattgattattgccccaattgacaacctcttaattaattatatgactgaaacaagatatgtatatattgggtgctgttgatctactttatttgttgtcacctcaccttaattctcaaattagtataatattgtctcttttagacctaaaccctcacatatttatttttaggcatatgaatcttcaattgcgagtttcgtgactaagatttttcgtttacatggccttccacaatctataatttttgatcaagatcacatttccttaagtaatttttgaaaacagtgattcaagctcaagggcactagtaaaaagcacgccttaccactcttaagcaacacacgaattacga

SEQ ID NO: 250398 - DNA, 2391 bp, Cannabis indica
ttggatttgcttctattcccttagcgttgactatgaagccaaggatttttctccagcctatgccaaaagagcatttaagggggttgagcttcattttatagctgcaaaagattttgaagcactcccctaggtcctctagatgcccccagcctttttggacttgacaagcatgtcatccacatacacctccatgttgcggccaatgagatctacgaacatcgtgttcacaaccctttgataagtggcccctacgttttttagcctatagggcatggctttgtaataatacaggcctaggtctgtcatgaagctagtgtgctcctgatttggttgatgcatctttatctgattgtatcctgaatatgcatccatgatactcaagatttcatggctagctgtggcatctactagcttgtcgatctttggcagcgaaaagcaatcttttggacatgcttcgttctagttggtgaagtcaacgcagactctccactccttattgggtttacgcaccaacactgggttggatacccactacgggtataatgcttctgttatgaagtcattggccctcagcctttcgacttcgcctttaagtgcttgggcatgctccttgcccaacaactacctcttttgctgaacaagtgggatgcttcgatcaatttttagtgcatgggttatcacgaagaggtcgaatcttactatgtctccatgtgaccatgcaaaatggtccaagtttgcctttagatattctatcatgattgacttgatttttggggcaaaatctttactgatcttcagtcttcttattgggaaagtgggatcgacctccacttcttccaactcttctacaggtccaaagcttcctaaaggatccccaaagcgaggatctatatctgtgtccccaccttaggctagacttcattgccccttgctgggctcatcttctagacttttggcaaacatcttctccttttttgccttggataagatcaagttgtagcagtgacgggaagactactcgtctcccctcacgcatgccactccatgccgtattgggaatttaaggcataaatggtagatagacgtcaccgccttcaggtcgttgagggtcagtcgaccgatcatggcatgaaacgttgagggaacatcaatcccgacgaattgtaccattagtgttttgatggttggattttctacaactcttaccagtaatctgatatacccaacatgtgcgatgccttggccaaagaagccatacatcacatggttgcaaggcgccaggtctttgagttggagccccatattttcatatgttattttgaaaacaatgttggaggaggattcgtcgtccaccacacatcttgcaacaataatgtttcaaatttgcatagtaatgacaactaccacgtgcaattgtagagaggcgtaacaaaatgtttgaaactccttggcgtagaacaagattgaggggatagtccatactgtattcttggtagactagcccaagttttcctgagtgacatcgtaagccgcaggaggcacttttgctgaaatggaagcttgttggcaggagtgtggaagtagtgcatgggccataagatctttgttagtcatgacaatggtgcagagttgatgactgagatggttcaatttggaatagacattgaatgcttcagttacgacatgggtctgtcaagagggacacacatggagaccaagggggaagaggccgcaattgtcaaaggatgattgtactttgaagtgttcgcatgtgacttttatttgatccatatggaagcactgagacaattgggtggaatgtgtttgcttgttaaagcgccacagggcgtaagtcacatgaaggcattgacaaggatgcacaattgtagaatgaaggcatcgtagaagccagtagggctaagaagatggagcacaagcattgatatggcgctagagtttgagtagaagccatagggatgtgccagggagacttagtagtcatgtaggcgtgccaaggtcaagaagggtgctagagtttgcatgatggcgagagggttgaatcattagaacttagtacatcgtggaagccagaagggcgtgatgcaagtgtgaatcagttggatgattgagcgaacattgcatgaaatcgacaggggtgctatatgagatagttgaattgagagtcacatcctgcaggatgcacttttagatggcatggtgtgcatgaagagttgggcagtcaggcattcgcgtgtgggcatgttgtcgaggacgccaacagatgaagtgggggacagaccttcacggtttgctaatcagactaggaattcattacaagcatcgagatgagtatcatggagattgattgttgttcaggatgtaaagtcaaga

SEQ ID NO: 250399 - DNA, 685 bp, Cannabis indica
tctaaacttgataaagattgtgctcttttaatcaagtgaaaccaatatgtggatttcgaatttgttatattgatgtcactcaacgataagatcctaagagaagagagatgagaaagccattcaagattgcaaccttgtgaggttcccaagctgagaaaagggaatggacaaaataggattgccttcaaagttgagatatgtgagtctacttaaagaaccaataaactcaggaattttagtaaattgattgtaactaaaatcgaggtacctcaaatgttgtaattcaagcaaagaaggaccaatgtcaccacccaactggtctttgtaggacacagaatgaagatcaagagtgataatataatgagttaagttatgacagctgatacctctccatgcacaacaatctgggctactacttgtccaggaggatagaagattgtcataatcgacaaagcctttcttcaagtcgagaagagcttgtctctccttctctatgcaattactactccatactggattactacagatcgtggctagcaacaacaaaagtataactttgatcatattgaagaaagtaatataatattagattattaattatatttaattatggattcatatataacatatatataggactccaaatcctcgtacaccactacaaaccacaatcactctttttctt

SEQ ID NO: 250400 - DNA, 741 bp, Cannabis indica
tgtattcaataacactcatgttttccttatgactcctatgaattcttttctttttgcgcttctgactgcctcattgtaatactttgcattaaacagtttccgaaacttttccaaggtcattgttgcaaaatcatgagttagggacaccatgtcccaccacactaaagcatcctcttagaattggaatgtggcacaggccctcaatcattgccgatgatgcccataaaattcaagattctagtaatgactattagccactgctcgaatttcatgagatcagttcctcccaagaaaactggaggtgcctgcttatgaaacctttcatataggggttccattcggttgactgcagctacaggtcctacctacacagcaggggcaggagctgccggtatttctagagcagggattgcaggagcaccctactgtctcaacagccgaatctcttcatcttgttcattaatcctggcttgcatttctgcaaacctcttttcccaatcttgggaagcttgggcaggatatggcgggttaacatcaccctgaccacgtgccctacctctgggacctctacctcggccacgaatttcaagaggaatccgagctccctgaccaccactggattcaactgaatttccctggattctggtgtatggcctggtgtccatactaattagaacagcctgtgtaaccaagagctagtctgggcagaccgtgttaaaaaaaaacttactaatgccgctt

SEQ ID NO: 250401 - DNA, 360 bp, Cannabis indica
cagaggaccttagagaggttaaagtcgtccaccgattggctcttcgtggtaagcttggccttccgacagtgcgccgttgtgaccaagtcccccacattaaggctgtttttttcatatgtggagaagaccttagtgtgctgaaggaaaagctgggtaggagcagtgcggtgcatcggagggatcctgacccactccgtgagcagttctgggccttccacggcttgaaagccagaagagaagaagaatcggtggcggtactccttaaaattcttttgaaaattgtaagggatcgggccctcattggcaggatgggcccgaagcgtgaagtctttaaatttatcccccttattggggacagat

SEQ ID NO: 250402 - DNA, 613 bp, Cannabis indica
aactacctcaattaacaaaatgtaacgctcatgatttgttcagccagttgccagaggcgtccatatcaacttgggagacattcatatatctattcttgatccacttccaagccacgatgatgtacaaaccgccttatacaaccctggctaacatcaagcaggaagtcggtgagtccttacaggattattttaagtgttttaatgctgaagtaaccaaggtcgagaaggcccccgagtcttcattagtttgtatgttaattacatgtgtcttgccaagaaccgatttttggaaggagttccaggctcgcagaccagattcatttatagaattcttcgccatgactgagccacacaagagaatcgagaattctctagctgaactagaaagggtgaaggaaaagcgcaagtcacccgtaccacgatcacgatctcaaagtcctagaggaaagaaccgcaaaggtagaagcctgagaagacgcagcccccagaggcagcaaagtccaaagcttgccaagtccccttccaagaaggagacatctccaaagagaaaaggaggaccacgctttgttaattacactgaactgacggtcccccgcgatcatatttatgtgat

SEQ ID NO: 250403 - DNA, 533 bp, Cannabis indica
tttatttttattttatttattatatataaataatattttattattttattaaatataaataaaaagtcacccatgaatttctcataaactaagaattcagttatataggcacactttatatagaatagatatatatttatatacccaattatctgaatttctcactaacacacggtaaaaaatgaccccaaataggtagataatagatatctcgagtaaatggaccaatatgttcaacttctatagaaaactggggacagatttagaatcttaatcttgattgtctttacctttaaccttaataaaggacagagttgtgtcatccgagaaatgattagtcaagtttaaacttactctctcctctgatgttgcaaaaatatttttcagttttaactgcaaaaaacaaaaaataaaaaaaaaaaaacaaataaaaaaaatgaataaataaaaaatacaaataaataaaaaaaaaacaaaataaaaaaaaaatataaaaaaacaataaaacataaaaaaacaaataagtacatcct

SEQ ID NO: 250404 - DNA, 1540 bp, Cannabis indica
accacaaaaatgctccaaccgaacactaaattccaacttatttatgtggatgtctacagcactatagatcacggtaaatccactttttgtttattttttgtttttttgatgtaatttttggtattgtagttgaaataagataaaaatttagtgataaatttatatttttttagtgttgatttaataccaaatttgagttttaccattggagcaaccgaatggcaaaatgtcaaatatagatgtaatccaaccagaaatttttctccaagaaattttctctaccatactaatatgcaaacaaatacatgaagaaacaaactgtaaaatgcatgaaaggatatgatgaaacctcatacaacataccagttgacaggagtccaattttttgacagagctatttgttgtgctctgagtacgaagtattgatatgcctctttcgtagttaagttcttatcctgaagcctgcattagaattatagataaatcagagacgctataaaaagaaggccacagaaacattcaaaaagtaatttgactcatttgtttataacttagacttttacaagtggtcttcactaatacaacatataacaattaaaaaacaatcaacagttcagcataaacatttggattaccattccttcacatgtggtgtagtgttccagcaatctgccaagtatggaatagtttctcagaaataagttcagttaataagcataaaagccaatgagaaaacatctttagactttcttcttagtaccatcagcaagtatacaagcattagaagatcattactatcaacatggaaaaagtattttggagccgagttactacaatttcctttgtatagacatgtctcttttattactactttggtagtagtggaatagaatcttggctgacaacaagaaagtacttttactaacctgtattaacttcgtcaccacccaagtggaatagctcaaagggaaaaatctctctcatatctgtataaaatagtaaatataggtagagagaaaaaaaaaagggaaaattttcttccgcaactttacaaagtgaatctagtaatagctaataacaataaaaaataatgagcaatgagtgaaaagtaagaaaatgaccattgtaagaagatgcacgattattctttccttaaacataggaatgtagcatcaataatgatggatcaagatgactgaatagttcagattttcctttaatttataattaataatactagtcctactctctttaattaagaatctcttgaaaaggaaaaaggaaggctacactgtgtaattggagctacataaaaaaagcccatgagaaacatggctcactacagtattggctgctgtatgtctatggagagtgtagctggaaaggaatttgaggatttttgaaggacaggctactgatgagaatagtctttgggataatattagatttcgagttgccttttggcttcattatgtaaataacgtaaaggggtttaagaaatcccattctctcatttattcaaagaatggttttttttttt

SEQ ID NO: 250405 - DNA, 821 bp, Cannabis indica
aaaaagttggaatcacgtcctcgctgcggcaagcctttcccttcaccgtggcgacaccttcctcgtcgcggcaagccttcctctttgccacggccacagcccccggcaaggtttttcttatcatttgtttgctagagcgaacctccaaacttaagcgtcaaatctcaggttttgagacttcgtggatttttaaaactctacgaaaatatcatttcggtgagtttgtttatcctccaaacatcatctagtcaataaaacattgttaggctaattttagtcttagttttgggtcactttttagggtagttttcgatctttgtttctagttttaggactgttttatgcttgattctctttgttttaggtccccaagatgtttaaaggatgtattcttgagaatagagtgggcaaaagaggaaagagttgggaaaagaactaaagtcctttcctggccaagctcaccgcggtagccattcttcctagtcgcgacagagattggcaaagagaaaattaattggagacatcccagctaccgcgactacggatttggtgtcgcagcgaagctttcttgatgagttctgggtaattttgtattttcacaaatttcaaaaggaaaacttggctcatttagaaggggggctcatgattttttatgatcattcagaattgaagacctaaagacagaggagagaaattcaagaacggcttgttgcaattcgaatcgatttttccaaccagttctttcttcattcttaatttttctatgttagtttctgttttaaatttgattatggagattatgaactaaactcctatttggg

SEQ ID NO: 250406 - DNA, 1341 bp, Cannabis indica
tctgttactcatctactactagaactgaacctataaaagaggagcagaactacttacaaatctctcagttgagagaacccaagtgtgaagacccaggttatgagagaggagctctcgtgttgattgtttcagagtgtacatgcaaggaaaagaaagagagagttagtgagaacaaaagaaaaatacacggaagagagagaagagagaaagaactaaaatatcagtcgatttttgtgactcggatttctcacctgatgtaatatttctcaaatatagtacaaatctgagatcgttcttcaaggcgagctcaaaagaggacgtacccttggatttagggcgaacctctataaaccctgtgtttggttttcttatatctctttactgcttaaagcttgatcttatgcgtgtatgagtttggggtagatttctggggaaggttactggttatatcgacctggtttgatcgagaaggggatctgggttctagggttctttgaacagggagagatagtttggtctcaaactctcgaaggttctaaggtcaattctgagctaggcttagctcattaatttgttttttgttttgtttctgggagatgacaaatcattttggtctaaacgagttgtcgtgcaggaagaaacaacttgatatctcttatcgtttggttaatttgtcatttttaattcttggtcaaaattaaccctgtcgttttgattgatattgagttggtgtagggaagcattcttggaaatcaagaaaatcctacaatttattaatttaaaactacagtgtactatataaagttcatatatgcatacacatattaatatatttaatatgttgttcccaattttaccttatgtttacattttgtaatatattattctgatattatttggtcatttttttttgcatattgggactttgggagagatgcagacttattaagaagttgatatatcacagacaagtagtaaattcccctttcatttttgagacttctatgattccatctgttaatctttttaatgttgcaaaatatcacttttttcttattctcttatttatttttctttttaggcagctgttataaattaacagaaatcttagaggtttttgatgtgcagaggacctttgccttgagtgacacactgaagaagtgccgtagcaataattaatataagtgtattatttttttttatttgtatgttaagtgattattatgaaaattacttgtctatattaatttactgatgtttaatatttaatgtgcactgtgtaagaaggccctagatacaaatgatggtaaagccatgatctatatatatatatatataaac

SEQ ID NO: 250407 - DNA, 802 bp, Cannabis indica
gagaactgtcctttgagctggagtcgtcgagccttggactgagatgtgaacttttgttcaagagcacgccacacagagaaggaggtgtcgtagtttgcaacggaagcaagaatggagtctgacatggaggagcgtaaccaagaaaggagaagctgatccttgcgtcgccattgaaggtatgccggattcgaggtgccattaagaagagtctttggagggggaacaccggtgaacaagatctcatcgagatcatgtccaatgacagtaggaacaacctgggacttccaagagaggaagttaaaacgatcaagcttgatcgtgagagaagaggacaaggagtttgagaaaggattccaagatccagtagcagtggtagagaccggtggagcttgagtggcaggtgccatggcaggggccggaggatcggagactgacgaagacatagtcttgagtcaagacttctgataccatgtagagaaggaaagcagagaaaagagagaaatgaaaaagaaagctcaattcattactggaaaatgaatacaagtatttatacactgatacaaaggaaaacagagcaagagaatttgataacagaaataacagaattgtaactacctaattaactaacacccttaactaaccaaagctaacagagaattaacaccagttagttaaatagtgttaacaaatgtgactgttgggcaaatgagattcattgtaaaaaatatttaacttttcaaatgtaaatatttggagcgttgatggactcgctgctattgctaattctttttttttttttttt

SEQ ID NO: 250408 - DNA, 2659 bp, Cannabis indica
ttcctaagggaatctcccaccataacagaatgaggaacaaaagaagagcgcttcgcaccagcaatggctttacctttggacttcttagaattccgagcaacatcttgaacagcaaccgagtcaatatcatttggaatatgtaccgcaatagcagttgctggaggtacagattgaaaagcatcgcaatgaacatcaacaagggcaacactacgaaggccagggctgaaaccttgatcagatgagactctctcaaagcctaagaaggtagaagcaggaataggaataccatcattgattccttaagagattatctcatccctccttaaaggagtggcagaagaggatgaaccagcaccaacatcctcagttgtaagaaactggcttacagcagccgcaagactttgatccacatttccataaggcaaaggcaactcctctaaaggaaaagagttagtaagatcaaacgggttgtgtttgaaattagacttgactagggctttcaaaggaattttatagtggagcgggggtggaaatgcctgatcatcacatttttgcagatatgacacacattttgtcaaggtatgatcaaacataccacaatggaaacaaatatttggaagattctcatatttaaagttcagccatttttctttatggatattcctaaaatcaactaaaatacctctaggaatgggtttggaaacatccaacagaactctaacacgaagaaacaaaccagagacttttaggagagtagttttatctacttcaagaaaatccccaacttcatccccaatcattttagcaggtttataggacttcataccaaaaggaatggaatgagcttgaatccaaaagggagagtacctaagctggttaggcagaagggtatcaagaccagctgggtttgcactagtgacaagacagtgatcaaaatgccatggctggccctcgatcactctcctcatgtcaccttcgcatccaaactcagccataaacatcccattgccatactcagagaaagtaataggagatcgagtggtccaggcatttctcatagcctcttcaaaccactcgattttgatagttcgggtagtaaggactctaaacacaagacaaaaagttttcccagtttgctgatccccccctacatcatctaagagttcatggacagtggcttctttatcagttagagttaggacatgagccatgttttcagttacaccctccatttcccagaaagtaaagaacagaagagaaacccagtatttaccagacaaagaagataaaagaaagcagaataataaagaacgccagagtacccacactcttaaatagataatactaggaagatacctgcatgttgtagtcttactgacgaagctaacttcggaaatcatcatccatttctgcagaaattctagaccgaatccaaggatcctaggcataatgatcaacttcctccttgaaatagccaaaatgacggcctccattaatggggatgggatattagatgaaagagagtataaaatccaaggatagagatccctggagagggatttttgatagattttcatcagagaagaaaaaggaaaaaaaccaaggaaaatagagagatgacggttggagtaataaatgagattagaagtaagcaaaaaaaaacaaaagaaacttaatgaacgagttaaatcacaataaatgatgagagagaagcagaattatagaggaaaagaaacttaaacaaagattggaaatttacaccacaagggagagaaacaatctggaatggaaccagaagaaactgcaacgggatacaacccactagagagttccagagaaagaaaggcttcgttttgtaagagtttgttcaacgtatgtactttgttctccatctgcaactgtgtggtgtgctaaactttgttattgctagctttttcctttgttgttcccttggcccttcaatctacaattcacattttaaaaatcaagttattgaatatatataaaataacaaaataactttacttcacacgaagtctgtaagtcttagcaataacaatatataaagatatatatatacaatacatataaataacaaagaaaagatcaaatttactttgcccgagaattatacttctaatatctaatgatttaggttgtccacaattcaatagcaataaaagtacatttaacattaataatatcatactatatgaatatatgaatttagtaaagtaatactagcatagcatagtaaaataataagaccaacaaattaataatagtcttattataaaagaaaaggagaaaaacataataatatgaatgaatactacattattatataatgataaactgtaaacatataaaaatcgccaacacaacaccactaattttaaaactacaaggaaaataatgatcttagatagaaaaaaataatgataaaaatcatatagttatagagggtactatacaagttgaaacaaatcacacaaaagagtaaatatttacatttctcgcaagcaaagtaagatttttcctttgaggctgtaacgtctccgattcaagcctccattgggcccttacacccacggactcatggctcttatacacgagtacgccactctggctacttcatggactgatgactgaccctaca

SEQ ID NO: 250409 - DNA, 428 bp, Cannabis indica
acgaactaaattgctcaaaccaacatcactacctgcaggggcagacccaaaatttaaagtgaggggacgtcatatttttttttttttaaaaaaagggcaaaagtaaaattaaaaagaaacagaaatgctcttaatgagattattagaaccattgatctttatcatagttgctatctaacttaaccattacaccaaaactaatattatgtttataaacatcatcttttattataaatatatgtcataactaactaaaatgtatatacatttttttccaatttttttcaaggaggcgactgtccccctcgcttctatgtaggttcgccccttcacatgaacactttgttcctcacccaaattccaattgtgagaacaggtgaagaaaccggtccccaaatgatcctgcatcaacttgaatcatagacaaa

SEQ ID NO: 250410 - DNA, 682 bp, Cannabis indica
tttttttggatttgtatgatttttggttaatgattgtgtttgtgttacactaatagttttgagacaaatttattatttttctttaatattaatatgtttgtggttgaaagatgaaaagaaagattgagaatgtgatatataggagtgtattaaaaaacaaaagtataatattaagttctaaataatatgttagtgagataattaaatattattgactgagggtttcgtaactgctcgaactgtttgaagtaattaattaatattaaagaagagaattttactgtaatttcttttttatatatatatgtggaggagacattttactggcttttttccaagtctattttttaatttactctttttttgacatttagtcttgagagaaattttttatatatatacttatggatatatatatttatgcactgctacccttcaagtgactaaaatagtataatactttttaagttattttgcataaatctaaaaagataatacattgcataaattacttagttcacaattttaatagaaaatttgaagatgaaatcaaataccaaactctaaactactgatagtattttagatcattagcattccatacttttgggaccataaatctatttatgtgtttgagtttaaaagtttcggagcatatctcatcttcaattctataaggttt

SEQ ID NO: 250411 - DNA, 716 bp, Cannabis indica
ttaagaaaaaaaaaatattaaaattatattagaatgttaaaaagtttcacattgctaatgcatggaaatataatataatatataaaaagatcaaaatcaactgtgttggattggttaagtcttctaaacattgaagcattgagaaagtaacagaaagagaaagaaagaagaacagagaaaaagaggaagaaagagagaaagaactcttcattgattaagcacacttgatacaagacttatatagtacaagaaccaaaggcacttagccaatacactaaccaaaatcagtaaagacttgaaaacatgttaaccaaagttaaccactaactattaagattaggagattagttaaggttgttaagtggttatttaggctatattagttataactaattcttgattagttattctgactatttcacccttattattgggtatataaaccttgctgtatcttttccttattgtattgaacatttcagaacatttcaaataaaacagagttcttctcttttctatctgcaaaccgattcaggttgctcctcctcatatggtatcagacgaagaccttgttcaagcttcaatggcaaggccctccactcgctcgcaagacggtcttccgccgcccacagcagagaacactacctcggagtccaatcccgactccacttccgcgcaaaacatcaacccgtccactggctctcgtcgacgctcca

SEQ ID NO: 250412 - DNA, 552 bp, Cannabis indica
atatttaatttgtcaaaaaaaagtatataagtgtataaatctaaaaacaataagtatttatgactcaaataatcctagacaaaagcttgatcaagttgagaaattttgttcaaaaattttatttattggccctaggataaattgtttgagattatttttttaatgaaaataagacgggagatataaccagacctaaaaaaattatcaaattaagcatagacagcttagctgctcaagccggtgatgtccttctctcctaacacgaccttacctattcaaggcttcttccatagacaactttcaatgcctattagtgagtgccatgaaaaatatcttggcctcccatcttactccggaagagacaaaaaggagctattaagcaatatcaaagacaaaatttggaaacttatgcataaatggagtgagaaaattttctcagcggggggaagagaagttcttctaaaagctgtggtacaatcgatccctacatacaatgagttgctttcaccttcccaactacttttgtaagcaacttgaatcaatgatggcaaa

SEQ ID NO: 250413 - DNA, 1478 bp, Cannabis indica
cgagaagatcttcctcgcatgcaaaacatctttagcgggataaacgcgtcgctgtgtgttatcttgactagccatactatctgtacttagtttgtatatcccataatatacgctaagtattttttagtgttgtcgctttctctttcatgcagcgaggttgaggcctcgtcatgagcgtatgcacttacatggtttctcatcaatacataaattagcagtttgtatgtttctgtctcgcagaaggctattcagccagccgagttataaacctaccctgagaattatatttccaacgagttgttccatgctaagcgtacttgttgtttgtgtgtttgatttctttctagctcgatacgtgtcctcctctgatgtccttaccgaacttcgggtataatagtggtataatcctcataagtcccaacaaattcaaaatacacactgaacttagattgtagtttcccgaatctaataacgaagccgaatatgaggctttgatcgcaggattaaaactcgctcttgagatgaaaatcgagtatttacaagccttcaacgattcacatatcatggtttgtcatattaatggagagtaccttgccagaggaggtcgtttggccaaatatctttctcttacttgtgagttattacaaaagtttaaaaagatagttgtttctagaatacctcgtgcttacaattctcatgcagatgctcccgattggcctcgacaagagaagccgagttactcgatgtaattcctgtagacatattaactcatccaacaatcaatcaagatgaaatgatggaggttgatacagcaaaaaaggttacctggatgaccccaatagtagagtacttgaaaacaggagtgcttcctgaagataaagaaaaagcttaaaaactgcaatatcgagccgctcgatatgtcatttatcacgacaagctctatcgtagaagctttagtcagccattactcaagtgtatcgatgagactaagtgcaattatatactccgtgaggtgcatggtggaatctgtggcaatcacgccggaggtaattcccttgctttaaaaatcatgaggcaagggtattattggccaacattgcgagcggatgcatctagctttgctaaaagatgcgacaaatgtcagcgaatagctacatatgtgaatacactaccaagccaactaaattctatcacaagtccctagcccttcgcggtctggggcatagatttgattggagaattaccaaaaggtaaaggaggagtaaaatacgccgtagtcgctgtcgattacttcacaacatgggctgaagccaagcctcttgcgactataactgttgcaaaattgcacgagtttgtatacagcgccatctgtatgtttggtataccttataagttaatttctaataatggaaaacaatttgactgtaaggaaatgcgctagctatgcgatggaaaacaactcctcgatccacgactgg

SEQ ID NO: 250414 - DNA, 506 bp, Cannabis indica
aaaattattttaaaaaattaaatgtataaaattattaaattacataaaagataaaatattacatattatttattattcaatgtaataattattatacataaacacaacttcaaaaattgtaaaaatgatattaatatactaaaaaaataaaacgcatttataaaatataaaatattaataaaaaataattaataaattaaacgggtcccggtcggggcagggagtgtcattcccgttcctgccccgtttaacatttggggacaaaatttgatctcgtccctgcctcgttccccatttagacggagaatccctgctccattaagggcgggttctcgcgggccaccatcttcatggggaaaatgtgcatccctagtcgtactactcttaaccaaaaaagaatttgattataataaaatcataaaataaaatacttcttttattaaaataatatgtgtaataattataaatactaaaagaatttagctaaaaatatataaaaaaaaata

SEQ ID NO: 250415 - DNA, 1022 bp, Cannabis indica
aaaaagaagatgaaatgggctgtaattagtatttaccttatatgtttgtgcttatttttagttttatttttaattttaccaccaagaggagaaggttgaaaaatattagaatatgaaaatattattggtgcttattagtaatttgcaaagaatatgaaagtctataaatatatagttgtgtagctataattagatatgaaatgagataatagaacttttttcaattagaagattaatgtacattttactattaataacatacattattataacacaactatgttttacttactaaatatactgacacatattttatttttataaaacaaatcgttcaaataattatactattttaattattaattcaaataaaaaactaaaatattaaataaaattaacactacgtggcttggcacgtaacaatcacctagtatatatatatatatatagatatatgaaagaggtaatatccacatttattgggaaccattcaaaatgcacgaatttgctaggatggaaatttttcccatatagggaaggagtaggggatttgaaacggaagggggttgatttttcatcattaaatattaatggtaatatacatacgaagttattaattagtaattgaaataagaataagtaatagaaaaaataaatcggtttaaaatataaaataattagaattaatattttattttgttgtttactaatttgattggaaaaaaaaaatagaaatgctttaatttgaccaaattattattattaaatgtaattattttttatttatatatttttgaaggacatatttattttttttatttttaattaataaaaatataattaatataaagtaagttaagcaaaaaaaaatatattctttataaaaatagggcgagaacatttatttttattttctctttaatttgtgtaaggcctactaatttctctaattccaaaatttagtaaacaaattaaagagaatcaatcacatgttgaaaaattgttgtgctccaataaaaata

SEQ ID NO: 250416 - DNA, 891 bp, Cannabis indica
gcctcaggatcactagttgaatttccagcatcatcagcgaatggtattattctttttcctgtgggaagcaaaacgatgaaaaaattttgtgtttcggtctccagccctaagccaggacacacgggatctctgcttccaataaatctcttccttgtagagaagagcatcaagctgagattggagatttttgagatgaatcttatgctcactagaatcagagcctaaggattgaatcctagttatttccctttgaacatcctgaatacgaggctgaaaaagtggcataacatacttgtgccaagaagacaaagcagtgacacaggaattttgcttggctaaaaaggtgccaagagcatcctggctatcagaaaattgggaagaattattccaagagtccctaacagtggtataaaaactagggttgtctagccaaatattttcaaattgaaaactctttttagatcgatgggatcggctaagatctgggttagggtgcagaacaatcttaatagctcgatgatccgaaccataaaaaggcaagtgatgcaaaatagcatttgggaatagcaccctccaagactcagaacagattgcccaatcaagacgttcataaacagtattattatgccaagtatatttactacctataaaattaagaggagaaagacaaaacttatggataaattgagcaaaatgatccatatcagaaacattataatagttactaccagttttatcatcaaagtccaaaaaactattaaaatcacccataatgagccatggcaaattaggggaagaataaaaaagtttgtctaacaactcccaagtaacaagacgagcagaggaaataggagaaccataatagcaggtaaaatgaaacatagcattatc

SEQ ID NO: 250417 - DNA, 626 bp, Cannabis indica
tacttttaaataaagtagaaaatacctggcataaaatttaatatacgtgcctcgcacgtaattttttactagtatatataaaatgtgtctatataactgaaattcttggtttatgagaagtttatgtgtgactttttatttctatttaataaaataataaaatattatttatgtataataaaataataataaaacaaatactattaatatttgcactgatattaaatattcccttataccatcaaaatttgcactgcccacatgtttcgaaaaattgggatgtttcgattcggatatcttagcagccatggaccaagcaatttccgatggtgtccatatgcatctcgggctgttaaggcaacaatatcagcacatgaaatttgagcatcagggcattcagttgtaagcttttctttaatttcatcaattacttcatatcctttcaccgatcgattctgaatggcattcttctctgtcgtattgtcatcactgtttaatggatcaatcaagattgatgcatcagatgcctgcacagacacgtacacatattcatcaatatatatatatatatattactctatatatatattctacatacgtactcggacgaaacaatcgtggtagtg

SEQ ID NO: 250418 - DNA, 1924 bp, Cannabis indica
tttctcttttcccatgacaaacaagggggaaatcccgacaggggcccttcttctgactttagacatttcattgattcttttaatctctcccctctcgacccatctggccctttactcacgtggaacaataatgtcgcttccccaaaaaacattcaagaacgcctagactggggtattgttaacaaccactggtccgatatctttccggatgccaccctagttcacctagggttcttcggttctgatcaccgcgcccttgagcttaacacttccggccccccgggcactcgtcccatcaataataacaaacgttttcacttcgagaatgtttggcttaaggaccccaattggaaccaagtttttgaccagtcctggcaaagacaatcgaaccaacctgagcccatcctcaatttaatcgccactcaagcctcttgtgctaagaatctcaacaattggaaccacaaaaaggattttaattttaaaaggcacattagcaagcttgagaaagagctggaacttgcccgctctgctcctgtttggaacgacaacaccattcggatcattaaggagcttcaatcccggcttgattctcttctgtacaaagaagaaacttattggaaacagcgagcaaggacccaatggttggcccaaggagataagaatactaaattttttcatcgctatgcctctcacagaaaaaagataaacaaaattcattcgctccatttggccaacggcggtattatctccgacgaggaaagcattacccgtgaaatggaatcccactttaactaactcttctcgtccacgaacccctcggaggaggaggtcaataaggccctgcaaggtgttacaaactctctctcagagttagacaaatccctccttgctgaggagttctccttgaaagaaattgaaaaagcttttttccaactcccctcagacaaagcccctggccccgatggtttcaactctaatttctataaaacaaactggacctctatcagaaatgatgtcctcaaagctgccaccagctttctcaatggcaatggggacatcacccctctaaataccactctcatcacccttattcccaaagtcaaacgtccttccacactatcggaattccggccgatcagtctttgcaatatcatctacaaagttatctccaaaaccattgcaaatcgacttaaactcgtcctcaacaatttgatttcccccaaccaaagcgctttcctcccggatagactcatctcggataacatcattattgcccaggaagtggcgcactccattaaactgaaaactaggggtaaaaaaggttggatggcggtcaagctagatatggcaaaagcttttgacagagtggagtggtccttcattgaagctattcttcgaaaattccaattcccctcccggtttatcactctggtgctttcatgcatcaccacagctaccttccaattcaacctcaacggcaaagttactggcagtgtttccccttctcgaggaattcgccagggcgatcctctttcaccctacctcttccttctctgtgcagaaggcttctccctctcttgcgacagaaagaaagtgataggtccctgcctggcataaaagtggcaagacgggccccggccatctcccacctgctttttgcggacgacagttttcttttctgtcaagcttccattaactcttgtaacgtcatcaaagaggttcttgatgtgtacgagcgggccactggtcaaaaagtcaacttccagaaatcctcattgtacttttctcctaatgtggagttgagggaccaaaccttgatctctgacttcatgggtatccctgttcgcccctcctttgaaaaatatctgggtctccctcaacacataggtcgaacaaaaaaacaattgtttcattaccttcatga

SEQ ID NO: 250419 - DNA, 837 bp, Cannabis indica
attctaatttagtttgtaaatattgttacaaaattataatgtatgttatactaattagtaaacactatttccaaaaaattgtattgtaacaaatttataaatttttgttaaacataaaaataaacattatattcataattatgaccctttagtagttttgttttttttttttttttgctaagacccctttgtacattttgttaaaacatctataactataataaaagtgtcaaaaattttaatccttcaacaattaatttaaaaaaaaaaagcccttcaattattttgagggagttaaacagttaatatctttttcactcataatatatattatattttaaagatttttttctaaataatctatttataaaaaaatataaagcatgcttattttttttttttttgaacaacataaaacaagtttattatgtgattactttttaactataataataccattaataaataattattactcaaatgaaaaaaaaaatataatattatattcttattcttttaaatttataattaaagccacaaagtgaacttatcaaaaaataaataaataaacatacaactataaataataaaaaataataataatacagcaatataattaatttaggaaaattttatgttccactctttaaaattatatgtactaaatactcatttcgtattttcgatatccagatagtttcaattttgatttttttatatgacaatgtaaatcatagttttttaaaaacattttccaagttttcaataaattcataataatttaacttgccagaaataaggttcaaccaatctatttacttatgcctatttttataa

SEQ ID NO: 250420 - DNA, 685 bp, Cannabis indica
atcagtatctgaatatatgtgtttgtttatataactacacatatggagtagatggcagaaaacttatctcattcaaaacttttaggccaaaatccttcctaagaaagaaaacaacaaaatggctgccttaaaatcaaacttacatattcgctcgaacagcttgccatccgaatcacaccctgttattgaagaatgcaatgaccatttgcacagattaggggcttattatgcaacttcatcttcatcttccattgcccatcaactcaatggtcttgaagacttgaacatttgtgttgagaaattgctccagctacccctcactcgacaagccttctcccaaagccgccaagagaaatgggttgatgaattagtgaatggatctcttaggctcttggacatatgcagtgcagccaaggatgctgttttgcacacaaaggaatgcgcacgagatattcaatcaaccatgcgtagaaaagttagtcttgagagtgagattgaaaaatactcagcctcgaggaaagtagtgaaaaaggcaatccaaaaggccttgaaatgtttgaaaggtgctgaatcaaaaagctcagcctctccttccaccaaagatgatgaaatcacagctttggtaattgttttgagagaggtggaagctgtcactcttgcatcatttgagtcattgttgtcattt

SEQ ID NO: 250421 - DNA, 733 bp, Cannabis indica
gacagaagcataagtaaatccccatcttgcatttgacttgcaacttgaaaatcaaagtggaaatctgacaatccccaaacggctttagcatgcttgcaactaaacatcgcatatcccactgattcccaagcattagaacataaactacaggcagcagaagtaattattttacgctggtatagagctgctgcagtaggtagtgaattctgaattaatttccatccgaagatcttgacctttgaaggtatgttcaaaccccaaaaatgattccaccatgaagagtcagagctggaattagaagaggaatgttgatccaccaaagagcaaggaaaatggtaactagattggtccgtatattccccatgagtggtgtgatgccacacccaacaatcgtctagagaagtggaagataaaggtattgtaagaatcttatcaatatcaacaacagagaagtccctttgtaatagaagtaagttccattcatgatcagaagtgatatattcagcaaccgtagcatatggtgaaccagtaaagtgagttggtgtgaacgttgttcgacttggaagccatggatctgtacaaagcatgttcaaaccattcccaacttgcatcctcattccttgaaccattaactcacggccccaaacaataccttgccatgtgagggaggagttataacctttgttagccgaaagaaagtcaccatttaagaaatatcttgcttttagtaagc

SEQ ID NO: 250422 - DNA, 1179 bp, Cannabis indica
agttccaaatttctttatatttatagagaaaatgctattcaagtaattctcatatttaaatacttggtggctatcgaaattctaagacaattaacatatgcatagtaaagacagttaacatatgcgtaagttaacatatgcgtagtaaaaagcttataaattataatattataattttgagaaatgtaaaggatatcagtggtgcctagcacctttatatgtgtcaatattgatattgtttcaactaagtatcgagtctcatataattaattacaatagcttttagagagtatcgctagccaatcgcaacgcaacatgtcaaggatgtgttaggcaccactagtacctaatagcaatgttctataattttacatatatttagtttcttatatgtacatagaaaccaactaaattaattaggggcattaactaaattatagattaatgagcttaattgttagtaaaattaaattactgcattaattaaaatataaaacctgagtcatatatatatagaatcataataattatcatttatcaatactatatatattcaaggcttaattggggtagggagtaccacacttaattatgtcgcgtccccaattctagaaatgaaaatcaaccccgtacccaccctatctcccgccaagtcagagattctctgccccattagaggcagattctcacgggtctccagtcctatgaaacttttgtacatccctacttgctattgaacacttaatacttaattgtaacaattacgcaataaaatactaaacatcactaatatcttttaacatttcttattaaatttagcaatcaaaaattctaattaatatgtggaagttacttttacaccaacccactgaaaagaaaaaagaacgaataaagtgatacaaatttagaaaaagaaaagtcatgaattgtgtctggctgctgcacgtttttcacatgaagacattatattattaaccataattaattccataaaatgtttggtatataaatgatattttatgatgtgtatatagttaatacctaacttttttcacaagctaattaaatttggtactaccaatagatatgtatattgtatattactatgtattttttacacaagatacatttttattttaattaaagtcatgcttccctatctatctataggttataaga

SEQ ID NO: 250423 - DNA, 515 bp, Cannabis indica
tatcactttattaatttggcttaggcttaatatatgcaagtgcgatgaaggagcatcttaggggatacaatattttataaaagatatttcttagttcatattattttttatatattttttttcactagtaaaggactattagaaaatattgaaacttccaattgattggaatgaaatcactacgtatttgtccaattcagaaacttccttactacttacgttcttatccaatagttatatatatataaaaaatcttttggctcaaaactgtggttaatttttcttttatatatattacttattaaattaaaattaaaatcatttttaatattaaattttctaatagctaacacttatttaattgattaaatttgtttttttggaaagagtgattatgatttatgtagtttttggtaataatgagagtataaataatcaaaatcttcacttacaaaaggactagaaaatagtgaaacttgtgatgaattagactaaaatcagtaatgatttgtcgt

SEQ ID NO: 250424 - DNA, 555 bp, Cannabis indica
acatttatcatttatttttattagttttgaacttaatatttattcaagctttcatttcagtcaaatttcttgtttcgtcaactttaatcacaaaatgccacctcgtagtggtgatgggcatgtctaggtaatagcaatattcttactcttttaggttttatgatatacagaatttctctatctcttaagtcaaatttagattgtcatttccacaaattatttaatgtcatttctttattttctggagctaggcattcattgtttaaagccatagtatatatcacaatgagtttattgatagtaaatattaatatagtatagccactatatatcaacctaattaatgtgaaacttttctaatattcattacacggcatttgcttaattaccttaataggaacttcaattccaaatgaaatcgtaatacttgttaatatactactaaaaaaattgggaatttttcgaatattttttaccatatcaaaaaattgggaagaataatgatggtttgataataaatttgtattggtttagatttggaataggtggatatgt

SEQ ID NO: 250425 - DNA, 605 bp, Cannabis indica
ataaataaatacttattctcacacaaattgtataacaaataaaatttaaaatatatatatttttaccgggtattacacatgttgagccttggaatgcccacgtgacatcctcaacttcatgtttcattagtttaggatcactaggacctattcatttaaactttatcgaaggatggcaactaaaaacgtcttcactagatctcagtgcctacctgagcgcccactattgctaactagggcaccgacacagtttctaatgccaaagttgaccacctttagtcccaatggttgggccctagggttgttttcttatagccacgtgtcaaaagtattgttcatgtcatcatgtcaaatttttgagtaaacactactattagtacaaattaatattaggtctcacacattttgatttaataaataatataaaaaactgctaactatttgaaatgtgctacatcagtgcagtgttggatagatgcccaataaatgaccataaaatattaataataaaaatagtactttctctgacacccatgtttcttactaattaataactcaaaattgaaatcatagccgcaaaaatttttccaataataacttgaaat

SEQ ID NO: 250426 - DNA, 517 bp, Cannabis indica
tttggatgcactgactgatacgggccatcctttatgtctttctgtactttgtcgagccactattttaatacatcgttgaggcataatgttttcccaggcgatataaataacgtatttaattcttcaatatccgagttggttcatttttagttattgtactcgtgtcgtgactatattcttgaccaaaatatagacataacaattgcgtttttagaattagaagaactttttaagaagaaaataatagaagtataattttctcaagtataatgagtacactttattttggtggttaatcccctaagaaagttcacttcagcatttaaacctatctttttctttgtcctcgtcttcttccatgaagccttgatttgcttggaggaagcctcggcgtgaagcaactcatttcttgccccgctgcatgggataggaagacggagagagtatgtctaagtttctcgagaagaagacttagagcatgtttggtattgttttctgttttttattttcaaaaaat

SEQ ID NO: 250427 - DNA, 1558 bp, Cannabis indica
tcctcttcctgacatttttggatctctgaaactgttactgttcttcttgtgagagttgttgttattattgatgatttgttcggggaactacttatagatgtggagatgtgagataatgaccgtcggattagatggcgatccgcgtctggtgtctacttttcttgtaaaccgttggattaaatttacttgaatgtaattggaggatattatttaaagcggatcggtcgtgagttggaagttgtaggattcttcgttggcgggaacttctacttaagtgatgctattaagtaatttttattgaaaataacaaaatcctcaaaattatatcattttgacaagattaattgcagttgtaaaaattgaattgcaatagcaaaacataatctcaccaaaatggcacttatgcttagagaaagtcaacaagcgtggtcgaagaaaaaaaataatctcctgtaactataaatttaaggacaacaaactctaattttatttttagaatgtatacaaattcataactaggattagtacatctatatagtatggttagtaacctttgtatagtataatgttgatggttgaatgggaagtacaagggagtaattgagttttgtatcaaaataggagacttctagtttatagaaatgggtaaatgaactttgttgatttggttcttggttacacaatttggaactattggtggggtatttgtaattactcaacccttacactgattataattatttttctaaatcattcctttacaaaaaatgtaccttctagagttaaatttaactagtataatctagttaatctaatctagaaatcactgaagttttttaagaattttttcaacaaatgcctaaaacatcctagagtaattgtcattgtagaaatgtaaaacaacttctaatagatttaattgagatcattcttttttttttgaagttggtaaaaacgggagaaaaaaaattaactgccgctcttgaagagtaataatattagcaatactgtgttttcaatgataaatttcattgagtttgaccattgaacctatagaagggtttgaaggattaacttgcccaaatagctctaaacatttagttagttataacttgactttcaaatccaacatgaacaagcaaaagaaccaaggtgtaactaagcatttctaaaaactcagtaaaaaggtctcaaaacaatgaatgtgtagttaagtaaagctcttaacacagtagatattgctgagattaaatattctgttaagaaaattaaagctctttcttaggaagattccccttataattaatcttccaagtccagtttttttttttcagaaaaagaaagaatgtagaataatcttcataaattgccataaattggtttttaatccaaaattctttttttaattaaacaacagattaaaataattaatggacaattagaaataacacaaaaatgaattctttgattaaagttgtcaataaacaaagtaagaaagatttaaatgaagcattcgatacagataacaatttcaatccaaaatcaaattatcctaatc

SEQ ID NO: 250428 - DNA, 689 bp, Cannabis indica
gaatagatatcatatcaaacgtagttggaccaataatttaacctttcttctttattcgttttctatataaacgtcctataatctaatatcctctctcactcactgctttcataattatattatatacagttttaattgtttcagaaaaattcggcaatggcggacgaggtgattctgttggatttctggcccagcatgttcggcatgagggctagagtagctttgaccgaaaaaggtgttcagtacgagtacagggaggaggatctgaagaacaaaagtcccctgcttctgaagatgaacccgattcacaagaagattccagtattgattcacaatggaaagcccgtatgtgagtcgctcgttattttgcagtacatcgatgaggtttggcctggaaaatctcctttgcttccttctgatccttacaagagagcacaagctcgcttttgggctgactacatcgacaagaaggtaactcttcttaatttttaagcattaaccctaacttattataatttgtttttctctttttaatttgggtttttgttaaatttgatttttgatgtgagatgttatactcacgcatgataactactcggaaatgaataaagtgaaattagtttttaagatcagtttttggactagtatagagcagagattattaaacggtttcaacaaatattgtgaat

SEQ ID NO: 250429 - DNA, 753 bp, Cannabis indica
aatagagttttatttagggcagagagcccaacaatatcttggtccttgagtgacatcaacttgcactacccctgccataccatcctctgaatatgccttactcacagagaagattcgatgagggatgctcgtggtctagctggatactcgcggagatgactagtttgtcattactctacttctaaagtaatcaaggtgatgcgtcttgcactcgtggatcataataccacatggcttactcttgaattgccacatattttgagagaaattggagacaacaaaacatcaaatctataccacgataaattttaaatttttcaatctaatttcaatcaacacaactttgaatatacaaattgaattagattaaattgcccgtataaaattgagtatttttatgaacaccccaattgtcaggggcaataacaaggtctaacattgcctctctttcaaggtctccacgcattcattattatttttttaaataagaattttctccaacacgtgattatttttattgaatctggcaggaaattgagacctaacattacaaggacatcaaatttcattgaaagaaactttctaattattattttttgatcaaaccaaccttcggtttcccgagatgtattaagaagaaaacttataactactaaagaaaatattacagataacgtataactgataataaagtttaagatgaagacatgattggcacaacaatagccgccacgtaaataagaaacgaaggtt

SEQ ID NO: 250430 - DNA, 601 bp, Cannabis indica
ctaatatgcctccaatgcaacgttgcagtgattgcattgcataaaaaatgtggttagaaattttttacggtgcgatggtgatttgtacttttttcaaaccacgtggtgcggtgcagtttataattttaaatttgataattgcggtttaaaccgtaccgcaccatatattataaaattactaatttttacaatataatttttattttattttcatttaagaataaatatatgttatatatgtatatattacattattttctaagagacaacttaatataatgatttgatgattagtatatatgttatgatattaaaactttaataagaattttttttttgtattgttaaaagtttatagattgattttaaaatttttattataatgttcgataataataatagtataaactgctcaaatcgcatcgcaccacattgcatttttgtagtgttttacggttttaatattttgtcgatacgattgcgatttgcgaaattacaaaaactgcatagcgatttagtttgaaaaaaaactttacaacccgcaccacctgcactataaacacccctagtcatgaatcacccaccactaaaaaaaatttag

SEQ ID NO: 250431 - DNA, 730 bp, Cannabis indica
aaaatatatatgtatactttaagtgtcagttgtaaaatgacaccaaaaatcaatagtgtcagtttagaatcgacaccaaaactttaatcttttgtcactgtggaataggtgtcgggtctatgaacagacactaaaagtgtaagtgtcagtttaaaactgatactaaaagtacaatttgtagtaatgataatttagtacgattgttatcgctatggttggtcgtttgattatttcttttcattctgattggacaatagggttgttatgtcccaattttattataagatcattggctgatagtcattaataggtgaattacatcagatgttcatttatttttacacatctttaatgcttgaccgctggtggcttattgaatccctagttaaggttgttgttagggttttcttccatgttattgtaaacgacttgtatgtctaatttctataattttgctttttgagctatacttttatgtaatgaactttgtccgatttacctattaatagatatttccattttctctaaaaaaaaaaatagtgaatatattttcataaatggtaattatttaattataagcataatggtgaatcaaaaaatttccataatcaaatgagctttactgttttgtaaggtaacatgtctagttttgtaagtggcttgctttttatttagtaaggccaatgtggctggctttattttgtatagaaaatgtggctagtattttttt

SEQ ID NO: 250432 - DNA, 1428 bp, Cannabis indica
aaaaatgccactaagggcaaaccattaaatcattctcctaagtagaggatgagagagaaagaccgtctacacaaagcttggagatagaccagctacacataaacgagaaagaccgtctgcacgcagagagccttgatctttgcacagaccatattctcctcatcatcaaatcccatttcctgaagccgagatctctttcccagccttaggaaatttctcaacactggagagaggctaacgcaaagatctcctggcacaggtagggatcttaggttggctagattctctgatagaaatcatgccaaattctttcccagatccacctgaaatcatgccaatcttcctttggaattcctcatcagcctgaagaggatctttgagatcgctcacaagatttataccgtttgggatcgcttgtgaggatcggccatggcaagccacagagtttccttagtttggattggtcggaagctcctcaaccctggaatccatcgttttcgactccggttgaggcttgaagtctgtaggaacaaatggaaaatggttggtgcatctgggtattatgagtctggaaggataaacttctgaactcaaaagagacattttggcaggaaggaagtaatccattctgaaaatggacttcactaaagagccagaagggttgtgaaaaatgacaagcatgagccgcccttttatacatgaagttcagtgacaagaaagttaaagattgggaaatctaactgttgggaatcgtacagaatatgaataggcgattcataatgatcttcgaaaccatacaaccgccagaatcaaaggaggagtcctttccaagaaaggattttggcaaaaatgccctccgtaattattaaaaagctctttttactaaaaaataactttttgaggggcaattgttatacccaaaatttggttgaaggacacgtgtcaagataaagggaatgtgaatcgatgccatatctttttatggaataactcattaattacgtaagtaccagagtatatttgcaacccgctaactgaaaggtcttaggcgaggaatcaatgtacgaactggctattgtattaacgagaaaccatatgtcgctaaaggagaatagcgaggcaccggagaaaagtaacacataccttaactacaataagcaaattaagtgtcaaagtcggattggctcgaagaacaagaatgtgagatgacaatctcgctacgaggaagcttcatattgttccatccaactaacaggagcgaggctcgtaacccttgcaagtcagaagatttgtgcatacccacgatcgatgcaaaacatatcttgtcaacctcggaaagaagaatggtaccagctcgccattgggatcacttcagtttggtttttgtcgagacatctccagattcaacaattaaagacgtgtttagta

SEQ ID NO: 250433 - DNA, 624 bp, Cannabis indica
gttcctttctttttagtttttgccttcatgtgtataaagatttgagagaaaacatataagcattaatacattattgtataacaaaagatttgagattcacaagaaaatttatcatatctgtaaaccattttgtgtcatagcctgactgattctcctcatcattagttacaatttttccatttatcgaattagatgactccattgaaatgctgaaattgacacaaccttaaataaaagtactctaatcttggagctgattcaatttcaacatgggacagtttacaagaaaggaaaggttcctcaaaagtgagacttttcaattgttgacttcaaattctccaaacgaggaatattaaaaataagagcttccaactatggctgatgatctttcgcgcaattacttaaagaaaggtttctaattttcttgcaagcttagaaattgagtttgtcaaagttaagctgacatagtttcaaagattcaaattttatggcttcaacttgtaatgtatacataatctttataagctcaaattccaagaacttgaggcttaaactttgtatttgaccggaacaatttttctttactattgatgatcagtttcgattacaaagttcaagccttag

SEQ ID NO: 250434 - DNA, 1398 bp, Cannabis indica
aacactagatgagtgtcattgagtcctgttggcatatactcattattgaaaaaatcagtgacaagttgagtaatatcagaaccaacagtatcccaatgtttttggtaaaagccagggctcataccatcaggtccaggagctttgtcgggatgcatttggaagatggcttgcttgacttcttcggctgtgatagggctgagtaagttgtcattttgcttaactgtgaccgaatgtcgaataccatgaactatagaaccacaaatagcacggtcagttgcataaagagctgagaaataatcaacaataacctgatctaacctagaattccagcctttccaaactccatcgttatcttggagttgcacaatttgattgtttcgtttccgagagcttgcagtggcacgaaaatatttacttgttttgtcccctccatttaaccagaactgcttggaccgttgtttccaataaatttcttgctgagctagagtctcgaaatagctgcattgttcattgataaactcatcacatgaatctggattaacacttgtctttagccttgctaattttttcttgctagttgatagtttctttttaaagttcccagtgagaccacggccccaatcaatcaaagttgcaagacaatgttttgttttttcaacaagagacatatgtgcattaacctcccaacaatttttgacaatttgaccacataaaggctctctagaccaagcattttcgtagcgaaaaacagtgactggtttactcatagcaacaggggcaggttcaagaataattggtgtatgatcggaggacgaaaatttaaagtttgacaaactagcttcattgaaaatagataaccaagattgagtagcaaaagctttgtctaaccttatttcaatatgtttttgagtccctttgccacgctcccatgtatacttgtaaccacacaattgaagctcacacaatcggcagtcttgaagcaccgcattcaagccattgatgagagtttcaggatagggccggccccctctcttgtcttcgtgtgaggtgatattgttgaagtcgccaaggatgcaccacagcaaagttgagtcttcggcaaattcacacaagagtgcccaagttgtatgacgaagagtgcggtttggctcgccatagaatcctgtaagtcgccatcgatcgtaaccaggaacatgaatttccaagtcaatatgatgggccgagtatttgagaagatgagcatcagatgaatttctccataaaaagctaaacctccttttctaccttgggctggcacagtaaagcaattttcaaagcccaatctaactttgagcctatccataatgtcattattgttggaagttattttaccaggaacttagatctactcacaagtat

SEQ ID NO: 250435 - DNA, 1090 bp, Cannabis indica
agccatactccctattttatctggagttcacaacaatatacttcaaagtttcagaaatacgaggtagaagcaatccatatacggagttaagagaatattgaatttcaaacagacttttttaacagaaaagagaaagttttgtgaaacaaagacgatatcgtagttatagtgctgtgaaagaacaacaacattggaagtcgatttgagagttaaagtcgcagttgtggaagctgtataccgagttatttgaataaattttgaggacgaaatttctataacgagggatagttgtactatcccaaaaaatatgttgatatttaaattggacatattctattaaatatgtgattaagtgggtattagagtaggactagaatcctacttaaactaattatgagtttattagggagataagaataaataaagcgtaatttattaattacagagattatattggaatatgtggatatcgtagataccataatttgaataaattattctcaggcctggcaactgtggaacttgtcgaggaggtcagaaatgtcacgacaataaaagatgaattgaattagattttataccggactagtttagagtttcaggttgttggtttggcggattagatagaattactaaaatacccctaggcttttattttaagttaaaggtattaggaggggtattatggtcatttgagtggtgataaaagttttgtctttagtgttaattaggttgaaatggattattggacataagtttaattgtttttatttatttattaaactattaggtgtaaaacaaaaataggcaagtcacataccttcacttttattcttcttctaacacgaaaccctaaggagctacaaaccaaggatttctatttcttattcttcagctcttggatcagattggaaggggtagaagcttgtttagacattaaggtaagatcttgaagctttattcttgaattacttagggtttaagtaagaaaggttgattttctttaaggatttcgagctgtatgtttgtattcaatttaggggttgtgtttttagatttgttttgaagtgtgttgaagtttgaattgaat

SEQ ID NO: 250436 - DNA, 802 bp, Cannabis indica
ttttagtaaatctaagatcctggtaaaataattccaacaataataactataatacaacatatccgaagcttcaaaacacaacaattcaatcattgaatcaaaatcatatgctcaagtgaaagaaactcaacttttagcttcatctagcacgattcaaaccaaacaaccaaagaaacctctcaaaacaatctccaacatactcaaaaacctatcctaaacacaccctaatcttagtttagttactacagccacataaaagcaaaaccctaccttaaaaccaactcaaaacctagaattttcaatccaaagagtaaggaacttacctcaaaacacctctaggttgacttggagttagaaagtagcttgaaaagaaggatttgttggagaaaattccccaaggctggctggttctaggcttgcacgaaggaggaggcgaagttgaagctttggtgccttagcttctaagtaaacttaaataaaataagtttcttttcttttgttcatttttttaattagtcatcccacaaagtcaaaaggttcaaaatacctatttgtaaaatgagtaatctgcctctcaaggaaaatttaaactttaaaataacctaggggtattatggtaatttcattaatccatctattaatgatccaagtaagatctatctagtccagaataccctcaaaataatctatctattaatgtcatgacatttctgaccacatcgtcaagtttctacaatcgctgggcccgaaaaatatttttattttaaaataagtatccacgatacccacatatctcaatata

SEQ ID NO: 250437 - DNA, 752 bp, Cannabis indica
ccccagcccagcatactcccgcgcagacagtatgcaatgcatattgtccgtgccacatgcaaaattttcaaattttttcaattcttcatcttttttcatggattttaattttgattttttggtagattttttgtgtagaattttattttcaaatttcaaatctaattatcagtttaaaattaataattatttatttaactaattttagatattagtagattttgaacatagaaaaggatatattctaaaaaatttctttattaattaattttttttttaatttgatcatttgttatcttattttaaacctaaggtaagatatttatatgttatttatttaaataattttataaaatgaccatatttaaaattaaaatatgatataatttaaaaagataatctagataattttaaaaaactaactagatattttttaatttttaaaagttagttatcttatttaaatttaaattatgagattaaaaaaatgataattatttatcgctttatcttattagatatttaattttatgttttaaaagtaacataattttgaaaagtcagttgatcatattgaaaagatatttagtgttgttacaatcgtaatttttaaattatgggtttaatttaaaattaaataaattccataaccatctatcctatcttgttacatgtttatttatttattatttatttaaaatattttttcataaatctatgatttatttgatttaaattggtataattaacct

SEQ ID NO: 250438 - DNA, 907 bp, Cannabis indica
tgcggaattgagaatgaaactatagagcacctgttcctccagtacaacttggcttatcacttatggcggtcttctccttggggcatctttcctattgttgattctggtattcgtatgtggtactgagttaagtttatttggagccttaaggataggggtattgatgttaatgaggtgtttatctggcgggctagaaatgacaaagttcacaatgataatttgggtaacatcaaatactttattgattttatcctttcttgttacatagaccacaaagctactctcattcgcactctcactccgactcaaacaaatgttaggcagccccctccgcaggactggatcaaatttataaactgcgatgttagagtggagttgaagtttatgtgtattgttgtcgttgctagagatcaccaggggatgttttgttgggccgccactgccagacttgattttttaaaccctctttgtggtgaggttgctgcctgttgcttggctttagagatggtggcagaaaagagttgtaattttgtaacctgtattctgatctattgttatattttttatggatactctaattctctagaaagaaaaaaaaaacaccaccatcaacataaattatcacccttaatcatgtcttacatttattgtatttacctaaagtttatttatttattttttttttagaaaagatagaaattctcattaagtgacatctggcgaggaaaatgagtcaaacgactcaaacacaatctagtaaatttggattatcaaaagaaaaaaaaatctagtaaatttggtaaccaaatcataggactgtttaaagataaagctaataagtgagggagagtatgagctttggtattcttagtaccataatacatgtgttgccctctattttgcccaa

SEQ ID NO: 250439 - DNA, 755 bp, Cannabis indica
acacaaaaatttttaggccaaaacatagctaatcttcttttaactcctctttgatcttacacacccattgatctcctttcttacagtcgaattttagagtatcatttctaacatgctaaatataatacatgtccaatgctgcaatagcagcagatagaacttactgattttttgcctgtacaatccacctcatgagtttgcataatgagcttgatttagcttcccaacatagccatcatttcaccagttttagacaaaccagagagaaggaacaattgaagaatagatgctccattgtttctaggtgtgacctgtagaaaagacagtgatcctcatcgataatgttgtgtttctgcagtctctcctttgttcgtaacttgtcttgaatagttatccatgagacaaaggtcttagtctaccccatatttcttgactctaattgaccttattttgaatagtttttatttaaaattttaaattaattgaaaaaattactaaacaacttgaactagtctcgaactgacatactgatttagcatttaaagtattgaaaatagaattgagtgtagaattatctctaattagagaccattcttattctttttattaattaatgttatgtatgtgtaataattttaaattataaagaattttgttaaaatatttcaataattaattaagtgaaaaaattaatggttaaaaaattcttacttaataacaaattacaaaaagttagttaataattatttataatt

SEQ ID NO: 250440 - DNA, 1138 bp, Cannabis indica
ataaagctataacgtcttcaaacaactcttcgttacattgaaaaataccttccccttataatagttgccgtcagagatagcgaaactaaaaaaaacataataacaccaaaatcaaaaattatattagaatggaaatcttcaaaataaaattaaaatacaaacttagaattcaacacacaacctaaaacacaagctcaacaatactaaaaaactaaaaaacaacaaaatttctaagtataactagccaaaggtattaccttttggctagtgacaacaaactagcaccctaatttaaaactgctgaaaattaatatcaaacagattatatttaaaataaaacttatcagaaaattctctgtaagtataggccctccacaaaacaacctacaaaataacaaaaaataaactctattactagacaatataatgaaaaaagttaatgtgaaaaaaacgatggtaaaccaatccatattaaaaataaagacttaaaaagacttgaaatacttatctattaaaactgaaaaagttgttaaagtagaaattatgagctcaaaatagattatttctcttgtccattgaccataacacaaaactatcctaaacaaataaagacaagccaaaacaatggcacaaataccataaaaggcacaaagccgtaaaaggcataaaaccatggcaaaaatgtcctgtacgttaataatttttattccattgtttattaaaataaagagtgggatgaaaaagggtttaaaaaatgtacccttctaattgagaaatttgaattttaatgcaatattaagaaaaaaatgaaaaaattgaatcaatattaatgcatattgagaaaatggatatgcgtacttaaaatgcccttgtatacactcttcgccctctcagtcgtccgctctctttctcacttcacttcttttctcaaaacctcatcaactctcattctctctaacaaattctcactaaaaatttatttttagtatacaattaacttttccaacctaatacaaagtataagaagttaaagagtttggtctattcttggagcaccgaacaaacttagacaacaatcaataggtaagtgattttttgttttttgttattgctccttatatttagtttataatgttat

SEQ ID NO: 250441 - DNA, 938 bp, Cannabis indica
tagtgtgtaagactgtgaagaatccaaacatctgaaggagtatcgggctcaaatcttgataatactctgcaacagaaaccaacaagggttagagatctatgtgggaggattcataatattcagctacaatcaatgtaaggttactcaaactttatatgtgtttaaattcgattgttttagaaattcatatttagtatattaataaacatacttgttagtatatctagatcctgataaaatatattccaatagagtagtaggatcataatcccacttattacctgattagctcataatatatataaactctaattattcaccattagatttattgggatattacacatcagagccaacagtgcgtggttctctagtttggctgacttgacagacgacttctcttagtctggataactcgagatctccttccaagtctagatagggctcgccaatggctggctcgcaaattcttagccctgtctctccagcataatactggggaccagatctagttgtcgtgcctaaaggttgctcctcatgggttcctccatcattagaaggtgccaatggagggtcctccctaggcgacataggtcaattattgagacccactagaatagttgtgtcgatctggctagttgtcactactacaaaaatggccttttgcttcagtttttaagtgacatataaagaatttgtgtcggtttgtgtaaccgatgctataaccgtagacgaaaatagtcttattttttgcttcacttagtaacatatgctaaaagtcttttgcttccgtttataaccgaagcaaatagtacagcaatgatgcaaattagcttttttgcttcagttatgagctgaagcaaaagaataaaaaaactaaaaaaacataaaactttcagaccaccacaacctttcagaccaccacaacaacccaacaa

SEQ ID NO: 250442 - DNA, 1652 bp, Cannabis indica
catgtaattgagatttatatatctgaaaagactataaattacttgagtaaacctgctattgcatagaatttggtaataggaattaaatcatgttaaaccatatcaatagatacaattgaaatcgaaaatcctaaattttaattattgttaatttacctatttattatttgcttcttatttttactgtttctttattattaattttaattttctcttaattttgatatagacaaataaaaataaagatttaattttaaagtacttaactacttgtgggatcgaccttactctttgtaagtctattatttgtttacaaagtgaatgtgaatgtgaatgaacatattgtgaacacaacacaagctattactctaaatcatgtcccgaatcgacaggcttctgtattaaccttggattggcacacaaacttggatacctttgtgtgtgttagcagaatataatgtatcaaagattgctaaactttgatacaatagctgttaattaagacagctggcttaactaattggtggcttatttttataattaaatagtgttgactatctaaatttatttatattaattaaaatgatcaaatctcaaagtttgatctcttctatttatttatattatataatcaaagacgtgaaggcacatgtaattacttataattagccatgcagctaccaccactcatattcaattatcatatatataattagttatgtcaaacaaactcctaataatcaaactcatatatatatatatatatatgcttttgtaattattactttgtgttcatcaatcaatcaatcttctctgtaatccttttctgagtttctgaagatctgatatggctgaattggttggaggagctgttctctctgctttgctcaatccattggtgaacaagttaactagtgaggtgaaggacttcttcaaaggaaaagatgccattctcaagctgttgaaggagctcaaaactttgctgtcctctgctgatctgctgctcattgatgctgaggagaagctcatcaaagacccaagagtaaggaagtggcttgatgatctcaaggatgtcatttatgatgcagacgacttggtttacaagatcgacactgaagcatcacgaaacgaactggaaggtggtgctcctcatgaaactcatagcgactgcagttgtactagtaaggtactaataaaccaattacctttacgattaaaagaaaataatagtttaaccttgtgtaatatattatatatattttctaaaagaatctgtaaatcagtttattcaagttatatttcaatccacccattggatattaactggttggtttagattttattggttgattttttttggatttggtttagagaatttatttagaattgagtgtgttgtaaacatacaacacaatcaaagtttggtagattctatctcagaaagtaatgaacaacaaaataaaccaggaataggataaaagaaatgcacaaaacacaactaagtttatactggttcggcctaatcaatagcctacttcatttcctccaagaagtttcactttgagcaaaacaatttgttacaaacttgtctcagatcaatagagatcgatctgagaacacaacatgtataacccttttacacccaagaactt

SEQ ID NO: 250443 - DNA, 563 bp, Cannabis indica
taattatatatatataaattaaactaaataattatataaataagtaacttttatatgaaaaaataattaaatgattttattaataattattttaaactcggcaaagattgaaaaatgcaaaaatgtatgttgcatttacttttaaaaaaattacagctaattgagcaaaattaagtttattaattactcacataaaaaattaataatattaattttggaacaaactaaagcaaaagaatagtgatctatataatgtaaaagtatatcacccataatgatttttaaaccatgtggtacttttttaacttgacactcataataccaaaagtacaaaaaatatttaaaaatgtgaaaaaataagaaaaaaaaaaaagcaaagaaaactcacataagatgccacaaaaatatgtgaaaataaataatattaatttttagaacaaataaaatgtatataacctataaaatttaacattcacaatagtctcataagcacatataaaattatatatatttaaagagtcttattattctaataaaatatcatgtattaataaattaatata

SEQ ID NO: 250444 - DNA, 927 bp, Cannabis indica
gaacagtatttccacatacgtaactctatctacatctcttcatgatttaatatgaacaaattcaatcattaaaaattttgaaaaacaacgaaatacaccaggataaatattttactatagtattgattgaatttttttttggattatacttgagcttgattgtttaggaactccagttcaactttttgagatatgcatttcatgaatctgaaaattgaagtcaggacattagttttatgcaaattaaactggattttctgggtgaatttagtagtttttctatacttttttttttcatgaattcgaaacatctcctattttaattgattctggttgtcttctcagggtgaagtcgctggaattaatggtggttttctttttggttggattttcatttggattgcgttgggttgatgcgtggttgtctgatggttgttgcgtggttcgcccgatagttgcctaggaagcatgaatccttggttgaaggtggtgtaagtggttatttgtgttaattttttttatttaggctgtatatttatttatttggtcaactggaagttattttgtaatattatttaagttttttttaggttaaaactgtaaaaaaaaaaaaaaactaaaggctaattgtgtaattcagttagtgaaatccttaaaagatattgtcactttaatataggttatggattaaagataacctcacactactaaaaaattaggttatttaaacaccctaatcttagcagttctatgtgtaattgctaagattggtacatttaaaaataatgtttttgaaacccatgatctcggcgggccacccgtgaacctccgagattagtaccctatctcatgcgtttcacgggtagcccatcaagattgggtctaaaaaaatcaaaaccatgtcccatttccataacctaaacttct

SEQ ID NO: 250445 - DNA, 859 bp, Cannabis indica
ttaatgctaccattgactttcatgtacacgagcgtgataacaattttagtgaaagagcaacaaagcttttaactcttacctcaactttggatctaaaagatgcttttaaatcttacagtattgatgatatatgttgtcttgcaaagagtattatcctcttgatttttttgagaatgagaaaattaatataaggtttcaattgaagcattttgaacttgatgtgcttactaatccaaagtttcgaaatttgtcattgatcgcaaaattatgttgaagattaatagagacagagaaatcaaagatatactatcttattgataaactaatttaccttgttttaactctttcagtatctacagcggttagtgaacaagcattttcaactatggagattactaaaacaaggctccgacataaaattgaaaatgattttctagcaaacaatttaattgcctatattaaaagagagatagctgagaaatttgatttaaattcaatacttgatgattttgtttctttaaaagaatgtaggttacaattttagacaatgtattattttgtataatctatatttatacctgtttttatattttcttttgtatatgttacattattttatatgcgttggataaagttatttaactttttatattaatttatataatactatatactgaaaaaattaagtaaaaatacattttatttgcccctttttattccgtcgattggttctgccactgttctcatcatttctcaacttttatccatcttactctccttgccttttactaagtataaactattttttttagggataattacataaggtattaatttttgtaaaaaaattatattttta

SEQ ID NO: 250446 - DNA, 1006 bp, Cannabis indica
atataacaacaacaaacaagattgttcaaacaaaaaaaaaattacccataagttagtgtatgatgctcgtccaaaaatgagagaaattatgtggtgagccttgtggtgtgccttgtgcagtgtggtgctagtgtagtgaggatgagaatagaggagcaaaatttgaccttccctctgtgtagcttcgggcaggttagagaaaagaagagagagggaaagagagaagaagtgataggggggtgaaggaaaaaacagagggtattttgggcataatagaaaaattgtcatatattttaaatatagggtattatgagttttgaggataaattttaattaaatgcaagcatacaaattcaaatttccctaacaaaaagtatattggataatttaaattagttatttattcttttggtcaaaaactaaaatataggtagcatttggtaatatttttgtttttaaatttttaatcacaaaaatttttctttttgaaaacagataacaaaagtgtgttctgtaaatttcattttcattttattttttttaattttatttaatttgatttcggggtcagttttgggctcaaggttgggggcagggtctgggatcggttttgaggccagggccgagggtagagccaggatctgggttcgagttagaggtcaaggtcgaggtcgaggttcgggtacggggccagggaccgggtttggatgcaagtctcaatgtccaagttgggattggaatctaaaatattaattaaaaaatatttaaaaataattacaatgtattttattttattttattttttaaaaaatttgattcttaattaaaaagtaaaaataattttataaaaaatatcttttgaaaatatttttacgtttatagctctatcaaacaaattaattgtcatgggtgtgtataattaaataaatatatgttaaaggaatactacaaattacatatatatgtgaattattaattataataaagcctagggtttattggctgc

SEQ ID NO: 250447 - DNA, 1171 bp, Cannabis indica
gttaaatgatcgtatgtaaagagatagagattgaaaataaatgcacattgaaatagaatttacacctagtgagttctattacagaaaattgacaaataaaagcagagtgttcccaaaattaccttaataagcagaaaagaactgattcaaagattggagtaagagatcctcgattcctgatgaaagatttaaaagccaaatttcgatttaactctaaagaagaaaagggtttctcagaagagaaaaatcggaaagaaaatatagattatagagggaacaactgaggtctttttttcacattatatacaagtcacacgtatcaaatttctgccaacactaacttttttttgttttttattattttaaaaaaaaaatagtataaacttaatatttattttaacaggataaatttaatatttattttttagcaacataaatatttaatatttataaaattttaattttcttttaatttcgtcaatatagattctgttttaaatttatcaaaaaaaaatatttaaaagtaactaatagtacatatttttttctagaccgaaaaaaattataattttacaaatattagtacttatactattaaaaataaatattgagtttatactctttacaaacttaaaattttttatatgctgctattttctcttttaaaagtaatgttatcctattttgctaattaaattttaatttttatgctaggtattacttcttaattaaaaaaatgaattgattcaattttaggtgaggtataatgctattttcttcaatataaagaagagaaagatgaaaaaatgtcgaaaacatgactccatctaatgacatattagaatcaaaattagagcagtgcacatttttcctcgtaagacccacaagagggctccactggatttatgaaaatgcaactttttatatttaaaatcatagactaaaaaacaaaacaaaatgaacttaatttcttttggaagtagaagtagaaggataataaattcatataattaattaaataatttacatgtattgcataattatatatgataaattttgtgatagagttatatcctaataaaatcttatataaaactaaaaaagctcattgagcagaaactaaaaaactaagaagaaaattttaaaagtgagatgttgaattggcatggtg

SEQ ID NO: 250448 - DNA, 1213 bp, Cannabis indica
acattgactgcgacatgaccaggctagctcactatttggcaggctaatctaatagaatggatgtcaggcggaacacgagaagccagtataattcagttggatcctgtggcggtcaaggagttcaacttcccccaaatgttcatggccgaggcagaggcctaaagggtagggcactcgatcggggtaatgttaacccactgcaggctgcccaagattaggaaaataggtttcctgatatgcaagccaggattagtgcacaagatgaagaaatccaacgattaagacagcaaaatgctcctgtaatgcttgatcctgatatgcaaatggctcttgcctctgttatgcaggtggggccagttaatgttgtcaaatggaaccactatatgaaatgttttgtaagcaggcacctccagtcttcttgggaggtccagatatcatgaaagtcaagcaatggttaactattattaatagatttttgaactttatggaagtcactggcaatgacaggacgacttgtgctaccttccagttctaggaagatgccctgttttggtgggacatgacatctctcactcaggacgtcattgaaattacatgagaagagttttaagaattgtttaatgcaaagtactacaacaaagcagtctatagtgcaaagagaaaggtattcactcagttgacccaaaaagagaatatcttggttacataatacacaacacagtttgatatattggctaggttggcctcgggaattatgttaactgattttagcaagaaagaaaataatctggatgggttgaatcccaagattaaatgaaactccacatttgtattctgcctgtcattttctctaggagcccttggcattccactctggatagtcttttagaacaaataggaatacccaagtacctaaaaggcaagtgctctgcatgcttgattttaggccttttttcttattcttgtggagtctcatgcgagagctaccttgtggcagtgttctccatggaccaactttatgcactttatcatttgtatgagaacatatttgtgtttatatctcttttgccacatacatttattttggttatgtattgacacttgggcccacatgggtggcttaactcatgtctacttagtgtggagtgctcgctagttaaactaacaagtttttttacatctttggaaccttttaagtatatataacttagtt

SEQ ID NO: 250449 - DNA, 709 bp, Cannabis indica
ttccatctcaaaactaattcgtaatagaaagagtagctcattcatcttatatatgacaatttattttcacacattaacaatgtgagactaactctaatacactctcttcacgtttgggcttaaaaagtgtgggtataacaaacaacctttaaaagactacatggtcgaatgtgacatttgaaagaatctcacaaggtcaaatattgagaaatttgtaggtgtattaagttgagaagtacctttttttttgtatccattaataaaaaaataccctcatattatgtttcattaaaatctactaatttttatgagtgagttgtctaatttatccttgccctccacctaagtgtagcacatgatttatattaatgtaaggggtataatgaagacatcatttataaaagtgggtatattttaaagaatatgaaaaatgaaggtaaaaatgaaaactaataaagtaaagtgggtatacaatgcaatttacacttaggaaatttatggattttgaaacaggccaaataccccaacactagaaactggcacacattggccaaaatgacccaaatagaggttaaagggaagatagcgaaagtttttaagtttagcttgtctttttggaagagcggcattttgggctcataacggatcacaagaggctctgataccatgttagaatttaggataagatgaatgatgtttcatctcaaaa

SEQ ID NO: 250450 - DNA, 878 bp, Cannabis indica
ttgaaacagagttttatttagggcataaaacccaacagacgtggccacggcgatggaacatctcgccgccgctactgacctagctcagaaccgtctctctgcccagagtatttagccgcagccaggaatagggtcaccgcggccagaagtgtaccaaaccttaattttgcgtttttcttagctccacttgtcttttgctgcacttttgtggctcggagcttccatagctttgagaaacctgaaaacatagaatacaagcgtaattctgtcctaaaacatcgaaaagcgaacataattatgacccgaaacataggctaaaaatagcctaacagtctgggtctgggttcgggtcccgagtcgggtctgggtccgggtccatgttcgagtgggtctgggtcttgggtccaagtctgggtctcgagtctaggttcgggtccaagtctggcttcaggtccgggttcgaggtccgggtcctgggttcgggtctcgggtgccgagtccaggttcgggtctgggtctgggtccagggtccggggtccgagtccgagtctgggtctgggtctgggtccgggtcctaggttcgggtctgtgttcgggtcccgagtccgggtccaggtcaaagattgatgttgacccgaaatcttttataaatattataatacaagctaatacggaccatttattatgtattatataatacaaaatacattgtattaaaaaatttggtagtgttatttattatttaatacaatacgactgttatacagcgtactaaacgagccctaaatataaagtacaaatcccatcatattaacgttaaatagactaacaggtaattaaattacatttattaatgttaggagggaaataataagagt

SEQ ID NO: 250451 - DNA, 6342 bp, Cannabis indica
accaagattgcttcatgattgtaccttgttttatggttgggggtataatatatgcaacttttaatgtaaataaaatatacatatttaacaattacctcctttggctgttggaatattgtttcaaaacttgaaatgtactgctgcttttgaagtatcttatatatgtcttttgaatttttttttttaatttatttatttatctatttttgaaaaggtatatgtcattgctgttgtgtttcatttatttttccactaatattgtcattcatttattactgttgttttttcatcatattatatatatttttcaaaagatatatgtcattgtattgctgatgtttttcattcattttttttaagcagagattaacatgttgagaattaatgtttttaattaataatgccttgaagagaatgtagaatgctaccatactgaaaaagctcattctaaggatgtcatttttgtcaaatttggattaaaactagcataaaatttagtatacgtgcctcgcacgtagttttttgctagtatatatatatatatgtatattatttactcatcttttgtatttccctgccgctccaacaactctactcttcattaaataaggtttcactcaaagaggaaatccattaaactaatggccgtatctttgaatcatcatatatatgtggatacatacatgtacatacacacataaaatgtacaatatgtttagtaagaaaaagagaggaaatacgctagcgtgggacggctggcaattaagaatgacaaaatatttgaagtccatgttcaataattgcaccacgaaaatttatagaggtaaattaatacacattatattattataaggttgagatgcgaataagtgtactcggtttagtcagactaagatgtatgcatgattctcgactctctttactctttaccctagaaactagaaagaacattgatgtggttagatatctatgtctcgagtcaacaattataatttatttggtgtacatttttaataatggacatcctcaaattaatttatatggtcttccctatcaaaataataataataataataataataataatttatatggttttgactttgtttctttttaatatttggttttaactttttttttattattattttaataaattataaaagttaattaacgacatcttttttattaaagacaccaccaggattaaaattaaaaaaacgagttaaataatgagctgcctaatttacaaatcgtttgataaaaaaaattaaaatgaaatcacaaaaagattgcaacatcacaattaacatttagaatataaatgttctgtttcattcaccactaagaagatactagtggacactgttgcagcaggttcattcaaccttgtacgtagcttgagcacgtaactaatgtgtaaggtacataattgtactactaacaactcccaattagtcgctaagaacttgttattcctaaccactaacaataatttaatgacgagccatcgaagaataaagaggaaccacgaacaatgaaacaaaatcatgtcacaagaacaagactaattacagtagaaaaatcgaattgcaatagcaaaacacaatcctgagcaagccgcacctaagccctaggaaggccggcgggcctagccagagaaaaaagacaatctcggtcgatagctataaatttaggaacgagaaactctaatttttctccatattattaacccttgagagagagagagttttaaatgtttcctaatttttttttctcttttttaaaatgagaaaacctataatacacttctcttttaatctttttatagtatatatacatttttcggtcccacaaacaaatatttctagcctcccaaatatattacactaaagcatttatactttacacataaatttacccagaatttagtaagattggctcttttagtcctctttaaacacacttcaagagatctatgttttgtctgaaaacaaagctatctgaaaataacatcagccatcctattgcaatatctgcaattaaaaaaatataattgtggttcctcctaacaaaacaaacagaaatcctctgttaagactctaaaacgaaccattcgatctctagtatgtaatctttgaagactttttttttttatttatttaagcgcttatatattacaaccatgttatgtaatctttgaagacaagccaaccatattatgaacttgtattttggataactatagcgattccaaatatacttaaactacacattaggtaaggatcatttcggccaaagcttcaaacaaagttgaaagatagtgtattttctgcaaaactcaatcaactctattttatatttaatgatatttttgaccttaaaaatctttttcaagtaacagttactcctggtggagcattataactccactaatcctcatttttaagataaacttaattagtgtatccatctcacccacaaacaatctttatttgaagcaatgtcccacaaatacctacccaaagcaccaatattttattgcttattgctaatgctcaaacctcccaagtcttttggtaaacatagctgattccaagcaataagtcaggagcatctgaagtataagcactttttcagaagaaagttatacaaatactactagtctattttaaaaatatatttcagaataattagtaattgtgcctaatatgaatagccatcaaaacagagttatattagttagagtgcatagcccaacatatataagagatgtgtctagagctccacacgataattctagcaatcatcttctgatcaatgatatggtatcacactctaattttgaattttttaagtaaattgagattctgagatgcttaaaagggacactgcttttaataaaacctaattaagctctccaaaataaactactcatccaccttagtcaagcccaaacaataaacagacatcttattcttgttagcctataaaccagaagtagagtgatcaattatgttaatttttttctttttgtttttttttaagaaatcaataatgtcaaatgaatatacaaaaatttaaagttatggttatatttgtttaatctttgtttaagaaaaaatatatggatttgagattggatattcatacaacaaatttttttacttttagtcacaacaaaccttgtgactaaaagtaaaaaaaaaattgtgactaattataaattattatttctatgttatgactaaaaagtctgtggctaaaggtatagtaataaaaattacaattattgtgactaaatgtatttttagtcaaaatcaatatatttttagccataatacttgttgtgactaaaactaaattagtgacaacttgtaactaaatactatgttattttaccaataacattttgctgtggctaaaagtcacatttagtcacaaaaaaataatgttatgactaaaaaattatcactaaaagtagcagctttttgtagtgccattatataacattaattagcatattcataattcactattataaaaacctctttttatgtccatcaaagttgactagataagtttttccgatctattttgcgttggacatgttatccagggacataaaaatggtatttttctattccaatattgatggacgtgctattgggacccacaatgagaacccttttctagtccagttttgttgaacatgtctcaatttttttttttaaaaaaatactaaattataaataatttaaatcaataatatgaaataatttatatattttcaaaatagtaaattacaaaaatatttttaattctaccaatcataatatcattattataattattatttgatggaaacaaaaaaattcaaatgttacaaagaagaataccaatcactatcagtctatcattatagtgcacatccctcgaaatattatccagctttagctcccatgaacaacaattaacaaggtcccattttacgacattatgagcacaaaaattataatctgtaggaataaaactaaaattaaagcgagtaaacagaaaaaaaaaaaagacttttaatgttcaaaacacaagcattagatttcccacaactcagataattctttcaaacaatcaataacaattttagagtcaccctccacaaatatcattgttaaacaacgctattacaaaaatgcatttttgctttaattttaaagtgacacattaagaatttgtgtcggttggtaaaactgacgtaatatctatagatgcaaatagtcttattttttgcttcacttgctagctgaagcaaaaacttttgtacttcagttcagaaccgatgcatatagtacaacactattggcgttagttctaagctcaagtaaaaatatttgcttcaaactataactgacgctaattgatttattgcgtcagttacagtttgacgcatatgtacacaaaaatatgtgttctttctactttttgtgttggttacaaaataatgcatagttgtaggtaagagaaaattgcagagttttccttgcaaatttctctataattttctccacctaaatttttagattttagaattaatttgtataacaatatatttttatgcactaacattaaagtttgtagtataataacaatgacaattttcatgtaaccaaaaaaaattaatataactataaagtataccactaaaactaatatagccaaaagtagcgatcaaaaaagttgtatcctacacgtcataacaaaaaaaatatataactatatcctacatgtatcataaaaaaaaagtaaagtaataaccatgtactcattccttcaatatattagacttcacaaaaattgaccattcatctcatatttcgtttatctcatgattgttgtaagattgctcactgtcaaactgtaaaactaaagatagtacatccttatgacaggcatctttttccgctggtaatcgtgtttgccagtgtttcgtctcgccatcaaaggttatagctttctttgtattgataaatcttaattttagtcataacaaatatttgtgacactaaaagtaaagtaagaaaaaaaatatacttatacatataaatctatcattaaaaatagtattcctttattactcaagagtttgtagctaaataatattaattaaacaaaatatggaaaaaaaaatctcattttcttcctatagatactatatatgaaagaaaaaaaaaatatctaacactacaatttgattttggagttgcacgtagtttgaatatctctatcattaacgttaaacgagatattacaagagctaaatgttgtagcatgcatcctaagaatcttaaacaaaatcacttttccatgcaaactagatgtggacgtcaaatgcaagcttccagaaacgacgtcgtccacaaaattgggattggatattaattttcccatcataaaatctgcagaagaagtcatattaagtttgccacgtgcagggacgaggttatgctgtatttgagcttcagcaacaacgtctccatggtaataaacataagctatggcgttgttgaacttaaagcttccgtagttctttcgattatcgattgttacgatcacatctatactaacattcaatgatgttatatttggtgagaaagagtttttaatgtcttcgaaatgggtagatatttcggcctctcttggcttgaagacagtgaggcacaaggcggtgaacacggcagcgatgatcagaatcgaggccaccgctgccatgcagcagattatgaggcatcggcggccgctacgcctggaagtaccagtgggtttagatttcatggttgatgttgatgaaggtcttttcagaatatttgtgaagacaaaatatgtaaatcatataataactgataaggttatctagctttattcggtggtagggagaggtatatgagatgggtttataaagaggttgttatataacatataactattggtacagataattacttgtacgtattaaattggtagaataggcttccatatttaattgaaaatgtcctttgaaaactatattagagttcatgaaaaattatttttagcggtctttatataataatgatttgatagtatattaacatttgatattcgatgatttggcttaaaaggagtactgttgatcgaataagaaggcaagttagaaattattaaatagtgtcattatagtggaaagcacgtgtaattaattaagtttgaagatggagactacaaatatatcatataattttgaaggttgatttgtttcgttatgtttattatcatatatattaattaacgtgttctctgatttta

SEQ ID NO: 250452 - DNA, 532 bp, Cannabis indica
ctattctctcatttaacatgtttgtctatcttattgttttattttttatttaattctctcattaaagtttcctcaaatctcatatcattcatttcattaatttcaaatccacaacttaaaatgctgtcatttataatgccatttttagtttattttgatatttcagtaacttatctcaagatcaatcatataagcacatatatatatatatagtgactacttagataaaattaataatgactaattattcatattttgtacagtgatttcaactaaatagcaggactctaagattgttccaagaagtgtgttgagagcttgggtctcctaaagatagactgtttagttagttttgtgagatactgagataaatacacaatttctacactgcctcattactttcattcacatattttccttttttccatataacatattgttgtaaatttgtaacactacctttactttctttgaataaaaaaatatatagttttttgtgtaaggaaaaactaaaaactgctttttaaaaaag

SEQ ID NO: 250453 - DNA, 775 bp, Cannabis indica
tatttaagatattcaaactctactataacatgcataaatatattaaataataacataaactgttagaatttattttaccaagatcttgatttactaacatgtatgtttcattgacaccctaaatatgaattctctaatacaatgaaattaaatatataagagtttacaaaatcttacattgatgaagcggaataatatgactccttccgctcagatctctaacccttgtttctttctgtcgcagagtaataacaagatctgagcctggatatccttctctccttcggtttagttaaccaccgtcttccgcactatgataaagtacttgacttgctatgtgtggacatgatactctatcactatagctcgaattgttgaagaacaatgaataaggtgtaaaatcactatataaaaggagtctctcatctactaattgtcaaagaatgaaaactgggtttaatttagttgaagtgagttattggatgagaatgagagcatccttttatagtatttcaactagggtttaggatttaattatatggattaacaaagaataaaataatgggcaaaaattcactaagtgactgaccacactaataggcctcactagttacaattttgccactttattttaattatttattcttctttcaataatactacatttctaatttcaatctataaatgtcaaaaaactattatttaataattataattaattatcaaataaaattgtcatttatttttattaatagacttaacaaagtctctaaat

SEQ ID NO: 250454 - DNA, 604 bp, Cannabis indica
taaaaaaaaaattaacatagataaaaattcaagaaatataatttagtatatgtcaaagttcgggggaaataatttagtagatattaaagtttggggagcataatttattacataaacaatcattgaaatagtaaaattgaatgaaattaaataaaagtcgttaaatctaaccatgtcaatttaacgtccaaaaaattaagagacataatttagtacatgttaaaatttatagaataaaaattttaattagccaattataaatatcatccaacacacatcctaaataattagaaaaagatttttttttagaaaaagtaaacaccactactaatactaaacagtctaattctacaatgttaagcggaatatccaaacccaaaaaccaatcaagtataccaccataattgccactatttctgcgtgtacaaatgtaagtttacctacgcaaaatatagagtaataaaaaaaatataaataaaaaataataaagcaaaatatagagtataccaccataggccccgttcggtaaccattttaaaaatgattttctatttttttaatcaaaaattttaaaaacaaacaaaaatcatgttcggtaactcca

SEQ ID NO: 250455 - DNA, 583 bp, Cannabis indica
tttatttttaacattaagttaaactataactctttaaatcttgaaagacgtatactatacatttattttttctaatgaattatttgaataccgaaaactaacaataatagaaaaataaaaaataaagatcgatttaaacggttaatctgatcaaaccgacgaaaattattgagcaagttacactttttctattttttcattggacaggttacaattagatatttgcaacccgatatttatattggattggtaaaaatacactataacccaactaagctgatcgatgtacacccctatttggaacatctattagttggaaagtgaaccttcaaaaggttgtggcgctgtcgataacttaagcagaatagatggttttgacggaagcgattaaggaaacactgtgataatcaaaaagttattattgttcattgtgataatcagagtgcaattcaattaatcaaaaattgtgtgcaccatgaatgtactaagcactttgatatcaaacttcatttcatactgccaaagttccaactgaagacaatctttctgatatgataactaaggtagtgccaattattaagtt

SEQ ID NO: 250456 - DNA, 2954 bp, Cannabis indica
actcctgtttatggaatcattgataaggacccaacttgcccatatttgtctagaaagttaaaattatgatattaagttttggaacagcagcattacacactgctatatattcgtttataggatcacagagtatgttgccatttttattttcttcttgctctcttttttattattattgtgttcttttctttcaaccggagtaagcgagaggataagtgttgagcttttaatatttgataagaagatttaacatgttaaacttggataaacatctgtgttacatgatcttttttgcaggaaagaagttggcagaaagcattgttagagaaaaacttgcagcttgtgttaacatagtaccaggtatgtgctagacatggttccaaactatattaacggttcctagctgcatgagtcattcagtagtttatatgactcttctgcctaagcaaaatggaaaatagggaaaataatataaaattgtgaaacataaataattaataaattacagtaagtagagcagaaagagatattaaaatataatgtattaaactgaacatggtagctaagaagatgaaaagaaaaggatctgattatttcttttttagacaagtcttgcaacagtgtctggtacaggagctttgatatcttagattaacaacatccctcagaacatgttatttgtgtgagagagaaactgttgattgttttgtgcttgtatatactcttatcccattggtaataatgttttatgctactatcttcaaattcttatatcatatttgctttcaattagtgcaattactagtcttcaaggttggctaagtgtagtgtatgataaactttgttaacgcaggtattgaatcagtttacgagtgggaaggaaaggtatgaatctattgccatctgcacactatgcaagagagttttacgaaacctgtttctattgccccaagctgactactgtaaatgcccaagttgtgaactttagcttctccctactaactgacataggttatcaatgaagtagatagtagaaacattaacactctttgttttcttacttcatttattgtgttttgctaacataagaacagatccagtctgatgctgaagaacttctcataatcaagagtagacaatcccttctagaagctttgacgaaacatgttgaggaaaaccatccatatgagtaaagcccaaagcttgtttatgcactgttatttatttctcacttcagctttggtctttcccaagtttccctagaaacctaattgacaaaatggatgtacaagtttattttcttcttggaaaaagacctttctctgaagtttttaaatgattcttgttcagggtaccagaagttatcgccttgccaatcaatgggggaagtacgccttacctaaaatggctcaaaaacaacactagagattgatttctccttcaaagctaagaagagagttgaagtacacatatccctgtagtgtgtcgtgagtgtttgcatattatgaggacgtggagttgtttgatctctctctctctctccctctctctctgggttattgcacgttggtaacattataataaaacatagtgattctataaggaataccttttgcctttgaaagctttactttgtcaaatagttggtaacccgcaggatttagaactttgctgctaatctagtcgtacgctagaaattatttcacatagatgtctgcaaagactaggagcatattaaaattacatttcgacttccaaatattaataggagcatactattttagggtctctatgtgtcaacagaataatgtcttggtactttgttctcaataatattcatgtttgctcaaattgtgaaatttaaattctacataattatttgaccattcaaacaaaaaaatgggatttttactttgtttataaggattttgttttccatataaatgtacatctcagaaaataaaatatactttatggcttaatactaataaggatatggaaatttgattttctaggcatattataaggtaaaatttgttagaaaaactgaatgcataactcattggtaaagtgtgtcaacatttagtaataccccaaaatacccctcacatttaaaaaaaaaaatacagaattctgccttctctctttccctcttgctcatccttctcagatccaatcaacccacatcatactcacggcggaccccaaccaacccacagcagcccatcctcgaccctaccttaccctacccacgaccctcgacacacataccaccaaagtgagaccctactcatgacccacggcgcacggacggtgaaaaatgtcaaaggtgagttcgttttttctttttttagtttttttttattgattttgtttgtgattttactattaaagattgaatgttgctttgtctatagtggaatttaagttttgttagatttggtgttttgaactctcggatctatgatttgggcaagaacttaattttcaagccaggtccaatgcacatctgatgtaggtccgattcgttctacgaatttgaaaggtttctaggttgaagacgtaggtccgatagaggtcgatggtggtccgataggttccgattgatcttttagttttgtgattttgttttgcctgatatatggtctaatggtgacccgatatttcttatatatgtgtgctattgttgtaggcctgatgagtccgatgattagcccaataagggatatgctggtttgttatttttgtttagtgtattgagacaataagatccgatgctaggacgatagtgggccgatagtggtccgattgtgaatgcttttcttcatttttgtatgttcgatatgggtccgatggtggcccgattttgtgtctaatgctttactacataattgttaactttcattttctttttttttttttttttctagagacctccacagctaataattcca

SEQ ID NO: 250457 - DNA, 590 bp, Cannabis indica
tttttttttaagcttatttgtttagattgtgatttcttttgagccttttttatataaaaaaaaaatactaaaaacatgccattttttaaaaaataaaaaaataaaaataaaacatactaaaatattaaattataatttagaatcatatacctaggtactatgaaaaatttaactctcataggttttccttctaaaataacaaataaataatttaattcctatagttattatcaaatgtataatttttatgtctatatttggcaaaaataaaaaacagaaactgataataatatgtatagtataatatactattggaaattttttgcagtggactcctttaaatagtcgtcgtagtagattttttgtgttttgatacattacgtatattgtaactatttatgactatttataaaatttaaaaatattttaaatagtttacaatgttaaaaataaaatctaattaattgcccattacacgtatgagaaaaaataattttttaaaatttacaactaattttaaatattattacatatacgatcatgaaaaaaaaattatactaaaacactttttagaatgccaaaaataaata

SEQ ID NO: 250458 - DNA, 723 bp, Cannabis indica
atcaataacaacaatatttatcgcaattattagttactaaatagccttgtgtcccacacgagcaattgattagttaaccagtatgaagtaataaaacagaggcactctatcaatcaagtcatataaattgccttgttttaagtcatatactttaatgctttctctctactgttcaagaaaaccacaagatgataatatcggaagtagtgatgaagctatttcaagctacccttataacgtgtttgaccatcaatatctcaaatacactagcaatgatcaccccaaatcctaactgccccatgaactgcagcaacgttagcatcccatttccgttcggaatcggcccagattattccattaacaaattgttcgaaatcgtctgcaaaaacgtctatggttctcacatacctttcctcaaacaggtaacaaacttaaaggttctgaagatttcaattgacaagtccatactgctgacagaaaaccccatcaatttcttcaattgctcagataagaaaagcccaatttagagaaatttgcttcccccagtaaatctgacgttgagcccattttcctactccgacagccgtcgaatcggcgctctcgtcggagagatcaacagcaacgccagcggtgggagttggggtggcagctggacctccagaggaatggtgacgaggagagggtgggtggtggattttgatggtggggagctgagagtcggca

SEQ ID NO: 250459 - DNA, 757 bp, Cannabis indica
aaataaaatttttaaaaactaaaaattttacttttattttttattaaaaaatttaaaaacaaaagtgttaccaaacgacaccttaatttgtaagatatctaattatcttatttgaattaactgacacttttttttagaatcaactaattaaatatctacttttgtttaatatctttttcttattttggtattaccaatgccaggttggactttgacttgtgccatcaatttggcttgcttctgaagatatcagtttcacttctacccataggttagattattatataaatatttcaatttattttaagtcaaattgtgtttatttataaatttgactctctcaaaaataacgaaaaaaataacaaaataatatagttatataatatcatttatatcatatagagaagaaaagtgcacataatttaaaaatgaactttttattttatgtaaactattgcttatatgtatataatgctgaataaaagttatacttataacataaatattaaatgtgatacaacagattagaatggtgagctatgcttaagctaaatccgtgtcaacaatggggataatctgtaaattaagaaactcttgactttactatttaatgtgtttgcagtgtgtggtgtgttttttagctattttttcaaaccaatttgtacatgcaatttttacaatttgactccgcttctgaacatacagtagccttgttggttagctaatttgttaataactaatctagttggttagatta

SEQ ID NO: 250460 - DNA, 467 bp, Cannabis indica
tactttaattattaattaaaataaaaaactacttactactaaccactatggcacctcatagtggctcaaatcctgataatctagtaattctatcttttttttgtttttctcaattaatcaaatattgtattgtgttgtgagttggttggtatttcaaattatatatataggaataattagtatttttctcttgaatttttgatactatttgatcttgctctctaaactatacggcttgtcaaatttttttcctaaaatataatagttatataattatgccacttttgttagattctatttcttttactgttaaatgttagcatttttatccctgaacattgaccaatacaaaattttgtccaattttattaaaaaaattaattttcaaaattataatattctattaattctgagaaaatcaataaaattattaaaatacttgataaaatataaaattaattaaaaat

SEQ ID NO: 250461 - DNA, 914 bp, Cannabis indica
gaaatttaagagagcaaaaatggtaaaaagtacagacggaggatgatcagaagacaaaaagcaggtctttaaatagaaaaagggaagaaagatatacctgaggaaagtagagcctggaagatgaggaggtgtgtgcgccattcgaactgctggaggtctagatcctcgcctgcccagccatagggcaatgattcgcctccatctgaagaaacagacggttattgaatgcgtgaaaggatggggaagagaaggagaaccaaagattttctgagtattcattaatggtagcctcggtagaggaaaaacgggggctgcatttaagaaacaacaatgatgaaatgcagagtatgatgaggatgcattaattagagaaagagaaagggaaaaacgacggttgggaagtggaagtgaactggaagagggactgggagtgaaactggaaaaaccagaaaggaccctagaacattccagagcagggaaaaaacaaaaaaaaactctaatatattaaaggacaattctttggctgtttctgtttcaagctaatggataatcaatgtcactggaatcttcatagtttgcagtctgtttgacatttaatttcattattgatcttatgtgtgcacctagctagccatcatttctggataaaaatcatatttttagctattaattgctataatatatatagatgtactttcatatatttggaaattggcaattgtgttgattcatttttatgcattctaagtcatggttgatcacattaaccgtattgatctttgttccagcaatacctcgattttcatctctgcatgtttttattttctaaaattttgttaagcattgagtctattttgtttcacatatttctctaaaaaaccgtatatcctcaattttttttgttattttttttt

SEQ ID NO: 250462 - DNA, 1197 bp, Cannabis indica
cctcttagagtaggcaaaagagttatgcagatccgaaacgcagaaatgtagagtttcaagtaggggatcatgtgttcctacgagtgtctcaaatgaaggggatcaagcgttttgggagaggcaagttatgccctatatttacaggacctttagagattctcgagaaggttgaacaagtggcatattgtttagcttcgccttcagcttttcagcggttcataacgtattccatgtttctatgctaagaaagtacgtttctaaccctgctcatgtactaagttatgaaaatcttgagctgcaaccggacttgtcgtatgaagaacaaccagttaagatcctagacagaaaggataaggtccttccgaataagaccatagctttggtcaaggtactacggagaaacaacaaggtggaggaagccacctgggagttagaatccgacatgagagctcaatatccagagttgttcaggttagatttcgaggaccaaatccttttaaggggggataattgtaaagaccacttaacattaatttggaaattagtagataattagggtttgatgatgaaacttgcatattagttttgaattattaatttacggagatttatttaaattcagagtgcattttagatgtcataaatggaatttcataattttgcatgttttgtgcccaacaacattagaacgcgatttggctattagaatcacatcttagtatttttttagtatagtggggcaatatagttagacattaggaatgtcaggaatagtcaagattttagaattgataaaaatacccctaagtggtttttatgctttttagtgtgggaagggcaaaatggtcattttgcctaagtttatgtattgtcctttagtggacattagtagaattattatgctgaatattagatgttataagtttaataaaactattttattaatttcatttttacaaaataccaaagttagcaaaaaaggaattcttctttctctttttcaactctctctctcttttcgaacccctagaaccagctagggttatgatctttattcttcaattgctgcgatttccagcagctctaagtttagtccaagtcaaggtaaagtctctaagaaactccctctctagttttcttaagtttcaagttatggattttgtcatgttttttgggagtttaagttctgtagttgtt

SEQ ID NO: 250463 - DNA, 1530 bp, Cannabis indica
acttgaggcaccaggcgccccgaacgcctagagcaactaatggccaagttgacatattgtcaacttagggcacttgcaatcacaacattagaagtatcacgagcattttattcatctccatccaaaacgaacaataaagtgcttttcagaaagaaacagatcgacttagagctgggcccagcgcccaggttgacacttttcatcttgggccatttcaaacatcagtttagaagaattcttcaaggatctccgttttcgtcaataattagatttgggtgcgttcggggaacaaacagagtcatttgagagcaagatctgggacccagcgcccaagtgacctagctgctgggactaacaaccaggttgacattttttaaaactaggctatttctaattagttttttcgagaagtcttctggacatattctccattttcacaaataattgagatgagagtatttccaggaatcaaacggaaccatttgatgtcaaaaagctagaccaagtacccaagttgacactagtgttgggccaagcgcctaggttgaaattttgtcaaccagggttatttttagtcatttttttctaaaaaagtgttccagacatcttttttgttttcagaaataacgaagatacaagtaatctcggggagaaaacgagatcatatgggggttgatataggaatctagcaccaaggtagcaccgttgtcagggttatgtctatttaatattaaaataattgaattttattctaatatggtatttcgtttcactttttgctaattttatatgtctcgatttcttatctcatatcaataacaggtagattatgggacatcaatgaccaacttctaaagggcctggttatgccgaaatagagaagattgtagacaaaatagaagaaacaagaggttggaatgagttattcttagagaacaaagggttgaggttgaagaagtcatggctcaacacggaaataatgagggtgcagtaaatcagaccaatggtcaaaatcgtcgtgatagaagcctgagggataatgtgctacccacaatgataatggtccaatcttgtatcagactacccactgttgatgcgaatgattttgagatcaagactgccattctttaaatggttcaattcactgttcaatttgtgggattgactataaaggaccccaaacatgcatctctctaacttcatggagctttttcagacatttaaaataaatggagataatgatgatgccattctcctcagattttttcccattctcactaagggagcaagccaagagttggttggtgtctttaccatctaactctattgccacatggaatgaatctgcaatgatgtttttcttaaagttctttcctccagctaaagctgctaagttgagaggggagatcaataatttttattagttagacaatgagtccctctatgatgcttgggagagatttaagacttgatcttaaagtgtcctcaccatggaatagaaaaatattgttggtccataacttttacaat

SEQ ID NO: 250464 - DNA, 652 bp, Cannabis indica
ggagaagggcaaagataagcgtaggtcaccagtagcgcgatcacgatcgcgcagtccccgagggaaaaattccagaggtcaaagcccaaggagacgctgtccaaggagacaacgaagtttgaaactagccaagtcccctccaaagaaggaatcgtcgccgaaaacaaaaggtggaccgcgcttcatgaactatactgagctcgcagtaccacgagaccatatctatgctatggaagagaagaatggggtcttcaagaagcatccctggattaggggaaaccgcgacaagagggaccccaaaaaattctgtaagtattataaagatattggtcacactactttagagtgttgggttttgcaggacgaaattgaagagctgatcaggagcgggaagttcaacaaatacaaaaggaacgaggaaagtcatccccgagcggatgacaaagaggaaaatcaaaatgcgagtggctcgagaactcctcgcaatatattgaccatcataggcgggcctcatatcacaggtgactccagaaagtcgcaggagcgatatccaaaggaagccaaggagaagccgctcaccaacgtgaacaatctcagcgagcgaccagagaagttattcaaaaatgaaatgcgatgacatcacgttcatgga

SEQ ID NO: 250465 - DNA, 947 bp, Cannabis indica
aaaaaaaaaaaagaaatttcaggattagtttcatttcaggcatattattttgaaattaaggtattttttaatgatgtggcaagatattattgtaattgagatttgttaagttatttttgtaattattttatattttatgtatatttttgaaaaaatccctatatagaaaatcctgttgtttaagtttcaaaaaaatcctctatacttattagccgtatatctttgaataccttttgttctattcttttgactaatgctaaagcaccatgagaggcattattaatggtggtgattggagaaatgtttgatgatgcttacaagaagctaactataaagatatttggatgccaaattaaaaaggtaaatgccaaaacttaataagaatgccatactcattttttaaataaaattattttaaataatatattaaatagtaatttatgatattatagtaacaaatttgaatagggtttactattagagtatttttaaaaggaagaatattaaaaataatataaaattaaaataaaataaaatattaaattattagatgatgtagagaattttttgtaacttttgaaaagtgccacaattagagacgctctaaaacgtggcgtatcattattaatacattttgatctcgaaatttatatattttaactttataaataatatgagaaatcactactaaattataagactccacattagtataatattaagtattttaaagtgccaaataacattactcgtatattaccttagttctggaattagtggaaatccaataattatgcaagatgcaaggctcatttctaagccgattcgttgagacatgacaggaaaaaaaaaaattaattaacataggtgtcgtttggcaacacttatattttttaatttttaatcacaaaatgaaagtaaaatttttgtttttaaaaaatttattt

SEQ ID NO: 250466 - DNA, 1668 bp, Cannabis indica
ggcactttgattgtcacagtgtatgaacaaattgtcaatttcaattcccagttcagaagtcaaacccttcaaccaaatagcttctttcacagcttctgtagcagccatgtactctacttcagtggaggacaaagcaacaaccttttgtaggtttgctttccaactaacacagcccccaaacacagtgaacacaaaaccagatagagacctccttgtgtctaaattccctgcatagtttgcatctacaaaaccagtaacattatcaccataattgttgtcatttcccatcaccaaaccagttttgagtgtgccctttagatacctcagtatccatttcaatcctttccaatgttcttcaccagggtcactaataaacctactcacaacactcatgctatgagccaaatcgggtctagtacacaccatagcatacataagacaacctacaccagtagcatagggtatgctttccatgtattttctctcattttcagtttgaggtgactgatcttgagataatttaaagtgttgagcaagaggagtggtcacaggtttagcatctttcatgccaagcttgtcaattaccttcttgaggtaatgttcttgagatagacttatagtatgaggcctatttctctttatttcaatgcctagaatcttcttggctggccccaagtctttcatttcaaattcaacaccaagttgagatttcaagctttcaattttacttctttctttccctactattagtatatcatcaacatacaatagtagatagattccattgtgaaaataaacacaagtatcatatttgcttttggtaaagccaattttcaacataaactcatcaaatctaaggttccattgccttggagcctgttttaaaccataaagagatttgtttaagagacatacctgatcaggtttctcatcatagccctcaggtatctccatgtagattttctcctctaggttcccatgcaaaaatgcagttctaacatccatttgatccacctcaagatcaaatctagcagccatggacaagacaactctaatggtagtttgtttgacaactggagagaatatgtcattgtaatcaactccttcttgttgagtaaatcccttagcaactaaccttgctttaaaccttggtccctcactacctggtacaccatccttttgtttgaatagccatttgcacttgattatcctttgattttcaagtcttttcaccactgtccatgtcttgtttttctttaatgacagtttctcctcctctatagcatgcaaccatgctgttctattcttaccagagatggcttcattgtaactagatggctcatcactttccatatcttcagcaacactcagtgcatatgcagtgaactatgcacaaccaaatttgtcaggagctttagttgttcttctttctctacctcgggcaagttgatatgagctgaaactaggttgagtgatagtctcaacattatcattcttggtggtttctgatgcttcaataggactagattgagtagtgtccacctcaatttgatcaccaagattgctggtttctggaccagtaacagtaacacccattttcattgccatttcctcctcattgaacaccacatctccactaataatacatttcttatgccctggttctag

SEQ ID NO: 250467 - DNA, 669 bp, Cannabis indica
ataggggagaaccacatgagaaacacttgtaagactcttcattttgataatggcagttacattccctcggttggcataggtggtggcttttgtttgttatggaataattgtgttaacataaagattttaaagaaggtggattcgggctttgtttgttgggtgaatgaccacgggtctcagaactcttggcatctttttgcggtttacgggactccttacgctgatcaaaagtctgagttttgggagaatttggcagtccaaataaactcttgtaatggcccctgggcactcatgggagatctgaatgttattttggctaaggaggataaatcgggaggacgtagctttgcctaccgtgatggctctgttttgaggaatttcttgttctcaaccgggggtgttgatatgggttttaatggctgcaagtacacttggcagaataaaagaggatctggtcgattggtgaaggagcgcattgaccgtgtgattgttgatacaagctggttgagcctttgtcctaaaggtggagttcgcaacttacctatcataagttctgatcatggagccatcttgttagactcttgtgcttttaggcctagagggcctcgccctttcagattctttgaagcttggttctctgatcttactagtttgagcgtcataaaagaa

SEQ ID NO: 250468 - DNA, 914 bp, Cannabis indica
gacctcacttgcgtgagtatactacttgattgcgtgcacttgcgtagtaattaataattttcgcaacaggttttgatctgggtttggatctggggtctaggtttgggtttgaggtccacgtcccagtcccgatcctggccccagttcggggtctgggtccggatttggggtttagggctgaggtcaggtttgggtctaggttcaagttcggggttttggtctgggttttggttcgagatccagggttggggtctgaggtccagggtctagggtttggctctgggtctgggtttaggtccggggtctgcgtctaggtccaggtccagggtttgaggtccgtgttcagggtgcggctgtccagctccaggttcaggtctagtattcaggtctgagaataggttcgggtttggctctagatccgcgtttggagtctaggtcggggctagagttgaccctagaccctttgtaaataatataatacaaactaagacaggtcatttgtatatattaaatattacgactcatattatattaaaatttatggtcataataattataacaatacaatattttatctaaatatattattatttgttatttaatacaatacgactcttatacgatttataagcccatataatataatatagtacaactcatattttcacaatcatttcaaaatatagggtagacctaacaagcacagacatatttacggctatgctctcattccaaacatttaacataacacaacatccatattgttaagataatttcaactatatatagataaagcgaaaacaacacttataagttggtggtcctcatgaaaaacacaattttggatagaagaacatcccaccattatctttccaaaaagagagagcgaaacaaataataaagagaattcgatc

SEQ ID NO: 250469 - DNA, 616 bp, Cannabis indica
tatgattatgggtgactactatatatcgaatagaacgtaagaatatattaatatagagttatttacagcaaaactccataatcgatctttaagttcagtttacacatataaccctgctataaaaaatttggtggtatataagacctgctaatctcggattcagttagcaaatttaagataattcaatatagttttgagtatatactgatatagacactaataatcaattggtaataacttaattagttgcattggtgaaaagcaggatttgtttgtagcagcaatagataattcatacaacgcagtagaatgggcactatctgaaatgttaaagcagccagagatgcttgcaacaaaagaaatcgatagagttgttggcaacaaaaccacactcctccaagaatctcacttggagagggaaactccatgtttaaggctaagcccttgttgtatgcccatgcaacacctcgcttgatttagcttatagctattattaattagtacgtaattaatgctttgcttccttatactactatatataaataattgggagcagctaattaattaattcatagctcatttatatataatggatatatttatataagggaaaaaa

SEQ ID NO: 250470 - DNA, 1152 bp, Cannabis indica
atgatctttgaattcaccttttctgaaatgaggtgtctatctatctcaacatgtttagttgtgccatggtgactgaatttttagcaatgaattgcagcttgactatcactgaattcattcataagccttttgatccacatcccttcacaaatacttaaggccaaagctcgatattctgactctagactactccttaagactacatactgctttttgctgcgccaagtaactaaattaccctatacatatgatcaataaccacttgttgatcgtctgtcagtcagctctccagcccaacaagaatctgtgtaaacttcaaagtctcgattgttgtattttctgaagtgcaaacccagacctggtgtcattttcagataccttagaatatgatacaccacttccaaatattcctcacaaggattgtgcatttgttgactaacaacactgacatgaaaggcgacatctggtcttgtatgagagagatagattagttttcctactaatctttgatagctccccctctcttcgattatctttcaagtttggatccatgggagtgtcaactggcttgctcccaatcattgcagtttcctttagaagatctaggatatactttcgttgagatataacaattccttctttcgatcgagctacttccataccaagaaagtatttgagggttcctagatctttgatttcaaaagctgaggcaagaagtcttttgagatctgaaatttcttctgtgtcatctccagttaagattatgtcatccacatatacaatgagaattgctagctttctagttggagagaacttgaaaaatagagtatgatcagcctggctttgagtatatccatgtttgacaactaactttgcaaatttgtcaaaccatgcccgaggtgactgtttcaagccataaagggatttgagaagtttgcacactactcgaccactgtagtgtttcttcatccctggtggaatttccatatagacttcttcttcgagatccccattcaaaaaagcattttttacatccagctgatataaaggccaatcacaatttacagctagtgataacaagattcttactgtattaagtttggcgacaggagcaaaggtctcctgatagtcaacaccatatgattgagtgaa

SEQ ID NO: 250471 - DNA, 1022 bp, Cannabis indica
tttactgtgccggatggtaagttgtggaaccaacgtagagcgggtcctctcaatccttgcgtgaaggtcttgcacttgattgcctccaagtcctctagcgggacggagacggttaacattttttgctcaaactgacatacgtattccgaggggtctcctgtctcgttatactcttgtaatttaggggccacataacgctgaggggcctccacgcgcaggatgtgattcccaaagggtgaaagggttgacccctccattcgagcccattcgctgtgtactcccatctggcttttttcttccaatgctattaatttgttccacatcatttcctttagcctctccgtctctttactcgccgttgatggatttcgagcaaccgttggatccatggttcgctttcggggtgttgtgcggaaagcctctgcttcagttatctcttctacctcgtctctagtccttctgggctgatctcgatggtaaattggggcctcttgaattgccaagtttcccttttctcccatttcttcatgcatgcatcgggtatggttgcctgaaaggtcgtcagtgtgattctccttctcaatccctcctcccacctggcgattaccggtttcttccgcatgcggtggtcgttggtacccttcgaggacaactttcatctgtccattttcgctctcaagcctttggatatgttccttttgaagggcaatttccactccctgggttgccattctcccttcttgttgtttaagcctttccaggatctctcgccatggcggagttgggtttaatacgtcctcgcctgcgtcgccagtgtttgccggtgttccgaggatgttatctgggttattttgaggggtgagattctcctgttcatttgccatatcttttattgattatcttacgaaaatgttcttttactgagaaaaagaaaagtttcccacagacggcgccaaactgttttggtcagaaaacagtcaagatttcttttttggggcctttctttttccagttcctaatcc

SEQ ID NO: 250472 - DNA, 581 bp, Cannabis indica
ttttcccatattttgggaatttttttctattacaaaatacattgagtcaaccttacaaatatttatatagttcagcaactaaatattacaataatacctcctttactaagcctttagccgcacgaattaaattcctcaactatgggaatcttcgatcgattgatccagcaagccaaccgaaacgaaatccaaccaggcggagaacaaccattaattctggtgacttcacctgagaagaagaccggaatcaatccaaacatatgttgtttcacatttatgaaaaaaagtgcagaaaagctgcttcgaaactaaaatttaatcatgaatttcgatttaattcgcagaaaattaatcctcctaatatcaattatcagattcataaaatgtagatctctaacaaatagatctagagcttcaaatcaatccaaatacggtataatccaaaaaaaaaaaaaataacatcaatattatagctaaaaatttatcatagcacttctccaaatgcaagtaaactctgttgtagattatcatatcagtaaaacccaatgtctgataaatctaggaaactttattcacatagt

SEQ ID NO: 250473 - DNA, 672 bp, Cannabis indica
tgttatttttgtattgtttctattcaaaaaaaaaataaaaaaaaattaacgtaaaaatgtaatttttaaaatatagtaccttatgtaattatccaaagccacgggttcgttttctttgttttgacaataggtgattttgagtttgacaatcacgccattgggctttttaagtctaaactaagactactttatgtatcacaaaaaaagtctttaagaaaatataaaatttatgaatcaaaagcttcatacctagcgagtctttatcaaactgttcacatcgtacaaactgcctatattatatcacattgcatagaaaaaaatagttttaactttttttttacagtgtggttgcagtttacatttttgccaaatcccacggtgtgatacagtttgcagtttaaaatttaaaatcacttacaaaaatattaattttacaaatttctcttttttatacatgaacaactcatatgcttacaaaactcaagctataccattaaatttaagaaatatacatataaattattctcaaattttattttatttttcgttaactttttattattaacatattattattattgatatatatttaatacaatatatatctaaattaaacaattttttaaaagacaactcatacaataatttaattagtatatatgttatgttgtt

SEQ ID NO: 250474 - DNA, 1194 bp, Cannabis indica
tatagtcacaaggataataaagtgtttgtttttacaaaaaccactttccttgaaggtgactatattaaggacttcaagccgcacaacaaagtagtgttagaaaaaatgctttcaaatataactccatctaatgttccattatcttctactcatgtagacgataatcccactcccttggttgaaccaacgcaagttgttacaactaagaaatctaccataaatgttcttgttcagaaggtcacgactctcgtcgtagtgggagggtttccacaaaaccagcttgttatggcttggatggtgatatcaatatggttgttggtgacggtattgatgataatccattaacctataaacagacaatggcaagtctcgaacggaaacaatggtcagctagcatggattcagaaatagattccatgaaaaagaacaaagtctgggaatatgtagacgcacctgatgattatcatccaattagatgtaagtgggtctacaagaagaaaacagggttggtggcgaagtcgaaacatttaaagctagactggtcactaagagttatacccaaagagaaggtgtggacaatgaggatacttttagtccggtcgccatgctcaaatccatcataattcttctctccatagctactactttgaattacgaaatttgacaaatagatgtcaagacaactttccttattggaattcttgaagaaacatctatatggagcaacccgaggcttattatccatggcaagaaaagaaagtttgcaaacttaataggtccatttatgcacttaagcaaacttctcgctcttggagtaaaatgtttgatgaaataatgaagacctacgactttcaccaaaacgatgatgaaccttgtgtttaccaactcaaagataatcaagtggtagtattcctggtccattatgttgatgatattttgattattggtaacaatatcaagaaaatgactgatattaaggaatggcttgacactcaattcaaaatgaaggatttgggtgaagctgcttataatcttggtattaagatcatcagaaactggaagaacaaatcccttgctttctctcaaacaacttacattgataaggtgctagagaatttctcaatgacaaataccaaaggggcagcgatgccttctagacctggtatccgtctatctaaggaacagtctcctact

SEQ ID NO: 250475 - DNA, 590 bp, Cannabis indica
tatcaatactaggtccggtatatcttcctttcaaaaaaacaaaattactataagtggtaagtatttttagatttaaatgaaaagactaagtatacacaccaataatataaatataacatatcaaattctttgtagtaagatttaagatttttttttagtattgctataagagattagtggttataagatattagtggtgcctagtattatttaaaggtagtagcgccttataataagttagcgatatttcatagaacttatttaattaaattatataagattcaatacttactaacaactatgtatcatgttagaatggaaggtactaagcaccataccttttaatatttcttattttttttaaagaacaagattcgatcttatttgattcacttcactttttttataatttttttttaatttatattattgttattttaaaaaactaacaaaaaaaatagtaggtgaaattaatctatataataatcaaagcatctttcacgtagtatgttatatgacctcattcatttattatttgaattgttttgttagtagtgtgatagtcgttatatttacaatattattcatat

SEQ ID NO: 250476 - DNA, 1022 bp, Cannabis indica
tctttcttcacttcgtcaagggactctgccagtagggtgttgtatgtttgttggtcataggttgttcttctgtgagatgatggcactagctctaaaggcaacatcctctcgtacccataagctagagcaaatggagtttgcccagtgtctgccttcttggttatcctatgcaactagagaacctctgggagcagttcaggctagttgccttttgcttcctcaaggcacttcagggtgtccttgagggtgttcttgacaacttctacctgcccatttgcttgaggatggcccatgacagagaagcttttgatgatgccatgtctattgcaaaaatcagtgaacatgtcactgtcaaactatttgctattgtttgacacaatctcctagggaaggttgaaccgacatatgatgttcttgaaaatgaacgtaaggaccttcttagaggtgattgtcgccaagagtttagcttttgtccatttggtgaagtagtctacatcgacaacatcaaactatacccgtccttttccctttagaagttgaccaattatgtctatcccccacactgggccaaggagactacatcatcgtgagctcattgggtggagctcttggtatcttcaaaaatctttggcacttgtcacattttttgacatagtccattgagtcttcgatcattgttggccaaaagtacccttgtcggaatatctttttggacaagctttgccccttggtatgattgccgcagaaggcttcatatcataagtcattcagctttggctttggtgatgcacctcaagagaggcatagaaaaactccgtctgtaaatttttccatctaggattaggtacctagcaggttttcttcttagtttgctagccttttttatcttctggcaaggcttcagtttggaggtaagttgcaataggtgtcatccatgttggtgtgtcatccagcatgttgacctcttctgggacaataatgctaagttctctaggaactagatgggcactaggtttgctttg

SEQ ID NO: 250477 - DNA, 1917 bp, Cannabis indica
acaaatgctccaccaacctctatggaccttatgaataggatgttcaaggatttcctcaataattgtgttatagtatttatcgatgatattcttgtatactctcagtgagaaggggagcacggacaacatctttgaatggtttttctacgacttagagatcacaaggtgtatgcaaagtttaagaaatgcgagttttggttatcaccagtatccttcttaggacatattgtaggacaagatggaatattgttgatccgaggaaaattgaatcagttgagaattggcataggccaaagacagttacagaggttcaaatttttcatgaattggtaggatattatcgatgttttatggaagggttttcttagatttctatgtcattaacagaattgactaagaagaatcaacaatttgtatggtttgataagtgcaaaacaagctttcaagaattaaagcagcgactgatttcaactttagtgttagctttaccatcagattaagagaaatttatggtgtattgtgatgcatctagccaaggtttgggatgcgttttgatgcaagctggcagggtcattgcttatgcttcccgttagttgaatgagtatgagcagcgctacccgacacatgatttagaacttgctactgttgtattccttaaacatttggcagcattacttgtacagaaaaaagagtgaaatttatgctaatcacaaaagtctcaagtacttcttcactcaaaaagatttgaacatgagacaaatgcggtggttggaactggtcaaggactatgatcgcacaattttgtgccatcccgagaaagctaatgtggtggctgaagctttgagcgaaaaaggtcccagacatgttttagtaccacaatgatctctcctcaattggctttaggtatggttaggactggcattgaactcgtggttggaaaactacataagctaatgctttagtcagatttattagaaagaattagaggggtacaattgaaagattctaagttagtcaggattcgaaggagatattagctggttgggctaaggatatctcaatctcaaacaatgtgatgttactttataaggcttgagcatgtgcttcgagcaatgatgagctcaggaagaaatactggatgaagcacatactacaccatattcattgcactcgggtactactaagatgtaccaaaatgaagaaggatgtagtcgattacgtgcccaagggcttgacatgacaatcacagcaagtcaaacagaacatcagaaattagcaaggttatcataacctttgacacttcctaagtagaaatggaaagatgttataatgcactttgtggttgagttacctagaaccacgggaatgtatgattcggtagtggactcttttacatagtcagcacacttttgccggtaaagacaacatacatagtgggtcaatatgccgagctgtaggtaaatgagatagtttgtattcatggagctctgaaatctattgtttcggacagagatttgaaattcacatccactgggaagaaactagagaaaggaaatatttgggtcttgaactagttcagcggactagtgaggcaatagaaaagatcaaggctcggatgcttgctctgcaaagcaggcagaaaagttaggctagtcctaagcacggagacatagaatttcagttaagagaacatgctttcctgtgagtctcaccaatgaagggtgtaaagcgctttagaaagagcgacaagttaagccctaggtttatagggccattcgagatactcgagaaggtctagaaggtagcatatatcggctagccttactgttaggctatttttagcctatgttttggatccaatttatgtgcatttttagctgtgttgggacggaattacgcttgttttctatgttttca

SEQ ID NO: 250478 - DNA, 1417 bp, Cannabis indica
aaaacttacgatggattggattttaaaaaaaatgtattctaacaccttcttatcaatcggtcgaaaaatattactgacattaaaatgctcaaataacttaatctcattttcactaataacatgcttttccgaaaataatgactctgaagatttgacgttcattgattcatttgttaatttatttttcttcgctgatttacattcacattttttattattttgcaaatgtactttcaaatactccaattcatttctcattcgctcgattcgtatactccattccatttcggattccatcatcaatttctataaaataagataaaaattatcaaaatgtgaaaaatatatttttgcataaacaaaattaaaatattagtaatacaatttcatatttatattaaagtaatgacttttataattgtaaatgtagaaaaacaaacaaaagtgagagagtatgatcttacgtggaacactttgaaaggattaaagcttcttcactttacactttgaaaaaattaaaatttcttcactaaactttagtaaaaataatgctacatataaaaatgtttttataaaattaaataggaaattaaaaatcaaatctaaaaaaattaaaataacattaaatacgaaggtataaaaaagatcaattttaaaaattgaataatttagtaaactaattttatttagaaaaataatattcattaatacacttagtggtattagagaaagagactacaattatattataaaagaaaagtttaaataattaaatatagtaatgtgaaattgtaaatagtgccaattgtgattatatattaagcaggttacgtgtcaaaatttattgctaaaaatttctaaaaaaaattaacccaatttagggtaatctaggttatatagtaatgagttggcaaaatatagtaaccaataatttataccagtaatatactaaagaatattaattaacccaatttaatgtaatctatgttatatatcttccattccatatgtgtcacaacttttaaatatggaacttgctatagacttgccatatgtgtcacaaatttaaaatcatttcttcaaaaaataataagtgaattgcaaaatacaatagcccacaaaaattagtagcacgaattcaaaattaaggacttttacatttggaaaagttgcactcaatagtttatccacgtgagctgaagttttctcaatccattcttttgtgcgattcaacaaatgtttaagcttccaaaatgtcagccaaatcttgtcataactgtaaagcttggcagaattaagccaatgcaagcttgtgccaagtcttgtcgaccattttctgcatttcaagtcttgccaagtcttgtgcaatccaacgcgcttccagaaacgattccttccctttccaagtctcttcccc

SEQ ID NO: 250479 - DNA, 616 bp, Cannabis indica
aaattaaaatcatcaaatataaataataataatataaaataaataacccactaaaattattttgagtaaatacaaatatttttgtcttaatagggaaaagaaaatgctattttgcaccttggatttagttttgtcaacaatttctttgtgtatttgttaaaaaatcaaagaagatataaaatagaattttaaccctcctcaaattttaattaataattataagcaacgaatttataggaaaatttttgtggtagaccctttaacggaggtattctattcactatgggtattcaatctagtactagtacccaaattcaataaaaagtggagagtatgcattgattttaccaatctgaacaaagcatgtccaaaggactggtttcttcttcctagaatcgaccagcttgtagatgccacagctggccatgaaatcttgaacttcatggacgcatattcagcttacaattaaataaacatgcatccgccaaactaggagcacactagcttcataacggacttaggcctgtactgctacaaagtcatgcccttcgagttgaaaaatgtaagggccacgtattaaaggctggtgaacatgatgttcaaagatctcattggc

SEQ ID NO: 250480 - DNA, 1083 bp, Cannabis indica
tacggtatgcatagtggtacttagtcccacctcctatatcccatgttcaaaagatttcaaccaactatgagaaatatttcttcaaaagtaaaccaatttcagaagggaatgggaacattctttcttgccactgagaaatatcaagacagttgcgcatcccattaatctgacaaagacaaacttattcaaatcccttccatagagagagggtgggagcaaattgctacacacacagagagacaaatcctaaatcctcagattttagaatcgtcaagattatgctcctaaaatgagtcatgactgcatctccaacagttgtactaccatgaccttggaagattaggctttgaccatagcctctcagcttactcatttacatgttgacatcaaaaggtgaatatgtaagaaagatgcagacaaactttgaaagatttaacagcaaaagaaattctgaacaaatattgcaagtcatgatctaagagctctcagttttcaccactgcatgcacctaacctataaatacttgcaacactgcatgcacctataaatacttgcaacactgcatgcacctatttcccaaaagcagggcatgctatacatgagaagaatgttgacgccgtagtctagattcaaaacttgggtccataatcaaagtactcccaactccgggaattgacatgtgacacattagactttcattcacttaaaaatgaaaaatcatgacacaattgatttatcattctgtatttatgatctccagtagtagatgcaaactcgattcatttaatttactattctaagttcgtgagcaccttttgtgtaggtgtaatcagtgtcactagaaagaagttaattatttggtgcagcctgcaaatgcttatccaccgataaagcaacctaacaatctcatgaaaatgttccaaagaaccactttcatagcaaaatagatttcaattccaccagtgacaacattcacaacccttttcaaaagaaattatgcataataggaaacacaaatttcatagaaatcatcacagtatcaattcaaataaagaacatgaacagaaatacatttcattaaag

SEQ ID NO: 250481 - DNA, 505 bp, Cannabis indica
acatgtgttcttgttttggtttgttatgtttgactaataataatgtttgcttttgtttgtttatctgctccaaaaaattattgtatttgaagaatcaagaactgatcctaaacgagaggagaaggtgaaagtgaagagcctagttatgattataggtatcatcattggattaggtggtgggattcttttgattgccttttgcatttgcaggaagacacacatttttggtaacatgactcttctctacattttacttaagtatcacataagacactaatttataacacatctagatatggttttttggttattttatttgctaaacaattctagctaattgtctaactaaaacattcttaaagctcctataaagctttaccatttatagtatataactaatattacaattagcttggcccaaaatactaaaaacatgaagttatcatataatctctaggaaatcttagatggtcaaaaggttgttttgttttctatttgttttgag

SEQ ID NO: 250482 - DNA, 611 bp, Cannabis indica
tgtaatgtacttaatagtaaaacatagtcaaaataaaatataattatcatatggtcattagtgtgacactcacacgataatgatacatcatctattaaagagttgcataagtatatctctaatggtgatgcatcaaataggtgatgtgtatagcttatcttacaaaaacagtattttaaaagttgtgccaaaattgatgcattgcaaaattatactaaatttagcacataatatagcatgatctaatatttatatcactataaatacactattttttatttattttttttatattttttaatattttattgatatatacctattggtcataattttacaacataaactatttatattatttttattgttttagataataatataatttattttttgatatgaacataaatttgcatgaatctaattttatagttgtgcattggagtacaatgataaaaattaatgcaaatatatcacaaagtaaatttttgtataaaatatagcataatttttatatggggttttttaatttttacacttcgaaagccaagtttttttttttttatttttttgattttttacagaattccacatagtaacccacataacaa

SEQ ID NO: 250483 - DNA, 555 bp, Cannabis indica
tttctttcttttcttcatttttttggttttgaaagggaaagtacctagctatgagctttatgataatgtgtaattaataaatatattacacattgaatctcttatataaatgttttgtcctcaactgaccgacactattcgcgacgtaaaataaatagtataaaattgtgtcatatataacaacatgttacttgctaattagttttgatatggaattccataattctgaatggaagaaaaaaaggaacgaaaaattacttgaattcttgttatattaataatggggaatttcattaaattttgattcagctttcaattggagtggagtacacaacgtggctcaagtatcaacagaagccgattacgataattgcaacacagctgcagccagagtactaagcagcacaagcccattcgagttcactctcaacaccactggtgaccactacttcctctgcactgttggaactcattgccgaagtggccagaagctaaggtcgacgtagatacctcaactaccacacccaactaacacctgctactcctacaactcct

SEQ ID NO: 250484 - DNA, 552 bp, Cannabis indica
agtcgacatgagagaaaaaaggatctgaaagtgaagttcatcggagatgaatgattagaactggaacaacatctcgcgttcatagttaagatcattgaggtgagcctccattgctttgttcatcggtggtggaccgcacctcaaaatctacataaattccaaagactaaacttagaaccaagacaacaaataatgttagccaatttcatttaagagtagtttttcgggcactcataccttgacatcagctgctggagctggacaatggttttgaatcatttcctttgttacgaaaccgatacctccatcccatacttccggaggctgagcaaacaaataatactcgattagaactcgacaaagaaagatagctaacttgaaccacccaccaacggtagttaggactgagattggacacactttccacaacagacagtttcggtctagacaaagaaaacaacctttgcccaaactcataagtgtttgtttgacaccataactaaaaaactgattttttagttttaaaaacttaaaaatggtttttttgaaaac

SEQ ID NO: 250485 - DNA, 668 bp, Cannabis indica
ttccgacaatagcttcgccactacgccggtagtaacgggaaaaaattgaaggacttgggggggatcgatccccgacgttggaatggaattcatctccacttgaagactcaggaagaggagaacctggagggtttgacatttctgaagcaggggaagagaaagcaagaaatatacgtgtgaagagaggaacttagaagttacaccaaaatgacaccataaacaaagaagaatgtctgtttaaatagaactcaaaaggtggccaaggtaagataaaaggaagatgaaaaggtaaatccacccacatataaggcattaaatggcaataaatgcacatccccaagtgccaaaacgcttcgaaaaaaatgccacacacatgtaaataaccataataagaaaaataagttgaacgtgcaaatttaaagaaaaatccttacaaaatccttaataataataaaataaataacaaataagaaattgttccttaagcttgtcccacacacacaaatataacacattaggaaatttattaaaataaggacagggcgaaattccctaccatctcctcaggctccgtcgacatcctcgccctcgctaccttcatccgactccgacgaagaatccaccaaatcctcatccttcttaaactcggaatactttgcaaaaaactc

SEQ ID NO: 250486 - DNA, 767 bp, Cannabis indica
catatataacaaataaaaaagttaaatcttaatataaatctaattaagatgtagaagcatactctaataaaccagacagagtaatacacttaaatctgtagatttaaaattagttaaacttaatcatataagaagtactactttaaaactttatgtacaaataaataattaaaagagctaacaattctcaatatcaatttccttatgcatataaaaaaatatgaattttgtgtgtcaaataaaatataatgcaagaccagtagctgtaatcaaatgatttaaaagctatggttctctcaaagcatagtttaaagactgaaaatacacctggaagaaccaatagccaatcccctgaattttttttttataaattgctcttcggtcacgtcataaggtatatttctcattgtatcaaatttcagtcagatgatatttatccctaaattagaaccaaacaataaatagaaaaacccttactataaactataggaattgaaaagcttagaaatttcaaaattgaaattgccactaagatttcagtcaaaagtttttaaagaaagagaaagacaaagtaatcttctcgatacctaaaaaaagagaacaaaaatgaacaaaaactaccaagagaaaaaactcatcataataacatccaaataaaaagctaaaaaattgttatacaattatttttaaaatatcctacggacgttgcttatctaaagaaaaaaaaaagaaggatctcataccatctctgcaatttcattctgccc

SEQ ID NO: 250487 - DNA, 550 bp, Cannabis indica
ttcaaatccaaataaaaactagttctcaataacaatctaaaatgctcaattgcttctatttcagctaatggtccaacgcccacaaagatgtgtctttcaccatcacttgagtttcggtagctcagccaattttgcatagaaacacttatgtgagaagtagcactagaatctattcaccaagtgtttctaggtactgaagctaaattaaactcaaaacaaaccaaattaagattaatacctttctttatacgtcatgtgtgatatttagcacaatgtttcttcacattttcatgttggttataaaagaaacaacccttagaatcctattgctgtttcttttgaactggacccttagcagcttcattctcaaatttctacttctttcccttatccttaggggtagtgccaagtgagcactttcagatttgtcctttttgaacctttcttcgtcttgcacacaatgagaaatgagttcattaagagtcaatttatccttttaataattgtaactaatttaaattggttaaattgtggaggaagcgttaccaaa

SEQ ID NO: 250488 - DNA, 762 bp, Cannabis indica
ctcgacatgtacaatctttatccactcgatatcacgactcctcagccttagccttgcccttacctacacatgcaaataatatctgtgagtcgagagactcagtaagaaaagcataatcaataacataactataacccagaatataatttggcgtccacacacccaaccataaccctatctctatgtttgacacggtactgagtcaagaaaattcaaatggcaatgctatcaaccataatatatatcagcctatactcggtatgctagtcatactctagtcgtacagatgtgatagcgtcgatcagaatctaagccaaacatacatctatcagtatctaatataactctacgtatactgataccacaatcaatgtaatctaaaaggctttataaacatgtacactaaatatgtaaatacatatgcatatcataatactaatcttaccttgtttccagattcaggtgtgccgtccaatctaagtggagcagctgctcgatgatttataggcccctaaattacattatccataaaactgatgagtgacacactaaatcacttttcaagtacttaaacttgatactaaaagttcacctatcgacgaataacatggcaacaccctaaacatcgcaaaaaggggaaaaattagggttccttagaatgcccccactagtagactggttcttccccaaccggaattccgattctatggggtttcctggagaccaaccgatcaactggttcctacaggtccctctgagtcg

SEQ ID NO: 250489 - DNA, 1042 bp, Cannabis indica
cgatgaattgccaggagtactatggtcctaccgcacaacagccagaacatccacaggagaaacacctttctctctagcctatggaatggaagcggtcataccaacagaaagtgaagtcccaacagctagacatgaactgactacagaaatgcaaaattgggaagacatgtgccacgaactagacacagtcgacgagagaagagaaagggcatctataagaatggcagcctaccaacagtgtctagcaaagcattacaacaagaatgcccgtactcggtcattcaaggtgggagactgggtgcttcgtcgagtttttcaaaacaccaaggaagcgggagcaggtaagctagccccaacatgggaagggccctacctgatcactaaggtagtcggcaatggagcttacaaaatccaaacggacaaaggacgagacatcaacaacagttggaatgctattcacctaaagcagtatcacacttaaaccccaaactattgttctgttctctttgcatttgttttctttatcggtcttacgagacccactcttctcaacgcactattgctaacaaatattcatgcagggagacagaactacatttgggcttgatccctggaaagggtatgtaggcagctctacggagtgcagccccctatcataaccatttttttttctctttttaggataatgcgtcattcaagctatttgacatacaacatccatttgatagtttcatttgacaacccaccgaacgaaaataaattcaagacaatattctactgaagtagaagcacaacgcatacaacgaaccacatagtccaaacatcattctgaactactaagtctaaatctaactcagctgacctacatttagactaaggggaaaatagggtaccagacccatacaagtcagccaaaccagttactacaacaaatacatagcgcatacaacaaacatcattccaaaatactaagtctaagtccaatttggctgacctacatttagactaaggggaaaatggggcaccagacccatgcaagtca

SEQ ID NO: 250490 - DNA, 3744 bp, Cannabis indica
gtatgtttcaaataaatataaaattaaaggtaaatttaattaattaattaattacccttaatttttctgggccgggcggcctggcccaatttcttaatacatgagatgagagtatagttgtaagagtgcctcggcttcccgcttcagctggtagcctggtagtaacaacattccataatcatattagagagcatcatcatgtagaacaaccaccattccaaccaattacactaaattctagggtttccatcctttcccccaattctcaaatctctacaggatttcttcccccaattccgtttcccatggacgatatggccgcctactaccctcctcctccgcctcaacccccaccaccaccaccaccaccatcatcctctcactacccatattaccaacccccaccaccacctcatccggtggcacctccgccttcgcaccaccacttgcctcctccctactttcctcatcatgaatctccttattcatcctacgctccaccgcctcttctctcttctgctgccacccacgatgaggtccgaaccctcttcgttgccgggcttccgggagatgtcaagccccgcgaaatctacaatcttttccgtgactttccgggttatgagtcttctcatcttcgaaacccttcccaaacatctcaggtagaatcaacactttgccaattcatcttttgaaatagttcgttttaagttatgctcacttgactaatccataatggggagaaaggagaaaaatgatttttttttcttcccatttaatccacattgggaaagaaaatggggaagtatatgatttcataaatttatttatttcaacctttcacattccattaatttgcagtcttcattggttagtgctctgacatgctgttcttcatgtggcagccatttgcttttgctgtatttttggatcagaactctgcaatcggagcaatgcaggcgcttaatgtaagacatcttgctttcaggatagaaacctttgtgatatagaatgcgtgataccatgttggggtgctcaattgtgggaattttgtttgtattcgaagtcatgatggggatcttggtgtttaatttataataggtaacatgttgggaatatagctaaaatgtattactgctagttacaatgtttttcactgtgatcacagcaatgcaattgtcctaagaaatttttaaaaagatgaaggggccttaccttatgcctttgaacttatcggcttgaccaatgggttcagcactagtaatagatgttgtacattgtttttccacatattaattgttagacttactttgtttagctagtgacaattggtactgtaaagtgacgttggattttacactttcactcttgtggatactgttgacaagtttgtggatgcagtagataagtatatgaaatacggaaaatcacagctgtagaggatcgttctcagttagtttatctatctggggtggtcaaacggttgtctgataaatagtgtatgaaataggatacagattgtacacttaaatctaattaagtttcttggcagacactttacaaatagtattttatattaaaaataatgacccttgattgaaattcgtaaacgctgtttctagggaatggtatttgatcttgagaaggggtcgactctttacattgatctagccaaatcaaattctagaccaaagcgatcaagagcaggtatttttcttgtttggattttgttacctttttttttttttcagtttcaatttattttgaagcttctctagtttctatctaacctgtgtgcctttgcttgttctttttaagtagatgatgaaagatttggctcagataagagagctagagggtctccatttccaagaggggctactgatttaggtgagtgtctagtatctctttacttgcacctttcttaccttattttttctacgcatagtaaaaattttcactagtgcttctctcatcgaactctctccctctgtcaattcatgtgcttgactttattatttgatgagtgatttatcggttagagttgaaattgttacttagtcacatggaggacacgttcttttaaaaggctcacattgcacatgttttgcacgcttggacactagcaggtgttggcagcatgcacatgcctggaatgggtaattctgcatacaacattggttattcatctgcaccaaggtcgtctgcactacttaagcacatttttactatgtagaagagattacatctatttttatattctgcacatatgtttatcacttcaagctgaaaggtcaagggcatagtgtaactaagtgccctgttccccgatgttaaagtattattgatctttcagagttttttttaatgtcgttgaacaaatactaattacttatttattttttatttgctaaaccatttagccaagggaatttggacagcagagctgtaaatgatcttggtcttccacattcggtagagttattttgtaatttatttattactgtaatttaaccttaaactggaatacctggtgcatgatatgatctctagtttagaagagtaataaatatgttctcttacactgacagcataattcctctgcatcacattcatcacggagtagtcctccatgtccaactctttttgtggccaatttggggccatcttgtaccgaacaggagctagttcatgtattttcaaggttaatacattcttctctagctctagctccatcttcatcttttctatcattgctttttactggactcagatcctgatgttattttgttctgttttcaacatttctaatagattccccgggttcttgaaagtgaagatgcaaggcacgtatggggctccagttgcatttgttgactttgaggtactagatctttcgtttgtggttttagtttttcttgatacaaaattatatttttcggatattttaccaaagattaaaccgctaaatctatgtaggatactgcttgttcaaccgaggcccttaatcatcttcaaggcacagttttatactcttcaccagccggtgaaggcatgcgattagagtatccttctttctttcactatctcttattgtttctttgttcccttcttggtaagtactgtttaaaggtctttttcttaacaataactctaggtttgcaaaatcaaggatgggaatgcgtaagaggtcagattaaatcaagtgaacaaggacaagagctgtgtagaacaaagttgtcctcccaagatatttcttcaagatctgctaaattatttcgtacaatagtcataaaagagttgatcaagttttagttaccttatggtactttgtaccaaatttatgtagactctaagccaaagatgtggccctcatcataataatattttccatcttgatgaattgagaagtgtctattttgacttattggtctatacacaccattaaaatggatttttcttttatctttttagttgactctacccatttaaatgatatttcccaattccaagtcctagcctttatttgtatttgaccttatgaaatgcaagttactaataatcacttacctgaaatggctaatctaatttgatctttagagatgaaaaatcaacatttcaccatataggccaaaacgataaattataacgccccaatatctccacctaaactttagactttcacctcaaatattcatagttggacggcacaactaatccaacattttaaatataaccaaaatatcc

SEQ ID NO: 250491 - DNA, 695 bp, Cannabis indica
actagaagattggagatggtagaaaaaattcaaaaaggaaaacaaaatgacaaagttacatacattcaataccaaaggatcttggctgttacaattgcaattacgattgcggattccgaggtgtagtgtttgatggcggtggaagatgaggcagagggacgcttccgatggtagactcacggtggagtttgcatgcattggggaggcgaaggcaaaatctggagtggggtacaatattaggggagacaagtgcatcgtttgggagactaaggttgagggtgagggtgttttgggtaataaacttataaaagtgggtacatttaaaggaaatttaaaatgcagctatttttggttaagtgtgaaaaaaaccagatatttttattttttattaactcatttcatttttatctttcctttctcggtatttaatttagaccctcttgtattgtttatatccccattatacccttaaagttatgaaaacaatcttaagcaaactactagaagtgacctgagcctggaagaagcttaatgtatggattggttcttctcttttcaaaaaaagtttatgattttgtgttttagaattgttgtggaatctgtgagcttatggctttgtttatggggtgttctggattggttttcatgttcatttgataattttgttgttgctttgaggtgagagtcaagtttga

SEQ ID NO: 250492 - DNA, 836 bp, Cannabis indica
ttctctcgttttctctctttcgttttactcaatatctatttctgatttactatatgtttgatgatttgttctttacttaaaatttatttgtgtaagtatgatattggagctgaaattacataagttaattccttcaattacaaccttcatttctacaacaccatagtaagacagcgagattattactaactattactaatccttcacttgtgattaatctagcatgaaaccaagatgaaaagttaagaggcaatcatataaggggcctccaacttagtgtatttatccaaaactcctctacaacctaattatatacatatcaaacactacagtgatgattgacgagaatgaatgttccaatgtgcattttcaaatgagtcaacttttcatcagtcatgtaattagctatgtggtgagtccctcaccctcttttcccacataatcaaatcatcacatggtctttcttctcgagtcacacttggaaaaaccaaaccattgtttttcttgcagttgaggctttgccttgtaaaaattgagaggatctcaatagtgaagagtgatatcccagttactgattgtgcttggaattgttactgtcaaaagattgtcttcatttctgtacttaaaatcctcagtacttcaagagtttaccgagcaagacttgggttttgtactaaagtaagctccaaacctgtcaggtcctcttcccttaattcttattttacacttagaggtatcactaaagatgttaacttccttaacagctccacgagagttgtacatgtttagtgatccatagctgcaaattcaatattcttgttgtaatccatagctga

SEQ ID NO: 250493 - DNA, 551 bp, Cannabis indica
agttttaataattgaagaattttaatttttcttaaaattataagagatatacattttttgaaataaaattatttttcataataatcgatttatttaagcattattcattttaccaacttacttgagggcaagcaatagttaagtgtggaaaattttgataagtccatatttatcttataaatattgccaatgttatgtgttaatattttaagttaattcttcaaactgttgattaatgtgattttattttgttaggagaattgatggttaatcatatgttcagagctgtatgatgtgattttaatacattttggtggtgaacggtggaggcgggacatatcaaactaactaaatagaatgtaactgaaatttcgacacatttaaaagtagaattggatttggaactcaacatgaaaattttatatctcgttcttaaatttttaaaacatctcaaatcgttccattttgagaaatattgaagaagttatgggtaaaatactaatatgagcacgcgacagtaaaaaccaaggaaggagcgcccatgtgccact

SEQ ID NO: 250494 - DNA, 824 bp, Cannabis indica
atcaccatagggtttctgaagttgtagagcctgattgatagcagctgtgcctggaggaataaattcaagtgcatgtttagttctcaccagatcagtagtaagtttttatatttcattattattctcatcaagaagcatgttgagattcttaattgtatcagtctccacttgctccatggaacttttcagacctctaatatgcttagtcatgtattcccaatggacaaatatttttgcgtacgcattccgtctaccttcaccgtccccttctgatgaagtggagactccatcatcttcagactcaactgaatgactactttgggccatgaatgctaccacctatttgtcctaatcataactttcacttgcagtagagctcttttcttcctcactatcactccaggttgcaacaagagctttcttctttttgaaagtgtttgcacactcagcctgaatgtgtccaaaacggtcacactctctgcacttgattcctcggttcttttggtcaacgggtgtttgaaattgtttgaagtttcccctttgtttttcttgggatcattttctttacaaatagggaaatttttcttgtagttctttttcaagaattttacatagtttctggttaatagggcaactgcctcatcagagatacgattgattatctctggagctggttttttatcttcttgatgaattagagcaaagctcgcatcagatttatctttaaccatatccttctgtttcttcgatttcttccatcttggcagtgacagctcatatttctgcagtgaaccaataagctcatcaagatcaagttcctcaat

SEQ ID NO: 250495 - DNA, 602 bp, Cannabis indica
acttaaatcatcatatactttttgatctaaatatttatttttatacctgcatcttaacattttcctgtgctttttgttcctccacaattattgtttgttcctaacaatcaaggcaattgtagtaatttttaatatttaataaaattatattgttggtatatacaacatgccatagaaacgatataccttagaacaatatgaatatactccaaacttaatataatattatattaagagtttatttttaatcttttttctgaatatatcgtagcacataataaatatatactatagtgcaaaataaatataccaagaaggaatcataatatacaaaaatgagctagattctccttttatacatgcattttaatattttcctatgatttttgttcctccacaattgttgtttgttcctaacaaacaatgccattatagtaattttgatatgtaataaaaataaattgtttgtatataccataccttattgaaaagattctgagctatataaatttactaaaatcttaatctactattatagtagcaagagtttatacttaattccctatttcttttttgaaacaaagattgcaacttttattaaa

SEQ ID NO: 250496 - DNA, 1346 bp, Cannabis indica
ccctcatgcattaagtccctatatagtgacctagcctgactatgaaggggatcgagagaattgctgttaaaatatagtttagagaggaaatagtgatctaagaaagaaattactcagagatcaattgtaagaactttcaagaggaagaatactctattccttctcttaagtcaatacaatataaggggagtaggctattaccatcttatagggtcgaacctctttaaaagctagtgttcacttcattttactgtttttgctttcttttaattatgttacttaatcgctttattatttgactcactgttgttggctagaagcgaggtcaacattttggtactttcattgagagaaaaactacaagtcttttgtcttaagttttgacaggtaaataggatggttgtacaaacccatagaggaggcctcactgatcagggcaacccaatggtgatagatcccaacttgaaaacttggaaaaagacgagaagaccaccatggacaaaccccgagcaggtcactacaaaacctcctactgttgggctttgtgccctaaataaaactctatttcaatgtaatcttttctattcaattatcaataaagaaacaaaattattttcattacttatttagaatgtcatttggctcatgtgatcatttatatgtttatttgatttataaattcatccaaatccttatcacattgatattcttgtttattgtgttgttagcacaataaaaagtaatcaagattatgtgattaaatgtattcctagatttatcagtacaaaggatttaactgatatgataataatccttatatggttaggttcgatctcaagagtgttatttatgttctttgatttgttagttaagcctaccttttggtctgggtgatatgtacattttgggaacatgatagtataatggactgggagcgctaatcatagatatagcttctatccggagatagaagtgaaacgatgatttccttcgagctttgctaaacagagataaatggttgagtactcatttcaatgattatattagttcactgaaatatcatttataggtggctaagtattttgaggataaaatacattgaagggtgtaacggtacattaatccctatgcaatgtatatcatctatagaggatcattgattattgggattataataatagataattaataatgtatctatatcgtggaacatatagagcattctatgtaactgagagtgcaattccaagttctatagtagattcaatgatgaattaataagttagtggatttacttggtaaattctagatctgcttattgaaagatcggttatataggcccatgg

SEQ ID NO: 250497 - DNA, 754 bp, Cannabis indica
tgcttagtgaaaattcaaaaagtatacatagtctaactttaaaattataattgattaatcaaaatgaattaactgagtcttacaagcattatggtctaaactagtttggggaccatgggcctatataaccgagcttccaacgcgcatcaccagtgaccttctggaggtcgagctgcatctcgaagtacttgatgtgagcaagcaggtcctctcgtctagtagaggtatggtatttatatatgccgagaatggtgatccccttgaccgatcaagttcgaggtctgaaggctttggtccagctatgccttggatcatgtccacgagttggtctaatagtgcttgcacagaaggatctgtttctgtggggacatgattgattggccctccttggggaggttgtagattctgaaaagataggggttggctggccataccctgaagggtgtattgtgaagatcagccatgccgtgcagaccttggccggccattcccaggtatgggagttagccctagtttgcaggttaacaccttgttgctgtgcttcgccggccaaaccttcattaggcagggtctggccacccagtgctcctccatggcaagccaaacctacaaagggtagggactagcaattcgtgatgtcttcttggccagctagagctacattggctaaagtctagccgcccgtgactcctccattgactagtgttcgctgtgcatttattggggatagatcacattgttggaaatattttac

SEQ ID NO: 250498 - DNA, 439 bp, Cannabis indica
acaagcccctaaatgagttcttagcaaatgataaatttcctataccaaataagaagttatagtttgccaatttatccaaagcccatatttttttttttaaatttgatctaaaagcgagatttttggcaattaggcatcaaactatatgaccagcccaaaataatcttttgcattctaaatcatctttttcaatggaccgtcctacctttttagctcaaaatagccccttctttattccaaaaggctatgaccaaggtacatggtccaatattggaaaaggctctcatctatattgacgatattttacttttttctcctgatgaaaaagcccatcaattgttattgacccaatttgcttctatcatcaaagcccatggtatcatgttgtttggaaaaaaaaaatgattattggacatgcaaatagaattccttgggatga

SEQ ID NO: 250499 - DNA, 674 bp, Cannabis indica
ggtactaggtcccgatcctagttctgtttctaaggacactaacctaattctgggtccaggtcccagttatcgtgtgggtttcggtcccggtctaggttaggcttcgagtcctagtccttgtttttgtttacgtctttgtcttggttttgatctgggttcgggtttaagtttagatcctggccctggtcctattcctagttcggttctagttccatttgcgattctcagtttgagtttgggtttgagttcgggtcggagttcgagtcgtggtctgagtttgggttctggtccggatttcagtctagatccgaatcaggctctgggtgtgggttcgtgtcctgggttttggtctaggttgggttcgagtcccaagttccaatcccgatctgagtcttaatccagttctgggtctaagtcctttgttctgatcctggtctgggttcgagttttgggccaactctgggtctagctttggatctgattccaggtgcgggtttgtgtctaggtcttgacctcaatctgagtctaggttctggtacaggttcgggtcccaattgtaggtccaagtttgggtctgggtcaggatctcgttccagatctaggtccagcatttcgatcccagtctgcgtgttggtccgagtccaggttcgtatccggatccctatctaggtcca

SEQ ID NO: 250500 - DNA, 627 bp, Cannabis indica
aaaaaaaaaaaaaagtagaagttcaacttctaccttatttatcctattttgttctactttcttcttcattcctttcctcgcctactaagtaatgttgggcttattattgggcccaaagcagttcttaaaatttgagccagcggcccaatgttcatttggcagactaccaagtcagcagccagctatgaccgaccgcacatggtaagtgaaaacagagtgaagggtaaaatggacattttcattacactccattgttctcgtcttcttcctctgttcacttctccaatctccgccattgttcttccctgaaacccaagtttcagtggttggattttgatcgactatggccaatcaaggtgccaagaagctcaaggaggagaactctcgccacatcaccaatctccgccgcatcatcatcgcctgcaacgtacgctttttggcttcttcttcttttttcctccctcaatcgaaggaaaaaacaatgaatcttatgaatactttgttattagaatattttaattatggaaattattttctgaaattattttttatttaaggaaataaataaataattaatattctgataaatgaatattttatattggacaaaatcaattatgtaatatt

SEQ ID NO: 250501 - DNA, 430 bp, Cannabis indica
ggttaaaggtagcgctgaatatcaggcgggtttgtcgaattttaagttcgcaggtttcgaattcaaaacaatgtacccgaatccggtttgtgaagtagatttttgaactcggacccagcccgtgaaatggtcaggttggccagcgggttgcgggttcatcggattaacaggttgactaggtcaacttttcttttttttagagagaaaaaaaactcaaattctatatgggtttttttatatattaaattaaacatataagtgataaacttatactaccataatctatattcgttagattaaaaaaaatattaattttaaaaatataagttataaacttataacactgtaagctatagttatattttaagaagaataattagtcaattttttctcttgaacttttgtacaatattgattttagctccttaaa

SEQ ID NO: 250502 - DNA, 1495 bp, Cannabis indica
tcttttttttttcttcaaaaaataataataaatggaatacgtgttttggcttattagtccttattcaaaatagtttgtctttgatatctaatttcgtaattattttttttcccttttaattgcaggataaaagatttattacttcctcatttgtatgcgtagtgttcttgaaagtctgtaaattccaccaagatgattaggtttggaacttaatctatgcatggaatattagcaatggggtatgaacttaattgaaataatatattttgtaggtatgttataggtggaaaattgacattagaagagttgtataggtagttagaattacaggttttagagttatcgagtatgttcatcatttattccttgctagataaacaaataatgagaccttatttttattgcttaattcaatgattatatcatcatgtatagaatattgttttgaaatgttcataagaaattttcatcagacaatattgtattgcaggaagttggtgaaaagactgtagagttgaaaccaaattctctctttgaacacaataagacttgtcaaagtaacatcttcactattttattgagttgtttacttgttaattcttctagcaattaagaccatttgaatatatgatacctatttttaggtaggagcattttagacccacgtatcaactattacaaacttcgctaagatttatttttcttccttttctagaaagacatcatttttgtttatactttcaaactatttgattgcacaatatgaattgttcatgtaaacgaagaaccaaaaccaccaacgtttacttggttttttaaaagtgaaataaatctaatcttatattgattgatgtatttataatttttatcactaaagcttgtattttgtcataacaggtgtgacaaccctcccaacgctcccttagaatcaaatactattaattaaactagattatcatactgattgcagatgtgtgcaagagcaggatctcctactgatgaaactctcgtagatctgtgcgagagcatggcctcctaatgatgaattatcgctactgattgcatctttgagtacaatgaggcacaagaaatatataagaacaatgaaattactgatttggtaaagcaattgaaaccaactcaggtatatataagaaatatggtactacttactacttttaaatgaatatattgcttactaattactatcttgattttgtttttatactctttgctgtttattttattatgctcttgttcccgaatttaaaactcgggaatcgaacagagctcaacatgtagattttcacatgaatttggctccatttcgttttcttattgttattagataatttatttgaaaaagcttcatggtgttgtttattcttggagctgtattggaactcttttttaacttcttgtttgtggttattacatatcgattaaacataaatatgtttgtcttccttgtatagcaaggtttaaaatttccagt

SEQ ID NO: 250503 - DNA, 733 bp, Cannabis indica
tttttttgtagcaatgaataacttcattgaaaaaagaaattataatgtcatacaaactttaagtcttaagaaaccccagtaaaagaaggaactcaaaaaaaccatactagctctctatccacctgaagagcatgccgagctaatccatgtgcaacccattggctgtccgacgaacatggattagggacactccaagaaaattagacatcaaactagctaaatcctctagcaaggaaccaagttcattgaggaaagaagagcggttagaaaatgcatttacaatcgctaaacaatcagatccatcaaaatgtaaagaaagtccaacactaacagtccaatccaatgccgcaagtaaagccaaatattctgcatgaacaactgaaaaacaacctgcaaaaaaataccaacaaaaataacatcaattctcaaaaaactaagaaaagataaattaacaatattcattctatatatataaaaaaaaaacttatcttatcaaatgcagatggtaccgacattagatcctggacacaatagactactttaaataatttaataatttaataactcaataactttacaactctactaataaccaagaaacaaaattctctaataactactaccactaatagtcataataaagtctacctcatatatatacagtttagtgtgagaatttaaaaactaatattaatacaacaaaaactaacacatttaataataataataataa

SEQ ID NO: 250504 - DNA, 742 bp, Cannabis indica
atttatttatttatttatttagtctaacttgagaattgtattattgatttttttacttacaataattttttttcctatttatttttaatttgactaattataatttttgctcgggacatgcactaaattataatttttcttgagctattaaaattattgaatttaaagatttttatctaattttatttaattttgccaatgtgacaattatacttatactaaattgtgcctctaaactttaatatctcttaaattatttttcttaatttttaatatgtatcaaattgtactcttaagattttcattcacattaaactttttttggtagaaatagataaaaatctttaaatctaacaatctcaatattttgaagggaataatttagtatatgtaagttttatgagaaaattatttttaaataagataaatttcttttagagtaatttgcgttatgaatatataaatttaacttttggttgtaaataaatatataagttttatttttggccataataatttaagttatatttttagaatgagttatttgcggcataacctcctaaagcggtgaggtttttacaactaacccccaattctaaaattttggtggtaaaacctcctaaactcaagttctgttagcagttagccctttccatctatttttaagtgttaactgccaggttggaatgcctacatgtacacagtgtacacgtggcacaattttattgatccacgtaattat

SEQ ID NO: 250505 - DNA, 718 bp, Cannabis indica
aacacaacttttaatctttttacgagcaccatgaaacacctgtgagtcacaataacttaggaagaaaagctattaaatcaaaagtaataaaaacttaagtattcttatcagaacataacatacatactcgtgattcattatctattcagcttgcatgtatagtataacgtctatacgaaccgtgtattacacattataaaaatatcatagcatcttgccgtgaatagctttatcattacactaatcaaatattcattcaatacacaatcacatattttcaatgccttgtaaaacactctaattttacatccctataaatacgtattcttacatcccgtgagtcactgtggctctgcaaggaaagaaactaatttctaaagcaatataaaattcattcagtcacattataataaagatgtatccgattacaactcatcacataatagcatgcttaattcattttacaacttcgtaatcacacaatcttagtactttataacgtacccttaccactcattaaccacaagctacatatgtcactatcgtttcccgatacagcaaacgataagtaagaaacatatctgcagtttccaagaataattactcataacggtaatgaccgttaccaatcctcaccgacttgttaatccaacgtagctgcgtaatgtcactatcgtttcccagtaaagcaaacgataagtaagaaatctatccgcag

SEQ ID NO: 250506 - DNA, 595 bp, Cannabis indica
tccacttcgataaaacgccccaaaacttcaccaagtctttgagccaaggcacgagaccgctttaagaaaggaattccagagacttgtatccagaaaggagtggttgtgagcgattcagcggtcacaacagaacccgcttccaagggtgtcataacgatgagtttgtaatcaaaatgccaaggttggccgatgagtactcggcgcctgtccccgaagcatccaaattcgacagtaaagaaattgggttctttttcaaggatattgatggaaaatcgttcaggccacatttgcttgagtcgattcttgaaggcctcaggattaaaatggcgattggtcagaagcttgacggctaagaaggcagagggttcttcacggccatcatcctcagggtggtcaggtgtttcagagaaagaatgtatttgagttttcaagagcagtgagattaagagtagcagtgaaggattggacaagtcgtccatgatcaaagcagggcagaaaaggaaagattgctgaaagagacaggttgcaaagtcaatcgagtaatgtcctgatatataaagccttaagcaaactggaaaggactctggcaagagca

SEQ ID NO: 250507 - DNA, 900 bp, Cannabis indica
atttcactacaagaatgtcacttttaccagcacagtttgctactgcgctaggtaaagtaactttaccagcgcattcgcaaactgcgctggcaaagagatcaaagttttaccaacgtatatttgcagtggctaaaatctaacttttaccagcacatttacgcgctgggaaaagtcttttttgccagcactttttattttatgctggcaaaagttctaataccaacattgatttgccgatccccttttgccaacacattataggtaaattctattttaccagcgcaacactaacttttgccagcataaaaatgtgctggcaaaagtaacatttcttgtagtgtttagatagctgcctgattagaagtgtagaagaacgagatgtaagtgtggagtctatagttttgaatgctttggtttacaatatttaaaaggctaggaataataccttttggaatagccaaatatatattgtacttttcattgtaaatagaagggtaattagtggcataagtacctaaagtttaaggtttgtaagcggcatgaatccaaagatttttttagtggcataaatacttaatatttataaaactgtaattttcttctagtttcattagtacagtctctgtaattattctaaacagggcacatataagactcagattctagattatttagtttggacagaaatatgtagtatcatttgcttttaaatcttttttcaatatataaatttaaaacggaacttgtattgacgaaaatagagaaaaattacaaattttataaacattaggtacttatgccgctaaaaaaaatcattaagcttataccgtttataaactctaaactttaggacttatgccgctaaaaaaaactcattaagcttatgccgtttataaactc

SEQ ID NO: 250508 - DNA, 859 bp, Cannabis indica
ccttccgttcaagatctctagcccttgattcctttctatcgcagagcattatcaagatctgaacctagatctctttctctcctttgggtttgattaccaacgtcttactcactatgattgagtatttaacttgctatgtgtgggcatggaactcatcactaagggtttgaatatgtgaataacaatgaaggaagtttgaaatcactaaggaaggaactctctcatctaggtttggttgaagagtcaagttgacgaaagttggatgagtgagagtatcatgttccttttatagtgtttcaactagggcttagggttgaattatatgaattaaaaaagaataaaatattgggcaaaaatcacttcttggccgtgcatattaagggacaaatttccaattagatttttggcactttatttcaacctataaatgttgttatcccaatttttgcaccctgacgtggcatcacacgatggtgtcacgtggaatcaactctatgtacctgctcgcaagaaatatgccaaatagggcaccacatacattcgctcggacgaaatcctctaagtcggacagtctgcaagctgctcaacatgccaacagttagcaaattcaactttcccatcgtgagtcatcaaagaaatccctataactttgggatcagattacagagatatggcaagctgaccaaatcccacgattagtgtattctgtatttattatgcaatctttccacttatatcaattgtaaccagaagggaaacacttccctcccaaggtcatagccctataaatagtgattcatactcactgggcaaagggtcgaaacatttgtctaaaaattcatattcagagatattattg

SEQ ID NO: 250509 - DNA, 660 bp, Cannabis indica
aacgtccaattacagccattatgttgccgaatattattcagtagctaggattaaaataaaccaatttttgtattattttatttgtttgttacaatataacttactttatgttgtgtttgtttatcatgaatacataatattttttatgcatttaatatttcgtatagattatttgttatatagctaactttaaattttatttgttaatggtgtagatatgaccaactcagattcgggatcagattcacacccagaggcaggcagagtgtcctaagccgatgcctacacgaggagctactcaaatgaataaaatatccaagttgatggatcaaggcaaactagtggccctcgaggtgaatgacaaagggcaatactatggcaaaagctactccaagctattattgtaataaccaaaatacttggttattattttctagtctagataactcgatgtagaaatagtgattgcataaaatatgttattaactcattagaaaaaaatggtatttttctaagttatgagaattatgtttttaattaatgcacaatgggcttttaggtttagtctaccacgtgtaggacttaagaaattatgaagttaatggtatttgcaaccctcttaatatgtgttaggtagtattaagtgaatgatgtgtttta

SEQ ID NO: 250510 - DNA, 766 bp, Cannabis indica
gaaagcgttgttcacatcgagttacaaagtgtgtgccattttttgatagtagaaatggccaatagtagcttgaaggtaaccatttttgcaactggggagaatgtgtcaaagaaatccaatccttcttgttgtgtgtatccttgtgcaacgagccgagccttgtgtctttcaatggagccatcactgttgagtttgatcttgtatacccaacgacatcctatggctttcttgttgggtggcagtttgacatatgtccaagtcttgtttttgagtaaggcaaacaattcattgttcatagcttggttccaaatcttgtgttgcgaagcctggttgtaattcgttggttcatatagagctgtaacaacagatataaaagctttatgagatgcagaaagtttgtcataggatataaaattttgaagaatgtgaggagtagatgttttgtcttgaatgactgaatggcattcatagtcacgtaagtaggcaggaggcttaataatcctgcttgtgcgtctgagattattttgagtggcatctgtagattcagcagtgccattatccatagcagtatctgccatagaggttgtattgctgctgtttgtggtagaactttcttgagccgtgtgttctgcgtctacattagtgtcctggtgagtattatcaacctgagaagagtttttttaagtttaggaacctaggtaataagggccctataggtaataagggtcgctcacagtagttctaaactttgatctcctttacaata

SEQ ID NO: 250511 - DNA, 735 bp, Cannabis indica
atcacttccttacacaacacttacatagtctaaatgctatcaaagcatataataggttcaatggaaaaatggaaaaaaaaaatcttaggtggggtatcattttagctaactattttttgtttttgatatatcgataaattgtaatttagttataaattagaaaggaaacaaggagaaaaagaagtcatgaaagaataccacttggtttaaaagcataatcaaccatttagagcttagtttactgtggaattttgatatttcaaattgccagaaagaaaaatacatgaagatatgtctataattggattttttttaataaaaatttcattgtaaaattggcctaagagtacataacgcaacaactgaaaaagctccagtgctgcaagttaaatggtcaaatatttacctaacataacagtataacacatattctgatcataaacatttatcatataagtaaatatgttatagtaagaagaacaagatcaaattttcaagacaaacagatcagaaatactgaacgaaagcaatagaaacactaatgaagaattcgaaagttgactttgtctgaaatgtaatgcttacttttgttcatgcaaaaaacatcccaagcatatatatctagagctttaataatgtcttagaccagtcatgtcaggagggtataagaattttaaggtgaaaatacttgcaaacaaaacatggatgataattctaattattgtgtcattttag

SEQ ID NO: 250512 - DNA, 948 bp, Cannabis indica
ctgatgggttgttggggaaatgtgaggatgctgtgttggccaaggatttgaagttaggagagactgaaaatcagttcaatcatgatgaaattccaactctgctatcatcagggaagcaattaattaaaacaagtccagaatattaccctgttggcaagccaatcacaaaatctgaagcagccctccaagcttctggtttgtattctgggctaaaacatcactttatttttgcataagagttgccttgttgcatgaaaggcctcaaaaaggataaacgaaattacatatgcctatacatttcttcatattccagtacgtgttttaataatcttccatagttttttttttaatgttgtgtttataactgtcaatgaagaaatcttaacttgtctgaacatgatgttgaaaatttaaggaattcacctatgcatatttaaccttagatgtgctgtaatatgttctcttatccatatttcaaggtcatttagtatttagtgctatgcttatttctttgtggatgtcagtgcatccctctctttgtccgcctgtgtcgcatttgcttttcttcctttatgctctttttcttttgataattacgttgtcaacagaactatggtccggtgtatttgttcctcttatgtttctcatgaatactgcaaattccattgcttccaggtatttcttttttttttcccttaacagctaatttgtgtcatttatgttaataatctgcataggcgaggctgtatatgtagatgatattccttcaccaccaaattgtttgtatggggcattcatttataccacagaaccttttgcacgggtgaagaatataacattcaagcctgatcaacagccccgtggagtagttgatgttatatctgttaaagatatccctgaaggtggggagaacattggatccgcgaacatgtttggtactgaaccttt

SEQ ID NO: 250513 - DNA, 1027 bp, Cannabis indica
ttgatcaaatttatcgttaatagctgtaaagtgttgctcaagcatagaactaatattctcaaattgagaatccaaagtttgcttgaaaaatgactccatagatttgagagttgaacaatctcttcattttccatggttgagagttcttgcagtgaatctttcactgtaatttctctcaatgaaagcaccagttcttagataatagtcctcttcgagacaggacaaatatccgaaatgcactcttcgagacaatgccaatctcccaattgaactaaagttctatttacccattccatatctcacaataacctcacaattacatatttatagtgattcacactctttaaaaattactaataaacccctacactatttcatagtgtaacaatttacttaataattaatttcatacctattatatatacctctacatatgctactataaaattaaagagattctattgttattcaatatttgataatataattattcatctagttttgaatataggaggtaagcaatatatttttatattatttttcttaaaatttttgttgtaaattatatttttcactcaataaaaaattgtaaattatatacaattatatacactatgtaatatgcacacatatatatatatatatattagtttgatacaattataatatatataacaaatatcatacctatatataaatatatattttttttatcaaagatcgaagagagtttctactactttgtatcaatttgatgatatctattatcatctagatttgacattagaaataagcatcataattttattgttctaatattaattagatacaattataatgtatataactaattttacacctatatatatgtttctatcgaaaattgaagagagcttccactattttgtatcaatttgatgatatctattatcatctagattagatattggaggtaagcatcgtatttatcattgtcaatgtagttttccatgtaatatatcattatatataggataaatagcggcat

SEQ ID NO: 250514 - DNA, 895 bp, Cannabis indica
aactattgacatgtcatcgacatatagtaataagatgacaaatttctcattaggaaatttgttgaggtagacacaaaaatctgcagctaatctcttatagcttcgatccaccatgaatgaatcaaacttcttgtaccactgtcatggagcctgttttagaccatacaaactcttacgcagtctacagaagatcctctttcctttttacctcaaaacctgcaggctgctgcatataaatttcttcttctaaatctccttgaaaaaatgcagtctttacatccatctgctcaatctcaagatctaaactcactactagtccaaagattattctgattgatggcattttcaccactggagaaaatatttcatcgaaattgatccctttcttttgaccaaaacccttgacaactaagcgggctttgtactttaccaggtttccatgtccatcatcctttaatctaaagacccatttgttctttagggccttcctgcctttcggaagtttcaccaactcataggtgttgttctttctcctcatccatggaatctatccacttgtctttatctttgtgagccaatgcttcctggtagttctctggtccccctttcagataaaaggatatactctgatcgtggatatcttttggatggaattagtcctctagccgaccttctgcgagattgctaattttctggttgctggtactgctcaccctgattgatatcttcttgtgtcggtacatcttcttcagcatcactgtcatcaccatgggtcatctcagcaacttcttgcaattcatcgtctgaccattgttgttctggaggaaacaactcaatttcagccttttcaggttgacctttttcttctcttatgccttcaattgtttgatcttca

SEQ ID NO: 250515 - DNA, 517 bp, Cannabis indica
aaaatatctgcattttgttaataaacaaaatcataatacaagtaagcacctcacatctttaagcatgtaagcaattcagattcaaaaacatttttaacatatcaataaaccaggcttcatcatattccccatgcttcttctcaaaaatcacaattctaacttccactcaacgaattagacgactctattgatatgaccttcgtaacaaaagtatccttaaaactgacaagtgttgacccgagaagaggattataagaaagaagaatgtgtaatgatagctcaaaatcttcactagtatcatctaatcatgtaaccgaaatttctcaatagacaggcaacccaacaaaaatgttgtaatttacaacaactttagctagattaatcctgcacaattcgaaaccaaaccaaactaaaccaaaaaacacacaagcgattaaatgtaaaactgaaagtaaaagaacacaagaaatttatagatcggttcacgtcttaaatggagctactcctcttgaactcc

SEQ ID NO: 250516 - DNA, 3233 bp, Cannabis indica
aatacaaacgaacaccttgatttatagtcttcttcaaaagattactcgatctttgcttattcttgcttaactttctatttcagccagggccacaatttgaagagagaaactattaaacaacaatatgaaatggtatgtgagaacaactaagccattcaaaacagctaatttttgcttccattgtatgctgagtttgatgaacaaatgtgttttgctctgtaggtgaaggaacggactgcgaatgccaacgatttcgtcaacggtggatctcatgtgatggaatatgggagtagaagtataagagcagagaagctctatctctaccaaaaggttttgatcctgccactgttaacttcccacccaacaataacaaactacacatggctatggaagttgtgaaccaaagagatgcagctatacttcatgtggcaattggtgaggcctattctcatatcagttctcaaatccttaactgggttcccttttgttacactaactgaccttttttgttcttttttttgttccacaacagtacaaaagatcagaattagagaagaagacagagattttgaaacagataaaggacacaacaaggcacagaacgcacttagatgagagcataaaactgataggctcactcctttatggcccacaaaagaatgaagctgtactgaactctgttagatcacctggtctgccgctagtagatgactggagttgtctgaagtcgatggttcgagtgtttgaaaagcactgcggatccttgacgcagtatggcatgaaacacatgcgcgcattcgccaacatatgcaacaatggtgtttcccaagcttccatggaggacgcttgtttggctgcctgtgacaaccatgatgctggccagtggcatccttcaaacaaaggttttagcgcttgatgatgataactctcaagcagtagtctactttgttagaaagtatatttttatatataaataaatgtatttatagtttacatgttggtataagtagtgtttacttatgatataagctttgtgttacaatactcgataatgtgtaaatatataaggttaccacaggatcaaacatgggcatttcaataaatttcttttggggtgagtgaaggagcaaattttcaatttttaagcacactactttcattctccttccattatatcatatacaacttgctaccatatttttccaaacgtggataaaataaaattttaaagatgattagagatatttggttattgtattccttcaaccacaaatagtatttgaattaattgctagttatacctacacccaatcaccatttactcttagtttaaatatcctcacatacggtggtatgcccgatatttttatagaaactctttcttgtttcttacaaattttattgggtcgtgggtcaggtctacgaaatgcgaatagggaacatacttttcatgtttcttttgtttctttgtccttggatgaatctctcgtctcatctttttactttgtattcgagccagtaggatttggatttcctactttagtggtcacaatgctcgttgttgcggtacttgtgctgggtttatctctcgagcaaaacattaatagcttaatttcatttcgtgcctcttcctttcacataaaaatttgtactttttttattgaactcgttgatatttctaacaagacaaccttgcaagtcatcccataattctccctgtagttgacaagttagttgtaattccagcttgaaggactgttaactgaatgctatcattcatattcttgactttggctgcagccatactaaaataacgtaagtacacctcaagggattctcttgattgctgcttgacattaattaaagtagatgcttatgctctccgatctctcgcagcttggaattagtttttgaaatccttcgacaattattttaagttatagaatggttagtagatttgtcaaaccaactacttgcgtctcttattaatcaagttggaaatatatgtatcgcgagttatttgaaacattgctttctcgtattatgttattaaagttgttcaggtgcgttacaggacctgttgtacaatcatattgtgcgacatgagagtttttgaatcctccaggatattgtgaattcaaaataccaggatcgaatggttctgcctctttgtttgtcacatcctgttagtttctcatattctccatcttggtattttttaaatttatctttcaactgtataactcgcaattatattggatccacaggctattgttccatgggttgtatgccagcatgttgatttaattgattacacaaatttggtgcattacactttagattctcacgtcggttaggttgtctttggtttaactgctcgggaatatcagggttgcgaggtttttgatcctaattacatacaaatcttgtccttgagtaactttcagattggtaactacgagagttgcttatactttcttggtcattgtaataacatcgtgatcctcctttgcctcacgtttacctatcaagggcatgagctctggttgacctactgtgctcgcgtgtttgatctatactcaaactagattcatgtgactcttctcgcatcgacctccttttcttgaagagatttgacacactgtccctacttaaattaaggtgtgcaatttctctatcgttgtgagtaggcctttgtagatgcctagggggttgacttgacgcaggttgatttccagcatttttcctgtcatggtgcaaaatttcttggtttctaggttgcgctttcttggcatttaattttatgcgagatgactttggtatatcgagttgttcattccctgagttttcaaatccatggaaagttcctagatttttaggccgcgcttcttgattttttgtatttccaatattttgtcggttttctctatctattgggatatccctcacatttccaagttattcttcctgagtgtttatgtggttctttttaggggtgcacatgggctgggttagccgggttgaaagtattttagtgggccaacctaataactacggtttggagaaactatgaactattccctttttttaaaatcgtataacccaaccctacttactataatgatataagggttgggttgggttgggttcattgggttgtgattaatattttttttagctttaatatttatatatgttataaaaaatgataaattcaaatgtactataaaatt

SEQ ID NO: 250517 - DNA, 621 bp, Cannabis indica
taaggaaataagcaatttgaatggacagaggaatgcaaaaaagccttgctatcacggaacatgcagtaagtgccgtactgatcacaaaagagaactatatccagcatctagtctactacatcagcaaacgactcattaaggctaaaggcagatatccattgatagaatagctcacctattggctaatcttagcaacaaggaagctaacgccttattttcaggctcatcctattttcgggtatacactgaccaacgattacgtcaaatattaccaaagtcggacgccttaggacggtatctcaaatgggtagtttagttgggccaatacgaaatcatctttcagccccaaacaatgattaaaggtcaggccttagcagattttgtggttgaatgtacgggtaaagaagaaagcacttccaaaagtaacccagagccagtacaagtacctcagccgaaaaatattaaagacaagtcaacttggaagttacacgtagacgggtcggctatggatcagctatctgacacacgaatctcccttgtcacaccgggggggggggggcgaacacttgcaagctacggtcaaatttggatctaggcatccaataatgaagttgaatatga

SEQ ID NO: 250518 - DNA, 524 bp, Cannabis indica
ttttttttttttttctaaatagaattcgtttattcaagataaacaattacaaaggaaatggctcatcaaaccgaagagcttgacgaatacaagggaacgaaacctcaatctacatagtactagctccagacaacaaaacttaatttgctaaaatgcgagtcatttgattagcttatcttaaaacaaaacctaaaccagaaacatttctaaattgaactaagctttgaatttggtggagcactctatctatgtcccgttagctagccctttcttcctgaagcagttgtactgcttgtcaacaatcaatctccactactgttaaatctgtatgcctaggttctatacgcgtgtccatatgtctttagtcaattagttagataaatacttgttaataggttcagcagttgagtttgctaatctcccagtcttaattcgagtatgtaagtattttactactagaggtatttagtctacaaatgtctctaatttcttatctttaaggtacttaattcatcatcgtaaat

SEQ ID NO: 250519 - DNA, 673 bp, Cannabis indica
agccaaagtgacgtactcgtgtataagagtcattattccgtgggtgtaaggattcaatagaagcttgaagcggggacgttacataagtagatgtcccaatttatttattaccattgttggtagcaaaatttattgataaataaagatttatttaatttctattaaaaaaatagtggtataaatttatttgattgatcaaacaaataatattatgcatatctacttaattaatatacacaatacatattattcattaaaccctattaattacgtgaagaatcttgcttgtaatatttattaaaatcttaaattaattaggtgtgtaccattgagactataccaaatactaatagcttgttgcattaattatttgcctaaccatcctatatggtgtttagtataaatctattataattaattgcttgtatttgtaaattagggaactaggctcaacctagttctaatggctggctaattcaacttacaataatgcattaatataaaaaatgaacattaatacgtctaattgacaatcaattggttggtatcaacttaacttgttatattatttcattgaatattatttagatagcattgtgcaaatgccaattatacccttatgcatatacagtagaacctctattcaagaatactctattcaagaataacctct

SEQ ID NO: 250520 - DNA, 1480 bp, Cannabis indica
cgtatagtttcttttctcgtacgatcatagattttcagcatctcagggttgtttttttgaagaattttctcacgggttctgggttcttctacggcagtgactgatttcctgcgactggtgctcttgcgactgggttcgtcggtttctgcgtgttgcgactggtgttctgggtttcttaggtgcctgcgactggtgttcttgcgactgggttcgtcggtttctgcgtggtgcgactggtgttctgcgtgtcgtgtttgtaggttccctcgtcattcctcctcgatttccagcgggctcatggttgtgttctgggattgattggattacgtcgactgcgtatactccctcggtgacgggttcctgcgggttgaacggacgttgatctctgggcgtgtgtccgtttggaggtaatatttcattgacgttttggattgtttggattgttttgtgaagtggactgtgattgtttggattgcttggattgtttgggttgttttgttgcgactgggatttttggattgtattttgtatagtggactgtgggttgggtttgtttatttgggttcttgcggctgagattactgggtgcattttttctggtttatatggcttcgacgagtacagccatggatgacatggagtttcagtatgggcatatagaattggatgatgaggaagaatgtggttttgagattgaggatgacgttgaggaagcggttctggtggatgatcgttggtgtttggtggggaggtttttgaatgcgagatcgatagattttgaagctatgaaacacacgttggcggggttatggaagccgggcaaaggcttgtttgtcaaggaattggggccgaaccttttcttatttcagttttaccatgagatcgacattaagcgtgttattaatggcagtccttggactttcaataggctaccattgatatttggtagagttccacgaggtggagatccgaaggctgtaaagcttaatcaacttgatatgtgggtacagattcatggcctttctacgggatttatgacggagaaaattgtcgttacagctgcaaactacattggctcctttgttgaatcggatcctaagaactataatggtctttggcgggattatctccgagtaagagtgacggtgaacattgatgtcccattgaaaagacgaatgaagcttaagaaaacgggtggtgagtggttttatgctaattttaaatacgaatttgctccgacgttttgctttatctgtggtttgataggtcattcggaaaacttttgtcctaagttatttgatacacctgaggatgagattgttaaaccttatgggagctttatgcgtgcgcaaccacgaaggaaaaattatctattgagctctcagtatttgcgtacgggtacggaggccgatgagcagtttgaccatgcatccccggtgcgacatgaggaggaggatgatcggccagccatgcaaactgg

SEQ ID NO: 250521 - DNA, 710 bp, Cannabis indica
gaagaccgtgaagaaagacattcaacaataaggagtttcaacactaaagaaggagagaaagagatcctgttaatcaacatacttgtgggtatatctaagatcctggtaaaataatttccaacatgcacaacatagcatacattaaacttccaagtactggagcataaggaacctttttcatgtcttctatctcttggggattagtgggacactgttctttagatagacggataccaggtctagaaggcataactgcccctctggtgtcactcatgaaaaatcactctcaccttgtcaatgtaagttgcttgcgagagagcaagtgatctgttcttcctctttctaatgattttaataccaagaacataactagcttcacccaaatctttaatttcaaattgagtattaagtcattccttaatgtcagttattttcttgatatttttaccaataatcaaaatgtcattaacataaaggaccaagaatactactgctttattatccttcagttggtaaacacaaggttcatcttcattttggtgaaagtatattgttctttaattgtctccattatcggttcaatttcaattctagctctcaaaattgaactcgaagacgtagcattgtgggaggaatcatcatcaatatcttcaactttccttttctccttatctgtaactctggagcgagccctccttgcaagtgataat

SEQ ID NO: 250522 - DNA, 736 bp, Cannabis indica
tctttggtgcatttggacggaaaagaatgcagaaactcatgctaaaactcccaagtctgcctctcgaattttgaattttgttggcaattacctatctgacttcaagcatgcttagactaagagtttatctacccatcagtaagaccctatttgttcaagatctcatgttcctactgctgcaacttcacaacatactttggtgcctccaactaagcctaaatggcttgctccactatctggtaggcttaaactaaatacagatgctgttgtcaatatttcttttggtgtgtatggacttggtactctacttcgtaaatctaatggtgatgtcattgccgcaatggctaaaccaattaaagggtgtatcaaacctaaagaaatggaagtgttggctgtggcttggagtctcaaattgctggtgtctcatcgtctaactgttaatctaattgagattgatttattattagttgttaatatattaaagtcttcagctaaattataatatacttaatgatgttacttttccgaaaaagaaaattagaaagttgaatttaatttttattaagtaattagttttcttaaatatatacatatatcactaaattatttttattaagaattagacattactagctaaggccaaatcaccatgtgtcaagtcaacttcctgttaaccatataagataaggctattatcaacgcaagcaatacccacctaaaaaactaaccaatcaat

SEQ ID NO: 250523 - DNA, 704 bp, Cannabis indica
tttttttttttttattagtaagtgatgagtgagaaaataagtatataagaaaaactactccattagttttgactctacttatatatatagctgatggcaccatcctactactcgtacagctgcatacattatacaaaaattacataaaatataatataggtatcatttttgtcttttgggatgaagtgtgtcacttcaatattttattattgagcttaatttgttcagctatatatgtaggaaagtgaagttttggttttaatcttttagtgccacatggtggggcttcatatatattgtataggtccccaattctcagccatgatcttccctagtatgcatagtaatgcttgtctcataaagtgaaggaaatacctcagcttttgtatctttctatactattctttctctttgggttctgctggagatgtaaaatgctagagatattgttctcctatctggtctgaccacatttgggtcctcttttgtttttgtgtagatttttagggtgctcaacattgtaccactatcctaagtttgagcaactcttaatagatagtacagttcaccttttctatgttcttcctaatatttttagtttaaattaaaatcatttacatatgccaaagagacaaaatcaccttatattactacaacactgagaaaaaaagtttcaattacttgtgttttcctttttctttttt

SEQ ID NO: 250524 - DNA, 711 bp, Cannabis indica
tcagaatttcttcgtcttgttggtaaatatgatctggtattttcgcaaatctctgctccaaatctggaggagcttgaggtgggttttcatgtcgacctccctaaaaccttccacaacatttaacacgtgcacggggattctaaggaatttgatttccctgatcgcctccagtctcgaccctattactatgactccttgtactttgctggacgtccatttaataggacttagcctgcgaacccataagtcaggcaggtcagacaacgatctcaaaaacttaataccgctctttatggattttatggcaacgcattaaaataaacaattacaaactactatgcttcctaacatgctttaataatcacatacaatactaaacaagtaaaggcttactgaaccgtgagccaagcttttctctgataatgattgtacatgtcttaatgatctttggtaaacaaacctggcgaatctgataccaaaattgtaacaccctgataattaggcgtgctatattgatttttcgactacagtgccacctttgctaatcaaaggattttcttgaaaattgtgtcaaactaaaacttagatttaattgttaaactttataaactttaaatatttatttacaaaattcgggatcccgtattgaaacttttacaatataatcaaaaaatatttagtttgtcgcacaacgactacaaaataaaaccc

SEQ ID NO: 250525 - DNA, 1119 bp, Cannabis indica
aataaataatgaaaaaaatatgggattaaaaaaataattaaagtaaaaaatatgagaaaaaaataataaataaatttgataaaacttgtaataattaggttcgccggaaaagtcaccgatgtcgaaaaagtcgtcggtgctggaaaattcaccggcaaaggtagtgttgtcggaaaagtcaccgttgtcgaaaaggtcacaatcgccaaagtcacctgaagtaaatgtctcatatataaacaaaaaaagagaaccggtttccataacagaatgaataaaaataaataattcaaactggttagaattgaaatataaccggttctgtaacataacctgttataattaaaatagaacaggtttcgtaacagtgttataatgaataaattaaaacaactggttatatttgtgtgtctcaaatttttaactagttgataaataataacacacaataactcaaaaataatataaagaaactggttatatttatcaactagttaaaaatttgagacaaaaaaattagttatgtaaaacaactaagataaaaactcatacataaaaaccagttaaataaaataactcaaacaaaaatatcaattcaacatgctccaacccactaaataattacagcaataccatatctacccaaaaatactcattcattatgttatataactcgttctattttaattatatccggtttgagttatttcatattatttgtttttattcattataacactgttatagaactaattctattttaattataactcgtttgagttattttgtgttatttgtttttattcattatgttacaaaatcggttatatttcaattataaccggtttgagttattttgtattttttttttcattatgttatagaatcggttctatttttatttatatctgagacatctacttctggtgatttttccagtgactttttctggcgacggtgactttttcagcgacggtgacttttccaacaactttctcagcgactttttcgacgacactaactttttcgacaatttttccggtgatacttattattgttttaaaaatatgatatttctatttttttttttttattaaaaatatgacataaaaaattcat

SEQ ID NO: 250526 - DNA, 692 bp, Cannabis indica
agccatcctcgttaagccactcagcagagccgaaatcagtgagcttgaggttccctctggagtcgagcagaacgttctccggcttaagttctctgtgaaaaatggggaaaataaattagggtttttgatagagaaatgggatagagatgtagacaagattactgtttttcagcaagaagaaaaggcaaggaagaagaagaggacgatgaaggggacgaagaagaaaagggcaagattactggtgtttgtgaattagttttaggttttgagttttaattaatgatttattttattttaatttaattaaaatataaatatgaatattaaatatttattattttattttattttaaaactatttttgttttatttttaatttttaaattgatttacaaataaaaatttaaaattaaatgacgtggactaattaaagaatgacatgtggacactaacttggcacataacggtcaggtacctacggaagttccacactagtgacggaaggtatttttaccgccaaaaatacgacttaggtatttatctgctactcggcataaaacttaggtatttatgccgcaaattactctattattattcaaattaaaaattaattattttaaaaaatagttaattatagttaatttaattctaaaaaaaaaaattacatgttgataacttactattacaggtcc

SEQ ID NO: 250527 - DNA, 1368 bp, Cannabis indica
ttaagtgtgtttcctttaagtccataagagcggtattaagttttatgatcgctgtctaacctacctagcttatgggtttgcaggctaagtcctattaaatggatgcccaatgaaatacaagaagtcagggtaatatggttgagaccggaggcggttagggaaatcaaattccccagaatccctgtggtcgcggccatggccgtggcagagttcagggtggtcgtcctataaatccaccacaagctcctttggattgggagcagagctttgtggaaatgcaagatcgaattcgccaaaaagaagaagaaattctgagattaacgcagcagggtcttcctaccgtttctccatacaacaagctcaggccgttgtagctccagcggtgccaacagaacaacctgttgctggcaaccgcatggagccgttatacgaaaggttccgtaagtaagcacctccagtgtttctgggaggtcgagatgtaatgaaggccgagcagtgggtcacggttattgagcgaattttgaattttatgggggtggttggaaatgatcgggtgacctgtgccacatttcagttccaagaggacgctctcgtgtggtgggagttggtgtccctcactcgggacgtcactgtgatgacctgggaagagtttcgagagttattcaactccaagtattataatgaagccgtctgcactgctaagcggaaagagttcactgagttagtgcaaactgaggggatgtcagtcactgaatataccgcacagttccaccgtttggccaaactcgtcgtgggtatcgtgataacagatttcaacaagaaacaaaagtacctagtaggtgtgaatgtgaagattagcatgatctggtgatgactactaatgaagcaacatcatatgcagagatggttgaaaaagctctacgggctgagggtggggtgaaattccttcaggagcctcgagtgactctgaatgttggtggaaatcccacccttcctagtcctgtttatggtagggattgtggtgattccaacattgatcagaagaggaaagttaccctggcatctggtggttcggggcaaagcaagaggtttcatgtgaaccaaggcagatatggacgccagggttactcttaccctgagtgcccacattgtaggaaacaccatctggaagagtgcaaccagaagacatgctttcaatgcggcatggtagggaatttcaagtaagatttccctcaagcaaagaaagaagagcagaactcagaggcaaaacccatacctgctcgggtgtttgccatcacccaagctaatgctgcaaccagtccttctatggtgagaggtcaactttttgtcaacaactcctcttatatt

SEQ ID NO: 250528 - DNA, 667 bp, Cannabis indica
gtctacaacaactgcagcaacagtaacaacaacaacaaaagggtacgagagttttaattcaaggagggtcattctggaggacataatggcagcggttagagatggtaataggaagaagataggtttgcatggaatgggtggaattggcaaaactatgcttgccaaagaaatcgctatacgagctaaggaagaggagttgttcagtaaggtggttgttgctactatttctcaaacgccaaacataagagagattcaacaacatattgttgaaatgctagatatgacgattttcagccagaacgaaagcattggcaagagagcagagctgcttcgaacgcgattggaacaagatgaaagcaagattttgttaatcctcgacgatatttggaaggaactcaatctagaagaaattggaatccatgacgggtgcaagattctagtaacctctagatatctgcatgttttacgtaactccatgggtatggctgagagtgatgtgttcttaattggagctttagagtcgagtgaagccatcgatttgtttaagaaaatcattggagacactaaagttgaaaataatggagattacaatggtccagcacttaagattgttaatgaatgtgggggcttaccgatttccattacaacagtggcacatgctttgaaa

SEQ ID NO: 250529 - DNA, 939 bp, Cannabis indica
ttatttatgttattttagtgtgaaggggcaaaatggtcattttgccccattattagtttgtcctttagtggactttatttcgttaattaaatgttatttgataatatttgttggctgaaatgaataagtggaattctttactttcattttacaaagtttcaaaaaattacaaagttagaacattaaaggaaaagcgctctctcgttttctctctatttcggccctttgagcagcaagaaaaggggatttttctcttgtgattcaagtgattttcagcaagtttagagtgatcctagtagaggtatttcttgtctagcttctcttcctttgttttcttgaaaaataatgaaaaaatgagtaatgcatggatgattttgatgttgttgctgttgctagttgttgttgttgtttctatgtgtaaaatgttgaattaaatatgtttagatacgttgaaatgcatgctagttgcccttgctctagtttgtcaattttcttgttcaaaagctatggttttgcaaatggaattgtgagaattgttgctgtgattgttgcatgagttagggtttgatttctgcagttttcatatgttgaaatatgttgaattatgcatgttttagtggctgattggagggattagtcaagttttgagttttgaactcaatctggaacctccaatggtgatttttgattctgtgaattctaggtggttttgtttctttagaaaggttatttgggtcatttagaacaagtctggaagttttggtattgtttgcattggatttgagcattgggtgaatttttgaaaaattcccgcgaggaatcggaattctggttgtgcattcggaattccggatgggttttgaaaatttccagaaccaaaatttcggttggacaaccggtctgccggttgggtgattttctgaaaccctagatttcctc

SEQ ID NO: 250530 - DNA, 858 bp, Cannabis indica
ttgaggcacaaagaggacattgtgtaagataatgttagcagtaagtctaacagtaccaattttagcaatattaacatttgttccatttgggagggtgacagatttattgttaggtgttgctgtaaaagaggaaaaacaggaagtgtgacagcaaacatggtgcgttgcaccactatcaataatccaagtattgggggaaagaggatcgaaagtacctgtgaagttgtttattgcagcaacatccgatgttgatgcatcagttgtaggttgcatggattgagtgagtagagaaatcaactgttgacattgtgctggtgtgaattgtgtttgctgtgattcattctgagagcaagatgcttgcatggtttggggaggcattcttgagtgggaaccattgtcagtcttgcggttgtttgtatgtgttgattcatttgttcttggttttccataaccaggagggaaaccatgcaagaagtaacatttatctttgtaatgtcctggtttctggcagtgtgtacagtggggtcgaggccttttattttttgatgtatgattagccattgggtctgtagatggtggggtaggagtggtagtggctgctgcaattgtgggaatggttctatggcccaaagttctttgcctctcttggtgaataaccatagagaagactttattaagtgaagggcaaggatcaagaaggagaatctggtcacgaacagcatgaaaagattcattgaggcccttcaagaattgaagaacttggtcatgattgaggtgggcatgattttgtgttgcagctgcacaagtacatggaatcttggggcgaagttggttaatttcatcccaaatggctgtaag

SEQ ID NO: 250531 - DNA, 509 bp, Cannabis indica
ttggtaggcaagggcagcgcatttatgtgcatagagaaaggtgaccctcgggtcctgtccaactctaagtcagacagatttggacaagacaaaccttgtatcattttctcgagttgatccagttgtgctcgcactaaaggatcaactttagcttgtctttggcaggcccggttttgacctgccagcccctgcctggccaggatagccggtgggtggacaagaaattggctagccagccccctgctgggttggctgggtttggcctattgtgctctattggtggactgtttaggggcaggacgtatttgtcccaagcatttcttcttcagttcagaccaacctgaagatctccctaacatgagggccattctgcaaacacagattctttaggcctcaagtcagaacatggttgattgttttgaggcggaatgttgttattgtgtccaaaattttaatctctccaaatagtgcgctcatcacttggctgactagtggcactatcatcatta

SEQ ID NO: 250532 - DNA, 770 bp, Cannabis indica
gtcagcctcacactagcacatcaagcatgacctttacataaattttagattctagagtctcggaccatttatcccacattctaaatcttttgtttctcacaaaccttcatcagctttgtccgtcataactactggtggtactctcatgcatttaacaagtagtggttccgttgttagtgctcatttattgcttcctaatatttgtcatatttctaagcttccactaaaccttgtatctgttggtgagttgtttgattctatttactcagtgacattttcttcctcttcttctcatgtgtaggatccgcaagctcagaagatgactaaaactgattgtaggcaaagggtttatatgttttggatgagttgaatttaataatatttggaattcctaatgtttatttgtcttctttgtcttctagtttttatttgtggcactcctgctgtggtcaagtttctacttcctgtttatgatttttagcttccacacaacaggaatcttcgaaaatttgcaacctcatgatatttttaactgtagtggtcaaaagttgttgctttacattttttgttgcaccttttcagtctactttgatgtatggggagcatctcctattgttgcaaaacggtatctaaatattatgttttttaactgatgattgcactatttttattgggtttatccaatgaaatgtcattttgaattttatgatatttatgctcaattttgaggctattgaagaactcaacatgttgtatttgaatactttaga

SEQ ID NO: 250533 - DNA, 513 bp, Cannabis indica
ttcccccaactgattattagtcttcccattgttgagatcttcccccattctttttcgaattccattacccgattgctccatctgaatgttgggtcttgttgcctcattcatagcattcagtattgtaggagatcgattaaaagaagcagttagattggtattattaacatgtagaacttcatgttcataattattaatgaaagatattttattgatagtaccttgtactgagttattggtggtatttgcatcccctctctcttgggttctctgatctgcatctttcagagactggatcttttgattgccaggaagttctctatgagtgtactgacttggttcattgctgtgaattgtttccatccttcccaccgaatcaaatttaagccaagaaccaaagattggtctcacttcttcctcttcgtgaattcccgtagctctaggttcctgacattggcgcatttcatggccaattcttccacaattaaaacacatatatggcagtctatcata

SEQ ID NO: 250534 - DNA, 567 bp, Cannabis indica
ctgactgtcacaatcaacccccttacggggtctgacatcctcgttgaccacacttccggctaggtcagggctctaataccattttgtgctattataaaattcttattttatatactataattataccaaaaatgtgggtaattaaattttgataattaaaaagagacataaaaaatttctttataataaaagatatgtaatattaactacgagatccccctatttttaaaatatttacaaactggtttaatagtgattttacaacataaactttgcattcccaaaatgcattcaaaatagagcattctgttcactggggcgtgccactgcggctgatatgtacattgctgctgcgaccccaaactcatgggtgctcaacctttgccttccctttacctgcaccataaagcacctgtgagtcacagagactcagcaagaaaagtgaataaaacaataatcagtaaagttcagcaattcaatctcatataacatgcttacacaatatcataaacacacaatcccggtactttataaagtaccccttttaccactcgttagccatgagct

SEQ ID NO: 250535 - DNA, 1597 bp, Cannabis indica
gtataaaaggaaaacatagaaagtttaagaggatggtacaaacaataaggaaggatgcgtgtataaacaagcttaaaaggagagggaaggtggaagggtaaggccaccagtaaccaaaatattaaattccagtaaataaacacccccaggtgtcgagacgcctcgataaaagaccatacacatataaataatgataattaaggcgaaataaatgaaaaacatcagtcaaatattaatccttacaaactataaaataaatattgttcaaaataataataataataatagtaataataaaaaaagacggggatggtaaacaaggaagaaacattctccccaaatttctcaggccccgtcgacatcctcatcctggttggtctcatccgaatctgaggaagactccacaagatcctcatccttcttaaactcagcatatttcttgaagaactcgtccaaatcccaggaagcagatataccttctttaaaatcagagtacaacttgaaggcagactgataacttccactaagaaacgccttcttaacttgactagtcaggaccttgatctcttttgttaaagatcctttttcttctgctagagttttttaggcctgctcagctgccttcccagcttcgaacaacttgtcatttagagaagagattttctccttcaccacctcggcctcagataggagggtatcgtgctcttaagacaaggcgaccttttccagtctcatcccggacaagctagcctctaaggaagcaaccttgttgctcaaaacctgcttcttagattccagaagagcgggtgagatcccaacctcttttctccgactcgagaccgtcatccttactcttcaagagcttattatcaacttccagggcgctaactttagtaagagcggtcgccttcgcagcaacgaccgcctcataattcttcttataacgagaatagcccctggctaagctttccttctccctatctgtctgcggggcaaacttcatggcatgggcacaccttaaggccatctgatgcacatatatataaaaaaaacacacacacttagcaaaggacaaaaaataaaagggaggaggataatgtacacttgagaaactacgttaattccctacatagcagtgtccttcaaaattgaatcccgtctttgggaaatatagaaatcatcatcaggttttctgacggcattcaaaagagcttttaagagttctcggccgactcctcaaatgggaaatctttctgaatcctaaaagcaggaatttcgtcccacttagtctgggcacgtggggaatgggtagctaaaggtggggaacctcggctggagggaaaagttgagggatgcactaaaagaggagaaagggcaagttgagaagacgacggagcccctagaggagagagagaagtctgagcaggagaagtaggcaaagggcccaggttctagcccaaagtagctgttgaaagattcttggactgagaagtccccctagggttaggaagttccgtcgggaccaagcccccaaaagttccctcggcttcgccagcacctgacgtaatctcggggaggacattgagcagtgtcccga

SEQ ID NO: 250536 - DNA, 614 bp, Cannabis indica
tcttgtgttggtaggcctgaacaaaatgccgtcgttgaacgtaaacaccaacacattcttaatgtggcacgggctttactcttccaatcacatttaaatttggtatattggccatacattatacacactgctgttcatcttatcaatcgtactccatctcgactattaaagttcaaatctccttttgaactactcaacaaaacttcaccacaatattcccaccttcgggtatttggatgtcttgcctacgcctcaactcttcccccaacacgacacaagttctctcctcgagcctccccttgtgtcttcttgggttatccaactggcatgaaggcctacactctcttagatatccaaacaaaccgaatatttcactcccgagatgtcgtgtttcacgaaacaatattccctttaaaaaccagcaacaacatacacaacccatttgttgattctcttcttccaaatacaccatcatcatgcctccctgcccctgcttctaattccccaattcatcacaccatccccccatctgaaacacctcatactatcaacaatgatgacacacgcaacaacatccaacacgatgctggccattccaccagcaacaacaacac

SEQ ID NO: 250537 - DNA, 587 bp, Cannabis indica
cataattatctaattagggttttgctaatcctttcttaattctgggtattacagtatccttctggacagtgccctttcttgaggcaactcgcctttggttatgtatttgatgatggggatcatccagttgagctctgctgccacaatatttttggctttaatgcttggttccgtgaggcgttcaactggaaccacccccaatttttcaatctccctgtttgacgctaatttagccaaacagtctgcgtgggcattcttttctctagggattctttccactttataatctgtgaactcatggagtagctctcggaaaattactacatatgctgccattttttctccacgcgtaccaaatgtgaatcattgaagacttctactctcgtggcccccacggcttttgctaatctcagtcctgcaatcagggcttcgtacttagcctcattattggaagccgtgaattcaaaatgcaggaccgcctggagttgagtccgttcggagatatcatcgctaccccagccccggatccgttttcgttggacggtccatccacgaatactttccatgctggagtttgtggcactggt

SEQ ID NO: 250538 - DNA, 1487 bp, Cannabis indica
taaaataatttccaacaattggtgtctctgcagctttcaccctggatagacaatggttcactatcagctacggattcactctaataacccacaaaagtaggggttcaacttcagatatttacctattctttaagaataattaatgggtttatttttttttttgtatatatttaatatgtaaaaaagagtgacatctccttattgtaaggattattaagctactttgaacaagatcagttgtaggctctcatcaatattgtcgtggtgattttgattttaaataaggctccgctatcgactgactaaatttaaggtaaaatttttggtgctttcattgagatcatcatttatcaattcgataaatcaccatggctgtaacaaggagaactccagctacaacttttgcttcatcgggtcttcctcaagaccccatgactggtggtcctgatgttcgtgttccaaccatcactagagtttccacgaacccaacggatgtagccaatcctacaagttgtgccaacttggcaggctcaacaaactcaaccaacacaactagtctggtcgacccaactaacacagctgatcccaatgaaaagcctctgctgcccagggtagatccgccattggcacctcaaacagaaggtttggtcaatgttgagaaaccctcacgcaccatgactaactctgttcctcgatattatgtaggggaaacagggccaggaattggcaaaataacaattggtgagcctcatgtggacttgggagaagactttgaattggccagacttagagaggctgtatgccaagtcagccaaactgaagagccaaacgatgttggtttcgatgtgttcgcccaaaagagatgcgaattcctaatggatggatgaccaagagtccatcctccgagctcatcaggcagaactggatcgccgtaacagggaagctagtaacataataaggaagttcaatgagagaattgtcaggagaagataggatagagatcctctacaaggaaggcttatcgaccgatcaggcaaggtctacaggcaaacaatctaaccaagttctttgggaacgaggacggacttccccatgcccaaagagacaaaaatcctgctaaacagatcctgtggcgagattagccagactctatggggggtcggccagctatctcttgctcattaacacccccactcggccaacctcaagccgacctacagagcaaaattcctctccaaaacatttgggagcaagtagttcttaggcttatctttaactggctaggtctgggaatgggtggaagcacccaagataacattaactcaaggagtgagaattgaagtgattttgttccactattgaacaatcacttgagacagttggatctaccaaacctaaacaattagtttgatcaaccctctaccaacacaaaagtcgcaccggccaatcaaaggcgaacaagcggccagacactgcccaacatagag

SEQ ID NO: 250539 - DNA, 475 bp, Cannabis indica
aatgacacacaattacataaaaaacatagcttaaagtgatatcaaataactctttactcaagagttatcacatattgacttgggcttatttggagaagcctagtccatgaggcgcttggtgtatagtgatgtggataccacatcatgttgacagttgtcaaaaattgtatcttcgtagagaattaaagaaatattaaatgcttgatttttaattactttcttttcatatttaagaatgtatgatcttcgggcgagatccttgggagttaattcttgatatctctgactaatgtgtgggtccaagttagcaatcttttgtaggatttgcttgggccaagccaagttttcttcccttagaaatttgtgctttgacatgtgtcgtgcaattgcgattggaaaatctactaaagttaacttccctcgaggttgcacagacctcctagaggcaaggttgtctttagcatctggacaaaat

SEQ ID NO: 250540 - DNA, 1205 bp, Cannabis indica
acgatcaccctgacctaaaagtaggcttaactaacaaatcaaagaacacgaatacgcctttcaagatttgagcctaatcatatcaggattaagattatttgatctaggatcaactaggcgatattgacttgaatagatattacggtaagtttaataaatctaagtcaaagttcaatatcggccccttccgatgcataccccatgcatccaacctgcgctttactttaaccaatgttctggaaagaacatagcacttctccaaatgcaagtaaactcttgttgtagattatcatatcagtaaaaccctgtgtctgataaatctaggaaactttattcacatagtcatgtttactttccaatgtgttgacggcacaataaacaggatcaagtatgtgaaaagggtttcagatgaatttatacattatgtacatataatcaagaaataaatcatgtgaaccatgcaacattaaatgttgtttctgatctatattaataagtaaatttgattatattgaaatgagttttatttagggcattaaacccaacattcactccttgtatcgcgacagtaatggagctacttctacttcgagtttttattctcacgagatggaattacaaaaaaatagctaagtgtttaaactttaatttctagagagaaaaattagagagagatgctttgaccttatggctacttttccgaatgtaaaaacgagcttgtggatctctccttttatagggaaggatatcctattaacatagcaataaaataatctaaaaaatataaaaaaaaatacatataggctattttttactgtatatgatgatctaacgggaaaattgactttggaggtcggtcatgaaatttcgaaacttgagtgatcgtgtctgcgggacccactttgagtaagttgtagcttaaatttataactctcttgagggtgaaatttggagttgataactttagaattgcgattaaagtgtgaaatattacatgatagagcattaaaatagctttaaaacgaaagttaaatctcgtcaatcagatcaatattggctaagttatgttcattttattgatggttgttttgggctcattgcccaagttgacatccaacgcccaagttgacatgtaacatcaacttggatgctgggtgagttagaaaatgtgtcggtgatgttttgatgcctaagtgatattttga

SEQ ID NO: 250541 - DNA, 854 bp, Cannabis indica
tcaaaacaactatcatcactgtatttgatcatttgtagtcaccattatatttaaagttaatttcatcactgtattccacttgtaatcatcattaatattatttgtaataggtttactttgtacataaaataaattaaacaataatcgataagtatttagttttattatgtgagggaagaggggtgattaacataataagtttaaaattttaatctttttggtatattaattaataatttcatttgataaggtagattaattttgtaatatataaatgtatagttattttttcttaatttttaattaattagtgatctctaattaaataaagatgaataaaaaaattagaaaaatgagagaattaaagagaaaatttaaaattaaacagaaaaataagagaataaaggagataatagatatttaaaatttttaattattttaattattaattaattatcataaatttaaaaattataaatagatagtttgactttgctttattagacatggggcggtgttgtcgcttcatcaatactttctggatatcgcaacttactttgggatgtgcccgacataactcatgccgaatagcattaaatatctgtcggcgatgtttgtcttgtaaagggagcttggttggcctccgcctacgtaccccttacgagatttggtactattttaagttgaagtttaggccgatgcagagtagaaccgactatttttatttcagccagcttggtcaccaatggctgggcgataccaactacaaggccatgtcaaaagttggtaggtatgctaaaaaatattttatggcataaggtcttcgttgaattgtgtgttgggttttatgccct

SEQ ID NO: 250542 - DNA, 805 bp, Cannabis indica
gatcctggtaaaataacttccaacagaatcatgccaagtacactacattcactattctgactgaagatatagaaagtgtttacatggcaactcagtcgctgaccccatataacccatgaagaaagatgctagcaagagggacatgacaaagttttgtcggttccacggagactacgaccacgacactaatgaatgcaacaacttgaagcgggaaattgaattcctgataaggaaaaacaaaccacacatgcagaagtatataaagaccgatcagggtcagacgaacgacaataagcaggatttactacctccaccggtagatgggcatctgcaagttattgttggaggcccgcacattgctggagattcgcgcaaagctcaggggacgtatgcccgaacagcacagcacgagcaagaagaagttatcctggccgtggaagaaagaaggcccaaagttccacgagcaggagaactgaccataaccttcaacgatgacgacgctatcaaaattaaatttctgcacaacgacccgctggtcgtggaagtccacatagccaataaaatggtggccagaaccatgatcgataatgcagcctcttccaatatcttgttcaaaactgcttatgaaatatgggactccaactcaaggatctaaccccatgcctccagcctgtgtattgtttcttcggttaaggagtcacacctctaaagcaaagccgtctacccttcactgttgcacaagctccgacgagcatgactatcatggcacagttcctgatattagatgtttcttcaccttttaacg

SEQ ID NO: 250543 - DNA, 1042 bp, Cannabis indica
ggtaccaaatgtgtatacatacacccttaaaaatatgattaaaaatatctcaatattttaaatttaaattttccttaaaaatacaaagtaaatacaaaatattcaatataagaagatcacatatttatttaactaattcaccttttttaaaagacttttcacaccaagaaaagacaagctatttttcaaaataataataaaaattatataatcaattttgaaaaggattggaagtttttcatttttactttttatacatttataaaaaaggaaacaacataatcttgaaatggaaacagcataacctcgaaatggaaataatttttataaaatcgaaacagtataacctcgaaattaaaatagcataacttcaaaatggaaacacttttataaaaaatgaaaaaatgtaaaaaaaaaaacataacagtaaaaaaaaaataaaaatacagtatatatggtactttcccaaaaaaaaattaccaatttgatacttcacgtttcatatttaagaatcattaatttgttaataaaaatttaatttataataatgatttaatcataaaagttaataagttattattgtaacgaatgctattgctaatacatacatcgacacttggacggtttatttatatatttatttttgaaataaccctaaacacctaataaatatatataatttttattaattaaattttagatgaaacaaatatttacagctcacttttatttacattaaaattaatattttattgatttttattatgcataattttttttttattttaattcaaagttaaagaatattcaattaagtaatagtatatattttattaaagttaacgtaaaaattaaaaaaaaaacaattataattaacatgaatatagatatagatatagattaataattaaataaaatatcaatgaaaagaaagtgggataaaatatcaataaattaaaagttgaattaactacaaagcattttgataaagcctctgagataatctcgtgaaaaagttaagaggtacatgaaaaagttgaaa

SEQ ID NO: 250544 - DNA, 629 bp, Cannabis indica
taattaaaataaacgaaattacccttcttataaaagaatcattgttaatttgttctcattctgaaccattttaaatccttaaatgcacgtataaatcaatcaaatttaaaatttgttcaaataaaagattaataaaaaccagaaattatagaaaaactctttcgaaagtgaaatttaatatttaccaaaatatcaagtttgccgaaatgtgttttaatgaaatcaaccatagcaacaatgctagctggatcagccacgtcgagctggtgaaacagcactttgtgagagaggtttttctctttctctttgagtttctccaaagcttcaagaccccttttctcatctcttgctgttaagaccacattgactccattcaaggccaattgtctcactatctctagtccaatccccttatttgcccctgttacaattgcatatctgcaaatatacatatgcattcaaatatttattcatcaaaagaacctaaaaaaagaaaaacgtagacaaaaagcagagacgctaaaataaattgttggtatattatatgtttggtgcagaacaccaaatgttattaacctttctgaagctccagacattgttgatgaaacttgggtttgtaataaaaatgt

SEQ ID NO: 250545 - DNA, 879 bp, Cannabis indica
gtgctggtaaaaatgacatttcttgtagtgtgaataactagttttcttgattgtacacgtgtcacataacataacacttacatttattgttcaaaaaatgagtatttttttcttataattaaaaggagaacttagactagatggtcattacaaataaggtccactggaatcattcatacctcaaccataccaattaaattttgagaaaatatccaattagccacattattagccgtaaaattataaagtctagaaataaaagataaattataacacaaaaacaacttaaagagtctattacagtgatacatgtagttatcaatactccaaacagaacaagtccctttacagttttgataactatctcagagtcactctcaatcatcacaaaatagtgcttctaagaaaataccgtctctagggcaagaaggcgggtcttagcttcgccaataaggagaatggagaagttgagcctgttagtagcaacccataaaaccgttcccaagggatctctaccaatgtcgccacacgcatagccccaccctccattttcatgtaaaattaatcttgatccaatcattcaatggttaagaccaaagaagagacacgataactggaggaggagttggaaacaaacaagagccaaaatatgtataacaatgaacgatatacagtcaacataatatttaatattattatgcttattattgtgtactttatcattatggatctgccaaatcgtatataccacaatttaggcatagaggaacacctcatgtgtaaacactgttaggctattcttagcctaggtttcggatctattctatgtgcgtttttcgctgtattgggacggaattacgcttgttttctatgttttca

SEQ ID NO: 250546 - DNA, 846 bp, Cannabis indica
attcgttcaaccataatccttcaccatcatcacgagatgatttgatatcatctccaacggtgacatcaacaggtggtggggtgatttgatgaatttggtgacaatactactaccttaaaatccaaatgccatttctttgagacaacatcatctcacgagctttatcctactagccacttgccacatgcttttgctaaaataattaagaaagactaacaacaaattttaacgttaaaaattattgaaataattattagaaatctaatataataaaattaatatttgacatatgcttctctagttttttataaacacaaggcttgttttacgagagatactcacaagctcgaccatgactattgctatagccagaatgcaattggtgattctaaatctaatgccaataaaaagagatatgtattacttaggtaaattataaagtgttttttcttcttttttattcttctaatcaaccacttataaaccaatcatatcaacattttattttcaaatatatatttcattaaaaaaatttaaaagacataatatatattattttttataaaaactagtatatatattattctcataccggccggaaaatattgtggtggtggtagtcgaaggttgggctccggtcgacgacgacgacgtgtgaccacccaagactccgaaccgacgaagagaagaaggagaagagaagagaagagaaaggatgggctggctcgtgtcgtgcgatagagaacggagagggttgtggtgccatcgtcgtcgacaaagaagagaagggggctgggtcacgtcatcatcgacagagaagaaaagagaagggggttgtgctagaga

SEQ ID NO: 250547 - DNA, 781 bp, Cannabis indica
atctttgggggccatcaagaactttatccaaagaaggagcaaggtattttctgacctttattgatgatttttcaagacatgtatggttgtttatcttgagaaataaatatgaatcacttaacaagtttaaagaattgaaagttatgttggaaactcaaattgagagaaaaatcaagaagctgaggacagataatggattggagttctgtaaagaacagttcaatcagttttgtaaagataatggcattggaaggcaccttactgttccaagaaatccttagcaaaatgagcttgctaagagaatgaacagaacaatccttgaaagggttagatgtatgttgatatatgcaggcttgcctaagaaattctggacagaagctgctgtaatagcatgctatttaatcaacataagtccttcatcagccattgaattcaaaactccactagaagtctggacagggggcactcctagttgtgatcatctaaggatcttcggttgtttggcatattctcacatcaaatagggcaaatttgaacccagagctaggaaatgcattttccttgggtacccagaaggggtaaaagggtatcaagtgtggagcatcgaagatggtaatcaccagaaaaattgtatccgtagagatgtggtgtttgatgagagaaccatgtacaaagatttgatcagtccacaagatggtgatgctgcagtaagaactgggaatgttgcagcaaaggagaatgaagagaaatctcagtttgaggtggagatggaaccagatca

SEQ ID NO: 250548 - DNA, 1065 bp, Cannabis indica
attgtaacaccctaccagtttaggcgtgttaacgtgatttttaacttaattgtgcaacttgttgctaataaatgagtttattaaaagtcgtgaatgattaaaactttatttaagtaatttataaataccaaaataatgattacaacactggtagaccccaacccgcttggtctgatatggcccggacatgtacattcttcgtccagctcctgcactcatggctgatcaacgacagtcttaccctttcttgcacagtagagcacccgtgagccaagcccagcaaaacagtaaaaacatatcaataaaatgcacatcatactatttaaaaagtaatgccattcacatatacgtctgtgtgacacagacctgcatgttgctctcacatgcctatttatgcctacgtggcatagacctacgtgttgctctcacacgtctaaatacaataaggcgttagaatggttcatgtcggttatgattaccgagtccaacctgattatcccttgaacgcataactcttaaatctcaatataaccatacacttaacatggcataacatttactcacttatatcactagggtaataaccctaggctcttaaccgttcctattagggtaataaccctaatcccggttgcaattgctcacatataacatattcaagataagtgccaccgtgcatactctacatgctaactactgtcttacctgttgtcttgcaaaagaagagattccaaatccctgggtgctcctgttcaggtgccgataatcctagtaacacaatccgggattttcataaatagggttaacccctgattccatactcataaaatatattcatggcatttaaaattcagacaatcatatagatctcgaaacgagctttccaacgatataacgaattcccaaatcgaagttcggaatcaaaagttatggaatttcaaagtgtgcactaaaactgcttagaaagttgagggcgggccgcagcatgcccaagccatgtcgcggcacctgggacaaatcccaggttccacgaataggggcgggccgcggcatgctcagaccatg

SEQ ID NO: 250549 - DNA, 1497 bp, Cannabis indica
gatggactcaaaactgacagcttaagtcacattagccttcagtcaaattttgagcattctatctctctcaaatttgaatccttcctctctccttctctcttcaatttcgaaccctttagtgattgagtacatgcccacgcatagtaagttggtactcaatcatagcgtctaagactgtgaagaatccaatcaactgaaggagaatcggactcaaattttggtgatactctactacagaaaggatacaagggttagagatctgagcagaaggagtcatttaattccgctgcaaccaatggaaggtttcttgaactttgtatgtgtttgaattctattgttttagaaactcatatttatgatgttaaacaacatacatggtagtaaatctagatccaggtaaaatgatcaccaataactggcctcaaagccatggtaataatttactttcatgaaatattgatttaaaacgatgtttgtattgatttggatgtgttcatgttggtttatgtgcatatttgatgatttcatggaaatcacaatttacgttgatatatattttttgctttgttctaaaattatttttccttgaaagtagatgaaaaattaataaatttaggcttttacaaaacttaatttgaattttttatgacttagctatgattttttgaatttggatgaaaatatctgattttgggaagcacacgtgcgcgcgaaggaggtttcactcggacagcacgtgcttcaggcaagtgcctgaccgaggatactcggacaaggccctatctgaagggctgctccctcggccaacataagctgcacgcagccttttccctcacccattccccttcatgcgcgctcattggtatgcattgcatacccttgtgcccaattttgtttttgtcatatcttttgattcaaaaatcatttttcattgaaagaaaattcaaatttttgtaaaattttgtgtaaaatctaaattttcaattaaaaatctaattgtcataataaaattaatttttattaattttttttaattaattaaaattagttttagatattagtagcttttgaatttgaaaatttgattttttcacaaactagccttatggttaattttgaaatttttgattattttttgttttattttaattataagatcagatattacttattttattattaaatttgaaatgatcttattttgatattaaaatattaataaaatttagaaataatctagcaaaataacatgaaattttgaaaaattttgttaattttagtttgaatagaaattttagggtttctaaccataaaattttcaaactttagatattttgttttgtttaatcattagataacattaataatatcctaaccatctaaatatcttcaatttcaaagttttttattttgttatatttaatttattaaattataagaatagaaatatctaaatatatttaaattaagatattatattatataatcttattagat

SEQ ID NO: 250550 - DNA, 2867 bp, Cannabis indica
agaagagagtcttgaaagacactcataccctcacaaaaaaatacaagtgagagagagagagagaaaaaaatggtatacctgtgagagggacatctctctagaaggaatacctattctctcgtatttaaaatacactttaagagccactaatgcaatacaagaggttgagcaccgcttaaaggctacaagctccctcactagcatcacaaaacttggaaaaggtagagtgcatcccaagaggctaaacatctcccttaaccttcaatatgaaatttggaaaaggttgagctctgcccaataggctatacaactcccttaacatcaattaagtaaccgataaaaggtcaagaatgctcaaagaacctatactcccttcataataaggttacatcagaaaataggttgtgtaagcccaaacatcacaaggctccctaaaataaaagatctcaaggcgcaagtgccaaaagagataattgtaggacaggtatgatgcttaccaaactttgtcaacaagagtacttaaaaagagttcttatagactcgggggaagtgttaaccctaaaagtaagcaaatctaaccttcaagattagtcaacagttaattcggtgttaactctaagaatcggtgttgacgattctcgaagacttgtccaagcattttagagaccgaactcatggttgcccgcaagcaaattgttgggtaatttgggaatccacaaaggaggaggcatcactctatgaatattttaaaagttccatcatgcatatgtgattgtttgaggtattttcgatagcggtcaatgagcacgagtagagttagtaagatcaacttactaagtggtaattgttagagaattttcataataatacatatagaattagatcttattataaacataaactccatagatctctttcttatctttctaactcattttgaactgtctaattttggcatatatcgagaaagttatggtaaaaatactaagatcactgaaatatgatagtggggtgtgtgagtcggtgtgcctttgtgaaaaccagtgtgtctgtgtgcaatccggtgtgcttttgtgtgagtcagtgtgcctttttgcaatttggtgttcctctttgcaagtcaaggagcatttgtgcaagccggggagaatttgtgtgaaccgtggagcctttgtgaaagtagtggagcattcgtgcaaaaacatgatgaatgcaagaggtccatgcaagttgtggtgcaagatgttcatgcgagacccgcatacaagtcatggcatgtgaggtgtgagggactcgctcgtgagctgtatgtggtgtgtgaagggctcgcatgcaagccatgtgtggtgtgtgcgaggctcgcatgttgagttagtaagactaacttactaagttcaaatttttggagtatttttataatgatgcctttagaattagatcttgttataaacataaaatccatagatctttttcttatctttccaacgtatttttagtgatctgattctgagatatattgagaaagttatatggctaaaatactaagaccactaaaatgtgataatggggtgtgtgagctgatgtgcctttgtgcaagctggtatgcttgtgttcgagccaatttatctttgtgcaagccagttgtgcctctttgcaagacggggagcatttgtgcaagctagggagcatttatgtgagttgtggagcctttgtgcaggtggtggagcattcgtgcaagtcgtgatgcctgggagacatccatgcgagccgtggtgcgagacatccatgcgagaccctcatgcgagttgtggcatgtaaggtacgcgagccgtgtgtgacgtgtgaagggctcacatgcgagatgtgtgtggtgtgtgcgagtcgtgttgtgcgagacctatgagtgagtgtgagaaatatgaaatgaagggagaattctgatacgtgttaaagaggaggtcgtcaaggaaggaatcaaagaataaggcttgcacacaaagaggtacgagaccgagtatgaccacgtccttagcgtggcctactggtgagatggtgcaagcagtggagacgtgttgtctgcaacccctaacgtctcgacaacaggtactctgtaaccacagatgaaagaacaacccaccggaagggcatacctaaagagtgccaatctcccccggcaaacatctatactcctgcaacttaggactacctgacacctgacaatgttacaaggtccaagaccacctccagcacctggaacttgtagccacataaggccaacttatgccttgaggaccacaaatgtatcttaggtcattagagcctataaataccccattctcagatgagagaggggattagaaaaatctttgtaacacttggccaacaaaagtatacacttttatctttctctatagttattcaacatttcttctttgagtttttatatttcttgatcttcattattttcttaggttttacatttaagttttgattttcctactacaatttggttgacgagttttcactgtcaacaacgtctgttaaggtttttctcttttccatctagcagccaccagttttatgtttctctagccatgctcgtcggccattcctaggcttgtgcagtgctttggttgggcttggtgatttgtacaacgaggtagatatgtggcatctcccttttctttgtcgtctgaatattttttctctctaaaaagtttcttttattgcagacatttggtttgcattttccaacattgtctagagttgttgggcgaaacatgttgtggatctggaagcctcgctagtggagtttttgttggggtttgtgccctaaataaaactttacttcaatgtaatcttttcta

SEQ ID NO: 250551 - DNA, 1463 bp, Cannabis indica
tttttcatgggtgcgggcttcttgtacggggctaacgattagtagccatatacacactttctatatcttctgtcaagatggtaaatgcagtaaacttggtaggattctccttgggagtttgttcggtcttgccagtgaactttccccttttcccatttccttgcctattgttgttgttggaccatttaccacccaagcttgacttgcttgggtattgggggagctggacggatgtctcagcagaggaagcttttggccaaccaggtttttgctcaacttctgcctactgaatggcttcttcaagcttaataaaaccttctgcgcggtcaaggaagtcactcattgaatctactggtccattcttcttgatatccttcgaaagttcgccaataacttcaatgccccccagtatcgcggacaactttccgtcttcagtcacccgtgcaaccttagttgtctccgtcatgaatttgctcatgtaggctcagagaggttctcctggtcttttcttcacttcgactagatctcctaggtgcaacggaagctggcaagaagaggagaattgtgcatggaactccgaggagaaagccttccatgagttgaacttttcgggcaccaacttgaaataccattgttgagcgacctctgagagggcggcaggaaaaactctacaacatacatctcctcgtgctccttgcaggtccatttgcatttcgaaatacttgaggtgggataagggatcttctttcccagtgtacatcttttaggttggcatcttaaacttgtgaggcaattccaagacattaatctctggggagaaaggggatccgcgtgctcggtccaactcgagatcatttttcctctgaccggccaggccttggaacatattttttagttcgtccaattgtgcctacatggctggagtaacttgttcagcctcttggccgaccacctgagtcacgtcagcatctctttgagcgggattttgagcgcgggttccgggctgtacgattggcgcatcatgtgggtcgtccaatcctctcctcctgttcagattgtttctgagatcatgaactgttcccagtcaatcaaatatagaaacacctggttgtctcaatgactggttggtttggccaattggctggtttgcaccattaacttggttggaattgttaggtatgacttctcttgatgaattgctagacagagtctgtccgcctaccgcttggcccacaggtggaacctgtgaccggagattggacggttgaccatttatagtcttagagtgttcaccgctggatctttgtctgtctcgcctagggggatgacggttacaggctgttgtccggtagcctaataggcttgtcgtatcaacacagtggcctatctggtccgatcgtcaatggctgcttcctgggcccttaatgtttccatctccttgtccctccattcagtgaacatgc

SEQ ID NO: 250552 - DNA, 582 bp, Cannabis indica
taagattttttgtagtgaattaaggtgaagtattgctttactaattaatgtatgccttgtatacataagtaaccacactagtgtttaacaaatgtggtcaataggtccatcttgcaaaatatacaacataatttttctccaaagttatagtgatcacttgaggtaatactgtcctttttacatagaaaaattataaaaaggaattatctcattcttgcaatgaagaagatgagccaataaagagcaataagaaatttaacaattagaagtgtattattctatgtcaacaaagggcttcaaaataaatgacagtaataacaagcattagattaaaattagtcttaaaaaaaattgatttaaataaataaaactaggaagatattttcatttctctaatattctcttttttgaacttttttaattatgatattttaggaaaattatcagttggtatgagtatggtattatatattgaatttactaattttgtaaatgatatttattcgtgtgtgtggggtttatatactggtgcaagtgccagtttggttagttaaaacaattgtaattaggtagttatttctg

SEQ ID NO: 250553 - DNA, 876 bp, Cannabis indica
gctccatgagctcccacaaaggggccgaatggctccatgagcttctacattggagttgaattgcaaaggtggagctgaaaaaaaaaggatggagctgaattgcaaaggtggagctaaaaaaaaagtgaagccaattggaatggctccatgacctccaataaaggagccgcatggcataatggagccaattggcacaagaggagactcaattggcataattgtctattttttttttttaaaattatgaatatatgcatatacaaaaggaggtgtggagatggtatatatgtttatgacatatatactcatcaattcctacatactttaacctactctacctttttgtctttactctctaaagcctaaatagtcacaaacacatcttttcctccatttcaaatttcttttggatcaaactagggatttcaaatgttcgtcactatcatcatcatgttctttactttttcccaaaaagtttacccaatcacaccaaatatataaatctcactcatttctaaaataaagagtggattaagataacccatagcctacattgctaagtttcgttcatagattccaaaaattacaagccaaatttcacaacattaaaaaaaagcaaatatgtaaaaagagggttttatgaaaaagtgtaaagaacactatgatattcataatttctatgaattttaacatgggagttagaattaaatagtgaatggatgggagaaacttactcaatagtgatgcccaagtttaaatcccctccaataatatttagtttccactttgagcattcatttgaaatggttcttggaactatttgagaggatttttagaagagctattatttttgataaagagtgaagagtagaatgg

SEQ ID NO: 250554 - DNA, 1360 bp, Cannabis indica
gctatatctctgttgctgatggtactaactgacacttctctggattttatggagctcctaatgtttcacaaagaattttcacttgggaacttctgaaaaaattaaaagattcgggtccacttttgccttggcttgtaatgggggatttcaatgaaattatttctcatgaggacaaacttggaggtgctatttgtaatgaatcccagatagatgctttccgtgaaacagttgatcattgtaatttgacagaattggacttcgaaggggagagattcacttggcataacaataattctagaggtgctaatgttaaagaacgacttgattatggcttcatcaatggcaaatggactgatttaatgaccacgcctgtgcttaaacatttggatttctatgcttcagatcatcgtgtcttgctggcagacatttctcaatccaacatacagcaagtcagaccttttaagtcccgttttagattcgagaaaatatggctgaaagaggaggattgcttagagattattggcaaatactggaataatttagcagtaagtgattcgactgctcaaactttggataacatctcttcatgcgccttccacttacaatcttggcatagacacaaatttggagatttacctaagaagataaagctttctcatgaaaaagttgaagcacttcaaaactcaaaccatactgatcatgatcatttttctcaacttcttgaaagtgagaaaattttagatgatctcttggcacaagaagaggactattggcaccaacgttcgcgttcctcatggttaaaatcgggagattctaacaccaagtatttccatcaaaaagcaagttcgcgaaaaactgccaacaagattaccaagctgacggattctaatggaattgtgcactcttctcaacatggcatttctaatatcatacaagaatatttctacaatatttactccactgaaggagttcattcggctgctacacaaactgttcttgcaacagttccttgcctagtctccactgaaatgcaggaagcactttccacaccttacattgctgaagaagtctaccaagctctgaaatccatgactgaggatggcagtccgggtttggatggcatgtcagtcatgttttatactaattattggcacattgttggggaaagtgttactaaaacagtgttgaaagttctcaatgaaggaggtgatccttcctctttcaactctacactcatcactttaattcccaaagtaaagaagccagtaactatgtctcaccttcggtctattagcttgtgcaatgtgttatacaagctggtatccaaaaccattgtcctaagaatgaagcctcacctcaa

SEQ ID NO: 250555 - DNA, 480 bp, Cannabis indica
tgcagaacaattttaagtctattagcaagaaccttggagacagctttgtaaagcgtggaacataggctgataggtctaaaatcacgaaaagtggaagcattcttttctttgggataaagaccaaaggggttccattgacagcagagcagtcaggtgattgttcaggacatcaaggatggtagagcaaagatccttgcccatggtatccaagtttctctggtagaaatatgtatatgttattcatatttttgaagtgatgatctaagcaaatttaaagcaccataacagtcaaggcaggcccaaatttggacccaatcaggatagtaattcagcccactaacaaagtcacactaccgttcctgatttggacatgactctagcccaccaacctaacaaggtcgaaccgcttcggtccagaggatgtcattcgatctacaagatgaagagtgttgggttttatgcactaaataaaactcattt

SEQ ID NO: 250556 - DNA, 1474 bp, Cannabis indica
aaaatggtgccttgtgtaattatcccttaatttaacaccatgttaatttatataaatatggaatgttcatttattttattttattgcttatagttcatttatattatttgtttaactagtaaaatatactacgcttcgcgttatacttatttaatgataattaaattatacaaccatattacataaatttacattgtcaatcaccatctcggacttcattttaaacatcaaaataggtagatagattatttcaatgttgtattttgatccatgtatatttgtatttatatatattgacgcataaatctaaacacaaatatctggcaaaatttgctcggtagattgataagaatgtaagaaagttaagtataaataagagagacacaacaaatttataagagttcacttcccgtgacacgacagtaataaagctacgtctgcttcgagtttttatttttcacaagaattacaaagaattggctaagtgtgagggtttaaattctagagagagatactcatactctgaccttataaggatttaaaagaatgtgcaaaatgagctagatgagctctcattttatacagaaagaattcctatttaaaaaatattaagaagtacaaaaatatgaaaaaaaaatatattttgggatgatcttggccattgatgatgattcatgatgatccaatggtgaaattagactcttggtgaaaatcatcaattttcaaaacttgaatcttgtccatcggatcgtttttgggttatctgctggaaaaatcgcaacattgttgaggactaattttggatccgaaatcattagaattacaatgtgggtgtgagacatggcttattaaatttttgaaataacttcgaaacacaagtttatcacgtcaatcggataaatattgagtgagtcatggttactgaaggttttatgcaccctacgaccaagtcaggttgacacccatcacccaagttgacattctaccattaacctagaagtcgggtgagtgccaaaacatcacagacatgtatttgctgatgcctaagtgatgtcttgatactagttagtcagattcaatgttttggtgaagttgttcaccaattttcaaagatatcgctattttgtgaaatcgggaggactcaaaactctccgattcagccaatattctaccttatagaaagggtaaaatatcaaagtgtaaatttgacctgtcacaagttgtagcttttgcttactatgaaaaaatagttgagtgcttgaagcagagacgatgctatagttgtagatgcaaaaagagcttggctttggtttttaagtgacatataaagaattcactttggttggaataattaacgctatagctgtagaggcaaatagtgatattttttgcttaggttatgaaccgatgctaattgattttttaattcagttatgaatcgaagcaaaaaaaagtttttgcatcgattcataat

SEQ ID NO: 250557 - DNA, 1037 bp, Cannabis indica
caaaattttaagaaatttaaaaacaaaataacatgtgaaaataaggttcaaatagtttattgcacgcgtgactcttttattttatactcgtgtgaaataaattatttgaacacttccaaattttttaaattttacatgatatcttaaataacaaaaacttacacaaaaaaaatttccaaaatgcatcactacacccttttcttaaaagatgcattataaaggcacccaataagttgtggaagaattccatccaaacaaataatttaattttttatttgtagcacatatcttgctaacttgtttccattaagcatcacatcttgaagacatgcactagaaaagacattacaataatctaaaggatacaacctcattgaaaaacaacctcaacataggaaactataaaatttacaaccatttatgtatcattctccacaaaagaaataaagaaaccaagttgcagagaccattgcaaagtaaaagaaagagccaaagcttctcccttccttaaaagacaaaagacaggtaaatgttttacaaaacaactcactcgaaaaacttccaagtcatgaacaatagcacccgtaccaataatggcattgttgttgttcgggaattctagctgaacatttaataatataaatatatgttactctaaatatatacatatatcatatatatactgctttaaataaaaataagacacaaatttacgtagttcaacaaattgtatttgcctacgtctacgatagcaaacagtcagttgtgcatctttattaatgtgaaatttataaggatcaagagcaaatgatgtttatatttttacaaaaatgatcaatcttgggcatatgtggtgacctagattaacatattccgtagataagggaggtgtattagaccatataactgtgtttgtaagaagaaagaaatgactgtgaatagaagaacttatgattcgtagaagaaccttggtgagcagatgtgttggaaggtagtgtgaacagtttggttttcataaaggttatgaaataagcagc

SEQ ID NO: 250558 - DNA, 508 bp, Cannabis indica
aacgagaagcatggtgatttgcgagatcacttggacaaaaagaagcagatgtcggcagtctccgcagagacgctgaacgagggaatcatggctgagctagcggtactgcctaaagacattgctcgagtctcccagagataaaaaggtgatgactcggactctgattatgaggaccgagagccgtgcgctaggcacattttagaggcagagctccccaagaattttaagatgcccgaaatggcagcctacaccggggactcacaccccaccgatcatttatctcggtttaaccgagtaatgacagttatgagagtcagtaatgatgcgaagtgcttgtgctttccactatcgttaagcagttccgcggaagaatggttcaaaaagttcgaactatgatctatggattgctggaacaaatgtcaagttagtttccggagacagtttgtcgccgcgagaaagatttatctcgaagttagtgccctgaataacatcaagcaactacccacag

SEQ ID NO: 250559 - DNA, 696 bp, Cannabis indica
aataattaattaattctttttatattatttttttttttgaataatttagtgatccctaataaagaaagttactaatattcaatattgtggaatctttaagcctcatttactaaaagatcttcaatgaggtgtcttacatggattttttttttaaaagaaatacttctacaatattttcgtttgatatatagtgaaatttggagattgaacattatgaacacattagacatataaaactaaagttttaaatatatttatgtacaattaattaatcaaataacactaattttttaaccacaatttgtatgactctgttagtatggctttcgataaatattattcacttgaagattacttatgttgtatcagcatacatataatttgttcaccaatcaaaatgcaattaagaaatcctaataatctatcactcatccttttatcatctacatataaaagagagaaagtgacatacatacatatcacattgatcaaacaaaaaatattacagaaagtgtttctttagaagaaaaaaaaaaatggtagtaaagatacctcatttgaagatcttttagtaaatgaaggttaagagtcaatattagtaatttttcttattatgggtcaccaaattattcaaaaaaagaaataaaaataatataaaaggaattaattaattattgatataaaataataaagtga

SEQ ID NO: 250560 - DNA, 615 bp, Cannabis indica
aaggggctaataaagagccaaaacctttaccagtgcactattgtgctggcaaagttgttcataccagcacatgcatttagtgaattgcgttggtaaaagtctagaaagaaattgccttatggcgcgaactgtttctattagttcatagacctttgtcagtgcaattatgcgccaacaaaagtctaaaaaaatgggaagaatttttctcatgtgatataataatgttataatgtcgaaatttcggtagaaataatgtagtaaaaaaaaagttaaattaaaattttataataagtgaaataaaattataaattaattatatatgatattaatttatttataaattattaattataataataaagtgatattataaattttaaaaaataagtaatttttagattgaataataagtgaaataaaattataaattaattatatatgtaatatataatttaaaatttaataaagtgatattataaattttaaaaaataagtaatttttaatttaaataataaataaaataaaattataaatgattagtatgtcatttaaaatagcataagctattataaattagtataaaatattataaattagcataaaataagtataaa

SEQ ID NO: 250561 - DNA, 941 bp, Cannabis indica
acagttaacagagttagagtagtgagtgactgaatgtggggtgggcttctttttataaagattgtgaacaaagaagacaaagatgaattggaggatgatctaaagtcagaagtctaccattccatatctgtagtcatgtttgcgtcacctcttacgccttctggtctgggtgactgggtctctcttctacctgtaagagaaggttctctttattgaattggaaacgaattgtcagtttttttggacacttacttctcttctacagagaaggttctcttttatcaattgaattggaaaagaaaagtcggtttttacttttattattagtattaatacagcaagagaatgttctcttcttacttgcatgtcagtttctattgtcaccagtttagtttatagacttttataaaaaaaaaaaaagtttagtaccttttttttttcctgtaaattaactaaaatttccctttaaatgatgggatattctagaacgcaatctcttactctcttaaaaaagatgtaatgatacattctctacttgttttggcatccaaaacatttttttaatctaatttttttaatattcatgtacgttatatttatttaagatattttacaaaattttgtaaaattcaaaataatttataatatagaaaataatgttcaaacagtctattttacatgcgtataaaataaaatagtcacgcacacaacttactgtttgaacgtaattttcggcgtgttaatttttttcaaatttcttaaaattttgcaggatgtcttaaataactctaatttacatgaccatgagaaaaaatttgactaaaaaattatttcggatactaaaacggatagaaatatatcggtgaatcttttttaaaagagtacattataaaattttcctaaatgatttaagcggtcttggtaacacttttttttttttt

SEQ ID NO: 250562 - DNA, 705 bp, Cannabis indica
aatatacaaactgttaatgtgtgcattaacgagaaatcatgcaacttcaagtgtacaaggcaaggcatcaatctcgctacacattagaagcgggagattatatcaaccttgggaagacatgggaagagcttcagcttgctatcagggtggttgttgccatgttcctagcgagacgacccagatgatacgatctgtagcatattaaatatacgtttaccttgacccagtaaaagcagactaatcacaactatgtgattttcaaatattaaccgcatttatattacgtgggatgtaattgaatcccccatttttaggagataattgttataaagattacagtcaactctataattaactacctactatgtgattataaatagaggcaagttagagtaagaaaaggacgaaaaaaggtcctggaaaacaatcaaaaatctaataagattgactcgtggattatgcagaattttaactgcaaaaccacgtaaaaaacctttgtgttcattttctttcctttactatttttgttttttcctgtgcaagtttatcatttaggcacaaatttgggtaacaaaaatctgcgttaacagtttggtgctttcattgagagccttcgtgaaaaagctcaaaacaaaaaatcccccttatataaaaaatattatacctcttatggctgacaataaagaaaataatccttatgaaaaa

SEQ ID NO: 250563 - DNA, 1159 bp, Cannabis indica
tgagaaagtaatttgagtacagaggaataaatatgaatattcactcaatctgattggatctctccttctaagaaatgatcgatcattttccctttagcttctaaccctatttattgggtatctagaaataacagttatttttctttgatcttattatcttggcaaccgttcatgaaatgtggataatcctcacatttcatatttacaataagtggataaaataaaataactactagttaccacattttttcttatctggaagcagttttgcttttaccaaaataatgcattctagttatggcttgcattacttagtgatgcttagagatagttggttgtattctgcgagatgttagtttaagtacagtagaacctctatttaagaatactctattcaagaataacctctaatttgttataaaaaaatcaagtcccaatttgggccagttataaataagaataacctctaaattgtaattagttatacattttctaagtcccgtattaacaaaatatacctctatataagaataattacatcttaataaaatatatacatatgttttgtaaatttatttacataaaattaataattttattccaaattgtaacatatgtattaccattatatttactctaaaataattctattataatatagtattaataattatttattgttattattgttacattgatattttttagtattttaatttttttttttagtataactctatttagttataacctctcaattagaatataattgcttggtcccaagtctattcttgaatagaggttctactgtatttgtcctcgctatagacttccaagacagctctttagacttggtctcttgaaataagtttaatcatgcttatttctcttagtctttcaacatactcacaagtatgtgggtcaatgagttgcaagctcggaagaactcgttatctaccctttctagccatgtcacaaggatttaacttgtgatcttctcatcctcgtaaatcattatgttgatagtactttgcgagttcatcccatcccttactccgtagcttattttcgaggtagaatattcattcatttctcgcatttattatttcattctttcttttaaaattgtatgacacatgccatgtccatatttagtgct

SEQ ID NO: 250564 - DNA, 1026 bp, Cannabis indica
attccatcatcatcacattcacatggcaagataaatttctttcttctttctctctctccttctgaaccttttataagtcaacattggttttatttctcctttttccttaattttttgtatagtccactttcctattagactatacaacctctggtaaagtcgtttctttttccccttctgcacaaattatctctttattgacacatgatttctttttatgtgcctctaaattattattttcgattttttttttttaaaggtcagcaaatgtccataggaaaaaacatgtataacatacgtgttttttttaaaaaaaaaaggaaaataacatatgtgtgacataatatttggttattactaatcactattttttatattaaaaagtaaatataattttctttaataaattattttttccactagatcaaaagctatatataatgaaaatagtgtaattgtctttcaccatccattcaatgaatgatgtaaaatttatttaaaaaaattgtaatttttttggaatatactctaatgcacaatagcaattaaaatgaaaattgacataaaagtaattaaatatattttaaaaaataattacggaaatattcattactacaaaaaaagggtatttacgacggttgtaaaaatattttttttgggaactgtcgctaaaaaaattaagcgagtgtttaaaactgtaacgtcctgatacttaagcgtgctacagtgatttttcaattacagtgccatctttactaatcaaataaattttcttgaaaatcgtgtcaaattaaaactttagatttaattactaaacttaataaacttttacacatttctttacaaaaaccgggatcccgtatttaaactcttacaaaatattcaaaatatatttagtcaggtcgcacagcgctacaaaataaaactccagatgtcccgagaatgaacactccagagcacgccgccatgacatatacaacattatcctagctcgaagctcacacatgttcagccttcgcctttctt

SEQ ID NO: 250565 - DNA, 698 bp, Cannabis indica
gacttcagtaaagcgtatgatcgcgtcgagtggccttttattgaagctatgatgaagaagatgggttttcatgaacactttgtacaactagtacttcaatgtgtttccactgtacagtacacaatcctgaatagtggcaaagaaatcagcaacatcaacccccaaagaggcatccgccaaggtgatcctttgtcctcttatcttttcttgatatgtgctgagggattctcttcaatcataaggaggtttgagtcatctaatcttttaaaaggctgtagagtagctaatagagcccctattatctcccacatgctttttgcggacgatagctatatctactgtagagccaacgacagagaagccgctaatgttcttaatctgcttcagacatttcaacttgcttcaggacaagtggttaattttaccaagtcttcagtcttttttagttctaatacaagtagagctgatagagatagactttgtttacgtctgaatgtccaagaagctgatgctaacagcttttatttaggactcccttgcatagttggtcgaaacaaaaaagccatcttgggcttcttgaaagataagatgcagaaacgagttcaacaatgggaaagccgttttctctccaaatctggtaaagaaatactcttaaagtcaatagcacaagctctaccaagctttgctatgtcagtttt

SEQ ID NO: 250566 - DNA, 910 bp, Cannabis indica
atgtaagcccaaataaaagtccaacaacaacttgttaaatgaaataacaagtggaatcaacattagaattacttcattcaagtattccaaaaatagctttcactcatcaatggtatcatcatttgctgacgattcaatttctctgacaccacccctcaagttggaaggtgagacagtcacattaagcttgctgaaattgaaaacgtatagaagtgagccccttagtaagacaatttgtaatttgatcatgtgatggaacatatctaatttcaagcttcttttttaagattttatctctcacaaaaagcacatctaattcaatgtgcttagtcctagcatgatacaggattagtaactagtgcactgacacttaagttgtcacaccatatcattggtgttgaaggaagattgaatttcatctcacttaacagtccctacaaccaagatatctctgctgcaaattaaactagagctctgtattcagactctatgcttgacacaacagtttgcttatttgaagacgatgagatcaataggtctctcaagtagacacaataaccagccactgattttcgatacaacaacccatgataaacagttcctttgagatacttgagtatcctatttattgcacaccagtgaacattagtaggtttctttaaaaattggatgagcttattcactgcaaatgaaatatctagccttgtatgactgagatattgcagagctcaaagaatgcttatgtgcagtgttgggttctccattggttggccgtcattgatcgacaatagtttcaaaacaatcataggtgtaacactaggcttcatatgctccatctgagctttcagtagcaactcaaatatgtagttggcttgtgatagataaattccagtggtgcctttaaatacct

SEQ ID NO: 250567 - DNA, 678 bp, Cannabis indica
catatatatgcctgccaccaaaaacaaaataattataattataaattaagacattattatcatcatcactgcaaaccgtgcttgctaggtagctagaaattatagctcaaaaatttgagctcagattcatgatatcattaatagaagcatttaatttatatgtatatgtatatttcatttttgtaaaattaaacaatacaacaaattaatgctaatatttttattaaagtcgaaaattgaaatatccatcaaaaaactattttaaacatttatatatgtacataatttatagaaagagaaagaagagagagtagtacccttttagcgagatgaggtgaagtgataaggcatttagcactccatagaggatcgtttaggtcagcaccatgtcgttcaagctcggtggcgaatcccccatccaccaccgcgtaaccaccgcactttttaacgaaatcaaccataaacgacgacgtttcatccaaactgctacctcctcctaatccaattcccattcttttccttaatttctcttctgaaacctcaaactagtcagctatttctttcttctaaaactgacacaccaacctttgtctatatataaatttgtgttagtatattacttatttcatttcatcaaagttgaaagaaatgtatcttctttatatagggaagtggtac

SEQ ID NO: 250568 - DNA, 1671 bp, Cannabis indica
tgctatgctttgcatagtgtaagacaagtaatattgagagggtttatacaagtcgcgcatatataaaaatatatgcgatgactaagtagccttctcctgcgactaagtgcaaatcgcctctttaagaaatgattggtccaaatgatgaaacgtgttcgatgactcgacaaggactcgcatatctcatgtcgtcgacacacaagatgttcatcaatgcgactctgatagaacgtagacatgctagtgttaggctcattagcactttaatgaatatagaacttccatacattactacatttatagaacgaattaaactgttctttatttattcctattatttagtgtaaaacggttctatagtcaatcagtgatgtataactagaaggatacttgctttctatataatagagtgatccaagatgaataaactaagaacaaatcacttgtaaaagtggactatgcagatcgtgatctaactgaacccctatatttctctatgttcatttcattttccagttgttctattatcttggcagttttctttgaatactcgctattctaattagagtattcgctttttctattttatttttctaatatttgcatacattttggtattgtctaaattcttcctatagcagtgtttaattaattttacattttgtacatgatcatatatgtttcatatcatacatataaatttctaatagatgcatcatattcttaccactataaaagctaaaagcaaaattattcaagtggagttagatattcaaatctccataaaagtcgtacccaccttttttggttagaaacttttgattgcatttgatcatgaatgaatatatataggtctatttcaaaagaaagcaagtactctgatgggtctttatgatgtggcatcccggtgaaataaaataatacttacaaccatcttttctaaatcctcgacaagacaaccaagagtcaccatctcgtgacaacaacttgcttgcctctctttgatagtttccctaatgacacatctatcagttacgaaattaggggcatgtgttataatgcgaattttttgcctagaaactcgagatgagtctcctataaaattgacatgtggatccaatcctcaagggatagatgagctgctaattaatgactctacgagagttgacctcgcttgaaccaaacttgcgagatgatacgaccttgacaaggtctaatcgcatgctatgctttgcatagtgtaagacaagtaggaccgagagggatttatacaagtcgagcatatataaaaatatatgcgatgactaagtagccttcctctgtgactaagtacagatcgcctctttaagaaacaattggtccaaatgatgaaacgttttttatgactcgacagggactcgcatatctcatgtcgtcgacacacaagatgtttgtcaatgcgactcagatagaacgtaggcatgctagtcatgttaggctgattagcccttttatgaatatagaacgcacctaaagcctacgagcttgtgcgagaatatgaacagacaacacaccctataggtcgcataagttgcttcatttatagaacgaattaaactgttctttatttattcttgttgtttattgtaaaacggttctatagtcaatcagtgatgtataactagaaggata

SEQ ID NO: 250569 - DNA, 1148 bp, Cannabis indica
taaatatatattttattaaaaaaaattatatacatccaaaataatataattagaattatcgttattattattattgttatttataatttaaaatttaaatttaaatttaaatataataaggctaaaatttagaattaaatatttatttagatatttaatttgttattatttttttatactttaatctaataatttatgatcattaaatatatataatataaatttgagtttaaattattttatcaataattttaaatgaaaatcaaatataattatatattaattaaatttagtaattcattttggttaaatgatacttacaatataatgttttattaaaaattttcttatatgaatttttcatttgtatatgaaactgagatgtaaatgtataagtacaagatgacatgatgtatcaaccacttgaggctagctcaagtggccataggagggtgtgtgttggaggtcctggcttcgagtcccaataaatggttaaattatgaattctgctacaaaaaaaaaaataatgttcaaataatatatttgttattataataaaatctaataaaaaaaaatctaaaaaaaacgctacatgaacaaagtcaattactattggcatatatatattactacgtgtccaaagttttctttgccctttttaaacttgcttcatgtgaagacagacagctatgtattgccaaattagctgacgggtccaaagcgattctcagagtctccagtgatttcaattcttcttcgtatcaaatcggttgttttctttttaactttatttttcgccttcgtatttttttaaaaaaaatatcagttcaaatattaatggaatttgttttattattattttattatatataaataatattttattatttttattaaataaaaataaaaagtcacctataaatttctcataaaccaagaatttcagttatataggcacactttatatagaatagatatgataaataattttagcaaatcatctttatctcattttacttatctaagatgagttttgagttttgcatatgtgggtatctagtttgtaaatcttgattaaatatgagagttttatttataccttataaatttataaatacgcattattataaaaaaaaatataaatttaa

SEQ ID NO: 250570 - DNA, 1160 bp, Cannabis indica
ttgggaataaaatgaatgaggtttcatttcaaaattaattgataatgggataggagtagcccattgatcatcttatatatcacaatttatttctacatattaacaatgtaggactaactctaatacaccttactcacgtaacatttgaaagaatcccacaaggccaaatatcaaaaaatttgtgagtgtacaggtcaaaaaatttataaattttgaaataggtcaaagactccaacattaaaatttagcaacacattggccgaaaaggttccgaaatagaggttaaagggaagacagcggaagtatctttttagactagtagcactttcgctcacaacggatcacactgacgccatgttaggatttgagaataagatgaatgaggttccatctcaaaacttattatatcataatttatttttcacatattaacaatataggactaactctaataacttatttaagaatatcgtaaaaaaaagtaaagaatagactcatatttaatgattgtccaaaataaattgatttaaataaaaaataaaataagacacaatatttttatagtaattcatcctctttgatatagcgacaatggactagttaaactgtgtagtatgttgttaatttacattatttattaaaaaataaaggaaaatattttacctaatacttttaacactttgtaaaattagttaaaatgtatacattttcattattgcttttgtaaatatatttttgacaaaaaatattatgattatattttcgattgaatattgtctaaaacatatatttataatttcttgtcaaaaaaatataatgttttttaacttaattatgtaaatatcccttatacaaagtattaactaaataaacataagctagttctataattatacattaaggcgttgcaataatataataaattgtaccacattatattattgtctatgtatagtaattgctacaaatattaaaaaagaaaacaaatatatactaaaaagctaatgctggttaaagtggttaaatgtgtgaatgtgtgtggataggggatgggctctaagatagctttattttattacattttatttcacgcgcttatgagaggggtatagtattgttgctctattattaattttgtattattttaattattattaatt

SEQ ID NO: 250571 - DNA, 712 bp, Cannabis indica
atataatatggtcgcacatagtcacatagggtcacatagaccaatattaggatatactttaaaatatactatggtcgcacatagtcacacatggtcgcacagggtcatatagaccaatatcaggacaatattttaaatatactatggtcgcacatagtcacacaggatcgcatagacacatattaggatatactttgaaatatacttggtcgcacatgatcacacaaggttgcacaagatccataataaatactttaattaacataaattttacaaatagatatgaataaaagtttccatatatcaaacacaagaaatattcaatatataatttagagaactaaataataataaatcacacatgaattgtgcttctaccatttgatgatacttgtagacatgtttatgaattatgtcctgactatccacatgctccacaattatattatttcttaggaaattcacctttggaagctatgcgattagttcttgatcttcctttattcttgtcttgaggaggtgctatcacttgtattgcaagaatatctttaggaatgtcggtctattgtgagtttagaggtacatgataaataattgctaacaactaatattttaatgtgtagcactatgaacacatagaacatatgagtttcccagtattttgggattgcgcctttcctgttgcggctattgcatggatacatggaagttt

SEQ ID NO: 250572 - DNA, 500 bp, Cannabis indica
gattgtttcctaataccaattaaccaccacatttctatgctagagactagagggagggtcgaatttgttgaggaggttgtacaccctcgatatgctggagagctaagggccaaccaagttgaggaacctatggtttggtagcctgtggttggtcgagatgaggaggcctagatcgggacggacaatgcgtctgaggttaaggaggttgtgcctgctaggaggaagtacaagacttgtgatgtattctcgaacaacgccttggcttcgtatgatgaggccaggtggcctttgaacaacttccgttgtctctttgaggtcaggataaaccatgttatggaggaggctactaacccgcaagtccttgatcgcggggaccagccggaccggtgtatatatccttcatcctctaatttccaccaagagacttgatgagatcaaggtagggctggtaggagatgttcgatgtgataggcctattagagactggctatcacatcaac

SEQ ID NO: 250573 - DNA, 674 bp, Cannabis indica
aatagacaactccgacaacgattggccaaatctaacgatgaaacgctgagttggagagagaggctgcagtatagccagggcagcacagggaacaattccttaaaactaacctgatccaacgataaggagaccacgaggaagaccttgaggttccagaactaggagacgagaatctccaaaatgcccaggaagaacaacctagggatataagggatgtcccaatggataatcaaacaaatcgtaataatactagaaatccagaacataggcgagatgttccttaaacttcccatgaatttgctaaccaagggaatgaacaaactgacatgccagaggcatctcacaagaattaagaggcgagggaccctcgaccagcgaaccaggaaatccctcgcaataatgagagaaaccctggaaatcaaccaaggtcaactaggctacctctaagacatcctcaacgtccttctcgagcagatagggaggatgtatacacacagttgaatagaggacatgtatctaatctcttccgtaggagaaggccggtacaagatgaagcaagttcaagcttgggacgctcaacgtctcaagggcacagttggttgagtaggtaaatgcgagaaggaagtagatctttgcgttatgatgatgactaagaaagcatgagcaattcatga

SEQ ID NO: 250574 - DNA, 591 bp, Cannabis indica
ttatgatttgaaaatcgtatagctatgattttttcgcttttattggatcaaaatctttaactgttgtatctggagatgtctcgacagaaacttggttatagtgatccctatagcgaactaagaccattcttccttccgaggtcgatgatgtatgtcttgtgtcgatcgtagttatttacaaagaattcttcttactcgtcagggttgtaaacctcgctaccgttagctggatgaaggtataggaagtcttcctatagcgagatggtcacctcgcttacttattcttgagtcgatccggcttttagacttagtttgttcattgcacgctaaggactttcacagttgatatgtgtcactttctctggtgcctcgctattcgcatttagcaatatatggcttcttcctaatatactaagtgccagtttgtacattgattcctcgcctaagacctttgagtcaacgagttacaaatatactctaactcttatgtaattaatgagttatccaataagagtaattgcattgattcacattcccttcatcctaacacgtgtccttcattgagatggcagccgaattttgggtataaca

SEQ ID NO: 250575 - DNA, 615 bp, Cannabis indica
ttcatatttaggatgttaattcaacatatttgttagtaaatctagatcctggtaaaatattcccaacagttgatagttgacaccaccaacttttttgcttttttcttgtattgaatatttgtaacctatattctgactttgttaccttctttttgcagatatggcttctaggctgaaagatcttgctagagagcctttgagaggagcttcaggtcgtcctatggccacggtgacccggaccgcccgatctggtgatgctacaaggtcttcactatctcaccctcctttgaggccttcaccgattggtcagtcgatgattgttgatcctttgccaaggaggaccccacctccacactggccttcaagaaagggcgcccagaaatctagttgtggagcaggctagaccactggatagagagttgtagaggtggctcatagacgtattcacaggatcctacccattatcggtggtgagctccaagattttgatgatgatgagctagagaggctatcatctagcggtctccaagacttgacctcgctaagtttgttaggctaaaattagtctaagttttgggtcatattttcagttagttttcactctttgtttctagt

SEQ ID NO: 250576 - DNA, 709 bp, Cannabis indica
aattcttcctcatcttcttcctctaggtgtacagagtcgtacttttcattcaaggaattaccatgctgactcgtagacgccataatacagaataaaacaaaacactccaaaacttctcagaactttttactcatggaacactccaagacttttcataagtttctttgatcccagaaggcttttttttaattttaaaagttaaaaaaaacactatgagataattaatctaaggatatgatatgagtagtagatagtgtaattggtaattaattagcctaaatttcggattattgagaggtgacatggtgctcataatgtcatacaatctttttcatattctcaatctctaaactcatcatttcatttccttaagttttcttaaaaatatatattatgatcaagaaaaatctcaacagcaaatattggaaaactatttattataaaaataaattaattaattaagaactaattttgattattgtctggtggtgtggcgatgaatgtagatgatataactattgtcatgtgatgatgagtatgagaataatatttttaatttttcttttaaaaagatttttgatgaatttttgttgtatacacaaaaacaaaagctactcagttttaaatttttactatttttttttttattaattgtgtatgtttttgtttattttaagattatttataaatttttatttttttttaataa

SEQ ID NO: 250577 - DNA, 509 bp, Cannabis indica
tttttatccatttcaaattttattccattccattcctattcccattcccattcccattcctattcctatattttcattcctcccaaccaaacgactcctaaatactttgtttactactactctaaaatacacgtgtgtcaatttaaatggtttaaaatcatctaatcttttattgtgtaattaagttttatgttctttttcgacgctaatttaaaaaaaaaagttttatgttcttttgataaagacaataataatacttaagttatatttttaatctttcataggtatttcgcgttaagtgtttagtcaatgaccatataataatttttgattggtttagattattaattttttatatttaataattaatttaaatatactaataaaaaataatacaaatagttattaatatttaacggttaattacttatgaaaaacataacttaaaaaaattaaacttatgtatcttcaaacaaggtgggtgcccttgaagagtttaagaacaacaa

SEQ ID NO: 250578 - DNA, 3203 bp, Cannabis indica
gctgataatccaggagcctctagttcaaagagaaaggataactctaaggagtcagctaaggacaagaaaaagcaaaagtaggacgacaaatacgtgccaatttacaccatttataccaagcttaatgaaactcgagaaaacatttatctcgcatatgagcatagggtcgcattttgcaaacctgagcccctgaggcatgcaagagacaaaagagatgcaaccaaattttgcaagtaccacaaagcaattgtgcatacgatagacgagtgtcgtcagctgaaagatgagatggagagtctcatcgcgcgaggtcacttcaagcaatatgtgaaaggacaaggcaatggacaaaaccagcctaatctgcccaataacccaggaaatcaagggttacaacctcctccccttgaaggagaggatatcctggttatctcgagagggccacatattgcgggagagagcaacaatgcccaaaagaggtatgtgaaggaagtgaagaatgagcagtcttcctttgctctggaaccctccaagaaagcaaagactgaagaacctccaattatattctcgaaggaagatgaaaaagacgtaaggtatcctcacatcgatccacttgtaattaccatccagctttccaataagaggataaaaagggtgttggtggacaacggaagttcagtaaacatcctttataaggatacagtgaagaaaataggacttgaaaccttgcatggtaaatctgtatggatttacaggcgactgtgtcgccagtcaaggaataatcgagctccaattaacattgggcgaagcacctttatccaccacgataatgtaagactttttggttgtcgacttgccatcagcttacaacaaactgctgggttgaccagcattaattggactagggacagttagttcaattaagcacttatccctaaagtttcagacaccaatgggtgtgggagtagtgcgaggtgatcaaatgctggctcccaaatgctgtcgcatagaactgtagcatagaaaggttggtcaccagttattggcagtcttaactgaagaagttgagaagaaggatgaagatcttgatcctcagattcaagatgaacgaaatttattaaaactaattaaggagctggacgaggttgttctagacctaggaaatcccacaaagtgtgtatacattgggaagaacctggataaacaattgaaatagtagctaattaactttttgagggcaagctaggatcaatttgcctagagccatggagatgtgatagggatcgaccctaagattatctaccaccacttaaatgtcaatcaaaattgcccagccaaaagacagaagaggcgacccttggattccgagacacaaggggcacttaagtaggaagtggataagttgttggttaacgactttatacgcgaggcattttatcccttgtggatatcaaatcgtgttcttgtcccaaaaccaaatggaacttagagaacttgtattgatttttctgatatgaataaggcatgtccaaaggattccttccctatgccaaggattgaccagttggtggatgcaactgctggacacgagcttatgttgttcatggatgcatactctgggtataaccagatataaatgcatgtcccagatcaggaacatacaaggttcgtaaccaacatggtactttattgttataaagtcatgccatttgggttgaaaaatgctggggcaacatatcaacgacttgtgaatgaaatgtttgcaaatcaaattgaaagaaacatggaagtatacgtcgacgatatgttggtgaagcaggtaaagagtggaaatcatattatagacctcacagagtgctttgaaatattaagaaagtacaatatgaagcttaactcgaaaaagttttcctttggagtttcctcaggaaagtttatgcgattcatagtcaacgcaaggggtattgaagcaaaccctgagaaaataaaggctttgatagatatgctatcaccaaccaaacaaaaggaagttcagaccttaaaaggaagaatggcggcatttaacagattcattttgaagtcaactaataagtgtctaccatttttcaatgtattacaaggcaacaagagattcgaattgacagaagaatgcaaggattcctttatgagcataagaagtcatttgtcgacacctccgattttggcaaaaccagtaactggacacactactcctctacctggctgtctcaaaaaatgcaattagtgcagcaatagtgtgagaagatggaaagcaccagcaacctatttactatgttagtaagaggttactgggagtataatcgaggtatccccctcttgaaaaacttgccttatgcctaatccacgcatctggaaagctacaaccttacttccaggcacatccgattaaggtgttaactaatgaacccctgagacaagttttatcaaaaccagggtcttctggaagattaataaaatggtcaattgaattgggccaagccttggtagatttcttgatagaaggaataactccagaaaaaaatccgcttgttcagcaagatgcggatacttggaaattattcgtggatggtgcatcgaatgagcagggctcaggtgcaggggtgatattaatttttccagaaggctttaagcttcattatgccttgagattttaattcgacgcatcaaataaggaggatgagtatgaagccttgatcgctcgtttgaggatagctgaagcattgaaacttaaaaaaactcatatgtcatagtgattcacaattgatagtaaatcaggttctcagggaataccaggctaagggcttgaaaatggccaagtatctagagacagttcgaaaaaacttggaaaagtttgattattttaaaatcgagcaaatccctagaggataaaactctaacgtcgatgccttagaaaaactggcgtcgcaaaatgatttggatgaactaaacttggttccggtgaaaatgctaaatgagccaagtatatgtgaaaaggaaaatgtcgagatgatagatagctcgcccacatggatgactcccataaccaactatctactcaacggacaactttcaactgacaagaacaaggcatgaaaagtcctgtattcagtgcctcgctacacgatagtagagggaaaattgtatagaagaggctattcaatgcctct

SEQ ID NO: 250579 - DNA, 722 bp, Cannabis indica
ggatcgacctcacctgtgtgagatttactacttgattgcgtatacttgcgtagtgtttataaattatagcaacatgtgtctagggctgaattcgatgctcttgccgccttggtaaagagtatcgcaacgccaaagcaaactgagtttgagctagaatgggagcgacattcacctctctcaaatcaaatgaaggctttggagatcccctcaaagttcagaaatctggtgttgcatccatacactggcaaagaagaccctatctcttacatacacaacttcaaagtacagactaacctacaaagcaattgagacaattctctttgtcaaatctttccagccacgctatcaaaagtagcacaacagtggtatctcaagctttccctgtgatctattaattcttgggagacactcaagcaagtattttatgaccgattctccccatcaaggcacagacaaatctaacccaacaatttggtctacattaagcaacaagaagacgaacctctaaaggattaccaacaactattcttagaggccaccacgtagacgaagatactcactgaagacaccaaggtcatgacaatgacagctggactaacagtaatgagtctgttagaactattattttctgtagtgacaaattatgtccagtagcattccagctgtgtctaggactcgtagtgttttgtctggggttcgtactgttagtgttagtccacgtc

SEQ ID NO: 250580 - DNA, 564 bp, Cannabis indica
aatctcactccttttcacttctctctcttgcctctactctactcataccccaatcgccatggcagggttctcccacaacgcaatccagagtaaggatttgtgcaattggatgatgttcgttgatgtggatgaattcatttactcaccatcatggttcaatttctcaaaaccatctaaatcaatgttacaatttctactcccaacattctcaccatctgctaaacctaattatattggtcaaatctctattagatgtaacgaattcggtccatctagccaacggtcccacccaccagagggtgtgactcaagggtacatgtgtcgaagatttgtggagcagagacacaagtctattgtgctactggatgcagtgaatgcctccctactcaatgcaattcaccattttaaaatgaaggatcggtacaagactgtgacaatgagcctgaacagagctgtggtgaaccacttcaattaccaagcttggagtgagtttcagaacaagtttaggagaagggtttcgacatacgttgttgattggaaggagaaggctaatctagcctccaa

SEQ ID NO: 250581 - DNA, 978 bp, Cannabis indica
aagtcctggttctagtcccattcataggtcttggtctacttcaagtttcggatccaattttaggtcacatggtacgggtttgggtccaggttttggtatggtgctaggtttcggtccgcgtctgggttcgggaccgaggctggtcccaaatatagacaccaactacgcgttcggtccaaggcttagttcccgatccagatcccgatctcgggtcctgacttgcttccattttgggtgccgggtaacgagctgggtcctaggttcaagtcaaggtctagggtcaggtattgggtcccagtccaagtttcactgcccaagtccctatcctgattttaggtcaaggtcccagtttttttcgggttttttgtcccgatctaggtgcgggtttgggtcctagtaacgattcgggtttgggtctcggtctacgtttttaattaggtttgggttcgggtctgggtctttgtcctagtcctggtactagtccttgtctggttctagttccagttgcgattccgagttcgagtttgggttagagttcgggtcacggttcgagttcggttcggcgttcgagtgctggtccgagtatgggttcaggtccggatcgggctacggctgtgggttagggtccaaggtttgggtccaagttcgggtccgagtcccaggttttgatctcgatctaagtcagggtttagttcccggtctaggtcttgggtttcgatcccggtctgggttcgagtatacgtcttggtgcaggtctaggtttgagtctcattttgggtttggctctgagttcgagtctcgggttcgggtttgattttgtgttcaggtgtaggttcgggttcaatcctagtatggattcgtgtccaggttcttgtcatgattttggtccagggcaggtttttgttttgggtctgggtctgactttgaattcctgggtccaagccaggtcttggttcgggttcgaatctcggatttaga

SEQ ID NO: 250582 - DNA, 850 bp, Cannabis indica
tttcttcttgttgttactttttggacaattttacgcttattttcctttatttcaggtttccggggtttaaaagtgtaaaattaattaactattaaagggacaagacaagttgaaaatcgatgaaaaaatcatgttgaatttttgaagctcgccactaaaagctcattgttggtcgcgactaattgttaatgcagtgagggtatagcatggtcgcgacgaggagctttggcagaatcgatgttttcgactcactatagttactgcggtgagactatctgtggtcacagcgacgcctctgtacgggacaaggatatttttgtcttttcgctattttgagttataaaattgatttttataagggcgttttgaattttagtggaggcagaaaaaagaaccctagaaacacaagaataagacttttgaaatgagtgtggcgatccgatcgagttctccacctagtttctttctcttccctttaatttctttatgtttcattctgtctttagtttaatcatggatttgattgttgaaattacaaactaatttctcaatttagagatatgatgaatgttaactgattttattctatgagttaatgtgatttgactatttcttctttcttgttcttgtggtttgttcgtatttgttttaatacatgtttaagtttgatcaccttattcatgattcatgatcctaatataaaatcttaaaagtgaatattaggaatgctctaattgaacaagcacaggttttgatgtgaaacgagagtattcacatagcttgtgtggcatttagactattactcaatgcaaattatgtgttattctatctcaaagatacaataattagc

SEQ ID NO: 250583 - DNA, 609 bp, Cannabis indica
ataataataattataaacttgaccttaataagtgtgagagttgcacaccaagctatcgtcttataccaatgaattatccaacaccttttgttatccaaaggataaagttgggtgatgaagtgttgaatgaccattgtgttttattcagttcagtaagtgatcaagagtatcaatcatctaaacatgggagcaaaaacgaatacgaagaatgtttgtatatacaaagtggaaaaaaataaaaacttggtatggatcataaaatcaaaacaaagcctcataataaaagtctgtcatttttctcatcaagcatggaaatctagaacaatggaccccactatttgtaggtgcgcatgcataaagtccctacaataataacacaacaacacctaaccataaactttaaagattctcactctttctcacaaacagtgttatgtaaaatcccaaaacatataacttctttatgtgtaaaatcccaaattttttaattgcaaaataatctcatccactcagaatagattaataaatattcacactcaatactgccaaaaaaaatagaatattttttaaaagtcagaaatccctcacatggaacccaccaatgaatac

SEQ ID NO: 250584 - DNA, 1307 bp, Cannabis indica
gttcaaacagtctattttatacgggtataaaataaaatagtcacgagtgcaacacactgctagaacgcaattttcagcatgttaaacttttctgaatttcttaaaattttgcaggatgtcttaaataactataatttacatgactatgaaaaaaaattgagtaaaaaattatttcagatactaaaacagagagagatgtatcagtgtatctcctttaagagggtgcattaaagaatttcctattaaattatatatgcctagggcttctttttctcttagccgccagtaggggtgttcgcagtgcgagtggtgcggtttttgactattttttcaaaccaacccgcacatgcggtttttccaatttcccaaaccgcacccgcaccccgaaactaaaaacttgcaaaaaccgcactgcaaaaaacagtgcggtgcggtttttgtgatttatacggttttgactatcactaaataattaaactatcacaaatacaacaaactttatgcaaaacttgttagaataccataaggcttgaaaataaatatgaaaaaaaaaaattaagtgtcaccaatacaataattagtggactttgagttgaatattcacatattggacctaaataaatataaaaattggtatttttataatgtgcggcgcgatgcggtttgaaccgcatattaacaattcaaaaccgcaaaccgcaccgcaccacgcgttttaagaaaaattcaaaccgcgaccgcactgcaaagaattttaaaccacatattttttgcggtatggtgtcgtgcgagcagtttgagcggtttgggcggtttgatgaacacccctagccgccagtttcattctttcgttttaaccaaggctcgccaaccttctttgggctctggcgtgactttggtcgagagtgatttttgattctcaaattagtgttttcggtggcttcgtgattccggtgtgaaactgtgttgggatagatctgcgaggatgtcgtttggtggttcctgtgggcctttgtggtatcatttgagtcatcttagtcggctaggatctctattactaaggatcatttgctggaatctgggacagttttggtgttctagtggggcttcctgacgggaaattagggtggatcttttgattgttatttatgtggattggggtcttaatgcttcgctatggttggtattgcgactttggaggacggtgctaggattaggtgttcttttttctttgggtgtggccagatcttgtttgggggttctcacttgggcgcatcagttgtggttgatggtgtgggcttccgaca

SEQ ID NO: 250585 - DNA, 599 bp, Cannabis indica
atctaactgatctttagctaattaaaaagtaaaacaattgcatatattttttttaactgtactactttaaagatggtcatccaacctgagtactagttattttatccaaccctttgagtggatccgcccagaaggccatctacttaagagtaaatgttctagcattgtgtacttgaaagggtcattagaccttgtacacttactggtagtatttcctcaaaattttcccattctaatctcttgctactacaacgagctccatattcttgtcatactgtcccagcttgtatgctccagagtccgtgactttaaccaccttgtatgacccttccaagttaggtctaagcatgccagttgcactgtcttttgtgttcaagaatactcttctaaggaccatatcttccacaaagaattttctcaccctcacttgcttgttgaagaactgggccaccttttgctgatgagccactaggtttaggttttctaaggttcatttttctttaatctcgtcaagtgattctgccaagagggcatgattggtttcttgatcgtagggtaatcgcctgtgggatgaaagttctaatccacgggcaccatgg

SEQ ID NO: 250586 - DNA, 1204 bp, Cannabis indica
ttattatttgaggagcttgaaacagtattgttttaacactttcaacacgactctcccaacgcgtctctgacaatggcttaatagtgagacctagcacaagatctgtaacaaacctttcatctttttgtagaagctgaaaacaatgagtatatacgttctagcacaccaaagaaagacacagccttagagcaacaattagccatatcagaaagtacaagatttagagaatgacaagcacatggagtgtaaaatgctctaggatttagttcaagtaatctgctttgtacacctttattttttcctttcatgttagatccattatcataaccttgtcctcttatattatcaacatcaacatcaagatcaagagtatgtaatgcatgtagaagttcattaagtagcccaagtcctgatgtgtcatttaccttaatgaattctataaaatattcatcaacaaatattggactatctgaaacattcacacatcttaatacaagagacatttgctcctcattactggcatctggggtacaatcaagtagcacagagaaatatttagcttctttaactttaccaatgattgattttttcacttcacatgccaacaactgtattatttcattctgaattttatgactcaaataatgataatgagtttcatgtgccataatacgacgcacatgttcttgcatagttgaatcaaattcagcaaacaattctatcatttgtaaaaaaatcccattgctatcatcatatagcttttcactacttcctcgaaatactaaattattttttccaagtcttctcacaatagcaattattctctctaatacacgtttccaatgctccctttcttggttgatttgttcttgtaaacctttatcaattgtttgattcagctttaaccgtttctccaactctacccaagtagcaatagacataatgtgatgcttatttttctcatgacttctaagcctttcagaaatattatgccaatcatttataccttcatcaacaaaatgacacacatgatgttttgttgaaaacaacttacaacaaaaacaaaatactttgttttgagaaactgaatatactaaccactttctatcttgtttctccctatttggcaaatctctagtgtaatgtgttgaagaaaaacttctaccaaaaacatccttaatatatgtgacattgactctttgtg

SEQ ID NO: 250587 - DNA, 1709 bp, Cannabis indica
ttaagcacttaagaaggaagttgagaggttaaagattgccacaagagagatgaagaaccattctgagtcatttaacatgggaatgcaccagatgtcatgcaattcctcaaattattttccagttccacaacaagctggccaccaaaacatgcaatttccattcagtcattcccaggctaccatgtcagctcaccatcttcaacaatcaaattctcataataatacctccgaatttttgcagaattatcctgttggtcggttacagggacttgacatcagtaacaaaggttcatctattgtgaagtctgaaggtccctcgctctctgcaagtgaaagtagcgccacatttcgtggcaaactctttgctgacctgttgagtttgtccatgacacaccatttgatcattttttcatagattgacatccatcaatttactcttgttcctttatctaatttattaatgtcaaggtttagttcctgattattttttctcaaggggcaaaaataaaaattaaaataaaaaagaagagaaaattcactcaattgtttcaatgttgtcttcaatttctgttagatgctgaattttgtgttctttggggtgtaaaaacatgtggggtataaaaggtcattccccattagaaatgtgccatgatgctataccttcttttgtaccttaaattattgtttatgccttgtaaacttatgtatacattgtgaaatgctgttctagtttccatttcatggattggctgaactgaactggctctgttgacaaaaaatacttgtttgcctttttctttttcttttggtattgttctttgcattggaaaattctaaacatagtgatgtggtttctttcttttggtggtttatgatattgatatatatatatttgattatttggaataatgcctagtcttctcattactatttttgtgtgttgattctccatgttaggacaagaacataaactcaagattgattgtacaacatacctggtatgatcattttatttatttttttttacaagaaaagctaataatttccaataacaagtaagtgctgattgcgaatctcaaatggctaatgtggtcctcctaacaagttcatatttatctacagtcatttatctaccttttattctcctacattaccttggcccacatcatgtgcattttgtaattatctatataattattattatgggaaaccctcaatatatattatgggaatggaaatgacttgatctttgtccatcatttgtatttgtagccagttgataagctgagtcactcatggggacccatagtttatcctttttcttgttgcatgaattaatttagataaaaattatagccttgtagaatatatttaatcttcattttgtcaatccatctacgatcgtgagtctgtttgtgctcaaaataaattttaaaaaaaataagagatattgatagcaaaactacttaaattttatggtttgtaatacttaaccacataaactaattttttagcgttaaaatttgaactgcacttttgttttggtttttatacttccatctaaagtttttgttaagtgtcacggtgtactgtttacgtgtacacgtgacaaatttttagtggtccatataatattaattataaaaatattataaaaaaataattgaaaaattataataataaaacaataataatatatatacattttc

SEQ ID NO: 250588 - DNA, 685 bp, Cannabis indica
gtaaaataacttccaacatagctactccctttttacttgtattacttgtgagaaaaaaacacaattttgtttcttgatctttctcaaaagcttacaattttgtagtataaaagctcttttgaagaataaaatttggattcctgaataatagaatggctccactatttatatatagggaagaaatacattaattaagtttttgaagggaagctaggaatgcttcctgttttacaacaataacgtgtggaaatccctttaaaataataattaaattgataaaataaataagaaaagtatctctaaaaaaattttagtcgcatttacactagttagtgtatgcgagcttgctgcgagattgacgcgggttggacggtgctatttaccttatctggatattccagcttattcctcaaataagttattgatgaggaataagcctccaaggatggtatcacccgtctaggtcttagaatgctccgcgtgtcacctagatgaacgacgtgtcaccttgtgtggaatttatgataacattattgggaatattttacaaagatctaaatttactagaaagtatgttgaattaatatcctaaatatgagttctctaaaacaatgaaataaacacataagggtttaagaaaaccttacattgattgcagagaaaatataatgacctatttcgttca

SEQ ID NO: 250589 - DNA, 520 bp, Cannabis indica
tttgtaaattttattttatttcacttgctctctctcctccgtgaccactagctgaacaatcccactcctccactctctctcgctctgtctctctcctccgctctctcgtgccaataaaaaggtaagcacaacattctcttatttattgtttaaatttctattagtcatgatttggtttgttgatcttgatctttgtgtgtgcaaaagaaatccgaagcttgaaatccaaagaaagttttgaggatcgtcaaaattaatctaatgcttgtaaaataaagtttcgaggaggatgaaaatgaacatggtgacagtggaggaggatgaagcttgaaaaggttttggagctgctacgacatatgcgagaagtggtttcgtggatgatgatgacgatatttctttttaatgaaatccattagcgatggttttaaactgtcggcaatactgtaggcgacgatttaaaactgtcaactatagtatagtcgacagtttaaactgtcgcctatagtatcgactatagccg

SEQ ID NO: 250590 - DNA, 655 bp, Cannabis indica
ctttgttttcaagcacacacacctctcaagtattggtctgaatgcattatgacagctgcttaccttgtcaatcgtgttccttcttttaacttgaacaataaaacatcttatgaattattgtttcaaaaaagccagattacactcatcttaaaacatttgggtgtcttgcctttgctactacccttactgcaaacagaactaagtttgccccaagagctaaggcttgtgtttttcttggctatccacaaggtgtaaagggatatagattatatgatataaacactaaacagatttttctgtctagaaacgtggtgtttcatgaacatattttcccattttcaaaactaaatgaggacactggtaatattgatcccttcattactactatcttacctactgctgatgtttccaatactccagtaaatgattatcctcctactaacactgttgttcctagtgataatattcctttacaggaagaaaattctggtgcaccagatacagaagtggaacctgctgatatgaccaacacaccagaaattccaaacaacgcaccaacagtggcacctagaagaactagcagaactaccaaaccccctgcctatctcaggactttgaatgttactcaatactacaggataaacataccactccc

SEQ ID NO: 250591 - DNA, 667 bp, Cannabis indica
ttgtttttttaattttaattttacttaaattttatttagccaaatagaagaatttaaattttaacgtaagtaactacaattctcgtgggatcggtctcgctctttgtgagtattatttgttaaaacgatacgtatatttgcgtgttggtcacaactgatgtgaaaaatttacatcacaatttaacataccattaattggagtagatttcatacaaaatgaattatattttatatttacatcatttatttacagttttattgaagatgctctaagtttgagtgtggtgtggttataaattaataataacaagaataaataagatttgttctttctaatattataatttttgtagagttgtgtttgctgttgtaaattttttactgaattataaaaaatcgttgcaaatctttccctacaatttgtttatttttttttttcaagaaaaaaaaaattgtgttgatgtaacaccaacataatattaatatagtagtctaaaacaaaaaatacttgcaataaataataatatatcatattgaattatatatgagaatatgtatatatatttttagaactaatgtttattatgccaataaattctcatattgtaactatatacttatgagtacttatggctatataaataaattagttttttttaaaaaaaaa

SEQ ID NO: 250592 - DNA, 620 bp, Cannabis indica
caaacaataccacaaacaatgtaaaagtttcttccgattactatgaatgccgacgagaaaacttttaccaatcaccatgaactccggcaaaaagctttttccgatcagccatgacagcacgaccaacgatagatatctccacgaaaagttgatgagagaagatcacgattgatgcagatctccatgaacgcttaattacttaccaaattttctgtgtttttcttagtaaaaaaatttgatgttgattagtgttatacccaaaattcgggtgctatctcaatgaaggacacgtgtcaggataaagggaatgtgaatcgatgcaattactttttatagaataactcatcaattatgtaagaatcagagtatatttgtaccccgctgactgtaaggtcttaggcgaggaatcaatgtaaaaacttgcacttagtatattagcgagaaaccatatgtcacttattacgaataggaggacagaacacattggaaggtgaaagcgacatatatatatcaattgtgaaagcccttagagtacaaactaagtgcaacgatcgtttcggctcaaaaccgagtaagcgaggtgcccgtctcgctatgggaagactgttgggttttatgcc

SEQ ID NO: 250593 - DNA, 629 bp, Cannabis indica
ttttctttatgtgtatagcaaacttttaaaagtattttctatacgggatcccggaactttatatatgtaatacttcaagtttttaattaaattagtaaaattcaattatacacgattttcaataatcttgttgattagcaacgaactgcacagtacgtttaaaatcacgcagacacgcctatactagttagggtgttacagctgagatttagagacaacaattctaagaacgactcttatggtagcaggtttaaccacagggctaaacgtctcatcacaatcaactccttgctcctgtgttttttcattacctacaagacgagccttataacgctcaaaagaaccatcaaatttatatttatggtgcaaaatccacatagaatgaataacattcacatctggtggacgaggcactattacctaagtcttattatcaattaaagcaataaattcatctaacattgcattattccaattcgggtcacggagcgtactaataggattttttgtgataggagaaatgttcttagtggtggttgcgtcacaattggtagagtactcaagatttggcttataaatgccattgatagcatgagttgtcatgcagtggagcatgggattattgggcc

SEQ ID NO: 250594 - DNA, 489 bp, Cannabis indica
caatgacatctcgggtgaggaacactaattcccaccacacgagagcgtctccctggaactgaaaagtggcgcaggttacccaatcatttccaacgactctcatgaatttaggaattctttctatcaaagtgagccattgctcaaccttcatcacatctggacctcccaagaacactggaggtacttgcttatgaaacctctcatataacagctgcatacgattgccagcaacaggttgttctgctggcaccgcaggaactacaacggtctgagcttgtggtggaggcattacaagaggaccctactaccttagtcttagaatttctttatcttgctggcagatacgatcttgcatttctacaaacctttgctccaaaatcggaggagcttgttgtggattcacatgttgaccaccctgaactctgccactacctcggtcgcaaccacaaggattttggggaaattggatttccctgactgcctctggtc

SEQ ID NO: 250595 - DNA, 509 bp, Cannabis indica
ctatttagttataacctcccaattagaatatgattgacttggttccaagtgtattcttggatggagattctactgtatgtttaaaataaattttgatgtatccttgcatgtttggattaatttttgttgttttatgatgcaaattttatcttatgtaaaaattagtaatttttttcgatattttgattaaagttaaatataatacttttttaagttattttgattaaagttaagtataatatttttatttagtgaaaaatatataatacatatacattttaatatactctacttattgattttggtgagaaaattgcacaaaatagaaactggctcaagtggtatgctggagagtaagggtgtacgtgttggaatttattttactaggatcttagatctactcacaagtatgttgtttaacaccctaaatatgaactttataaaacgataaataaacacatataaagttaagaaaaccttacattgatgcagcgaaattaatgtctcct

SEQ ID NO: 250596 - DNA, 1143 bp, Cannabis indica
tcagtttaataattgtctttgttgaactaaaggtagtgccgtaaggaaaatgctctataggagctaacttcttggaagtatacagtcttgctgttcatctactgttctattaacaagttttcaaaggcaccatggatcctgctcaagttagtgaccttttccatgatgcggttcaactctcccctgaagatatcaccttcgcacttaaccccggcgaagttgatgaacctgaagaagcgaatcaagttctaattgggaagattattagtcggtacaggctaggaaaagctgctattcaaggctccctaaagctgtcttggagtgccatttcgggttggaagtggaaagaaattgaaggtggactgatacagttcacatttgctaaacgggaggatgctatgaatgtcctcgctcgtcggccctggtttgtgtgtggtgcccttattgtgattatgccttggccagcctggttaacccccgcggagataaggttcgacaaaactcctctatgggtgaaaattgaaagcatacctccgttttattggaacctctctaatcttaaggaaatggcctccagagcctccccgtgtatgatcttccaccgggcattgaggatgcaatcggtatgagctccctgagatttagagctaccattgatctaaataaacccatcttttcagggtttttcctaagaaggcagaaactaaaagacctttggattcagtataaatatgagagattacccaagctgtgtttcaaatgtgggcttcttacccatgaccagagcatttgcttcaagacacccacagttgtaaaagatggctcaggaaacttttacccaatgtatggcatctggcttaagagcgacgcccctgaaagatcaacattcacatcccccttggccaaatggtttcaagattgggtacttcaaaaacaaatcttcctggaccctacacttcgaaaccaattgaaagttcaaaaggcgttgcgcaatggtgaatcggcggaccttagagagtgcagaagacaactgccgggcaagaagagaattgtttccgatgaggaccacccggaggcatctcaagacccgctggctattacccaactaccattggttaacttgccgggtataggcaaaattgc

SEQ ID NO: 250597 - DNA, 588 bp, Cannabis indica
tgatgacaggcgctctattggtgcttatgtagtgtttctaagggaaatttcatttcctggtcagccaaaaagcaaaacattattgccaggagcggcacagagagtgagtttagagctttggccaacacaacagcagaggtgaaatggctatgatatgctatgtctgagttgcacgtcactttaccatatgctcctataatctgggttgataattaaggggctacatcccttgctgcaaaccagtgtttcacgcctgatcaaaacatattaaaatagatctgcatttcgtacgcgatcagacattggcggaagaacttgaagtacattttgtgccttcaattgaccaaacagctgacatactcacaaagccactaaagagagattcaactatttaaaaaccaagcttcaagtgtgcatcataacgttccgcttgaggggggatgacaagcaactaacttctacggttaattagttatgttacttgtcactgttttgtacctaagtgtccaactaattcgattgtatttcttaattgtactctcttttagtttgttactcctctctatactcactctctataaataaagg

SEQ ID NO: 250598 - DNA, 996 bp, Cannabis indica
tattattttattaaaatataaataaaaagccatccatgattttctcgtaaaccaagaattcagttatatagacacactttatatagaatagatattgggatggaaaaagaaagagaagaaatgagatataaatgagttttggattaataagaacaattttctaaagaaaaagaattaaaccaaaaaaataacacaaatgaatgtagataagaaaagttgggtttttgctgtttgactgtggaatagcaaaaacccaatggtattgttatgggaatgtacaataggtatctaatgaaattaatgaaatagcccaactttccatgcacaggtatctatataacaacaatatttgtagattatttcaatatataataagtgaatattgtaaatgtacaacagtaaaaattcaatcgtatttttatgagactgttcaaattgtaataagaaaatgaatataataaataattaaagaaaattcctaacaatttggttaattatatgccgaaaccataagtcaaacattccaagagtttacatgatttctaattgaaaataagtgttcatccaaaatatcactccttccaatgtgatgatggcgatgaattatatatataggccattttcctcgtgtggcatctctcatacaaaaccttctctctatatacatccgtgaaaaaggaaacaaacactaacatattttcgaattaggtccactatcaatgcttgcacattcctctctaccctcccaactttttttcttctttgaacactacctctatatgctataaatagagtaactccctcagttttgcaattcaaatccccatattagagacttatataacaggtcacttgattattttgtatgaagaattttcacgattcatacttaaagcatcttcgtcacatatattaaatttagtgtcacactattattatatttaacttcaaaaaattatttctactctaattataacactaaatattacactaaaa

SEQ ID NO: 250599 - DNA, 570 bp, Cannabis indica
caaccaaacaaaggaatggaatgcaaatttattcctttctattccattctatttcattacctccaaccaaataccacctaaatcaataatgacacttcttctttaaccaaaatcaaaggtcttaaatccttttgtgagctaaaaatagaaaagtgataagtggtctacactctacattctctctttttttcaactattaattatttcaccgaaatttcttggaactgtttgtttcaaaatgatagtatctatcctaagcataatcagtgaagagaactaatgaagcataacttcagaaattctgctctgcattaaagctataagccataagcaggaaacataacaacgtggcaattttgtcataatgggtttgtttgcttagaaagtctactctgcattatatattgatatgattttcatcaaagaagatgaaagaaacagtggatttttatgtttaactaatgcatatgcatgtaagagaaagagacatctgtttgttcatttcctcactgctttgagaattttaaattcatcatataaggagaaataatgtactttgtcgacttggcg

SEQ ID NO: 250600 - DNA, 560 bp, Cannabis indica
agacattggtggttgtgacttttatctctaagtcaggtgtgtacacatctaacaataaaggggagttgttgttgatgttagtgacaataatcaatttccctttattattaactgggccaacaatacctggagcagtggttggtaaattgaaaggcagtggtggtttaatgagtgaggaattattaagagagggtggtgggaatagggaagtagtcggtggatgaatggcagaggtagtagcagaagtacaagtggacacaaccagcgtgcgtggatcaatatgggaggggcaagtaacagacacatctggagtgtaatttgatgattcacccatcaaaaaacttttggctgcggctgtggagtattgcgaagtctaggaatggtattcgttaatgtgtttcgtgtcaaacgagtgagcaaaggccatccatttccctttgaaaaatcagtgcgataacgatcataggaagaagttggcaatctcgatcctttaagttcaggtccatacggtaattcgggttcaattcctttgtccaatttctcaagaaaaacagaacatt

SEQ ID NO: 250601 - DNA, 570 bp, Cannabis indica
atgcaagtgtcaacaaacagtcaagtacaaatacaaaatgacccctggtgaacagcttgtgtatgtagtcaaagaacattactggtatacatgaaaaaacatcattactggtatacatgaaaaaacatactccccatatgactcaatatcctactgatcagagcttccttcttaccaagtactttaactctgttacagtcaaaaatccttcaactgcaagtcgaaaatcatgaaattttttattttctgaaatctaaggtgtaatctaaaataaactgttagcctttatatattttctacatgcttaaggattcttttaaaaaagccaccattattgtataaactatgcaaacttttaatacgtctaagttctctttccttgtctgcaagatagaatcatagatcactgaagcaaaacaattctccaacctctccattgtctgcaagtttactccaatcatactttgcatactcatgaactgcaatttcggaagcagcttttctctttttggaggcatcaatttccttctctgtctccagcatttttagtttcctcatcataatggtccc

SEQ ID NO: 250602 - DNA, 1743 bp, Cannabis indica
ccagcaggcagtcccaaacaccttgcaaattcagaaccagccttccccgctgtggcagacaaagtttcaatggcctggctcgaggaggcagaggcatgagttgtatgaggatgaggtgcgttggtgttgggatcaactggaggaggagtctgttcatgggtctcgatttcagagacctcaagttcaatgggctcggacactaccttctttttatgggcagtgattttctttttccttttagaaggctccacctcggtatctgtaggaacccctgaattggttccccttttcttcccttttcggtccataacatcttcaaaatgcatgtgtgcgaggcaaaataaagtgttaaaattatttaaatacaagtgaaagggaagcgtggagtgtaatttttcacgtaagaaatttaccaaaaccactagagtgagctatcactagaagagggggtagaagggtcatagtatccactaaaatccctacagcctgtgatcttgaatatatcaaatggctcgattggttctaaatcctagcttgcatctatatggcttgctctatctgtcatggtgccatattgctcgactataccataatatgactcattacagttaatctggacgtggaatctagggtaccagctgtcaaatctatgagcaattcggtctacgagaagggaaatccaaatataaaaattaaggcagctatctcaaaaggtagccaatgtgttacattcagcactaagtattgtgggtgaccaaccacattgattatctcgggatgctccttcaccggcttctcgagggactgtgttttgaaggtattgtgcctgacccacgcgatcccaagccttatccccctctagaacggaaacctgctgccaagaagaatacttggaaaacttataatcataagtatactccttgttagtaaggagatccacagatctcaaattggcctcatttagaaggaagtcgcacgatctaaggccgtggggaagagttagtaagagcctgtgccgattgaccatctcaggagtacggatgggtcttttcaagagggttgtaaaaaacaaaaaattagtcagaaaacttagaatgaaaatacaaggattaatccaactgagcctgatgaaaacaatcacttatgaattttgcagaaggtggttgtgccaattggggagaggccagctatccaaaagaagttatctttgaaagatatcttatttggcaagtctacaataattttaggctcactagagtgagtaccaagataaaagaagccccctacggcattcttccttgctggaacagccttgacagagtagagatactcaatttccacaggcgtagggcactcccacttaagaattttatacaaaaccattaaactggcaagaattctataagagatggggtttagttggaatggggaaagcccgaggtggtttatgtaatccttgaaatagtcacgggggaaattctggcccctgtactgatttgttcaagactccaggcacctatgccagtcaagccactgatactggtctcaccactggctccctcagaggtctcacctgtaagacgcgcaggggggtaacaactaaattcaccagctcgcactgacctaacttggcatactcgcccaagttcgattccacaggtcctcagtatatcacctgtgtagcttgagatagttcgcaccttcgattctattaactcggcctcaaaggtgacgctaggatcc

SEQ ID NO: 250603 - DNA, 1803 bp, Cannabis indica
tctttgtttgagatggcccaaatgtacttccctatggctgctagattccattcatgaactcttttgaaccccagtcctccacaggttttagaatagcatagtttctcccaggctatcaaactagaacccgtggctttatcctgacctgtccataggaaattcctacatatagcttcaatatcatggacaattttctgaggcaaaatcattacctgagaccaatatgcatgtatagataagagtactgagtttatcaagacaactcggcctgcaaacgacaagtttctcgatctccaagttcagattcttgttgtcattttctccacaagtgtagagcattcgttctttgagatctttttggcacaaataggtactcccaagtagtggaaaggcatctgtttttgactgaatcctgatgcatcaagaatcctagttacttcagagctagccatattgctgcaatagatggctggcttttaaggattaggctgaagtcccgatgtttggctaaagagctttaggccttgcagaagataatacacactcttgaaatctccgttactgaagagaaggacatcatctgcaaaagcaagatgatttattttaagctccgagcatctctcatggaaatgaaaacctctcttttgccaataactttcagaattctagaaaggtactccattccaatgacaaagaggagaggagacatgggatccccttgcctcagacccctcttagattcaaagaagccatgtactgagccattgaacattatggaaaatcttggagttttcacacagttcataaccaaattaatgaaagactgtggaaatttgagtgccttcaacatctcttccacaaaatcccactctatggtgtcataagcttgttgtaaatctagcttgatcaagcaattggcctttttagttttccttccatagtgcttcaccaaatcctgacaaatcattatgttgtgaccaatgaatctcccttggatgaaccctccttggttttgagaaatcaaactagaaagaataaatttgattctagagcacaaaagctttgttgcaactttgtatattacattgcaataggcaattggcctaaaatccttggccgaagaagggcatttaactttaggaaccattgtcagaatagtagaattaatctccttgagaatcttccctgattcaaggaaagaggtaactgctttgtaaacatcatctcccacaaggtcccagttgtcttggaaaaagaaactagagtagccgtctggtccaggagctttatcaccaggtatctcaaataacgccttcttgacttcttccttagtgaacttgttgactagtagagctgtttgtgtggaatctagtaccggtccttcaagtatcacccttttagaaattctcgttctattagtcatttgggacccaagcaaggacttgtaatagttgatgaagacctcagtaatttgttaggctcagtaacacgcactccatcttctctaacaatagacaagatttgattttgtctctgcctctgcctgatgcttgcatgaaagagaactgagttgctatcccctttttgaatccaagcagccttggctttctgctggagaaagtagaagtaattcttaaatgccgcattatacttctctcgggcatttaattctgcttcatgtaaatcagtattcaaagggtcttgttgcagcttatcttgtagttcattgagtccagcttttgcttgttcaaacaggcctgaacatcggagaacccttctatattgatctatttaaatgtagcc

SEQ ID NO: 250604 - DNA, 802 bp, Cannabis indica
tttcttttactaccacccccacctcgcgagctcaatttattcataacattagccacaataacatgagaaagtttcgggctcaaaggaaaagaattggacttaggcatacctttagaaccacgaccctttgacgaattaacgcgcttccaagtcttagctttttgtgctttgataaggggttcaaacgtttgttgaaaagcatgactaaaagataaatgttcattcaaaggatcatgcaaaattgcttttcctttatcaattggttgaagtggcaccttactgggacccattgtttgactcaaaccattacattgcatttgcactccacccgaggaagctatcacatcatgtgacccaccattaatcacctccttacctttcaacaactcatttacactatgtgatgccacaccatccatcatctcggccaactcactctctctcaccacattattatctttatcaacctcacccataacacctttatcaactttattaacttcacccaccatatcaactttattaacttcacccatatcaactttattaacttcacccatatcatccttatcaccattaataccaggatcaacaccagcagcactcttctcctcctcttcacgctcacgagcttccaagacagaagtcggagccaactgctccggggtagggccagaataacgaggccgagaccgttccactgccgagatgattctagaagcttcgcccatcgtcatgatcggtctgtttgaaggagagtccgctcgttttctgttgaaccgaaattatcacggggaggaga

SEQ ID NO: 250605 - DNA, 868 bp, Cannabis indica
ctgatgagcctttatgcaaatcctactctcgatcaaagttaacagcccatctagaccgtccctctacccgattgtgcggctgaggatagcgcgtgtcctccaccccgacagcaacaagtgaagtaggaatgtaaatggggtgggacgggtgcggggattgctcccccaccccacacccgcttcttaaattcactcccatactctccccaatacccatttaaattaaagcgggagtggggcgggaattacccgacgggggaagaattctcatcgggtacccattacatatatatttttgaaaaaaaaagtaatgtctcaaagagaattaaaaaaaataatcaaaaacttagtaaaacaataaacttaagtgagatagtgtgtatagtgaaaaaaaagagtatcatcaatagaaagcctaaagcatgaagttattttaattgtagtagttatgattttaaaaattaaatatatacatacatcatatcggggcaggttcggggcgggtatctatttccccgcaccgccccgtttttgactcacgtatgaatctttaaacccatacctgccccgcccccgaaagtcaacccccgtactcgccccataagggacgggtacccgcgagtataattgacatccctaaagtgaagcctgccaacctccttccgcatgggacccacgaagcagctggtccccctcctcttttcgccacgcgtgcaacgcaggcctgccccctcagctccaccaacgaaccagacgatcctagatcaccaactgccagtgctccagccatccaaccgtcgccatgtggcatctgcagaagaaaaaaaagaaggaaaaaaatgagctgttagttgaattattcacattc

SEQ ID NO: 250606 - DNA, 777 bp, Cannabis indica
aatgacagattttacaatgaaaaatgagtaggtaaagtagaattacatttgagcatttttatggagtttattggtgatgatgacagatggatggcctaaacggaagtgccatttattgtggttcatctgagtagtggaagttgcagcattgcaatgtggactgggagtaatttcttgctgaatgtaatagagattaccgaatcggctagcaatcccaatcttcaatgtctgagagagttcctggacaatgcatttgttagatgtgaattgtataatgtgattgttagcattaagaaatgaactaacagaaaaaagattgaagtgaaactgaggaacaaacaagacattggttaatattagcttagaattgataataacagtaccaacattttcgattttcacagaatgtccattaggtaaagtgacagctatagcatgtggtttgttaacaaagaatgaaaaacatcgaatgtcacaacatacatggtgcgttgcaccactatcaatgatccaaaaattatagggaaaggggctgacattaccagaaaaattggtgacagcagcattgatttcaggagttgaagtggatggttgcagctgttgagtgagcatggagataatctgctggcattgttcagtagtcagctgaggtggatgtgaatcagagactgaagtggaggcttgcaaggtgtgaggagttgaccgagatgtagatggtgcagcatctttgcttttgcctttaatgttggaatccgttgttcttcggttgccatatcc

SEQ ID NO: 250607 - DNA, 948 bp, Cannabis indica
aggaaaagagaagatttatgggttgagctagaagaattggcaaagagaatcaaggaaccatggatgttaatgggagattttaatgagattatgaatggtgatgagagagttgggaggagagctcactgctgcccatctcagcgacttagagattgtacggaaaattgcaatatggttgatttgaaacattcagggtcattcttcacttggaataataaacagaagcctgaggaaaggattttttccaaaatagatcgagtcatggttaattaaaactggataaacaatttttcatgcttctctaaaattgagaagaattcataatagaattttctcgattgaggatgagtatggaaattggtgtgacaccccagataaagttcaacatgctttcttggattattacaaaaagttgcttggaactacaatacagtctagaaggaaggtgaatcaagcaattgtggatttgggtcctaaaataaacaatattcacaaggaaatcctaatggcagagtacacaaagaatgaagttgaagaagcaatatttgccattgacaaaaataaagctcctgggccagatggttatgggagtgccttctttcaagataactggaagatagtagggaatgactttatagaggctgtactgtcttttctcaactcagggaagattttaaaggagattaatgccactactataactctgattccaaagtcaaaatgccctaagagtgtagtagacttcagacccatttcttgctgtaatgtcatctacaaggctgctactaaagtgatttgcaatcggttgagaaggattttacctgatcttgtagcagggaatcaaggaggatttgttcatgggagattcattgctcacaatgtgcttgtttgccaagacttagtcagactatatgggaggaaaaattgcaagccaagtagtatgatcaa

SEQ ID NO: 250608 - DNA, 976 bp, Cannabis indica
ttttttttttattttgatgtcttttttaattgcaaggtgtcaaattggtgcttgagtagtgtaactgtctttttgtatttatccatttgacagttgtgccaccagccaatggattatgggggttttccaatattcaaatcgggaccgtcggatgattgacgatccgtgtcgccttagttggtctataaaagccctacattttccttcttcaaaattttttatcctcacatcttctcagaactttaggctagccaaaattccaaacagcctagagtttcttctacactttctccgacgtttccaagcccaactttaccggtgtcgtacaccagaacatggaactggccgaactttttttatttgtaagtcattggtcacatgaacctcttttttgttactgttgcctcatttgttgatatgtttgcatgaatgcaatgttttcattgtatatgcgatttgggctttttcccagactgcctttatttttcatctcaggtcagggatctcgtgtttaaggtttataggactccctactttctttattttcgttcttgtaccattattcttaatcatggtgcaattagcacctgatgcttagcataggaaatttctagtttctgaacatgctagcatccaaagagggccttttctcagcggttagggacctccatttccttgtttgtttaggatttgatatggcggctaactattgagtgaattcttgctatttcagatgagcaacatcttgagagacctacataaacacgactttcatgcatttgacatagaaattctataactctactctgaaaccgagatgtcaaacgctgaagctctaaccatttcttcctctcaggctatggtcccacgatacccagtggtgcctctgttagtggtgatcaaggcctagtcctggtcaccaattatgtccatcaggctactgattgggaagccgatgatttacactcatttattg

SEQ ID NO: 250609 - DNA, 502 bp, Cannabis indica
atttccttgtttgtttaggatttgatatggcggctaactattgagtgaattcttgctatttcagatgagcaacatcttgaaagacctacataaacacgactttcatgcatttgacatagaaattctataactctactctgaaaccgagatgtcaaacgctgaagctctaaccatttcttcctctcaggctatggtcccactgtacccagtggtgcctctatttcctggtcaccaattatgtccatcaggctactaattgggaagtcgatgatttacactcatttattggatttgttcatcacttggaactattattgacgagaacaagatcatgcctcaggagcctgggattttccatcatctggctcgagaaactgagacccccaaccacaactgttgtggtgcaaatttctcgcctagaagtacaagtacaatctcatgtaaaatttgttaggttttgtgctctaaataaaactcacttcaatataatcaagatttacta

SEQ ID NO: 250610 - DNA, 1666 bp, Cannabis indica
aagaatgcggcttttggttttttgaaagagaaggttaggaagcgtattcagaattgggatagtaaacttctgtcgagagcgggaaaggaggttttattgaagtctgtgatccaatccttaccttcttacaccatgagtgtctttttggttccccttgaaatttgtaaagacattgatcgcctcatgggaagattctggtggcactctaaggcttctcaaggaggtggtattcattggaaaagctgggataagttgtgtcttcataaacataaaggtggtttgggctttcggaatctgagggactttaacttatccatgttgggtaaacaaggttggcggctattaaccaatccgacttcgctggtggctcgtgtttttcaagctagatactatcctcatggttcttttcttgatgctgagttgggagctaatccgagttatgcgtggcggagtttatttgaagctcaggatgtggtcaaaatgggagctagatggcgagtgggttctggtgcttcaatttctgttcttcatcagccgtggctcccttctgaggataatccttatgtgatttcttctcatgaggctcttcagagttgttctgtttctagtcttcttcagcctgatcggatgtgttgggatatggagctcttagaggacttatttgaatccagagatgtggagctcatttgtaaaatccctctgcctgcattgccagaaattgatacatggtattggtcgtttgagaaatttggtggctattcggtaagaagtgcctatcgtgctttgcaagtgcgaaatggaagatggaatgcgcaggataattctggcttttggagaaagttttggtacttgaaacttcctcctaaagttaagaatttgctttggagagctcttaccgattgtcttccaactctagtctctcttcaaactaagcgggttcatgtttatagtgtttgttctttgtgtaattttgaacccgaaaccactttccatatcatggtcggctgctcttttaccaaagcttgtgtggagcgcggtttgggtctggtttttaataatggggaggaggattttggtgcctggtttgaagatttctgtaattctcatttgactgagaatattgagaagttggcaatgattctttggagtgtttggggggcccgcaatgatttagtctggaatgataaggctatttctgtggaaagagttgtttcatctgcaattacttaccttgagctttggaaatttgctcaaaatatcaatggaggagcttcgtcttcttctggtcagcctcgtgctggtgttgagcactggattaaaccatctttgggagagttgaaggttaattgtgatgctgctctgttttctggagaaaggagtcatggattgggttggattgccagggatcatgctgggttgtgtgttgctgcggcagctgtcaaacaccgaggagatattgaccctgttgttgctgaggcgctgtccatgaaggaggctttgagttggattaaatcctgttgggaagatagcaggactgttgagggcttttgtcctacagcggtaatattggagtcggattgtcttgtgttggttaatgctattaatagcaagagccatattctgtctcctcttggtcttattgtttcggattgtatttctcttatac

SEQ ID NO: 250611 - DNA, 926 bp, Cannabis indica
acacacagtgatcatgacagcagttatgctttcgaaaccagagaagttcaaagtgaaatcttgttgctactgatattcagggcagtgaaaacaacaatcagcaagatgaagagcagattattgaacatactggcacttcacttgcccctattcaccccatgataacaagagccaaggctgggatttttaaactcaaaacctacatgggaaaagctgcagcaacagatgaatacaaactgcctatgtctcttgctgaagctttagctcatgagggctagaataatgctatgaaagaagaagttcatgccttgaaaaagaataaaacatgggtgttggttccaaggctgcctaatatgaatattgttggaaacaaatgggtgcatagaatcaagttaaatgctgatggttctctccaaagactcaaagcaagacttgtggctaagggatttagtcaaagacctggtatatactatggggaaacatttagccctgtagtaaaggcctgtacaatcagaattgttttgaccattgctgtagcaaagtcatgggaggttagacaactcgacataaacaatgcttttctaaatggaactctcacagaggatgtttatatggcacaacctgctggttttgaagacaaaaatcatcccaattatgtttgtaaactatccaaatctttgtatgggctgagacaagccccaagggcttggtttgacaagctgaagcacacactgctcgagtggaaattcagaaattctaaggcagatacctccttgtttttctacaaaaatgctactgacattgtgtttgttctcatctatgtagatgatataattgttacaggcaacaactcagtcaagcttaaacagtttacaagcaaactcaacaaagtctttgccttgaaggaccttgggttgctgcattat

SEQ ID NO: 250612 - DNA, 826 bp, Cannabis indica
ccagctctattactttggatagaggaagcatggtctaagtgctagtacaaatccaaccttgtctcccctattctgcttaaggcaattaatcgagaaacacgtagatgggagttaagctccgtgactccaatcgtgatcctgtaataagcataaaatccctctgtgtaagattaatttgccaaagtctgtaaagcaccacaaaaaatacttcaacaaggattaatatctaaagaatttgcggattgcatacttcaaaggttcaacacattatttcaaagtaggaaagtctaagggtatcaagttttggccattagaacaaaaaactttgaaaaaaccttaggtaatctaccgagtggcctagaaaaaaaaacaatagtggaaagagaaagcaagcacaagtatggcaaataaaacatacatacatagattaaaacaacagtctttaaagctagtacataatgcctcgcggttaaggcatgattaaactatctccacaaaagtaaagttaaagtaataaagaaacaagggttgttggatagaatcactctttggtctggtgcagaagttgatccagacgctgaacccatccgtgctcacaaatgtagactcctttgggacaaccatcctatgccacatcagtcccgatacattgagcaatcccactttagtggtgtatgtttcaagcatcccatatgaacaaaagaaatgttccttttggtccatctcccagatggagtctttgaatttttgagcgggaggtgaaattttagccttcctttccctttagactttttggatgtcctaaagaaagtgactttcgagatgg

SEQ ID NO: 250613 - DNA, 1057 bp, Cannabis indica
tgtattatttttaattaaaatagttataggctgagtcataatgaaggacatgtgtatcaaagtcatattttctttttatataataaatttaaaaaattaaataatatacttttattatcactatttttgaaaagagagtcggtctgaggaggtatataagggagttgtggttgtatggtctcagaaggtatataaaagagttgttgttgtataatttgcatgatacagagatgccttcttcaaatgcattatctgcaatgtatcagcagttacaaaataacactaatactataactaatggttcatctagtgatagcaatggctcatttagcaactctgagaatcaacctcctgcatcccgagttcgaagtcgaagtcctgaagttcatagtcttccaaatggacaaagaagacgtttcgaagtacctataacttccccactgcctacagacatgattaccattacccggtcaagtgtaaatggttggagatttagtattcgggctccgttaacacctcaacaagaagtttacctccaacgcgtgcacaatggtatttcagcaatagagagtgcaatggaatacatccagctaaatggaattactgcagaatccatgactcggctgttgattgtagtagagacgatgcctgaacagttgcgagatgcggtcagcattttccgccgtccaccctagtcttccttatctgttgaaaaactattttggtataatagagtatgattttagatagtggtattttattattttttgctaccactgtattcttataatccgcttatgccaagatatccttttgatatatatgtatatatgcatgtaactatatatatagtttgtaatgttctatctttttctgttaatgaaatttaagtttgttttattaattaaaatctaataataagtcatatattacaacaaaaaaccttccacctataaaatcatcagtatattatataaacaaatggacaaaataaaaaaagacatccctttttattatataactagactatacaggggagccattttttcattacttc

SEQ ID NO: 250614 - DNA, 1032 bp, Cannabis indica
attaacaaaaagctggaaaataacaatgagacaaagaattatagtggttcaatcagatcacggtctgcttagtccactgtagcaagagtttcgtaggtgccatttcacggtggatcacccctttatatacaaagcaggtgtccaatttagttatacagggattgcattcattgtcaatccgtttttacacattgaattacaataattaactgaacaacgttaacattaataaatgaacggcagttactaagtttatcaacgtatgcgtcttctacatctgcgagttggctgtccatattctggtgataatctcgcgggttcatcgattatgctcgggatgtctgcgtccttaggtagtcgcctcttgtggacatcgcatgacgggctgatagggcctagttatgcaagcctatattacattataaaggctgcagggttcttaagaccaactcgtatttatagagaatcgttctcctggttgatacaaggacacggggaggatgctcgcatatatttgatatatgcgagctactctcttgtctcggatgcgattagacttcggtcatgctcgccacctctcgctgattctatcttaagcgaggtttaaaacttcgaggagtccctcagggacatctcagctttctttggaaaatctgagtatacgtgtcctctaagtaggggtctggtctcgagtttctaggtaagagaaatctcactataacacatgcccctagtttcgcgatgtgacaggtgcggtcacaagggaaactatactcgagagacaggtgaaaggttgtcacgaggaggtgacctttggttgtcccttcgagggtttcgaaaaatgacggctataatcattacttttattgcatttatggtgccacgtcacaaaactcttcggtttctgtgtaggcgtggccatctctggccgttggattgggcgactctaggcattccaactgccacgtgtcgtgatcccaattaatgagggatttgggtatttaaacctcctgattcgaaccaaaaattccc

SEQ ID NO: 250615 - DNA, 630 bp, Cannabis indica
cattttctctttcatgaaacccaacacagttgacttcttcctcccaatcgtacttggtaggcctaaatacatacaaacagactaacaaacactactcaacacattgcaactaaagaaagcagttgatttgttcaaattaatcttctgactcgacacccattcaaaattgtgcaacagctcaaccaccctttgagctccaccattatcaacttgaacaaacagattaatagatatcattagcaaatagcatatgagagacagatggagtccccctagcgacacgagaccccttaataagtagatggcgctcatatcttagaatcaaggctaaaaatctctcaacacaaataaaaaaaaaaaaccaattaaggtgacaatggattaccctgcctaatccctcgagtaggaatcatgggactaacttgatgactaccatgcacgattactgaactaaggataaacaaccagaaactaactgcacccaccaattggaaaagttaaatatctttaaatatagcacgaatgtaatatcattccacatggtaaataaactttgctcgtattaagcttcaaagtcaagacccttcctcctagaaccttgcacttcagtaatgcataatctcaaaggcc

SEQ ID NO: 250616 - DNA, 828 bp, Cannabis indica
tcttcttcttcttctacttcttccacctccttcctccacctttaatcctataactctcttctctcgtctatctctctctttgacaaaaaaagatagcgagccacatcatcgtccgtctctctctgttcctcgggttccactcggctccacgacgacagagtgtatggtcattaatggaaaaaatggagttcatagtgaacttcgagcaccttgaaacccccaatctcgtgatccttgagttccccttctccattttttcggtctctctctcttgtcggagtcgagactttttggctttgacctggttgtctctgtttctcaacgagcgaaaagaacctggtttttgtttccccttgcaagagcttcaaggatctgtggcccgatacttcgtacacctcatttgaccgagaaccgccaccacctacagtggagctctggagagagttttcaaattattttcatttcaagtgttttattaatttttttttgttcggttgaggaaattttaatttttaagtggttttatggatttaaaaattgtaatagtagtaggggttattgcagtagctacagtggtgaggtggtttcagtggtgtggttgtggtggtttagagaaaatgtttatggtggtggtaatggtagagattttggtgtgatggtaatggtgacggtgataatagatgtgatggtggtgttgttgatggaggtgctgttaatggaggtggtgttatggtggtggtgtgaaagatagaggaagaagaagtggagttgggagattttgatctttcaagaataaaaataaagcgatagaaaagaaaaaggagaaaa

SEQ ID NO: 250617 - DNA, 547 bp, Cannabis indica
ataaattaatatctttacgtctatattttagccataatacgtacaaatcaaatcttaaccccataggattttaataatcggataaatccgtaactcaaatttattaaatatataaataaattttagcccacaactacatattctgttttcgaataataggataatacataatgaaatataatttcctaaagtggtgtttggttggaggtaatggaatagaatggaatagaaagaaacaatttttattacatttctttgtttgattgcatttttatagtattggaatattattccaatggaatgatctttttacaattttggtggaatgattattttattttgaaatgaaatgaaagaccattccaatgtaagatttaaaaaaatttattaatttttttgtcaatttttttattcattttaaattttgttccattataattctaattcccacttccattcttatattttcattcctcccaaccaaacgacacctaaatgtttagtctcttgtcaatttgaagcccttactattagatattagtctttt

SEQ ID NO: 250618 - DNA, 583 bp, Cannabis indica
ctcaagagagtacatggttaatgcagttgatggaggatctataccagtctatagattatgcggtgccactgtgataattaattttttattcgtctagtagagaatacaatgtttcatgctcgaacaacacatgtgaaagtgcattacaattttctaagatagaaagttctacgcgaagagttagagatgcaccaagtaaagagtaaagatcaagtagcggatctattcactaaagggctcaacacttcaagatttgagaagctaagagaacaactcaatatgaagagttggtgttgagaaggagtgtgaaagtcaacaccaactttttgaattttctaatcttaagagataataagataaatgtggacatttgaagatctttttagtaattgaaattaagcccaagtttaacataagctagaattttctagttatttacactttaaagtcagctataccaaccgattatagatggtataaataggacattgggtcttttgtagtgtaataatcaaaaaagtgtcccaaagagaggagtccaagtgtagtgtgagttttcttattctaagtttgtcttagagag

SEQ ID NO: 250619 - DNA, 662 bp, Cannabis indica
gaaataatataattgtaaaggagcacttattaaaacatatatatatatatgttagtcgtttattttctaattatagcatatagtatataaaagaaactaaaaagttttatgaaattgtatatatacatatagagatgctcatatttataaaggagagaaatataaatacataaataaataatgaataaaaaaaattaaaacaatttgttggcatattatcttgtgtttgtgttgtattaaaaaataaaataaaaaatagttagctaggctacaaagaaagagaaaaaaaaataatatgctgagtaaaacgggaagtgaataagaatggaagaagtggatgagtatagattaatttatactttcggtaaactaaggacgttatgtgagttattaaaatagctgacttatacataaatattattagttttatgtatatatttaaaaatttccctattttttagctgagttttatccacaatatatttctctcaaaattaactcttatgacaaggaaataacgatgggctggacagaatacaggactgatcttcacttaaagcccaatttttctcatttagccgatttctatcaattttatcattggaataattacataatgcaccattttttgtaaaatatttacatttttacgttcaaaaaat

SEQ ID NO: 250620 - DNA, 708 bp, Cannabis indica
aggtaatgcagatgatagaaaaaccagcagtggtggatgtttctatcttggaaacaatcttatttcatggcacagtacaaagcaaaactcaatctctctgtccactgcagaggttgagtacaatgctacgtgtagttgttgtacccaatcattatggatgaaacaaatgatggcagattatgggtttgatttgaaaactttagctattttcagtgataatgctagtgctataaacatttcaaaaaatcctgttaaacactcacgcacaaagcacatagacatatgtcatcactttattagagagcttgtggaaaataaaactgttggcttagaatatgttgaaactagcaagcaaatagtagatatttttactaaagctcttgactcggtttgatttatctctctaaggacatccttagggatttgtactgtttaatgtttgtgctcttcatgatccttgatatttgagttgacttagggttcataatgtcttgtctttgtctttgtcctataagaaaatctcaaccttataagaattacactcattattttattactaacgtttttggtgtaatggtttcatacaggtttggttcaagaaaattgttcactcctctcaggaatatttaggttcttcaaacaatgttatgtgagcagtcattttcaaaaaaaaaaaatgtttaaaaactgtgtgttcaagctccattg

SEQ ID NO: 250621 - DNA, 871 bp, Cannabis indica
ttataaaaaacacagtaaaaaagtaaaaaataccgtctggcagtatttttataaaaaaatgacaaaagttagtataccatgtaaattttccattaaaaaagtcgaggaagaaggcccatgcaaacaattggcattacttggcacgcctggcaaggagccaccattcggcccagttaagacattaagagagagggataaaagattgttctttgggcccccaataccgatccattaccctcacaaaccaaagggcccacattctccactaaagggcacgggttgaccgagtcaacccaattcctcacatctttctctccctccaacggtaatatctttctccaataaattgcttctctttaggcaaagaagcaggagcctttctcgcctgcagagaacccgaaagagaaacttcactagaaaaggcttgtccccagctgcctagctacgcctattgatcgcaccctgtctcccatgcattgaggcacaacaccatcagccaaaacaatggcgaacagggcccaacatacaagatcaattctgaatcaggcccaactaacttgacatctaccatctttgtagtaacatcttctgagtatcctttttgatttgctgaaactttccattatttccttattcctgcaaaatgtcctccttgtctcccactatatcaatgtccatatgtaatttgtatcaccaaaatgtactcagctcagctgccaatttgtatttatttatactccgttaccaatttagataactctagaacacgtacaaaatttcaattaatgtaagctattggtctaaatagatcaataaaattttattacaaccaaaaacaccttatagtagagctttgaaaatcaaaatgttt

SEQ ID NO: 250622 - DNA, 697 bp, Cannabis indica
cgaaccagttgagcaatctcatttcggtggattgggaaggccaaatgcaccaaatttcgcaagcaagtttattcagctgctgtggcagctcttgtgtatcaaatatggcgtgctagaaatgacatagtgtggaatttgaagggagcaaatgaatcattgatcataaggaaaatcagaaatgatgttaaaggtagaattacttgtttttggcctaagaaaactaatgttatagatactaattggttctccaagttgtaaaaaagaaagaagagaatagagggggagaattgaatacttatatagtgattgtattttttcataggcctctattgtatgtgttatttattgtaaagttgtttttggagtaatgaagaacttgctaattcatcaaaaaataatgatactgctttattgagtgtagttcatatgtttcctgaatatgttatgtaaatgatctcactcttatacattttctacatatttcataaagtataagaatgttagcatgatttaaagttatcttgttaaaaaatcttgttaggaatatccagtgggacaaaatttgacctaagggaaaatgagtgcaatatatatttcatatttataattatttgcaagttgtcacgttaaaaactttgtcaggaaaacttagtggggcgaaacttgagctaaaggaaaaagagtgcaacatgaatat

SEQ ID NO: 250623 - DNA, 705 bp, Cannabis indica
attatttatttatttaaaattaaattaaataaataaaatctaatataaaataaaataaaataacattccaacagtttacaactgcggggaatacatagtatttccaactgtttataattgtatagtattcccaactgttgtaaattgttggcattcattgtttacttttaaaaaattctatatgttattgcccacggttctccaccgttggcattagtttttttcaacagtttttttgcttcagttctaaaccgttgggaaaaacctccgcttaccttttccaacggtttttataattgaccctcttattaaccgttgggaaaagtccattttgtagtagtggtgataggtcatacctcagactccatatctcgaaccgaccgtgataggtcatatctcgaactccatatctcagaccgaccgtggtaggtcatatctcagactccatatctcggacctaccgtgataggtcatatctcggactccatatctcggaccgaccgtgatagatcatttctcagactggtctgagataaaacatattttgaattgattcgagataagaggagtccaagactaaaccgagataggaaccttccgatccgggataatgtgtttctcagcacgatctgagatgggaattatcttagatcaattcgactttaggtattacttcgactcgtccaatgaggttaccctcttagt

SEQ ID NO: 250624 - DNA, 741 bp, Cannabis indica
taggagttaaacaactcctatatggatcaatgacacgtctgccagtagagaaagcagactccgaggcaacagtagatacaggcatggcgaagacatcttgtgcaatcatagaaagaatcttaaatctaccagcattctttttccaccactttagaatatcaaaatcagattggttgtcattctcacatgcttctatgaagtacttgtcaacttctgttttgttgtctgagaaatcaactgcctttaactttgcattgcgttgttgactatacaaagcataatcatcatcatcatcctcatcattacccatattatcttctgcagtgtgagtactagaggaattatgcataccactagtggcattgatttgcaatactctttgtacatacgatccaaagtctttcttacatttgtagaatatcttgaagcttcttctgaatcaccacacatcatctcaaaacatacatttaaaaatggctccttatgacgcggatcaagcaaaacagccacaagtagaagaaggtttaagccctcaattttcccccaatacttgtcatatttttccttcattgattcagccattgctcttagcctataattattcatattcccaacccaaaattctaaccgactatgaataaaagagactcgatccaaaaattggtttgatgtcacaaaagttgacccagagaaccttaaggtggtatcataaaagattttcaagaacttcgtaaacattct

SEQ ID NO: 250625 - DNA, 497 bp, Cannabis indica
acctgacatcaatacatcgagaattttttagaagacccattgtctctcatccactacttcgaagtgcagaccgatttgaaaggggtaagagatgacgttcagtgtagaatcttccctaccaagttgacagacttagttttgtaatttatctcaagatggcccgtggatctattgattcatggaaagagcttctgaatgcttttggcagtctttttgctttatcctcaaaaattcagatcaaacataatgatctggtatatgtgaagcaacaagatgacgagtccttcaaggactacatccaacaattcttagaggtaggtgtttagacaaagatacttagcaaggatatgagggttatggtatttgcagcaaaactcaaggagatggatcctctatggtctaaccttcatctcaatgtagtctacaccatgaaatatttccctgatagacgagatgactttatcaaacaagaaaaagttgttgttgggttttatgcc

SEQ ID NO: 250626 - DNA, 576 bp, Cannabis indica
ggcagacattggtacggacctttgtgctctaataccaagttaaagaatacacagaattggtttgcacaaaactcagctcaaagggaggctgagaagatcattttccatttatactctcataggtattacaagcactaatagcaaggtgacaagtggccctaatgctgcagcaaaggggacaagaaaagcaaaaagaataaagtgaagaaaactatgctaaccgactctgacaattacacaaaacagagtattaacaccaattagagattaattaactttcttaacaggcaccgcttcaaaaagttatgaaagaacgaaaacaccaaattaaaacttcaaaggcttaagaacaactaacgaaaaagaaaattcaaaacgtcttagctactaacgttaaaattttctccttgacttaaggtttatacattttatttaaaaagctttaactatatgttttttcaatactagtatatataaaaaaaaaaaaaaaacaaaaaaaaaaacttaaaaatacagtagtgaagaataggtgaagagtcattcgctaaggacagaagatattatactataacgttt

SEQ ID NO: 250627 - DNA, 840 bp, Cannabis indica
attaaaaaatgtaacaagttactggttattaaattctatagttaattttttttttaaaaaaaaatatatgcatatacatatataattaattatatatcacactaacataattttaaaaacattaattctaaactaattaaatccctactacctcattctcattcacagcaaatatatacacaaaacaattacacaaaatacacaattagaatatacacaatatataaacacatattcaataattaaacacaaaatatacacatatatatatatatatatattatatatcaagttaataaatatttaccttataaacgcaatccgtcgataaattgcgacaaaaattcgaccacctgtagcacacacacaatataatattaataaaataaaaaaatcctaaaaaaatttacaaaaacgaaataataccaatgtacataaataaaatgaatagaaagcatatttataccttaatggacgttgagactcaacgtttcgctaaaatctgtggccggagttataccaccacttttttttataataggttcggtttgatatatagaggggaaaaaaccaaacattttacactataggtttaagtattgaaaatagaagattttaagaccaaaatggcgtaaaatggttaagaaatgaggaagaatgaggttgttttagtggttgttgacaagggtttttttcgtgggtttagggctgttgtggtggttgttcttcatgggtttgagggtgtgaaatgaagaagacgatgtacagggggtctaataaataaccctatggcgtcggttattttgtattaaccgatgtcataggtgccaaaaaatccta

SEQ ID NO: 250628 - DNA, 832 bp, Cannabis indica
gattgatctgagttgcaaactcttttggtttgtatccaacaacagccaaaatcacatgattgaaatggtcacgaggatgcaccctcgaaacatatcccaacttcatcaaatctgcactggccagaagggcttgtgcagtccatttagccaacttattagcgttgttcttaagctcagtagccaaaaccgcacccctctgactctccaacttctgcctccaatcaccagagtacttgtgatcgaattcattaagagcattcaaggtgaggaaagatctctgcttgttgacctcaacaacactctgaacctcacatctagcaataagatgcatgttctcatcaagcttccatcttctgtatctgtaagccaccgaagctacctcctccccttcattagcaaaaggattaggctcatcaaaggtgaccttattgccgtccctaaccaagacttgctgcgagaaattctggttgatataagcagcctcaacactcaaagagtaggcagaattgatatcatccttggcctcgggcaaaggctcctgagaggtctcgtgaacagaaagcaaatcaagctgcgacccatctcttttatcgaagaataacttgttcccaactcgctggatcacaatatcccatgaatacacagacctaggcgcgcacataagagaggacagaatagtgtcagtagcaaagacggtggctttatcctcattagcaagccttcggataattgggtcatcagtggttgtgactttgaagaaattcctgttcttgaacctctcaagacggcgctcattcttcggagcagtccgatcgaacgaccggtcatagaa

SEQ ID NO: 250629 - DNA, 1080 bp, Cannabis indica
aagttgacgagtcaacaatcacctgaaaacagtcttaatcgggttcagtggtgagtagaagcactcgattggagaggtcaacttgcatgtttgggcagaatgggtaaacctccaaaccaagttcatcgttgttgactgtccttcttcatacaatgccatccttggccgaccatggatccatgagatgaaagctgtgccatcctataccaccaggttatcaaatttcctacaccatgggaaatatatcaggggcacaaagagcagcgcgagagtgttatcagagcaccctaaaagaaaaacaatcaaccttatagcaactacaacaatcaaatgcaatgattgatccagatgagcctaacatggaggaactagacgaagtgagcattagtaaggaattccgggagcacaaagtacaaattggggccaagctcacaccagaactttgagcaaagttgatcgaatttctcattagccatcatgacagctttgcttggtctcacaaagatatgacaggcatagaccctaacactattatgcataagttgcaggtagaccccaatttccctccagtgaagcagaaaagaagaaagtttgcgcccgaaagcaacaaagtgatcaatgaagaaattcaaaagctcatcgacattggatcagtcagaaatgtcaactatccagaatggctggccaatgtagttgttgtccgaaaaaataattgaaagtggaggatttgtatcgatttcacagacctcaacaaggcgtgccccaaagattcattcccgctcccttacatcgacatgcttgttgatgctacggctgggaaggagctccttagcttcatggatgcattttctgggtacaaccagatccttatgcacccagatgatcaagagaagacatcattcatcaaagaacgagggaccttctgtaacaaggtcatgttgtttggactaaagaacgccggtgcaacatataagagattggtaaatcaaatgttcgcagacatgctagggaagtcaatggaagtatatatcgatgcaatgctcatcaaatcgctaggagcagcagaccacctcaatcatc

SEQ ID NO: 250630 - DNA, 694 bp, Cannabis indica
acttttatgtagttttcttgatgtttcgtgtagtttctataaaaaaccgtaaaattgttaaaaaaatatatttaaacgtaaaaatgtaatattttttttacataaaacagtgccttatgtaattatcccttaaaaatattggcacgacatgacacaacttatattattttgtgtcacgtgacgacacgacctattttttaaaaagcatggataaatataggttgggtcagcacgacacgcatgaatttacagcactacgacaaacgataaagatataagtacacccaatattaaaaaaatcaactcaaaataatttttaaaaataatttttaataatttttaaatttcttttttagatgtatattttatataaaataaaaattattaagatgaaatatatttataattttatcgagtataataaaattctcctttaatataaatattctaaaaatgtaggttctaattaaatttttaatggaaaaaaaaaggtaggattcaaaaacttcaactcttacctatatataattatagggtaatactatgtaggacctagcaaaagttccctactggtaggaaacttttttttttaccgttgattttagatcttgtggttattatgatgtaaggtatatactcttactataggactgcttgtatataattaaaaatttatacatattataataatatt

SEQ ID NO: 250631 - DNA, 813 bp, Cannabis indica
ccctacttgttcatttgggcgacaaaaattctgtctagacttttgaatgacgcccagtgtaagggccttattaagtgcataaagatcagcaggggtggtcccataattactcacatattctttgcggatgatttaagcatggttggaagggcaaacttggaagaagttaaaggatgttggcaatgcattgagatgttttgtgcctggtcaggccaacaagtaaataaactaaaaacctcgatcttctttagtaaaaatactcccaacggtatgagaagaggtataaattcggtgctgggaatagggtcctctgaaggcaacatcaagtacttagggttacctctctttcgctttagacaaaaggacgccgacttcaatttcataattgaaaatctcacgtcgaaactcttgggatggaaggctaagacgctgtctaaagctggggacgccactctcataaagtttgtgggactatccctgcctatgtatgccatgaaaacgaccaagctctctaaacggcttgtggggaagattgatggtatggttggcgacttctggtgggggtccaaaaaaggtaaccatggatgtatcttaaagcttgggacaagctttgcctccctaagtcccggggggttctgggattctacaagaccatagaaatgaatcttgcctacttggctaaatgggggtggaacgtgttgactggcaagcaatccctttgctgttcgatcttggaagtgaaatacctaaaaggaaagcctttccttcattgtgtttctaaaaaaatctgattcctggttttggaaaaatgtg

SEQ ID NO: 250632 - DNA, 708 bp, Cannabis indica
gttgatattaaattgcgacataagtcctcaaaaatttcactttgatgcagataagtctccaatctggaaaaattatggtaatagtcccaagctcaagatcctcgttagtctgtaggtacccaatttaactgttttgtttgttgctctcaataataccacgtgttgatattttattagtccaaattataatttaaatttaaaataatttctactagcgagataggccactcaaaaaaataaaaataaaaatttgtctaagtaaactttgaaccagcaaagtcgaggttaaagaatttgctaccaaaatccaccacccaccactatccatatctctatttctctattgcataatcctctatccatatctctcagtttcctggaaacaaaaagtttcatctctctcaaatatcccaatcttgatcacatttttcttttttcttatgcttaattggtttttctggataatgagatggacgaggaagaaggtggtgatgaaaggatgctattggtcggtggcaggcctctaccaccgagaatggtgggtggcaaatcgtagaaatttgtaaaaaaatttatttattttttttttatatttataatattttttaatcttaataaagaaaatgaaaaaaaaaaagtgttattaaagttttttaataatttttttatgatgtggaccaataaaattttgacacgtgacaattttaa

SEQ ID NO: 250633 - DNA, 1019 bp, Cannabis indica
ttggcacgtcatcgtcgttaaaatttgggtaaacatcaaacatctatatacttaatctaccacatccttctttatataacaccaccaataatagggtttcaagtcctggtatgtcttggtggtacaaggatgtaatgaatatggagttgtgtgcgcttcatctagtatctcttttctaagctcaacactgcatggaattcaaactcgagccttgtaaagtagcatcctattctcacactcagatatctttagcttcagcagctaagttttcaaattcagaatattccatttgagcacttttgattttttctaacaaatcagattgaagcatcaaattattgagttttccaaccacaaactcaatacctgctttaaccatgtttgccgctaattgaggagagagattagcgtagtactaaaaacctactcgggacctttcctacttagagcataagccactacattggccttcctcggatgatacaaaatctctaagtcataatctttggctaattccaacgatcgactctgtctcatattcaaatctttgtgggtgaagaaatacttgagacgcttgtggtctgtgtaaatcttacatttctctccgtagagataaggtcgccaaatctttagtgcaaacacaattgtagcaagctctaaatcataagttgggtaacgtttctcatactccttcaactgacaagaatcataagcaatggctctattagcttgcatcagaacgcaccccataccctgtctcaaggcatcacaataaatcacaaatttctctcgatctgacagcaaagccaacaatagagctataatcaatctttgcttcagctcttgaaaactagtttcacacttgtccgtccataagaatcgttgattcttctttgttaaattctgtcaaaaggcatggaaaatcttggaaaattcctttcccactaaaaacaaattgaataaatacctaaccaaactctatatacttcattttttgtacaagttaaggtcatctatat

SEQ ID NO: 250634 - DNA, 966 bp, Cannabis indica
gataactaatcagattgtaatgagttttatttagggcataaaacccaacagtcttcaaccctctttccaagaaaggaagaacttcttgaagtctatctcactcgtactgatgctttcaccctttgatctttttaaacaaagtcatcgcttgaatttttatgtaagtttagccttacctcacagaagccgaagcttgcctcataaaaattcaacatgattatcgcatgcacaatatttttcgtgcattaaagatcacaaggggtacaacacgtctttaaccctccttcccggaatggaaggactgcttgaagtctttctcactcctagtgatgttttcaacctttaatcgttttgagcaaagtcatctcttgaatttttatgcaactttagccttctctcacggaagtcaaaccttgcgtcataaaaattaaacacgactcttgcatgcacaatgtttttcttgcattaaagatcattgagggtacgacatatcttcatccctcctcccaaaaatggaaggactggttgaagtttgtctcactcctagtgatgttttgcaccctttgatcttttcaagcaaagtcatctcttgaatttttaagcaactttagccttccctcgcagaagtcaatgattacctcagaaaaattcaacatgactctcgcatgcacgaagttttttgtgcatgaaagatcactgggggtgagacacgctttacacccttattcctggaatggaagaactgccaaagcatgcctcataaaaattcaacatgactctcgcatgcacgacatttttcatgcgtgaaagatcagtgagggtacgacacgtcttcaaccctccttcttgaaatgggagtaatgcttgtagtttgtctcactcctagtcatgttttcaccctttgatcttttcaagtaaagtcactttagccttccctcacgaaagtcagagcttgctttataaaaa

SEQ ID NO: 250635 - DNA, 720 bp, Cannabis indica
acatttggatctatttgagcaaaggaattatggctttactgagaagaggttttatagataaattttcaaaaactaaaactcccttcagattagaaatgtcaaagggtaatttaatgggtataccaaattggtatctaaattgctcaattgaaaaaccaaatctctgattcgatttgacagtgaacaggggagaagggaggaaacattcaatacctctaagagattgtttaatgcaggtacggatcgacgcttggggaggctggccggagttattattgattcgactgaggtggttgggctggatctgtctgcagcggctggatcggcttggatgagtcaagctgccttgagtttcaattgaggaagagtcggagccaccttgatcgaaggacctgggactgggcattggttccactggctgggaacgtttaggggctgagtgtgaacgctttggggaagacgaaagagctgtgttcatactgtgcatttcgagagagcaagaggaagaagagtctggaaggtttttctaaagggacatacctacataaaacaaaaagaaaacatatatgaatgaatatatgaaggaaagtttcattattctatatataataaaactccaagtatcaaaatttattccttccactaatttatataaaataatgccactattttcctaaactactcacagtgctcttttcatttaatttctctctctctctc

SEQ ID NO: 250636 - DNA, 658 bp, Cannabis indica
gtaaattcaaaatcaattcgctatatgattattttttatctgactcgacaagagttacatttgatcgagttgtttggtctcgtatgactataccgaaacataaattcacattgtggaaagctttacgctcacatcttctcactagagaccaccttgccagtaggaatatttctattgattcaaacttctgccctgtttgtgacacttccgaggaagaccatgggcacttgttctttaattgtgctttctctacaagggtgattagctgagtagagcaatggctaagtttgaacttttgacaagagtcacagagagctcgctctatttcaacagagttgaagtatgtagccttagctggtgtggtttatagcatttgaattagaaagaacctgtgtatttttgaacggaagtatttgccaataaattgtatagataaaataattagagtgtcaaagttcatttatcatttgcaaatagagggaataattctaaaattcaaaaactgactaagatgcatataagtcaactttagtttctttggagcggatttttattggctttgttttggttgtaaattacccagatgattaatgatgtaaagcccgcttagttaatttggaaattagcagttatttatgttaatcaggaaattatttat

SEQ ID NO: 250637 - DNA, 688 bp, Cannabis indica
ataattataaaatatttaaataaaaagtaaaatagactttgaatttttttattatatttttattataatattatattaattttgtaatggattataattgtactgaccattacaatagtatttcattgtaatgaggattacttcatacaatgtaataaccattgtatgtaatggattacaaaatttaaaaaaggaaagcaaacaaaataatggacatgttgattaccattacaattctcattcctataaaccaaacatattccaaataaattaaaattggattgtttgtttatgtaattgagaagtattaaaaattagtgtaattaagtatcgagttttatatattttaatataataatttgtatgtaatattactaaccataatgaaatttcgtattttaatattcccagatttattatttaattaaaggcttaattaaatgcggaataatgaaactggtattgaaatagtttttatgtagttatagaaaacaactttgtaacttcagaagaaattagaaaaacaaacagtgcagaaaagtaaaaacacataagatttttgtacatggtttcaaaatcctttcagactgttactagtcaacaggggtacacccagagataaaattcattagataggtatcaaaaatacaaagtaattgacctatgcataaatagactccctcttatt

SEQ ID NO: 250638 - DNA, 664 bp, Cannabis indica
gttgaacctctggtgtccataacttgcaaaaaagttcttgaatttgtagtcaaaaacattattttgaggttaggaatacccattaagatagtatcagataacaggactcagtttgatggcgacctattgactgagttttgcgaaaggaataagattattaagagcttctcgtcagtgtccaggcctcaggcaaataggcaagtagaagttgttaataaacccttgaaagatactataaaaaagaagttagacggtgccaaaggtagatgggtcgacaaactacctcaggtactttgggctcatagaacaactaagaagacagcaacgagacgtacttcattctcactagcatttggtttggatgtattgttgcttgtataagtaaatacctcgactcatagacgagagttttataatcaagaaaaaaaccaaaaacttttaaaattgtccttagatctactcgatgaaaatcatgctgagtcgcatattactaatgcagcataccaatacccagtaacaagatacatcaacatcttaacgtagattttcgttaactaaatttgagcctaaccgtgaaaatctcacacagaaaaaataaaagttataaaataaaaagtatgaacacacaaggttttttacgaggttttgcaattaaaattctgca

SEQ ID NO: 250639 - DNA, 939 bp, Cannabis indica
tataattggtctacgtaagctaaagcccaagctttcccgtatacaaaaacccagtccagatcagagtcgggcccgagcccatctaaactcttgaaaccttgcctctgaagatgaggcccctctgctcccaaagctcttccagccttccaagagacaaaataaacaaagtcctctgaacaattgataatacctaatgagaggaagtctaagaggcgtctccagaagcctctcgcagggtgacgtggctaccctttgatgcctagtcccactaaatcaaatcttgtcccctatgtcagaacatgatattgtgcgccccccaaagggagtaaatcctttttgtctaacgatgcctatttaacattcttgtctactgtagcagcgtccgtgcgtgacacctatccagactgcataggccccatttgtacagacaccttcgacccacgagccaaaatcttatagtaagagtatatcctttttgtccaacgacgcctatatgacattcttgtctattgtagcagtgcccgtgcgtgacacctgtccagactgcgtaggccttatttttacggacaccttcaccccactagccaaaatcttatagtgggcctcaaagtcatgtatcccgtgtatttaccccaacggtgagcctattttgcacaaaaatcctaaacgagtcatgggtatgttcagatccaaatctaagcctataaaatttcctttaccccttcatgcaaggaggacaaaaaatactttcaagttctttctaagctttcttcttttaaaaaaaaactagagggaaaaatactagaacaagaattagagttcttcaaattgtaagacccatttgtaatacatcaagcattcttaggctaatacattagctcgtggactagggttcattaatacctaaactgcataaaactctgttgggttttgtgccct

SEQ ID NO: 250640 - DNA, 1504 bp, Cannabis indica
cccacagccacattcatctttaatttcctcttcttcttccacccatgtatcaacttttaagactgtaccaatgacaactggtgttactccatctaaggaagcctctgttattcctttcccaccatacctcccattaaaacccatgattgctacttatccacccactccacaaaccgttaaatctttccctcacacttcctcactacctgtatcttttccctcggttccttccactcctagtaccattgtttccacatttccttctgcagcaggccaatcccctcggtctctatcaaaaggcaaagctgttcttgagtatgatattggtacagagaatatcaatcccaacaagcaatttaaaaggcaaatcgactctgagtcccttcgcaatgttctaaaacgttgcagatcaaatgttcactctactcagttggcttcttcagcaccaacaagtacttctactctgcctgtttcctgtgtcagtgatctggattcagtggagtctcagtctgatgtctcagcggttgttgctccgcaacaccgcgcacaaccatgaatgttataagttggaatgcccggggattggggaacccgtgcgcattcagacatttgcgcttgcttgttcatgagcaaggcccctgtgttctgttcattatggaaactaagttagaatctggtaatgttgatagatttcgaaataaactacactttcctcatggcattgaagtacctcggcttggtctaagtggtggacttatgcttctatggaagtctcatatcactctttctattaataattattctacaaatcatattgattgttttatggaaagtaatgatggtccgtccttacactttactggtttttatgggcatccttgtgcttctcagaggcatcttacttggactttgttacgtcgatgcttcgatattgcacctctgtctccgtggttggctttaggtgattttaatgagattctttctcatgatgacaaaattggtggctccaccagaaatgcttctcaaattactgcctttagagccactcttgatgcatgtaaactttctcaaataccttttgaaggtgaaagaactacatggactaataagagccaaggaaatgggaatgtgaaagagagacttgactatggttttaccaataatcattgggattcaactttccttgttcctactttgcgacatttggacttttataattcggatcatcgggccctcaaagcaactatttgtactagttcagatcagatcaatgtcccaaagtttaagtcaaggtttcgctttgaaaaaatctggttgcaggaagatgattgtgctgacataattttgtctaattggaagaataataacagttgcccgttagctcaattgactaccaatatttccaactgtgcttcaaatcttcaaaaatggcattttgaacactttggcaatctgaaatcggacattaaggactcccatgaccatgtagctgctctgcaaaatt

SEQ ID NO: 250641 - DNA, 660 bp, Cannabis indica
tttaaaggtggaggccagcctttggagatggacgtcagcctttggacaactttttccttgcagagatcaggctcccttggttgaatggaagttttcgtggtctgaaagtcaccttttggccaaccagattatgtttaaaccataggcagccatacaagctcacctgaccagcatatagattctccttggccagccaaacatgttggtacagatacttgatggcttgcttaactcctctctcttgttgcttgacgattttgccataccatgcaaagaggctttgctccactattagaaaggttgtattgcacatgtactctatcttggcttacttgacatgccacattaggtggacaaagtttacgataacattttccccctaactctctgttcaaacatttggtcggatagggactttctagctctcgtcttatttgttgcagtctctattgagtagccttgtctagtcaagttatgaccgtagaagagagaaagccttaatagccatgtgttggagaaccagtcataacttttagcgaagtagacttttgccacgtcatttatttgcacagtgacactttgatcgtcgaagtacaaaatgcaaatataatggtggctcggataatggtcgataattgagcttcctcaaatatgttgttc

SEQ ID NO: 250642 - DNA, 8654 bp, Cannabis indica
ttttttaaaaaaaaaataagtgctttgaaaaatgagaacaaaaaacattatttatttattaatgatattggtcatcacttgaagaaaaaaaaaaaacttttaaagttttcaaaacaaaatggtgtttggttaatattttctaaaaataatttttattttaatttttaaataaacaatatattttgaaacctctatatgaacaagacttgactcggaccaaactcaaattcggacccgagactcgaactcagatctcagacctcaacccgaactcggccccaaactcggacctgaaccttgatgagatagaaaataatatgacaaagaatattgagagataaagtatattgagaaaataatataacaaaatgatgagagaaaatataatgtgagaaaatgatgagagagaataatgagagagagtgattagagataaaataatgtgagaaaatgatgagagagaaattaatgagagaaaaaataatgcgagaaatcgatgagagaggaaaaaagaatgtgagaaaatgataaaatgatgtgagataaaatagaaacaaaattgacaaaaagtgttaaaaaaaaattaataatttttgttgtcatgaaacactataaaaaaatagctaccttaatttagtgacaactttttaatttcaacataattttttttttttgtgactaaatgtgaattttagtcataacaaaaagttattttgtgactgaaacataatatttagagagaaattgtcactaatttaatttgagtcacaataagtattgtaacttattataataatttagtcataaaaaattgtgatttttgtgactaatatatttttagccacggacattttagtcataataacatagaattaatgatttataattagtcataactattttacttttagtcacaaattttgctgtgactaaaagtaagattttttgtagtaaaaattcttattttttgtaaatttgttttctaaaaaatgttttcaaaaaataaagtcatacactcttaattgttctcaaaaaaaataattttctatttttaaaagcaaaatacaatttttttagttgtgatgtgaaaacacacactaaatttttttgagaaaattgaaatagtttacgtacgtacaatgcagaaaataaatcttcaaaatatatagtttattattcaaaccagcattcatatatagttgtcacgtacacacatacagttacaaatgacatgcatgatggttaggcccatataaccaccactggattatttattatagagaacgtacattaatttaaacaaagtacataacaatattaacctaaaaaagatttaataggacatggagcttttttgcagttcttggtacttcaaaataactctgtagaaaggtcatgtgatcaattggcttatactgtaagggtacttgtcattatctaccatctcttcaggaacttcaataattccatctatgtatgtgaacagtgcaattacatatctatctttattcccttctttcataatcactcgatgttcactaggaagtatcctatcattactccatgcctgtacgtatatatatacaaacaattaatatattttagtaattatatatgaatatacatatatatatataagtaattataattaagtatatgtacccttaaaatgtcgcctgcgaagaccacaaaagaattaggagatggtttagcatcgagaagccagtgaccatccttgttggatttgatttgtaaaccttcaacttgatgctggtgcacaatatttatgaaggtcttgtccgtatggggttgtaaccccaaattggtttccttctcctttggagatctgtactttgataatttcaaacgatgaaatgttgacttcattacactctcgtgcaatctctctactccatagctctcgaacaacattcttgttaccgtttcaaacaattctgtcatcagcttcgagaacgaaacaacactttcactataataaataaaacaaccattaataatcatatatatatatatatagtaatagaccaaaaaaagatatacatatatggatttgttttgaactttattttcctacttaatacacaatatatagaactaaaacgaaaaattgttctttgaacataagtaacagtattttgcatgtttgcaattttaaaaaaaaattaaaaaaaaaaatgttgagaacaacaaaaaattatttccctgattttttattactttttcttcaaattattgcttaaatcacattatttattatacctttttatttttcacataaaaaaaaaacaattctaaaaactatttttaagacatcaaccaaatatttaaatatataactaaaaaaaataactgttatacgatttaattactacaataaaattaatattatcatcacgtaaaacactataactaattatattaacttccacacagaacatacatgttatattaattataaattaataatatatatatatatatgttttgtgtaccgaaaagggtcatttccttgtggccacataatgttagtgaatttttcaactccttgaggggttgaggaatggtcaatccccaaagactcatagagagggttatgggaccagttggaaatatagggtacgctgagtctgtcactagttttcctcgaaagagtttcaactggaagtttgaacaaatccttagtcgcatcgaaaactgagttgtggacttgggcagcaactttgtcaaaaacaacttccaaacacccatgctcttcgaaacccaaccgaacttgtttacacgcccacttccatgaatctgttccttgctttagggtttccttgtcaaaaaatatcacagggatctctctctccataatcaaaaaatattaatttatatgtatatagagattgaaattatactataaattgcctttcataatattaacttatatatagtattgatcttgtttttggctcatcatcggaacatggtgggttatgttaggtcacatgtaccccactcaacttttcataattctttttcgtataatttttatatatatatatttatatttttattcctatataaatttgattatatatatttttttaattttgtcattatatataataattatacctttataaaatttatatttttcatttttatcatatattaatattttcatatatatctaaacatgtctctataaaatgtactttcctaataaaaataacatattcttttcctcatcatgatcatgatcgtgactcatatagggacaatatttcatgatgtggtttgagtagttacgtagtacaattattagtattaattaaatgaaaatatcaaactaatatagtcgtattattatttccatttcttaaattcaatttattgtatggtccatgcagttctcgtgctatattttttttaaaaacaaaagtatatattatttatagtacttgattgagaggttagaggtaagatgtcaatgcatatgcatatattgtatcttgattaaatataataaaagataattatatatatatatgtacgtaccatatatatcatgtgagtacaatcatagagcacaggaattataatttaagtcacacataataagtacatctagaacgtaaaacacataacacttcaccccaaattgtaaataaggaaatatatctagtggtcttacttggttacgtacgtacagtcaagttaaagacattaataattatatactatattaatttatacaatataattattattttttttgagaaaaaatatatctaactattaagatcatgttttaataatttgaaaggttttgtatatgtaaaataaccaggcacaaatacaaatacttattaatttaatcttttatatacatacacaacaaaaaaatttactcaagttaatggtgactaaaagtacaaaaataataactaattttaaattatcatttttatattgtgacgaaaaggtctttgattgaaggtattaattagtcacaaaaattataatttgttgtaactaaatataattttagtgataatatttgttgtgatttgtcgaccgatggtttcgtcaaccaataattaaaattgtataaagtatttaatggaagttaaaagagaagattttttatgtgtttaggacattaataaactttagtccacgagtcactgcatttatgagagtatttattacataactctttttttcaatccccatttctctttattataggctcataatggtggtaaaaaatcactatcgtgtttgtttacaccatacttgtcacaatttttaaaatttgattatttagggcataattgcctatttttattatggaatttgggttgtctatatgcatttggtgggatttgacttatcccttatttatgactttgacttatatatgtagtcattgattgatgtaagggatctcgtgaaatcagagaatatgatggacttaaactcgtaaacacgcttgtcatagtaaggcgtctgatgttcttcctcatgctgcattaaatgcacatatagtgtcttggtctttgagtgacatgtcacatttcattagtcctcacataccaccctttggatacacttcacttgcggaggagaaaagacgagagatgctcgcggtgtagctggaccctcttggaaatgactattctgtcattactctttttgaaaaataatagacttcgacagtggttaaggcaacgtatcctgtaatgtggatctcattgccacgtacctgacttcttcttaaactgtcacgtattttgggagaaattctaggcaatattgatccacaagtccttttttgcaattttgtaagatgagatttgcaatgtgcctcttagaatgttgttgtcatgttgtgcgtgatcatttttaaatgttgttcattaattaccatcgttttttataaaaacgattcgatttcttaatcgattctcataccattaattgcaagatgttaaaaggacactcgagtagcgtaatcgtcctttttatgcttatctatatgccagctacatccctaaccattagatcatgaggcttttataatctttgaagtaggatcgttagatgacgacgatccatgttgccttggctggtatataaaaactcatgatcattcttctttgagatttttactctcatatctctcagaatttttgtgccagtcaaaatttcaggcagctcaaactttcttttactctttctttgacgttgtcaagctcgattttacccggcattttgcaccagcaccagcaactgctcaactttctcctatttgtaagttactagcctaacaagcttctttttattttacttttgtaacttcatttgataataagcttgcacgaatgtgttgttgacactgtatttgtgattttaggtgactttcaccagctcgtctttaattttaatctttacacaagagattcttgtgttagggctaattaggattcacctttttttttcatcctctataccattactcttcatcatggtgcagattgcactcgatgcatagcatatgaattttttttgttttcgatatgcttgcatccagagggggtctcttctcggcggttaggggacccctattccgttttttatttagggtttgatgtggcggctaactgctggattaattcttgcctttttatataagtgacatttttagggatcttcataaacatggcttgcgcgcttttgacgaagagattttaaaacttcattcacaaactaggatgttgaacctcgaagctcctgcccaaacttcttcttaggccgtggtaccacggtaccttgtagtaccactaactatagtgatgcagggtccagtcctgatcctaaactatgttcatcaccgagctatcggtgaagttgaagagctgcactcgtccatgggttgcgtctactatttgggaaccattgtgaccgagaatggaatcatcaccagaaactagagggttttccaccgcgtggctcgagagatagagacccccaaccattacaacggatcagggtttgaggcatggagccaagcacaccttatgtatggcgtgatgctcctggaccaagattattttttaaatttttcagtttttgtaggacttgctccgtattaattgataccccaatgatcccatctattgttaggcttaattattttttatgctttaaggagttggcttactcccagccccgctaaaatcttattcttttatgaaaattttggtccccaagaatggagatagacagattaatggtttctactccctccatgatcatcctgccaacgagacaattgtcccgttcaaacttttaaaagagcgtcaaggacttttttcgttgattcttcttctcctctgatttcaaagcctttgaacatcccaatcttttaaccaagtagacttagatccctccgctactttgatcagttccaatcaagcttttgccgagtcatgttgtcgcctttgtaactcttactagggaagagcctaacgtgggagacctggtcacaattgctaactatgggaggactgggctaattcaaggcgaccaattagttaagaatactaatatgtcaaaagtgacgtgtccaaatgctcaaaataaagaggctgagaggaagctccaggtggagtatattcaagaggcaaaaaccaagtaccaagcctaccaaaagaggaaggagtaggaggacctcttagcttgtgcccagagtatagcagacatgaagaagcagaagaaggtggacaagaagctggtggctctgagaccatcgtttcccttcccggtccctaagtctagtactcccagagctagtacctcgagtgcccgtaagttccctctatccttacactattttgtcaagaattatccctgttcccagccatttggctttgataggagattagttaaagtacagatgtatcactcccagtggggctatagggacaaagaaaggcgagagggtggctctcaaggacaaggtcttggcagagaaggccttgaggcagtgggactagcgagcgagggagaattcattgaagaaagttcaggaaaacctacaatctactcaggaggagaataaggaactttaggataaggtgaaaaaaacttgaggagcttcaccaagcggatatctagaaggttgtccgcatgtttgtggacctgaacaagcttaggaatttctaggagaaggccaaacaagaggccaccaaagctgccaagaaggctcttgcagcctcggtcacatgtgaccagtgtgtgaagtgttttgggcatggcgtcttcatatgtcggaggtccaacaaatttgagcccagactccatttcttacccgatcctcaagtcctcctaactcgtttctagatgaagaacaagaaactagacatcaagcttactgagtctttgggtcctcgccttcctcgcatagctgattaacttgccatttatctaaacatctttgataactttttaaattttagtatgttggggagaattttttattagcttgtctctgaggctttcttgtttttttatatatatttttacatcaagggagtcaatttattagcttctctttaaggcactttttatatatatatatatatatatatatataattatactcttttcttatatatgctctcttcttggtatttcttgacattctagcttttcagaacaatatatttcgagttatttatgcatgttttatgccctactactccccaagtgactaaatagtttaatatttttttgtcactttgcataaacttgaatagatagtacatacataataaagtatgacaccgagaaaagtattaagcactaataatgtcttcttataattctctttaccaaaatactataatccatttttgctaaagctgcagcatatatagaaatatgcttctgaggtgagtaaagttaaaataacggtatatgattttccaaagtaaaacaaaaaataactaacctccttttattattattagctcaatggtaattaataactaaagcaaatatttattatttggttttatcgatggtataattttctgttcctcgagattatttcatgataaaataatttaattaagttattaaaatacaaactaagatcaatgatcagctgattaaaaacccaaatttttttgtattaattaattaattggagacagctcgatcgatggtaatcaaaaactaatattatatttacatggagccttgcttattaattattttgctgtaataatattaattatatgcacagcttttttattagttcatatcggctcgtccagtttgtatcagtgagtctgtaattttatttttattatctctgtaatgaaagggactggtggagtgtaaccaatttaattaagaatgattccatatagtaccaatttaattataatataaaacttcaattataaaagagtagtgatgaaacaatatagtatataaaaaagctaaagtacaacatcccatatacattactacaatttgggtgttcattaaagaatgaagtcaatttagtatgcaattaattaatataagagcatggataattatatatatatatatatatatatatatatatatat

SEQ ID NO: 250643 - DNA, 607 bp, Cannabis indica
agtagtcttttcccattataatttatgatagctttaggatgcataatgtttaacttttgatgagcaagatcgagtcttgtggtatcttgttagagaccatgtccaactcttacatgttatttaggaactctgtctaatacttaaatcctgtatgggaactttgtatatgacttagatcctgcatatgatctttatccatgacttagaccatgtataagaactctctccaagacttagatcctgtataggaactctgtccatgacttagatcccgtataggaactctgtccatgacttagatcccgtataggaactctgtccatgacttagatcctgtatacccttgcccggtacttagccccttttaggaataatgttcggtacatttcaggttgaatctttcctgaacagtcaatggcctttgtttcataggttatctgattaatgattcttgcttttatactttgttgattaccgactttgtatctcaaggctgtctggttaataccattaggttatggtcagttaacctgtcttttgtctaagtctttttatgttctccgattgtttacctccctcaatccttttgcagggatgaacccacatg

SEQ ID NO: 250644 - DNA, 887 bp, Cannabis indica
ttggaccatgctaattggacaaatgatttgctgattggctacaccaaaactatgatcgtttgaatattctggtaggctgtgttcatttcactgttaccagtgactttaacttaaaagacgttgtgatcaatggtagattatgctctagtggtttataatataagcataatgtacatttatatatactattttctttttcattttaaagaaaattaaagttacctacgtaacaaaaattattatttatacttatacaagacaaaatttctacaactttattcactctgattacactgaggttccttgacagaggaaaccacgaagagcttcttaagggattatttgaacaatatttggtgtccataattttttaaattatatgaattttattattgtattttaaattatgaatgagttaattctaaatatttaatactgcacaaggacattgctcgggtctttcggaggcaaaaaggggacgactcagattccgattgtgaggaccgagagccatgcgcccaacacatattggaggcagagctccccaagaattttaagatgcctgagatagcagcgtataccagagactcggaccccagcaatcatttatctcgtttcaaccgagtaatgacggttatgagggtcagcaatgatgccaaatgtctatgctttctgctaacattaagcggtttcgctaaggaatggttcaaaaaattggaaccaagatcagtggactgctggaacaagttgcaagtcagcttccggagacagtttgtcgcagcgagaaagattaatctcaaagtcaacgacttgactaacataaagcaactacccgcagaaaccttgaagaactttataaaaaggttcaaagaggaggcttcaaagac

SEQ ID NO: 250645 - DNA, 1670 bp, Cannabis indica
tccttttgggcttcttccttccggacaaacacttgagccctctcattgaactcagcgatgtttcttaccggacgtccttgtagatcatcccacaactcgcccccagcgattaatggatcagtggagatccctgcctgaagggctgtaagttgcatgctgtcatccaagtttctaaccctagcgacagccgtgctaaaatgacttaagtacaccttaagtgtttcatcagactgctgatttatattggttagagaggctgcttcgggtcacctatccccagtggcttaaaattgcttcttaaaatccctggacagctgctccctaacaattatcgaatgacgagtgaacttattaaaccagttactcgctactccaacaagcaagttggggaacaaaatacaacgtaaattgtttgtcatgttactcgctcgcattatcgtgttaaagttattcaaatgcgagaccggatctgtggttccgtcgtaggacgagacatgcgggtttttgaatcccaaaggaaaaagggtattcaaaatatctgggtgatgcggctcaagctcctcgtcagagtcgtatccagatgattttcctaattcccccacttaatatctcctaaacttgtcctccagctcgtttatccgcaattagattggatcctctagttttggaccaagctgttggcaaaggtcaggtttcttccgattcaagtgctctcgcagatccggttgggagtaattgctggcagatccaatggcgagctggaaccattcttctttgcaggtcgacaagatatgtcttcgtcgatcgcgggtatacaaaaaacttctgacttgccagggttatgagcctcgttcctgttagttggaagaaagtataggaagtttcctcgtagtgagatggtcatctcacattcttgttcttcgagccgattcgacttttacacttagtttgtttattgcaagctaaggtatgtgttacttttctccagtgcctcgctattctcctttagggacatatggtttctagttaatacactaagtaccaggtcgtacattgattcctcgccaaagaccttacagtcagcgggtggaaaatatactttgatacttacgcaattaatgacttattccataaaaagatatagcgccgattcacattccttttaccttgactcgtgtcctccagccaaattttgggtataacaatggtcataagagaagaaaactttttataatattacgagcatgctattgcaaaactaatgtatttaaagcatgtatatgtaagttattatgatagagtacgttttggtatttaagtaatgtatagagaagtaataatacttaattaagttgtttgtattatatgtgttgtgtattgacctataagacataggttaaatacatgtttgttgggaccatatagtagataaggaggtaatgcggtaggtggtaaaagatatgaagactcaacaccccgagtgttggtaagttatatttcgaggacgtaattttttttttcaggagggtagaatgtaataaccagagtaaaatagtatttaacttttcttgggatattaattgtgcgaggataagtatctcatttatttgtgtttgttagtgagttgagaatattgcttagagtaattgtacctgttgaccgaggttttc

SEQ ID NO: 250646 - DNA, 573 bp, Cannabis indica
tgatacagagattgtattatcataatataaaaacgtcttgtcaaattatgaaagtttaaatatcacttgtgcttgtaggatgataacttgtaaagttgtgtctttgagggagtttttttttggcaacacaaggaataggttcttgccttggtttaataggaggccaaatggcgaatagtatagtaatgtgctaatgataatctagtctgtgtcatctgtgtatgttctaattgtagatgaattatatacttattttcatttgcaataggtacgaagctccctcttatattgttgttgtgctcaataagctgaaattaacttcaatgagaggacagagggcttttagcctcattctttacagtggactagtatatagtatatgcaaattataagttagtgtctacaaaaatatactaatttttccaaagttctgtttttcttgatatgagcttaaaaataatagaataaaaatgaaagctgggttggtcatggacgataaaagtcacgttttagcaagcaagagctgtgatgatgatacatgcatgtgctctacatctttcatttgagacaaac

SEQ ID NO: 250647 - DNA, 557 bp, Cannabis indica
aaatatcaaatcatgcattttaatttgagtttttttcgactaaaccttttaaactattattttagtagtaaaactcttcaaaccacataaccattagcaaatttaaagtgttatttatttttcacagttaactgccaacttgaattgcttatgtgtatactcttataaacgtcgtacatttatattgatacacttaatattattatttaaaaattataacatattttttatttttaaattttattgcatggttttgcactctgcatgccatttgatagtgtagcgttgattctacagaataaggatcttgatcgatgccacgatttgtagttgaacttttaccaaagcttctagtaatcgtttatttctttagaaactgggatagaatgtaacgatgactatgtctgcattgagtgttacttttagggtgtttctgttgaaattttctcagtattgtatcaagcaacgctattctttatgtgatgggttaaagcaagtctaattgaactaaaatggatgtgagttaggtcttgatctatccattattgtggaaactc

SEQ ID NO: 250648 - DNA, 1600 bp, Cannabis indica
aaaataatttccaacactaagaacaacaaagtcatattgacttagaaagatataacggtaagtttatgatatcttatccaattgtcaatatctgtccagtccgatgtatattccaatgccctaaaaaggacacaacacttctccaaggtgtaagtaaactttatcgttgattatcatgttagtgtaaatccagtgtactgacaaatcatgggacttaaactttgaaacatataatcatgattatattccactgtcttgacaacactataatcatgaataactatatgttctagatttaatagaatttatacattaaacatataatcatgaaagaaatcatgtgaaccatgcaacataaaatgatttctgatcttttattaattagtaaatctgattatattaaaataaattttatttagagcataaaatcccaacagtttttctttagtttgtaagcccactaatggagtgattatatttgaatgtttattaggcctcaagaagaagcccaatgttatgtttggtaagtgtggaacactattgatagtattgtttggagtcaatgtgttaggctgcatgtggtccctattctgcatggaaaaatggttgtgtcagagttgtggctgtttcaatccctagggtgatcttaccttttatctaagctctttcctcatacaagacaaaggagacattattcgaatttggtgggattccttcagagagattccacgtaggataccaactgggaagacaatattagccacctttaaactcttcgaattccacccgggatcatgagtgcccaggttcgtctagatggattccttgggcaaggttcagttaggatctactgtctccttcaccatcctagagcaaggaaagagacatgacgtctgttggaaaagttctcattacaagagagaatgtgaggattacaatcaaaatactcaaaataaaaatagaagtatttcatcaagattacaagaaagctagagaagaagaataataataacacacacaaagcttgaccaaggctcaagaacctttgtcctaaaagtcatttcctccctcatatggacatttaaggaaactctagaaatgctcttaaggatttatcaagcctcatatgctcagcctagtgtctaaggatgagcatatcctcacaaggttctaaccacaacaaatgatttcaactacttctctaacaagtgaacaatatggcctctatttatagagtttttcactcccatatgaacatgaatgaccaccataaagcccttggatgttatcaattataaattgggcatttatagtattaaatgggtgattttgaggagttttggaatattagaaagactcacaaacgtttgtgcttgtggcaaaaacagtaactagttactagtcaccattgtttcaacttagccaattcttctctaaagtgttccaaatcacttctacttgattttgaaccatttatacaccatataaatgaataaattaagtctttaacaactatatttttaatagctatcattcattcacattcataaacaattagtaacatcttttactaatttaagagtgaaaaagagatgagagt

SEQ ID NO: 250649 - DNA, 773 bp, Cannabis indica
gtatggtaaggccaatattctagtagagtaaggctctggctccttatccgaatcatatccaatggcattttggttattggccaccatcaattgttgtatcatttattttaaggcattgagcctatggtcattaacttatcatttcccaccatggccaactaggggaatgttgttttgatgtcccccattgatgttacaattgttattttccattggtggaattgggtttcaccttctattcaaatgttccctcaaaataggttgtctttgattaaggtgttctcgtaaatcaggtcttcttgcatcccttaggggacagttgttgtgacgttcataattgtgaggcgcattattatgaacactaatggagcgacatctatagtcacactgaccactactctcagtaaaactcactgtcctttgttgttgtggatgatgaggagagagcgggggctgctcagagtatggcgtcaaagttgtgtttaattttgacacatagctattttcttgagcaggttggcccatggtggcatcttttttttttttggcccacgatgtgttggcctttgacgagcacaatcattgcgaggagctatgcgtcgcctatgccccctaggtgattaagcatgtggtacattaccatgggaggtggactgtaaagcccgcttagttaatttggaaattatcagttgattgtgattaattatgaaattatttatagctatttaaataatttattactgttatttatgttattcagtagcttgcatatt

SEQ ID NO: 250650 - DNA, 1290 bp, Cannabis indica
gagattgatctcatgttattaatgtttcaaaatttatgcagttttaggttgaaaccagtacctttgattgatgaggttggtagtgatgagtttaagagctggaaagtaattaggaaaattatatatacttggtgtttaattcataatgtatgttcaatatagatatttggtagaatttttgtgtaaatttagcttgttatcatgttcatgttcatattgaggaggtgtacaatatctttattgtttaattatttattaagttgtaatcttatgcagtgaaagtacaagataatattcttatgattttatttaaatgtcaaagacaatataatttatgtttacattttatgctctattttttaatatcttctttagtgtattaaaatttgtagaaacaaaagccataaataatagattaaaaaatacactaaagaaaggaatctaaaaaactttttctaaaataaatagatacattgaataggtaatctacttttgagttcgagcttttggtgtaagaatgtacataccaaacccatccaaatatttagtgaattatttgtactgggttcgggtgccactcaaattcgttccaacccaaatataagttatgtgacacctgaatctgattggcttcatctcgattacatagaattataaaatgttacatttatattttcctatgataattatttgatattgtcttacaatttttatcatttttttattttattttgtctgcttcaagtattttttgttcactattatattataaatatttatttataaataaaaaaagtatttaccttgtattactttttaaaaagttttaaaaaaactaattgtgtattttataatatttattgtttaaattattgactaaaaaatacatacataaattgaaataaatatttttcaatcttaattttttcatatatttattttttaatacatgattaaaatttatgctaatcacaataacaaaaaaaatgatatattttatatttacgtaaaaagttataccattacaatatataatgaatttatatgtttaatagttttaattattataaataattttattcgagatgagcatttatatttactgtattatgactaatatttgtgttaatcacatataaaaaatagattttactataaatatattatataattttatattattcataaaaaataaaaaagaaagtattatacttgaaattttttatgtaactaaaattaatttttattaatataaatatttaagaaattagtaaaaccgcgcgaagcgcg

SEQ ID NO: 250651 - DNA, 814 bp, Cannabis indica
tgttgatacacgtgtatgtatagctttgtaatgttcaaaatacgtcttgatttgatttacaaaaacacatataaataaagatataaatttcttttattttgacatattcagaaaaatatatcttgattttttttttgtttttctattttggcatatttgaaaaaaaatacatataaataaaaaatatttatttttctaatttgataacgaatattaatataaaaatatttataattaatacaaaaccaaataaataaaataccatcatttaagagtgaggactttatgttttcaaaaaaataaaattagggaccaatttattaaaaaatataatttgaggatcaacttgccaaaatttatataatttagagattaatttatcaagaaataaaatttaaagactaatttattcaaacttatataatttataggcttataatacaaataaatggtactcataattatgtgggatgtaattaaaactttcctaatattttataaactattaagatataatatagtctcacgtttcgttttctctttgatcttcttcttttttttttcctttaaacaaataatttgaattttgatatctccctctaataaatgaactttaatatagctgtgataatgatgagacatggcccaaattttgataataatttcgcaacaccgacagtatgcaactacgcattaattaattggatagctatataatttatggggacatgattattttgtctcgtgattgtactttcacggaatgtatttcgtgatgtacgacagtcgttagatgaggaagttatttgatctg

SEQ ID NO: 250652 - DNA, 722 bp, Cannabis indica
ataaggtgaaccaaaacatacacaaataaatgaaaaatacttctgttactttattgatattgaataatctggattacattgaaatggggttttatttagggtataaaacccaacacgctgatcgtttaacaaaaacacaagaaacattattaagatcagacattaaagtacaacaattacaataaatagctaaaccaaaaggagacaataaagaatatgaactatacaaggcatcaatgatgcttttacaattcaactcaacaacaacttgatctaggtcccgttctttagtctagctcaaagctttcttcaacccaattgcctctgccaaaagaggagagacgcgactagacaattttttagaccaatgataaaggagagctccatgatgatcacaggccaacactccaatcccaaaataaaaacccccagaagtgagagaggcatctacattgactttaatcatatcaatactaagaaccgatcaatgctctacacgaacacaaggactggaatctattctgtttgaaaattttcatgagcaatcttccattgattaaagtgttgacctcgcttttagccaacgatagtgagtctaatttagtaagcgataagtagtttataatgattgatatataataaagcaatataaacacacatgaattttataaaggttcagccttgagcagttcagtaatagcctaatcctcgtcatttgtatt

SEQ ID NO: 250653 - DNA, 942 bp, Cannabis indica
caaaagtttcaaccaaagtaatgaagagtgggtcgataatcaatgatacacacacagagagattcttttagctcagttcacaagagaagatgtgaagaaggcagtttttagcataccaggaggcaatgctccaggtccagatggatatagcagttacttttatcaagacaattgggagcttgtgggagatgaaatttctgatgcaattcttgacttccttcattctgggcatctactataggagatcaattctacagtcattactcttatccctaagagtaaatgcccaaatttggtaagtgattatcgcccaattgcctgctgcaatgtactttataaaattgctactaaacttatctgtgatagacttaaaagtatattgccagatttagtagcttcaactaaaggcggtttcatccaaggaagattcatagctaataatatcatgatctgtcaagacctcataaggcactatggaaggaaatcaaacaaagctaattgtatgattaaattggatcttcaaaaggcatatgataccatgagttgggattttcttgaagaagttttgacaacattcaacttcccagcaaagtttatagctactgtcatgacttgtatcacaacaccaagattctcacttatgttcaatggttctatgaatggttacttccaagctagaagggcactaagacaaggagacccaatgtctcccttgctctttgtccttggaatggagtaccttagtagaatcatgaagagagtaggtgaaaagacagatttttttttcatgagagatacagtgatcttaaactaaatcacctgagcttcacggatgatgtactcttattttgtaaaggtgattttaaaagcatctactgaatgctccaaggcctaaagttattctccaacacctctgggctgcaaccaaacaagaataaatca

SEQ ID NO: 250654 - DNA, 1115 bp, Cannabis indica
agcgcggtggtgctcatgtcttatattatcatcgacataaacctccatttttgccctattttgcttgcggatatttcgtttactagtcactgatacgttgccccagcgttcttcagtccaaacggtatgactttataacaatagagtcccatgttggttacgagacttgtatgttcttgatatgggacgtacatttttatctggttatattcagaatatgcgtccataaacgacataagcttgtgcccaacagttgcatccactaactggtcgatcctaggaagtggaaaacagtcttttgggcatgccttctttagatcggagaattcaatacaagttttccaagttccgttaggtttcgggatgagaacaggattagctatccacgagggataaaatacctcgcatataaaattgttggctaacaacttgtcaacttcctgttttagtgccccttgcctctcggaatccaagggcctctttttttgtctcttcgccgggtaatttggatcaacatttaagtgatggttgataatcttaggatcgatccctatcatatccccatgactccaggcgaattgatcttggttcgcttttgaaaagcttattaattgctatttgagcagctcgtccaggttcttcccaatgtacacttatttggttgggtttcttgggtcgagaataacctcttccaattcttcaattgattttagcagaattctttcatcttgaacccggggattaagatcttcctatttcttctcgttttctcctgccaagatcgtcattaactgatgaccgacctttcgatgctgcaactctatgcgatagcaatcgcgagccagcatatggtcgccacgcaccactcccacgccatttgttgtttggaactttaaagataggttcttgatcgaactgacgacccctagtccgatcagtgttggacgacccaatagtatgttgtaagtcgaaggcaggtcgacaaccaagaagtcttgcataacagtagcagtggagctcaccttgccacttgagctccttcagtggagctccactttcttccttttgtcgcctaaacaaccccaactttaccatagaattgccttctccagcta

SEQ ID NO: 250655 - DNA, 518 bp, Cannabis indica
gcattcggttgtcttgcttatgcctctaccttgagccaatcaagaacaaagtttcaacctagagccacatcttgcattttccttggttatccaccaggaatgaaagcatataagcttctcaatctgcatacaaaccagatattttattccagggatgttcagttttatgaacacatttttccctttgtaaagtctgagagtcttcctgctgcatatgatagtttcttttctgctatacctgactctactcagtattcttctccctgcattgaacctgattctgaaccaattgctatacctacacagagtactgaatcagcttccttctctgataatgttcctggttctgttataagcaatgaaaatattcctaactcttctatttctgatcaggttcaccatccatctggtgtcactagaacagggagacacacacaaaaaccatcttatttgaatgagtatcattgttatcttgctgctaatccttttgtttcttcatctcagggaaaatccaatac

SEQ ID NO: 250656 - DNA, 923 bp, Cannabis indica
gcccgattacccacatcaaccagtttcccttgcagatcaaagcttatgtgggtttgaagctcaagaatcaatggctggaggtatttcgatccttaaattatagtgcatatatgatttattaattccgcactttattcataatcatgtatgttttagtctatacaaataaatgtctaacagttggtatcagagcggattatatatctctgccttgatttattttgagttttatatatatacatacatttacggggttcttcatttataatataatatatattttatatatatatactttcatattatataatcccgattatatatatattcatactcaatttatttttatatatattcattcatattcatatatatacattcatatattcatacatatattcatatacatatatacctttcatatatatatatatttattatatggttatatatatatatatacaaaatcatcattttgagagttcgtatatatatggtatatatatgtatttatgtatatatgtttatatataattattgtgaatttgtaattttattgtttgtcattcatttgaatacttcattatttctatttctgtatttaaacaattaaattactgcatataattatatatgtatatatatattcacgtgtttgcgtgtttttgggatggtgggttcaaaagtttatttattttctttgaatctttgatgcgtttttcaatattaatagccttatcattttcatatgatgttatatatttaatctatgcatgaaaaggttttgaaaaccatcaaagtctggaaaattttttgaagagacccgacccattttttattgaaattaaagtccaatttttacatgtttaattgcctaaaaccgacatgaatctctttatttatgcatggagattcaaatggga

SEQ ID NO: 250657 - DNA, 656 bp, Cannabis indica
agatcctggtaaaataaattccaatagaatgcccaatggagcaggagcattacaaatggtatcaaagccttaacccagccaaaagtgtggtcaaagaggacatcagaccccataagagggtgatcatgacagtcagtagtcccgtgatccataagggacagtactgggtaagttatgcaatcccacatcggctggagaaagtcaagtatgatgattctgagactgtataggtatgagattatacagttgaagaaggcttaaatagattgatgtgtactacatatatcaacaaggtgcatcttgttttcttgtgtagcccatcacttaagaactcaaaagttaaatgtgcttgacttggagtaatcttcatatgttgatgacctcttgggaagtttttccaggaagcgtgcgagtaagaatgaagcatgttggaaacactcgtgttagtttgcagggcaagtcatcaatacagaaagcatccaaagtgatgtactcgtatataagagccataattccgggaggaggcccaataaaaacttgaaacaggaacgttacacttatatgacctaccaaccgagccttaaatctattaaataagaaggaactttatacaaaattaatatagctaaaagtaatctttataacaatttatagtt

SEQ ID NO: 250658 - DNA, 503 bp, Cannabis indica
aaaagaaaaaaaaaaatagtaaggcagcatagatttttgtgtattattagatagttgaattgtgaaacatagttgaattatcactacatatgtatcactcaacgtgttgtgaagatcaattttaaacttttaataaaattttctctcaagtgagagggttcgagttccaatttgaccttatgttttctagttaattgctagtacattttcctttttcagtggtcaatgccctgtgtctgagtcatttttaagtcttttataaatttctggtagtttttttttggttttatctagatttggtctaccgccttttgttctgctacgcttgctttgcttgtgtttcgtttagtggaagtaggtgggattcctaaaggtattgattgctttttctacttgcagtggttatgattgtcgctatgagagattccagtgagaatacacgtgatcaggaatttatgctatggacagggatcaggaggcatggtaacgatattaatgtctcc

SEQ ID NO: 250659 - DNA, 553 bp, Cannabis indica
ctaagattaccaaatgataaagttttacaacatcaatgtagaaaatagagtaagcgataaatgttttactcaatttttaactacttttaaagatatctttccatttaaaattggtttccagaatctacatatgaagtgaaaaaggttataaattccataggattgaagtataaaaagatctatctatgtccaaacgattgcattttatatcataaggaatatccagacatggattattgcccgacttgtggtttatcctgccataaagtaaacaagagtaaggagaataggaaacttatcccccaaaaagtgatgtggtacatgcctttgattccgcaacttaaacgattatattgtagtgcagaacattttgaaaatttgatatggcatgagaccaagagaatgaaagatagaaatcttagacatcctacagattccctagcttgggaaaaaaagtaaactacataaatcctgaattcaaatttgaaccaagacatatttgtcttggtctgtctgcagatggagtaaatccacatagatctctaagtagtcg

SEQ ID NO: 250660 - DNA, 512 bp, Cannabis indica
taatattaccaaaagtaagatatttttgtttgtgtggaatgttgcctaataattcgattcaagcaccacaagaagtgacatatcgttattagtgcattttggatcttatcgagctagacctaaggcccacacagcccaaaaacccaaaaaaaaacgtttggaacatatattttttagtaaaaccacctacaaatttcaagccagatcctatttaatatgaaaacccgctaatcaattataagatgtttcgtcaatatggtgttgaagggcccaaaacctttagaaatacatatattttcttagtaatttttaaaaatataccacctattcttttattaagggcccaaaaattttattttatctaaggcctagaccttattcaatatgaaaactcgctagctaattataaagtgtttcgtcaattaatataatgttgaacgccttaaaataccagataataaaaatatatcatcataatgtgattatatttgtgtacctctccatcgaagtac

SEQ ID NO: 250661 - DNA, 597 bp, Cannabis indica
attcaggagtcctcttgtcccctcccccacttttactcggccattgctttcctgacttcttactcgcagcattgttggtgttggtctggggattcatcttctttggctacaaattctcagaggtgtaatcagtcagctgctcgactacagcttgagcagtggcaaggtctggcacacgctgcctttgtagctcatgtttagcccacaacttgaatccttcgaggaagtagaaaagtttgtcgacttcattcatgtcttagatgtcgagcatcaatccggagaacttcttcacataatcccggactgttccaacttgctttaactctctcagttggcgtcgagccaagtaggggacattctttggcaggaattgggcactcaagtctttcttgaggtcttcccatgtctcaatggtgcactttccactctaaatgtcttcatacttcatcctccatcacaacttggcatccctggacaaatacatggtagcggttgctacctttgcttcttcagagttggtccgcacaaccctaaagtattgctccatgtcaaatagaaaatttggagctcttttgcatccctcgcccctccatagca

SEQ ID NO: 250662 - DNA, 1072 bp, Cannabis indica
ccccccgctatttgcacattctgctgctatcatggtaagatttagctttgttaactttcctgctaactcttcccaaatggttgtgacagatgcatgacaatcctctatcgtatcattgagggagtcttgtaatgcagcctacccattttgtagcacagtgatagcatcccacatttctgttgttgcttgttccattgccctgatgcgatcctccagttgaggcgcacctgatgttccggtagcggcgtctccccctctcgatcgcagctaccctggccaacaagttagcataatcttgagccaatatggcaacttgttgttgtgtcgtttttggccctgagttctgatttctagaggttagatccctgaccctctcgtctaggccatctagttcccctatgcgcttctcaagctcttgaattctttgagtattgctcaccattatgagcgtgttaccaagcttccctttctcttggctctgataccaactgtcacaggctgtctatttagacactcccaagtaggtggaacgtgctgcacttgctggcatactgagctagcaagttagcctaaacgcgcctgcaagcaaacaagttcaaaggttaggcacgattcatgtctcgcacatgttgagtgcaaacaagtagcatgagcaagcaaacacaaagcgtccccaaggaccaatctcacacaacccacaagcaaacatatagacaaatggcacgtaatggcccaacaaaggcaacaaacaggcatcacaaagaccatatagaagcatacacaagaagcatggataaacatcattttattattatatggccttgatagggcaagggagtacacagctgggccctatcatgctggtgacaaggtgcttcataagtcaccaggtcacccccctaaagagcttattggggttttaagggatttccaggaacatacatgattatagctctctatacatatttgagtggaaatacaaaagaaagaaagctaaacaacaaaagactccccaccccaatgaggtgcttggtgcaagacttgactaatgatcaagcaccaaggcatgctc

SEQ ID NO: 250663 - DNA, 890 bp, Cannabis indica
gcatttttcaccataaagatagtgtagcaagctctaaatcatgcgttgggtagcattgttcataatcgttcagttgacgggaggcataagctataactttgtcaacttgcattagaatacatcccagaccctgtctggatgcatcacaatacacaacaaacttttctcgatctgatggtaaagctgacactgatgttgttatcaaatgatgtttcaactcctaaaaacttgcttcacatttgtcgaaccatataatcgctgtttttcttagttaactcagttagtggcatagagatcttagagaatccttcaatgaaacatcaataataccctgctaaactgagaaaacttcgaactttcgtcatagattttggcctcggccaattcttcactaattcaatcttacttgggtcaaccagaattccatctttcccgacaatatgccctagaaaagatacctctaacaacaagaattcacactttctaaactttgcataaaacttatgatccctgagtcgttgtaataccattcgaagatgatgctcatgctcctcttccgactgagagtatatgaggatgtcatcgataaacactatgatgcagttatcgaggaaatccttgaatactctattcatgagatccaaaaaggccgctggagcattaatcaatccaaatgacattactagaaactcatagtgcccatatctagtttgaaatgcagtgtttggtatgtcatcttcctgaattctgagctggtgataactagatcgtaagtcaatctttgaaaacatagtgttccccttaagctgatcgaataaaacgtgaattctgggcaattgatacttgttcttaatcgtcagcttgttcagttcctgataatcaatacacat

SEQ ID NO: 250664 - DNA, 617 bp, Cannabis indica
attaatttaaaattgatatttaagtttaaatatattaaaaataatattttattttgatatttagagtttaaaattgggaaaatttaaaaaatagaaaaaatcccacaaaaatcaagtttggggctagctgcccaggattgagcgtgcaacaggctgcacgcagcctattacgctcgcgcacgaggtcacctgcagggtgtcctgccgaggtttctcagcacctgcagcctcctggagcccaatttgcagcctcctaagcgagggtgtcccctgtccgaactaagcatgcacgtgtcttcacacaagattttcccagcatccgcgcacgtatcgccttgtccgaaggactagtgtgcgtgcgattgagccatgtgcacccaaaatttcaaaccttcataactttctcaatttttatcggaatcgagttccgtaaaaaccgaaattgcttactttttcacaagaaatccaaataaaatatttttagaacgaaaattaaattattttcatggaaaatttttgtaattcacataacatcatcaagtaacatataaaccaacatgaacacatccaaatcaacaaactaacaatattcaaagttttaaatccatatttcatga

SEQ ID NO: 250665 - DNA, 733 bp, Cannabis indica
ttgaccggaagagctattgactttgaagctatgcgccatgttatggcctctttgtggcagccaagcaagggggtttatgctaaggagattgacactaaccgttatctatttcaatttttccatgaaattgatttagaaagggtgatagaggtaagcccttggacgtttaatagagttcagtttatttttcacaagctaagaaggggagatgatcccaaaagggtagtgctaaacaatctcgacaactgggtgcaaatccatggtctccaaccgaggtttaagtctgcgagtgttgtggagaatttgggtaactttgttggtacgtatgttaaggctgatcctaagaatgttcagaatgtgtggagagattatatgcgtgtttgggttacattggatattactgctcctttgaaaaggcgcagtaagctccgtcggactgcaatggaggatggtttctgggccgaattcaaatatgaatatatccctacattttgctttatttgtggtatagtaggtcactctgagaagttttgtcctaagctttttgatataccagccgagatgatcataaagccgtatggtgcttggatgagggctcaaccacgacgacgaaacaacctggtgggctctcagtggttgcgtgatgggaatgagacagatgagacgtttgctggcagattcaatggtggtgcggcgacttcttcggggatgttacatcagcagcccaggagtg

SEQ ID NO: 250666 - DNA, 647 bp, Cannabis indica
ctaaatactaataataccttttaacaattgtcatattatttatttatttattttactaattagcagtaatgataccaataccaatgcttatagcaataggctctttataattggagctaaatacaatacgtcatagtttgcttatggctatggaaatattattgctcaccctctcctctcctcccctatttacaggaaaagaaacttaccaaccttaaaccaattttttttcttaaaaaaaaaggaaaaaagaggagcatcacatattcatcgtcgtacagttgtgcaatgatgggtaaccaccgcctgggatctcctcttttggcctatgtgtaacatcttaaataattaggcacgctacccaagatacttatgaaaccctaatcccctatacgggattactaatgagattagcgtggaatttaaactttatgataactggaatgaaaataaaacttgtaataatttaaactttacaacagttgggatcccaaaaatatttacaaactttattacaagtctttttcagttagccggtctaagcggcaaagtagagtttcaaaaatttaacactggtagacccttagcccgcttggtctgatatggcccggacatgtacattcttcatccagctcctgcactcatgg

SEQ ID NO: 250667 - DNA, 1026 bp, Cannabis indica
ctaatccaaattactaatgcggttattacatcattatactaattttacctcgtttctgaattcaggtgtgctggccaatctgagaggaacaactgctcggcgaattatagacccctaaatcacatcattcacaacatagataagtgacacacgaaatcacttttcggggacttaaactagaaactaaaagtttctctattgataactaacatggcaataccctaaatatcacaaaaattggaaaaattagggttcccaaaactgccccaaccggtagaccggttccccaaccagaattctagttctttgggttttcctagggaccaaccggaattccaattcctacaagtcccactgaactggtcgactggttcagtgcaggaaaacttcaaaaattcctaactcactcaaatcaaacccaaatcaaaccaaaccttccaaacctgttatttagaccataaagaatatattcaaggcaacaaagcaccataaaatgcacagaaacaaaattcaccatgtgagagcagagtttgagctcttaacctcaaaccttgaacacacctcacaaacaaccactaaaccatctcaaaacaatatttctaacgataatttaacttcagaaaactacaacaaacactaacagcaaccatagaactctaacactcaaatcatgcaaaattcataacttaaagcttaagaaaactaaagagagaggtgcaagggaccttaccttgacttgaaatcactaaacacttgcaggaattcctagaattggtgaagaaaatccagagttcttgctggtttctagggctcatgagagacagaaagaagaaaatggaaagagagtgtattgatcttttttcttattttaataaaatgaataatagaattaggttttatctaattaactaaaggataaactcagaacataaatcccaataatgtgaactaaaggaccaaatcacaattaggaaaaataactattttgccctccacttagtcaaaaagtcataaaaacacttaggg

SEQ ID NO: 250668 - DNA, 1003 bp, Cannabis indica
aaatggcacaaagctttttgtgtaaatttcaaattgacgcagtatgttataaagaatattttattttttgtgtcggttttaaaatgaagaaaattattttttgcatctttttagaaacgacgcaaataaaatactatttgcatctacggtttttacgtcgcttttgtgaaccgacgcaaaatctttaaatgtcaccaaaaaactgacgaaaatactccttgtagtagtgtcatggtaaaataatactcaacagatacttgcattgtccataggttcccactatgataaggcaaatcccaacgtcgtcgctcaccttgtcagtcgtgcccaaggtagcatgtgtggcaagatgccaacactaagctgacgtgccaacgcttctaatcatgacccattctatattgtccaaatagtcttccttatcacccaaggactcccatacatccatggtccaatcctcaaggcaccatgcctccatgcatgttggcaggccctcgagataagccgccaaactagtagcaaatgttagacctctatctctttccaccatggttcatatgtgcgtatgcaaactagcccacaaataactacccgtgtcatcttgtgttgagacacgtggccaatgtgcaccacaacgtctcttggaggtttaggccacgtatcgtgtaagcagcataccagtaagccaatagaaacgtacctgctaacctttggcaatatttttagatgcactacagggtcgtcccgacaatgtccatgagtattccaacacatggaggcatatgagtcccatcgtggttctcatatgcctaccctactagtctcactcactagtagtagctcacttagcaccaaggtgctaggggatggtggagagctgacaccaggtactccccccttaaagagtattctaagattttagccttctaccaggaacatatatgatttttgctctatagacatatggtcatcatcatacaccaaatcatagagtttctcaaat

SEQ ID NO: 250669 - DNA, 1071 bp, Cannabis indica
tttttaaagtggttaaccaagtatgaagatagtgatgattgcaaggaagcaatggtatcatatgaactagggagtgaaaccttagtggtaatgatgaaaaagaacatgagagtctcagatgttgatgaatcagcatcatcaacgagagactcactataaattggtatggcagtttgtaccaaaggttgtcaataaagtaaagaatatacttgaggtatgtatatttctggatgtgtttgaaaagattattatgatttctaccaaacacagaatagaaattttaggatcacggaatgatctttaattaaatgttattggttgagaattcgggaaatggataattctagtagttgtgggtacctagtatgagcagtgttgcctctactgtataggtttaatcaatttactttataatgttggttaaccgtaaatgattaggaaatttaaaagttgtggcagttcaagagaaattgatgcaagttagaataagtggagatgaacaagatttaagttgacaataagaggggaattcctcaagtttaagtgaacaaaacttatgaggaattgcaagaggttaatgaagggaattatagaaattgaattttattaacgaaagaataaaagcaagaaatactattagggatgacaaagaagcctctactttctgataaccgaccatgaggttaccttggagttaagaatgcttaacttggggtaatctcaaggtgggaaatcttccgggatgttatcttggagagcacactagtgaggacaaagtatgctagaaagattcatattaggatgcagaatcgatagtcgttccagagattatcaaggtggaagggatgtgttaataagtagaaatttacaaggtgttgagataagtatatattagtgggtggaaataagaaatgctctaattgaatatctatcagaaacaaatacttaacttgttactatgttaagtcagttggtcagcttaagagatttcatataaggaatgaaaagatataattacaaattatgtattctgggatcttatgatttcgactgaatagtaacagttggaca

SEQ ID NO: 250670 - DNA, 673 bp, Cannabis indica
gatacatgcattttgcgatattgattcctttaaaatctcttccaatcaatgtcaattatggagttgtattatatttatcatctttattaatattattgtcaccttcataaatatttatttatcttagattagacatgactcaagcctacaacaacaccaaactttttaatatatatatttattttaatgttttccggctaatatttttgttcattccttaacgaaatcacatgggtgtagtacccatcaatggacccccacatgattaggttaaaggctttaattttatttttaattataagaaaaacaccttggaagctcctcatttaactattgtttttgtttgaacatcatcataatattaaattattaaggccatgttgcatgaataggatggtggctttcgttgtatttattatcattatttcttgttaaaaatatattaagtttttttttgcccccttccccaaactggtcacaatatcaagctagattaacaggtcggcttatgaacaataaatactataataaataactataatgagaaaggttgtgtatatctagtgatttagggctcgtttggaacgccgtattagatcgtattgtattgtattgtattgaattgaattgtattttatgcaatattttttatgtaaaactatatgtggtatta

SEQ ID NO: 250671 - DNA, 803 bp, Cannabis indica
gccaagacattacaaaagagattccccgcagcttaagaaagaggaacaaaagtcaacagcaaaacccgctccaacaagggtgattgctctaactcaggcagatgtacaggctagcccctcagttgtaacaggttagctctcggtcaacaactattatttctctgtattgtttgactctggggccactcactcttatgtggcagctagaatttttaataaattggatagaccgcatgacagttatgataaagggtttggaaccctactgcctggcggagaattagtcatctccaaaaggtggattatgtctatgctgatcagaattgaggatagggagttgagtgctgacttaatagaaatgggtttagtaaatttcgataatatacttggaatggatttcttatccaagtactcaactagtattgactataaacggaagatggtgatcttccaacctgagggcgaagaacagtttgtttttgtgggattggttcagggatcccggattctagtgatttcagtattagcagctagagatttgctacaagacagatgtttagggtttctggccgtggtattggataccacacggcctgagatagtttggccagaggacgtcagggtggtttaggaatttctagatatttttcctgatgaactaccgggtttaccaccgcacagagaaattgatttcatcatcgatctagcacctagagcataactagtttctaaagcaccttacaggatggctccgacagaacttaaaggaattaaaaattcagcttcaggggttgcttgaccta

SEQ ID NO: 250672 - DNA, 902 bp, Cannabis indica
cctagtgggatactagacgcggtggcgggttagctagtaagcaacttgataggctctccgcctagtgagatgtttccagtctaccctgtcccctccactcaatgaactggcgtcgctgctcatcgaatggaaggtttatagcagtacggagatcctcctgttcatggtggaaggtcgattattatggctttgcatgagtccaagggcatctcggaggttttggatcttagtgtcatcccccactgtcctctgagcattggtggtggacgagattccaatgctgggagttgttttggtcggctgaagaactgatattccgagtctcttgcacacctggtgtgatcccaaccagaggagaaatcacaccatggcccacagtatgtggttgtatgttaggctgctcgggattggtcccttgtggcacccttgtgttcctagggtgttgcacagcagggttcgtcatcattggatcactctgatcaaccaagcctctatgggtttgcaccaccattttatgcgcctgttaagacttaagacaaagaacaaacttgggattttgctctcaatgaaagcacaaaaatattaacctcgcctttaattaacgaaaatgagtcaattatgaagcaattagaaatgtaataaaaatagagtaaaaaccaataagcaataaagaacactagatttgaaggttcgacctctttagtacggtaatagcctactccccttagattgtattaacttgagaacaaagaacacagtgttttctctctcaaatcttacaatgaaatctctgagtatttctcttagatctctctctaaagtaattatttcaatcccttttctagtgaagctagatcactatttgtagggccttaatgtatgagggaaggttttattttttc

SEQ ID NO: 250673 - DNA, 1661 bp, Cannabis indica
gtaccctttcttctcttcccatctcttaatttttagttcttcaattttccacacatcttctattaattaactcattcatattcacatatatctaataattaatctctttaattaggccattaactatacatatcatacgtaatcttgaattaatcttctttttattaattttctcaagaaatgtattaatgtacacatagtcttgaattttcaatctgatttttaatttgtatatgatcttgggtgattttcttagcaagaagtactgtgttattgtacttattacaaccaaaatcaagaattaatcatggtgaataattttgggttgttccctgatgagcaacagaagaatttacgttttctagagcttacaagaatgataattgaatcaatggatgctatagatgattcgattgaaaaaataaatgtgaaattgaatcctaataaccctgttgatgttagagcacaatcttggaatgtagaggaaaaaatgaagatatacacgtaagtaaatctatctaataatattaattttgttttcattgttaaaatattattagtataaattatctttttcctttaataatttgttttatatgttgtacgtatagaatggtttacaccattctcagctcgaatgaggtacaaggctttcattctttcgcaatagatgagtattatggaaaatttgagaggacgctgatgcaaaggatttcaaactatgtaagcttaattattatttgtatttttttttaattattattaaatgaattcatctttagatttagttaaattattattgttaaattaatttggtacaggtgattccttcattggaaaatcataagtttggggaagaattattgtttatgactgaagttgctaagcaatggtcacaagtggatgaatacagaagaaatctccatattatatttttacatcctgagaaaatggtaaagggtagtttagggattttcaaacctttattggttgatatttgcaaagccaagttctgtgacatggtatgttataattccaattattattattgattttgctttatattattgaaatgtacgtaacagttcccctattaatttatttttttgttaattttcaggtttggaacaaattccacaatgaaatcgacctttcagtaactaagatggtatactttaattattctgaaattaaatacttgtatacataatatatatatatatatgacaataatatagggtatatatatatatatatatatgtatatatgtattatgtactgcagatggagtcaggagtgtttgacaatgaaagtaataatattccactgaaggaggaagtggtcaaattcttgaatgagatgaagaatgtgtctaatgaaaagttgaagaagactttgaacattgtcaaattggagtgcgtagtagaagtaccaagctacaactacaatataataatatcattcattaatgctgctgatttcattatataatattcttttgttgtttaagttttgggattttgattagttatttttggatttactagtaaaattatacatgctcgtgaattatacttataaaattaaaaataatattttattatatatattgtaaataattattttgtatattaaattatattatgtataaataactata

SEQ ID NO: 250674 - DNA, 1118 bp, Cannabis indica
atcactagccttcttaatcatagtgtaataactgaaaaaaggggggttacaccatccgtcatatcgtttatggtggattcaatacgtcttcccccatgcggcattaaatgcgaggtgatcgttcaatagagtccagtacctcccggaattgccttagtatgtccttggcctccgggagcgtaaagatccttctcatgtctccttcgagagacaccttcccagaggcactcctctattgtctaagacttagttgattactttaaaagttggtcctctcatctccacgtgtcatccttatccaggcccacgtattttgggcgaaatcaagggcaacatttaccccccaagccttgtatggtggagaataaacgaggcttgtttggtgcctccgggaggctcttcggtttagcggcacgtgcttcaagcgcgtgggctgtatttatgacagtcatcattaacatttatttccttttgtaggcaacgattctcttctcgtccattaatgatcaggcgcatttaatcggtgtcagaaaaggtactcaaacatttttaaccgccctggtgaacattcatcccaaccgttggatttgcagaatacgaatcgattatgattcccaccatacgatggcgcctgatcacagctcccttgcacctctcctggtctataaaaaccaatattcttccttcactgggttactttcacaactttgccatttcatcccaagaacattttcgagagaaaattctagaaaccatatattttttattgctatttctctgtcgctgtcaatctgcgttctaccgtcgatcaacaccaacccccagttttcaaccttcatgtaagtcttctgggtactttatgtttttgtcgttcagttgcatgttagggtagaacttttggttaagtgcttgatttcttgaaaatagctttcgcgaaaatggtcgcatggtgcatataccctcttcttatttgtgttctattacttctctttcttctatttttgcaatcgacccctctgtcaaaagattacttaggatataagacagtttttgttcccacgttctgtgtttttcattctccctctgctttcgctacttttgagatatttgcacccgat

SEQ ID NO: 250675 - DNA, 830 bp, Cannabis indica
ataataactaatatttgtaggatatgacaacttttatgatatccctaaaataccccccagttacatcaccccttttacaccatcggacccccatcagaccacccatcggaccaccatcagactccatcggaccagatctgctatcaattttttttttttacgtttttgtacatacaaaagtagcatcggactacatcggactactatttttttttatgtttttgcactaaaaaaaaagtatgagaaatttgagaggggtatttttggattttatataaagtggtcatatatttttaatggggatatgtattagtttagggataaaatattaggtatatgtaagtatagaaaatcaaatttctctcgtgtaaatgtttgagaaattttaaaaaatttaactcactcaaaatataatttatacacgtatgcctagcactagttaaaagtggttttggacttaataacaagtaaaatatcatttgtatgtgttttgtttgtattgatcactaaaaacaaatacaagtaacagtagctacaataatatgtgttttgtttgtattgatctattgctagatcttttgattttgggctttatttccttcaatgaaagtttgatttttctaataaataaaataaaaaagaattaaaagtatttttatattattaaaggaaaatttcattatttgaccctaataaaataccccatatcaaaatttataccctccactaatttgtatacattaattctattattttccaaaactacccaaactagatcctggtaaaatatttccaacagccccttcaccacttcaagattctgtttatgg

SEQ ID NO: 250676 - DNA, 785 bp, Cannabis indica
tttttttttctttttttttctgattttttttttttcaaaataatgctaagaaaaattgggcagcacctccccttaattttctacttcccaaaaattcacaatcactcaaaaactgtacaactaatatctccaataactcaacaccacaatataattcaaacaaacccaatatcaacaataatgctatcacaacacgcactattaccacccaaaatctataaaaagtaaatcaaattccttaaaatggtaggaagtgatacttacaaacccaaagaagcttttactccacctccattgttgaatgttcttgaaagcttaaggttgaagatgaagacaatggtattttcgaatttggggtagtattggtgattttttggatgctttttgatggaaagtgaggattgatgagtgaaagtgggttttaggatggattggaattgagaaattgaagaaaagatgagaaaattgaagattggtgatgaaaatttgaatttttggaagagagagtggcttcggcggctgagaggttattttgaatgtgtgtagggttgaatggggggaaaatagggcttttatacaatttcgaaagctggtcgcgaccagcccacaggctggtcgcgactagcataaatttgaaaacttcgaaggctctggaaattgtggtggtcgcgaccagggtcgcgaccatgaaaaagggtcgcgactatggctttccctcgtcgcgactactggggagtgacaattctatgcggttctgtaaaatcccaggtcgcgaccagggtcgc

SEQ ID NO: 250677 - DNA, 673 bp, Cannabis indica
tgtcactaaagtggtctttttttgtagtgtcctcgattttcttttctttttttttatgattgtacacgagcaattgtcaacaatatttgtttcattatcattaattgtttagtttcataaacaacatttgtttcatcaccactttttaattttgtaagcaaaaattgcttgatcatcattttgcgtagttttacaaacgatatatgcttcatcacccttttacttagtttcataaataatatttgcttcatcagctttttgctcagtttcgtaaacaacatttttgctttgttacccttttgcttagtttcataaagagaattcattaagtgataaacactactgataatataaatattggctggaaagttatcaaaagttgatggcaaagtttatgaggcggcgtttggtttaaggtaataaaattgaataaaatggtaaagaaaacaacttttaatctgtaagtgcaatagtttttgtttggaaaattatgtggtacattggttgttcagttttctgtctttccatgtttgatgtcttagctttttacattggtcatctaagttgtcatcagtttcatatgttttgtcttggtgacttttattatgtgacgtgtcagatttcaacttttatattcttttcttgtttgagtcagtgccagctggactcagct

SEQ ID NO: 250678 - DNA, 880 bp, Cannabis indica
aaaaagaaataaataaaatagtccagtccattcttaaatcaaacacaggattactttcagcataatccaatcttgtccagtccaattcaattcagtccaatcatgcgtaccaaacgggccctaaaggggtgttctcgtaaatttcctatttagtcagcattcattaaacaatttagtttaattcttttacatgatctcgtgtacattatagtcaattaaggtcatctataaacttttaggaatttttgtataatttatagtgttaaaaataaaatttcaatattttattgcatgtgtcagtattttcttagggattttttatttttacacttcaaaacaatttttttatatatatttttacggaattctacatagaaactcatattgcaactagcgatacaacctaaattgcaacaaaaaatcgtatagaaacccctattgcaactagggctgtaaccactttagaaaacccaaaccttaaatttgaaaaaaaaaaaaattaaaaaaactatatatggcgtaattcctttttttatatgtacgtagtaaataattgtttgaattttattttcagcattgtatattatttagaattttttttagtatttacatgtggttctaaataacgtacatgatcatgaagagagaaaaaaattagattaaaaattttttttaaatactaaaatagataaaggtataccgaaacacgactcttctttcatcatttgacactgaaatttattttctaattgcactgatttacaatctaataagattacttttgtataattttattgtgtgttctttgtttcaaaaataaaattgatcattgttttaaataataataataataagaagatcattgttttaaataataata

SEQ ID NO: 250679 - DNA, 1464 bp, Cannabis indica
tggatttggtggagaaaatcaatatcaaattgaatgtgtcaatggagtcttccaatttgttgtttggaacatttgtgatttatgaggggcaagagaactatgacaccgattggtttcttgatttcatcaattttctttgaatctcaactgttcttggggatgcatagacattcatgttgaatcagatgaggtaggttcaatgtaggtccaatacttggcccgattatagtgttgttaaaatggaactagaggttgaagataatggcctagtgtgggtacgatataggtccgagtcgtccgactgtcaacaatttcttatgttttttgtatgcgtctgatgtgaattccatatataagtatgctgcagtataacagtattgggcttttgaggccatattatagttttgctgtcagaaagtcacatggtttcccaataataattaactgggagagtatgaaaaatgtaaacatcaacaaagtggatgttataaaaattattcagcaaaaatataagttttttactcttttcttttctggtgggctcccatacttttttggacttaggctaagttttttggttcccacaaatataggtaagaaaatgttttgttggttaattccaaaatcttttattaagattattaaatgaaagaaaaaattatagagattgtataactcatgtatagcatagcagcaatattgtagaaccaatcagaatcagaaagctcattaggtaagttttagagtaagaaccaaggggaaaaagcatcataagataatcatatgctgaaaaaaccccaaggcactatccatacactatactttcattcatcaaactaagaaatcataatacaataatgtcatcagaaataaaaacacaaaacaaacaaagccaacacaacacaataatgacattattacaaactcaacacaaccaaaaccaccaacttggagaatccagaaaacaagccttaaagcaacaccatcaaccatgcaattccacctgaatatgtgaaaaaaactgaaaatcaattatcaaaaccagagtaagataatatgataaagctataggcatgtttaatcatccaagaaccataacaagaatgataattttccaatttccatggtaaccaagcaagtgactttaagtttgcttatgataaaaacaattatttagcacaaagatttcttcatgcatgcttcaaaagaatctgtaataattatgaaaagttaacactacagtcaataattaaaaggaatatttagagttatcttttccaagtaaagctcatgtttgtaaaaatgaaaatttcttccaagagaaaaagaaaattgagctaaacaaacagcttcataagactgaatacattcagacaagttgttaatgaaaatatcataagcaaaagaacaacatttaacaaatatgaaattgaaaaactgataaacaatacctgaaacaacagg

SEQ ID NO: 250680 - DNA, 1035 bp, Cannabis indica
aacctccaaactttgacttgcgatctctgacttacggtagcgcaaatggggaggcagcgcttatggggttgagatcactggcgatcgggggtttgaatggtgcagcctgtgggtcatatatttgttgattattgcatattaattataacacatgatttccttttacacctttttgatgctattttacgttactttctttaaattttcaatatgtctcagatatatataaatttatatatatatatatatatattatgtaaaggcattgagccatttcctactatatgttttatattatatggtgtactgtcattatactcattatttggggtcctgataatattagcttttcttgaggtttgtcaaggagtgtttttgtgattctcttataaagttgctaattttataatgtatagctacaaaagatattgatattcatgatatataagttacatatatatatgcatacgtttgtgttaatgtataaggtacgatcgttgaccttcatatcaagaatcaacagcctatcatgaaacatcacaattatgtataacgtgttaatttaattttacctaatacatatatgtgttttgtaattaataaagttaaacaactaatattaaaacccatatgtataatcactcataaaacacataaaataatcttaaagaaataatcaggaaaaagtgggtgcactagaggatttggatccttaattttcaactttaggattgtcatctatctctcaattgatcgctgcaaaaaaattgtatgtgtttatataaatttaatcacacatatatatagttatactaattattacttgaaaaatatatattttttaaaaagtaattaaagaaattataaattggatccatatttcttattattaattaatcaactattatttttagacaacgcgcgtcatggatggtaagtggtactatacaagccctccattctaaaatgcttcttcttttttatttcttttttctatttttatttgaaaatttgtttaacttaaaaaactaaact

SEQ ID NO: 250681 - DNA, 996 bp, Cannabis indica
aaagtcgtttgtgatccgttgtgagctaaagtgcgctggtccaaacaaatacttccgctgtctcccctttaacctccatttgggacctttcggccaatgtgtgccaatttccaatgttaggggtctttgacctgtttcaaaattcacaaatttcccgacgtgtacacccacaaatttcttgatatttggccttgtgggattctttcaaatgtcacgttcggccctgtggtttcttaatggtcgttcgttatacccacactttctaggtccaaacgaggagggtgtattagagttagtcccacattgctaatgtgtgaaaataaattgtgatatataagatgaatgggctactcctcccatagccaattggttttaggatggaacctcaatcatcttatccccaaattctaacacttttacaatacatatgtcatctcatagttgacaccttaagagttgtttaatataggagagagtgttggattgtggagggtatttgaaactcttgtttcttgtaatttttttgatggaaaatttactataaaatgtagtaggtgcatgttctttatattttttgaaaaaaaattaacagagtcttatattttaggggtagaattaggtagtgtggaaagtatatgggacaaatgtaaaatttaaacacaatgagcattgtattatcaataataataaacacaactaagcttataaacatcccaaatcaatcattttatttagggcgttaaataataataaacatacctcaatatttagtattctctatttgtgtgtctctttgattcaccataacaccgaactactataaatagcagttacaattaaaaagttgactcattcagaaaatttaataaagataagtcattttcaaattcagactctctcaacttggtgtcagacgtcgaaggttcttccatggcttcctccggcaacaatgctttagccaacacctttgttattcccacaacaatgtttctccct

SEQ ID NO: 250682 - DNA, 803 bp, Cannabis indica
acaccaaaaattcaaatttcaaacacccagccgaaccctaccccttttctctcaaaaaattcaatttttcatcaccaatcttaaatcttttcatcttttccataatttctcaatcccaatccatcctaaaacctaatttctctcatcaatctacactttccatcaaaaacaacccaaatactcatcaatttcacccaaatctgaaaatacattggttcttcatcttcaacctcaaacattcaaagatattcaacaatggaggtggagtaaggcatcttcgggtttgtaagtattattctctattcaatttgaaaagttgcatgaggattttgagtatttttgtgattattgttggaattcttgattgatataggaattgttaggtttatagtgtgatttgggattgtggatgtaattgtgtggattaattgatgagttttcaatttttgggatatagaaaattaaggggaggtgctgctcaaatttttagcattatttagaaaaaaaaaaaatacagaaagaatcagaaaaaaaaagaaagaaaaagaaaaaaaaaagagattctatctatttttgctaaaaaaaaaaacaatggcacctaagaggactaggaatgtggaggagggttagtattcaaacccaccaccaacgggttttgataggacccgatttggtaacattgaggcccaaaatcgcttcatgagaattaagaatagggcttatattgaagatcggggtattgaattccccgagaatcctttgaggcgtcaacctcagtttgaaacaattcgagctcaaataga

SEQ ID NO: 250683 - DNA, 1018 bp, Cannabis indica
atgctcaccacaatggtggtatcaagatccttaagcatgctttgttgagatggtgtccatgagaatttggctgagatggtcctaaaagtcattggccaagatggtgtccacaagggcttggctgagatgcatgctaacatggttgggactttgagaggtgattttttagacttgaagttacagtcttgaagctctttcagctattgagcttgggttttgagacttcaagtcttgagccttgaaccttgaggcttgaggtcgggtggattcaaacacattactctaaatttattgaagagatttaattaatggtgtattttacttgactaatcttagggactagcctcgttgatttttggtgttaatagtcggtaatggagctacactacttgagctttcattaatcacaaaaaagctagaagctttacaagagtagacttaaaaagcatgagaatcaaaagagcgcttgagaactcagaattctaaaaaaataaactctggatcttgagagagaagctttggcttatgaattgaatgtataatgtgcaaaattaacttgcagagcctcctatttataggagtggaggtttcttaaaataaagataaaatattacaagtatcaagaatatgttgggaatattcattttgagcatatctaagaccattggtggatgtcacttcattattgaagggttgatattgctcatcttgactttggatgttgatcattgattttggtgatcaggtctggattgtcatatcattttttgatgctttgatactaaaaatttcactttgacttgagagccaatttttaatatgatatcattgaaattttgatatgactattagacgtccgtagaaatatcttggaacaagctttccaatacacttaaaatcacgtcagttcaagatgtaacaagtgagatatggttgaaaaattgaaaggcgttcaacaaccgacagccatgttgaggtataagcgcctaggttggcatccaacgtcaacctggatgcc

SEQ ID NO: 250684 - DNA, 553 bp, Cannabis indica
gaaaaagtcttgtataaacaacaaaacaagactaactgaaaggcaaagaaccattccagaggaactcactatcaagcccaataccccaattagcaaccttatgagcaatagtattaaactccctattgacatgagccacccgtagagatgggcgaatagataacatgttctgaatacaaacaattaaatcatcgacagaactacaacccagagttccatgatgaagtttatcaacaatggatttgcaatctgtcttcaatacgtccacaggcaggcaaatagaataagcccactgcaaagcatgcaccactgccttagcctcagccaccatcggtgaaacacaacctgaaaatggtttaggcaatcctgctaccacctggcctgaatgattaagaacagcaaccccaatgctgtgcttctgcctattcagatcaatggctgcatcagtaaagatctggaaatcaccttcaggtgggaactgctgtaaaattgtctgatccgaattggaagcataaggcagcacctgatcttgctgtgaatctaaatacttgaa

SEQ ID NO: 250685 - DNA, 723 bp, Cannabis indica
gattttctgcaaagccaagaattcatcactcatttgaagctgccaggtgaggaaacttggcagccttcttgtaagttgtaggctcaaaatatgctgaaattagtttgcaatacaacattcatttaataacacaatagacaattcaacaagtaaaacacaaaataaatattaacacagaacaagaaaaatataaagagaacactagatttttatcttggcttgtttgtttttgattgcttcaagaaaggtctttggcacttcaagaaaggtctttggcactgtgtcttgtgattccattgccatagatagagcataggcaattatatcaacttcaacatacttagcaggggtcttatttctcttctaaccctgtctcgagccagctgatagtcatccaaaacatcactcatatcatcaggttgtgcattagtgtcttcaacattatctagtgtaatttcctagtttaaaatgactcttcccagctcaagttgagtactaagttgaacatcattttgttttacctgaaatgtaaaaaactaaacctttctcattatttttaaatgggaaatcacatctctactagttacaatattattagtttcaacagagagaagtctataaccttctacacaagtaggatatcccaaaaatatgcattttattgatcttttctcaagtttgttctctacattgtgtgcatatgaaacacaaccaaagattttt

SEQ ID NO: 250686 - DNA, 989 bp, Cannabis indica
acacaagtaagacttggcttgttttgcatactttaactatgtctttatattatcacgcgatcacaataaaaattcaatcaatgatgctgctgcagacatttgaagtacgatttttggttggtcatataaaagaaggaagtttgttactattcgtctcttatagttggaaaacacaagtccatagcaaaaataatacagctacatttgtgtttagattatttttcttacactaccaattttttagtatgcagctgctagggcatggacaaaatgggaaatgatgactgcccgtcttattccaaatgatgaaaacatcaagaaaggagatgatgactatttttccttggtattatcatttttatacctgtatcttttcatgaactttgatcctttttatttgggaaatgttttcaattgtggatggctatagattcaatctatcatatgtattctattgttttttacttcagattacaggttctgtaatttaatttgttatgatgactgaagttagtcatggttctataagtttaatttgctcttcccaggcatttgcaaggattgaaaatcattattttaccaacaagggattcttttcttcagattcatacctattggataacattgataagatacgccacatagacgctacaattgttcaggttcatatttactttttcatccatgttgtgacatgctcttctgaaatgttcaagattattgctgtacttaaatactttcttattgtaatttcaattgttggttcaacctaatagttgtgtatttacctcagacaaggaaatgtaactagtaaaaactatcttttcagggaagatatgatgtgtgctgtcctatgatgtcagcttgggatctccacaaagtgtggccagaggcagattttaaggtaaactgaactaaggccattttcccttttctttttcaccatggggccaaatcaacattgaactttgtttctttcaaaaaaaaaa

SEQ ID NO: 250687 - DNA, 572 bp, Cannabis indica
ttttttttttttggctgaaaataactattaaatatgtcaaatagctgctttattttaatgttgattttaaaagtttatattttctttaaaattggtaatggttatgtatatgattttttttaagtgttctaagtatatattgtactcatcatgatagtttaaatagtaaatatgagtatatataattttatagagttggtttatatgatggatgattgatatttatgttgttgtgaataatttgtttagtgaaaagttttgtgtataaattggtaatggaaatagcatatgtgtttgttggtatagtagagtataggaatatgtatttatgtatattgaaatgtgagactagtggaatagtcaagtaaaactagtgtatagtattaatggccttgtaagttttttttataaatgttttttaagattttgtaattagttattctagggtaatgtttattcatttttaagtgttgcaatatatacctatatataaattagttaatttttttttttgtataattgtgtaatattatttgtgtaatataaattttaaaagtttagtatattactag

SEQ ID NO: 250688 - DNA, 746 bp, Cannabis indica
cctagagaagaaccgctgatacataggcatcctaaaatcagaaaatcaaacacaagaaatggccttcatcagatagctgttgaaaatgagacactgaatattttcaaccccaagatgggtcatcagtatgatacataatatattatttgttttcaaagacaaaatgtaaaatttgggagagaacagaagagaaaagagtaacatacctatattttcttgcaattaacagttatatttgggatgtgagcaattattggccagtcctcccctgtctccctctccactcgtggtcttagcaattcacacaaagtgatatgaagatcagaaagagaaaagggtagttcttttggcaagcattgcagcttaggacactcttcaattctcaactcctcaatggaggtgaggtgttgtaaggccgcctcgtctaactgcctcaagtttccacatctcataattctaagcttctttaaactgatcaaaggggcctgctccatcagttgaggtcttgggagtaataatggtggtatttgttcctcactgacacttacttcaagcactgtcaatgatggaaaataatctcctaacaatgtcactttgagtttattacaattatgaagatgaagattcttaagacgaggaaaatctccaccttcaataaatgaccactcttcgagattagacaaattctgaaatctcaagctctccaaagatgtaaagaatggctttgtttgtattgcaacagaaga

SEQ ID NO: 250689 - DNA, 964 bp, Cannabis indica
tttaggagttgatatcgtagtgagaattatgggtatataaggatgaatactactccattagtacgaggtcctttgggaaggtgtccaaaaaaaaaaccgtgagggcttagacccaaaacggacaatattatattaatatgggagtcaaggtgaggtacaaggtagaagaacggggctcaacaaatctttagcctactaagtgaaaatcttctaattgtggggaaattattgacaagattcaaaagaaactgcatggcttaaaaaatgtttgtctttattttgttgggtatttgaaactattggatgaacatctttattttaccctcataagttgcgaaagaaattgataaactctacaaaattttcctttgagtctctttgatttcactaatttttgtaaagccacagactttcactaatttttgtaaagccacgggtttctttgctaataagtctaagtcttctatttattttggaggcatcactatagacactaaaaggcatatgttggatattgtaagtatggaagagtgtttatttggaaattattaacaagattcaaaagaagctagatggctgagaaagtcgtcatctctcttttgtaggaagagctcatctcattcattctgttttgtggagtattcgaaactattagatgaacatcttcaatttattccagaaagttgcgaaggaaattgataaactctacagaattttcctatggggtagctctggtactcgaagcaaacttcatttagcctcctgggaaaaagtctgtttacccaaagactttggcgttatgggtttagagaaggcaaaaaatggaatgtagctcttattgtctttggataagatgggtgaatgcaatttttatgaagaacgaagagttttggtcttgttgtccaagtaaagatactagttggtacttcaggaagtttattaatcttaaagattaagatcaact

SEQ ID NO: 250690 - DNA, 646 bp, Cannabis indica
cccaattgctccataatctttttcagaaaagaccattagtcctggtcataggcttttgacatatctagcttgacaaaaaaatacccaggattaccaactcttttttttttctcaatgaattaatgcactaaaacccaataaaagcgtcgtcagtaatcaaacgactggaaagaaagacactttgttcctcagaattcacataaggtaaaacttatctcattctattagtcattattttagtgataattttataaatgacattacaaagactaataggacgaaaatcaacaggcttggaaggagaatcaaatttaaaaataagacaaataagactcttattaatatctttgagagttgaagaaccattaagaaaagccaaaatagctacaataacatcctcactttctttatcccaattcttctgataaaaacaagttgtcatgctatcagggtcaggacttttagaaggacccatttgaaaaagggaactcttcacatcttcaccagagaaaggaagagttaactgattatttataagtcccaagatcttaacatgatcaatagtaacaactcaatcaaggtcactacaagagggaataactgaagtgaataatctagataaatactctacaaaaacatccttcat

SEQ ID NO: 250691 - DNA, 589 bp, Cannabis indica
agtttaataccatgtatgttaccctgcccaagagcttcttccagaagtctcgagagaacctctgcagcacagataaacaggtaaggggagagggggtcgccctggcggaggccacacgatggcaaaatctgaccaacttggcccccattcaagcaaatgttaagagtggtggtggaaatgcattgcgaaatccaagaacgcagcttgagagggaagccaacgcaatccatagcgtggtcaatgaatctccaactcagtctgtcataagctttaacaagaaattagaataggcattgtttgaccatccatgtagagagcggcattttgtgggtgcagaccatccataaccatgaactgcatatcttcagaaggctttagtgtctcttcctttgatgtatgaaccaattatttatttgtttctaatccaaattagtctccgccaaagctaccttctctgtctcctgtaaattagttgtaacccagaaaaataacccatactcatagtgatatcttcaaacatataatgatcaattaattaatgtcaaataaattagttgtcagctttaaaggacaaggtggcttttgttaa

SEQ ID NO: 250692 - DNA, 609 bp, Cannabis indica
aaataaatacaattttaattaaatataaaatattatttttataataattattattaggtattcatacaaagtaatataaatttgttttaataatctaatttcattaaattagatttcatttaaaatttttgttctaattttttaataactaatatttatttatatttagtcaaattaattcttatagttcctcaaaaaaaaaatgtatagtttttattttattttaattatcttatacaaaataaaaaaatttcacacacaattcctacatgtgctatgcacgtggtggcgaaacactagtatttatatatatgtgtattatccgaaacaactcttctagatttatctgtcaagtgagattaaaaacaaagataatatagacatgttatgttagtgtcgatgagatctgatatgatattgatgataatgtgatagtttttgtggcatagtaatcaattctctgaccggtttggactatgacttttggcccactttcatgccgacaacactccatttattttcatgagtaattatagtaaatggccctaaatcatatgagtatgttagtttatgttctcttttcaaaaaaatatagtaaatgaccctaaa

SEQ ID NO: 250693 - DNA, 569 bp, Cannabis indica
gaagattctgatctctcaaactcttccaataaccagcatacttggtggaaatacttttggaacctgcaactcccatccaaggttaaaatctttgtgtggaaagcttttcattgtgccattcccactgctgctgcactgtgcaagcgcaagattattgattctgcagcatgtagcctttgttcgaatgcctgggaatcggttgagcatgccttgtttctttgcaaacatgctaaaaaggtttggcgtgttgctggtatttctctgaattttgatctggtttcccgaatgagttttgctgattttttgatgctgttatctacccttaaatctacttcggaaatggaacaactactctgcactttgtggtttttatggaatgacagaaacaactttattcatggcaaaccaggcctctcaccaacacaactttgggccaaatctgttgcatatttctgcaactttcagcagcagtccacttcatcaaaatccatccgagactctacaggagcagctgctcaaccccattggatatctccacctttggataaattaaaaatgaatgttgatgc

SEQ ID NO: 250694 - DNA, 503 bp, Cannabis indica
ctatccgtttttacaggtactggtaaaaccggttactccgtttatactagttcaccccaaaaatcccatttcttgctcaaaactccaccaaatgaaaccaaaccttccagagtacctaattacggtatacacaatatattccagctagtaattcatagaaaagcccaatgaaattcatactattaaagacctaaagtttgagttcagagctcaaacttgagcaaaacaaattccatacatcaaaaccagctgctagaagttgaaactaactcaaatgaaccctacaatttgaactatacaataatcaaaccttaacacgcccctaattttcaaaattacataatcaaaccaactcatagctttattaaaaacacatagttaaaggctctagggttttacctttgcttcaactcacaaagatcttgctcaatttctagaaaaaggttgaaacttgaagaattccacccgatttcagtttggccgaacaaagagagagagagaga

SEQ ID NO: 250695 - DNA, 744 bp, Cannabis indica
tatattaatatatataatttttttataatatagataaagaggcaaacacaaattcaagaagtgagctggttgcctcccccaccgaatatcatcaaaattaatactgatggcgcagcaagaggcagctccaaagaagcaagttgtggtggtgtttttcgagattcaaatggtgcaattttgggagctttcagttcttttcttggaaacaaaactccactcgaagcagaactatatggagttatgaatgccatacatattgcatttgtaaaccaatggcattgtgtatggttggaagtcgactcaattctcactgtgtcgatgataatgaataagcaaattgatgttccaagcacaataaaagaagagtggttgctgactttacaacggattcaagatatgaatgtcatggtttcacatatatatcgagaaggaaatgaagttgctgatcaactagctaattatggatttttcacaagggacaattttagttggttttcacaacctcctgattttattatggaggaagctataagagacatcagtggtccaccaagattaagaataaagatttaaatgtatataatagagaaaaaaatgtatttgaaagacaaaaacaaattgtaaggaaagaaacaacatgtagcggaggagtaagggaagacatggcttcacacacacaaaaaaaaaatagtttctagtcacaaaaaaaaaaaaaattgtaactaaatgtaatttttaatcaca

SEQ ID NO: 250696 - DNA, 1585 bp, Cannabis indica
ttattttcgttctaatttcatgtttgtgctttcttcaacatccccagctgcccctaatcttactggcctaatcttttcgggtgtttcggcggaggctaatcaggcgttgatcaggaaacctacggagaaagagatcaaggaggtggtctgggcaatgcctccccttaaagccccgggtcctgatgggatgcctggcaagttttttaaagatcactgggatatagtgggaaaaggtgttgtggtcgcggtgactcttttcttcgagactggagagtttgccaaagagattaatcagacttttttcgtcttgatctcgaagaaaacaagtgccaattgttttgatgatttctgacccataagtttgtgcaattttacttataagatcatctctaagttgttggcgaatcgattgcgcaccctccttaaggatttaatctctccgttccaatccgcttttgtgccgggaagatggattgctgagaatagtattatggcgcatgaggttttggactccttcaaaaaactcaagggtcgcgaggggtatgttggattgaagttggatatttcaaaagcttatgatcatgtagaatggagttttttggagcgtactttggagacctatggcttcgatgccagattcattagaatggttatgcactgtgttagatcggtctctctctcgattttgctgaatggaggccctttgaaataatttcagccgtaccgtggcctccgacaaggagaccccatctcgccttacttgttcattttatgcagcaaggtgttctctcggatgctccttgagaaggaagtcgagggtctgattactggctttaaggtgagccattggagcccttcaatcactcatcttatgtatgctgacgatacttttattttttgcaaggctaatattaaggaagtggaagccgttctcgagtgtatcaatgagtatgggtcgtggtcggggcaacagttgaatgtgtagaaattagcctatactttctttggaaacactgcccgtgacactcaattggagattgtggatcgacttgaatttcacaagttggggattgaggataaatttttgggtaacccgattatttggtcaaagagtaaggtgaaggatttcaagtttttaaaggcgaagatcttatctaagattgaagggtggcgatgcaaacttttgtctcaagcggggagagccacccttattagaattgtggcccagagcgttcctatttactcgatgtcttcttttcttctccctaaggttctttgtagagaacttgatcaagtgattcgtaaattctggtggataggaggaggagataaagatcattatctggcccttgtggagtgggatgcattgtgtctttcggtggaccgagggggtcttaattttaagaaatttgaggacatcaatttggctctcctgacgaaactcgggtggaaactcgcgtcgggagagtcctctctttggtgtacgattttcaaggagaaatattggggcaggagtttccattctttttggtcctctatgctacctagaaacgcctctttcaaagctcggggtatcttggcaaca

SEQ ID NO: 250697 - DNA, 525 bp, Cannabis indica
tttgattgtaaaaatgaaaaaaaaaaaacctcttataacttattgtggtgattctctgtatattaaattgtgtcccacgaacagatattataaaatataaattataaataaaaaataattaaaatattaaatgggtcctcgtcggggtagggagtgtcatcccatccccgccctgtttaacattcaagggacaaaaatgatccccgtccctgcgggcccatccccatgtgaaaaataaaaataagttgaggaatactttttttttatattattaatcaaaattactctcatattatatttcattaaaatatatccatttttgttagtggattgtttaatataccctcatacataatttacattaacttaaggggtatattagggccattatctacaaaaatgaatatatcttaaaaaaaatagaaataaaaataaaaattaaaatatataaaataaaataagtatacaatgtaatttctctaaaaaaaaaatatgcatctcaaatcgaatctcatgtaacttttt

SEQ ID NO: 250698 - DNA, 1621 bp, Cannabis indica
ttttttttggtgtagtaatctgaatagagcttgtgtagtaatatgttgcacgtgcatgttctctctctgaagtctactgtccatgattctttcattctggttaccttaagtaaatattcactgtttgatttaatctgtgtaatttgaaaccaacatttgttaaacatacgaaataacaataaaacaacccaaaaataacattaaaaaaattatgacaaccacaatattattatgtttaagaatttaaagtgctcaaacaacaagttaaaagaatttcgagatctagagcatcatttgtaatttcggatttaaaagaatttaagtggggtttaagcttctaacctttttgatgtgttgatttatattattgacgaagcttttgggtgttgatttgacgttaattttaatatttctgcttcatctcgccgaaattaatagttatttttcaatctcgaaatccaattaaccgattcaatccaattacatctaatgtttattaaaaaattattcatatttatttatatataataaaatgtatcaaaaataaaaataaaaatattaattatatttttagtgtttttttgtgttgaatttataatatttggatgttttgtatatttgttttcatattttattttattttattagttgacagtattgttatttcaattatttcaaattgttaattgcattaaacttgaaatgatgatatctttatagagtatttaacttaaatgaaagacgatatttaaattttacgtatttttttcttcaaatcagatatgtaattggatatccaatagaaaatcgattcaatctaattagtaattaaatttgactgaattttgaggtccaattagtctgaattagatgataatttttttttaatttaattactaattagattagatcgaattaggagaaaaatattaaatattaaattggatcggatgtccaacccaacctgaaacccgatcccaaaacacagcaccccaaatgtgcagctctacaaatcactacaataatcaattttcttacaaaattttaatgtgataaacttttttcatttcttttttaagtacagttaggaaatctaactacaaaaaatacgtgtcttttgtttctaaaatgtgttttttttcttacaaaaatatgaagtgaaaattgtaattacagattaggaaaatgcaaccaacaattagaaaaataattacatgacatttttgtaaacgattatcacatactaatttgtaactaagagaaacattgtctttaaccaagatttatggaactaatttgtgaacttaccctaacatttatgtatctaatatttatagaaataatatattaatgcataaaactagttagattagatcacattgaaattgttcactaaagatacaaggttttcttcttctccatctacaacgtttactttcgtttactttcacttgaaactggaattgttcacaaaagatacattgatagacacactatgttattgtttgggacatttttagggctcgtttggaacgccgtttaaattagatcgtattgtattgtattatattgaattagattatatatcatattttatataatactatgttaaactttaatt

SEQ ID NO: 250699 - DNA, 1005 bp, Cannabis indica
aaatgtgagattgattttaatatgagcttaattatatatatatatattgaacatgaaatatcaacttcattgaaataaagcattcaaattacaaactggcattataatctgccaggacatcaacatcatgaatgctacgatcagaatagaaacaagaacgtctagccacaaagtgggcgaccttatttgatgatcgtttaacaaaacgaagactaatattaggtagagaggataaaaaagatttacaatcatgggtaatcagaccaaaaacagaagtcatctgttgttgactgaaaactgcttggacagtgagtaagctatcagtttcaacctctaccgcgctccaacccttgtctttgagccagcttagtgcttccttaacccccaaggcctcaacaacctcagcagggaaggacccatgaaagtatttggccacgaaatcaatgacattaccttccgagtcacatgccacaataccatacccatatgcattttcagtctcaaaggtagtcccatcaactttgatcttgatcgtattatcagcgggtttagtccaatgctcaaagttgttaccaacatctagcgtagaaggagataacaaactcattttatcttgagctttagtccagtgatcaagaatagtccaagctgaagagacaacctaaggcggagaagaaacttttttgtcccaaactaacgtatttcttgccttccaaagtgaccagcacaacatcacgacacgacaagaaatatcctcattgaagccagtgaacacaagatgaagaaagtgtccaatagtcccaacaaaattagcataaggaaccaaatcagctttttgccagccagctagcgcaaaagagcagttgagtaagatgtgtgtagcagtttcagcagtatgatgacaaacaaggcacatgggggaaacacttacaccttttgaaacaagttgaagacaggtgggaagcacatcagatactgcgcgccacatgaagttcttcacttttg

SEQ ID NO: 250700 - DNA, 1787 bp, Cannabis indica
attagtaactaagacaacttaaaaaaaacaaaatattttaatagttcttaccaaaaaatgtaatagtagtcttttggttctataagtgagataaaagtcatttgatctctcgttctcatcgaactctggatgactcgatggctggcgctgtgatgtctgaggttgttgtagcggctgtgatgtctaagatggttgtagcggttgtgatgtatgtggtggctgtagcagctgagatgtcgatgcccccatcatccattgatataggtaggctagctgagcctgctgtgatgatccacccatatcagtcgaaccctggaaagaaagcagaaggatgttgctgtgaaattcctccgtacatgtatgaatgtgtgtatggtggtccatacatgtaagggtaaggcggtggagggtgagatggttgtggcaaaggctgcaagagcggctgtagtggatgttgaggctgtgatgtcgaagatgtatgcatgttagatgatgtcgttgaatgttgagaatgtgcaagggaaccttgagaaatgtgcgtctaagacggttgaggcgctggagtggagtacttactcttaagcatattaaacattgctaactttgtagggtccatatttgatgggtcgatttgagatgaaaagagagtaaacatcacactcatgtcatttaccaaatattgtgaaggggcctatgattgggtggattgggcacgactacttgaagatgtatccttcaatctgcgaccaattctacgaacgtgaccttgcctctgacccaatgcctcttcgaagatgctaacatgatcagatgatgacccaaaatcaaaatctatctgagaacgagctgctcgagctacttgcaatcgctcctatattaaattgaaaattagaacaatatgacagtaatattgggaaaatataaaattaagtgacaaaaacttacataatcttgtcttgcatattcatgacaaattgcttattctttttgctatggacttccatccatgtgccgatgtaatctgggttcccctataatttatgaagtaaacattagagattatacaatttaataaaacttaactacaattatatttgaacttactaattaatggtgcctctgagccaagaattttgttccttgggttgaaacatatttcaaattttcttgttttgttcagatcgggtaagaaaaactaggctagtaaaaaattcacactgcattttccattgttccggagtcatatcaattggatgatgttttagcgcttcctcgtaatcctcaggttttgaaagaaaaaaaaaagcatttgaaatgcttgtgtcgactagttttctttattctgtatctattagcacactcggtgtcgaaacatctcaaaaaaatttcagcataaggattctcgacaatttaatagtaaacctacataaaaaaaatatttaagtatattaacaaatttaattatagcaaggataaattgtctaaagttatttatccgaactcttgcaagcacttgatccttgtactgttggggcattgcattctaatttttgtaatttgtaggacaaaaggcagcaatgtaatcgctcaaaacgcgtgggaaagctaaatgctctactcccactatcttatgtgaaattggacagtacactaaaggcaatgactcttttgcatccctcctttttttctctaattcttcacgaatagatggaccacgaccttttgttcaggtatcttatgttttgaaaaagaagaagaaaactataatcaaaatatatttttttttt

SEQ ID NO: 250701 - DNA, 867 bp, Cannabis indica
ttaattattgtaattcaatgtgtaaaaacggattgacaattaatgcaatccttgtataactgatcggacacctgctttgtatataaaggggtgatccaccgtgaaatggcacctacgaaactcttgctacactggactaagcagaccgtgatctgactgaaccactatattcctttgtgtcattgttatttccagttttctgttaatcatttctcgttcccagtttgagtactcgccactctaggttgaatactcgcacttgttcttcatatagatttctttctgttattaatagtatcatataaaattggtgttgcgaaattcactcgacaacatgctctgagtttgtttaatggagtgttggtaaattatgaagaagttccaaccttatttataggtaatttggtgaaaaaaaggtaatcatttggaaatccctcaaacatctgattttcccccaaaagaaagtattgggaaattaaaatcaatcaagtgtaactgtcaaagcgtgcgaagaaaaccatgtttcaaggcattaattaagttcgagcattaattagctgaaaattgaagagacgcttggtcagactctcatcaaatcacgaacagacgcacccaacacgtgtcatccattcaaatgtaaaagcatttcggatgaagtctacacgcaacttcaaaagtcccgcacagacttgggggaaactgttatcccaatttttacactctgacgtgacatcacacgctggtgacatgtggagtcaactccccatatttgctcgaaggagatattctgagcagaacaccacatatacctacatggacgaagtcctcaattagtgtattccatatatgtaatgtgtattcttacca

SEQ ID NO: 250702 - DNA, 1484 bp, Cannabis indica
atatagaataatgtataaagagatgatttggttggatagtatttaaaggctccactcacccaccgccttatttaaaatacttctatatatccctagtcgaataggaataggaattactcatttactcaaattattaatatattttaataaattaattgaatccttaattttatatgctaaagaagaaaaaaatttaaaattaaaatgaaaacaaaaggatttaaatttatacaaaaaaaaaaaagatttaattggaaaacgaagcgtatttattagcgtagatatttatttaactgatattttttaaaaaatcaaatataaacttatttagtcacattctttttttttataatgtatttacatatttttaaattacaaaatattaaaaaaattctttattaatttatcatataagtttgtacaataaaacatcatactaattgattttgtgtggtatggccaatttgtgttttatgttttgatcttgagctttgtgttatgcatgctcaattgtatatcaatgttagattggtttagtattgattaaaagttttagtttgggcatgattttggataagttttggtattagtttgggtgagtttcgaatgtatgaaaagttgtgatttttgggagattttggggttgccaacgcggctacagtatggctcgccgcggcgagctccactaggttgtggccgtcgcaacgagggccatgttttctcgggattttttgtttttcttatttttgtcataacttttgattctgaacttcgttttggaagttcttgatattattggaaagctcattttgggctctatgtgttaatctataattggagttcaaattatgtatacgtgtgaaaatgaatttgagattaaccttaatattaaaaagcatgaatggactttttttttgttggttaaaaaaaagcgtctgctttataaaaaaattgtttaaaaaaagggaaagaaatatatgtgttgtgtctgtatacatgaattggagttttttttttttttggctttgagttaatgagttttgttatttattttttttatatggaaaaaaaaatatgttaaaaaaaaacacataattttttaaaaaatgaattaaaaatatattagaatgtatcataaaaattatattatgttcataagaatgtgttaggaggtgcaatatataacatttggctagaccaaaatttgtgtataaataagaaagtgtacgaattgtatagatagtagtattaaagagagcttcaaaagtggacttattcttgtacaagaaaggaagttgtctagcataaataaaattgagttgtaagtttctcttttgaagggaatcgcattgtggatgtaattgactaggtttttttttattttgaaacattaattgactcaatttgattaatagaaattatctttcttgataaaaaagaataataaagcaaattaatttaaaagataattattgaaaaatcgt

SEQ ID NO: 250703 - DNA, 1342 bp, Cannabis indica
ttcaataaaatagaaaatggtaaatacatacccttttcttattttacaatttaatttaagtaaaaataacaaaatttaaaagttaacaaaaataccttatttccctttttaaaatatcatgattatagtaatcttattctaaataaggtcaagttaccaaataaagaaattcttctcacggccacaaatgagccactgccacctcctctctcgtccataatgcttctcaaatattacactactaccctcccctcccctctcccaaatcacaatcctaacaatttcatcctcgacaatccaataaagaatgaaaaaaaaagacacttagagccttctcttcccaatcgatgcccttctctctcattccctctccttgatccgtacaacttcagtttcctcatccctttttctgttcatcggccatctctgtcattggtgggttctaggcaagtttcagttctcttcttcgtctatggtaagttgttatgttacttcattaatttcttttaatcattgatagtttatgggtgattgctaatatggagagaaagtttataggtgattgatagtttatcggttatgatttgaatgtttgaatctcttaattgtttattcccatatttggcgaatccacctacgccaccgaagccaccacagaagccccaaagctttagcttccatgatcagacatgggaggacccttatagttggatgtcaagcttgaatgacaaagtagcaatgtgtcacatggatatctacatggaacaagaggagaagtacgcggaggccgtcatgattgatacccaaagacttcagagcaagctccagtcggagatggcttctcaattggctttcgacctttccacgcctcctctccgttggggaccatggggaaaaaccgctcttgttgttgatgtttgtttatcgagaatctgatggaaattggaaattggaaattgatgaaaggagaaagaatcatcctcggcagaatcatacagaggaattttctcaactgagtatctgcaaacaaaaaacacagttacaaaactatacatacatggcacgacacacaaaagaatctcaagttcaatgtataaactatcaacactatcgaataggattgtgatagtatctccataacaaagatatagcatctttacatgttagtttggaattcaaaaacctttttctcaaactttaggttgtcactcaaaactctgacaccattttcttattaaaaaaattaaccagatggagcgagatagagagactgtagacatattcaacataccaaaggctcaatagcacacaataatcgggtgactcattgaaaataatgaaa

SEQ ID NO: 250704 - DNA, 583 bp, Cannabis indica
aaccatgcaacattaaatgttatttcggatctatattaataagtaaatatgattatattgaaatgagttttatttagggcataaaacccaacacatacttcttgcaaatgagatagttcatgccattaacaataggaagaatgggaaagttggttgggcggcccttaagcttgatatgtccaaagcttttgatagggttgaatgggactttatccaaagtcttatgtaccattttaatttccctgttaagtttgtttctaacattatgaagtgcctaaccactgctaccatatctttttctgttaatggagaggtttgtggcaaagtctttcctaccagaggtttaaggcaaggagatcctctttctccttacctttttatactctgttctgaaggactctctgcactccttcattcttctcagtgacaaggggcccttaagggtgttgctatctctcgcactgctccttctcttactcatcttttgtttgcagatgatagtattctcttttgtatggctacaccgtcttcttgtgtagctttgaattcagcccttcaaacctattctcaagcctcgggccaa

SEQ ID NO: 250705 - DNA, 816 bp, Cannabis indica
tactccactataaatatggaattatactatttgagaatatagaattatatttacaaatgtctttctagtagttcattgatataatcaatataagtagttcatcctccaatcattattagttcataattagagctagttaaaattaccgttttaccattctaattatctcttgagttccttatgtaccattaattcaatgtgaatagttaatctataatttcaattatagatttggatctaagtgtaatcactctcagaattaacactataagtgaactaatattcaatcatttcagaagcttggattccactattgtataacatgttctcaacctctcatgttattagattctcgaaacagaagttgtaagaattatcttctctaaaaaactttaacgagtaaatcaaagaacctaatgagcacaaacaggagttcataaacacgcaggagtcataccgatctactaatgatcatcgttgtgatatgaataactcttttatgataaacgatacgttgataaaagatgttaatttatattggtccagtcatgcataatcaaatcatagacattatctttactaaatgtctatccacatatgtgattcgaaataaaattacatgcactaaagtataatgcttagtaaatcgtacttagtaatttcatattaaagatttcatagtttaatacactaccaacttattttattcatatagtatgatcttaattctcttgcacttccttacaagattataccttctctatatgaatatagaatttttagatatttattaattatatttatataatttatata

SEQ ID NO: 250706 - DNA, 957 bp, Cannabis indica
agcttcagcaatattggcacttcatgcaaaagattgcagagtttctggtccttggaatgatttgtcgaatctatagaagcatttggcaactgtgtgtcccaacttatggcacaattgatactgaacaatttggccccaaggtgattattgattcttgccataagtcgaagctcctctgttggatgtttgagtgccacaagattgacctcttcgagttttaggagaaggtgcttgttgaccaaatccagggggaggatgatgagcagagtagtgcatactactattctgtagctggtttcctcaagacatataattgaagccaggattagtcgaattggaaagataaggtcaagaaaaggtacctctaccactagtgaatggtttggtatgagcaagatttgctttaggcttggagatatccagttcctgagctggtttttccaggcgaacttcttgtgccatgagtaaggcttcaatttcagcaacactatagttgtcagttcttgtgttgactgatgtaatgaacacattgtagtcactagtgaggccgttaaagattgcttcaatgtgttcagaaggagagatcatgtggctaatagatgctagaagatcgacttatcttttgattttgagaaggtaatcacccagggaaccttgcattttggcatttcgaagcagagtacggtactgtccaatattagctctgttcaaagctgtgtagtattctttcaaggtgatccagatctgagatgtcgtaacataccctagcattcgtgtgagaattttcttagacatggacgataatagccaagagacgagtatgctatcctgctgctcctagtcttcctactcagggctgactgtattggaatgtcgatctgcttcagagagaaactttggaggagtgagtagtggatcgagaaatcgctgtaatcgacttcctttgattgctgcaaa

SEQ ID NO: 250707 - DNA, 1279 bp, Cannabis indica
catgttggaaatgagaaatgtgagttgtgaatttgacttctttaacttcatggatctcagttatagtgaaaaactagataaacaattgaaatagaatcagaatcagataagtagaacccaaagccccatgccatttgtcaatctaggctctgaataccctaatttcgagctctcaggtttttgttttgatacttccaagattcttgaacatgaggacaaggcctcttaccccatttttgaccattccatattcattagtcgaatcacatttggtatttacatgatcgaaaccaacagaccaagctgattgtcaaactaggtgttgggcccagcactaggtcaacctgggcgctgggccttgcttccaggggctcaagtttgtggttttctctgagtttgcttgaatctttattattttttatggcaaaaaaatgctcggaccacatttccgagaacttaattggcaacttagccattaagtcccaattatggccctttaaaagttctatttggtcctcgaaaacagttgaatgttaatcttttctaaaaatggagaaggtgatcaaaagagttctcagaaaacatcatcagaatcggcccaggttgacaaaatttcaatctgggtgttgggccagccctaagtgttatcctaggccctgggccttgcttctggaccccaagaagtgttgtttcttcctttaaagtacctatttccccgtttttgatgaagactaagttgatgcaaaaatcggatcgttgatctgatacttggaagacacccagattgacaaattgtcaacataggcactaaggtgcccgggcaccgtgtgctgcgggtgctcaaaaataaacttgctcccaaatctaattatgatgcctcaaaatgtatgttgtatgtctagttgatgtcccattaaaaagtccatttgcactaagacggtcacagaaactaaaaacctagttgaaaatgtcaacctgggtgccaagtgaaacccttagggcacaggttaggctttcggggtttaggttcatgtaatttcagcttctgaggcttggatttgattactccatgtcttcatggtatatattactgaaagatagtgagttgaattcaagttattgaagtccgaaacttccatcctaaagctcttgaagtcaacatgcgcgcagggctagggacccctcctaggttgactgctatgactcgggtctactcagctccgtgatgtcatccttcttgacacgtgtcaaacattgatatccacatcatcagggaaag

SEQ ID NO: 250708 - DNA, 548 bp, Cannabis indica
attttaaatgcataatttaaaaagataaaaaaaatacttgaaatatagcagtgggttttaaaaatcaaaatgcaatagcgaatgatcttttatttgtaaaacaaattacaataagtaaataatttcaaataatacatttccactgtgtttagatttattaactgcttaaaataaaatcaaggcaccgtcggcgttctagatcgttttcccatcgtagccgttcacagtatacgtaccagaactcaccctactcactatacgtacttccctgtctaatacctgttgggggaaagtaagggggtgagctaaaagttcagtaaaaaaatacttattatacaataccatacaatatcacacatatcattaatttatactaaccaagttttaataatatcatacacgttattttataaccataaccagataacgctacacatgttgggggaaagtaatcctaccagaactcaccctgctcactatacgtacttccctgtctaatacctgtttggggaaaataaggggatgagctaaaagctcagtaaggaaat

SEQ ID NO: 250709 - DNA, 615 bp, Cannabis indica
taaaataatttccaacaatcaatgctaataagcattccatacgtacacagacataacatccattattcataacctatcatacttttctaataactcacacatttcaagtaagcaaataattcaagcatttagctaataatctaataatcaactaacaattaacacttactataccatgagtcgaacgagtcttcgcaaccaatgtacatatccaaccagtcttcaggatctttaaaccttggtcgctcttataccatattgtaatgccctaacccataaaggcgccacatgtgtgcttttataaagcagtttataataataatctatcagtttaagaaaagtgtggttaaattaaaaatttagataaaattgaattaaaacttagctttcattcaaaatactgctagattcgaggatcctcttatttataaacttttacaacatgtcacaaaataactattacaaaatggggttacattttcaaaatacgatcaaaaggtggatcatgtccactgaaagtcaagacacaacagttgatatgtacatcatcgggagacctctgactcatggttggtccgatttctccttccttttacttgcatcacgaagcacccg

SEQ ID NO: 250710 - DNA, 598 bp, Cannabis indica
tgtagcatattttgcatgatgcgaaataaggtagcatagtttaagtggataaatctaatttaagtagattgataaatttctcatgtcttaatgcgtaagattcagtccgatattgacataattcaagacatgcatgttatttatttggcaccaacaaaacttttgaaatttgacagttacaaacttacaactcttgatcattctatcacttttggttgagtcccacaaatcacatccattggtcgaaaactttctggtctgttattacattatttacaaccaatatttttactctctcacaaaacaaaaaatgagtaatgctatttgttgtactattatgctcagttaagatttagtaatatgactctatatgtttgatctttgatagctagaatgatattttatatacttaattatttacatgattaaaggatatttcttctccaattcatttattatttaatggaataacagttttttcttctcattttaaaaccttaaaccaatataaacagtgaaaatttgattttttgttggataaagttctaaaaaacttgagaagaagttgtatttagttgactaagaaaagtaatgtatc

SEQ ID NO: 250711 - DNA, 2365 bp, Cannabis indica
aaaaaataaaaaataaaagtaattttcgtccatctatacatttttgtttaattaattaagttttaacttttcttaaaaaaaatctaaatattttgtttgaatatgagacaatgaaactctttagaattaatcatttttttctcccacctttttttttaaaaaaaatgtacattattttatattagggtatttttttaacaatttaaaatgtgtataattaaccttgattattatagggctatttaccaagaagaagatgagaaaagacaaaaaggtctaaaaataagcaaagacataatggaaataggaggtgatgccatcaaaaccaacatcacaacattgggcccactagtccttcctttatcggaacaactcctcttttttgccactctcctttggacccaccttttcggcggtagggctaccacatccgccgaaaagggtagctctcctcatccccgaccatcgctatctcctgccacaactaagaaaccgtacatcccagactacaaactcgcgtttgagcacttttgtgtgcatgctgcgagcaaacatgtgctcgacgagctacaaaaaaatttagggcttagctcgggccatgtggaggcatcgagaatgaccctccaccgatttgggaacacatcgagtagtagcatatggtacgaattgtcctatctcgaggccaaggaaaaagtcaaaagaggagaccgtgtttggatgttgtcgttcggatctggttttaagtgcaatagccttgtttggaggtcgcttaagcgtattcgaaagcctttgaggaataatccttggcttgattgcattgataggtatccaatcaataactaattttcttaattgactaattaattaaggaaattaataatagtatgttataattattaataattattattagatcatgcatgcagggaattaatagtacttatcaacaagattgtgatatagatataatatattatattttgtgtgaggttggattttgaacatatatactacatagttatatgtagaacatatattttattattttaagtatgttatatatacatagatgatttggattataatgtaatatgcaatattttcagatttaatttatatttctttcatcatcaatagtgatgaattttttgctatatcaagctacatatttgtggaaatgataatgattaattattgttgatttttgtttaaagtacttgtggatattgatcagaatattattctcaaacaaagatacgattggttgaaattagttaccacgtgttaagtttgtgtgttcacatatttaggcccgattttgaacataagtgggcaaagttcgtgcttagagttcatttagcctatgggcccaataaaactccctttttaaaaatacacatatatttttttttactaattttaaaaatattatatttccttctaaatgaaggtccaatttagttttttcatatcacacactaaaattcaaggccggcgctatatatatcaatactcatctttaaaagataattcataactgtagttgtgtatttatttggaagttgaatatgattttaccattatattctcgtctatatttaatttgttatacaattataattagatttgtggtgcctctaacatagaagaagaaacaaaaattagtgaaaaatcctatgggataccgtaaggtgtcaagtcatataagatattttatattgttatttaagggtattcgtcaaaccgctcaaactgttcataccgcaccacacatcaagcaataaggggatcttgtcttcccatagcattgattgtgacagtcagtagtcctgtgatccgtaaaggaaaatatcgagtaagatatacaatcccacatcgatcgcttggggaaggtcaagtaggatgattttaagactgtgtaggtatgagactacatagttgaagagggcataaatagattgattagtactacctatatcaacaagatgcatcttgtttttcagtagcctatcacgaaagaactacacggttaagtgtgcttgatcaggggcaatttcaagatgggtgacctcccagaaaattttcttaagaagcgtgcgagtaaggacaaagcatgttgaaaacactcgtgttggtctgtaggatcaatcgtcaatccaggaagcagccagggtggcgtactcttgattaaaattatcattgcgtgggtgtaatgacctaataaaagcttgaagcgggaacgttacataaaaaaataataaaaaaaccataaaaagattaaaaaaaatagtaaataatataaagatcattcataaaaattactagctaatatttaccaataataataataataaataatcgtcat

SEQ ID NO: 250712 - DNA, 2368 bp, Cannabis indica
tgtctatctattctgtcttgggttatggagggtatagctgataacatggcaaatgtgctctctctcactgagagagaagctgttgttcacgaacacattgaggaagccatgaggaatgcttggatcactcgtgctcctatcaccttctctgaatatggaaatggaatgttcatggttgaatttggttgtgaaggggacatgaagagagttattgaaggccagccgtggcactttgatcactctcttgtcactagtgccaatcctgctggccttgacactcttctccctaaccagattagatactcccccttttggatccaagttcactccattccttttggcatgaagtcttacaaacttgccaaaatgattggggatgaagttggtgacttccttgaggctgataaaatgacccttcttaaagcttctggtttattccttcgaatccgtgtcttgcttgatgtctctaagcctattcctagaggcatcttaattgattttcgcaacattcacaaagagaaatggcttaacttcaagtttgaaaaccttcccaatatctgttttcactgtggtatgtttgatcacacccttactaagtgtgtctcttacctgaagaagtgtgatgaatttgcctaccctcctcctctacactacaaaatccctttgaaagctcctgccaaatctaactttaagcgaaatccgtttgacctatccaattctcatcctctggatgaactgccaatctctcaaagtaatgttgatcaaagtcttgctgctgctgtgaatcagtttcttaccacccaagatgcaggggctgattcttcctcctctggtgccatccctggggctgatggggctgtttcctctggctttgttggaaacaaccctgttcctccccctgaaccctctacttttgagagacaatccattgccccaactttcaaccctggttttaattgccctgctcctgtggatgccttctgtgaggctaaccaaactgctttccctacggcagccatggccgtgcacactaatgctgaacatgatcctgttcctgtccaagacattgaaaggatcactgagaaggccaagggtaaagcggttgctggtgccaaaagatctgctttcctccctcactctgttatggttggagattctcttagaaacatcctcaaaagagctcgtgctggacctgtgatcaatgaagcttccaatgatgcggactctccctttcatcaggcgggtgttgctgagcaaccccgcccaaaaaaatgagtcttatgagttggaatgcccgtggattagggagttcccgggcattccgtaatctctcccttgttgtaaagaatcataggcctagtttactttttgttatggagtctaaacttttagctggtcactgtgacagttttagaactagactctcttttgataatgcttttgaagttcctcggtgtggtcttagtggtggacttttgttattttggactaatgatgttaatgtaaatattttaaattactcttccaaccacattgaatgtattattacctttgaggataatataactactcacttttcttgcttttatggttctccctatgctcatgataaaactcatacttggactctcattgataggctctttgataatgcccctcttcttccttggttagttttaggtgattttaatgactatctctctgctaatgatagaagtagtacttctaatattcctcactatgctatggttaatttccaggcttttgtcaataaacattctttagttcctattcactttgttggtaataagtacacctggaagcatggttcaacctatgagcggttggattgggggatagccaatgataaatggtttcatcactatccccaggctctcctccaccatcttagtttttatggttcggaccacagggtgttaaaagttgtcctttctgatgatagtatgcataaaactaaaaacaaaagatttctttttgaaaaccattggctcactgaaccctctttctactccacggttgctgattcttggtcctcttcaaatctcgattccaggtctgaccctatatcgagttttcttaagaatcaaagcaactgtattcatgccattaagaattggaataaatcctatactagtctttcttataggatcaatgaaattgatgggaagctcagcaacctttcttcctctctccctgcttctcctgatcagttgcatgagatctcaaatctccaatcccatcttgatagccttctatataaacaagaaattctctggaaacagcgctccaaagtccattggcttcgtgctggggataagaacaccaagtttttccatcagaaagcttc

SEQ ID NO: 250713 - DNA, 795 bp, Cannabis indica
ttgccaaaaacctcggtcaacacctaataatctctctctatctcgctctttcccactattgtcggttgccccaccgcctgaaggtattggtttttttctttcttcttttaccctctctctctttctctttttatttgtctcaccatttttctttctttacaaataatttttttaaggaaaaaattatttgtgtcaatattattatggactgttaatatcattctggactatttgtgttgaatcagactctctttttatattaatcattttccaactgaaaaagaaataaaaaaattatatatatggcttcagttatttgcctaatagtagaagccataagatttgtagatccacatatgtatgcccctatagtttcagttattagccaaataaacgaagtcggagtcccttttgccattaatttttttcaaccccctttgctttacctttagttgcgaattttatcaaaaccgaaactaaataataactgaagctaaatggtcattttgtagtagtggaatgagctaccaattttacttctaattaattagtaattttttttatataattattaaattaaaatatgtaaaaactcatattcaattacatgaataataatgaatgacacattgtgacattgctggaacataccactgatacccttgaccatttctctaagtaccactgcaataaaatagctacttttagtgacaaccttttagtcacaacataatttttttgtgattacatgtgacttttaatcacaacaaagtgttatttgtgactaaaacatag

SEQ ID NO: 250714 - DNA, 778 bp, Cannabis indica
catcatggctggaaaccaagcaaacggaggtgttaacaacgaatccatcaacatcggaatgatgaacattccgttatctggagttagaacgccacctggcggagtagggagaggtaatgtcagacctctcaatctattccctgaaaccgctagtccccaagtcggagaaacatccacactagtagcaacaatggggcactttccaccgatcacttcggcggtagtatccgagggaatcttccagctcatcactgaccagtatactgcgatccaagaccaattacgcgccctgcaggtcaaggtggatggacagaacagggcccgacgccccctcgagcccccactactcgcacaaaaaaccctcaggtaacgaattctaggcgtcgtaataaccgtgttcgcagagaacaaaggaccaaccccgaaggtgtggacctgaatcagccaacctcaagagacaaatatgcgaggtatcccaaccaggagacgcagatcgatgaagaccccgaacgacgcaatcctcacagcaggccttcacgagacaacgacattgtaaagaccgcttagtttaatttggaaattagcagttaattatgtttaattatggaaaattatttatagatatttaaataattatttatattgttatttttgaattctgaaatgcattttatgtcatatagtgaacttcataattttacatttccggtgcccggtaacatgggactcggtgttgggctcagtaaaatcatgacttagtatgtttttattgtgggac

SEQ ID NO: 250715 - DNA, 1147 bp, Cannabis indica
ggtaaaataattccaacaggcacgaaatcaagagaagaagaagcaaggattttgaaaattagaaggagctctcttattttgtctagtaaagtgaattagttttatcaaggttatgaaaataagagcttatgattttctatttatatgatagttattagggttaggttagaatttaaatataaaattatatatatataaaaaaaaagataaaatggctttagtttttaaaccccatggccgaaatccttagtgggcccattgagtttcaattttgctactttatttaaacttatctttcttttctcaaatgtcatattttaattctatctctataaatgtcaattttatctatttaataattataattaatttctaaataaatttgttacttaacttatttattaattagacctttcaaagtctcttaattaataaacaaaccctaaaatctcttttattctcaaataagcccttgcttagtgaaaattcataaacaagacatagtcttatttagaattctaattgattaattaaaatcaattaactgagtctacaagataatattatctcaacttgtgcggggaccatgggcaagatgagatggggcagtttaagaagaacaaagtgtggatcttggtccctaaaccaaaaggcataaatatcattgggactaagtggatttttaagaaataatttgatgaatttggcacttttatcaagaacaaggctgggcttgttactcgggggtataatcaagttaatggagtggattttgaggaaacctttgcaccagtggctcggcttgaatctattcgattactacttgttgtggcatgtttcttaaagttcaaactgcaccaaatggatgtgaaaagttcttttcttaatggttttatataagaagaggtgtatgtgaaacaaccccaaggttttgagaatcccaagtatcctgatcatgtgtataaactcaagaaggccttatatggcctcgaggaagctcctaaagcatggtatgacaagttaactactttccttctttctcatgagtttgtgagaggccctgttgataatactttatttattaagaatttgtcaaccaggtatttttgtttgtctcaaacttatgctgatgacattatttttgggt

SEQ ID NO: 250716 - DNA, 577 bp, Cannabis indica
ttaggattggttagtgttacttcgaattttggattgctcaacttgatttcagtgttctatctaaaaccattactcatttggatgtgagcaggagaaagagcttcttgaaaggcataatgcatggcttaatgatgagttgacgtccaaagtagacaatcttattgagttgcggagaaagcatgctgatcttgaggcagatctatcttcaaagcttgcagatgtaagttttccttttacattattttctaatgttttgtttggctagtaaaatatttgtatatctgtgcatgataggtaatgtgtgggtccttactatctttatggtttagaatcctaacttccttatattttcaggctgagagacaacttgaagagtgttctacctctctaaattggaataaggaaagggcaagagagcttgaaacaaagctaaaatcattggaggaggtaaaatgttgagaaacgaaattcggttgcatctcattccttattagttgggtattttatattttaaattctaatcatgtgtaggaattatgctcaactaaagatgttgcttcagcaaacgaggaacaac

SEQ ID NO: 250717 - DNA, 2858 bp, Cannabis indica
atgagaatttccacaatgaataacatctttttttcgttttttttttcctttttttttggatgtcacatcttcaatgaaaacaattcacatcttatgggatgatcaattattgtgggacaactagtatagtacattgtatgttattacataaagaaatgtgagcatataaattaaagtagaattggagaaggacaaatcatatgcatatgtagcagaataacttttaaaattaaattagattcacattccaaactcagtttggtttgggtatacaattctctgagcaagaagattgagctggaatgaaaatggtggcagtgaagtaatgtttatctaaatatttagttattgttatataatattgtattgttttatttaatgtatgtttagtattactagcattaatgtgtcgtattaaaaaatatttggtttatgttagtttaaaaaataattaaataaaatatataatttttatagtatcatatgtgtaagcagcccgattcaaatctcttgggcatccatttacggacttataattcttataagtgtactttgtctttggcatatgtaatattcatcaatccaattgagacattagttgtttaggcttatacatatactattagaattatcacatttaacttttctcaaataatgtgatattacacaacttacctgatatttttcttgcagatcacataattctgacggccaaatatgtaatgctaatcctgactctacccttcgaccatgatcatgactcctagtctgtctcttaatccttacttgatgcaggagacggacttgaaccccaaccctgatccagactcaaactcgaaactaaaaccaaacctagacctcgaaccttgactttaaccatacaccctacatcctacaccttgcacctcaaaccctgagaccagatcccaatcctgacagtgtaccccaacctcggacccaaactctaaacttggatctgtaattgaaactcaatagtgaccatagtgtaccctagactcaaaccttgaccttaatcttgacccgcgacccaaacctcgacctcgaccctctataccaagacccaaacccaattccaaccttaattaacactgagacaccgaaattgaccgcaatcacaatttttctatgatacaaacctaagttcataaatatacttcaatacaaacgtatatagatcattaatttattatgtattgaataatagaatttgtattctattaaaatttatgaacacaataattaaacgacaccaaattcaatccaaatttagttaaatgattatttaatataatttcctcttatatgtcatgtcaaagtaagtatataaaatagtatgatttttataaaactaaataaataaatatgagcaatgacacaatgaataacaactttttctttttctttttcttccttttttttttttttttggctgtcttgtctttaatgaacgattcacatcttgttggatgatcaattattgtgggacaactagtaaaataatacattgtatgttattgcataaagaaatgtgagcatataaattaaagtagaattggagaaggacaaatcacatgcataagtattagactaactttttagaataacttttaaaattaaattagattcacattccaaacctcgcaagaaaatttgaaagaaaaaaaaaaagaaaaaaagtagactggatggtaaagtaaagtggacagaaattgcttctccctttacctaaaaataatatcaaaacttcttattatcttcttttctttttccaggaaattctagagggcaccattgtttatgggctcctatctctttcagttacatataacttgatagtgtatgactcttggatactggatagtctatttattttaagagaaaaataaatgatttacatagtaaaaaaatatagttcaaacaacttatttcccacatttattataaaaaaaaaactgagtataataaaatatttaaacaatctgatctctctcactctcatactctcatattcgaacacttagtcatcacatatatataatggaattacgcaaagctaatcaatgaatactaaaatataacaaaacaaatgagtagataaattcatctcaatcaaacaaacatgttgagaaatctcaaaactaattgtgatgagtggagtagctcatgttcttatatatatatatgattcaatacttttatatttaatccaaggagaacaatgttctccaatatcccccctcaagatggtggctattttttgcttcaccaatcttgaatcaccttatcacaagccatgccatttccttgcttatttttgttcggatatcaagcgtctttgcaccatctagatctcatgcggctagctaaccatctggataaatgtggatcgaaagcgctagagatatagctctgataccatgttaagaattatggggttccatctcaaaactaattggtgatagcccatgttattatatatggctcaatactttcacatttaatccatatgggacaatgttctttattatccctcctcaagatggtggctatttttgctcaccaatttttaattactttatcataagtagtgtcatttgctctaataccatgttgagaattatggggttccatctcaaaatccattagtgatgagtggagtagtccatgttcttatatatggttcaatacttttacatttaatccatgtgagacaatgttctccaataatacagtttctcaaaaaacaaaattatctttgcaagaaaaacaaaggtagagcattcaaagctgttgagataataactgatgctgtaataccataaggtgttgtcaagctt

SEQ ID NO: 250718 - DNA, 686 bp, Cannabis indica
ttaagagagacgaaaggcttcatgggttccttttactattggactaagcttggaagcttaatgggccaacaaacaattgggcttttttttttttttaaaaaaaaaaaaaaaacgaattgggctgcaattagtttttcagttttttatatttgtacttgtttttagttgtattttttttatttctaccaccttgaggacaaggtgattttgaagggtgagaaagtgttacactataaaatagtgtaggggcttagtagtaatttctacaaagtgtgaatcactataaatatgttattgtgtagctattatgggatatgaaatgagtaaatagaactttggttcatttgggagattggcacggtctcgaagagtgcattttagagatttgtcctgtctcgaagaggactattatctaacatgctgttcttcaatattttgttcagaggcatcctaatctgcaatatttggttgaggactcaagtgctcaagattaacagtagctgagtttgtgttcacttacctcttgctgactttgagtggcagatggtgttccaagggaaggtgtagatggattgttggagttgttatcagctatagaggtgacattaggttgggaaaatttagtgaagtggatgtttggaagctgactccaatgagtggtctggactatgatttttttttttttt

SEQ ID NO: 250719 - DNA, 550 bp, Cannabis indica
tctaatgccacaagatcttagaattttccctacataaggggaaattgatctaactctagattcgatcgattcttcctcgaatgtaacggtaggattttggggcatcttagatttacgagctttaggtcgcatgagtttaaattccaagtcacctggtgcaaaaacaacaatgacttatgaaaaaaacaatggccttgctaagggtatatttactaatttaggctactcaggccaagttgcttcttgtatacaatgacatttatcctctatgacttcattcaaaatttgcatatagtaggtggatactcttcctaattggtcctaatgaggtgcttctaaatttttttcatcattgatttcaagtatggatgggtttatcaatttaaggctttaaaactatggcttgaaattgaggacagtttgattctaaaggttctaggaatgcaaattttggattgaattgggacgtggtattgtcacaaagtataatgccctaaaaaatttcttaagaagtataacatagttaaaacccaagacctgcgaatcatat

SEQ ID NO: 250720 - DNA, 649 bp, Cannabis indica
acaatacaataaaataaactcattattattttacaaaaattaaataatatatattatatatatatatatttatatgaactcatgataacccacgtagctatgatatttaaattataatgacaataaaagtgaagccacacacattagattttgtacattatcccatttatgattttcattaatttatattttaaagatgcgcatttattttattattttattattattgtgttttttcttgttcttgttaattataactatctgtgaacatatttattctatttataattgaatgaatatctttatagttttatatatataaatattgggacacgattttgtccaatgatgtacttttacagattgtatttcatatgagtctcaagatacattagatgagtctcacggtatgttattatttttttaaccctaattacccctaaatcaactctcagccctcagatcaaataactttttcatttaacggctgccgtacatcacggaatacattccgtgaaattacatcacggtcgtgtctatataaatattaatattatttattttaaattaatttaaatatataaatattaatatatagtattatttgtaatattataattttttattattgtttttatgttaacattat

SEQ ID NO: 250721 - DNA, 1148 bp, Cannabis indica
tggacactcccacaatgtctcacaatagaatatcaagaggccaatctagttcatggcctcggatacaatatcaaatcggcggaaagcctctgtgactcttgagtcgcgaagacttggggggtaaatataatccgtatttttggatagctagcacgtgagccattatgaaggccaattagagataccaagttgattcactaggtccataagggccaattacgcgacccgttctttaaagatgggcagaaccaaactcaaggtccagtttctacaaacatttctcatcaacaaagttagacacatggtccaacttccttgatcacttattaacaatagattctaacactaaatcccgaatcaacagttagcacttatcaagtagaacaacataaactcaagacagataaccttatgggtcatccgagaatagaatatgaaagggcatctgtgaccacataatgtccttgaagccgacccacgtggcactcttctgacacgatcccaagaaataagggggcttgtcccttgtgtcacactttggaaaggctcacaacaaaaaggaaatcacatttttggcctcacaacatagccaaagagctcaatagcagtgactcgtggacaaagactcgttaatatcccaaccacgtaaaaattagtttattcttaatcatacttcttttagctaatatgtatttttctaaaaatctcagtaaacatcaattgatcctcccccattcccaaaggtaaacaatacaatcctcctgatgagttcatattttgtcttataaatttagccaatctatgtattaatattcttaaattaattctttaaattatcaattagtgtgattataatttattaagtcaatttaaagactaatcatgcatttggagtcatttggagggatgtatgcatattgtggtggaaaatagtaaaagccgacaagctcggttttacaaggtggaacttaattataatactggatgatcctagaagcataattggacttagagctcgacatgaaaattttagatctcattcttatctctccggaacattttgaattgtccgattccgagtaatatcgagagagatatggccaaaacactatcagtcatcgcaggaggaaatttctgaagaaaaaaaa

SEQ ID NO: 250722 - DNA, 891 bp, Cannabis indica
cttccaaagtttaccacttcttgatgttaacccctttaacaatgggatcattagaggtggtggtttcaaccatatgttgcccttgtgcattgaattcaggttgggaaggaagtctgcctttctcagaattgccaaggatgtgtacaattttgagaattgaatttttatctcttggacatcttccttcaattggcgatttattttggtttgttcctcaatgaatgcacgaatggtattttcaagggagttcccttgttgttgagtattgtattggggtgcatgatatgcctttggaggttgagcttgattttcatttctccattgtcctccagatgtttgagcttggttggaattatctctccaactgaaattcgggtggtttctccaaccagggttgtacgcatgggagaatggcttgttatattgccctaaggcattgcattgctcctcatgaacccccctcatttctttgtagactaagcagtccttagctaaatgctcattttctccacaaacgaaacaaggttcgagtggtctggtttgtgcttgggcaaccatacgctctttttggccatctttatttgaaaggatttcaacttgctttctcaaagctttgacttgggcctttatactgtcctcttcccgcaattggtaaatcccagctggtcgatttctgttggtgctttcagcagcacttggaccagtccatgtgtgagatttttcagcgagcccaatgagaaactcaagagcttcttcaggctcatattgcaggaattcaccattgcacatcgactcaactaactcacgctcacgacccgtgaggcctccgtagaagtagctcacgattctccaactttcatacccatgatatggacactgacttaagagatc

SEQ ID NO: 250723 - DNA, 434 bp, Cannabis indica
cctaagcaataccgaagtgtcattggagcattacagtatttaaccatgacacagcctgatatctcattcgccgtcaacaagctcagccagttcttaaaagctcccaccactgatcatggggagcttgcaagcgtgtgctgagatatttagcaggcaccacacatctcgggttgtatttttctccaaccacccttttggatcttcaaggttataccgatgcagattggggaggctcctatgatgatcgcaaatctatatctggctattgtgtgttcttaagccaaaatttgatcagctggtgttccaaaaagcaaagtgtagtagcccggtctagcaccgaatctgaatacagagcccttgctctggccatgtctgaacttacttggattcaatccctcctctctgagttgtctatctctcttcctcaatgtcct

SEQ ID NO: 250724 - DNA, 657 bp, Cannabis indica
gcatatttttccatttgtttccattggaggtatccccccgcctatgagaatttttactctcattcaccacacaatgcaccaaatatggcagaatattcatttgttcttgcaccagaatttacaccagctgctgcagaaaatttgaattcttctgcaccaggtactgtaacaggtgaaatctctcctctcaattcatttaatcagttttctgatcagtttttgcagcaatctgccactgttccagcctcaggtgagttgtctcaacctgaatttgttgagccgactgtcctttctgatctgagtgctacaccagatttgtctcctaataatatttcgcataccagatcaagaagagcagttaacaaaccatcttacttgaatgaatatcattgttatcttgcttctaccgatttatctaagattgctaaagtctcttttgtcaccactcaccctttgtctcaggttattggttacaacaagctgtcttcagcatttcgagctgctgttctggccatttcgagtcactctgaacctgaattcttccaccaagctcatggaatcccggtttgggataatgctatggacactgagatagaggctctagagaagaatcatacatggattattgtctctctacccgaaggacaccatgtcatt

SEQ ID NO: 250725 - DNA, 751 bp, Cannabis indica
aacatacatgaatatgaaaaaaattagactaaaaaattcttctgcatgccgaaacaaattaaggatgtatcaatacatccgttttaaggggtgcattgtagaatcaccctatgacattaacataacaataacaaaacttctcaaaaaatattaaaaaaataataaaaacataaaacaaatagcttaataaaattccaaaaaaaaaaaaactgacaaagaaattctcaaagaaaaaatatggaaaattgatgtgttgtgagttcagtcatttcattccccaaaagaaaaacattaaacttttatttcggtatacacgacatggaatgattacaaaatccccgctattcttttatattaataaagtaaagtgtatttttataaataatttaaaaaatgcttatccccaagtaattttctcaaaaaaaaatatattttgtagtatttaagctagactacttttgtgctgtcttgttttgtgtttctcaattctcaccgctctgtacgagttgtatttatataatctttagtatactttatttatttatttatttttttatttttgtcagaaatcttcttaatttgaatactaactaaattaaccctgaaaaataaaattaaaaactggagtgaaacactagctatcttaggttaatctgcatgttttgattgtttgttaatttacagcacataatgaagtgcacacaatccataataatgtcaacatgtagtaatatatattttaattgaataa

SEQ ID NO: 250726 - DNA, 1168 bp, Cannabis indica
tttgggtttttttctagtgactgtgcttgttttgtggcatcgtttgctgaatacttcattgatatgaaaccaattccacccatatttgatgttgagaaacaccgcgataggcttgctgtgttgttcttcaagtatgctcgcatgaaagaagtgatagtacttttttgttttattgatggtgaagatgaggctcctccaaagggtccacagaagattttgttttagttatgtctttgttgtttcttgcaatagtactttttatttagcttttgttttttctattatcagattatgttgacaatcatagacaagttgttgtttctagcatgtgtttttttttattgaaattgcttatattttcgtaactagttttagatttttagtttttatattcagtttaacccacgaaagcatctcattaacaacctaattacaaccatcatacaaacaactaaacttgcattttaatcacttatgtaattttgtttggtacatataaatttcaactttcttgcaaacatttaagtatttaactataatatttatgtcatttatatattaatgatcataatatcaattctctattatcaatatatctccatataaaaagttttagttaaaaataacgaaacaaccaatagtaataatcagtatgtttatctaaatgtttcagtatagttgtttttggttgctgtatagttttttgtacttctatgctataattcttctgcaggtctttttgttatgtcccttttgtccacacttgccacacttgttttgcttctttgtttcccaagcagccgccattcttcttttcctcggccttccagacttgatactttcttttggaggcaacactatgatgtgttcaaaaaaatttggtagttcccattctctaatgtttccaactgggcatactatttcttcatatgtttgcagccatgcttttgatgtgtagtaatgtccacagtagttttatgtgtttatgttcaagtccttcatgacgggaactgcatggttacatggaatttcatctttttgaaatcttttgcatgtgtacgtcttgtccttcaagtttactattcttgttctatctttatctatcacctcaaataggttttgatttgctggtttcacctgtatgttttttaaagcaactttaaaacaa

SEQ ID NO: 250727 - DNA, 444 bp, Cannabis indica
tttagagcgagtggatattgtatttgatcaatgcaattgttaacaagagaagaactccgattgcaccatctgcatctttgggtctccctaaagacccacagactgcagatccttatgttcctgttccacccacaactggaattcctattaacacgacagatgtgtccaatcttgtcaccataataggcaccaagtctaaccactacaagtggccaaactgacacaaacatccttgtggatctgaatagcaatcccttgcctccaagggaggaccctccagtggcgcctcctactaaaggaaggactcatgggcgacaaccccaaagaacaacaattgaatctcatctccagtactatgctggagagacaggaccaggagttggcgagcctacaaatgatgaaccccatgtggacttgggagaagatcttgttggaaattatttt

SEQ ID NO: 250728 - DNA, 1672 bp, Cannabis indica
ctaaaatcacatttgaatttaagatgtcaagttaccgcatgctcagtaggaatattgtaatgggtgtcagtttagttttagtgaggtatatatatgtgttgatcattcctattgacaattttatgggagtggaatttttttaggaatttttcttggacatgtgaagtgatattcttatgtttgttttacaatgatgagttcaagagattagtacattggttttgttcctgaaaatagtttcggtagaacttgtgaatcttctattactacattcttatgcttgaagatcaagataaggcataaatcataagtggaaaagttttttattaatattaaagtagatgtatgatcccaattgtctattcttatgtgataatcaagttatttgtgaatgcttgtaaacacgatgtatttaagatagtatatatgatgcatgtgtactctatatcacatcattgttgctacaaaatttgaagatattgatggcttcatatcagctttgaattataaatagaaagaatagaggaattaaaaccttatcttatctaaggatagtacacatgttgatcatgttaatctgtttgtccacaaagttttcatgatctacagtatcatgtataaaattttgagaaatattgagtaattgttactcctttgttaagatctccctcatatgattgtcttaaacatagtttctcaaagttttgactcctcaaagtttgatagtttttaatgtttcagaaagctttaaagtggaaatacctaaagagattaatccatgcatgcataataatattcggtcacttcttatgtgtattgtttctcaaagtggcaagtacacaataaaattgatatatggtcgtagttgtacttaagcctctttgtttaatggttattattatatttgaatgtctcctaggccaaattatgtgtagtatacatatcctatcgatatgtgttatacctaaaattcagctagaggacacgtgtcaagataaagggaatgtgaatcggtgccatatcttttatggaataactcattaattatgtaagtactggagtatatttgcaacccgctgactgtaaagtcttaggcgaggaatcaatgtacgaactagtacttagagtattaactagaaacaatatgtggctaaaaaagaatagcgaggcaccagagaagaataacacataccttggctcatgataactctatgaaaatagagttatttatattttttttgggcattaaattagctttgttctcaagtatttttaattcattttagtgacttttatttggttttatttagtttgcataaatattcattttagtattttgaaattagttttaattaattttcttaatttttatttgtttatttagtctcccaattagttaaatacaattgtttgtggtgtattaaaattttaaatgcaaactttgcatttagtattatgggcccatctatttaaaaagagaaaacaaagcaagaaggagagaaagaaattgggcataacgtgacttttaagggcttgggtatatatgcattggatatatatgctaggcatatgattgaaggagtgatagaggattataaagaaaagaggaggcggctgacagtgaagaaaagaagagaaatgaagaaaaagaagaaaaagaagaaaaaaagaa

SEQ ID NO: 250729 - DNA, 708 bp, Cannabis indica
agttcatgtaatcaatggactaaatttgtacaaattaagggagggtataaattttgatatggcttgtattattaaggccaaaaagtgaaatttcccttaataaatatgttaaatgacaattttatttgataattaattttaaattattaaataaatagttttgacatttaagtggttgaattggaaaaatagcgtttttgagaaaataaggaaaaattcgaaaaattgcaaaattgcaaagtgggggcctacatatccatggccagccacttacccctattttaccatttaattttttcaatattttaatgccaaataattctaacctaaacctaggtggttgtttataaatagatgttgctatatagattttcataaaaatacaaaaaaaaaaaactattttaaaatgtaaaaatgaaaaaacttctaataataaagcataaataataaatattaaattgataagcaacagtgtggccaataaaataaaaatatttaagagcactcacaatattagatgagctatattagtgaaagaatagagaagaaaaaggtgaaaaaataacaaaaaaaattagttatgagctattttagctcaaattttgaagaatactacaatacttctctatatgtagagaagtactattcattttttaaataatattttattattgtgtattttatttatatagtgatatttaaatgaat

SEQ ID NO: 250730 - DNA, 780 bp, Cannabis indica
ccccaagtatcacaatgaataagatcaaatttattttgagcaaaagaattttattaggaaaaggtaacttcttttgctttgccaaagggcaaacataacaaggagaatgtttgtggacattactaacagtacatttcaattgtttactcaaaagagctaatcttttctcggatagatgtcccaatcttgaatgccatagttctgctgtaacagagaggacattttctgattgagcagtagccaagatataaagaccatccaaatttctacctctgccaatctccctcttgtggagtttgtcctgtattcgaaaatcattagtagaaaactttacagaaatggaatttaaattggttaggccactcacagagatgatattgtacttgaaatgaggagcatagagaacatcagtcaatataagatctttgttaatacatacagacccactttgttgaacaaagagaaattcattatttggcaaaattaattttacttttggtataggacatacacattgaaacatgttaatgttgttgcaaatatgtctagtagctcctgaatctataatccaagattcattattaggagtaaaacaatgatttgataaaaccatacctgtagctcctgaagaggaactcggttcagtattggtcataccatttggttgatttgcaaggagattcagcagctgttggtattgagttgcactgagttggggaagcaaagtgtttgattcttcagagggacttggttcattactggtttgcacctggtttgcac

SEQ ID NO: 250731 - DNA, 733 bp, Cannabis indica
attttgtcaacatgggccaattccaaggagttttcttagacaagtcttctgggtatattctttgttttcatcaaagattaagatacaagtgtactcggtaatcaaatacaaccgtctggcagcctaaaattggatctagtgcccatattgacacctggtgctaggcccagcgcctaggttgacattttgtcaacctgggctgtttccaatcatgttttcaaaaaagtgttccgagcatttttttgtcataataaataagaaagataaaaccaaactcggggagaattccaagggcatgaaaattgaacctagtgcccaggttgacctggtgttaggcctatccccccaagttgacaattaacctggtgcgctagttttaatcactcaaatgcaaattctactccaagaattctctccgaaatggtcaaaaatgaggtaggataccctgtcctcaatttcaagaaccttggaagtatcaaaagggattcccaaaagcttgagaaagagcacccaacgccgaggtttacatgtgacctggtgtgctgggttatgtttatccaattctgagtgcatctcgagcgtttttctagtttttcatagtaactaaaagttatgaagtcaaacaagtcaaattcacaacttcatattttcctttttaggcaaagtgacttactcacaaatcgggaattttgagtcttcgaattctacaaaacatctttgaaaactggtgaac

SEQ ID NO: 250732 - DNA, 5507 bp, Cannabis indica
ttgtaggattgaatcatcgaccaaagatgttaccaacaacatcaccatctctaacagatacaccatatagagtcctatcaagttttaaataattctgcatttagataaacataactctattttccttttcacaaacagattacctggagagagtaaggatggaatataagatgattgccattgttgtaagttcaaagctctgatggtgttcttgtaatttgtggcaatcacatcattaaaagacaaatcttttcagattcagccacaaagtggatcatatattacaagtaattatagtattacacagtgagtttgaccacatttcctttataaaacctcccaaattctctatcaatctcatcagccaaagctacctcaccaaatcttctaagccctttactcaaagaaccaaccatgtattcaccatctttggaccccaacaatccactcttcttcaacattccgtaaatcctgaccgttgattccctactacctgacccaatcaccgctctcaccagtgttatcactcccttatcatcccaccgaaccccacctccagcctcctctagatcaacgattaaccggtcaatatcctccgccatgccattccttgaaagggctttgaccatggcggcatacagagacagttccggctggtattccgatcggatggtggagaacgcttggagagccaaaacgcactgatcttggcgtagaagctcgttcagggtagctatgaggtcagctttaatgagtcgagagagggttttggagactgtggtttggagatttgtggggtctgatctttggtagcgtttgagggtttggacagcttgaatggcttctatgcttaggactcggcctttgacgagtggtcctctgttactccgtggaccgcaccgtatcggaacgtaggttgaaaagagtgtttttgttgggtttgggttttgcgagaaaaatttgaaggaacgatgttcggtttgagtgaagagaagtcgccatgtatgagtactaggataaaaaccaagggttggaaatggaatggactcgaatccagtagcgttttaattaaaaatacatacatatttatttttaactttaataaaaaaattaaaaaagaaccgtcgacagcaggattcgaacctgcgcaggcaaagcccaacagatttcgagtctgtctccttaaccactcggacatatcgacgaatgtataaccttgcaaaaataataaatatattgttacttctacaatgcactcctttcaaaatattaattggactgatacactctctatccagaattttttttttaattcaattattttttcatattcttatatattatagttatttaaaatattctataaaattttaaaaaattcaaaataatttacaatatagaatgcagtgtaaaataaaataattacgcatacaatatattatttgaactctgttttcggtgtgttaaatttgttgaagttcttaaaattttaaagaaagtcttagataactataaagtacataattatgagaaaaaatttaactaaaaaattattttagatacataaatcgagttttagaaaatgcatcactttctcaaagtttttaattacaggccctaaatgtttttttttttttagtatgatactagcttgtactaatatgaaatgtccaattaatattagtattaattttaaaaatactagcttctgtaccctacaaaaaaaaaaattactagcttccattccatgtacatatttaccgagacattacaactgtcaaaatgatgtcaaatttgtatttaaagaaatttgaattcaaaagacaatttgtgcatacatttttttttttctttacattacaagcttttctgtaaatgaacatacaacataagaagagagacaacagaaaactagcacacacttctttacaggaacatagtcaacatacatacatatatatttttatatatatagaagatgatatataggtataaccatttatttgtcaccgaggccgagtgagctgaatcccaagttgatccatagaccatcaagcatcatgctcagaccattctttcaaggttggtgtagcaactccaacattcttcatatcaaatatgttagctggttcagggaaaaaaaaaagagagatttccatatcaatcatggtgtattagtatctgtgagaaaagtacagcatatttcacaattgagttacccctaatgggcattcctataactttttttcaaacaataaattaggacgaaattagcaagccatgttaattatgagtcttaagagatttgaacttcaaaacttaatgcaggcatgggtgatgggtgtgtaactagtaacactggtaaactttgtttctgtgttaccctgaaaatggacacatccaagtctataatggcaaggcaattgaagttgattttctgcaattttgttctactatattttcttgtctggttttctttttcttttaggcatagaaactaatcctaggaaatagttataatgagaagtaagagattcccaaaactagtttccaagtaaaccaatattagaaacataacaatttgctttcctagttttcattacaaacccttttcagaaaacagagaaagtagtaagaagggctatttccattttgtagtttactagtttcactatataaaattgcaagacaccttcaacatattctactcaaagcaacctcaagaacataaatatcaatatatcagatgatatgaagaccaccaccatgttcactttactacaatcaaagagcataacaaagcgcaatgaatgactaatcttcaacgtcagaaagctcatacctgcgtgtacctcaggtgtagcagcagccgtagcatcgacaataactttaacagaagggtaatctagcgccacagcatcaaaaactgtctgtcttatgcagttgggagtctgaacacctaaagatggtaactcacaaaatcacaaccctttcactcaagagcaatctattacccaaaacataaataaaacaacccaagcaagttttctgtattgagtattggacataccagtaataactaaactatcaatccctgcagcctgaagaactgaatgaagatgggtattgaagaaagcactgaaacgggtcttcaccaacttatagtccccttctataatcaccagcccttcaaccaattctgcacccaaactgcccttaacagttggacccaatttaccatcatgatagagatggcggcgaaatagttcaacatctctaccttttgggtcatgctcacgaacaaccttaccaatattttagcccaaacaaaacccttaaaatacaataaacattaaacagtctttttttacttacaaatacattatatacacacacaaaatacaagaaaataggttctcgatttttaaagtgaattaatcaaaattcagtaggaaaaagaaaaacaaaggaattgggtacccaaattacgagaattccgcgctgccgagccacttgaactgccgcaatgacattggggactatggctttgcctccatttactcgcacatgaccatcttcgtgtatgaaatcagtctgtgaaaccagatttaaaacatgaaacaacactgtgttgaagaatcgaaaaagagggagagaagaaaagagcaaaacctgcatatcaatgacaagaagagctgtgtggttccatttctcagccattgctttccaaagtaaagctaccggcaccgccacgctattgcatttgtagtcgtcgttctttatggaatactaagcaaatgatgtaataatgaggccctaacgaacaaaatgggcctataaatatttgacttgattagaatgggatttttaaaaaataatgtataagttttattctgtgtattatgttaaatttttactgttatttttaattgttatattttattattttaggctgttttatgttgttttataaaaaaaaaatatttttataaaaaatgttgtgtaacagtaaaattataaatttttgccaactctaatatatttataaaagccccattagaatatagaattgtcgttaacctgaatagaaacaagattactttttaacaatttaggagttttgacagatgatgtatacagtcaacatggaccattttgatttcaattacaagcactatgtgattttaaatggttttaaaaatggtctatgttgaatgttaatccattgatgtaagtgtcacgtttgtaattttaaaatataatttgaaagttttgatattggttttttgattattgatttattttcagtttaattatttttttaagatatacattattaattatgttaaggaaaaaaaaaggatatacattaaagaagaagaataaatttgatataaattacttgtaaatggcatgttttgacaaacatttattttatttctattttagtaaaagatagatagggttttcatttttttttcattaatatcatatttgtgtgcttaggcttcgttttaagattatggaatttgcatcggtgttactatgtctgttgagttttttcttttacattttgtttaggtttctagtgagttgctcctagccaaacaaagagtaacaccgttggttaggtatttctctaaattttgtaaggtttgagttgtacttagtacttttgtagtttttgagtctctagataatttagtttaattatttagctaaaagatgacttttctaatattttatcttgggagttgttttgaaataggtaatatttcaatattacaagttgagactttaactcttgtgctaggactttcaattagtaaggttttttcaaattcattatctctagtgacatttattaccaaggaaaaagtatattagttagatgttttggttgaagaattataactttattgagtgattttaattattactatataaaaaaaagagcaatgctattaagtacttgtgtggtgtctagtaccttcttgacatgtcgccttacaattggctaacaatacttcttaaaaattattacattaaattatatgggatccgatacttaaatacaccaatagcgatattgacatataagagggtgctagacaacactggtatcctttagtatttctaaaaaaaaaattatattacagggtcacaataaaataaacatgcatccatattagtgtttttattttaatttcttttttattattacttctttctaatgttattataagagctccaatttcacccacaaatgttcgccaagacaggcgagttgccctcacctatgaacggtgcatcaagccccaaccgagctattctatatctatattaaaaatatcattactcaatggcattatatgaaacataagatcattgatacaattcctgcaattatataaaattattccatgtgttggatgcatgatgttaatttgtacttaaaacaaattagatgaaacttttcccatcaaaatggaattgaagagaattta

SEQ ID NO: 250733 - DNA, 526 bp, Cannabis indica
tttgaatgaaaattgaataattctactatgggccatgtccaagccatggattaatttacagactaggttttagacgagatgcttgaatttggatgaattgtcatatgaaaagttagatggtctcatggtaagattctgttaacttaatattcagtaagagatttttgttgggtggatgttctctctctctctctctctctctctcttttggtttattgaagttgtgattttggtatagaggaaaattttgggataaaataatcaggacctgcatttgtttgggatagtatgaatgaaattgagttattagctatggatttatttacagtgtaggttgttatattatgatatgcttgaatttggatgaattgtccattgagaagttagattatcaatggtatagaatagaaagataactgtttaatggtttcgtctaacctcatgacagatgttgcaggttttgaattttgtgtttattagtggctaaagatctggtctttggccagtgatcacagtcacagctaat

SEQ ID NO: 250734 - DNA, 1090 bp, Cannabis indica
ggtgcactcaagagattgttacggtatctaaatggtacttctcattatggcttagttatacatcgcaactctccacttcaacttcatgctttttgtgatgcggattgggctggagatcgtgattcatacgtgtccactactgggtacattgtttacttaggtcgtaatcctctatcatggagttctaagaagcaaaaaagcttggctcgttcgtcgacagaagctgaatttcgtgcagtagcatctgctacagctgaaatactttggttaaaatcgcttctccaagagttggttgttgatattcagccagttcctagcatatactgtgacaatttgggggcaacaaattactgtgccaatccggtgtttcattcacgtatgaaacatttagctttggcgtttcattttgttcgagaagaggttcagcggggctcacttcgagttcaacatatttctggcaaagaccaacttgcggatgcacttacgaaaccacttgccagaacacgctttcatgatttgtttttcaagatcggtcttgctgaaaggtcgtccgtcttgcgggggcgtgtagaaggataatactgccagctattatcagtcaaactataacaatttgtaccattatattcgttagagttgttttgtatattcctctgttctctctcttttattgttattagtttgttaataacttagtcaatcttttccttgattgtagtatatatcagtattctttcttgtaaatgtacacgcctatataaaggctctttatcaattaataataatcaattgcttccaacattcacacttatgtggcagcgcatttgaatatttctatcaactataattaattgaaacgagttatttaagttgtatttaatcatacaatttaatatatcattgagttgattcatattcttcctgaagtacacgtatcaatttctggtttgatagctgaatttcaagtataacaattgtctacctaaaaagtactttttaaattaaaaagaaatttttaaatgttttcaagggtatagccgtatttttcctagttttaaaattaccatgcttagaatttggcggttcaaaa

SEQ ID NO: 250735 - DNA, 567 bp, Cannabis indica
atatatatatgtgtgtgtgtatagctaaatatatttatagagagagaaagaggagagaaagagagagagggttgaggaaagttgttgtttttttctctcttttgggtgtggtattggccccaagaaggtatgtgcagaagatttcaaattactcagatttacatgctttgtttgtgttccttttaaaagatagagcaataataatgctaattagtatttttgactcttaaattttgataatgtaccaaattatgattcttgaacttttaaagtcgttaaaaatgtcttgaactattaagatggttggatttaaagacttttatctaattttaataaaaaagtctaacatggatgaaagttcagggagcatgatataatttatgttaaaattcgatgaacatgatttggtatatatcaaagtctgggagtatgatttagtacataagcaatcactgaaatagtaaaattgaatgaaattagacaaaagtccttaaatccaataatcccaatagttcgggagcattttttaccaccttaaaaattcaggagcatgatttggtacatgtc

SEQ ID NO: 250736 - DNA, 1123 bp, Cannabis indica
gtgaaaagggtttcagatgaattgatacattatatacatataatcatgaagtaaatcatgtgaacaacgcaaaattaaatgttatttctgatctatattaataagtaaatctgattatattgaaatgagttttatttagggcataaaacccaacacgggtgtgggtctaggtccgagtcatgttctgggtctaggttcgtgttttggtttaggtccgagtcttggtcccaaatccagacaccaaccacatgttgagtctagtttgacttctggtacgggttccagttctggtccgggtctgggtccgaatccaagtccaattcccaaatttagacaccgactgtgggtcgggtccaagcctcgggtcttgggtgctgggtctcgagtctaaatcaagatctttgtccacctctagctcatgtcttgtgtccttgtttgggtctcaagtaaaggtttgggtcgaagtttgggtcttgggtcctcagtcattggtccacgtccccgattcaggtcagggtcctaagtcccggtttgggttaggttcccagtctgagtgcaggtcccggtccatgttccgtactagtccttgtctcgggtgttgaccttttcggggtataggtcacgattcggttctcaggtcctggtctcaggtccagtccaagtacttgtcccagtttaggttcaggtctcggtgctagtctgggtctgggtcccagtcctgatctcgattcaggtctgagtcctgggttcgagtctgagttatgttacgagttcgggtacgggtttgggtttgggtttgggtcttcgtctatgtttcagtctatgttttggtctgggtcttggtcttcttctgggtttgagtctgggttctggtacgggtctaggttctggtcaaggtcctaactcacaggtcctaggtcgcaggtcctagcgcaagtctgggttcaggttcgggtctgggtcttggaaatggttccaggtttgggtctacgtacgattccaagatctagacaccgactacttgtttggttgaagagttgggtcgtgggtcaagatctgaatcctgtgtccctgcccatgtctgtgtttggctccgagtttgggaccaagaccggggtctaat

SEQ ID NO: 250737 - DNA, 850 bp, Cannabis indica
cttttaggacaaaagtccttgaggcttgatcaagcattttgtgtgttattcttcttcgtcttctctagctttcttgtaatcttgatgaaatacttttatttgtattttgagtattttgattgtaatcctcctattctttcctagaataagaacttttataagaatctaaaagtcacttcgatgtcatattcttcttctaaaagacttgcaatggaggtcatacaatcaaagaaaagtatccacgggggcagagcatcaatcaagatcatgagaaaaaaacatgtggcaagagattcaagccatccataggtaagcatggtggatttattttgtgatatactatttattttgtgtatgttatctatgatagtatggtaacatatatgcaatattaattaacataaaattatttgagagttgtaattttatagaagttatttattaattttgtgtattaatatatgtatataaattatcatattaatatatgtactataaggtatgataatggagatgataagaaaaatgtgttatattgtgattaaagataattacttagaaataaagttcaattttggtgataatcatctcattttatgagaaaagaaaattgaactatgcgagttacacttttttgtattttttcttgtcatagtaagagcaaagtgatcaaagtggatttaaattgtgaaatgagcttataaaattagaaggataattttagaattaatgaaagtagatcattgtggattcaaatactgagatacaagattacaaaattagagaagcgattttgaatcttaaaaatcaaagtgatgaaaaaaaattgatgagaaataattttgttaac

SEQ ID NO: 250738 - DNA, 574 bp, Cannabis indica
ggatattctaaaatgtgtcatatcccacaaatattaaatgttatgtgttttaaaaaaaaatattaagtatatgtaagtatagaaaattaaatttccctttgaaaggcacgaacgagccctcaattattctattaatatatatttatatgactatttccacaatattaaatttataaataataaccaaatgttacacctacatagaatctgatagaagcgaaggcaatgatatagagaaaaaaaaaaagaaattgcaacaaaattttcaacaaatttaccatactagcaattaatcctcaaatcctattatttagctgtaaaactttttaagtccacattctgttagtaatttatcatttctatttatttttaactgttaactatcatgtttgattgtcagtgtattgtgcactagatataatggacacataatataatttagggatattggcggctaaaccatccgaactttacggtttgtaacacttaaccacaaaaaccgaatttttggcggctaaactacctaaactcccattccgttttgctactgtacacctccgtccaaaaatctcag

SEQ ID NO: 250739 - DNA, 543 bp, Cannabis indica
ttacattttagaaaagagttaaaccaaaggagaggaaaagtgtttggaagtccactgtgacaataaaatggtcccattaaaattaaatataaatattaatatcataggaacaaagaagtctaatcacataatttgtttagaccctcctcctacataatttgttttcttgtgttagaaaatacttatgaagtttagaccctactacataattcaaggttaatttgtttattgggttatttttttaagagaaatataaaattttataaaacgacaacagccgataatcagagaagtaacttaatatccaatcggtaaaaccactaaaccatagcattcacaagtgataaagccgaatgagctagcttgtttattgggttatttgaggtaaaactatccaaattttatcacttttgtactattattattatttgaaaatttttcaaactttaattttattttggtatttactattctattcaaaaattaagttaaaaccaacatgtagtattaatgtatatacttatgtacacatgataagttttt

SEQ ID NO: 250740 - DNA, 521 bp, Cannabis indica
caccccagacttcttggccggaggagatgagattgaacttccccccactctcttattcaaagcttcgagcatcttttgagacatgtttgcacgaaataaaagccacatggttaagagaaaagcacaagaactacaaaagcataataattaagaaaattaaaaacaagagggagtattttgcgaagcatttgcccgagcaagaattgaaggctcatcatcacctgacaagtctcttatccctgcaggaattttctttctcctttcgagcggagtcacctgctcttcctcagcctcatcttcaggatccagaggctcataagcatactgtttagcccctgcacctcccttcaacttagcctcacgcttaagttgaatgagttcattctcttgatgagctccctcagcccggccagcaccagatttcatctttttctcctttacaggctaagggatgaaatcctctgggtaaagctgttgggttttgtgccctaaataaaactcacttcaatataatcagattt

SEQ ID NO: 250741 - DNA, 680 bp, Cannabis indica
gactcaatatgtggtctagcttgaaggtcacatcctagtattttagttgctaatgctctttcaagagctttcaaatatcctgatttatagtttccttcagctttaaacattccctcattgtgaaattctaaaagtaattcaatcaattttgtgtcttcttttatctattcaaaagctcttattctgtcctggacctttgacttttgaagtatttcttgagcaagccatctaataataataatactaaactttacaaacttagtcataaacatgatatactaaaatatttctaagtttgcaacatattatccaatcataatttaaaattacatcttgatagcaagccatctaataataataataacaaactttatagacatagtcataaacttcatatattaaaatatttatatgcaacatataatccaatcataatccaaaaattacataattaatagcaaaccatctaataataataacaaacaaacattatgttatactacatcttaatttacatgcttacgatttctccactcatcatacatttgatttgctaagttcattctccaagtactccatgttgggctttgtgccctaaataaaactctatttcaatgtaatctttgtcattcaattatcaataaagatacagaaatattttcatcacttatttagtatgt

SEQ ID NO: 250742 - DNA, 1116 bp, Cannabis indica
aaagtttttaaacaaccgcgcgaggcgcggtatcgttacctagtaaatatgtaattgtgtagcttttattgaatgtggaaatagcaaaatagagtctgttgcacgctcttttattttatatgtgtgtgaaatagattgtttgaacaatattttttatattgtaaattattccaacaaataagaggtgcatcagtgtatttttttgggtgcattataagatcactcaataattttaattttatttttaaatttttttatcatttatttttaatgttattaattttagatattttctattattttttacaattatttaaataataaaataactggaccaataaaaacccatttatatccttgtgcacactgtgccaaaaagattgagtaggaaagaatagagagtttagcccctacaaaatgtaaataaaacattaaaaaactatttttgaaaattctgcttaatttaattcataaattgaggaagaaatttaaaggtttaattattctaaaattctggatgacctgtgttgttttggttagcattgtctgcccttaatattgctctgtggcagttagtctattattttcttttttaactacctttccagttttttcttccatccttgcttaaatttaactgttcccgcctgcatcttttttaaaaaaaaacacaaaatcaacagcaaaaacttctctgctactggttccaatcatggaaagcttcatccctaccatgtctgatgctctgtcaatccgagaaagggaagttattaatctttccaatctcaacattcctccttcacggcctgctgtcaaccgtctgctatgcaggatatattccaaaaagggatataaccccaagactttcaagaacttcatcactaagcaatgggtgggccggtttgctgtgtccatctctgattatgatgctgaatcagattcctacacaattacctttggttgtgaaggtgatctcaagagaatattgtctaaagaaccctggcacttccacaaccagcatatgattttatgcctcccaagtgctctgcaaaatgcttctatggaatcatacactatcactccattctggatccaagtctttcggttgcctttcct

SEQ ID NO: 250743 - DNA, 1045 bp, Cannabis indica
gagaaaaatggtctatattctgtccgtagtgcctatcaactaatgcaagatcaaaagcttcctccagcttcttcagaaggccatctgttttagaaaaagatgtggttacttaaggtgcctcttaagactaaagatctggtgtggagagcggcttcgaactgcttagcaaccaaggtaaatctctgcattaagaaggtgttgactgataataactgtcctatgtgtggtgttttggccgaatctgagttgcatctgctagtatcatgtcaatttgcttgggcctgctgggagttttctggttttactgcagctgacagaaactccaattctctgctgtcatggcttagtttcaatgctactcagatggataatgagaagctttgccgagttgttatgttgtgttgggtaatatggtcggccagaaacgatctgctctggaaaggacaggttcgaagtgtgaaagatgtggtcgctttgctcaatctagccttgatcagtttatgaaagcccaaggtaaggtaacctaccgttctctgtcgccgtcttaaacccggtgatggttcagaggtttggattaaaccggctgaaggtatcaagttgaatgtcgatgcagcgattttcgaacatgatctcaagcatggcttcgggtgtgtgatcaggaatacaaaggcgagatgatttctgttttttctggtgctaagcaaagcaaagttgcaccagaaattgctgaaattatgggcataagagaagccttaagttggttgaaaaatcacaatttctctcatgctgctgtcgagtccgatagtttggtttgtgtggatgctattcgaagcaatgagaggctccattctggtttcggatttattgtggaagagtgcaagtttattcttcaaaatttgttaaatgttactttatgttttgtcaaacgttctgcgaatcgtgccgcgcattttattgcccgacactctttgtccctagctgaacgtatgttccctattaatagtgttcctttggagttgttgtctatccttttgggcgatagctc

SEQ ID NO: 250744 - DNA, 745 bp, Cannabis indica
acagattgtctctaactggtttttagatgttggttcggatttttgactagatgatcgatgatctatagccggttattgtgtgtttttaggagattcgctcatttcatggtcttcaaaaaagcagatagttattgcaaggtcaagtactgaatctaaatacaaggccttagcacaactagctgctaaaattgcctggctacaagaactgcacaaagaaataaagtttaagctccctggtgtacctgtaatgtggtgtgacaacatgagtgctagtgcactaacttctaacccagtgtatcacgcaagaaccaaacacattgagctagatgtgcactttgtaagggacaaggtgttgcttaaacaacttgacatcaaatatgtcccttctcacaatcaagtgtctaactaaagggctcacacactcacatttccagttcttactcgaaaagcttggtgtgatgaaatcaccctctctctgaggggtggtgtaacagagtaaatacaggggtattttagataatagagtgtgtgtccaagtttgttggattgtatgcaatcccgaggcaatcataccacctgttattatctttattgttagcttcatttttaggaatatactttctattatgatgtatacgtgtaaggtcatgattgaaatgtaattacctttttgggtgccatgtttagctataaatgaaaagttctagcatcaacatcatttaagctgatcaatttcattttcaaa

SEQ ID NO: 250745 - DNA, 1017 bp, Cannabis indica
tttgttttttcaagcactcttccatttataatgagcttgaatcttttttagatgatattaatagtttgttttttatttttcttgaggcatgttcatgtttgctgtacagttaataaagctgtttataaatttgttgtgcatgaacttaaggtacatgaatgatgaattggattgagaattatatatttttttatatatatgtattgagtaggagattaaattttattttttaataaaaaaataataattataataagctataataatttttggttgaaacttcagatcaaaaaataattttggttgaaacattatgacttttcaacgtgtttttttggggccaaaagattagaaagtatggtctggtttacgtgtttttggttggttgacttaataaacgtttctcatacattgacgaaatttaacgtggtggtgatgagcgcactgggcatgccacactaataagaaaataaaattagaattagtatttatttaataagaatacttccgtcacaatctcttatactatcataatatctctttaataataaattgtataaaataaagttacatattagtcaaatttaaaactaatagtcccgttccaatcagtaaaaatatctttattattgttaattgatccatttaattaagacttcgctagctgctatttattactcaaactatgtcaacccagcaccgtggtcaaatatatactaagagcaatatattattctactaattttatcaactttaacgttttacatcatgaatatatattttgatataactttactttcatcaattgaaaatagatcgcaaaataatgagagatgcaagtaccaggaaaagagagtcgtctaattaacagaaaactctttatttaattaagcttaaatcatatatatgaatctcaagttggactacttttggtacaggcttcatttatcaaataacaaaccactaataatccacagattaagattgatccatgtagcagaagtctttataattgtg

SEQ ID NO: 250746 - DNA, 583 bp, Cannabis indica
gttctttttaccttattatttttaatttctattatttattttacctaatcgctttatcttggctcactattgttggctagaagcgaggccaatattttggtgctttcattgagagcaaaaatataagcttttatcttaatcttgacaggttaacaagatggttgtacaaactcgaaggggaggccttactgaccaaggcaatccaatggtgatagatttgaacgtgcaaacttctggaaatacgagaggaccaccagggataaacctcgaacaaattaatacacaaccacccacggtaggccatggagcgacttcctctcttgctgggttcacactaggcatataggagactgggaacaccagtacggtagctaatcaaaccactcctagcactgaggtcccatccaccaataacactaaaaggctagctggagatgacactgaacttcaaaatctgcgagaagcacttgggcttatgccaggccataacaacactttacatcaagatcaggtagatctttgagcagttattaaccttgccttcaacgagcaaagaaatgaattcatataatggagggatcga

SEQ ID NO: 250747 - DNA, 568 bp, Cannabis indica
attaaaaaaatattaccaaatgtactctaatatttaagagcattgctattagacaccagtggtgcctagtaccttctcgatatgtcgtgttgcgattggctagcgatacaatctaaaagttattatattaaattatatgggacgcgatatttagttagaccaatagcgatattgacacgtaagagggtgctagacaccactggtaccctttagcatttctcaatatttaatattatatatattcatcttatccactatacacgtgatgtttataccaacctttatttgatacctttccaaggcacaactctgtgatcaataaattacaatgtttatttcattatgaaatatgctgtagtggtgtgtttggagtcattcaatgagttatattcctattagtacaatgggggaaaagggaagcttgataggcatattctcaatgtaattgctaggtggccgtgagggctggggttgcggctgtctgttgtggctgctctgtttttgctgttgttgctgtagtttgttgcttgtttgaataaatattttccttcttgttcaaaaaaaaaaa

SEQ ID NO: 250748 - DNA, 1238 bp, Cannabis indica
agagaagaatcacagatcgctctttcgacatgatggtgcaaactcgctgaggcctgtccgaccagtaaaatcactgacgctggatctgatgttgcaggacccagggagttcgacggttccacccactgtcaatcctggatagacgggaagcgtggtgaatgatggaacaactcctcttactgtaacttcgcctcgtgtgcaagagaccggaaataacggttctgcacacagccaggatgttcataacatgtctgttccaccaggcatcaacgcccagacgaccatcggagacgtaactgaattgcaaaatctctgtggtgcacttggactcatgcagggccacaacaataccctgcatcacgatcaagaggaattacgtgccgcagtaaaccttgcgtttgacgaacagaggcgtatgttcgccgagtggagagataaagagatggaggcattaagggctcaccatgcagaaatcgaagatcgtagtcggtaagctaccgtgctgatacgaagagcctatcaaactgtaggccagcaggcgccgaacgtcattccccttagagaaaccgaagattacccaacagtgaatgcttcccagacaaacaacgttcagccgtccaatccccggtcacgagttccactcgtgggccaagaggtaggcggacagaccttgttgagaattcatcaggaggagtcatgctcgatagatccgcacaaaataatagagccattccacctaccaaccaagcgaaccaattgctaaggcaaccaggttcttctgtgttcaaaaggttgggaacaccccgtgacctaagggacgacctaaaaagaagaaggggagcagacgagaacaatactacaactaatgtgcagtctggagcccatactcaaatccccgctcagaaagacgctgacgtagcccaacacgaccagaatgccaatgaagtcagcccagccgtacaggcccagcttgacgaactgaagaatatgtttcatggcatggccgggcagcgtaacaatgatcttgagttagaccgtgcacgcggaagtcctttgtcgccagaaatcaacctcctgccactacctgacaagatcaagatgcttacgtggaagatgtacactgggagagaagatcctctctctcatctcaagtatttcgagatgcagatggatttacaaggagtgcgaggagacgtatgttgcagaatcttccccgcaactctgtcggaggccgcaca

SEQ ID NO: 250749 - DNA, 1030 bp, Cannabis indica
aaaaaaatattctagaattgagtagttttgagtcatagcaatcaacctgaaaggggtccctagcctaatacccagggtgactccaagaacttcggaatgggtgtttggatcttgtcaagttgtttccaactcaccatctttcagaattctgaatcaagatgactagaagaatcaagtccaatgcctgaaaactgaaaagttacgaaaatgcacctcggaagaagtcaacttagatgcctagggatttcactcagtgcccgggttgacatcccaactagggtttcaatttttgggtccatcttagtgcaaatggctcaaactttatactttaacacgaataacacttgtcacgaatatatttggggcacaaaaatcaaaatcagaacacttttattttttagcacttgaggcaccaggtgcctcgggcacctagtgcacccagcgcgtaggttgacatattgtcaacctggggcgtttccaatcacaatattaaaaaagtatcccgagtattttattcgtctccatccaaaacgaagaatcaagtgctttcgagaacttggaggccaaaacgggcacctggcgccaatgttgacactttgtcaacccaggccatttccatcagcagtttagaagaagtcttttaggcaaatttttgttttcgtcaataattaagaattgggttgagagtaagctactttcataagctattcgtctgttgtcatttcatcttttaaaagctaacaggttataataaatttgttgaattcctaagatctaggccattggaacccgaatctcagggaacacaaaattagaaaatttattaatcctaaagcatttatctaagaatagaattaaaatcctaaggctcatggtcagttggaacctgactcctatggtgttcagaagtaacttcatgtggcgaaaattcatctaaagtttcagtacttgatgaatctaaaacaaaaattaattacacacaaattgttggaatttattttactagaatcttatatctactcacaagtat

SEQ ID NO: 250750 - DNA, 1787 bp, Cannabis indica
cagcaggcagccgcttctccacaagaacctccgagaagtcttcccgagccgtctgaactctaacaactcttcctaagtgattccttgcaacaacagcaatacacatactattgaatcccaccttgacatcacaattcagcttaatccaatccggaggaggaggggaccaagcttcctttagatctggagtgggactaggaagcaaagtatcatggcaatctgcataagaagtacaaatattatcaatacatttttttatgtcaggattacagttattatggaccttttcattgcgcaccatccagatagtatccacaacaatcgaggcatataagaaaacatcatcagctcggatccctctgttgtgaagatcccaaatgaactttacccaatcccaaacacggatgccagtgtcacacacagggaaaataccccagggagaggagcgccatagatggaaagccacatcgcaggagagaaaaagatgttcaaaggattcctcccccacaccacataaggggcaactagtgtcctctatatggaatctctttccaatcaacgctctcacaggcagagcactggaaaggatacaccaccacagtaccttgtgtcgctccaaaattttgctgttccatagcttattccagagtttcggagcaacctcacagtgaggagctctctcctttgcttgaaccagataagccgatttagacgagaagcaacccttgctttctaacgtccaaatccatctatcggagccaatcccggaaggatggccaccttttagaatatccgagaccgtttctcgatcaaaagtatctcggagtttttggatgtcccattgcccgttacatgacatgaggtcagccacatagttaaaattggaggaggcatcccccctcggtttcggacagaagcctttgcgatgaggaatccaggggtcctcccaaatcttagtattcgaaccatttgccaccaatttgcaggccccttttttcaagatgtaattcgctttcacgacattcttccagaaccaagagtcagaatctttgaacctgcaactaagaaagtcctttcctttgagatatttggccattagaactctacagcacaaagattggcttccattgaggatattccatccccatttagccagaaaggcctgattcatctcttttgtttttcgaaaaccaagcccccccagagatttaggaagacaaagtttatcccaagcctttaaatgaatcccatggtttcctttctcaaacccccaccaaaaatctcttaccaagccatcaatcttatttaccattcgggtagagagtttcgtggtttgcatagcatacataggcatagccaaacctacagatttaatgagagtagctcggcccgctttagataaggtttttgctttccaaccctgaagttttgtcatgaggttatcaagaatgaagttaaaatcagcatctttctgcctcgatctaaagaggggcagccccagatatttaatgcatccttcaggataatcaattcccaacacctccttgatttcaccccgtaagcttaacggtgtgtttttactaaaaaaaatagacgttttgagcttattcacctgttggccagaccacgaacaaaaactctctagacatctccagaatccattcacctctactaaatttgctcgacctaccagaataaggtcgtccgcaaagaaaacatgagaaagcaccggaccacccctactgagtttaattcctttaataaccccctggtcaagggcttcatga

SEQ ID NO: 250751 - DNA, 1198 bp, Cannabis indica
agaaattcattttctttctctctatattctctttagtaaaatgtctcaaatccaagaagattttgagctcttctttttaggtatgtcaaaaagatccatttagttggagcgggttggagttccgacccaacggatcacctctgatctgaaacattcagatacttattggatcttggattagatccgttctaccctgcctaatttttttactggatcggatctgattcgatccgatttcaatttacttaaaaaaacttaattcaagacttagatcccttaggacttggactcggactcggacttggacccagactcggacccggacccaaactcggacccagacccgggcctcggatccagactcggaccctaaccctgacccgggatccggactcggacccgaacccggactcggaacccggactcaggacccggacccagacccgagacttgggaccgggacccagactgggactagggaccgagacccggacccagacccgaacccgggacccgagacccggaccgggacccgagacccgagacccaggaccgggacccgagaccgagacccgaacctggacctagtaggaggaccgggaccggaacccggacctgaacccggacttggatctttacacaatctattaatacatatcaatactaaacatagtattgtatttaataatacaaaattaaaatgaatataaaattataagttaatattaacatacttaaaaaaaaaaaaaaagtagtacgggttggatcagatctgatccaaataagtcgggtcggatctgatccgatccgaataagtcgggtcggatccgatccgatctgagtatttgatctagcgggaggcgaggcagatccttacatgatttggatcaggtcagatcatagcaggatcagatccgacccgacccattgacactcctacttctcttgttcttttcctatctgctagttagtttttttattcttgatcaaccatggcaaaaagaggagttcatactcgaaacacttcaagtcaagaagataaattcgacaatatagatcaaaatcatcgaaaattcattattaatgtacaattttttttcatttgaagaagtggcattgggtcgatctgatattgcaggatttttttgaaaaattatgaaagaacgtatatatattattactgaaaattgaatgatga

SEQ ID NO: 250752 - DNA, 519 bp, Cannabis indica
ttaaatgacaatttaaataaataatgtgtaatatttaaaacaaatatatataataatggattaaattaatattgtgagcttgattttgttcaaataatttttcaataagactaaatatgaaatcttttactactacaaaaatagtttttctcgacgtttttgaacagccgtttaaagtattcccgtcgtgtcgcctatacgatcgtcgtaaaacgggcaaaataggtgactgttaaaaactatcactaatgtgaatttttctacggtttaaaatcgtcgcctataacaaggtataggcgacggttttaaaccgtgccctatactataggcgacaattttaaaccatcgcctatagtatgggcacagtttaaaaccattgcctataccctgttataggtgacaattttaaactgtcgggaatgtaaaaaaaaaatatatatatagatttttttgccaaaatttgtattttcccctatttttttccttgcattagttgtataactttacctaaattaaaat

SEQ ID NO: 250753 - DNA, 628 bp, Cannabis indica
agatgaaaatgcattttatatttgatgaataatcataatacaaaagcatttaaggggggaggcatttcctccaaccaagaacaaacagagtccaccgagagagcatatttggcaagtaaatgagccgccgaattggcagacctatatacatgaccgatttttactccagggaaataggacactaagttcgtaatgtctgataaaagacaatggaaatccgaggccgctgtagaaagtgattgtagacctttggccacaacaagagaatccgtctcaatatagtgaacatgtaggccattgtctaacagccattgtaatgcatacattaaagcaagagcttccatcacctctggccgaaaagagccaataaccggctttgaaaatgctgctacaatttcaccttcagaatcgcgaaggattgctccacagcctgttgtttgagtcacctggttaagagccgcatccgtattcaatttaaacctgcctgtaggtggattcagccaagaagcatcttgtttctggtgcaaattgttgtgagaagcagctggtgtagttgctggttttttcctttgagccgcttgaaaatcctccaagtaagaaagagccgaatactccaacaggttatacg

SEQ ID NO: 250754 - DNA, 662 bp, Cannabis indica
tggacaggatccacctgttaattgtgtattaaattgtaaccctactttgtaatattgattttgagacaaaatgtaaaagtttgcaaataggggatccccaaatccaacagtgttttgaatgaaaagttatgtgttagtttaatccaaaagttttaattaaaccaaacttttcttaacctgatagattatttataaaattaatttgtaaaagcacacacgtggcgttcccgtgagacagggcgttacaatgtccgtcaagtgattaatctcttttggaagtgatagtatattctcctcttcttcaattggttggggtgagttcgagaaataaggagggtattggtgactccaatcctgaagtgatggatcccaatgccagtcgtaatcaaaatccaccatatcattcaacaaatttattatatcatggcctctccttaacaaaggctctccagttacctctgctcaataattaacctagcttcttttttcatcatcaagtccgttataaaaaaaccaagtaaaacacccacttgagaaattgggattacatctttctcttcccccaagtagaatacaatggctcattgtgttgttgggcaaaattcacaaggtatagcattttaatttatcttgcaggttaaacacattcagtaaaacattag

SEQ ID NO: 250755 - DNA, 1091 bp, Cannabis indica
agcaggaatttttcccaggtgagaggctatgctttagggtggtaattggttgcttggtcgagcatctgtctttggcacggaaggaaaggtgttccatagcatctggggactgattctcaaagctcgcatgggaatcgagtacttcttaagcgggaagtcaggtttagtaaaagggtagatccattagggttagaatccttgttagcagtctcgggcgatggcgaataaaaatatcattcaattcggggatcctcaaaaaaaaataagaaaagtttcgtcgttgagtgagaaatggaaaattcatggaaagttacaatccctaccacgtaatagtgcacctacacgacttcatcgacgttgttttctgactgcttccagacctcagttcttaccaatctccggtgtgtaatcgacatgttgctagcttcaactcggttgaataagaatcattgattccctctgctgtccatttcttattcattcagggcgctcggtcggtgctcttttctcaaaccagaacaactctgaacgttagcgaagataagggaagaccgcctgagcgaaccgaccgaagggacttgacttattcaaatcgaacgatagcggcttaaagctaagcctatcacgagcagcgtcgctgcttgatcggcagggaggaccatctcaaagtatggggcaaagaatcaagcgctttgactttgtcccctgggattcaccacaggttgggtctgagagccgtgtgatgggtgactatccagcatggttcggagagcacttttagtctacattggtgaatggaagcccccactatcaagcaagaaagaagcggctcttcccacggtagagtcaccattgactctatttattattatggtaaattagtgtatcaagatgtcaatctgagatcttatttcgattcgatacatccacctacaagactcagctaaggacggtccgtaagaaaacagagtggttccctaccactggagatcgagtactaggatcgataccacgaccagactacttctcgggctagccatgggcaacagctgatctacaaccaagggtcggatgtctacgaaggagaatgg

SEQ ID NO: 250756 - DNA, 1371 bp, Cannabis indica
gaaacgaaaggaataatagattgaatgtgtggaatgaatggacaattcattactgagagcaattgctctataaatatacaatacaaagctgttagagatagacagctataataaacagaaataacagaataagccacctcagcataacaaactaactgtattaactaccactaacagggtaagtcctaacaccccccctcaaactgagcatagggaaaccagactcagtttgcctttgagacaagaaaatcgagcattggaaaggggcttggtgagaacatcagcaatttgatcttgtgcaggcacatgtttcacgtgaagttgcttgttgaggatacgctctcgcacaaaatagaggtccagttcaatgtgtttggtgcgagagtgtaacacaggatttgctgacataaggactatgctttgattatcacaccaaatggtgggagaagaaggctaaggtagatgaagttcactaagcaatgactgaatccacactatttctacagttgcattagctaaacttcgatactctgcctcggtactggatcgagacatagtacgctgctttttagagctccaggaaataatgtttggtccaagataaatgcagaagcccatagttgatctgcgatcgtcaggatcagatgcccaatcggcatcgcaaaaaccagtaagaggcagagtaggagaggcttgaagcagtaaaccatgatccaaagtgcctttgagatatcgaagaattttcttgacaactttccaatgagtatctaaaggactttgcatgaattgtgaaactttgcttactgcatatgcaatttcaggccgagttactacagcgtactgaagagcaccaactatgcttctgtactgatgaggatcaggaagaggatcaccagtgtaagcagagagtttttcacttctgaccattggtgttggcaggctattggagcagtccattttggtcttgcagagaagatcgatgatgtactttttctgagacaaatgcagaccagaagtggtatgatgcacttcgatcccaaggaagtagtcaatctgacccaagtccttaagagaaaaagagttgtgaagcttctgaaccagatcagaaattacagaaggagaacttcctgtaactaagatatcatcgacatacactaacagaaacagagtatgagatgaagtcttttgaatgaagatggattggtctgcctttgaacatgtaaacccaaatgagatcaaagcatgtcgtagtgtatcaaaccaggcacggggagcctgcctcaacccgtagatagctttattaagtttacagacatgctttggaaagttcgaatcaacaaaaccggggggttgctgttggaaattatttta

SEQ ID NO: 250757 - DNA, 548 bp, Cannabis indica
gggacccaggaccgagacccggaccctgactcgcgacctggacccggaccctgacccgaacccgggacctgggaccctggacccagacccgacctagacccagacccagaacccaggacctaggactaggacccaaactcgaactgggacttcgaccccgacccggaccgagacctgaacctagagccggaccgagacccagacccgaacccaggaccttgacccagacctagactcagattccgacccaaacttagacctaaacccagtcagggtccgatagtggtctgatggttgcctggtactcctttttttatgtacaaaaatataaaaacaaaatagataacattgggtcaccatcggacatcggacttttattggaccaccatcggacttttatcggaccaccatcagtaatggggagtatagacggtgaagttaaaagaaaaaagagagaaaagggcataattggtatgaattgaaagtgtacctatttttctaattttagtaaatttatgtttaaaaatttaatatctattctatataaa

SEQ ID NO: 250758 - DNA, 811 bp, Cannabis indica
aaattagtaactaattaattatataagctagtgtagttggcatgatatggtatattgtgaggttacactataaatttttttactttaagtaacaataaaatttgtgattaaaaatataagttgtgactaattataaattatcattcatacgttgtgactaaaaagtttttatagttaaaagtattagttataaaaatcacaatttgttgtgatcgaatgtatttttagtcataatatttgttgtgcctaaaactaataaattagtaacaacttgtatctacatctatgtgttagtcacaagtaattttttattgtgactaaaagtcacatttagttacaaaaaaatttaattatatatgttgtgactaaaaaattgtcactaaatatgactagtgtgactaataagattcattagtttcaactcaaataatttatggactacattagtggaactatacaacaaaagaatatatgtcatcaaatctattgaacttggcttatagaattaaactaatgtcacactcataaacactatgtgtgtacgtttagaatttttttctaaataaagacatgtgttaatgaaacgaaactttaaaataataacgaccaataatatttgaaaactaaaatcttacattaatttaattcgagtcaattatgtagtcatataagaaagataagaaagttgaactaaattcacataatgaattgatcgatatagtaattagaggaaataaaaagtatttgcaactatgcatgcatggctttcatttcccaattaaattaatccccttaatttcgggtttttttt

SEQ ID NO: 250759 - DNA, 1007 bp, Cannabis indica
ttacactgacatgataattaacggtgtggtttacttacacttgtataagtagaatgtcctttccagggcgttagcaaagtaaattaatatcggatgtattggctatagataggactggaccgatattgacagtggaaaagatatcataaacttactattatatcttttctaagtcaatgttacttagtatatcttcagtcaattgatctcaatcttgagatgattaacttctagcttaaatgtattacatgtgttctttgacttgttcgttataactgaccattaggatcgacccaatacttacatcttggaaacatggtagtgtatttgagtgggagcgttaatcatagatatggacatctatagcttctatgtctattaaaagttaagagatggttttcttggagcttgacttaacgtgataaatgatagagcgctcatttcagtaattatattaatttaataaaatatcatttacaagtagttaagtgttttatggataaaatactttaaagggtaacatagtaaatttgtcccttctcattgtaaattttctatagaggatcattgattgtttagattctaacaatggataattcataatgtatctatatttggtatatagagcgtcctatgtaatcaagagtgcaattctgaatctatagtggagtcaagaagaattaataagctatgaaatttacttggtaaattttgaatctacttattaggatcttgtttataggcccatggtgctacattgtttgagataatatcatcttctagactcaactaattgatttaataagtcaattagaatttgaaagtagcctatgttttatttgagattttcaccaagtttaggcaattttgagaagaaaagagaaatagaggtttatttatcaattaagatactttatgggtctaattgataaatttatttaaattttacttattttgataattattaaataaaattagtatttaaataattagatgagataagtggt

SEQ ID NO: 250760 - DNA, 740 bp, Cannabis indica
taatttaattaattattataaaaatatatagttaaaaatatagtttgaattattatttactttttacataacaaataattttaacccaaaaagccttttttttttattattataagttttttattattaactttagtattttaacatttataaaaaatctattgaagaatttaatgaataagagttgaaattaagatttaaagtatttttttttaaaaaaaaaaagtacaatataatttgacatgttattaaaaagtatagtatattatcacacatcaatcatgtcatgttacttttttagtttttttagatttagaagtaccaaacaattaatattttattaatatcacataaccggttgtcaatttaataaatacgaatacccctattaaagtctactaactttataaattaataacaaccatttgattaatgactagactcaatctaacgactacagtacaatcacggattgtatactcaaaagtacaataatgggacaaaatcctatccctatatataatggacatgtctatggtaagtaccttacttttgtccctatggtaggcacacatttatagccatagatatttaatctaaaagacataaattgatgagtgcatataaataggtaatacttacaatgtattggattattcctaaaattatttttttaataatacttttaaattaaataattaatttttttaacctcctccaattagttaatcttttttttt

SEQ ID NO: 250761 - DNA, 753 bp, Cannabis indica
taactaaacctacatcaagctctaggttcccttttcttcgtgacaaacttggtgtggtttgtttcactaccctaagtttgaaggggctattaagagtacctagttagttagtgaagttagttaatgtcagttaggttagttacaactgttttgtatcttctctccctaactgttttgtatcacttttctcaatcaatgaaatcaatgcttttctcttcatttcgtttcgatctatttcttgaacactaacaactccaactagccgatgcatttaccaaacatctaccttcaataacacttgcatctcatgtacgtaagatgtctgtatacgatatatatagtttattttaaggggataacaaaatattagtcttaatcttttctttttctttgtcagttatggtttgttaagttagctgtgttgtattgttaagttagtatttgttatttcagttaaatcagttcttgtgagtttagttggtttagttcatgtatacataaattgctttgcacatcattgtattcattcaattcattctacaatcattacaaatttctttttttcaattttagcaacaattaagaatttttctataattaattaacaaatttgtgaaactatgatgatagagtataatcaaagttaataaatttctcaaccatgacatgctaactaatcaaatagtagaattgtcatttacaaaaatactaaaatttggttttttttaagcgtttatatattacacaatgcat

SEQ ID NO: 250762 - DNA, 1555 bp, Cannabis indica
gccagcatgagagagcgaaaagatagaaggacaagaacaatggaggagtgtattcttctgtcattattataacaggacaagaattattgacattatacattgctttgtttggagctgggtttgagtaggcaagcatcctgatatagctctacaaccaaaatgcaagaccttcggtggtacctttagtttccaataattcttctaaaaatctccatgcagttgaacttcatcttcattctgctgcataaacctatatgcactctatcctgagtaatgtcctgaaggtttcaaaaatccaactccaatgatcagctgtatttgcattaggaaagggatccccaatataagagcacgatccctgttattgaacagattagcaacaatatcatcatcccatctggactagtttatctgcattaagctagcaacacggtttcgagccaaggctgggtgagaagaactaatatagggctgatgtatgtcaggtaaccaaggatcagtggtaatctgtgtgctcaagccattaccaattcgaattctcgcaccagcatcaatgagattctttgtttcaaatatgtttttccaaatgaatgagggattatttccaagagaggcctagagaaatgacccattagggaaatatctaaatttgtaaactttccaaacatgggaagaatcttcagttaatagtctccatgtttgtttccctagtaaagctaagttgtactctctgaaatctctaaagcccaatccaccaactgttttatgcttgcacaatttttctccacctgatccaactaactccatggttttgttttgaaaattgccacaaaaaagtactcattattctctcaaggcttcgacaagtttccaatggtagcaagaaaacagacataacatagcttgaaagtgcttgtgctactgttttaaggagagtctctttcctgctttggagagaaacaaaccttcctaatgttgcactctctttttgcaacttgtcctttagaaagcccaaaattgctttcttgttccttcccgcaactataaggaagcctcaggtacaaacttgtcccatctgcttcacgaatatgcattaactgacagatacgcttctcgtgtcgatgggtggaaattgctgctaaaaaaagattgatgatctataaaaattacaaatctgccctgaagctgaaagaggatctccttgacggagaccgcaagaaggagagattgagccatgaacagagccattaagcagaagacccatcctttcaatggtaatgcatttttccacccacttgacaaaggtagaatgaaatcccagtcccttcagagtattcagaataaattgccaatccattttgtcataggctttctccatgtctagtttaatcatcatgaaccccttcttgcctttcttcttggacatggaatgaacaatttctcgggctaccgcagtattctcagcaataagtcttccatggacaaacgcagattgggcaggggaaataattctggggagaataggcttcagccgaagtgccagaatttttgaaat

SEQ ID NO: 250763 - DNA, 531 bp, Cannabis indica
tataaaaacacagtatttttgtaaagatttccgtgtgacagtatttttgtaaaagttaacccaaattccagtatttttgtaagtttcccaattaataaattaataagcgttgagctgtctaataaagttgtttactacactttttatgcaatgttagctgtaaaagaaattattgttcgtaattcctatgtttcatacatttttgttttttctcatcaacttaccatagcctacatagtccttgtccacttggttttcccaccaaatcaacaatgccttacaaggtagtcaccctttacaacctcttcaccaacttcagcatttttcttaagaaaaatgagaggggactagtactagtaccagcagggccggccttgaaatgttgtgggctatagggtaaaaattatttattgggcccttatttacaaaaaaaatggtatttttcaaaatcagcaaaaaaaattgtgtaattttaaaagggcataatttttttaaggcccctggactaggtgggccctaggcacaggccta

SEQ ID NO: 250764 - DNA, 1040 bp, Cannabis indica
attaaaaaaaatattattttcacgttatttttttatagcagcaatgtaaaaataacgttagactaaaaacaataaaaaatataacactttgtatttttcgtaaaaatgtaaattttttgtatcttttaatatttataaaataactcattatatttaaaatgactattttgaaatataagtcaggactacccatatgagtggctattaattaaaatttcatatttataattggcataaactaaatatttattttttttagcaaaagtatctaaacttattaataattccattagtttctcaaagcatctagaattctttatttttcttagctaaaaaactaaaatagagttatttttattattgttgcttcaattatgttccatactttacttagtatttgattattttaaaaatatttttataatttgaaattttgtcaaatataaattaattttataaaataaaaaaaaaaagtaaattttttttattaaagtactattaaaaaagtttaacaaaaaagtagggagctttctacatatttagagagctttctatctattgtctattataaagagttatttttttgtaaagttagagctcttttttttttcaaatgtcactccctattttagttaaggagtatgtttagaaaatataggtggagatgtgtaactttcattaatacttttaaaataaaaaaattgattaaaaatagtttttaaatagtataaactgaaaagaaataattataaaaaaatattccttctctctttctctctcttgtgagtgatacatttctatgccccttctacttcttcttcttcttcttcaaaaatcaaatttttaaccaaatagaaattataactaaacatcacatatttatacccatattaaaacctaaaaccaagttgattatgaccatatcaattatcaacatatttcaactcttcaaaccaacaaaaccagcaaaaggagaattaaaatctaaggagtcttgattgggttaccgacatgaaattggagtaactgctgtggatcaa

SEQ ID NO: 250765 - DNA, 1458 bp, Cannabis indica
ttacgaaactgcccaaaaatcccgtcactggggtccccgtcgcgactggcaaagctcccgtcgcgacgggattaaactttgaaacttcaagatcctctctgccagttcccgtcgcgactggcatgttccccgtcgcgacgggagtaaactttgactccttgaaaatctctctgccagttcccgtcgcgactggcaaattccccgtcgcgactggaacaggcagcgacaccaatcttggattttcttctcgattctttcaccacgcgtcctcaattcttgtacatactttctttaaacacacaaggacctgaaacaaaagaatcaagcgtaaaatagccctaaaactagaaacaaagagtgaaaactaaccgaaaatataacccgaaacttagactaattttggcctaacactttgatccaaattgagattggtctctttgtcccaactcagtttgcgagggtgttaattaggtgttagttagacttactgtacatgttagttaggattctgttattacatgtacaactgtatttatcaactgctttaatctttctaactatattgtactctgtatatatatcgaactattgctccttcatgaaatcacacttttgctcattctctttcttcactcttaacattattgacttagtttttagtcaacgatgcggagtcaaaaatacgacaatatgtttatgaactagtaaaataactaaaaccaagaagttacacaatcgatttatagaggtttgtccccagattgtttggtaataacctgctctccttttttagtattacttatggaataaccaagagcaattgaaccagagccaagagagtttcttgattatcctctcagaattacagtaaagtatttcgacagcgtttattgtatttagaagttagaaattggatccccaaaacagtgaaaatgagccactttttatagggttacaagtaaataaatgatacttattacaaaatattcatgaaaatctaactattctctcaatcccataattttaggcacctataatgacttggtcttcaagaattgtggagctaattttgcgaatctagaatagatccatgtatactggttagatggtccatccaggatgtcattttttgatgttctttgggaaaagtcagatcgatcctcgctgatcgactacattgatttttgagtttactaattgcttggatgcttggttgacatcaatattgagttatcctagttgattcaacaattctaacataatacgttgtacttccttgtcttccaatcactccatccagcttccaaccttcttgatatgatatacaccgacttgttatctgtttctatgccacgtgtcattctgcctcataccacatcaccaacgtaatttttgggataatatgtgtggtaagcaactatttgaattttatattcagcacagtaaactattcagaat

SEQ ID NO: 250766 - DNA, 610 bp, Cannabis indica
aaatcctaatttggacgcacttaagtacactaaatggttagttgatgtttcaacgagtctcctaaagatgtcatgggaccctcaaacatgttaacttattttacctttgtaagtcttggttaaaatcgtagagttgactttttcatttctcaaaaatcaggtataacaatatgaatttaacaaaacatatataactaattaattaggtaaagattgatttaatcaattaccccagaaggagattaattataatttttggacaaattaaaatgacaaaagaaagatgaaaactgtagtgcaaaatgtactcacaaaattgttatagaatagataggagtggaggttggtgatgctagtttttgtttggcttttggcttgtattattttggttgcatttgattggttgcacagttatggctcgtttggtacgttgtattagatcgtattgtattgaattatattgaattggacaatatattatatttttatgtaatactatgttaaattttaatttatgctaaaatattatatatttagatacccataaaagttaatatcacatacaattttacataaaaaatattgtaaaaaatacaatttaatataatac

SEQ ID NO: 250767 - DNA, 1281 bp, Cannabis indica
gttatataactatttttgtttttagattttaaaaacagaaaacaaaagtgtgttctgtaaccacttttgttttataattttaaaaacagaaaacaaaagtgtgttctgtaaccatttttatttttcaattttaaaaacaaaaaacataaattttgattttttttctttttttaaataaaaaattatgaatatcatttatttttatttttaaacaaatatataaaaattataaaaaaaaaatcaaataaaaaatactcattaacatcttaaaaaaattcaagtaatttaaaatcacgaaactcattatctataacacaaaaccgacaaagtcataataaaatatgaactaataattgttcaatcttgacgaaaaatattaaaaaagttctaattgttaataagcttcactcattatcttcatcgtcgatttgctctccatatatgatcagcaatttcatcacgaacattagccatttcacgaatttgatctcttgaaatgctaaactcaacactatcattcaaagttcggtgggtgctttctatagtagcatcttatacttcaggaatgtcttcatctccatcaaaatatagaatctacaaaaattacagtaatggttcttaatccaaattaaattattgtaatagagaatattctataaaattggttgtatatactcactaatttgaaaggaaactagaaaaggattttactcttgttcatccacaaattagaaaagtaaaaaaaattgataccaataaacaaaactatacaaacaagggctaacaactcccaaatagtcaaatgcatcagcaaaggactcaaaacaatcccaaactaacaaacaaaatatttatacatgactttacgcactatttattctatgtattaaaagtgatacttttaggaaaatctaaggaatattttgtaagcacacaacacaatcaaattaaaatttggtagattctatcttagaaaaacaataacaaataatgcagaaaacaaaataaaagaaattgacaaaacacaatcggatttatactagttcagcctagagattttaatatgaacaaagtatctgttagagacttatctcagatcagcaaagatcaatctaggaaaccatcgtgaatagaacccaactgagaatttaaagaactattttacattcaacaacttaaaaatcactcatttagagaatcttaattgctgagccctttgaatggagctgatattgttggaatttattttaccaggatcttagatctactcacaagtatgtt

SEQ ID NO: 250768 - DNA, 534 bp, Cannabis indica
attgtgaaaaactagatggacagaaaaaacaacatcagattcggataagcagaacccagcgcaccaggccttttatcaacttaagcgcttggtacttactcccgagctcctatgattttgttttgatacatccaaggcttttgaacttgaggatgaggtctcctaccccatttttgaccattccggactcaatggttgcattagatttggcatttgagtaattaaaggcaactccccaggttgattgtcaacatgggtgctgggtccaaccctaggtcaacctgagcactgggccttgtttctagggacttaagattgtggttttctccttgagttttcttgaatttttgttatttatgatgacgaaaaaaatgcccagaatgcttttttctgaacttgatagggttgaaaatatatcaccttggacgctaggccaaaccccaggtgtcaacctttgcattgggtcccccttttgcccctccaaaaattctattttgcccccaaaaatagttgaatctcaatatattctaaaaa

SEQ ID NO: 250769 - DNA, 824 bp, Cannabis indica
gttccagaaaaaattaaattaaaaactaattttcaaaataataactccaagaattaatttttgaaattgattaaataaaaaatcagatgacatataaattaaaatagactctgttccacaacaaaaatgaactaaaaaaaataacatataataactcagaaaccggttataatttaaaaataagagggaatcatattaaaaataaaaacatagtgacgtaaaataaaatagaactggttccataacaaaacgagtaaaaataaataacacacaataactcagaaagcaagttataattaaaacataagagaaaattaactccaaatatactaataaataaattcaatagaaccgggtccacaataaaataacgagatgacccgaccacacctagaacctaacactgatacataaattaaagccagttaaataaaataagtagatccaaaaccgatttcttgaattaactaaataaaaaatcggttccagaaaaaattaaattaaaaactttttttgaaataaataattcaagaattgtttttttcaaatgactaaatcaaaaactaattgagacaaattaaaatagaactggttccacaacaaaaggactaaaaataaataacacacaataactccaaaaaatcggttataattaaaaaaaaaaaacaaaaaagaaaatcatctccaaaaataactaatacataactaaaataagaaccggccggttccacaataaaaagaaataaaaataaaataaacacataataaattcaaaccgaatcataattaaaataacaaccaacttataattaatgaggaaatta

SEQ ID NO: 250770 - DNA, 6693 bp, Cannabis indica
gtaggagggtgctaggcaccagtggtgccctttagcatttctctacatactacatatatgaatttatattccaacccacacatgcatattcatctatatctagttcgttttaaataactgcttaactatatatgtgtatatatatacatatatactctgtctgcctagtaaaaaaaattagagttcacctcaaattgtaggaagaagtaagaatgattagtagtactgaaataaagaatcagatcggagagtatatgaattgtgagaaaatattacttgttggagaaggtgacttctctttttctgcctgtttagcaaaagccttttgctctgccaagaatatggtcgcaacatcattggatactctaggttcgttcatatacctatactacatatgccatagaaattaatttcacaagttgtttgatttatcttcaatttgtatatatgtatgtatgtatgcatatacgcagatgtgttattgaggaggtataccagtagtgaaagtcatttgaatgagttaaagacaagaggttgtttggttttgcatgaagtgaatgtgcatcacatgagccaacatcccgcccttaaacacatggaatttgatgttattgtttttaattttcctcatgcgggccatttctgtctaaatgaatcaaaccaaactctcattcagtaagtttatttattaattaatgtcactctcctctcttttatatcataacttattcttcttgtaaaatgtttttaagaatatttgaattatatattaactgatgggagtatatataataaaaataataggatgcacaagactttgataagaggtttcttcagaagtgggagtaaaatgctgaaggaaggtggggagatccacgtggcacatagggatgacaatccttacaacaaatggggctaagaggagctagcacaaaacgcacgtttgattctcaaagaaaaagtgtcgtttgtgaaaacacgctatcctggctacaataacaagagaggcagtgttatccgaggcaacaaagagttccctctacaaaaccctttcactttcaagttctccgtcagtattgatcaaaattaattttattggaaaacatgtactcttcgaaagatcattgttaacaaactcacgaaatctgcagcgtaggatttcgaagattagttatttgttgtataggttataacagctggtattaaagtagtctttacttattgttgactttgactctatatattataaagtaatatatccacaaaattgcagaccaacatatgttagcttctccatttcaaatatatatgtacgtatttttcttgatagtttaaaattcttgctttttctattatttcctcgtcgatttgcatggtagtctggcgtggatagtatacagaatacagttgtacagatatatccctataaatttttcaaaaaataaatataaagtataaataaacttcttgtaaagtgtcaatttctttcttaatatgttcattaagttgccacaaaaatacgctcttgaggaaacaatgaaggatttcttaattaattacagacttaaaaaattgtaactttatctagtcaaggcccttacattatgacagttaactgataactagtcgtgttcaaagttgatttcatgctttacagattaaccaacaatattacatttagactttcaaggattttatattgtaagataaaatatgtgcttttgcgagtgaagaggaacgactgggtaatagatcaaattaataatatatcactgttgagccgtcttatagcttcataatctgttgtcttgatgaggctccgtgagcggagttaggaagacactctggaaaatttccctcttgatctttttgcgaagtttgttcttgtcttttccaacaaataatccagcttattagggtctaaatacaatctttcagtgataaaagcatctacatcgaagccactgtcactttccttgtagttgtcattagagtaaacaccaattgagttttcatcggtgtagttatcgtcaatgacagccattcttctcaaggaatcttgaggtgcagtggatgggttttggtctaactttaagagtctctttacactatcaattgctgggtctatgatatctaggaatcccataacccatgaagcatcatcgacaacttcagtacgctgcagcaaccgaaataagtatgtgtaagtctattttacttataattatacacaacaattctttgacataaacaagagaaatttgttgtggtagtaaataacctgctggaaatagagattgcggatttcctcagcacgaatggaatttccttgatcctcctcaaatgctgcccatgtcatccatgtgacgaaactctgagaatttatatttagagaggatctaaataatctacgagctgcagataggttgccaattctttgttctaggactccccaagcctacagcaacatgtatgaacattacttcaaatgggtctattcctatttttcaaccacatccggatgaataatttcaccaaattatatggcagttacctgtaggcatcgcgcagcagtatcactagtcgagtcaatagacaatgccttttggtataattccctagctgtggttatgtttccttctttccactccatccatccccatgccttaaaaaaatcacattttctcatttatacagattattcctaattcatatgtgatatgcataacatacagagcaccattatttcataattctcactattcagtgcacaacatagctagctataataaatttgatcggtaagtgtttgcaatttgagattcttaccatccatactggttggtgagttgggtctaattcagatgctcttttgaacaacactcgagaaagatttgcagttgagtgtttatattccaataaagcaagagattgaagtagaacaggatcccttggattaagtgcatgacctatctttaaaagctttcttcccttatcaacatttccaacattggcttcaaaaactccccaaacatgccatgcaaatctattcttggggcttgcctggatagctttctacattataaaagaagcaaagtatttaactaattgcacggcaagataattttcaacagcaatatataggtaagtgatagacacagatactacattttagtaactgggacatcttaataaaacctctagtttctatgtaacgacgtgattcttaagttgtttagtagcttcaattctactatagtgaaatggaaatggaagtaatggtaatgctataatttggagatgagaaatattcacctcaaagagtcgtctagcaactccattattttcctgttgactctccatttgtgcccatgcctgtttcaaaagcacccgaaaagtaaacaatattaataaatcattaagaaagttactgtaaccaagagaataatgcatgcagaaaacaatacttaccagccaactagcacagcttttgggattacacttggtggcctgcttgaacagatatcgagcctgctcaaagcgatttgctttcgcttccagcaatgcaagcgtttggtatatgtactcatttcctccacaaaatttaagagctttagccagaagactccttgccttcctgatattcccctgtttcagctcaagaactgcccaaccatgccaggcagcagtatgccttttgtcagcaacagtggcagcatcaaataattctcttgccctccttatatttcccatacttttctctaaaacagcccaacactgttgaagatgacaataacatagtcaaaatagaacctaacaaataaatgaaataataacacccacaactgaatttctcaacagtgaaattcaagactactgaaagaggactggttctgttttgactgaacccaccaatgaaaaaaagactatgacaactcaattaaactacatttgattttcttaattatcaattgaacaaagagagtacaatgtacacatatcacttgctcagtttagtaagctttttgtttttcagtaaacaaaatcgtgatatgtttaaacgaacctgccagataaaggggttctctccctgagtagcttggcaacctttctcataaacagctcgagcttccgcagtccttgattgcttgcttaaagttttccccaaaaccacataagctcgcccatcttctggccagtagcttatacactgttcttccaagcaaaaaccacacaaaacacaatcactctcttctccatcatcaaattccaaaaacaactaacaaataaacaagcaccattaaagtacagaacatgggctggcagaagattaaaccttttgaagaatttcctcagcttcggcaaatcggtaactcctgtttagaaccttggccttatacaaagccaagtccaaattcaccggcagaggcttcccctgcaaggagcccgactcaaccctctcccggggctcaaaaatcggtatcttctttgcaaacttcgcaagtccatcgtcgatagctgccgtagatttcaacccatcttcatcatagtctccaactgagctctccattgccggtcggcgaaccacgagaaagtcttccggcgaggagtcggtgggcctcttcgaagctacttccttggtcgaaacaacggctgcggcggcataagaagtggaatcagagtaaggaagcgcggaggcgtggtcgatgactggagcggaagaggaatctctggaagaacaacgcggaatatggagtgtacatttggagaggttcgtagggttctgtgaagtgaagaagagagtaaaattagggtttgaagaaggaagaaggtgcatattgctgtgtatatcggagctcaaactatggaagaaatgtgaggcaggcagacgaagaagaagagaagaattcaaattacaattatacccttcttctttctttttacgtaaatttgttaaacttatgttttataattaaagtgaattagaaaataaaaaagcataattaatttcaatcttaattaaaaggacagttttgtactttgataaaaacggttaacagtattattccaaaaaacaacggtcagcataggatcggccacgtgtttcactttatgctatggctgtgcttcaagaggaatatattattaatttatcattattattatttaatttgggcctaagtgaaaagaatgagctatttgagaaaaaaaaaactgtaaatttattaagacagatcaataagtagaagttagacagatcaattgacacaatagtttgcaaccatttcaaacaacctcatgatcctaatacatttaaatttcttggaacataagatagagattaaggacggcaattatacctgtggatttgggtacctgcgggtatccgctcctaatggagcgggagcggggttcgacttttggaggcgagagtgggtgtgggtttaaatgttcatactcgaatcggaaacagggcaggggtggggaatagatatccgccgcgaactcgccccgatatgttatatgtataaatttaagtttttaagtcataactactacaattaaatttaatttttttattgattatagtaatgagactatttcagttttcatgaaaatgtctacagtaatgcatattaataattacacttaactgttttacaaaaatgatacttaactatttattttcaattaccaattttgtatttgctaactccatttactatacatactagagtaaataccattttagaacctgtattttgtaaaagttaccaattagaccctttgttttgttaaatgacaaaatggaccctgtatttgcaaaattatacaaataagaccctgaattgattttttgtaaaaataaaacttactaaaaattcgatctagagatgttatgataaaactagttacattttctgtatctgttcgtgttaaaaattatcttaaagttgattgtattaaaaaataaaattattgaaaattgagcttagggtcttatttttacctttttataaaacatagtgttcattttgtcatttaacaaaatagagggttcaattggtaacttttataaaacacatggcccaaaatggtatttaccctacatactatatgtaatgggtacccgataagaatccttcctctgttaagtaattcccgtcccgtcccgtcccgttttaatttaaacgcgtattgggcgggtatagagtgaatttaggaagggggtatagggatgggggagcgatccctgcacccgtcccatcccgtttacatccctaagagagatacgttagaaaataaagataaagagacaatgacttatctttccatctatgtttcactttgttgactaaaaatttcacaatctaattcaaccagagaacaatgaaaagctccaccaaagaacaccaaatcaaacctttatctaaagctttaacctcccttacaattcttcaccacaactccaaaactaattctcatattcttttcatcgataaaggtatccacattaaattatatttttcgagtggagatagcttatcatcctagctaaaaactcctctacaaaatttagattgattttgtagaacacaatcaatagtgttattaaaaccatccaaattgttaccttgtgctttaacataatcctgaagaagaaaaaatcacccaattttccacatatgcaat

SEQ ID NO: 250771 - DNA, 531 bp, Cannabis indica
gatctagatttgggacctgagacccgaacctaaaccaaactgtgacctgagagtgggatccagatcttgacttgagatttaggacctgagacttgtacctgaccactagtcggtgtctggatttaggactcagtatgggacacgaaccgaacaaggacttgggccaggacccgggcccaaacttgaaccaaaaacctaaagccaggactcaaaaccagaaccagaacaagaacaagattgggactctggaataggatcaggactagtacccagacccagaactagactcagacccggccccagccccagacccaaactgagaccgaaacccaggccctaacccagaccagaaccaagactcagacctggacttaacctcagactcggacccaaacccaaactcaaaactagaccgagatctaacctcgaacccaaacaaaaactcagacccaaacccgaaccctaacccagacccacacccaaattgggatcaaaaccaatgacccagacctggacccaatcccagaccca

SEQ ID NO: 250772 - DNA, 825 bp, Cannabis indica
gtgctcatactggaaaggacttgcaagatggagcaatgtatcgacaactggtgggaagtctaatctaccttacattgactcgaccagatatttcttatgcagttggagtagtaagtcgatatatgcagcaaccaaagaagccacatttggaagtagtacgacgaatactgagatatgtcaaagatagcattaactatggtctcttctataagaaaggggatgaggttaagatcattggctactgcgatgctgattatgctggagatcatgatacccgacgatcaactactgggtatgtattcaagattggatctggagtagtgtcttggtgtagcaaaaggcaaccaacagtgtctttgtcaaccacggaagcagagtatagagcagcagcaatggcggctcaagaaagtacgtggttgaagcaactaatgaaggatttacaccaatccacagattctgcagtgccactttattgtgataatcagtctgctattcgtctagcagagaatccagtatttcatgctcgaacaaagcatgtggaggtgcattaccattttctcagagagaaagtacttcaggaagaattagagatgcaccaagtgaagagcgaagatcaagtagcagacttattcactaaaggactcagcacaacgagatttcaaaaactcagagaacaactcaatatgaagagtcggtgctgagggggagtgttaaaagtcatcacctcctctacaacttctagaaatttctataattttggtaaaattatagaaccaacgagaattatatagaattaatattcataagaagtttcaagaatatttt

SEQ ID NO: 250773 - DNA, 589 bp, Cannabis indica
cttccttcaggaagattaacaagaatccaggtcttgttcttgagtaaagcaagatgttcaacatccatggctttaagccatttttcattttgcatagcagcttttactgtcttgggataaagggaagccattaagactcttggctttcttattcctgattttgatcgagtacacatgggatgttgattttgggtaacattgggagctgtgggaggtacatcaggcattgtaggggcagttgggggtaataaggctgtattttctgtaggtgtatgggtcatgacaggtatggtagtggactgaggtgtaatagccgttggtgtgggctgtcctacagtagtagaacaaggtggtacaggtgggatgttgacaggacatggcacgggttgaggagtgggtgcaacagtggcattgtgaggtgtagtagggactgtttgattggttggggagggtactgttggaccaaaaaagaacttttgggaagggcaggtattcgaccagtaggtagaggagtagtagggtgattttgagatgcaatagcagctgtagcatatggaaaaaaagtctcatcaaacaatacatcacgtga

SEQ ID NO: 250774 - DNA, 1373 bp, Cannabis indica
tgactattttaaatagttttcacaagttttttgaagaaaaaaaaatattttctattatataatgtgtttattaatgttttatggatctggataatacaaaacattagtataaatgaggtatctttgtgtaactgttatagtattggctatcaatgtataatatatgattacgattgaagtgtgtagaaattaatagcactttgttcccaaaatgtaactatatatggtcattacctgtgtaacgagtgcatacagaggaagagtgaagtagctgcaaacgatctggacagtcaccctgtatacgtaaatataaattaattattatttaaaaaaaatttcaaaacttaatttcaaaaacaaaataataaaatatcagaactaatttttagtttaaactatattataaatatttcactaaatcattttaatatatttaagaataaatagtagtgtaagtacttaaaatttttaatttgtaaacagtagaaacataataattcttttagtagtataagtacttaatatttgtgaaattattaaattttttttttagtttcgtaattacaaatactgctatttttttatagaatataaaaaattaagattttatattattgagtttagacagaaacatgtaacattatttaattctaaatttttttattattaaattaaaaattgaatcaatattgataaaattaaaaaatatatataattttacaaatattaaatattaaaaaatcattaaatttatactttttacatcgttaaaacttttgattattatatcattatttaccgaatatttctatatttaatttgtatatttaggagcataaggtagtagtactacttacgctaatacaactcttgtgacaagaatcgcgttgtgcacatggtagcacgagtctactccaaactggatctgataatcatcatacacaaagaaaataatttatataatatcatgatcaacatatatagatataaaatatgtaattatataatactgaatactaataattaatgtacataatcacagccttatttattataatttgagattagatgaataagttttatttcaaaaccaattggtaaatttgtagattttaaaataagtcaaagactccaatactgaaattagcacacatatggcttatcttctgaactagtagcattttagacttacaagggatcatatttctgatactataatagaatttaagataagataaataaaatttcatctcaaaactaattgacaatggagcggctcattcatcatatatattttatacttttccacacattaacaatgtagaactaacttcaaatcaaaaaaaaaaaaaaaaaaaaacaaaaactatagt

SEQ ID NO: 250775 - DNA, 1017 bp, Cannabis indica
actgatttagttgaactcctatcgagataatttaaaccctaatcgaattagagaatttaaacggtcttgattgaacaattatttatacattatcagattcagtttggtccggtcttaaatgatttggttcgtattgattgaggtttggaatcacggattacaaattataagaacactcttagataattatatatgttttgaagaaatattataaactctacatgtatgtattatgaaaaattcaacacgcatcgttaataataataataaacaaagattgttactaaaatttgaaacaagaagaaaacaagtgtaattctgtattgtatttatgtatctaagagaaaaatggttcattttgtcgaattgattacattcaactattgattaatggaggagaatgcaattttgttatttatttttatgaatttgaagctattatttcattgtaatttgcatagattagtatctaaagggtttaatgaatgtggagcaggtcctgtggctgatgatatgtttcattggcaagcaactatcatgggcccagctgaaagtccttttactgggggtgtttttcttatatctattcacttcccacctgattatccattcaaaccaccaaaggtattacttcattagtattcatgccatcttacttgattacttctgttttgaatgttgatatggtcaaccatgtggtttgctctcgagatcttctagggtccccgaagattgtagggttaagcagggattcctaaaacagttctagatttatatgctggtgttctgggaatcgatataactgtgtatctaatctactttgtttaaaccatatagcatatggggattattcgtagctataatcaatatatgcaaatggccaagtatttggtttgctatccactccttccagggttaattgtgtactagttagtttgagtgttgtggtttccatgtgacttgatctattgtactagttagttagtagttataatcgaaatctgtatcagaatatct

SEQ ID NO: 250776 - DNA, 4485 bp, Cannabis indica
ctctgggacaatctagtagggcgtgtgtgactgtttcagcggggtttggacaaaaagagggaggatatggtggtaaactttccacgcaaagtttttaatcttaggctgcacatttaggttccaaagagttttccaccaggctttagaaagggaagaatcagaggaggagggaggcagggatgcattattagctatatggtaggctgactttacagagaaaatacctgagttttcttggttccatattagtgagtcagctttttggaggccaccgattggaattttgagaatggtcaaaacagagtagtcatcaaagtaatgttgcagtttttccctatcccaaaaaccagagttgtctatgaaaaaacttaccttatcagcaggaggtagatcactacttcttaagcttggaaatttcatacctggaatccaggggtcctggaaagttctgatagagcaaccatttccaaccttccaaagcaagcctctaccaagaaggtctcttccccagactagactagaccaagtgtatgaaggtgtgtgacctagcttagcctcgagaaagttattaagcttaaagtatttagcttttaagatgcgggccagaagggagttaggattggataggacacgccaggcttgtttggctagcattgcctggttatgagagataagagatctgaatcctaaaccaccaaagaatttggaagagcaaagagagcgccaatttttccagtgaatttttgatcctttccccattgaaccccaccagaattgagccatcaatctttcaattttgtggcaagttgatgccgggagtttgaaacacgacattgtgtaagagggaattgcctgaatgacagcttttagaagcacttccttaccagccttagagaacaatttgctgttccagttagaaagttgagaactaactttctgcagaataaagtcaaagttcgatttctttgagcgcccaaagcattggggaactcctagatacttgttgatgaaaggtcttgactctagacctaaagtaccaaagaagtaagtggagatgttggtaggagtgttgggtgaaaaaagaatggaggacttggtagttcaccttttggccagtggctaaatggtaagttgtaagagcttccttgagagcattacaagatgagggagaagcaaccgtgaatagaagagtgtcatctgcaaacaacagatgagagataggaggagcattgcgagcaacagagatgcctttaaaggatccatttaattcctggagtcgaagggcagcagtaaggccttcagagcagaggaggaagagatatggcgataagggatccccttgacgaataccacgagaaggatggatggggcttgtaatgtggccattgatactgaagcaaatttttgcagaggatatgcactgatggattaagctaatgaattttagagggaatttgaacttatttaaaatagccaaaaggaagtcccactcaactctatcaaacgctttttccatatcaagtttgaggcccacccaaccaaacttaccttgttttcgatggttaatggcatggatgacttcctgagcaataaaaatattgtcaaagattacccgctcagacaagaaggcactttggaaaggggagataaggctgcccagaacactcttaagacggttggaaagcatcttagatatgattttgtaaattgttgagcagaggctgataggacgaaaatccctcaaagaggaggcattggatttcttgggaattaagactatgagagtttcattgatagaggaaaaatcctttccatggttcaggatgtctagaatcacagcagtgagatcagaccctatagtactccagtttttttgataaaaggccggattaagtccatccaatccagggtccttgtctcctgaaagttggaacaaagcctgtctgacttcataggcttcaaaaggagaatcaagagactggatttgatcattatccagagatttattaatggcagataggaggtactgggtagcatgactatcagaatcctgagtcttaaagaggttattgaaaaaggaagacacttctctggatatatcatcaacagaagtgaccactctgccatcctcgcacttaagctttcgaatgaaatttgttttcctcgtagcagtggctttactgtgaaagtatttggtgtttttatcacctgcttgcagccaatgaattttagatcgttgcttccacagaatctcatctttatagagaagggaatccagctgagattgtaaggcagctgcctcctgaatttcatctctggaaaggggaaggttggaatgaatggcattgattgagttttctagagtactaattctacgagaaagactgttaaaaccagcgttccagcttttgatatcatcaacacacatttgctgcttaagcaggaatagtcaagggttagagggacttgattgggagagccatggtgccaacttcccttgacagtttcatagaaagatggctccgtgagccaaaaattttcaaacaaaaatcgtttgtgttttggaggcagcatactcgcatcagtgagagttatcttaataactctgtgatccgaaccatagaagccaaggtgaaagagggtggtatgggggaaaatattatgccatttgtggttaactacaccccagtccagtctctcacatgtactgccatgcttccaagtatatttggagccaatcggattaaggggcagaagggtgaatttatttacaaagttttgaaattgagacatagcataagaggggggattagagttgctagatctatcgttaagagataaataatcattgaaatcacctaaaatcaaccacgggagtaagggagcattatcaaaaagtctatcaagcaaaagccaagagtgaactttatcaaaactgtaaggagaaccataatagcaggaaacatgagtagtaatattgtcattaaaagttataatacaatcaacatgattagtggaggagtttaaaatatttacatatatatccgaagtccacaaaaccaaaagacccccccccccccaaaccctattctaggcacctcaaacacattgtcaaaaggaagactacgacacaaactttgaccacggccagcagcagctttgtctccatgatgaagagaaaatttggcttgtgtttcttgacaaaacgggagaggtttctgaatgcccgagaactccccaaacctcgggcattccagctcatgagactcatttttctgggcggggttgccttgcaacacccgcctgttccagggattgattaatggcagtagaaacatcagcaatggtaggtccagctctagcacgcttaaggatattcctgagagaatcaccaaccactaccgtttgaggaagaaaagcagttcttttagccccagccactgctttccccttagctttttcagtaattcttggagtagcatcctccacagcagtgccctcactggcacattcactagccacaaccgtagcatgctgagtggttgtgtagggaaggtcgcagataacagtagagtggaagcttccatggctcaaaggagaaccttcatgagttagaccagtggaagtttggataggatcaactcccatagattccagagtggctgcattaccacgagaggctgcatcagaagagccagtgccaatgtcttcagtagtaagaaactggctcactgcagcagcaagggattgatcaatattttcctgcggtgcaggaggttcatccaaaggaagagagtttgagagatcaaacgggtttcttttaaaatttgatttcggaggggctttgagaggtattttgtaaggaaggtcagggggataggcacgatcgtcgcatttttgaaggtaagtaacgcattttgtaagagtgtgatcaaataggccacagtgaaagcaaatattgggcaggttctcatacttaaaagttaaccatttctcacggtggatactcttgaaatccaccatgattccacgagtgatgggcttagaaatatcgatgagaacgcgaactcaaagaaagagctcagagactttgaaaagagtaatcttgtcaacctccaagaaatctcccacctcatctccaattagcttggccagcttcagagatttttggccaaatgggatcgagtgtacttgtatccagaagggtgagtaccgaagctggttgggaagaagagtgtccaggcctgcaggattggcacatgtgaccagacaatggtcaaagtgccatggttggccctagaggactcttcgcatgtcaccctcatagtgaaactccaccatgaacatacccgacccatattcagagaaagttagagggccacgggtaatccacgcattcctcatagccacttcgaaccactcaagcttgatggttcttggggaaaggattctaaacacaagacagaaagttctactaggttgact

SEQ ID NO: 250777 - DNA, 709 bp, Cannabis indica
taacttaaaattttttaaattttgtctaaataaaattatttaattggactatttaaatttcataaaactattttaaaattcctaataaagttttagacctcctaaagaaataaatagattagttagtggaaaattgaaatgtaactaatactctaaggaaacacttcttattgtcttatagagagaacatgccatcaactattatcattaacattcagtattatagctctatcatgctacacttgctattattacatccttttgtaagttcatttgtaataagtaaaattgcaaccatgattttaaaactaaaagaataatttaaattaatatttactatatatatttatatttgggaattatatgtattattcaatcataatcatcaaaacatcatattatattagaatgatttaccttgtaataatttggataaagccaccttttattaactaaagtgtaactaaacaactttaaaaaaaaataataaaaaaaaataatatacaaatcactttataaaaattactaaaaaatatgttcattttttttttttttgttagaaagaactgttattataaattatagagcgtcatttactaacaacagagaaaataggtagagaaatttaccttcaaaccacatacaatcatcatccaactccaatgcatgtttagtccaagccatgagcagcttggttagcatctcgctt

SEQ ID NO: 250778 - DNA, 807 bp, Cannabis indica
gaacacctaaacacaacataaaataactgtaaaataactataaaataacaaaaagataactataaatcaacaaaaaaaataaaaaggcatcaaacttgttaaaatatgcaaattatttataaattaactccgaataaagtacaacacatccaaaataaatgtactacttttattaatcatgttaaagataaaaaagaaaatataaaaagagtgcttcttaattattttgtaagagagagagagagagagagagaaagaatctatatatctttataattcttttgttggggaggatgatgtggcatcttctatgaacttcctttcaatttctttgcattctctattttttttacttttttgttaattttttcattattttctgtaagttattatttaatgactattcattttcataacacttattttaataatattttatttttacaatgtgacaattgaattataaaattaatgtattttttattattatactataataatttgataaccgaataatttaatctcatttcattctaattcaacttttcatttccttctctcaaaaaataaaaaaacaatgtcaagcacatccaacataaccaattcattcaatatatataataagaggttaagcaagtgtcaagtgggagcttcttacaaagtctttgaattggatgaagaaaataggtatgtcattttttgaattcacatttatatgctctcttattgttttggttaatttggagtaaaaaacttaccaattgatgtaatttttgggtaccaacttatgtatatgatgaagcattt

SEQ ID NO: 250779 - DNA, 859 bp, Cannabis indica
taatttttaataaaagaaaataacaaaaattattaaagtttttaataatttttcttacataatttttatgttgtaaacaaaactattaagttgggtacctatagacgataactataatttttcgagattaagacttatctatattaaaaataatttttttttagaaatttatctgtattaaagtaatttttttgaagacttatgccgtatttaatatcaacacgcggcattttgaaaagaaattaatggatctgttaaaaagaggactaacagacttataagaattaaaaattattgctgatatttttaaggttggaaatttatttagatgaaaataaatttttaggaacttttggtacaatatttcttaaaaagtaataaaagtagtccattacagcacttttacatttttaaataaaaaaagcctgttgtaagtgatttgcaaaaaattgacttgttgctaccgtaaaaggcaacttgtcttattttacttatttagtttgtgtttgacgtagaaaattcgatcaattatgtcaaaatttccgatgtatattaactttttgtcttaagatgtatacatcattacatctatttggactagacttgtggtttttgataggccgcgagattaaatatctattttaccccttgactcgtcgtaccattttgtttcattcatgtctcaaagatttattttttgttcacaaagttattcaatttagtttaatttgtaccaactaattgcaaataatacagcaatttaaattataacaaaatattatatgacaacttatataaaaatgattagagaaattacttttaaaaacttaaatcataaatttaagaaaaaaataaaaaa

SEQ ID NO: 250780 - DNA, 842 bp, Cannabis indica
tttaaatttacagtttgagttgtaccggtagtttctccgttggtttttacgtgggttgctatacgaattttagttgggatttagattgttttattagttactatagggatttctgtgtagaattctataaaaaataaaataataataaaaaaaacctattttaaagtgtaaaaatgaagaattcctcgtattaaaagcttatctttaattttattttttattcttttaaaagtcctctagaaaatactttttataatattcttaaaaaaataagagatattagcagctaaactactttaaatttaaatttttgctctcgtatatagctttatcaaagtgataaatgatcttgttacctttatttcatagttgagaatgaatcaaaataataaatggtactttgtttttctgtctatttattacatatatgtatgtaaaatataaaatttaggtggcgtttgattggaggtaataaaatagaatgaaatggaaagaaaataattttcgttccattcatttatttggaatgacctttttactattttattttggtagaatgactatttcatttttagatagaagaaaagagcattccaatgcataataagaaaaaatttaataattttttttattaatttttatatgtatttaaattttatttcatactatttttatccttatttttgttttcattatcttctcattctcatattttcattttcccacctgcataatgttattcagcgaattttggtgtgcatatgacaagaaacgtacacagaaatgtatttgaaaatagaagagcacatgatattatacgtaacacatttaaatggtacttt

SEQ ID NO: 250781 - DNA, 730 bp, Cannabis indica
tactcataaattatataactagtatgtagctaaataaagaaattggtaattttgtagtatttatttatgttgtaggttgtgaggtcaatttacaaagatccgacttatttggtgtatatcggtttctaggtagctcgaggcatacatttactaacatttattataaattaattaagaatgcttagtagagtttgaatatcttaaatattcatctgtagtgatgtgggttctgtaatatattgtactgcgccggatcgatgggttgaataatatgcatgttagatgagtttgaatatgttaaatattcattcgtagtgaagtaggttctatgaatacatgtactgtagtcgtatgggtggtaaacttttatattggtaaatgttgttgtgattattttatattagtttgaattgtgttttgttgttattaataggtttgaatttcttggaaaggttcaatatagccgttatactgtcaaaattttggtagaattaggataatatttggttttagtttctcttaaacttggttgttaggataataattggttttagtttctcttaaaattggttgctaagaaggagccagaggaaattgtagagatggaggagatggcatactacaccatcattatgtacctaaccaatggagttagaagaaagctaatccaagaaaagaccgcaaaaggattgtggacaaaattagagaaactgtacatggcaccatcaat

SEQ ID NO: 250782 - DNA, 565 bp, Cannabis indica
aagaaaaggaaactgagcaaaaaaaaaaagtgtctggaaacctctcttcaatttttttttgtattttcttaatctctatagtctagagacttgttttccaaaaatcatcaattttttcgttttcatcggtattcttttggtttgtttggtttgaattgctgcttgaattctcttttgtgtcgtttgattagtttttaaagaacttaaagaagaatacgagtagagaaaggcagaggtgtgagttcaattgagggtacaagccatcgaatttgagtgaaaaaataagtgaaatttagtgacaaattattttttgagtgaaacatgtgagggaatgtggtgaggtctttctttatctgttctaactttattgttacaagattcaatcatgtcaaaaattccataagaaaataccggtaatgaaactacaccatctacggttctaaatttacaacttcaagcattgatgggggagatgaggaggatgatgagagatgagtgtgaaaaaatacatgcgatgttagatagggtagaagagggatccaaacagaagccacgcaggaatagg

SEQ ID NO: 250783 - DNA, 617 bp, Cannabis indica
gtacctccgaaggtgcttaatttcctttggagagcaagtgcgaattgccttccgactaagtttcttttggcctctaaacatgtccaagtcggtatgctctgccctttgtgtaatgctgcccctgaaactatattacatgtactggtgcggtgtagttttactcgctcatgttggcagcagacccgtgttcaggccgtagcacctgatgcaatggtgtttcgaagttggtttgctgaaggtttggctacttggagtgaagctgagtgcctcgaagcagttatgaccctttgggcggtgtggaaagtccgtaatgaggttgtttggaatgctatttctccttcaagtgaagaggtaattcacgtggctaatgtaaatttttcggactggtgcaatgcacaacagttcgaaaaagaaactcttcctgtgcaatcaagggtgttgtgtgacaaatggtatcctccaaattttccttacatcaaagtaaatgttgatggcgctttgttcactaccgaagctcggtttggcatgggtttagtggctcgttgtgcggctgggatggtgctgcaagcaaaaacagtgttaaggactggtcttttgcagcctcatgaggtggaagc

SEQ ID NO: 250784 - DNA, 795 bp, Cannabis indica
ttttgtgttaaaagttttaatttaccgaaattagtttaaatttccaattcacccccctcttggaaacatatcttgggctaacaaattccactaacgactcgggtcgttgtgcttgtagttccttctaaaaatcggttcttggtagaacacatgcaatcaacatgccaactaacgaagacttgggggccttctcgaccttggttatttcagcgttaaaacgtttaaaataattctgtatagactcaccgaccttactgtttaatatttgccagcgttgtgtacgaaagtttgtatgccatcgtggcttggaagtgcatcaagaacatgtctataaaagtctccaatgttgatgtggaggtctcgagtaattggctaaaccagtcgtgagcattagcaagtatctgatattttgccagctgtggtacctggtctacttctataatcatattaaatttatctaaataatcgattgggttagtagtacctttgtatttgagtgattcagacagcatgaagcctttcgggagtcgagcttgttgtacttcttctgtaaaaggcggtcccatgaatcttgtaaatgggctttctcttctgctcgattctcaatgctcgtaggaggctttcttggtcaatacctcctggtaaaataggattggcctgtgttaccaattgtatggcagcaactgggactatgttagccaggattactacctctgtagtcccagctggtgcatttagcgggttgactagattagtggggttatttacgttctgtgtgctttgatcgcccaccta

SEQ ID NO: 250785 - DNA, 739 bp, Cannabis indica
tctcataattcaattttcaggttaattttgagcattacataagagaagggtatttttggaatcttaaaatatatcataattattattagggaaattattggaaaagtcttcaaaagattcattttgatgtagataaattctcaatctcaaaaaataacgataataatcctcaagctcgagattcttttttaagtctgttggtactcattttaatagatttattagttgctccaaaaatatcacgtgttgatattaaattgcagcataagtctccaaaaaatttactttgatacagataagtccagaatctcgaaatattgtggtaatagctctaagctcaagattctcgttagtcagtgggtacacaattgaactgctccatttgttgctctcaaaaataccacgtgttaatattttattggtccaaatcataattttaatttaaaataaataaataaatgaataaataattttcaaaactaattaattaactttatcttttttaattttttttctttcttcttcttcttctcattcactcccagcctaacctgcccaaccccgttctgttcaactaaaactcttcaatttctattagcaaggggggcgctctaaagaaaaaaaaagtaaaaattgtctaggtaaactttgaacgagaaaagttgaggtcgaagaattggccacaaaaacccatcatccaccactgtccatatctttctttttctactgcatactccat

SEQ ID NO: 250786 - DNA, 1207 bp, Cannabis indica
aatttattaatttctttaattttttattaagtaaataaataaattagtttttttttttcaaaaagtaataaattaaatgaggtataaaatgcacattatgaaaccctaaagcctcaaactcaacattttccctcactgtgctctacccacaccgacggcaacccttcaccagaccatcctttcatcgtccaaccccaaggcgaacccgatgaaccttgctggtccctctccaccctattgcccaagttacgggctctctcgtctctcaccctcacaacaatcgcatcactgggatcgtgaacggctagtgactcaggtcaccgtaggcaaaaatggaggttgtgggtggtctcgtcgaaatgcctcgtgaactccattttttctctccgccattcacggtcaaacctctgtgaagccgaacgaactatcaccggcagtcaatgcccaatcgtctacaaccaccaccgaagctgcaacttctctgaagctctccgatctttgaaggagaagatccaaaaacctcaccagattaaccaggagtttgattctgtccaggtctttttaggtttttcttctcaaaggttgtttgcgataatggaagcttattgagttgtgattttgttgaacttttttgttttcaggattgtaagataacgccgtcggagatgaagcgaaattgcagtgttgagtttgatttttagggtatttagtagagatttgtcgttaaatttgattattggtttgttgagtttgattctatgtatattatcaatatttttatttactccaaaatttctataatgagaattttcgtctagaattaatattcttatttctcaaatagaatcaaattaattagaatttttgttagaattttagtatgttagaaattctatattgatttgattttgtatttgctcttatgttatcaaattaatgagatttttttttcctgaattactattcttatttctcttctttatttttctttacaaaataaaattattattataacattattattgttatattaaattgtatttttatataatcaatataaattattatttataatatttataatatagtgacactttttgtatgtcactatatctccaaaaatattaataaaaaagaaaaaaaaggatatagtgacacttcatgtgtgtggttgttgctttttcagttaaaaaaatttgactctata

SEQ ID NO: 250787 - DNA, 1100 bp, Cannabis indica
agatgttgaaccacccagagatgcttcaaaaggcaactgaggaaattgacaaagttgttggcaatgacaatggcacactactcctccaagaatctcacataccccgactaccttaccttgtggcttgcgcaagagaagctattcgcctccacccaattatccctttcaacgtcccacattcctccactgaggaatgcactgtagctggatacttcattcccaaaggaagccacatcctccttagtcgcctcagtctcggtacaaaccctactgcttggcctgatgagccctcgcgcttcaatcctgaccgccatcttcctgagaatcgaagtgacttgggagagactaatttgcgtttcatctccttcaccacagggaggagagggtgcattggaggggtgttgggtaccaacatgacaattatgcttttgggaagattgttacaatgtttcacatggaagattccaaaagcaatggagaacatagatttgaagagtaaagacgatggaattctctttaaggctacccctttgtttgctcatgcaaaacctcgtttcattccttctatctatgtatgagtcatatttatcatcatgatatatgtatatataataaacaatgttcatggcttgcatatgttaggacatgctagatcatagagtagtagtactcaacttactggtcttgtctccttaatttagttattgttgtttgcaggtattttatgaatatattactaaacaaaaggtttttgacgaccattataaacgatcatattttgtattatcgtcgattcttatgacatgcctatgccaccaacaaaaaacatgatggaataggtgtcaattatagatagttgctattgaggaataagcaactgttctacatagtcgctatggaataggtgaccgttctagtagtcattaacactatacatgtcaattttaaactgtcacatacaaaaaaaaaatctatatagatttcgaataccaccaacaacaactataataataaatcaatgatcgcatatccaacaaccaagaataatattgttggaacttattttatggctacttcattcctaaaggaagccacatcct

SEQ ID NO: 250788 - DNA, 643 bp, Cannabis indica
ttttttttaaaaaaaatcaattactattttatttcattgaacttgactaaattaaattgtaattgttttttttttaaaaaaaaaaactttcaattggttattatttttcagattacaaaaaaaacatctggaattaacatcttttgttaaaaaatgatattgtatagtgtattaaactagacacatcaatttatttaaattttttttttaaaaaaattatctacattgttaatagagtttaagaattgtagttatacttagattgatttaatatattatgagaccaatttctaacaggtgattttaattctcttttattagatactaagtgcatctctaatagtggtacttgaagaaaatgtttgatgatatggcggaacgtttgcaagaagttaattatgtggaatgatgatattaaatttgaagagtgtttagtattaaagtaagagtataaaaaataatgtgaaagataaataaaataaaatattattttttaaatgatgtgaagacttttgatatttttgaaaagtaatataattggaaatgctttaaatgttaatgtgaaactagcactatagtgtatcaccttaatgattaacaatatttctaagggaaaaaacaaaaaatacaaaaaaggaaaaaa

SEQ ID NO: 250789 - DNA, 838 bp, Cannabis indica
agtatggggtgaatgatgatgatctctctgagatcgatgataggtggtgtctagtggggcgttttatcactgatcgggaaattgatttccttgctatgcaacataagatggcctccttatggcgtccgggacggggtttatatgtcaaagaattagagcctaatctatatctttttcagttttatcacgaagttgatatcggacgagtgatcgaaggcagcccctggacctttgatcggatccaatttgtcttcaaacggttaagaagtggggagaatccacggtctgtagtgctcaatagcttggatttctgggttcagttgcacgggatgtctacggagttcatgtcgcaacgtgttgtaagagatattgccaattatataggcagttttgtcgaagctgatccgaataactttatgggcatatggagagactatcttcgtgtgcgagttacgattcgggtggaccgtcctttgaagcgcaagatgaaattagaaaaggtgggaagtcctgtctgttgggccatttttaagtatgaagggctgccgactttttgcctcatctgtggcataatcggtcatgcagagaaattttgtgagaggctctttgacactccgtctcacttacttcaaagaccttacagtttagagatgaaagctgcaccacgaagaaggaatcacaccatcggctcaagatggttacgtaatggccctgttccaagagctgctactgcctcacctagtgagacaaacgatgggggtcaagagcatgttcggcggccaccagtggaggaggaggagaggccatctgaatctgaacgtgtcccgattgtaaggga

SEQ ID NO: 250790 - DNA, 696 bp, Cannabis indica
caagcgggttggggtctaccagtgttgtgtttttaaaactatgttttgccacataggccggctaaaagaaaaaggacttgtaataatattttgtaaatgtttttgggattccaatttctataacttttagatcgtaaagtttaattattacaagttttattttcattccgtttattacaaaagtttaaattctgcgctattttgattagtaatctcgtttaggggattagagtttcctaaataacttgggtagcgtgcctaattatttaaggcgttacacgagtcatctaaccgactgaccgagatacgggtcatccaaccgaccgactgagatacatcatcccattcaagatatgtcaccatctcatccaagatatatatctttcgagataggtcatcccgtctgagctatcttatcccatttgagatatgtcatcccatcgagatatgtcatccctttcgagctatctcatcccattcgagatatgtcatatatctaggatgtaactcttccacttatatgcttatttgatctaggattcatctttatcgaatgtatagtttttattttagaattggccttttgtgccttttgggcttttttataataattgggcttgcagatttcatctcggccgagagaatatttgttggaatttattttaccaggatcttagatctactcacaagtatgtt

SEQ ID NO: 250791 - DNA, 978 bp, Cannabis indica
gcgtggtgtcgtccgtggcgacgggaagacggagcgcgcgtggattgcctggcactgtgtgtagacgagtgggtaggttttgttgaaggtctgaggcggtgagagccattggagagctgaggcggaagggtgagttgtgaagacgacgaggactgagtcgtggttgttttcgagggagatggtgaggtggcagcctctgattggatcgggtaccgaaagtgagaagggaagcggtgtatgggattttgggtcgatgacggagtggacgatgactgaacgagcgtcgagggagagaggacctgtgtatgggttggggaaggagagaagagctgtgccgtggattgtggaagatgggaagtcgaggtagagagagagggaaatgtgagtggcgaatgggtgtgttgagtcggtgaatgagtgtgggtcaacgggcgccattgacggaaagttcgaagcttttttttttttgagttgcagagctgagtagctgtggagaagagaaagagttcggtttttgttttttttttaaagatttatttattgagagaatcgttttttaagattatttaatgaaaattaaataaaggagttttgtctagacacataaaaatggtatatttttaaggtaaagaagatcctatttagcttagagactaagcttaagctaattgattttgtttttttttggaaatgttgaacgccacgtgtgctactatgatgtgttatgttacaacttacaagtacaatttaagactatgtatgatctaaatacaagtacaattaatgataacatttcacctaaaacactttgatggtgaaactaccatgtctcatcacctcaaactacacctagatagtggcatgatatcaactcacatttttcattgtcaagatactcttcatcagggcatcatctcggccttagccgagatgcatatcgttagggcatcatcttaactctagccaagatgcacatcc

SEQ ID NO: 250792 - DNA, 1441 bp, Cannabis indica
tcacgaacacattttcttttagtgttgttgagccaaaaaggtgatgctagatgtaaacacttggttcagttattcttgctggccgagtattctgagcagtggaagatttggtgtgagaaaccaatgaattgtttgcaagataggttgatgaatgttgttatggctgcagccattgattttctttggcaaaataggaactgttgttgttttaaaagctactgcaatgttgctggttttattagcagggaaattaagtatggtgtcaaatattaatttctcagcattttcttgaacaagttaaaggggatatgtatatccaaaatgtaattaaaggctggtagtttcttctttgagcggttgtattgggcaactggcttttgtttgtatttgtttgtcttttgaataaaaataattacattttttaacaatcacaatttggtcaaattttaccatttagattacctttcctagtaaaccaaataaagtaattctgattttcttttggagagtttagtaaacaacataataaaatattatttctaattattttatattgtaaacacatccaattgatttttgattccagatacagtttagtaaatgttccccctcacttttgtcactaatattattttattcccacttttaacatggtattattttgatattatatgtaacgccctgaccctcaggaacgccacgtgtgtgtgtgcttttataaacttattattattaatctataaattttagaaaagtgtggtttaatttaaatctttaattaaattcaacataaagactttcattttaaataatgtcgtaatatagggatcccctgtttataaaataaaaatattcttttacaataaattacatttccaaacatagaaaggaatttcgatcctgcttcccagaagccaagaccccaggctgatatgtacattgctggagacctctgactcatggccgaacacagcttccaacttccatacctgcaccacgaagcacccgtgagtcacaatgactcagcaagaaaagctactaattagactttatggaaagtgcaggcagatttcataataatataatatacataccggtaggtcttacatatgtcaatctacatatacaaaataacataatgcttatgtaagcaaatttaatacataataaagaatatttatagctattcataatcaaccatctcagtggtttattaagtaccttaatcacacatcattataaacactcactttcagtacctcataaatcactctaattcatatattacagtaaccacataatctcagtgcttaataaagcactcaaacacataatcttattgcttcataaagcactcaattcttacatccctacaacatgtatttttacccccgacagttacagagactaatttcataatataacgttcattcaatcatac

SEQ ID NO: 250793 - DNA, 1232 bp, Cannabis indica
gtaagaaattaaaatataatactaaaagagatatataagatatgaatgaaataataataataataaaagttattacttagcaacctgtgagaaatttttaaaagtgaatataatttttgtaatttttatatcttgttaaaagtgataaactaaataagaaaaaagaaaatacccccaaataatcaaggttggaatctatgaactaaaacagacaagtattgtaaatatttaaatggtgaaactaaacaaagatgaaagattaggtctttaagtgttcaagcatcaattcatcaataaaaatagaaaaatactcaaaaccacaataaagtaaactataccatctttattgccttgcctttcattcataattcatctcatttaaaatactatatgaatggattagtaaagaatttaacttacattgtcgtcatcttgaagtagcttagatgaaagtttgttgattttaatagtgtccagaagtgtggagttctttttttttttttcttttacctaagcaaatgagaaatttggattaagcagtagtatttatatgtatatgtgttatttaaaaaaaaaaaaaaaaaaccaatattatttgtcatttgaatatactataagtacatgcatgttgccaagttttagtttataatagttttgtaattacatgctggctgacaagtgtatattttgtaatacatgtaaattgccaaatgtcaatttaagaaagagagagagagagagagagataaagtgtagtgagcatttaattttttcattaatttaattagatattatgtgtaaagaaattgatctttaagaatagtacaaaaatgatcactcacttgtcttggaatgtagtcatttaggatgatgggaagccccctaatcaaggcctcagcaattgtaccaggtccaacctatgaaaaacaataataaaatgatcagaaatgttcatgacaatatatttatctacatatatatattaccctatgcagagtgtctttctaagtaggtcacctttgttattatgcaatcacaagctcccatgcatttctccatttggttttcgaaacctctaatctaaaaaagggtgacaaagaaatattactgttttggagtttaatctcagttatggtaagaaaaaataaaaagctaagtacagtcaactactcaccttgactgaaatctttcattcttcagattcaagtctggatagaagtgttttatttcgg

SEQ ID NO: 250794 - DNA, 1347 bp, Cannabis indica
ggtgtggtttttgactatttttttcaaactaacctgtgcatgtgagttttttcaaattttccaaactacatcctcaccgcgaaactaaaaaaactacaaaaactgttgtggtgcggtttctgcagtttctgcggtttggactatcaccaaataattaaagtatcataaatacaacaaagtttgagcaacacttgtcaaaaatacaataaggcttgaaaacaaatatgaaaaaaagtttcaagtttcaacaatacaataattagtagattttgggttgagtcttcacatatggacctaaataaatataaaaaaatttatttttataatatgtgatgcggtgcagtttgaactgcatattaacaattcaaaactacaaactgcatcgtaccacgccatgcagtttaggaaaaattcaaaccgcgaccgcaccgcaaagaattttaaacgatatttttttatggtgcgagcagtttgagcggtttgagtagttagatgaaaccctagttgaaggactatgaatgaaggaatgaaattttaaactagtagctgttgaaattttatgccccaaataaaccgaattttaatgtaatttaatttcattatcattaaaaaaaatagatgctatttcattattatttcgtatatttcttggttcacatgttactttcatgatcgtatgtttgatatataaattctagtaaatcgttatcgtattattattcatgatttaattgggactatatgatataaactatattggtctcatgatttattagtgcattagatttacactgacatgataatcagcgatgtagtttgcttacacttgtataagtggaatgtctttttcagggcattagcaaagtaagcttgtatcagatgtattagttatacatcgaactgaactgatattaatagtggaaaatatatcataaacttatcgtaatgtcttttctaagtcaatgtcacttagttgatcttagattgatggtctaaatcctgaaatgattaggttctaggccaattgtactattcaggttctttgacttgttctttacctgcttacctgtaggactagctcatacttacatcttgggaacatggtaatgtaattgagtggagcgctaatcgtaaatatagaatttacagcttctataaactcttaaaagtgaaacgatgatttctgtatatcttggctaaacgagtttaaatggtgaagtactcattcagtaattatattagtttactggaatatcatttataaattgttaagtgttttaaggataaaatacattgaaagataaaaacggtaaatttttccttgctcgatgtaaatcgtctatagag

SEQ ID NO: 250795 - DNA, 606 bp, Cannabis indica
gatcatggccacccttccattagttcgaggaggttatctgggtacctgctgatgaggaacacccccgggaggtatctgcccttccagtactgttgtaggtcccccctgaggtgctgggactctgacttgcccaagattcaagtgtggtaacctatctttgatccattcatataagtggcttaatcgaattaagctctcgatttaatctttcaagtttttgcactcgttagtggtgtgaccaatatcgttatggtagtcgcaccttttgttggggtctctccggaagctatctcaatacaaaggaagatgcttccaataatgagtgttgtgttggattgagaagtacactcatttttgagtatccacgtgtattatgtatactggggggtataacctctcctttgtctcttatccttaggttgggtgcttccttttgaggatctcttgctctaggagttttggggggctcccgcaacacttgtggttgatggagaaaattgagcatggacctagtgccccaaaactatattgagccagaggaagagggaggttttgagtataccgtggggtcactcggcttgtctgtggtatagtcgggaggatagc

SEQ ID NO: 250796 - DNA, 1241 bp, Cannabis indica
acaattatttttatataatttaataactatataaccaaaatagcaaaatagcccataagtaatttttgtagcaattaaaccttactaaaattaaataaatttattaagaatgattatatttttcgtttaaagtaagcacacatatattttataataattattacttaaaaaagatattttataataataagcttccacaaactaatttttttggaaccctcactggcgagaaggcacttataagagatgcgctagcaatacgtgcacttctggcaaagagaattgccctatttgagggacaggtgaggagactatggagcacctttttcttcactgcaacttagctttccatttgtggagatcttccccttgggtgtttggccggtttctggttctggtagtcgtatgtgggattggattaattttctttggggccttacatcaaacggtgttaatgttaatgaggtgttcctttatgcctcgatagtggtggatacaatttggtgtgcttgaaatgataaggtacacgacaatagtctgaatagcattaaacattctattgactctatcactcattgctatgcaaattatgactcttgtttgctcccttctcctcaagctgttgttgttcacatgtggtctcccccacctgaagactggatcaagattaactgtgatgttaaagtaggtagtgagactaagtgtgtggtgactttggctagagatcatctaggaacaattttgtgggttactactgagaggctcgacttcgttgatcctcttattgatgaagttgcagctttgcttactagccattgaaacaacagtttctttgaagcacccttttgtgatgaatgagatgttaaaatttattggggtcacaattgtatatataaaatgtgtgttgggtcatcaaataaataagtcaaatttatgtggtctattttggaataaagtttatgacttaagggcatgattattatgattttaatatgtggataccataaggacaatttctatattgatgaggggccaaatagaaatagtcaataaatattaccaacaggtttgtctgttggtaatataacaggtaatggtccccatttgcatcttatcttttcactcttgtatccccatcaccaagagcaaaagtttacagagaaaggttttgatgcaaattggaagatcataccaatctaaggttattacaatgttgattctatggactccggtacgcttcc

SEQ ID NO: 250797 - DNA, 1173 bp, Cannabis indica
gtccaagtctgggtcctgggttccgatctcagtatgggtatgggtttgggcccgtgtgcaggttagggcttagtgtttagagatttaggttttaggattttagggcttagggattaggggtaactataaagagtttaggatttagggttcaagggttcgcttcaagtttcggttccaatttcatgtcacagggtacgatttaaggttcgcgtctgggtctgggtccaggtatgtgtttgaattcaagtccaagtcttggtcccatatccacagacgaaccacatgtcgagtcaagttcaaattcttatacgggttcggtttttggtcctgatttgggtttgggtccatgtctaaatcccaaatttaaacaccgactatgggtcgggcccaagcctcgagtcttgggtcatgggtcccgggtccaaatctagatcctggtccagttcaagctcatgtcttgggtcttggttctcttctcaggtctaggtttgggtataggtttcggtcttgggtcctgagtcattggtcttggtccccgattcaagttagggtcctaggtcctggtctgggttacggtcccagtccgagtgtaggtctcagttcgtgttcggtactggtccttctcttgggtcttggccatgtccttgtctaggtcacggttcggttctcaggtccatggtccgagtatcgagtccagggtccctgtcccgatcctgggtcacggtctcggtcccagttcgggtgctagtcccaatcaaggttcaggtctcggtcctagttctggtacgagtgtgggtctgggtctggatcttggtctgggtccaggtctgggtctagatcttggtcagggtccgagtttcagtccgtgtctgggttcgggtctgggtttgggtccgggtttgggtacgggtctgggttctagtctaggtcccgggtcagagatcctgggtttaaggtcttgggtcgtaggtcctggcgcaaattcgagtttaggtttgggtctgggtcagagtatcgatcctagtctgggtcaaggtccgtgttcggttttgtgtctagatctggtattgggtccaggtccaattcatgttccagggtcttgattcaagttcttgtaccgatttcgtgtctagggtccgagtctgggattaggtcctggtcaggaaatggttc

SEQ ID NO: 250798 - DNA, 877 bp, Cannabis indica
tctggatattgcgtttttcttggcaactcacttatctcatggaaatcaaaaaaacaacaggttgtctcccgttcctctgctgaagccgaatatagagccatggcaaacgcaacttctgagctcacttggatcaatgcccttctacgagattttggtgtcactccaaaccttcctaccaagatgtattgcgataacactgctgccattcacattagtgaaaatcctgtgtatcacgagcgcaccaaacatgttgaaattgactgtcatttcattcgggaaaagattcaacaaggcctacttcaactaatgcatgtttcttcacaacagaacttagctgacatttttaccaaagctttactaccatctcacttcagtcaaattgtattcaagatgggtgttcttaacatttacactccatcttgagggggctaataaaaaattggaataaaaaattacttagccttaattctcgggttctgttgtattctgttattgattagttaggctgtaggctttgtttttctccttaaatcgactttgctcaggttgtatataaacctcctggctcttgtaaaatcattcagacaacatagaatatagagactctgttttcttctcctctcaaattctctgtttctcatatagagtttatatattaatgacactcatcttaaaaaaataggaaagtaagactttagtaaatatattgttgacctcccttttagtcaacaacagtgagtcaattataaagcgattagaattgtaataaaaatagaggaaaatcaataagtaataaagaacaccagattttgaagaggttcgattactttattacggtaatagtatactccccttagattgtattaacttgagaaca

SEQ ID NO: 250799 - DNA, 1130 bp, Cannabis indica
atgtcctaatttaacccagaatttgtactctcagattcctcagaatgatattgtccttaatttcaggccatagtttttaaatctcaaaccatacttgaaattaatgacataaaaattaggaatcacctctttaggtttaaccaagaggaagtcatctagggtagacaccgttatctacgagaagaagcttggctagagcctcataacttagttgatattccctcgacaaagctattatttttaccaccagtcactgttgctttttcaccagatgacttggaatttgaccttatgactcataaagctcgcaaatccaagatgcctcagaatccttctgttatgtttgaagctgaactaattgaatctaggataaggtcgattgtccctatgtgggggatgtattaagatcttgtgggattagaaacgagaatggatgttaaatccgttcagtcgcacctggggagtttagctatttcccccataatgcatcattagagatgaaggctgcgacaccaacgagtcctctaaaattggagcctagagcatggaacacattagggcaagagccgtactacccttaagggattattttaaagaattttgcaggtatctcgggatagcacctttccagctcatcccaaattcttataggatccttgcttgtttgaaggatctccaccacatcttaaattgggagtgtccaactcccctagagattttatacttttactccgtaaaagcttttcttgcgagaaagcatggagcaggaggcttttactatttgggaactcgtactaatgatcgtaagatcatagtgaggcttcccaataaaaaggagtttagggaagacttcttttggacaaatgggttccatccaatctacaacactaagttcagaattttacgtaagtattgataattctcaaaattttggttttgagttgtttttttatgattttaatgctttactaattctaatttttcttgctaagttttagctattataaagagaccaatccccactcctgaaatgaaaaagaggcatgagattttgaccacactactacaaaaatagattttctcgacgtttttaaacagtcgtttaaagtattcctgtcagtttctataac

SEQ ID NO: 250800 - DNA, 727 bp, Cannabis indica
tctctctctctctccatttttttttctctctcttcaaagcttcaaagaagccataaccaccaccaccaccactttctggcgaccactctctggtcaccgttcaaccctatgcgtcggaccatttgaaaccccggtactggcgaccttaacccccaagcagcaccgcccctttcgccaacattagcccagaatcgcaagtcaaagtttgaaggttcaaactttgaacggattttccagccacctccagtgtccgtttgacaagtggtcttcaccactagactcagcttgtcgtgaagaacaacctacaccaagtcattttgcccaacccgctacttttttcggtgacaattttgtagctctgcccctttttggcgatatagtgtactattttgacaaacgattggcatgggtgtgatctactcgtcgaagtggtcgttttgatatatactactcctatttcgacgatgttttcggtacattcatttttaccgccatcgatagttaatgtgcaccgcttaggtgaggttttgaacctccaaattttaaatatagtcaaattatatgtcgttggactcagttttgaaagaagaatgtaatgatgataattatatagccatttgatggtaggtgagagtgatagctaaaattggaccaaacaatcggagcttgggacttgagagcttaagatcgtcttttggacaaactttaacgacttgggagaggtagg

SEQ ID NO: 250801 - DNA, 609 bp, Cannabis indica
aaattaaaaaacaaaaatattactaaacgtcacctagatagttgagtccaattggacaaatttctttccacccttttctttaggcatggattaaaattaaattaaatgaagtctacaaagacaccgtggaggaagagatgtattatttgatattgaaccctaatcagtattttattgtttattcatttatttatttgaaagcaaaccataaataggctgtgtggaaatttcatcaacgattgaggtagttagattcaagaatttttgtccaattttattaacggatacttgacatgaataaaagttcagaaaacacaatttactatatgtcaaaatttggaagatacgatttgatagatttggtacatagacaatcaccacattagaccatctctaatgggagatataaaaattatactatatttggcacaaaatgtagatttgtggtaaatttacactaaattttagctttgtgctccaatgcacaattacaaaattttgatgtaaaatttaatatctaattaatattttattaaaaaaataaaatctaataactttataattaattttattattattttaatatgtaagacaataaaataagggaaa

SEQ ID NO: 250802 - DNA, 812 bp, Cannabis indica
ttatttcttcacaattaagcccttgcttagtgaaaatttataaacaagacatagtctaattttagaattataattaattaataaaaactaattaactaagtctacaagcagtattatctcaactagtgtggggaccatgggcctatataatcaagcttccaataagtggttctagaatttaccaagtaaattctctaacttattaatttcttctaactccactatagattcagaattgcactcttaactatatagaacactctatatgttccaagatatagatacactattaattattcattgttataatctaaatagttaaagatcctctacagacgatctacatcgagtagggacaaatttatcgttctaccattcaatgtattttatccttaaaatacttagctacttaaaaatgatatttaattataaaaatgagatctcaatcttttatctctattaagacaagctcaaaggaaatcatcgtttcacttctaaatacttatagaagttatagattccatatctatgattagcgctcccactcaattgcactaccatgttcccaagatgaaagtattgggctgatccattggtcaactttaactatttaactctaagaacataaataatgtagttcagatcgaacctaactatatcaagattaaaatctattgacctaagatcaactaggtgatattgacttagatcgatgttacggtaagtttataatatcttatctaatgtcaatatcggtccagtctgatgaatactctatacatccaatactagcatactttgccaatgtcttg

SEQ ID NO: 250803 - DNA, 836 bp, Cannabis indica
cccacaacgctcccaacagctgaaagcgaatgagcaatttaatagcacatgagaagcagtctcacccgcattgtgacagacagggcacaaggaggatagatcgacattccttgaagccagttcaaggcatgtggggagagtattggtgacagcgcgccacatgaagttcttcacttttggcggtattttaaggtgccaaaacctgtgccaaaatcctgagtttggttgattctgctgaccatgtttactaatctgcagcatatcataggcactacgaacagagaaggaaccagacctttacccttccaggaccagcagtcttcgtttggtgtagaactcaacgggattccaagaatcaaatgagcatctcgagggttaaacatatcatgaacaagagggatatcccaagatgtctcatgaatatccataagagagttgaccattttattgtcaaggccgagagcattggaagtcacaaaaggattgacgggatcgggaagccaaggatgcttcaagatacttgttgacattccattaccaatggttcgttgacaacccaatttaaccaagctttgtgcactccagatgctacgccaaacgaaacttgggttgttgccaagctctgcagtaaggaaatcagagttgggataatacttggcttggaacacacggctggcaagggatgttggggagacaagaaaccgccacccttgtttggccaacattgcaagattaaagtcatgtaagtgacgaaaacccataccaccggaatgtttgggagttgccatacgatcccaagacatccaaatgattccttgacctttagcacttgaagt

SEQ ID NO: 250804 - DNA, 840 bp, Cannabis indica
atggcagccaagatcgagaacaagaaccaatctttatttggaaatcgctctccttggggcaattccaaatacccgagccaccacgaagatcgcaagagcaccgaattcccaccaaaggataggaaaccaatgggccaatatcggagaatgactgattccgaattgcaagagaagcgacggaagggaatttgttatcggtgtgacaacaaatggtcaccgggacatcgatgtgaaaagaaagagcttagtgtgattgtgacccatgacgatgagattgaccgaggttgcgaggagaactcaaattctatgcaagaggaggatcttagtttagataatgcagaactgaccggtgcagcagaagtatctttgaattcagtcaccggtgtgaccgctcccaagaccatgaagatcaaagggaccctcggcagccaagatgtaatggtgcttattgattccggagcaacacataatttcatttccaagaacctagttgagcaacacaacttgcctttgacaaaaactggggtttatggagtaactcttggttcgggtaaatcaattaaaggagaaagaatctgtcgggaagtagttttggagctacaatggttgaccattgtagatgactttttaccttttgggctgggatgcactgatgtgatacttggaatccagtggctagcaactttggggaccacccatgttaattggaatcaacaaacaatgaagtttcaggttggggaccaaccggtaacaattaagggggatacttccttgggcaaaagcgtggtaactttgaagtctttagtacaaaattgtcaaaggaaacaatcccaaccaaat

SEQ ID NO: 250805 - DNA, 801 bp, Cannabis indica
atttagttaagcagagtctgaattttgcactacggaggtttttcgtaacttggaattataacgaagcttacatggttcttcatttattgggtgaataaatattttcgtgatttaacagatgcacaaattgttgggtattacatgattatatgaatcaatggtttgatgtagtatttactttgcccatggaatccgaaatcaaagatctcatggatgcccacggttgttgcttttggctctatccattttcttttctctccatttaataaggttggcgttatattcatgttttatttgtgctattttcaggttttctggtctctgtggatttgtacatgaatttgcaggtttaattttttaatccaatagtattttaaaatatatgtttgtgtttcatcttgatatatttgtatgttgtattctacatgttttacttataaactctataattacatttcctttttactttttactacagatgtaacaatgttctttatcttcgtggagtaccggaggatgaagaaattgaagatgctgagcgagaatgaatagcagctcggtcagctatgtggtttatgtcaaagggcagttcttaactttttcttttagtggctgctctggaattaagctagacgtcataacaaaattgaatcagtagactaataaggcatgtttcaatttaataaaatgttgtggtttaatccctttctaaatgacttctaagagtttgtattaattgtattcaagtataaatagtcaatttaccataactaaaaagaagctaatcattctaatgtgtgc

SEQ ID NO: 250806 - DNA, 2204 bp, Cannabis indica
aaaaaaaaattaagaaattatatttctcatctacaaatatataaaataatttcgaaaatatatttgaagtttttttaaacacgtctggtagactggaatattaagaactctgttttcagtactgtaaactatttataattttttaaaaaataacaaaaatattattataactataatgaatactgctaagaaaaaaatttaaaaaaatattttggcatgtgattttaaacgtaaaaattgattaagaaattataataagagattataattaatattactcaatacaagtttttttatttttatagatactatactcggtaaaaagtgcgtacaagctaacccaatcaagcttcgagcaagagagtagttcggactcaactactttttggaaggctatgtgggcgttaaaagtacctcccaaagtgaaaaatttgatgtggagggactgcactaattgccttcctacccttgtgtctttgcgaataaaaagagttcaagtttctaatatttgccctgtatgcaacttgaaggaggaaacaattactcactgcttgatttcttgttcatcgatcaaacaagtgtgggaaacgacaggtattggtactactctttcgactgggatgtgttttttagactggtgtgctgagtcttttaaagggttggacaaggaaaaaaggtgtagattggtcactctttgctggacaatttggggtgcaaggaacaacaaaatttggaagaaaaagtcaacaaatgctccggaaattgttgcttttgcaaataactaccttggccaatggcatgctgctcaagatcatgagataaatccatctcgggttggacttgtagaaggggatggtgctgagcggtgatgtacgcctcaacgaaatggtgtcaaggtaaatgtagatgcagcaatgtttggaagggatcgtggctttggagttggtttagttgctaggaatgaccgtggactgctgatagaagcatattccagctgctttaatggtgtcgttcaacccatggtggcagaggcaattggagtaagagaagtacttagctggataaaaattaaatcgtggcagcaggtgattttggagacaaattgtctcaatgtggtagaagctttaaggaattcaattgaaatgatatctgtgtttggtttagtcatacaagaatgtaaaaatatgcttgttggtatggaaaatgtttttgtttgtgttgttaaacgttcagctaatatggtagctcatgcttttgtaagagcttttattttgtattctgggcgtggcttcagtatggggatgtcccaactgatttgttaccatgtttagtaacggaagttgttggttaataaagattattaccattcaaaaaaaaaaaaaaatactaaaagtaacaatgacacattaataatccaatactcacgttagaatgaaacctaacagtctcattttacagcactctgattttacaacaatgtgataagtagtttgaagactattctgatgcaaaactctaaataatattttaaaaaaataacaatgtaaaatatatatagtaaaataatgatatcttattaatctcttacgttgcgtttttctgacaaaaaaaagtattaaaagacgaacggaatccttaatgcaatccgtgctccagtgttttggagcctcttctcataataatgataatgataaaaaaaaaatgatcactgcacaaggatgatacgaaaaaggtctaaggactaatatgaaataattcaaacaaattaaggaccaaaatgaaaagtttataacaaataaatagaaggagagtttttgctataaaattaggcatggctagtagtaaggtgattaatccaacaagaaacatatggaaggtaaatactaatagttgacttttttgggttgaaagttaaaaggtgggggataaaattgacttatttgtaaataacctagggaccaatagggaaatagatgattaatccaaagtgtaaagaaaaattaatggcaaacgtatatgattgatgctaggggtgttcatccaatccaattcgtattattttgctcatagtgtatccgatctgcactaagtgcaaatttcatttttttggattcaatccaatccgcacaatagttcaaatcaaatccgcaaaagtacagattagatcgattattttagattgattattttttaatattaaatta

SEQ ID NO: 250807 - DNA, 548 bp, Cannabis indica
gggatttaagaaagggttaattggaaagaaaggctatggcgaaagaattaagtatctgttcatctttatttttttaattttcttttttgattctctttctttctttctttgtctctcttttctgtagggttacagatttgaccttggttagggtcttcgatcagatacgggatgtgggggacaacttgggattgagacactggtggttcagacctcatggtgacagatatgaagaataaatgtggtaaaatatatttagggtattttgagtttcttgaattttttttgctaaattgtttttttgcagacatagttttattttgttttttggtggtcttcactgtcgatagtagacgacggctgtaattgggaatggtggtgggtgagggtcgggctgggatggggattggtgaagaagaagaatttttttcaaaaaaaaaaaggaaagggaaaaagacaaaataattttatgattttaaaataattttcttagtttctttttttattattttaaattatttttaattaaaattatgatttggaccaat

SEQ ID NO: 250808 - DNA, 850 bp, Cannabis indica
ggctgtgttagttggaaagcaaacctacaaaaggttgttgctttgtcctccactgaagccgagtatatggctgcaacagaggctgtgaaagaagctatttggttgaagggtttgacatctgaattgggaattgaatctgacaatttgttcatacattgtgacaaccaaagtgcaattcatctcatgaagaatcctatgtaccatgagaggtcaaaacatattgacatcaaacttcacttcattagagacattattgctagcaaattggtcaaagtaaagaagatatgtacacatgaaaaccctgctgatatgttcaccaagactgtcactagtgagaaatttaggctatgcctgaagttgctgaacattgaagactgttgatccttcatccatgaaggaaaactttattgatggaatggttttgcctatgttatttttttttgctcagttcatccttacttgcaaatgtatataaccaggtggaatttgtggggttcatatacagttgcaagtattagtttagttagttatttcggttgtaaacttagacagttaattcagttattttgtgttagtttgcttgtactctcagcctatgcatataaaggcttttattctgtaattgagtaagagacagagagagagagagagagagagagagagagagagagatcgagttgtgagctgagggattcactttgagttgtaacagagcatgaataattcaattcatgtctctcaagtgcctaagtttctggtgtaggagcaagactccatctagtgtgtttgctgtctattgttgtggattgactgagttacattcattataataaaggcaaagcctcaaggc

SEQ ID NO: 250809 - DNA, 1299 bp, Cannabis indica
tagtcacaatttccaggattcacgagtatagcgttaatccctaaatctactttcacataatataaaattggtattcaaaatactaataaagacatagagcttggaacaagctttccaacgatatatagaactcttgaaagggagtccagatcacaaagttataaggattcgaatttgcccaaaaacgaagggcgggtcgcgacactccccacatggggccgcggcacctgggtttaaaacccaggatttcaccataggcgggccgcgacgcctagagagctgggctgtggcccttgggtttcaaacccagaaaatcccaattttcaacttcgaattacatgctcaaacacacccaaactaagccaaaaacatactcacacaccagattaaattccacaataatacccaacataacagagggcaaaacacacatactaaagctcaaaatccacagctcaaatgcatctaaattaatatttaaacaatatacaacttaggctccaaactagagcaagattcaccaaaattccaacttcaagagcttaaatacttaaccaacattctcagctcacatacaacaacaaaattagagctacataaaaatattaaagcaccaacctaacctcaaaattatctcaaaacacaacacaaagcattctactccaatcttctaacacaaacaagcacagagtattaagattaaactaattccaacacacatgcatcacaaggatctttacaacaaaatcatgcttaaatcaacttcaatttcagcaacaattgaaaacaaaaagagatagaaactacctcaagatctcaaaatcacacaagctccaaagatggccacaaatcaagcttgaacccaagctatttctcaacaaactcacaaattgaaaagatgaataaagagagagaggggggtcgtgtccctagggccatataacacacacataagcattcaagggtaaaattgtcttaaacacatatcacattactcaattaattttcaggttattcactcaacaataatatgccaatataaaatcccaaaattgtatttcaaccccaaacctggttcggcccgaaatacccgtttgtgactataccgcgccaacatgtcagaacacacctgaaaaaggacaaaataagtatactatataataatatagtccataagcacgtaaataacctgaaaattaattgagtaatgtgatatgtttttaagacaattttgcccttgaatgcttatgtgtgttatatggcgctaggggcaattttggtctttttgaccatttgttt

SEQ ID NO: 250810 - DNA, 1021 bp, Cannabis indica
tggagcaactagtggtaataatgggagaggtaatgttagtactactagtagaaggaatggcaaccatgaaaatagaaaagatccagcttggaaacatggtaaggagattgatatttcaggaggagatgcaaaaaaaaaaaaaacttttgtttatcttaagtgtaactattgtaagcaaattattaagggttgtgtgacaagattgaaacaacaccttgctgaaactagaaaaggtgctaaaccatgtccgaaggttcccaaagaagtaaaggatgaatttatggagcacttaaaataaaaaacattgacaaagcatgttagtcaaatgaattttgaagagatgattgggtcgggtgcttactattctcaaaaggattctgcccccatgcctagtagaggtgtaagaggcccaatggataggtttatgggcagccatggtggagggacggaaactgaacaaacccaagtaactcctaaaaatgcgaaagaattgcatgataaagtttgcatggacattgggaggtgtttctttgagaatgcttagcctttccacttggctaagagtccttctttcatcaatatgtgtcgctcaattggagattatgggaggggattgaaaattccgagtatgtatgagcttaggacatggatattgaaggaggagatgaatactacaaatgctataattgaggatatgaagcagtcatggccactaacgggagtttcaataatgtctgatggctggtcagacatcagaaatggaggcataatcaacattttagttaataatcccaagggcactatgtttcttaaaagtattgatggttcttcatttagtaaggatgcatcgaggttatttaaaattttggatgatgtcattgaagaaattggaaagcatctagttgttcaagtggtcactgataatgctagtgcctacaaagtggcgggcacattgttaatggagaaaagaaattgtctatattggactccatgtgcaacacattgtcttgatttgatgctt

SEQ ID NO: 250811 - DNA, 535 bp, Cannabis indica
gtcttaatggtccacaacttttgtgttcttgcgaaaaaatttcattcaagtccccaattaaaagccacggatcaagaggtgaaacgtcagcaagacgtctaattaaagcccaagtatgttttttattgtttgcttccgggaaaccataaattgcagaaagatgccaacgcgggccatcatcaaacaagacataacaatcaaaatgatttgtattcatagataaaagagttacatcaacaccatccttccataataacataataccacccttcaaacccacccgagacacttctagaccattactaaaattgaaagacactttaaaacgagaaagagcaccatcacataatttagtttccattaaaaataacacctgaggagattgctcactaacaagcaatcgaagacggcggaatgcactcgagttccccaaaccccgtgcattccaactgagcagtttcatgatgaagtgcgggattgcctagcaatcaccgctgcattgtcaattacatcttcagaatccaaagaagcatca

SEQ ID NO: 250812 - DNA, 1497 bp, Cannabis indica
atacagttatattagttttctgttaacagttaattctgttttacttctcccctttttctggtcttatgtcagaggttagttaggatatttagtcttggttagttgttgtattacttactgttttgatctttccttctcctgtataaatactctgtactttacaacattcattatatacaaaattcctttctctcatttccgtattaaatctctccattaattcattccgattataaatactgtataagccattattgaaaactcactatggaaaaaaatatgaagctcttacaaaattatgagctattatgttacgatacacaaacaataaagaaactctactcatacaaattaaataattgcctgcagtcattaacacttaaaccaaaaagagagaccatcattaattgactgcgaatagtcttaaccactactaaactatctgtctcaagagccaccatcgatcaacttttatccttattccaactaagagactcacaaaaccctataatctcaaccaactcaggcactacactaccatacaaagatacacagaacaaacttcaattgagcgacccaaataatcataagctaccatactagtactaatataagaggactcagcaaacaatgtaacatcaacatttatcttgatttgattctcttttggcttcactcaagctctagtactatcttctgcaataccactcaatagtggtgtataatcatccttaacttgagcatttctattgttcaagatacaactttactgaaggaactacaatattattcatactaggaattttttttattctaaacaaatgcattttgtgctcacaaaatagcccaataaatcaccgcgacctcatcttgtttctccttcccatccaagtccccacctgaccaaaccaatcacaaaagtcgaccactccagccattggcaaaccaaccccaatagaccctgaccatacattgagcagcaaacggacataatttaaggttaacctatttgaataagttgtttgtaactagatacataattccatttctagaatttgtcaaaccttttctttatctatcaaataatactaataataatgataaaagaatataccacacttagcataccttcatatcgagtaaaaaaaaactttctagttataattctttttaataaaataatgataataataaatccaaagatatataattagaatagtgtggtgtggggtggagggattagtttgagtccacaggaagtggtagtacggactggacacactaactaactcatgatattatgggaattgggaaatgccgacattataaaatatcttaatttctatgttaaatattacaggaatgctaattattgggtgattttataatacacgtctcttaaaaaaaaagtgtactaatacactttttttatctatttcggtatttagaaaaaaattctagtctaatttttttatatagtcgtatacgttatagtta

SEQ ID NO: 250813 - DNA, 732 bp, Cannabis indica
tgtttaaatttattggtacatttatttcgtatttaatttatggatttatagtcatacatttgtttggttttttttaataaattatgaaattttattaatggcaattaacataaagaatatattctattttatctactactcagaaattataacagtagaaattgttacatgttcattaattaacctcgtagctcaagcaactaactattgtctaagatacgaaactacactaacaatcccttcaattgcagagaatttattattactaattactaaagttaatttgatggtgagacattgaacaataattaaaaaaactaacagcaaaacaaaccactaaaacactcaaaattatgttacagagacaagcctaaaatactcaaaatcatataatggagacaagactaattgcagtagcaaaacacaatcccgaccaagccgcaccaaagcctaaaaaaggtcagcgaacctgaccaaagaataagaaaacctctaataggtatagatttagaaacaacaaaaccttaattttcaccctattattaagtgttgagagaatataaatactcacacacaaattttaaagaatttagtaaaattacaccttcaacaagtgaggtaaatagtgagctaaaataactcatagctattcctttagctatatgtagcttaataaatagtggtgaactaaaaatattatatattattttctctttctctctcatttttttt

SEQ ID NO: 250814 - DNA, 897 bp, Cannabis indica
gggttgaccataagttttaaccgccaacgcatcatgaataaaccattatgatcccgaggaatctaccccaaaccgagactattgtcatcctcaaagatagcagcatcacaattaactttaatctaaccaaaacaaggtttagcccattgctcacgcccggaagtattcggaccagaaattggcgacacaactctactttccaactgagcactcttctaagaatcaaggtaagtaattgtagcattcaccaccctctctaacgacaaagccttattattccaaaccaagtcattacgagctccctaaactctccaaagaagcataacaagcctctcaatacgatctacaggctgtaccttacaaacattatcaaaccagctgccaaacacagcagcttcaccccttccaaccatccctcccagcaccatgtccagacaactcttagtaaaagcacagttaaccataatatgaaaaattatctcatcctctcgattacacatcggacacaattcgctcacgtggaccctcttagaccgcagagacacaagagtaaggagaccattagtaagacctcgccaaagaaaattcttcaccttaggaggcaatttcaagttcaaaaacatcctctaaaaacccgaattgtcttgagtattccacctaccactgcatacttgtaaggcgcgataagcacttttgacagaataatgcgtctccaacatccaaaaccaagcatcctcaactgaagacggagacaacggaatacaacgaatcaaatcaatatccctctgaacaaataaatcgtgaagaagttactcatcccattcaacagagcccacttttaataaattattgaccttttaagaactccactacctaatttccaaacttatatatcaa

SEQ ID NO: 250815 - DNA, 513 bp, Cannabis indica
cgcagtaggaaatttctaaaaaagaaaagataaaaagatagtgagaaaaaaaaaatagagttgcgattttaatcttatttaagtttaaactttaaataatatattttagtatcttttaggtaaccttgttagcctatataaacacaatattaatagtgtttttagtacgttttcagatctgaaaaaactcagaaactcttaattagaaagcaatttagaaggaaatcagaagcaatcaaggagtacgaattttagagagcaaaatcgatcgcgaaggctttctcaacggggttttcaacattcttttcttctctattttcttattaaattctaaattaatatgtgtgaaattgatacaacatgagtagctaaacagttcattagggtctaaatggagattgttttatattgatgatttttggttttaatattgtttaattttctctcaatttctatgtattctatttcattcgtacttaattacttttaattgtctgatcaccaattaaatgt

SEQ ID NO: 250816 - DNA, 889 bp, Cannabis indica
gagacccatatataacaagtacaggcttgacccgaacatgacctgtttaataatcgtgtcaaaaaataaaatccggacacgacctgtttataaacgggttgacacaacacgacccgcgtaacccatttataagcatattttgtttaaacatgtcaaccaataacacgtttatgaagtattcaacatatttataacctatttatgacacattaaagtactaaaataactttaaataggtcattaacaagtcaatatcgtgttagttgtatcaacccaaacaccactcgtttattaataaacgggttagacgagtcaacccgaacacaacccgaactcatttaaggcaaacccaaacccgctaactctcgtgcgggtttcgagtcgtgttatcgtgtctaacctgttttaccggccctacccaatgtggcgccctaactaactaaaaccaaacggataagactatatgggttttagcatacatcataaattgttttgtaccttatatatatgaaccgatccaatttacgaggacactcaaaacataaacaaatattttcttcacaaataaattatattataaaataaaaatagttagcaaaaaacacaacttgcatataacttagcgttatacgtggatctgcacacataacaatatatatatatatatatatatttactacttatctcttcaaactaaacaatcagctgatgatgaatgctataaaatgagtcaaaaactctcctaattcacttcatttacaacatatatgaaaccattattaatacgatatacattatttttttaattttagaaaaataaaatttaaataagtaaaaaaaataacaatgcaaaatcacgtattcttaatcgccactccaggaatcggcc

SEQ ID NO: 250817 - DNA, 607 bp, Cannabis indica
tccttgtatactttcttcaaagtaccgtcttttgccatgacaaacaaggcactaataacctaataacgaattcgaacatgaaacttataacatgatcaactatgtctaaaacacaaatccattcaaatttactgctcactagaagaattacctttgcaatctcacatgttagaacagatgaagtcacaataacatctcgtctgcaatgaagtatatactatttaatgatttgcattatacagtatcatataaatcatgagtgtattctacttaaaaataaacggacaaagcctgcaaatatcttggcatgatcataaatgttatgaatatgatgaacaataaaacttactacaacattcttctgttcacttattcaaatgggtttctaacaacattcacattcttatatagacgaatatatacaaacacacaaacaaaatctctaattagctggacttttaaaacaatctacccaactaagaatactaacaagattctaaaatctaattctaatttttgcaccgcgtaaggtttgcaatctctcatttcaatccgaaatcagaagcaatttttttggaaagacgtacataaaactgaaaacccagct

SEQ ID NO: 250818 - DNA, 881 bp, Cannabis indica
aaaaatgggtagcaacgggccaccattggaccgccattggaccaccatcaaatagatgagaataccgagtatggatggtgaagttagaagagaagagaagagaagagagaagggtataataggtatgaatataaagtgtgcgtagttttttaatttattaagcttgtgctcaaaaatttaatataccccaaatgtatgcatataaattcaaattttcctaaaaaataactatttattaatataaaatagtcacttaaaaataagggaaattatttcatacactatttttttaattttttttttcaaatttacagtttgattttctaaagtgatttctctagtggttttttatgtgggttgctataaatttttggttgcgatttaggttgttccgctagttgcaatagaggtttctatgtagaattctgtaaaaatgcataaaaaaaactcttttgaggtgtaagaattaaaaaattcctaaaaataattctaattaataacaataataaattcaaattatttaatttcatgttatgatttgctattatttagagttatttattaaaaattttaaattttatacaattaaagtatatatagagttttaaatcattttgttaagaaaatattattatataatattatcatcaccatatctcacccgttatctcatcgtctcaccgtatctcatgttgggttttgtgccctaaataaaacccttttcaatataaacatatttaataatcaataaatatcagaaatcacattttatgttgcatggttcacatgatttatttcatgattatacttaatgtataaattctattaagtctagaacatatgtatttgttaatgattatagtgttgtcagcacattggaa

SEQ ID NO: 250819 - DNA, 647 bp, Cannabis indica
ctttaattatactaccattattttcatcaattttaagaaaatattttgtggtaattaatgactgaaaatcaattaataatctaaagcgtgtgttttttcacggcatttaactaattcccacaacagtttttaggaaatctagaaataactattttagagcaatcattagggcttggagtaacatcagtcaattttaaaagaaatatatgagaaatgctaaagggcacatggtgcctagcactctactatgtgtcagtatcgttattagtccaactaagtaacggattccatatagtttaatataataacttttagggaggtggtggaggtgtgggttcggttggctctccgtcggcgtctcggtcggaggtggcgttcgccgttcagttcgtgcgatggttggttttgggtggaaggcaggtggatcggcagtgtgttttggtgggtttgatttgagagagaaaggaggaagagagagaaatggttgagaataatgaggggggtattttggggtttaggtaaaagtagtcctattttttcaagagttataagtattagtttagataattaatttgggtataaaaatgcatagaaactcaaatttcccttttaatatcaggtcctacttatagggtgacacttcatag

SEQ ID NO: 250820 - DNA, 725 bp, Cannabis indica
tcttcttgataatttgggaccttctattccacacgtgatgttatgaatctcctccattcgattgacaacctcctcttggtttaaacatcttgccaacaccccgtctgatgatcgatagtaaagtgttccttcaatgatgacataatgctgtatttctttaagatgagtcatttttggttttgtaattttatcgatcatttggtgtggccaatctttgcctgtggtttctctcttgtaccttgaagtgattgaacacttctgattgattactttaaccactaattgaatttctgacacttcaattttggaagccatagtagctaaagcatcggcatacctattttgtgttcggggcatgtgctcaaagcgacattccctaaaattcttcgctagttcttggaccattgttcgatatattgctaatgatggttccttcacagcgaattcccctttgacttgttgaataacaagtttagagtcccctctaatcgtaactctgctaacttccatgcttagtgcgaccgtcattcccaaaataagtgcttcatactcagcttcattattagtacaatcaaatgataatttataagcctgaatatgattcttacctgttggattggtcaacactattcctgcacctccccctttagcggtcgatgacccatcaaatgttattgtccatctttcttgtgtttcttcatcgcaaatcatggcttcaggtaatc

SEQ ID NO: 250821 - DNA, 1462 bp, Cannabis indica
ttacacacatatatcactagggtaataaccctaggctattagaccgtttcaattagggtaataaccctaatcccggttgctaaacaatcatacatatcactttcaatataagcgccaccacgcatactctacgtgctaaccactgtcttacaagttgtcccgcaatagcagagattctgaatccccaggtgctcctgatcaggtgccggtaatcctagtcgcacaatctgagatttcacaaatagggttaacccctgattccatactcataaaattcaatcatggcatttaaaattcagataatcacatagagctcggaacgagctttccaacgatataaagaacttccaaatcagagttcgaaattaaaatatatggagtttcaaagttcgacctcaaaactgcccaaaaacacaagggcgggccgcggcatgcccaagccatgccgcggcacttgggacaaatcccaggttccaccaacaaggggcgagccgcagcatgctcaacccatgccgcgacacctaggttgaaaacccaaaaatcaaccaccttcaaatacgatttcagcaaccaaaattcaacaatttcaccacaaatcacaaccaaactttcaaattataaactagagctgctagcaaatattagggactttaaaacacatattcatgcattaaattccaaaataaaacctccaaaatcagattgcataaaataacccaaaactcttgcttaacttagcaacttcaagctcttgaacaaaagcttcaaactccattaactcaatcaatttccagcagtgaaataccataaaacccatggatttaaagctagaaaaaatatccccaatataccatctaaagctcaacaacataatccacaaccaaaacatgcataaactcatttaaaacaactcaagattcaaacacatgcaaatcaaagtttcacaaccctttttcatgctcatccaacaacaaaaatcagcaacaacaactaaaattaaagctttagaaactacctcaattacttgcaaggctaagcacaatcaaactccaagtcttaagctccaaatcaagcaaattccaagctaaaaccaaacacttttcttcaattcgaaaaattgaaacatcaagagggtttagagagagagaggggtcgggtgagaggggaaaatactagaaaattcattctctttctcttaaaattcaacttttattaaatttagaaaatcaaggtcaaaagacccttttgcccctagagccaattcccacataattaagcattccagggaaaaaatggcattcatacatattaaaatttcaaataaaattcagattatcaaataacaaataaaatgccaaataattcaatccaatttgcatttcgggcccaaacccggttcgacccgaaacacccggttgtgactataccgcgctaacctgtcagaacacacctgaaaagacaa

SEQ ID NO: 250822 - DNA, 747 bp, Cannabis indica
atgtgaaccatgcaatattaaatgttatttctgatctatattaataagtaaatctgattatattgaagtgagttttatttagggcataaaacccaacagtttatactttttaaccctaataattacccctagatcaatctcagccgtgagatcaaataactcactcatctgatggctgccgtacatcacggattacaattcgtgaaagtacaataacgggacaaaatcatatccctaaatatatatagcatgtcaataaaattatatacatatattaaaatatttgtattatgctaacaaaattttatactattattatacattgtaaaataaaaaataaatatcatctaagaataataatatatcatacaacaaaataaaaatatactgtacagtaaaatttatataccaataacccacaacaactcataagaaattaaaaaaatcgacataactttcaaataataaagattttaacaaaactaatatagatataccataatttttaagtaatttgcttccaattgtaaatatatatatatgtatatgaaattttactataagttttaaaatgaaaacgtttactaatatagtcctataatttaagcctatttactatatttctgttagcataatgtagttgttacatcaataaattctttaaaaaggagaaaatataactgtttgaagttatttgaagtaatttttatagttgataaagaaattttacataaaaataaaagttaa

SEQ ID NO: 250823 - DNA, 903 bp, Cannabis indica
attgattaccgtgggccttaagaacacgcaaaatcttgcttccagtaacactcttaacctgagcaataccgtgagaatcacgaagaatcacaccgatctgagatggtgtaagacccttctttgcaaacttgcaaatgttatcctcaacctaacaacatacattacagtcaaataaattaatgagggaaattaaaaacatttaaggttacaattaacaaaataagcaatcaaaaacatacatcttgggaggagatcttgagccaacttggtgaacttctcttgtatggaagagccgaggcagaaatacccttactgaaaccagaatcaaaaacacaaaaaattacatgctaattcaattacgcagatgaaattatatgaataaattgggttggtatagatatgatacccgcgactgtgcatacgacccatggctggtggcggagaagagttccttcttcaagctttgttgttcccgagttagttgctcttccaaaaccctagccctgagattgtagcatctccgtacttatacaagccctagatattgggcttttatcttcagtacttccttgggtcggcccattacttttatggacttggctcgtatcctttagtagaatttacgtggggtatgggttttttaaacattttatgataaatatggcataattgattatggacactttatatggctttttttatagtttaaccatagtttatgggattttaaagcccatacggttggaatttatttgtcaaaagtccatagtatgtgtattgtagtttatttaggttattttagtaattttagttcagtttttttttaacataaccatttttttttttgtagagttttgcatgtaatcatgaggttttgatggttgtttctacattttaatttac

SEQ ID NO: 250824 - DNA, 1160 bp, Cannabis indica
atctgagttgaaatagaagttggttttattttttgttgcaagaatgaagatagacgagaggatgtggcattgaaagagacggttgttcgaatatcaagagaagcataagaacaagagcatcgaataggcgagagcagttgaactaagtcgttcaaagtacaaattttataatttcatattgctttttataatttcatgacctgatagtttgtttcactgtatataagtttatgatttgtgatcaatattgtccatatctatgtacatgggataaattgatgacgatgatgaagcaattgaatttggattttttagctactgattaatatatatgaaacaaaagaatgtattttgtttatattttgaattttgatgaacaatttacatatttttcttgaaactatttgttgtgtacttctccaatctttaatgaatagaacgagtatatatagtacaacattatgcttggactacatataatcctattgttgcaacaatcttggaggagaaaactatttgagttttttttggaagataataataatcttggaggaaaaatagacaattctattaaatatgcagatccagctagaatgaaaagtgcaaaatacaaacattatactattgtctctgtcgaagcaaatgaagattaagctcctatgaagagtatctttgtttttcttatctacaacttttagacaggtgttatcttcaattatcaacaatttacggagtgatttttaattttcttttttattttacacacatttaagttgtgttttctttagtatttgaatattaatttttagtttatttttgtattatcttaagaacatattacagttaaattatcaagctttcttaaatataaaaatattgcatctaatattcttttaattgtcaaaattataaattacattagtaagatatacataatagtaatctcacctaataactaataatatttatttataacgctttattatgaaaaaaaaaaaattcttcaattatttacttttaaataaagtagaaataactagcataaaatttaatatacgtgtctcgcacgtagttttttattagtatatatatatatattctaaaccacattaactataaatctaataatttttacaagctctcccttctcatcctttctc

SEQ ID NO: 250825 - DNA, 526 bp, Cannabis indica
actcgttgaacctctgctgcaactgtctaatggacattgtaagattcggcttgactccctgaaaaagaagcttatttctgcactgccaaatatgttccattacacaagcaccaaacatcatgagggagtcattccccgtgtcaaccaaccaaaggaaccagtcttcaaaactcaaagagcccaggttactattaatgacaccccacgggctgctaaaccaaagacaacgagcaaagtggcagtctctaaacagatgaacttcattttctggcatttcaccgcacaaatcgcaaagtttatccctttccagcacataacccagcctgcttttgagtggaaggcagccacttaagaccctccatatcagaattttctgtctagcatgtagtttctgcttccagagacacttccacactctcttctcctcatgaaatctccgtctttgtgcacaccaatacgcacttttaaccgagaacttaccactgttgtttccctgccaaaatacggtatctctgctgtcacaaag

SEQ ID NO: 250826 - DNA, 922 bp, Cannabis indica
caaaaaattaatgatccatcatctctcacacattcataatacataaccattgattcacaatataaatataaatacataaaactcacacaacatttaatatatatacatatataatggaactgctctggtactaattgttagttttacgatactaaatcaggtacctaacggaataaataattctgattattatcgtaccatatctccaagatcaccatatgtatatattaaatttgaaagtaaaaacatgaaaatattatttacattttgaagtctattaaggtatcttcgagtcttttcgtatgttgtatcctcagaacggtgatgtcaaaactcacaccttgatctttcagattttcccccacacacaaggactagtgtggcctagtagaataaagtgtatataaagttcttatattctcaacacatgagcaagaacaattttgttgtagtgatggagagaaatggttaaccgattaatcttgtttaagctttcataaaagtcacgttaaaattcttattctaaattttgtttgtacggtatacattaaataaaccaaataaaaaatttatttaataaattatttaaattcaatcttttattaaatcttaattaattatttgaataaataatataactgaattctattataaatatttatttcctataaccgattgaggggtatttctcaaccacttgagagaatatctcaaccatttttcaaattcaaatttaaatgaacatttatcttttgattaattaattaattaactcaagaaaaaactccaatggggacaccctacattagggacgcctacaatgtgcctggacacagtataggtggcacctccttctgttttagttaagatatgagttctgtcttttgtcctgcaacctttgtcttttctaaatttatttaaa

SEQ ID NO: 250827 - DNA, 1402 bp, Cannabis indica
agagagagagagagagagtaattattgacttatctacatattaaggttagggaatttacaaaaaaaaaaagtttaggggaaaattttttccctaatgtaagtataaaagatcaaaattccctaaatagaaataaataaacaagtatattctctaaatagaaatagatattctttgtagtgtggtttgaagtttgaactttgaagtgtatgtattgtgaaagcgatttgaaaatttgcttaaacttagcactaaaaccacttagactgcaaacaattttaatttacataaaagtatttgaagagaaaagagaaaaaaagaaaagttattatagagcaacttaaaatatttacctaatcagatatacattgggattaggtcatgtaatgtataacctttatattgaggaatccaattcaaatggcctaactttgtctcttatgttgtgtttttaggcaccagagatgaattgaggagaccaaattatttatggaaattgcattagacaaaatgaaaaattagaataataattagaataataataataataaaaagaattaaattctatatttctgaaatgaatcttttttttttgaaaatggcgttttataaaataaggagttagacctctcggtcattacaaaggataaagacaggaatggaatgaacatccacccttccgtaaatagagttagcaaaagcccacctggccacattatgagccaaatagttacaagttctaggaataaaagaaaagttacaacttaacatcaaagtagaaagctttttacattgttgagtatagttatcaaattcccaacaggtatgagtccccgtcaaggtcttgattaccgtcattgaatcgctctctaccaatacaaagcggtgttgttgagaaaccgccgtttccacggccaacaagacagctgcagcttccccaacaagggggtccgaaaaacaaagtgctgaagtagccacccacaaaatggtctccctatgatccctggcaatggccaccgcacacatggagtcagaaccaactctaacatcacagttgatcttgatccagtcttcaggaggaggaacccaaacaggagacccagctaccttcaaatgagtaattaaactagaggcataatctgcgtaacagcaagagatagagtcaatatatttagaaatactacccaacccattcatatgaaccttgtcgttgcgcgctttccaaatcgtatcaactactatcgaagcatacaggaaaactttgtcaatatccaccccttgcgactttaagttccaaatgaactgtacccaatcccacatacgagcacccgaatccacaacaggcatgagtccccaaggggaggagcgccacaggtgagaagcaaaatcacagtagagaaacaa

SEQ ID NO: 250828 - DNA, 748 bp, Cannabis indica
gtacaaaaatcttgtgtgtttttacttttcaacactgtttgtttttctagtttcttctcgagttacagagttgttttctgtagctacagaaaaactgtttcagtaccaattttattattccgcatttaattaaataataaaactgagaatattaaaataccaaatttcaatattaaatatgaaagacatatttgaagaagaaaattccataagctttaatgcataaaatgggaaatacacatcataagtactatttagttatatattgcttcatcttccatcttaacaacctcaagaggtttagaagctcataacctttttagaataaaagttacaaagaaaatacattcaatgaaagggagaaaatgaaagtaaagtacttgagtaagttatgtgtaacgccctaacaattaggcactctatgacaaccagtaaaaaacctattcctgctaaactaggattactagaaaataagagcgggaaaatttaaactttaatttactacggaataaaaatataacttgaaataatttaaactttagaaccatttcaaaaagaccacatgtttcgggatcccataaaacttttcgaaaaatattacaagttactttacatgtcaacctaagcggcaaaatttgagaatacaaaatattttaattggtggacccaaccctcttggtgtagtatggctcgaacatgtacaatccatcgccaagctcccgtactcatggctaattactaatagatt

SEQ ID NO: 250829 - DNA, 571 bp, Cannabis indica
taagtagagaaaatcttggcccgttggagaaacacctgagtagtcgcggtccgtaggtagggagggatcttgacccactctgtaagaagctccgggcggtccatggcttggaagccggaggaaaagaagaagcggtggcggtactccttcacgtgcttctgataattataagggaccagaccctcattcaaaagatgggaccgaagtccataaaaacaatctttaaatttgtccccctttttggggacggaaacgagttcgtaaaagtataaaatctcagccggactgggtgaaccccagctccgggcagcgtacaagataaataagcctgaaagcaggtggtatgcttgaggaattaattgatacgacgcgaggccaacaaaaactaagaaattaacaaagtaatcctgaagagggagcatggccccgcacataagatgggtctggctctaggctcgaacccctcgtagttatgattgggtgtctcctcatcccgaggtaggcagtggaaggtcccggaagctaatggcttgatgccggccaacgtgacgatcttctcgagctgatgggc

SEQ ID NO: 250830 - DNA, 812 bp, Cannabis indica
aagaggtatcatgcaggagttgggactcaacctacctaccacgaatatcaattacttggggctcccattatttagttctaaccataaggatgcgaatttcaacttcatcctagacaaccttatgtcaaagttacacgaatggaagttaaaattgctttctaaggcaggtcgggccactcttattaaatctgtgggtctggcactgccagtttacaccatgtaaactactaagctctctaagaaacttgcttcaaaaattgatggtatggtgagggatttttggtggggttgtgagcaaggtaaccgtggcctttaccttaaggcgtgggaccacatgtgccttcctaaagcgagaggtggtcttggattctgaaagactgcgaattaaactaggctttcttggaaaaatggggatgggccctgattaacgaggatcagtcgctttgctgcagggtgttgagagccaaatatctgaaaagtaaaccttttttggatgctacctataataatgatgattcttggttttggaaaaatgtggtcaagactaaagctatcctcagacaaggcgcttgcaaactcatctcaaatggggaagacacaaacatttggtcggacccgtgggtggttcatgggacagatttctacccgaaacccatctcttcctaccctaggagcgttgagaaggtctcagagttgttgttgagtaatagggactgggacatctccttgttaagggctatgttcgactctgccacgattatgaacatcctgaaagggggtaaacctagcggccagggaagagataagtggat

SEQ ID NO: 250831 - DNA, 1166 bp, Cannabis indica
cctcaattcccacatttccaactatgtcaacatcattattatcccccagtgcaatgaacttgttgcgaactatagtagcagtaggtgcagcttcgggtctggttttccatccatttgacaccggttggaagccctcagcatccactttactgttgccaggactcacggttgctgcctcttgttgttgcataatatcttttcgaacccattgctgcttcttgggttctttcttcctacaatctgcagttaaatgccccaaaccttcacaatgagcacaaataaccggtttccattcataagaaatagcaactaaagtattacacccattctcatcttcaaaagatatcatctcgggcagctcttgtttgatggcaacttcaatcaatactcttgggaaacttagcttctctctattctttgtagcctcatccaccataatcggcttcccaacttgcccaataatcttgtacaatgacttctctccccaatacttgagctctagatcatcaagatgaacccaaataggtaccattctaatatcttcttttttcacattaatggatggttcccattctttcataacaacaggcctacggttaaagaaaatgtatcctcccctaagcacttcatctctatattcaatggactgaaaccgaattatgtatataccatatgaaagtaatccaactctctcaaccttctcagaccacatccttgtcacaaaaccctcaaaaactgccaatgggggattagctcctagaatataacaaacaattgagggtttccaaaaatccacttcctcttgtatatcatcattagtgatcttcaccttattgcacttagaaaatagacttttaacagcagatccagatcttagaacagggggattcgaaaccatacattgtgcgattttagcagagcactgctcagacgcctccaagaaatgagcaaaatccatcctaatatcctcctgttgcataatcgaccttagcgaggacttcggggtcagaggatcaggttccagcatacccggaggtaatccctcatttccgtccaccgaattgtcatcatcgacatcagaaaaaactatgggagcaacacctagcaccgcatccattgatttggttttcctaacatcaaaaatagaattaggacctttcttcttc

SEQ ID NO: 250832 - DNA, 3442 bp, Cannabis indica
aaaaatgcatttcatatcagtggcaaaaccagtactcagaactattactaagagaaatactgaataggtaagtaaagtaagtacataatattttttaaaacagtaaagtattttgggaagtcatatggttattcatcatgcataaactattagacactaaccgtctcatcacaggttggacaatctttagatggtaatggtacatggagatcgaatcgacggtggatggatggaaggtgattcaacccagcccgattatcagccattgcatctgcaatgcattcagctgttgccttctcaccactgcatgagaataaataggggatggaaatatactagattataattggtatgctctgaaaacatgacgcagggtatctcaatatcaaatattgggtaaggctgcagatgggccataaatacgtttggctttaattttcattggacaaatttgaacatgagccaaaatcccatactcaagtacccacttgattcaccaaattttaattaaatctactgttagctgaaaattttaataatatgcatgggatttaatgtgctaaataaaaaactccgcaccacagaatgagcttttaatagagaaataactaccatcttgtcattaaagaagaaaacatacttggctcataaaattacatggtctacactccagcaactacaaaactgaaagctaaaaggaaaagaaatatggaaaagaattttccttttcaattggtaatttttcccttgatattgcaccctcgctgatcctctgaacagagtgcaccgcaatgccttcacagttcctgcacttcaagaccaatcattgagtactaattactatgccaaccacagaataataataattccaatatctaaatcaaaacagttaattattcttagatcaccaattatacctatagaaaagaaaagaaaaatttaaaacccatttatcttaaagaaaaatgaagtataaagcttatataacaacaagaactctttgagaaatttcgttttgttaattggaaaggttgcaaggtttggattgagttgaggggcacagaatggaaaaagaagcaagcagtggtagagttatgttataagtaaaacaaaagaagcatttattttgctgggaccaaattgtgggcttatagttcccaattctgtctctttcatcgaaaaaagaagagagagaagggtgtatacaaagtttgccctatccttcaagaattttaagtggctatagaaggaccagcaactaccacaaatgttcatattcatggcagtttctccacctcagaaacccttcactctcaaccacgtcaaccccttatcatcaattccttctttctcaagtaaattccttatcatttcagccctgatgtcatgccattgtgttagtaccattattctcacagttctccttactctttctcttcaataatggcagatgaaagtacaggaagccggcgggcttccaatactcagctactagaggagctcgaagcactcagtcaatctctctatcagtctcacactgctgctgtcactcgaagaacagcctcccttgcccttcctcgaagctcgattcctccgatatcatccaatgatgagatcgtccctagtgctggagttgcagccaaaactgaggccgttaaagtcaacaataaacctcttcgcagacgcctgtctttgtccccatggcggtctcgtccaaagcttgacgaaggaggtgatcagacagagagtcagcctgctaggggatcgaatcaaagagagttcaagaagttggaagaaaagcctagttcagaagagaaaaaggggctttggaactggaaaccaattcgtgcactttcccatattggaatgcagaaaataagttgtttgttttctgtagaagtagtcacagcccaaaaccttccagcttcaatgaatggtctccggctctctgtatgtgttagaaagaaggaaacgaaagacgggtcagttcaaacaatgccatcgagggtctcacagggggctgctgatttcgaagagaccttgtttattaggtgcaatgtttattccaaccagggtagtggaaagcaactcaagttcgagcctcgtccgttttggatatatgcactagcagttgatgcgccagagcttgattttggccggagttcagtggatttaagggaactgattcaagaatctattgataagagccatgaaggagctcgagttcgacaatgggacacaagtttcaatcttttgggaaaggcaaaaggaggcgagctcgtattgaaacttggatttcaaatcatggaaaaggacggaggaactgggatttataaggcaaaccgaagaaaccaagaacaagtccaagtacttatcatccacttcatttgcccgaaagcaatcgaagatgtcgtttagtgttccaagcccaaaattatctagcagaaaagatgcgtggacgccttcacagattggaacacctaatgatcttcacggcattgatgacttgaacctcgatgaaccagctccggtgccatcaacatcaagagctgagaataagccaaaagaaccagacgccaaagcagaagaccttgatcttccagattttgaagtggttgataagggaattgaattccaagagactaaaaagaatactgcggaggaagatgaagaagaaaaggaaagggattcagtgaagtctattggagaaacattagctggaaatgaagttgtaaaggaaattgttcacgatcaagttcatactaaaagattgtcagagctagattccattgcgcagcagataaaagctcttgaatccatgatgggagacgaccataagtcagcacatatagatgaagatactgagtcgcagagattagacgaagacgaagataaggtgacaagagagtttcttcaaatgcttgaggcggaagaaactaatgaatataaattcaagcaagaagatattcctactatgcaactcgaaggagcagaggaatctgaagaaaaagaatcatcgaaagcttacctcccggaccttgggaagaacttgggctgtataatccaaaccagggatggcggatacttggccgccatgaatcctctagatactgaaatatcaaggaaggagacccccaaattggctatgcaaatctcaagaccgtttgtgattccgttgaatgagaatgagcccttgagtgggttcgagttctttcaaacaatggcagccatggagctcgacgaactaaactcgaaaattcagggcttgatgtccatggacgaactgatgggtaaaactgccgaacaggtggcgttcgaaggcatagcttcagcgatcatccatggcaggaacaaagaaggcgcaagctcgaccgcggctcggacggttgcaggagtcaaaataatggcgacagctatgaattccgggcggaaagagaggatc

SEQ ID NO: 250833 - DNA, 2888 bp, Cannabis indica
ggcctcgcatgtctggcactgtatgtatacatataatattacgtactacacattaattactgtattgatatattaaaatgattatatttatatctataggaacgtggaaagattatgatgaagtttgcagacttaattagccaaaacgttgaagaactagcgactttggacagccttgatgctgggaaattatttagtgtggggaagagcatagacattcctggggccgcagcaaccgtcagatactacgcgggcgctgctgacaaagtccacggtgaggttctgaagatgtcgcgtccactccatggatacacattgcttgaacccattggtgttgttggacacatcattccctggaatttcccaagcaccatgttttctcttaaggtcagcccttgcttagccgccggttgcactatgatcgtcaaacccgccgagcaaactcccctctccgctctctattatgctcatctcgccaaactggtaataatatataaactcaaaatatataccttatatataaatagttaaagctcttatttgagattatatatgtacataaacctgatatcttgtaattagttttttttttttctgttttcaatgttatttattaaatcaaaatatataaaatctaatgttaaaatacactgattgataataatgtaagcaaccttttataatatttcgcagcttaaatgctttttagtatattttattatattattattacagtctctaataatttgtgatgataatactaagtgctactttaattatcaccaattaattttgatataaaatctaatatctttcagtgtaagcatgatgtcactttactaattaatttctaaaacacactttcacaatataattctaatagtatacttgataataatgtttctaaaattactatgatcattaaaataatttgagaagcacacataaatttgtatatgtattattatggtattaataaaataattaatggtaattaggctggtatacctgacggagtgctgaatgtgataactgggtttggaccaactgctggtgctgccattagctctcatatggacattgacaaggtacgtaacattataatcatatgtagtttcgaataattatggttttcatgagttacatattttcattaattattcatgtgttcaggtaagttttactggatcaggagaggtaggacgtgaaataatgaaagcagcagcagctagcaatttgaaacaagtatcactagaattaggaggcaagtcacctatcatcatttttgatgatgctgatatagaaatggcttctgaacttgctcttatgggaatcttatttaacaaggtgtgtgttatactatatttataatattctacattccatccttctaataattattactttggtatatataacattactaaaacatttttattctatcttttatgttttctagggagaagtttgcgtagcaacatctcgtttgtacgttcaagaaggaatatacgatgagcttgtaaagaagttggttgagaaggcaaaagcttgggctgttggagacccttttaatcctgaagttcgtcaaggaccccaggtgattataatataataatatctatatatctatttttcaaaaaagaaaaaacagaaatcgatctgaaaattaatgatattactctctactcatacaatggcaggttgacaaaagacaatttgaaaaaattctaagctacattgagcaagggaagaaagaaggagcaactttgttaactggtggtaaccgtgtaggagacactggatattacattcagccaaccatatttgccgatactaaggtaattaattaataagttggatcagtttttgttcaattatcaatttaatatggaatgttttttaatctataataatgggatatataaaattgaactgctgaagtgaaattatacacacgcacagaaaagatgtcctaatatagggagggaaaatactaatgaaatgactttacgaaaatattaataacaataataaaagtgtttaaactttctttacatgatatacgtttgaagatataaaattaatattgtttgtttgctttaatattatattaggaggacatgcaaattgtaaaggacgaaatattcggtcctgtcttggcgctcatgaagttcaagtaagcataaattttatatatatttataaaaaatgctaaggaatattacctactctaaccaccataagaggtgttatattatttgtataattccaaatataataaattaatctatatatataggactgttgaggaggcaatagagagagctaacaagacaaggtatggactagccgcagtggttgtgacaaataacttaaatgtggcaaatacggtttcaagatcagtgagagccgggtcagtatggatcaattgctacctcgcaatcgataatgattgcccgttcggtggatacaaaatgagtggttttggtaaagatttcggcatggacgccctccacaagtatcttcaagttaaggcagttgttactcctctttataactctccttggctctgaaacatatatatatctttcaatatgtaataatattaattattgctttaatggcaatgttaattttattaatatttttatgtaattttataattaaaatgttgatttaataaaaacgtatactgtgtgttttctctttgctttgattgttgatgctacattatatttaattaaggtttcagctcgctcccacttgtattatttaaattaatataagaaactagttgtaaagtctaaggaggaagaaagagaaaggagagagagtttgtggtgaatctctttgtaacaccctaactagcataggcgtattacgtgatt

SEQ ID NO: 250834 - DNA, 986 bp, Cannabis indica
atgtacgtgatctagcagggcgggacatgatgaatcattacatgatgatctagatcaagttggattatagatgaatcggatacgacctgatctatttacactcctacatgagaacaaaacctcaatcaaatgacaaatttcattttgcaagttaccgaagcactttcttttggtgacaatcttttgatggatattgaatttatttggctgggtgacattttactatgtctaatcattaggaaaattttatttacacccaaaagatttataaggacatcctattttaataatttttattttatataaaatttacatctttaattgtactaaaattttttttaattttttcttaaaaaatatacctattaaataaaaataaattatattttaaatattacgacgaaaaaataaaataaaaaattatataaaaacttttttagaaaaaattaaaaaaatatatgtaaataaaattaaaataagtattgaaattaacataaaataatgtaaggaatttttttttaaaaaaaagacttatgtgtaattttgaaaaattatttaagtttatttttttttttaaataatgaggtctacttattattttatggggtgcaaataacattctcaaatcttattgtacttttcttgtttgtgaaaactattattgtacttttaatttactccatgaggataaattgatcatttaataacattgagtaaaatatttaccctattctactttctctcaacactcatctacaaatatatatttttcttaatccctgggaggattgtaaaaaaaagactaaatagaatttgttaaatataataatatcattttaaaaaagtgataaatatttttgtttaaaattaaaaagcaatattataatttttcttatttctaaaggaaacatataatgtacttttaaaattaaggatggtaaataaatcaatattatgcactcctagtttcaagttttttttttttt

SEQ ID NO: 250835 - DNA, 795 bp, Cannabis indica
tataaataaatatataagctagatggattctaatgtattttttgaataagaggatataatcatgtattaaaattatttcagagattaatcaataaatatgtataaattaataatatatatgtatgatttatatacaatgtatagtgggataattaattaaaaaaatgaagatacttattagagtccatttatcttaattattactattacttcaaactatatatttatctttaatgaaatcctattctaatattcattcacttctaactacaaatagagaaacatttactatcactttttgtgccactacaaagtctctcccccgttttttattttagcaaattaatcgagtaattttcatgcaaataaatttgataaacatactacttgacatgcctaactcacattatttatatgtaatgagttgattgggaagattacataaattatttatataatctatatagattatgtaatgagttcttcaatatatttgtgtttcaattattatgtagattatattaatattaagaatattattaattgtgaataccataaatattattatatatgcaaacatacttgtaattgttttgattttagataaatttttttacattattgaaacttttaatattgaaaattaaaatatatatggaacacttcttaaggggtattacccatgaatggttactaaacaaatttaactataaatattaattttataaatatcaaaccttcgaattttgatataataacgaataattaaatcacaaatttgaatttctatgctta

SEQ ID NO: 250836 - DNA, 526 bp, Cannabis indica
tgcttgttactcttgtagcggcaccaactgatatctacatacataaatcacgcacaaacttgacacttactttaagtcttttggaacaagccatctcgaaaatgaattcaacttgatgtgaacaggtactgaatttctgtttgaatttgctcattgataaactattactgcataccatgaatataaatatctgcttatgatgcattgatgcagcttttctttatggaaatcaagttatgattgatgtgattaagtttgttgttgagcaaatgtactgagaaaaaatctcacccgacacatcaacatgtaactacgtgttttctgcataccatgctcgcggttattacaacacacagccatggaagcattgcatgtattgagcatgcgtgtgttatgagaagaattcgcctatcttcaaaaagagatggtgctcgaacacaattttatccttgctaaagtagcgaaaaccgagtcaagaatattgcagttatttgaaaatttccaggaggaccgcgctgtggccctt

SEQ ID NO: 250837 - DNA, 701 bp, Cannabis indica
tagaaccacatacatatagacgttgggtgggagaggtgatatccaaactaggccaaataaggttcgtgtcattcacgggcgcgtgagggttctattttaattattatttttatatattttaattgtatttatatttattttaaagaatatttaattagtttcaatttaattatatacaatggtggtatataattttgttgtcatgctatatatatatattttaattgtggtatataatttagttagtttatatagatatatatattagtaatatatatatgttttggtaaatgatatatgtagtttttgttatacagtatattatttttttaaataatatttaagttctattctttattttacttttattgacatgatatataattttatttttatttattgttattatatatatattttgattgtaaggtatgtagtttttgttataatatgatacataagttttattgtatagtatatgattttattttagatcatgcatgtttaatttttattttattatatataaatgtgatatataatttgtaagtgtgatataattatttataattgtatataattttgttaatatggtatatacaatatttataataatattattttattttattttttatttgtaagtatatatattatcttggatggtatatggttttggttgtctataatatatcatttat

SEQ ID NO: 250838 - DNA, 1636 bp, Cannabis indica
gccagccctcctgcaaagtcagtcgactaagcaacctacaaagtcactcgttcatgacattttaaaacttggtggaaccttcccaagtgagaagagagtgaagcgacaagagtactaacacgacttttggaggttctgaagagaaggaggtacaaggagtggagacaccacacctgcaaggtctgaaaacccgatcaagggtacactgtagccactaccgttacagcccagggccacctggtaccagaaaagagtacaaggtgcaaggccacctcctgcacttgcaacttgcaacttgaaagcgacacattgtccccccaggaccaccatgtacctcaagccattagagcctatcaattcccctctcagatgtgacgagagttggaaaataatcttgtaaccaccatatggatagtaatagaaaattttcattttttctccctaccttaagatagtcacttgagtttacattttatctttttttttcatctttgttctaagtttgaagtagagtttaattttccagccagctagttagttgatgagttctcaccgtcaacaaaatacaacaagaaaataataataaaataaaaaaatatatcgcataacgctataaagatatcatatacaaatcgcaaaacaattaaaataacacaaaaatctcaatgacatcgcttaatgttgccaaaaagactaaaagtcattcctaacatccgatttcagttgttgtcgcacaaaaaatcgcataaaggcgtataaaattgcaaaaatttgaaaaactcagaaaaaaaaacagtgtataggtacgaactctactttcatttcaggtcacaaaagtaacataatacaacgaataatgtgtagatccatgtaatacaataaaaaaaccaactatattttctatgcaaaaaacttaaccattgcttttggagtgagaaaaatgaaggttgtggtgagaaaaatgaagcttctggtggtccagtgtggttgaggtccagctgaggtcgtggtgggtggtggttgggctggttttggtgggtggtgggtgtgggtggtggcggcttagggaaaacgagacaagaaatgaagaaaataaattaaaagtagtttagataatgtattatatagttgtataatataacaccatgtgttatattttagcattaaattttaaattttattttctattattaaaagaatattatttaataagctaagtatattattacaaaagaaaataaatttttaggaaaattctacaatacatctccttaaaatggatctgatgcatcctttaactgtttcggtatctataagaatttattagtctaattttataatcgtataagttatatttatttaagacatcctgcaaaattttaaaaaattcaaaaaaacttaacatgtcgaaaacattgttcaaagagtctgttacacacgtcacttttttattttatacgcgtgtgaaatagacggtttaaacattgatttctatattttaaattatttcaaatttctcaaaattttgcagaatgtcttaaacaactataacgtacacgactataaaaaaaaaataaactaaaaaattcttatagataccaaaattattaaaaattgcatcagtacacccattaat

SEQ ID NO: 250839 - DNA, 690 bp, Cannabis indica
ctttctgcaacaaaaagctaaggctaattggttaaaggaaggtgattctaacacttcattattccactcaagtattacagaaagaagaaggcaaaataggattctttctattgttgatgctagaggggaaagaattgaggatccagttccgatcactgaagcttttattcagtactacactgatctgctaggacacaaaatacagggaaggcagatagtgaagacaatggtgattaaagaagggcctgtgattacagaagagcaagcggctttcctgatgacagagttcactaaagaagaaattaaagcagctgtgtttagcatcccaggtgggaaaagtccgggaccagatggatttggaagttggtttttccaagataattgggagctagttggaaatgatgtatgtgatgctatttcctcattcttggaatcaggtaatcttttaaaagagattaattcaactgtcattacactaattcctaagattacatgtcctaataaagtgagtgattttcggcctatatcttgttgtaatgtgttatataaagttgctaccaaattgatttgtacaagactcaaaaatatcctccctaatttagtctctctaaatcagggtggatttataaaaggtagatatatagcacataacatcatgatatgccaagatctcattaggaattatggtag

SEQ ID NO: 250840 - DNA, 789 bp, Cannabis indica
ttttacacaagagtgttcttgccaaagttcaagagccctaatctttagtcctcaaattgtgaaatgattttctaatcctttgcatgtagaggtaatgctctatttataggcttgagtcgagtttatgggtagacccgaacacattaggattgaaatgtgttaactaggcccactgataaggtaaagtacagtttatatttttaggtaagacccaatttatgagataacagtcattcatacgtatggggaccattttgatgatgataggtgtcatgcgcaccgaagtttttacaataaatataagagaatatggcgttggagaaaaatgtatgttccatttggtggtgtgcgcaattctcatgttagcgtagaggacaaatctctaacttggtgggaccctgtgtctagaagatgccacgtaggatggtttttggatgcctccaagtgtatcttcaattgcccattacggattaccctatgaaggtatccggatacgtttagatggactttttgtctttcgggcagatggtccttccaagaccaatatagtatggctttatcacatctatgagacttacgtctggatccagagctgtaacccaacttcattgtgggaagatttattaacttaattaggcctaagaattggcatgtttttgttaattttatgcattagaagtacacgtgtcattaatccagaaacacagataatatttacccctaagtctttagggttcaagagtcacggaggcttgcaacttcttttcagattcactattgaatgtggga

SEQ ID NO: 250841 - DNA, 568 bp, Cannabis indica
ggactaaaagtaggagtttttatggtagtctcctacacattttctcgatcaataatttgtttattatataaattttttttatactgaaaacctgtataattaattttctttttcaagcctggataattcaatttctttcgtagatatcatcacagttttaattcaagataatggccgtaaaatcttaatggatttaaactctctgcatttttctttattttttcttattaagagcttcttttgaaacaatatatataaatatgcatatatacatatatgcataatcatggaatataatttaccagaagggaagcaatggtgccacaaagaagagtgtaaaacttgcccaaataagcatcggaaacaaaagctccagctaaagatgaaacattggaaaagccactccatacattcaccactgttactaaaaatacaccactcaagttgtattgcatgctcagatacactgtgatatttcctatcaagctcattgaagccaacttttcgaatgattcgtttcctttatcaaaaaaaaaaaaaaaaaaaaaagaaaaaccaaaaacaaaac

SEQ ID NO: 250842 - DNA, 562 bp, Cannabis indica
tttgacaaaaaatcagtttagggtcttagttatacaattttgaaaattacaggggccattttatcatttaccaaaacagagagtccaatttgtaatttttacaaaacacagggtccaaaatagtatttacccattgaaattagtgctttacataggtcgaatcattcaactcggccaactcaacctattttttttatagtaaatagttatgttaaggttagatcatggttcattgggctgaaaagtaatagaccaaataattatggattggacatattctaactttatataactcaaccccacttaatttttgagagacgttctaaaattaagataattttcatatataaaatatattttacattcacaaaatatataaaaaaaaaattatattttacattttaataaatatattatattattacgataacattaaaaaattaattaattaaaacatatcactaatacgtagtccatagttactctactacttctacaaataagtctaaggtgagaatcaatcattataattaattttgctgcccatacaatgattccacca

SEQ ID NO: 250843 - DNA, 774 bp, Cannabis indica
aagaccttacagtcagcaagttaaaaatatactctgatacttacttaattaatgagttattccataaaaagctatcgcatcgattcatattcccttttcttgacacgtgtcctccagccaaattttgggtataacaggtaatattccatttcttctcttcacaaaagccaagaccacctagcttcttaggaaggcaaactttctctcaagaagttagatgaaatttgcttccatttcccttcattccccaaagaaaatctctaaaacatttgtcaatagcaacagtaattttctgagggagaatgaataaactcatccagtagttcctcatctcttacagaatagagtgaattaattatgctcctccagtaaaggataagttcctactaggccaactatggtgcatcttgtggattttttcaagaataataccgcaatccgatgctcgccatttggttggcctatgatgaaacagttgggattttatgccctaaataaaacccttttcaatctaatctgatttgttatcaataaaagattagaagtcatttatatttacatgtagttttcaagtttatggtttaatatatacaaaatttgttaagtccgtaacatatatagtcatttacaattacagtgatgtcaacacattggaatgtgattgtgattatatgcttcaaaagacaaagtctctgattcatcagtgcactggatttacattgatgtgctaatcagggatgaagtgtacttacactttgcataagtgttatgttc

SEQ ID NO: 250844 - DNA, 655 bp, Cannabis indica
acccaaaagtggacccgaacccgtactctgtgacacaaacttggaataaaaactgcaagttgaccaggactggagttaggactctgacttggaatcagaactgaaattggacatagatccagaaccgtaaccggacaagagcccggactccaaatcagacctggacccgaattggcagccggacccggacacctacccaaacctagactctggacccgaacctaaacttagacacaaacatggaacaagactagggacataaaaccatagtcgggaccaagcaccgcacccgagtctcgatcccgaacccaaactcaaaaatgggaactgaaccagaaccagaccgagacccgtgacagtgatctagatgttgactcgggattcggtaacggggcctagaatagacaagtagtgggtgtttagatctgggactcaaactaggaccaaaacccagacgatgaaccaaacccgaacccagaccaggatcagaacaagggattagattcataacagaatcaagacacatatcgggattggaaccctggactaggacccaacatagacaacgacccaggacgcgaacccacacccgaagcctgatttggacctagactgaaatccggacccgaacccaaactcagaccaggactcgatc

SEQ ID NO: 250845 - DNA, 898 bp, Cannabis indica
ggggcgccttagtctggttaaaacttgacattagtttttgggttgaattattcagccaaataaagtgctaagctcctgtttcttccaaaagacctaagtcaaggtaattacttaaagcgcatgaatagtttcaaagagaaaaaggctaggcctttttgaagaccttctcctttgattggaaaggccttctatttttggtgaatttcagttcaagttggaataacttcgcccttttcgactttcactcctctcacattcgctcgagtggcttcgctcctgatagtttcattccatctgtcttggattctttgtgtttaaggcaaaagaaagtctatgctcttgcaagctaaaagcccatcgaaagtagtcgctacgccgaattcttcaataaaagtagctgtcatgaggcctctagaaggggcgttcggctatgtcttgaaccttcgcattgaccgttcgctttctcagtagcaaaagtgcttctctttgccccttaagtagaaggacaagaaagaaatttttggttttattgctcccgcttcctcacatctgcgctcgtcaagccaaccttgctttttgggaggtgaaatagcggttgaagcgaacattttgaaatttttttatattatcacgattttttaataattaatttatttattagtattaagctagtttataaaataacacacatggtgtccttatagattagggcgttacaatttgaatgtgattaattgattttatatacgtattttatatgcataataaaactcaagtgagatatcgtggtgaatcgttgtgtgcctgattgagcggaactgtctcttattttaattcatatttaaaccaacaatttaaaaatatggttcaaaatatctacatgtatgtttaatttttt

SEQ ID NO: 250846 - DNA, 893 bp, Cannabis indica
atgggatggtccacccctaatcacttagaatagctaacaaacatgcaaaccttggttaacagttctagcttttcttaagattacgattaggtcatccatgaatctagtaatggtttatactaagtacacaaccattccatcattctgaaattttcctttcactagggtatttccttagggcatttaggatttttatgcttaatgcctcgtatgtatttaaatttatcacgagagtataaaatttgcatatagattgagatttatatgtcctagtctggatataagtttctttaataaatccgctatcacatgaaaattagaattcggaaattaaattatgttaaaccatataaagtagatgcaatcgaaattaatcaccataagctttaatcattgttaaatttcacattaattatttgttttctttgtttttctttaagtagaaattaaaatcttttcttatttttattgtcacctaatagaactaggaatttaagtgtttggtaattaactacagtctttgtggaatcaacctcactcttgtgagtctattacttgtaaacaatacatatacttgcgtgttggatttatcacaacaaagattcggaagactacggtatgagttattcgccatccaaggatacaacatacgaaaagaaataagaataccctaataggctttaagaggtaatttttttttgtctatttattttagacttaatctatatatacacatggtgatcctgaggacgtggactgtagtacgatgataatcataaactattattctgctgcatacctgatttagtaccacaaaattaatataggtgtgctctgcacatgcacggtgtcatattgcaaaccctccgggagggaacaaaagagttggaacc

SEQ ID NO: 250847 - DNA, 679 bp, Cannabis indica
cttactacaatcatgttcctaatttgtacaataatgactaggggtcattgtgtgggaaactgacctgagcagtgtcttcttccatgaaagagatcatcggctctatgggtttttgttttttagagcttctatcttcgacagctaggatatcgcttttaggcttgtgacagagtgtccaagcataatgctccctagccttgttggtctcacctacaatgtggggttcaccaatgatgacccctagatgtcctgccactggcggtggtattgcatctccattctaggcaccgtgtgcccgagtttggtcgtcttacacataacaaagcaagtggggattattatgccttatgaggtattaaatctccatctccaaattttgacactcattggtgtcatggccgaagtcattgtgataccggtagaactttgacatgtacctcttgcccatctctcttttaataggaaagggctttcggtatgggactgttccctgagtagccatgaagatggcctcaagtttctctatcaggaggggtgaagtaggtgtacttctccaccttgttcttatgtggcatgggaaaagtgataaacttcctttttttaccattgttcctccaagagttgttggtgttgcacttgtttctagtgtatttgccactagatgtctggacagagttct

SEQ ID NO: 250848 - DNA, 599 bp, Cannabis indica
aacaccacatccctgcttatgatatacctgtctaaatttccaacttcaatacaccacattttgtacccttttacaccctcaggataacccaaaaagatacacttctttgccctgggatcgagttttccttgtttgacatgcgcataggctatgcaaccaaatgtctttagattcccatagtttgcagggtgtccagaccataattctattggtgtgttggcttggagtgcagctgaaggacacctgttaatcaagtaacaggcagtcacaacaacttcagcccaaaaaattttaggcacaccagagtagattatcatgcatcttactctttccaagatggtcctgtttagtctttcagctagaccattatgctgtggatttcttggcacagttttgtgtctagcaatcccattttgtttgcagaaagaactaaacaactcagaacagtattcaagtccattatcagtcctgagcctttttactttcttccccgtttgagtctctaccagtgtcttccattccttaaatttactcaaggcttcatgtttatgtttcaaaattgatacccatacatacctagaatagtcatcaattatggt

SEQ ID NO: 250849 - DNA, 851 bp, Cannabis indica
tctgtagctgacccatctacgtgaaatttccatttaggtctgtcttcattgttgttccacgtggctccaggttgtcccttatgttactttcttctttgcctgtcaagtcaactataaagtctgctaaggcttgtcccttggctgctgttcggggttgaaagattatttcgtactgacccaactctaccgtccatttaagtaaccgtccaaaagcattaggtttttgcaatacttggtgtaatggttggtcggtgtatacccgaataggatgagcctagaagtaaggccttaacttccttgttgctaagattaggtagtaagtaagcttttctatcaatggatatcgttcttcagcttcaatgagtcttttgctgctatagtagactggatgttggacgttgttttcttctctaatcagcacgacacttatagcgtattctgtaacagctatggcactttgacaattgagacatttcttcttcctgctaattgctataaatacccctcaacaatattgatgaggggatcgggaaaataaaacagaacattctctgtaagaaacacccacctattaataacggagactcgtggactaaggctaattaatgctcaaaccacgtaaaaatatttgcattaactcttcctaagctatcattattacattaaagatctagttgccgaaaatctcagccagcatatatgaataatatctttgagatatgtgcattttataatttaattattctttattattaaaatttaatttaaatatatatatatatatatttgtgtaaataaattaagtaatttaattagttggacaatttcatattaaattttttaaaaaaatt

SEQ ID NO: 250850 - DNA, 898 bp, Cannabis indica
ctcaaaactaaaaactaaaaacaaaaagaaactctgactcactagttaccttaaatacatttatatcaaaagagaaagcaacattaaaattagaatacaataaaatcttgtcttccactccctcaaaatcatggtagccgaataaaatgctacttttgtgatgggtattattgccttatctccactccaaatacgcatactttgtgctttagggtaggttagattgggcttctttaatcgtggtttcacttactggatggtcggtattcagtgggcagaccataaaagaaaaaaaaccatttctggtcgtacaatgtttgacatgaacaataaagatgtcaatactctgtcatccaatccaaatgaatatacaacttgagtttttttcaattcatgtctgtcattttccattttaataaagcatcattacttagaatttgtaagtggtctgaactgaacccactactcagaaaactcagtggccatggctgctgctgcttctctctcctatctctctcccccaactgtcatgaatttcaatcatattcacagaagtgagttgggttcacttcactcttcagttcccactaatcttcaccaaatcagaccccagagctatcgtatcaggtatttatttttttttttcttttctctctcaactatttcttcactcggtaggtactactaagtacttggtggacatttaagataagcttttaggtgataattgtggcctttttaatgggtgtttccactgaattatccgatacttctgtatcttaggaagctgaaactataatgtaagctaaacttgtaaagggtgtttaaaattttttctcgtttattgttctcttggcagcccaaaaacatatattgagaaaagaaaaaggaagaaagc

SEQ ID NO: 250851 - DNA, 899 bp, Cannabis indica
acaaaatctatttctcgttgcggcagcaatcccgacaactcctcaggaaataggtcaagaaaatccttaaccactctgactaccttaggcccaaatgtttcaggtctgttggagtcaatcaccactgctaaaaatcctacacatccactatgtagtagatccctagcccttagtacagaaataaccgggattcgagacccctgaactgatccaacataaacaaatagatcttcaccttctaaaagtcaccattttttcgcttacagtctaacctggccgaataattggacagaaaatccatcccaagtataatgtcaaactctgttaattccagttctataaggtcagcactcaactccctatcctcgatcctaaccggcatagacctaatgcgcctattggagataataacctctccgccaggcatgagggttccaaaccctctttcaagtatatcacaaggcctacccaaaagatcaattactctcgtagccacatatgaacgtgtagctcccgaatcaaataatacagtatacgaggagtttttgacaagaagctgacctgtcaccacagaaggactggctgtagcatcagcttgggtgatagcaaacacccgagcaggtataggttttgcctctattttcggctcttctttctttgccagagtgcaatctttcttgaaatgccccaccatgctgcacagaaaatatgtcttccagttgtactctcctggatgatgtttctcacaacgcgggcactcagggtaataataaccctggcgcccacctctaccttggttcccacggaaccacttactctgccccgagccaccagatgtcggggtaactttccttttctgattagtggtggaatcaccaccatccctaccataaacagga

SEQ ID NO: 250852 - DNA, 622 bp, Cannabis indica
gaaaatatttttttggactcctaagttcagtgggccctaaactcgagcctagttcaccttaactaccttattaatgttattttttttacagtttagttaatcagtcttatctaggttacaatgtctatagatataattttttattacaaatatatgttttaactatctaaaatgcttactttttttcttattttttaaggggccattgtctcttattacttttacgtaggtccgccctgttaggttacattgttagagatatcattgcacattataattataaaataaaaatatataaaatctattcatcttttattttaaaaatctaatacttaattacactatttttatttctacataataataatattttttttcctaagtctcactttccatctctttgattgagaaagtgacttaataataaagagaattattaaaaaataatacgattatttttttttatcttaaatcattattagtgtaaatgtaattaagtaacgagtaatactattagggctcgtttggaacgccgtattaagtcgtattgtattatattatattgaattggattatatatcatatttttatataatactatgttaaactttaatttatacta

SEQ ID NO: 250853 - DNA, 1229 bp, Cannabis indica
gatgaaagctccaaggtaggaagaaatccattgttcaatggattttcaaggacacgagtagtattgtttggagggttggtgaggaaaatgaaactattagctctcatagtgactcgagaatcaagttgcatgatttcaagttttcttagagagaaaagcaaaaaagaaaagaaaaaaactcaagaacaacaagagagggagagaaagagagtactgatgctttgcaagcaagagtggggtgggtttttgtgaggggtaaatggctccttttatgggccttaggggggagagagtctgtctagatgactgccatgtgttttaatccaatggccagtaatacaatttgcatgtgtctatttaccttctcaaatttggtatttttttcttcaaatttggtattttttttttcttcttctcaagttgccgcaatattgtaacattttttttactgagttaatatatataatgattaggtcgttatatggcattgtattttaggataaattctcatgaagagtctaagacacgtggaaggcatgtgctgcttctttttttcttcttttttatgctttgtaggtatcgttcaagaattatctcttttttatgtgtgttattcttaatactatatatattgttttattatgtatagtgctgtaatttaatctccttttctaaattgtggttgttaattatggctgtatattagcactgaacaccaatgctctaactctaaagtgttcatgttgggatacgttgagaaatcaatttactttttcaattttatcacttaaagaaagataattatttaggctatttattcgttcaaattcaaccttaaatgttacaattaaattacccaataaaagtctatatagctagcctatatatatatatgtataatcaacttattaatttggtctgtattttgtgtgaatttgcaatctttatggttcaattcaagttgtcacttaagagaagcaaaactatgtagaactatatgtctacacacatagtttagtaatttgttgtttgggcacggcccactgattgaaataaaatgtgttctaattgaccacatgtccaatacttgaataaattttatcaatttaaagagttataaaaaagtaaaaattagtgtaagaactccctttaattgttacataatgttttctttatcataaacaaatgtttctttctttttttattctcagttcttacactaaaagcat

SEQ ID NO: 250854 - DNA, 520 bp, Cannabis indica
ggaagcttactcttcaggtttgcatactcgctcttttcgttttgaaaatgcttggttacgtgagcctatgtgtagagaggtggttaggagtaattgggaagctttgaatgggagggatttaatggataaaattaagagctgtggtgaagccttggaggcttggggaaaggattttaccgggaattttaaagaaagattgagcaattgcaaaagggttgttcgaaatttgaagaaaaagagagatgaagcttcggttaagttgcaccgtgagaagcaagaggagttgtttgagatcttggcacaacgagaagtttattggaagcaaagatctaagcaattttggcttcggtctggggacacaaatagcaaatattttcatagtttggctagttctcgcaagaggcaaaatcatattcagcgtcttcaaagagatgacggggtgtgggtggactgggaaaccggtttgggaggagtaatgttagattactttaacaagctgtttgaagcctctgatgtcgat

SEQ ID NO: 250855 - DNA, 740 bp, Cannabis indica
gagaagtgagtggcaattatgctatagtgagatagagctgaatttcaatataggacgagagtacctgtatggtttagatagctcatagggtttctgtgtttaatgtttgttgcatgcttaatttatcacaagagtagaaaatttgtatgtaattgagatttatatatctgagaagattataaattaccttagtaaacctgctattgcatagaaattggtaaaaggaagataatcatattagaccataatcaatagatacaattgaaatcgaaagccctaactttaatcatcattaatttccttttgatttatttgcttcatactttcactatttatttagtgtttttaatcttacttttctcttaattttaaattcactaaatagaagtaaagatttaattttaaagtatttaactagaattcttgtgggatcaacctcacactttgtgagtctattacttgtaaacgacacatatacttgcgtgttgaaatcatcacaacaatgcttaaagctatttattaacaagccaaaatgattatgatatcagtgataatatcgccgttgaaggtgaaactctggcttcagtttcaagacctctgtcaatgttcatgggagcttgtcgagtaggctccgttagttctctcatggactcaaggcggaaactatcgccaaggcgaagcaattttcacaagaactcatgagtcgagctataaagcgattctcatggagccaccatggc

SEQ ID NO: 250856 - DNA, 562 bp, Cannabis indica
ggtctgaggccaagttcgggatctgtgtctaggtcgaggtcaaatctaggtctgtttttcgagctaaggtctggggccaggtccgggttcgggccagggtctggggttagggtccgaggctgggccggggccagcccggcgatccaggtccaagtcggggttaggtccaagccggtgttgggtcagaggttcgagctaggatcggatctggagtccgagttttggggccgtgaccgaggccaagaccgggtccggggtccggaccgagtctgagtttgtggtttgggccaggtctgggtccggggcggggtcgggtctagggtagggccaaggtcaggttcaggcccggtccggggtccgagtttgtgtctgggtccaggttttgggtccgagttcgattcgggtccaagtctgagtctagagtgggtacgagtccaggtctagtcccagtgcgtgtcttggtctgggggtccaggtcctaattgagtcttgttcatatcgaggctcaaagtattgaagtgtttttcaaaaaaataaataaattaaaataaaaattattttt

SEQ ID NO: 250857 - DNA, 828 bp, Cannabis indica
gtttctaacaaagaatggggtagggtgtctgagaggaaaccagcagtctgcgcgagaatgttataaccttgcaatggccaaggctaagaaggaagtatcctccagccagagcacagacaagggaaaaaacatttccaagtagggaacttcccaaggcggggatgaagatgtggatcctcgacttggggacccaagcagcaatgttggacctgtggaagagttagaagagatcgagatcgatctagatatcccgaccaaaaagctaaagatcagaaaaggtttgttgctcgaagtaaaatcaaaattgataaaatttctgagagcaaacctagatgtttttgcctagtcacatgcggatatggttggaattgatccttctatcattgcacacgttctaaatattgatcccaacttccggccactccaataaaagcgaaggctacctgataaagaacaagcattagccctgaaggaagaaataggaaagctgcgcaacaacaattttataattgaagctttctacccagcttgggtcgcaaatcccgtattggtgcccaagacgaacaagaaatggcgagtctgtattgatttcacagacctcaacaaagcattccccaaagactgttttccacttccaaggatcaaccagctcgtagatggattagtagggcatgaaatattaagcttcatggacgctttttcaggttacaatcaaatccaaatgcatccactagaccaagaacatacaagtttccgaacagttatgggtttatattgcaacaaagtaatgttgtttggtctaaaaaacgctggagcaacataccaaag

SEQ ID NO: 250858 - DNA, 564 bp, Cannabis indica
aaccgtgttcgggcccgaaaatgtaaattgaattgattatttggcattttaattgacatgtgataatctgaaagttatttggatataattgagtgtgaaatggcatttatgcccttgaaattgaatatgcatgttatatagccctaagggcaaaatggtcatttgactataattaaattactttgaattaaaggggttttttgaagaaaaaggattgatttttctggtttgttcatcctctcaccctctccctctccctctcttactctcttgtttttaaacatttaatttttgaggaaaagcttggatgttgtgtgtgattaaggcttgagttggaggaatatctttgctcttgctttgttgagaatcaaggtagctttctgtaatttttaatcttgtttagttgctgaattttatgtttgggaagcatgttcttgatgaatttgatattaggttgtatgcttagtgaattgtgtgttcaagcttgttaatttcttgtgttgtgttggtttgagcctagggtaattcaatgttgtttttgatacttaatacaattgttgatta

SEQ ID NO: 250859 - DNA, 637 bp, Cannabis indica
ggcggttagtgggtgtcttcctatgagagtttagttgaagactaaacatgtggatgtctctttgttttgtccaatttgtcatggggcaggtgaatcaattttacattctttatttgcctgtgattttgtacaaaattgtttgtgggtagcgggtttggctatgattccagttgattcaaggtcgtttggagactagttttttcatttgttctcacgactgggtgaggaacaacgtgtttaggcagtgatgttggtttgggcaatttgattcgcacaaaatcaactcttgtggaagggtagaaaaaatcgggtggagttcgttgtcaatttggctcatatcactcttgatatgtagagaaacgttcaaaaaagaagtttgtttcctgcgtttgatacttggtatcttttggatgtgtaaaaactggtttcttagtagcatctagaccattttttgggttagatggttgtcatctaaaagggccatacaagggtatcctactaactgcagtggagcttgatgtaaatcttaacttttatccaattgcttttgcaattgtggaagctgagaataactttagctagaaatagtttttggatttgatgagaaacaaaattgaggatacttaatagaggccaa

SEQ ID NO: 250860 - DNA, 1168 bp, Cannabis indica
ttagttttcgaccagtcgacttagacttttttactaaaaaaaatacctttttaccaccaaatagttaggtagaaaaagcgtttaggtataaaattacaagaaagttagataaaaaaatttattagccagcatattatatattgaattaaaatttttaataattaaaaattatattttttgatagaatatatttttaaagttcccattaaatataagttatatattagtttaataaatttaataatattctaaaattatttatttgttaatatatgtgaaaattagaatgttatttattcttataatactaataattataaattattataaaaattgaaaaaaaaaattatttatataaaattatgatatttttaccagcatagtttgtcgatgcgttggtaaaagtaatttttgccagcgcataacactaccaatgcaattttgtgctgctaaaagtaattacactggcaaaagtaacttttaccaatgcaattttgtgctggtaaaaagtattaaagggaagggttttacacagcttgttatgccaacgcaaatataagttgcgctagtaaaaatatgttatgccagcgcaaatatgtgctggtaaacttgccagcacagttcacgagatgcgctggtaaaagtaaattttaaccagtgcattagtgaattgcgctggcaaaagtaatatttcttgtagtgatttggaccactccaggtccgggagagacaatatgtcttccaagttcgagaagcctggataaggttgggcagactttcgctgatcgagtagtcttaacttgttcccagttccgtgagacttctccatgataggattgcaatggaaaattttaattagcgagagtatgaggttaatctctccttgtatatgccacatgtcacacactaaaaaatgcgaataacaattattattataggattttttattgtgtcttgtgctttttgggcttgtcaagtatcatgtcttttgggctaatctattcgtgcttacttgccgtgtgattcgtgcatgtcgtgacgtatcgtacttaagcccatatttttcatgctgtgtcgtacctaaatttatatttttttgtgcctagtcgtgctcgtgccacccaaactcgtgccgattttgtgcggtgtcaaaaaatccagcccaaat

SEQ ID NO: 250861 - DNA, 3320 bp, Cannabis indica
atagatgcttccaattgtaagcttgaggggtcgtgttaggagtgttagttagcttactgttcattagagttagttaattctgttattggttatttctgttattagtcaatgtcagttctaactaattctgttgtatctaactgattctccttgtgtaattcattggctatataaggccaatgttcattcctttcaataatgagattgctatttgttcaatctatctttctcttatctttcttctctttgctactgtctttctctctctttcttgttcttctctcctttgctctgttttcttgttcttggttcatcaatggcggagagattcaacacatctcaattgttatatatatgtatcagatataataatgacaaaacttgttgatcgactatgaagggtatggtgatggcgattcgctagcgaggtcttcgattgagatcttctcaaagaaagcagtataaacaaggatagtagtcggtctattgatggcgagttttgatggggctgtgaaggtctagcaatggcaagctcttagtggctaattacgaggcctgtttgacgatgggaatagtcaagcatggatgcaacatcttttctctttctcttcaccatatatagttttgcataatattttctctttctttgcacgagattttatcatctctatctgtcttaaagccatttcttttttaatctatagttcatcatgatcatgctaatagaaaccttcctagtttattttgggtttatttcatattgagtgcaatggcatgcccagatgtcgttgcaacgatcgtcagagagaattgagaatctaccaatattttctgatgaatggatgcgtgatgatcggcgttgaatcatgaatcaaccattgtttggctttattaattaatatgcgtagattatctattttaggacacttttatagtagtagacacctttaaaatggacacaccaataaacactctttttgttctcattttattggctgttaaataggccccatgctattatgttgttgctacacacaccatattgctaagaagtaatatttatttttgtcctggactcttcctctgttttctagtcgctagtcttcaacaataaaaggctaaacgttggagagttttaatttactgaacaaatatgataaaatttatatttacaatttatgagtttgttttgaggatatatatatctgcattttcttaaaagagaattacatttacgtttgctctttattattattattattattgttgttgttgttgttgttgttgttgttgttgtttgagtacattttcagactgctactaattttttacccacttattttttttttccatctctttaaaggatcctttttccaatttttcattagtgtgtaaattaattgaaaaatgtggatttttaatcaattgtacagggtttatcgttctaataaatttattagtagttgaaactttcaaattttatttctaggatgaagtcctgaagatttcaaattgttccaagatgtaggttaaagaaaaggtaaaatcaatataactaacaatagaattcaaaacaccaacaaacaagaacaacaacctccaaattaaatcgatatgatttaaataaaaatggaatacaaaataataataggtttaaaaatttttaaaataaaaataccaaaacaaaagaagatgaataatgcttcaatcaaggaactcgagattaaaaaaaaccccttcacgaaatattattccgccaactaaactcctatttaattatcaaattaaattatttctaaaaactattgaacaccataagtgtaccctttctcacaagtgaagtaatcatatgtatatgcattcacattaaacgggcccacaaacaacacttgtaaacaataatatagcaacaaaatagacttattagtgtggtcgttattggggtgtctatgctagaattttcctctattttattatatctagtttttaatgtataattcatttgtatttaatgtattttcttttagctttttctataaataactatttatataatctcttttatttatagttttttattttttaattttattatgagtctttttgttaaatcaggtttattttaacttttatttcttttatgagactttgtttttagtataatgcctattttaatgtttaattttttttttgcattattttatggttttttgtagttcactactattgaagtgttggccaaatatcaaagttcctaaactacccctactgctcataatagaattaaccaactatcagttatgacagttggtgattgagcctttcacaccagcttcaacattactatttaaggctaattggattaaacattggtgattgatttttagggaaaacaattttgtgtgtgagagaaatctataagttgtttagagagtgatgagttgcccttgagtgttatgtaatggtgtgatgcgttgattgttatcatcaccactaatgagttcaattacagaagcaatgcttctcaagattgtgtaattggaactattgtaacctctcattgaatatcagctaataaagattctctaaagccattgttgtggctgttttctggtcggggatgtaggcaaggtgattcaccattaccttgttcgaatctcgttaaatttgtgcgttcttaatatttgtttaaggttcttgttactggttttatatttgctgcattacagtgttagttgttgatttggtttccttgatcattgtcttgtttattgtgttcttgtcgatgtgttgtttcacaacaatttgcatcagagctcaagtttcttggagcaagaacagaatcaagaaagcgatccatggcttccgcacactttgaagtagacaagttcaatagagccaatgactttggactatggaggatcaagatgaaagtatttctggttcatcaaggagtgtatcgagccattgataaagaagaattgaaggagttgggagatgacaagaagaagattaaagaaattgaaacaaaagctcatagtgccatcttgttaagcttgggagatgaagtgttaagagaagtgtcaaatgaagaaacaactctgggattatgggagaaacttgcctcgatttatctgaagaaatcccttgccaacaagttatatttgaagaagaaactgtacactctcaagagggaagattcaagagaacttagaaagcaccttgatgagttcaatcgaattattctggatctcagcaacataggagtgaaaatagaagatgaagatcagggcatcttgttgctcagctcattaccaaaa

SEQ ID NO: 250862 - DNA, 618 bp, Cannabis indica
taatttcaacccctctctctctctcactctaacctcaaaaccaaacctagacccggaccctgactcagacccagaccctgaatcggacccagacactagaccccgaaccctggatgctagacccagccccggaccttagatacgggtccggagttggggtccgtgttcaggttcaggtttgaattcaggttcacaatttggtttggattcgggtccaatttcggggtatgagatatggggttgggtttgggtctgaggtagctgggttaatgtcgtggtttggtgtaaaatattgaaattaattttttcttagtaagaaaatatctaaaaatagttttaaaaaacatgagccaaatactattaaatttttaaaatgaacaaaaaaattattttctattcttacttttaaaaacacaattttaatcttttgttttaatttttaaaataaaccaaatgtaatttaatattttcattgattaataaaattagagtaaggtattttagtcattttgtaaaatactttgaccaaaatcaattttaaagactatagttttgtctctgacaaagtatgtagggtctaatttattttttattattattattttgctctatatatat

SEQ ID NO: 250863 - DNA, 588 bp, Cannabis indica
agagagaaaggagggagaagaaatgaagaagaaagaaacacacacacacacacacacagttaaaaaacccagaaaagaagaaaagaagaaagaacaaagaatttttgtttattttgatgattcttttattttaaattaacttatttttcttttattttttaaaaatatttatttacgtggaccaatattatagtgtcatttgtgaattgtgtcgttgtggacaataccctatgtacatatggatagctaacctggcagttaaccgccaaaactagatgaaaaggggtaactgttaagagaacacaatttttgggattttttccatcaaaatttaaattttggggattaaattgctagaaaggtgaaagtattgagggttatgttgtaatttactcattaaataaatttgatttttttaaatatcaacatcaatattaacaaatacaatctgaaaaattcattcaacaaattaaacataagctcacaaaaattaatttttctactttataacacaaatttatagaatttatttatatatatatatataaataaaagagatagagaataacaataaataaagaaaatttt

SEQ ID NO: 250864 - DNA, 526 bp, Cannabis indica
acaacagaggagttgagggaattagtgaagtttctggagcttactatgattgacacgtggtaggacatctgacgtggctacactatacagtgccatgttgtactcgttgttgttctagcttcttcttaagtcctatctccatagcactgagtctagaaactagaaggatcacgaatataagaagaataaaatcatttactattttaaataaggggtattatgtctctcaattagaaatgaaattttaaatcccgatgtaggattactttttaataatataatacctcctacaactaatttttctatgtctttaaaaaaaaaaaacaaaatttttactatccgatagtacactttactatgttagataaattattatttaattatttattccgaaatacattgcagggattttatttaacgccttcagtttcttgaatgtaactaagaaaatagtaatgtaactgaaatgttattatcaatttaaattaaaaaataaaaataatttcttcactaactaataataaat

SEQ ID NO: 250865 - DNA, 1202 bp, Cannabis indica
aaaaagaagggcataattttttcaattttttgggctatttttttcctttattttgtcatttatggaaacatgtttttattgcattttatttattatgtttcttttatttttgttggggatttgctcttatttttttgtagtgttttaggaaacttgtttttatttaattaattattttgttggtttcctttttggtggtattttcggatttggttgatgtatttaatttttaaattttgtggggatatgttgtttcctttttccatttttggtaacctttgactaatttttgaaatatcctttttggtatccttattcctctcctcatgtggtgaccaaggtaaggaagttactttccattttttttgggtatttgtgttcaagtgttatatatgctcaactacccaccttcccacgatcaccactattcacctctctatctattttttttcaaaagtccaaccttcttcaagtttgagagtgtgtttgctttctagggtttcaaagaaaaatggccaagaccaaaaatgctcaactttccaagaggcattctcgtggttctgcctttgcttctccaatcaccccacttgtgccacatgttccagtgaccggagttcctgggtcttcatctgctctgacaaaaaactgccaagaagtcaaaatcccaagctcgaaagttaacttacaatctcagttctcctccgatcattgcctctccgattgctaccccaactcttgggcttggtgatcatgatgaatctcattcattcgatcactcattgtcgaagttttcatcttcgaatggtgctccaaatgttgagaaagaaattgtgcctatgcctaccgtgagctctcgaactaggtccaaggtgtccaaaccaaggaaacccgaagtatttctacccaaagaagtctccaaaagtaaaaaggtggtatcctcatcttcaaagtccaaaagtctcaaagaaaatcccccttccgtttcatcatcggattcagaacctgaagaagagaccgatgaggatcaagaatcagagggtgtgtctgattcaagtgaagagtttgtgcccaaagaacaaccctctactgataattctgagtcggaaagtgaagtgcctgaagctgaacctgtaagtgcagaaccaattgatgtccctggtgcagttccaaagaaggacgaaggaaaacgacccattgtttct

SEQ ID NO: 250866 - DNA, 1426 bp, Cannabis indica
gtatctaattaactagtacttttcgaaaaatttgttagcttaaatttaatatagtttggccaccctaatatttgatcttggttccgcttttggaggttccatctcaaaactaagcaatggaaagactaattcattcatcttatatatgacaatttattttcacacattaacaatatgaaattaacttaataagtagtgtaatatacattacattaaaattaaaacttccattccattccaaaattgattacaccaaatcaaatgggatgtaagactatacaatcaagaatttttgtaatatttatttatgtagtataatatctataccttcatctgttttaaaatatatatatagggcaagactatggtaggacctagcaaaagttccctaccggtagggtactttttttaacccttcattttagatcgtgtggttattatgacataaggtgtatactcttacgataagactgcttgtatacaattaaaactttatacattataataatatttaatatctattttaaaaaataaaaaaatattaattttttatttaaattattattattttttaaaaaataatttaattttcttttatacaattaaaattttaatataaaaaaatagtaattaaaaaatctaatacatataatacacatatatttcaaaatttaatagattaaatgtatatttcattcttatatatatattttctacatacaattttaaaaaaaattaaataatttttatatataaattttttcctttgtaattttttattttatattttatttttttaaattttgtttgtttagactacattaaaatagcaatatagttatgtagaaaaaaaaattatttttttttgtaaatattaaataatttaatattgaaaaataactaatccaaaataactgattcaatctatatttttactgattgaattagattgaatttgagctattgtgcgaattggattggatccaaaatatgaaatccgcacttagtgcgaatcggatacactataagcaaaatagtacggattggattagatgaacacaacaacactccgtatttaaaaaaaaatagaaaattaaaatctgtaaaaatatgaaaataattatagatctgtaaaaatataactttttgttatttttgggtgttcataaaataactcctttcttattgtcaaaaaattaacaacgtgctttttagatttaaatgtttaaatttataagcaaaatattaaaaaaaaaaaaattgtacaagaggcgcacatttaagaattgtttattttaatcttctctgctctaataatttactttttaaaatcgaacttcaaaagaataataaaataaatattcattaaaataataaaataaataaaataacttcctacaataaagtttattgtattacagtgaaa

SEQ ID NO: 250867 - DNA, 1457 bp, Cannabis indica
tggcaaactcagtccgctggacccccgtataagaaggccaggcccatgaagatagatgccaacaaaagggacatgacaaaattttatcggttccacgtagactacggtcacgacactaaagaatgatacaacttgaagtgggaatttgaattcctaataaggaaaaacaatccgcaactacaaaactatgttaagaccgaccaaggtcagaggaacgacaacaaccaagatttgctacctccactagtagatggacatttgcaagtcattgttggaggccctcacattgtttgagattcgggcaaagctcgggattggtattcccgaacagtgcaacacaagcaagaagaagtcatcctggccgtggaagaaagaaagaccaaagttccacgagcaggagagccaaccataacattcaacgatgaagacgctgtcaaaattagatttctgcacaacgacccgctggttgtggaagtccagatagccaataaaatggtggccagaacaatgatcgataatggagcctcttccaacgttttgttcaagactgcttatgaaaagattacacgatctaaccccatgcctccagcctgtctatggtttctccggtcaaggagttccacctctagaacaaatttgtctaccctgttggacaagctccgacgagcatgactatcatggcaccgtttctaatattggatgttccttcagctttcaacgtaatgcttggtcggccggccttgtatgacttaaaggttgtcacatcaatatttcactcgtgcttgaagttcccaacaaagaataaggtagggtgtctgagaggaaaccagcaatcggtaggggagtgttataatcttgcagtggccaaggctaagaaggaagtatcctccagcttgagcacagcaaaaggaaaaaacattcccaagtagggaacttcccaaggcggggatgaagatgtggatcctcgacttgggcgcccaagcagcaatgttggacctgtagaagaattaaaagagatcgaaatcgatccagatatcccgaccagaaagctaaagatcgaaaaagatttgttgctcgaagtaaaatcagaattgataaaatttctgagagcaaacctagatgttattgcgtggtcacatgtggatatggtcagaatcgatccttctatcatttcacatatttcgaataatgatcccaacttccagctagttcaaaaaaaatgaaggttgttgaacaaagaactagcagtagctttgaaggatgaagttgaaaagctgcgcaacaacaacttcataattgaagcttttacctggcttgggtcgcgaatcccgtactagtgcccaagccgaacaagaaatggtgagtctgtattgatttcacagacctcaacaaggcgtgcccgaaagactgtttccacttccaagaatcgatcagcttgtagatgcaacaacagggca

SEQ ID NO: 250868 - DNA, 1591 bp, Cannabis indica
aataaacatactttaatattgtgcattctttaaatgtgagtctcttaattcaccacaacatcttctaagcattaagagagcttatggaaagcatccccttgtaaaactttttaccaccatatcatccatatttttcccttgttccactaaaatcacacacacatatatagatatacttattaggggtagagtggacatagttttgggtttaaaatgctagtggtggtggactataattagtgggccaatttatagtcattagggtgcttctatgtgcctcaaatgcagataataaaatcgaccatcccattatggtcctaatggcataatcggtattataccatgcatatagttatccacatatattaatattgacattttatgagcaacttatttatgaagtccatataaaatattctaacacttcatttattgttagagatttcataagtagtgcttatttacctatcgtagcagaagtgggggtagattacaatgttagaatatcaaagaatgtaaacagtaaaaagaagtaaagaaataaaataaaaaagaagtaaggtctaaagatcaggacatagagacacaatttgacacgattctatagatccaaattcatttattacagtgtaaggcatgggcatttaataagaaatgctaaaggacaccagttgtgtgtcagtattgctattggttcaactaagtatcgagtttcacatagtttaatataatatttcttaaggagtattgctagtcaatcgtaacgtgacatatcaagaatgtgttaagcaccactgatgcctaatagtaatgcttttaaataagcagccgatgctgactcaaaatccttttttctaccagtcacgcgttctatctagctaagccgaagtcatccattcattaagtcgatatacaatctcaattgtctcattatctatgtttgatgtcgatattgacgtatacttaattttattgacattagtatttcttagttcaagtacgaatattaaaatattctatgtaagctaacatagttaagaattgttcacttagtgtcggtgttaatatataataatctgtataattaataatgtatgatattatatattatcaagtcctataaaataaagataacttataacatgttcaggattcatgaacatatactttaaaatatgtttagttagtttattggaccaaaataattaattctttttcacattgggcatgtaataaccccaatttggcttatcattccttaaaaaagaattgtgatgtttattttgtgaataaagtttgagaggggtactgtggctatgatgttgagagtggtatcaagagcagtgttcattacactctcttctatgtgggtagatcaaaaacatttattgaatcaataatcagggccggttctatgcataggcgggttagatatgtgcctagagtctattcattttgggagctcatgtaaaaaaaaacttttaaaaaatatacatatttttttaataattttttaaaataccatttatttttataataacaggcaaaagaaaaaattacctatggcctatatttcaatttagggtcgagg

SEQ ID NO: 250869 - DNA, 826 bp, Cannabis indica
tgttttaagttgttctgttttgtgatttactggtgtttataaaaacaaagtatttttgaaaacttttccgtgtgacagtatttttgtacaagttaactcaaatttcaatatttttgtaagtttcttaagatctatttgttaaagttttaagtgtacgtagcccaattaataatctttatgagcctactcaactgaactatggggttcgtaggactaaagatttttaccattattcaaaagaaaaaaaaaacaaaaagattttcagcagtgttgctagttaatcacagcatctagagcacgatttaattatatataatttatggtcacttttgttgccattattactacattaatatttactctccataacacttgacatttgcgagagctagatctgagagagttggagtaccgtaatgagataaaaatgttttgaagagaacttatagcatgttattttattaaaataatatatatcatctttatattaaatcatactataaaatagaaacaatgtttttttttaaaaaaaaaaaataagaattatactatacattattttttaactttttttttttaattatataaataaaaaaagattcgctgtcttttaactggctgttcttctttgtcaactcctactaaggacgtagtgcccagagaaccagacttgcttagcttactacggtgaagggttttttcattgattgcacgagatcctgcgaaggccggactaaccccgactaaaaattgatctataaggggcccttctaggatctaacagtttaggttgttccagtagttttcatgtaggttattatataga

SEQ ID NO: 250870 - DNA, 1268 bp, Cannabis indica
attaaaccgctcactttagggtaataaccctaatcccaatttctaattaatcacaaatataatattcaacataagctccaccgcgcatatctctacgtgcaactattgtcttaccaatgtcccataaatgtggagattccaaatccccaggtgttcttgagcaagtgtcggtagtcctagtcacacgttcccaagatttcaccgatagggttcatcccaaaattcactttcaataatcacataattagcattatatttacagattaacatatagagcttgaaacgagctttccaacgatataaagaacgttaaaacggagtcccgagtcaaaagttatggtcaaaacaaaattcgaccttccccgatacagtccaaccgcaattccagtttggaacagccctgaaccaaccagaattccggttgtctgggtagaaacaacacgaaaaattttaatttttaagccaccataacctactcaaatcttccccaatcaccaccaaactttccaaagcatcatcatataacatattaaacatatttcacagctcaaacacaataattacacaaaaaattgaaaagtgccaatgttgagcaagttttgagttcttgaactcaaacttgctcaaccacacaattaaacaatatcaacagctcaaataggtctaatttcatcaatagaacataacccaagtaacgataacctaaaccaaatcaaaaatcacaaagtgttattaaagctctaagcttcagttccatgaactcaagcttactcacaacaaccatacttttagctatcacaaagaaataaccacaacaaaaattcagatttaaactcaaagccacatctcaaataacacatcaaaaacatctctaaaggcaatatccatgaattaacaacacaatcttgcatacaacatcaaaactaactcaatttccatactctgcaactcaagaacataaagcaacctaaacatgatttaaacatccaaatcttaggagcaaattaaaattaaataagtgatagaaactacctcaagatcctcaataactcaagcaccaaagatccccactaattcaagcttaaccaagaccaattttgtcaagaatcaataaagtgaagagatgagtaaagagagagagggagagagagagagagagaatcggttttgagttgtatagaaccagaaaaatatctcaaataatcagccaaaatcccttttgttgaaatagaattaaagggtcagaaagaccaaaatacccctagggc

SEQ ID NO: 250871 - DNA, 1093 bp, Cannabis indica
gtactgggcggccaaaccctgcccaatggatgtctggccaaaaaagcacaccaaccgggcataagcctagccagcctaggccaacccccttacctgggaatggctggccagggtctgtagggcataggtaatctttgccataaactcttcgaaggtatggccaatcatcccctatctcttcagaatctgcagccggaagacggtggtaaccaacccaaaggagacaaagagatccaggctcagatcttaataatactctgcgacaaaaaggaacaagggttagaaatctgagcggaaggagtcgtattattctgctgcagccaatgtaaggttttctaaactcttatgtgtttcatttcatcgtgttagagatattcatatttaagatgttaattcaacatacttgttagtaaatctagatcctggtaaaataatccttgttagtaaatcgagacatgtatttattgttcatcattctctggagagaatggtacgaattaaattcaattaattttaaagagtgttcgtattctatatattagtcatattattatacattgttattacttacaatatttatattagaaattattatatgtgacatatattaaagatcgaattttacatacatcttgaagattatgcaaaaactatcttcatatattgtaaaagaaattgctaaataattttttatatttttgttgatgaacaattaataaacttttaagaaatttataataatattctacttgttcaacgtcataccccgaagtgaatataataattttttcaaatatttttaaaagaaattagaaacaaccataagatgaaatatcacacacaatcaaagtgcataaaatctatatataatgtgtggaattgaataatagtagtcacgtacttgtagtacggacacacttataatcaaaataaaattatatttgattattgaataaaatgtaaattgcacacatattttagtatattaattatttacatttaaaatatttaaatattatttcctgaagagaatgattagacataaaattctatcaaggagtatagaatttacatatattagtaatgtcagaag

SEQ ID NO: 250872 - DNA, 957 bp, Cannabis indica
taatcttattactttcaattaacatctgaattcttatcttgaccttttcatatgcttttttttttaacaagaccttgtcatatgctttgttcacatattttatacaagattataggtttaatatataagttcttttaaatcctaaacatatagttatttacaattatagtgatttctttataatgggaagtaattgttattacatgcttcaaattatttagtcccacgatttattagtgcactggatttatttgacgtgataattgatgataaggtttacttataattagatgagtggaatgtcttttccaaggtattagtaaagtaaactatgatcgaatgtatctgttatacattagactggatcgatattgataatggaaaagatattataaacttacccttatatcttttctaagtcaatatcacttagttgatcatagatcatttgatatgaatcttgattttgttaaactttaacttagttgtactgcacgagctctttgacttgttcgttaccagcttaccgtagcactagcccatacttacatcttgggaactcgatagtgtaattgagtggaagtgttaatcatagatatgaacatctcctccttctatgtttattagaagtaaaatgatggttacttagagctttggcctaatgcgataaatgatagagcgctcattttgataattacattagttttctaaaatatcatatacaagtagctaagtattttaaggataaaatacattgaagggtaaaacataattttatccttactcaatgtaaaccatctatagaggatcaatgattgttaagattttaataatggataaattcatagtgtatctatacttggtgtatagagtgttctatgtaataaggagtgtgatttcaaatctatagtagagtcaggaggaattaataagttaggaaatttactcaataaattt

SEQ ID NO: 250873 - DNA, 1525 bp, Cannabis indica
atattgtaaaatagcataaaattaaattttttttatcttttcttcatctctttggttatacaccaaagataggatagaacaattgtatttgtatttgtattatcacatagtgataatttttattttttttcaattttacacatgcacgaaataccttagacccgtttggagaggctgagtcagtaaggactcttaaatacgcttctccaaattatccaggactgtttgtccgcatggatagtttgggcttgttttatacttatagtatgatctattgcttatttgattatttcattagtagatattttggtacaacgtcttcttacacgttcttgtaagtcggcaaacttaattactacaagtttgctaacttataagaactgtggggaggtgctgccgaaatttttacaaaaatgaaataatcttaagagcgtagattgtactatatgtatattacaaacctgaatgggataggttctttacccttttagtaatggagtgagaaggtggattaggacacttgcacattttcttgtttgtttttaaattgtttttgttaattacttcatagtggaagatgcctaccaaccgaagttggatgaaggcgcaccggcgctctgcagagtttcgaagtggcgttgacgagttcgttgcggtagcaacgaaccacgtgaacgctgacggattagctcgatgcccatgcatgcggtgtttgaatgtaaattttcacacacctgcaactataagggttcatttatttctcagcgggatccaaccttcgtacaacccctggtatttccacggggagactttttctcagcccgcagttgaacttcctgaaaacgacgaagaggaaatggcaaacatgttaaaaggggatcctgggtttgacgaatctgccagcactactgattctttcaatgaaccccctataaatgacaacaacaagtttgatgacttgtttaaggagatggagtctgagttgtatccaggttgtaaaaaatcggccctcaatgcgatggtaaagcttatgcactgcaaggttttgaataggtggagtaaccactctttcgatatgttgctgtctatcttgattgaactatttccggaggagacaaaattactgaagtcgcattatgagtcgaagatgcgattgcgcaatcttggtttgggttacgactcaatagatgtgtgctagtataattgttccattttctggaaggagaatgagaagaaagagttttgccctgtatgtggcgaatcacgatgggtaaaaaataaggtaaggggaaaaaagttcctcacaaagttatgtgttacttcccactcacaccgagactaaaacgattatattgctcaagacacaccgctaaggatatgcggtggcattactcacagagactaaaagaagacggtgtgcttaggcatcctgcggatgctaaagaatggaagcggtttgaccgccttcatccgtcttttgtcgttgaaccaagaaatgtcaggctgggattggcacgacggtttt

SEQ ID NO: 250874 - DNA, 1085 bp, Cannabis indica
aatcaatctcaagtatgtcgattaacaccctaaatatgaacttctaaaacgattacgaaatgaacacatataaagtactagaaaccttacattgggtgcagtggaataatatgactcgttccgttcagatctataacccttttatcctttctgtcgcagagtattatcaagatttgaacctggatctctttctctccttctttagtgctgaaactccttcttgttctatgtctttcttcacgatcttcctcactatgattgaggtatcacttgctgtgtgtggacactactctaacactaagttgtttcgaaatcctgaaaaaatcaaggtattaatagatatgccatcaaggaatggctgtacttaacagattcatttcgaagtcaactgatacgtgtgtattgttttttaatttattgcgagggaacaaaaagttcgagtggacaaaagagtgtaaagaggccttccagaacataaaaatgcatttagtaatgcctccaattttggcaaaaccaataattggaaggaggtcgtttctctatttagccatctcggaagatgcgattagtgcagctatagtgcgagaagagggcaagcatcagcaacccatttactatgtaagtaaaaggttactaggggcagaatctagataaccccctatagacaaacttgcgttgtgcctagtccatgcgtttcgtaagctttgaccatacttccatgcgcaccccataaaagtgttaaccgatcagcccgggagacaagttttaacgaaactagatgcttctagaagattgacaaaatggtcgattgaactggggatgttcgacctaacatatcatcctcgaacttccatcaaaggccaagctttggctgagttcttgacagaaggtataaatccagaagaaattccacctattcagcgagatgcggaaacttggaagttatacgtggatggtgcatccaacgaacagggtttgggtgcaggggtaatattaatatcgccagaaggctttaagtttcactatgctgtgaggttccaatttgacacatccaataacgacgctgagtatgaagcctgatcgct

SEQ ID NO: 250875 - DNA, 960 bp, Cannabis indica
aaaaacaaaaaacaaaaaaacaagagtacagataaaaatacatcaaaaatcttgaaaaacgtaaaaatatttaaaatctcgtacaatcgtatatttgttgtttttgtatatttttgaaatatatatttttttaatcgtcttacactttataatttatagatcgagtcaaaagactaatgggctataccaacaagaattgcctatcacttgtcatgtaactctacttttataagcagctcctccaacgattattttctaccaacaatacacttttttttttgacaagagaagctgctaaaaggaagaacaagatgagaagagcagcaatagaggagactaaacaacatcctcaagatcatcctctcgcagcctaattgcctcccttgctaagaaatgagcagttgtgttgaactgccgaggtaagtgcacaagagaagcatcagggaaattggagaaggaatgtctgatctgattaacaatgagtgaaagcgtcgagttatcctgccaattgccattaaccttagaaaccaaattgagacagtctgtaaaaattgtccttggttggtggtgcagagatatgcaccaggagagaccgtgaaaaagggcttgagcttcggcaaaaatgggcaagggagctctaggcttctgaaaattggtagaagcaataacttgatctggcccaactttgaggacacagccaatgcctgtgacaccacggtcatgatctaatgcagcattcacaaacaaagcaggggtgtcttgctgaatgaaatctgaataaagtggctgttgagatgttgaagtagtggagtcttgggaatgtatatgttgagcctcccgatagtcctgcagaaaagtacagacaaattcttccacattgttaggctcagagcagtttctgaataaaatagaattcgtggtggtccaaatatgccatagtatgccaatgaaaagaggaag

SEQ ID NO: 250876 - DNA, 1012 bp, Cannabis indica
atgatagataactctcctacatggatgactcctattatcaattatttactcgatgggcaacttccaaatgacaaaaacaaggcacaaaaactattctattcaatgcctcgctacagaatgattgaaggcaaactatatagaagagggtactcgatgcccctacttcggtgtgttctccctgcaaaagcaaatgaaatcatcaaagagattcatgaaggcttctgcggggatcatgcgagctggcaaagtttgtctataaagatcattaaacaaggatactactggccaacggtcaataaggacacacacgagttgtcagaggttttcacatatacctcccgtgccgccaacgaaactaagaatgatgaccttgccctacccattttctatatggggaattgacctaattggggcattacctactgggcgaggacaagctaagtatgcggtagtagcagtcaacttgctcactaaattgacggaggctgagcctcttgtttccataaccgccaagtaagtccttgactttgtcatgaagaacattatcagtagctttggaattcccatgaatatagtatccgataatggaacccaatttgatggcgacttgttcactaaattctgcgagagtaacaaaattatcaaaagtttctcgtcagtatcgaggcctcaggcaaatggacaagtggaagctagatgccgccaaaggcagatgggttgacaagctccctcaggtactctgggcccacaaaactacagagaagatagcgattggacacattcctttctcgctagcatttggctcggaagcaatgcagcctgttgaggtgaacatatcagctcatagaagagagttatataatcaagaagaaaactaggaacttttgaaattgtctttggatctacttgaggaaaaacaaactaagatgcaaatctccaacacagcataccaacaccgagttacaagatacttaacaaaaaaaatcaagaaaagactattcaatgttagaga

SEQ ID NO: 250877 - DNA, 1241 bp, Cannabis indica
atttgaatctgacaagattgtaatgaccaaaaataatatatttgtggggaaaggctattgtaatcagggtcttttgtattgaatgtttctgatgttattaatgagaatgcatattcttctgcttacttggttgattctattgatttatggcatgctagactaggacatgttagtgttaattatataaataaaatgcaatctcttggtctaatttttggagttaataattctagtctaaataaatgtgaaatttgtgttgaagctaaattaaataagaaatcttgtaaatccttaatattgttagaaaatatcaaacacaataataaaatgataacacctgaggcctgcaaacattttagtaagaaatcttgtaaatctgttcaaagagaatctgaattgttaagtttaattcacactgacttgggagatttaaaacaaactatgacaagaggtggtaaaaaatattatgtgacttttatagatgacttttctagatatgctaaggtatatttacttagaaataaagatgaagcatttaatatgtttttatcttataaagctgaagtagaaaatcaattaaataaaaagattaagagagttagatctgatcgtggaggtgaatatctttcaataaatgatttgtgtgaaaaagaaggcataattcatgaagtaactcctccgtattctcctgaatccaatggagttgcagaacggaaaaatagaaccttaaaagaaatgatgaatgcaatgcttattagttcttgtgcacctaataatctttggggtgaagctattttgtctgcttgtcatctacaaaatagaatcccctataagaaaacaggtaagtctccttatgagctatggaagggatacaagcctaacttaaaatatttaaaagtgtgggggtgtctagctaaaggtcttgttacctgatcctaagaaaagaaaattaggctctaaaacttctgattgcatgtttattgattatgctaatcatagtgttgcttatagatttcttgttgtgaaaagtgatgtacttgattgtaatactattcttgaaacaaagaatgctgaatttttttgaatatatttttcctttgaaaactgattcaatttctcatgtgcctgctaaaaataattttaaaaattaatcttttgaagagcttgggaaaagtaaaaggcaaaggaaagaaacttcttttggaaatgatttttatacataatcttattgaaagtgatcc

SEQ ID NO: 250878 - DNA, 1002 bp, Cannabis indica
caattaattattgagaggttaaaggtttgtggagacccgaagatgttagcgctgaatactcttgatatttgggttcaacttcatgatgtggaacccggttgtatgtcagaatcaacaatctgaaaagtggggaacacaatggagaaatatttggagtccgatcctaagaatttattgtaagaattttattggcgtatggcgggattatcttcggatgcaaattactctgaacattacaaagccactcaaaaggcgtatgaagatcaccaaagaagatgggaattgttttggattaatttcaaatatgagagaactcctaccttttgttttatttgtggcattattagtcactccgacaagttttgcccacgtctttttcatcaaccaattgataggattgagaagccttatggcgagttcatgaaagcactacctcagcggaatcataaaaatattggctcaagatggctccgaaccaagggctggtgtcctccggcggcggcgacgactgaaactccgggtcctaggacgaatgaatctgcctccattaatggtggagattttccagtggctacagccgagaataatggtggtatggccgagaaagagggaggtaatcgtgggattaatttggctagaatgaagggagtgattgtgggtgatggagatagttatttggagggtcaaaggaataataatgctattgatttgggaaaagataccactattccacaaaatgatggactggttatttatgataataaaaaaagaaaaatgacaatagacaaccatgaagagaatcctgatgtggaaaaggatatgagtaacctttcaaaaaactcatctttggcgggccttggtattggggctcgccagtcattatgaaaatcttatgttggaactgtcgtgggcttgggccgtcacaaaatgttcagttccttaaggagttagttactaataagcagcccaatattgtgtttttatgtgaaactttgtgtaaaa

SEQ ID NO: 250879 - DNA, 589 bp, Cannabis indica
attaattgctaatttctaaattaaacgaagcggtctttacaaatgaattcgagtttttatttccgtaaggtttagggctcttgttagggtattagagaggtcgtccatgggatgagaataggggaagaaattgatagatgaaacatggaagagaatcgaagaagagacaaagagaaaacacagtgtgatagggaatggtcgaagcaagaagaggacataagtggatgaaacctgaatggagaaagagacatataagttggttaaataagaaggaataagctcgagtaacattgaagaagaagctcctcatgtcagattaagcaatcatatacactaaatagtctacggtatatcctattttagtttcaataaaaccttgagaggggagagggtaggctacatcagtaggttcgatgatgacccaaggaggtgcaggggataagaagaaataattgctaaaattggaatgatttgaattagagaaaagggggagaaagatttggaaggatgattaattatatatagaaagcatttgtagaaattaaactctgaatagacatattgccggaagttaatggtgatttgaggc

SEQ ID NO: 250880 - DNA, 593 bp, Cannabis indica
catgtcaattttaactattgtatcgtatcgtgcctaaacttatattttttttatgccagatcatacccatactaatttcttatcatgtaaaaagttcaatccatatttacatcaatatatagaatattattttgatatttttatttttattttataaaaagaagttttaaaatttattctctgaaaaaaaaaaatgctaatttgaatttttgcctccctaaatttgacatgtaccaaattatgtcctttgaatttttctagccgttaaaaatttctcctgaactattgagattgttagatttaaggaattttgtctaatttcattcaattttactatttcagtaattgtttatgtactaaaccatgctcctcagactttgatatctaccaaatcatgtccctcaaactttgatatgtactaaatcatgccccctaaactttcattcatgttagacttttttttactaaaattagataaaagttcttaaatcgaacaatctcaatatctcaaggggtatttttaacgactttaaaagttcaggagcataattttatacacatcaaagttcgggaggtaaaaatcctaattagcc

SEQ ID NO: 250881 - DNA, 578 bp, Cannabis indica
tttcaaaatcaagtaaaaaaaatagtataattttaaaaggtaatatttttttttgggcccctaggataggtgggccctaggcacaggcctagcccgcctatgcccagggccgggcctggtcaacagtaagtaggaccaagaggatttgataacgactttgaatgtaatgacgacaacaagtaagatacggtgataaacaatagttttgaaatgatatgataagttttctataaatcatcaatatatcaatatatatatacatatatataaaggagaagtatgagacgctgacatggtgctttaaaatctcttcaaatgattttatgtattttctccttaattttttcattttttattagtttataaatatttatattgattaattaattaaaaaatattcataaaaatctatatattcacatatgtggtttatgtttttttcttaattattaatatgtatgaccgtatatacatattatttagagtatttatcaatctatataatacacatgatattatcaattaccctaaacctacaaatatacatctctctcaccttttttccactctctctctct

SEQ ID NO: 250882 - DNA, 585 bp, Cannabis indica
tttttttcttttttctctttcttcttattcttcttcgtcttcttcctctagctagccacacctaacccctcccaccgcgtcttattttcttccagccacattcagacccccaccccatctattgcaccagagcaccaccattgttttgtaccaaaaataaaaatcaaacatatataaagtaatatatatacacatatgagaacaaaaaagggagggaactagtcagatctaaagagagaaatacctaaaaatagagctccttcgcaatcatctattgtccagatctccagccctcgacgaacacgaacagtcaagaaacaccatcgccggaggagggtaaggcgtcgacgagtgaaagaaaaggagcagggaaagagagaatggaccattgcgcgactatgaaggcgtttcgagtcgagatccgaagctccttcccagtcgcccactgcccatagctccagcccgcccgtcgtcgtccccgattttgttcatcttagtgtgttctgttcgacccaacagtgacgagaaaaagatgaaaaaatctgaaaaaataaattagggctttgatgctaagagagagagaga

SEQ ID NO: 250883 - DNA, 620 bp, Cannabis indica
caacagggaagaatttcaggataacaagattggttgcgccgaggggacaactcggggaagaagagcagagtagagacaacaacaatggcgtcgccggagatgggaatacggcgagaggttgcggaaggacaggctcgatcaagggaaagcattcctttcctgctctgataccataatgcgaaaagagaaaaggcagaatgaaattgtattattgaaatgaatggaaaagaacaatttacaaggctatatatacaaggaaaaagcaggggtgacacatcaatccaacttaacatatacaaagcaccagaacaagaaccaaccgactcaactaaaataactaacctatctgacacacctaaactgaaatagctgaatgagcataaatcggagaagcagttaggatagtagaaacagttgacttagtgattctaataataggtttacaatgatgaaagaaatacaaaatctatttattacaaattatttataaaatttattaacaattaaattttgattaaaattaaaccattaaatctatcaacaatttaatcgtaacaatttacatcatataaataatagatttgttattattctcaaaatatttttaaagtaaataaatc

SEQ ID NO: 250884 - DNA, 2011 bp, Cannabis indica
aaaaaaattctcaaacccattaacccccgaattcgaaactcgaaactcgtaacggcaacatgtgaacaggttcaaattcattttttattcacccgaaactcgatcaacccacccaatgttcaccccaattagaagcaccctatatttactaggctaattaggaaattttccccctaaactttgatatgtactaaattatgtctcttgaacttttaaggtcgttaaaaatttcccttgaactattgagattgttagatttaaagacttttgtctatttttagtaaaaaattcttacatggatgaaagttcacgaggcatgatttagtaaatattaaagtttgaagggcatgatttggtaaatatcaaaatttggagagcatgatttagtacatcaacaatcactgaaacagtaaaattgaatgaaattaaacaaccattaaatctaataatctcaatagtttaggagaatttttaatggcaaaaaaaatttaaagagcatgatttaatacatattataatttaaggaaaaaaatcttaattagcttatttactatagtcctatctaccaaattacctactattcaaataaaactattctaagtggtaattacagtcttctccttcacccttcaaaactcaaaactcaaaactcttctctctgcctttgaaggaaggaaaatcggcttatcggccgattgatttttgaaaacacttttaagaattcaaaaacacacattttccaaaagcaaattcgaatcccaatccgatttccacggcgcacttctccactgctccggtggtaaatatcaattttaaaggacttgctctgtgcttttgtatacaatattactatttcggtttcaatttcacaaactgctattgttttctcaatttttcaaatgcttactattgtgtttgcaatttttctttttcgtattccaacaaagtgtcttactttcgccggaaaaattaggggaattagctctttttagggttttcaattagcatttcctgagatcagtatcagttttgtctgtaatataataatttttattattgttttaaattagggtttatgaattggagggaaatatggggttgtcatctactgctactactactgctgaaggggtacagttttgcatttttgatttgaggagaggacagcaagaagggcaggagctggacaagatattgttcttttatccacctgatttgcccttttctacccagctttctgtgattggtcttagtgaaggactcatcacctttaccaggttagcagtcatgggatgtctttaatattatgtgggaaatatgtcaattgaatgaaacttacatcatatttgtatatatgaatgtgtatatatgtttatatatttccatgttaatgttttgactgacactttgattggtggtttaactattatgcagaatcttctctccagaggctgcatgtgaagacatagaagcagagaggcactcccatgtgttttttgaggctgagcctgacatttggatggttatggtgtgttatatctttcccactagtgatttccatacataaatcaaagttattcaacctaaatagttgttaagtatttgtcgaaactgatactgttcaactattatctcactactggaatttcctatttatgaaattagacttattcattgtttgactaatttgatttgtatacttaaggagcatgataattgagtcattactgtgttctgaattgattgcttgatattgtctattaaaactttaaataagattttgtatgaattgctaagtaagctggttagcaatgagttctttacaagaaatcctaattagtcaatatacattgtggtaggtggtggagaaaagcaaagagtctgaagctatttggcggactgatgcattaagaaaagttcttatggaagtccattctctttttgtgatgtttcacggatctataagaacattgcttgataaggggcctggtggagaagtagctcgatctct

SEQ ID NO: 250885 - DNA, 761 bp, Cannabis indica
tcctggtaaaataattcaaacaagagggacttcaaaatagaagaattgggtgttgagagaatgcctttccctgattgagacttgagataaatttcattcgctaacaattcacggacgattgaattaattgaaggaagtggagagcgatgcaatatagaaccacgaagtccctcaaaattactaccaagagccattaaaaattaatccaatcgttgttcctctctacgagaaatatacggtgtaaaaacacgtagctcttttgatttagtgagtgccaattgattccaaagatccgtcattgtagaatagaactcttgaatgctcatatatttatgatcaatagctctaatatcagtttctaattgaaattgctttgcaaaattagactgtgtatacagtcttgcaagatggtcccatactttttttttgttgtatcctactttgctagttgggtaccaatggattgttccacagagttatttatccaggtgaggattttcgaattatctacttcccaattttctaacagatctacattaccatctatatgtttcttatttgttctagaagtataatcccacatcttttttccttttagaatatttttttataacataaccaatacgaataattctttccatccgatctgacactgatcgcttaaagagaatcatctttattggtagccattgcaaaaaaagaacaaattgccaaaatttccaaatacaaaactgatgaaaattcaaaattgtactgcaaaa

SEQ ID NO: 250886 - DNA, 1428 bp, Cannabis indica
gccagaaaaatcgttataaaagtcaccatcgagggaaaaatcactataagtaaatatctcagatcatataactaaaaatataaccgattatatgaataaaaattaataacttaaatcatatataattaaactattaccggttctgtaacataataaataaaaataaataacataaaataactcaaatcagttataattaaaatagaaccagttctataacagtgttataatgaataaaaactaataatacgaaataacttaaaaccggttataactaaaatagaaccggccggttatataacataatgaatacaaacaagtaacacccaataattcaaaccgattacaattaaacaataaaggaaaaatcctttcctaaaacactgaaacataaaaacaaaactagttctacaataaaaaatctcataacacataatatctcgtaaaatcgattataattttttttttttaaaaaatagagatcgattttaaaaaatattgaggcataaatatgaaaagaactatttctataacaaaataaataaatacaaataataacacactataactcaaatataatataaagagacgagttatatttatcaactagttaaaaatttaagacaaaaaaatggttccgtaaagcaactaagataaaaaatcacacataaaaacagttaactaaaataactcaaacaaaaatattcattcaacatgctccaacccaccaaataattacatccataccatatatatctacctcaaaaatactcatttattatgtcatataaccggttctattttagttataaccggtttgagttatttcgtgttatttgtttttattcattataacattgttatagaaccagttctaatttaattataattagtttgagttattttgttttatttgtttttattcattatgttacagaaccggttatattttaattataactgatttgagttactttgtgttatttatttttatttattatattatagaaccggttctattttagtttatatttgagacatctacttcttgtgacttttctagtgatttttttcggcgatggtgacttttccagcaacactaactttccggtgacttttccgacactggtggcttttccagtggctaacccgacgccagtgacttttccgacgacttttttggtgccagtgacttttcgataaaacttattattgtttacaaatatgggatttccatattttttttacaaaaatatgcataaaaaagcttatataaatgtaaaaaaaataaaaaatcacataattccttagcattatttatgccataaaaaagtaaactcttataattttcccatatagtgtaatttctactttccaaatagaccttattttcaatctcagtacacacattctcaatgcgcccaatac

SEQ ID NO: 250887 - DNA, 1121 bp, Cannabis indica
aaagagttttatttagggcataaaacccaacaatatgaacccttatttacaagggaatataaagtgcaactttggcatttgggtttgagccccaaggggtacccagttttgtgcgaataggtgaaaactcacacacttgatccaccacgcgcgccgtccgtccgtccgatcagggccaagttgggttggtgtgacactctattatttttacagaaaaattatttaataaaataattattttttatttttaatttaattgagaaacgtgtttaattggaactgattacttagtcgtatatgttaatgagacacgttcaaccaactacaccccacgattcaaaaaacgttcttcttcccattataatttttcaatccattcgtctatataatgcgattgaactgatgggaagaatacatatttttcatatgaaaaaattacagttttcacaaaaattatataccatctgcgatataaaaaatctttgggtgtattcgacggtgctttacggtacagttgggttccgatacaatacgactgggctgttttatcctggggacgaccagcaaatttcgactacttgcatactcctaagcagtgtcacgaacgtcttaaaaagagcaacttagtccgcgactcaacccaaattttttatttgataatatcattcctcttttatttttgttaggagtttactcaacattatatcatatcataccttagtataagaaattaattatttgagattttaattttaaaaatataaaattcaggaagctttttctagtaaggttactattgtaattatcgtcaagaggaaattagattctatattctttttatattgtacttttttatttttaccctcttttttaaagtctattacttttgcctctttttttaaatattataccaattttacgcctttcacttcaagatactctccatgtaactctcttatgtcaggatatttttggtacaatacatataaaaagaggtatgtttcaattaaaaaaaatagaagtaaatttgattaattgattaataaaagaggcatttttcaacttactacaatgcaagcattctaggccaggcccactatgagatcggcccacgaagcagt

SEQ ID NO: 250888 - DNA, 1498 bp, Cannabis indica
ccataaagagcttatgaagtttgcaaactaaatctgtttggccaggaatctcaaacccgagtggttgaattatgtacacttcttcttgcaattctccattgataaaagcgttattcacatctaattgcttaatagtccatccattggacaaggaaagggttaaaaccacccgaattgtgactggtttcaccacggggctaaaagtctctgtaaaatcaaatccgggttgctgatgaaaacccttggcaactaacctggcctttagtttgttgacagtgccatcaggattttccttgatccgatatacccatttacaaccaattgctgtcctaccaggaggcaacttaaccaaggtatatgttttattccttattaaggctaagacttcattagccattgcattattccattgaatttgttgcaatgcttcttgaagagtggagggaacctttgtgaccaggtaagctttgggcttacggattccacacttggatctagttttcatgctatgtgtgttctgttgagtaggggcaggaggacacccagcaacatttgttgaagatacaggaggcaactcagatgtaccagctggagatagattaggatgaagaggttgctggtcagtttccacatgatgaccagcttcaagtcgttgagttgctggtacaaaaacctcacaagcagctggaacatcagaagcttcattatgttgtcgagataattctcctgcatcagacacaacttgttggctgggtagccaactgttaggaatagaaacagatgcattattgggaatagcaacaggttgtggagaattgtcaattaaaacaggtagatcaatccttgtatttgcagaaagtaaatctgccatggtgtaatgagttttgggatgagaacagacaggtatgatagcagacactactgaatttgtgtgtgatccagacatgggactgctatttttgacagcagactctacataaggaaaaacaaactcctcaaaaataacatctctagagatgtacagtcttccatttttatcaaggcatttatagcctttatggtttagactataaccaaggaaagtgcatggagaggatctaaactcaagtttatgtctgttgtatggccttatattaggaaagcatttacaaccaaatgttttaaaggatttgtaatcgggttggatgttgaacaatgtttcaagtggagatttgtttcctaatacaggtgtgggcaacctattatggatatacacagtggttctaaaagcttcatcccaaaacttgagaggtaaggatgcttgagcaagcaaagcaagacaattttcaacaatgtgtctatgcttgcgttcagcaagaccattttgttgatgtgtagtaggacaaggatgcctatggtgtatgccattatcagcaagataattggaaaaagatctaaattcaccccccaatcagtttgcaaaactttaaggggttttccaatttgaagttctagcttc

SEQ ID NO: 250889 - DNA, 563 bp, Cannabis indica
tacaacaataaattaaagagaataaattaataacgcaacctaaaaaataataatacactctacaacaacaacattacaacagagcaactaactacaaacaaacaaaaacaaagagaatgctaaaagttttagtgtgcttggattattacattgttagcccttacatgtgtttgaacaaagagttttaacaaaatatttatcatcatcttctccaaagcatccttaaactgaaatgttcatcaataaaatattaattttctccaaaacatctcaaagaattgaccaaatcatatttgcattgaaaaaaaaaatagttctatatgagatcccttgctcacgaagagtttagcccactttcccccatcgtcatcctcttccttcagcggcttgctagaaggtctaaatctcaaatctagttccatcatctctaacctacattctcaaatttagtcatcttcgagcctgccgtctccatctcttatgacaaccacccttgaaaaaagaggaggaagatgaagaggacccaaagatgagagaggggatgctttcaaatcatttttttt

SEQ ID NO: 250890 - DNA, 530 bp, Cannabis indica
tgcactgcttgttgtttaggaaagcatcataagcttccctttcctttatctaacactgtttacactgctcctctgcaatctttgcattctgatctatggggttctgcccttgttacatcatcaaatgggtatgggtattacattagcttcattgatgcttacactaggcacacctggctttacttactaagagcaaaaaatgaagtccctttgtccacctttatttagcttcaaaacttcaggttgaacttcaactaaatacaaaaataaaaatgattcaatctgattggggagggaatgccaagctctcacaggttatcttgctgaaaatggtaggatgccctacccctcaacttggcttcatttcacctttagaaagctgttcagtataagcctgactattcttcacttaaagtgtttggttgcctttgttttcctaatctcagaccctataacaaaaataaattacaatataggtcacagccgtgtacctttatagggtatagtcttgcacataaaggctacaagtg

SEQ ID NO: 250891 - DNA, 814 bp, Cannabis indica
tcatcttcttcatcatctgaaatttctttttcagcaacattaaaagcaatacctttacctttatcagcaacggacctgggttttcccttctacttgatttgttgattcaattcaaaagtacgcaaagaacccattaattcttccaccttcattgtgctaaaatctttagcttcctccattgccaaaagtttagtatcgaacctctctggaagaactctaacaatttttctcacaagaacagaatcatcaagcttttcaccaagagcaaaatattcattagcaatatcagataatttttcatagaattcagttagggtttcattatctgacatcctaagatcatcaaatttggtctgaagcataatatatctagaacgcttaacatcagatgttccttcaaactgagtttgaaggatctgccaagcatccttagcagattcacaagaagatataagcttaatataaccttcacctactccattaaatatggcatgtaaagctttgctattataagcagacaaattatcatcttcagtagaccattcaagttcagattttaatttagaattaccttcagaatctaccacaacaggaggagaccatcctgaaagaaccatcctccatgctttctcattttgagacttgataaaggctctcattctaaccttccaataaggatagttggaatcattgaggagtggtgggcgaacaatagaagttccttctgcaaagggaaacatattgcaaaaacacaagaaaacgttaaaaggaccacactaagagtttagtgtcccgctctgataccaattgaaaa

SEQ ID NO: 250892 - DNA, 628 bp, Cannabis indica
tttttggtctcttgaagcgttctgagcctaactcactccaaaccaagttgttcttgctttttgtacatgacaccgtaagtaaatttatgtttccattactccactcagtgccaattagtttaaataatattaaaaatttacatttaacattttataatactaaaaataattaattacaaatatataaattttaaatttttttattactaattaacaattaattttgagatggaacgtaaatattgttgcaggtaatgatggtgttggtggtggcgggatgtgcggcggcgaccgccatagggtacgtggggcggcacggggaagtacacatgacgtggcaagctgtatgtgagcaagtgcccaaattttgcaatagaatgatggtggctgtgatgctctcttacttggcttttcttgcctatttcaccttaactcttctctctgcccatcgtctcatgactcgtccaactcattggacaatatggacccaactcagacctactcagtctcagaatccttcggctgaatgactgattcaactatgttattttatgtttttgtggcctatgagataaatatcataatataaaaatatttctcttgtgtaaaaatgtttcagttttattaa

SEQ ID NO: 250893 - DNA, 1065 bp, Cannabis indica
tgttagtttttcattaaccattaatcatgctttcttatgttgttgttgcattgatcataattttttaacgggaagaatgtaggaaccatatctttatgtgtggcaaattatgtgtgtgtctcatggttgtttatgtagtcatactcggtgtatgttattttttattgttgtaatttctgttgcttatcttcttacattgtgttaattaattcattcatcataattttttaagctagggggagattgtaagaaccatattttttgtgtgaaaaatttatgagttttgtgttatgtggacactcggtagttccaatgcatgatattgcttcattttttatttttgacaggttggacaactatcatgtgttggcatgtgagatttcaaagtcgatatagtgagagttagggttatatatacttgattcctaaagatcctaactaacgctcagtcatttgattctttggtaaaaaaatttctctgctaggacagaatttttttcttcttcttctttatttcttctaggttcctccattgttgaaaagtttaagcttttgtgatgaagtgataatggagaccgtttcatcggaagggagttaagattcataactgaagggatttcagctcaatcaaagcaaagggagctggtcttcgaatctaagggagaatcttggttggttaatcaagatcttaaggtaaattattgtaagaatctttgttgtatcgttttacatccatttgatttacaaactgaaatttgtatcttaacattaatttttattggaggttatttaccatactaaggcagttagactcaaaatgaacatgttggatttattaattttttttagtgtactaatttggctaaataaatagcatttgaatctcgagaaacactttactatgtttatcctttggagatataatatggtcttcgttattaagcatggtcatatcaaacttaacttatttataattataaaacaaactgttaagatttatttacatatactttgatttattttcttagattaaaagtggtgatatacattagtcactattaaaga

SEQ ID NO: 250894 - DNA, 518 bp, Cannabis indica
taaaataatttccaacaaagatactcctagaagctggttgtagtaactccatttagcatcaacgaaggttgaatcctgttatcaaggaagtagtgcgaaaagaagtgataaagtggctggattatggtattgtctacccgatttcagattgttcatgggttagtcctgttcaatgtgtgccaaagaaatggtggctaacaagaacaatgaattgattcttactagaaccatgactggttggagggtgtgtatgtactacttgaagctgaaaatgcaactaggaaggatcattttctgctgccatttattggccaaatgttggatcatttggtgggtaaagagttctattgttttcttgatggttattcaagctacaaaaaaatttctatagcaccaaaggaccaagagaagacaaccttcacttgtccatatggcacctttgcctctaggaggatgccatttgggctatgcaacactcccgccactttatcacttgcttatggtatagagttattttt

SEQ ID NO: 250895 - DNA, 448 bp, Cannabis indica
agaagatgaacccaatttcatatcatatatataaaatgactattaccggcggaccattccctattaccgcccctaataatctttcaactccgcccctaatgctcaacaatctcacatccctaaatttcaacttttcactttcccgccaacttttccaccaaacctcacctgtgattcccccatttccatccattaccttctgctcaaacccaaaacccatgctctactgattatttcagtccctaatagaagggattgggcagcgttttgtggaatagctggaacaattcaagttgttgttgttgacatgtaattatgtttgaggagatgaatcaaaagtcagttactgtacaactgcattgaactgggcttgattttgattgagattattaagaaaatgtagtaggtttttctctccaaaagaaatggattaccaccttttctttaa

SEQ ID NO: 250896 - DNA, 893 bp, Cannabis indica
aaatagtttacaatactaaatagttggtaattacatacagcattaatatttaaaataattttttttttatcaattaaacagtataaccacatctaaatctcataagttatgagaattgaatagtgtaattaagacttttcaattacctctaatgatataattacctttaaattacatagttagacaaataagttgttctagttttatgtggttcacatttaaatttgttttagtccaccattgcattgaggagtggaagaacttacaatgatgaagttctaggggtgcttgaaaagtcacggtgtaattagatttgtgtgtaattagattacataatttgctatgtttgactgattatgtaattacactataactatgtaatttaaagtaattgaggggttccaattacagtgtgtaattactaaaaaatttctattttaaattttaaatattaattactaaaaaaatattattttcctgtgtaataactaactattttgccaaataagatattatgaattcatatataattatcacttcatatccaaacacatcccgtattttaaaatatagtgtaattgctaaatcgtgtaatcactatcctagtaattaaactacctaataattacatatttacttttataaactctttactaaaattcatgatcatttaagagcatttcatcaacactatttccaacctccaaggttgtcgagtgtctttttgagatttttagagataataataatatgagaaatgataaaagacattgatggtgccgcgtaccacctaaggtcatatcagtaataatacaattaaatattaagtctcacataatttaatataatagtttttataaagtaaaagaaacaactaaaatacagttaacaga

SEQ ID NO: 250897 - DNA, 1264 bp, Cannabis indica
aaacccacatttaaaaaaaaaaaaattaagtttttggtcaaaactttctgacgagaaggggatcaaaccatcataactttttcatttaaacctgtctgatgagaaaggaaaatcaaaagttatatatgagatataactcataaacttgcgtacaaagctgaatattaatggttcgcacaagataggagagtattaaaggagacatcaaggtgtcgtgataaaagtacttaaacctaacgtatgaatagatgatcaaactcatcataaaagtaatcaaaaatgtacaaagtgatgagatcattaagagtatattcaagtttgcttaagatagattataactgttattgcgaggcagaattaataactgctcgtagatcaaaagtctggtagataataaactgcccgcacacatagtagattactaactacttaaataggaaaattacatgcaatggaaagaccaaaagtactctgcatttgatcaaaatatataattgtttacattgtgaataaaaacgcaagcaaacacaattatattacgtttgaatgtaaaaagtacaaggcatttaagataagaagaaagctaagttggtttacaaacttgtctttacaaaagtgccacaatgggcaaaccatttggccattttcctaaaagattacaaggttctgtatagggaacaggagggctcaagaaagactggctccaagcaagaggactcgacctgatgcactgatttagtaagatgtccctctatgatcctcgctgcatagatctcattctttgcagtagggacctttattcctcacatcagaagatcccattttctcgcatcagaggatcccatttcctgcagctgagacctcattcccagcctcagaaaacttatcaaggcttgcgattggttggctcaaagattttctcgtgtaagcttctgtcttgagccatttgggttctttggtagaacttgagacttcatcaactttggttaccttcttcttggatttcttatcggcttggggaggacctttgaacacgctctcaaaatctacgtccattcctgtagagacaaagataaaagatcaatgaagcaacagtggtaaaaaaaacaaattcagatcagaccaccatttacaaagaatgatgcttactttcagaaatcccttgtaagaatcgcctataacgatcgacattatctccttgatttggattaatcggatgatcttcagtcttggaatctttcgtttccaatttaaactgaggttt

SEQ ID NO: 250898 - DNA, 516 bp, Cannabis indica
aatggtgaatcggcggaccttagagagtgcagaagacaactgccgggcaagaagagaattgtttccgatgaggaccacccggaggcatctcaagacccgctggctattacccaactaccattggttaacttgccgggtataggcaaaattgccccttttggcaacaacacaaaagaggtttccatccaagagctgcaggaactaaggacagtggctgctggaactgatggggaatcctccaatggcaaaccggctgttgtgaggatgactgaaaagcctgaggcaagccgcaacagtccaaaatccacctgggttaggaaaaggacccctcaagctcctccccataaacttccacatttgggtaaacatgctatagccgttgcacacgatgaagtactgaatgcctctgttgaacaaaaggaatctgagaacctaaagcaaccttctgaggctcttactcttcgtgtatcacctggacatgaggcccatagtagcagcccagtattgaagcccata

SEQ ID NO: 250899 - DNA, 763 bp, Cannabis indica
atcggaagctgcagagtctgaatcgctggagtgtgggccaaccatagcctttgtaggatagccagccacctagctagtcaaagccctagccagccacctcctcaataggtggactggccatctcctcatcaaactgccccgaagatgatccttctagctagacggtggcctggtatgtttctaacctgctctcaaacaatgctttcccctgggccaatatatgtgctctctaggaaagaagcatccctcatgtaagaaagatcagctctggggttgcgcaacttgaactcgtagatgagttccaaagataattaagccaacatattcatctcttatggcatgctggccatcgagggttgcgtcagctctccccacacctcctgagattagtctccaacctggagttgtcagtagcaagcaaggtgttctcctgattcctagtgtcgagcatgacctctaaaccagaaatcatgttctggttctgctggccaagagcctccatatcaaccaaagccttgcccctcgccaagagatcaacctctaaggtctctacctactcctaaagagcactcaaggaccccctagagttgccatgcaaaaagctcagcttcataaaggcttgaaaataccataaggtttgaaaattaatatgaaaaaagttttaagtttcatcaatacaataattaacgggttttgggttggacatttacatattagacctaaataaatataaaaagaagataattacataaaacaccatttt

SEQ ID NO: 250900 - DNA, 1873 bp, Cannabis indica
attggcgatggttttaaaccgtggcctagtcttgagtatagccagcagttttaaattgtcgaaaattcttttataccgatatttttctaccaatgcctattctacccaatatacgcgacacttgtataggtatcagttttatagaccgttaggaattttttatctgacgatgtaaaactattgggaattccgggtttttttaatagtgtcgcccctaatacttcaaaaaaaatacatagtacttgaggcaagatctaggttttccgccgctaatactatcctctattagcagtggattttgctctctcctaaatttgtcgctattgacaaatattgttgtagtgtattgaaacttttgattatgaactgtaattaatctttaagatagtacatagaactacatgagaagttcaactaatttagaaataaaattcttggtcaaattttgattttttttttcaaaatgaattttattactcaagaaaagaactataagagtggaggcaaatctagattacagcatatgcacaataagggtatgctatttttttttttttttttgtagttttgcttattgtttgtgttgaattaatattagtgtgagaatatgtctcatgtctcatgtctcattgtcccttcaatatctcttttactcctattattataaatcaaaatatcttgcaatcttaaaatatctagatcttcacattttgcgttaatttgtaatatcttcaagtctttgatagggaagaatcactaagatttgaagattttgtataattttgcgaatacgtacggaataactttccaaaaagtatttttttaaaagaaaacattgaaattggtatatgatttttttttttgtactggaaaattggtatatgattaatttatgcttaaatgataattttgatgttcaagcataatgaaatttgatatttttgtattattttaattaataagaatcgtgaaaataaaaatgattgtttgataataagattttttttagatgtttcttaattcgtgttaaaattaaaaactatgacatataataagtggtgcacattaaatttagttgagccacaataaatatatatatttattgacagtctcattaaatataaatgagaggcattaaattacaatatgtgctttaattataatattttgaaaaactacaagagatcggctacaaataaacaccaaaactctctatgtgtccttatgtagagtgtgtacacataccattacagtaaagaagtgtactctaccaaattggtacaatattataaatattagataaatataacatttgtttagtgtttagaagcatggttagttagtatttcatatactagctagagtcaaacttatatagttcaaggtaggttcaaactcaacaaactctctatgaatgatcattggtgagatcttttagtaaaaataaattgattactgaaaaagaaaactttcaataacttaaaaatgggaataaaatttatttctacgaccgtgataattatcaaatcacttgcactagaaagaatcccagtccacaatgtgtttaacattaggaataacttcttcagtttctataagtgtatctatataatattccaacagtttcatccaaatctagtattatgacagcttgagagatcagtttttctgactggaatattgccccaagggttgccattttcagcatttcaattcaaaccaatgaaaaaaagaagaaagattattctattcactggacagtaaatctgatctgatttggacagttattctaaaatgcaaaacccactatagggtttttcatatcaggaaaatgaaataaataaagcacacacacgtataaatatatatatat

SEQ ID NO: 250901 - DNA, 746 bp, Cannabis indica
ctaacaatcaaagccgaaacactcaaaatctatagtgattaacagctagttgtcaactaaattctcaaagagtaccaagatcgagggtcaaacatgattgcatacttaagcaaagctaaagatctattagcccaactcaagcactattccatccaacaagtgtcatgtgaatagaatacaaatgcggactccctatctaaactagctagtacaacagattttacactcttagtgtatttcccgttgaatacgttgccaaacgtaggattaatgaagactcaaagcctatcctgataattgaaaacactccatcagggatgaacccaattacacagtacttagaacaaggtattcttccaactgaccagaactaagctaagagattgatgaggaaagcagctcgctttgttatcccaattatgacgaggcatgtggacacgtgaaatatagagtgtcaataggtgagcaaaatcaccaggcataagagatcaattgattagggatcaagagacagggcagatcaagttacaagaaaatggtttgttaggaaggtttgaccagaccacatcctagtcggccaaggatgattatatgctggcgagacccggatcgaaggtaggccgaccaacacatataaaagatcatcaaaagaagcctaattgaatggtggggcccacaactatcttcgtgggtgggtcacaactgagtttcagctacgagacggttataacaacacacaaatgtaa

SEQ ID NO: 250902 - DNA, 867 bp, Cannabis indica
tactttcttaatggagtttatttttatattttagtaatttgtttctttctttgtttgttttttcaaatatttttattggtaaaaatttattatatgtaacgtctctttaaatttttattagatcttttcttaaaaattaaatgacttttacacattaatacgtttttaatgtttcataaattaactactgatcctacatattatttcgagtattttcagcgtgttttgtctttactttcactcgtatgcttcttggaaaaactattcagaaggtcacacatcttaaaattatctcaagtcaaatacgcttaacttgaattgactatcagaaaataagatccaccttattgatacaaataataccaatcaatctagttaaaaataatctcatacttacacaattttaaaataaatatttattgatttgttttttaacaatctttatttcagtgaaaatatataattttagattaatttgcaaaaaaagatgtaataaaataatattaaacagtttttcaaaaaatatagtatatagttcttcaaaatatattaccaaaatattatttaagttactggttaattagttgtttcggcatttaaatttttttttaagttaaacttttttataattggatatattgtacctattttcaaacagttctttaccatgcttataagaaaaaattatcgtacgtataacaaaatattataactttatttttagtactgtaaattattcatttttttaaaaaaaaaaattacaagtaattctatatagctacaaaatatatgatcatgaaaaaaataaaaaaatagattaaaaaactcttataaacgtcgaaacagataaaaaatttatcgaaacaa

SEQ ID NO: 250903 - DNA, 785 bp, Cannabis indica
aaagttgtaaatcaaaagattgtaacctgttgatgattaatggattcaagctttgagggcttgacggagacgtagccggtaattttgggcgaactccgagatcaaatttggtgtctccatctttaccatttctatttgtatttctcatctcaaatctctgttttgtttatatttatatttttgtatgtgttgtgttcttgctaatttttggatttggtatattgagttttggccgagagaaaggagagttttctaggttggtagtttcgggtagaacaagtgagaagagcaagaaaaattaagaaccctaacccgtggctgtgaagaaaagagaaataagaaaaacctagaaaaccctagtacatcattttcgctgctgccattaaaatagaaaaggaagaagcttgaaaagattagaaccataagaaccctaactctaggtgtgcggctgtagcaagaagaagagaagaacataaccccataaccctagctaccattagagtgagaagaagaagaagaaagcttgaagaaaccctaaccctaggtgcggctgtagagaaaataagaagagaaaagaaagctttagaaccctagagaagaagaagagaaagaaatattagaaaccctaagcctagatatttttgtgctgccgtgagttgagagagaagaaacatttgaaaaaggtttgatttttggtgaaataattgtaacaccctaactagcataggcgtattacgtgatttttaaacatactgtgcagctcattgctaatcaacgaggtttat

SEQ ID NO: 250904 - DNA, 1105 bp, Cannabis indica
aatgagttttatttatggcataaaacccaacatgctcaccctagagggattgcttacgggcgctccaaagtgtgacagtgctggggttaaggtgagattatggttgtatcctcgagtaacgtagaacggtattccgcttgtttagggagcagcagggcgtggagccccgggaagttatgctcttggtgcatatctcgacactcctgtcgagtaaagccactatttgggcctcctccaggttaatgtatttctggactctcttttgtaattcttggaggctagccactccttcatgttgcaattcgttccagaaatgggttcctatttggatcccgacttggaatagggctaattgttgtccatcgttcacctttttggttttcgaagcctcctccttgaatctctttatgaagttctttaaagtttccgtgggcagttgttttatattggtcaaggcattaacttcaaggttgatcttccttggtgccacaaactgtcgcaggaaactaacttataacttgttccaatagtccaccgatcctggctctaatttcttgaaccattcttgggcagacctgcttagtgtcaatggaaagcatagacactttgcatcattgctaaccctcatctgttaaattgggatagatggtcattggggtctaaatcccctgtgtacgttgccatttcgggcattttgaaattttttgggagttccgcctccaggttgttcctgtcgcagggctcccggtcctcgcaatcaaactttgagtcatctcccttctgcctccgagagactctaacaatgtctttactgaggatagccaactcggccaagattccttcattcaaggcgtctcccaacaccggtatcatttgctttttcctttcaggtgctttctcaagtcaccatgtttttcattaattttttgcctcaagtcaaccgggggatgtttccgacttttcctccctttttccccaggttcctgatgcattgatacgctctttcggtcctttcgatcctgagagccaagactctttcgagggagcttgcccctctacaaacctttcctttttgggaaatcagagtagacctttcgcgaatctt

SEQ ID NO: 250905 - DNA, 580 bp, Cannabis indica
ataattaatatattgaccaaaatattctattttatttattatcaatgataaagaggtaagggagaaaaggttaaaaaagtcttttttgtaatgtattagtaattgtaatcctcattcatcagtcatactcatataatgagaattgatgcaagtgctgtaatactcattacaatataaaaagattacaaaaaatccaattaaacattataattgtaatttccattccattttcattccgattttcattagacattagacgaaagcaaacatgcacttaattgtaaacatttggaagggagtggaatgggttaaaggggagcccccaaggcgaggccccaacaactcagttttagcccttggggtaattacttagcttagcatataggtaggtacctaagggcagaaaaggccaaagcttttttattcctttctttgttggtgcggtatgtgtgtgtgtaagtattaatcctgcgaaaacggccaaacgagtttgggaatgggattgggaatgggaatggagatggaaatgggaatgggatgaatgggaatacgatagcaagaaagtgatggtacgtctaca

SEQ ID NO: 250906 - DNA, 1234 bp, Cannabis indica
aggagataaaatgttgaaaacaaattgaactcttcgttttttataagaaaactcctagcatggttgcttttcaaaattttaagttcatcataagtaagtgagaagtgatactctatttaggagtcatctttatacttttgaatttatttgcaaatgtgttaagtaagagaatcctgggctgaggatcgttaaacatcattttgacagctacaaatatatataaacaaaaattattaacttggttcaataaaaattcatacacatttttagaaaataacaagtattgaagatatatttacaaaaataaaacatatttatattattttctaaggtttccaactagatgatatacagtgtcccagtaggtgagagttaaagataacatcaattgaatagaggagtcagctcatctaaaatagacactatcttagcaaccttttattcgaccaaaatgagaatctaatgttgtccctttaggcgagagtcaatgttattcttattttatgagcttgtactattctttcatatttataaattaaattctaagtagtcactgtagggatgagtgtaactgaaaagaaaatttacaaagtacttacctttcaagatcttacggtgttaaagattcaatggataaccatccataaggcgaaaaagtctagcatctcgaggtcctattgaaacaataactatgtaagaccaataatggagattgaatgtcttatattaaagctcattattaaaaaaaaatatatatatttttcattaattattcattttaatctatttattttaattaataaagaaaattacttgatttaagttgatctaaaattaattaaaattaacttttaactttaatttaaatttcaataaaattaatttcaaaaaatatattataaaataaattatatatattcgaaactataattaagatataataaaataaatatgctaaaaatatctaatttaagtgattctaaaataattaaatttttaacttaaatataattttcttatttaattaaaataaaattaattaattaagtatctttaataaatgaacttaattatttattaaaaaatattctaatttaagttggttataattaattactttttaacttaaatatatttttgtaagaaaatctaaataattaagtataatgaaaaaatctatttatttatttacttaaatataaaaaaatatctagtttatcttgaatttatttta

SEQ ID NO: 250907 - DNA, 688 bp, Cannabis indica
ttcattcgtggaagctcttgaaaagaatttgtcgaatgtactcggggccttggattgtgggtggagactttaatgagattctgcatcaaagagagaaaaagggaggccttcctaaaccgaattacctaatccataatttcagaaaggctctagatagttgtcatttgagggaagtgagttatgaaggaagtgattatacttggtgcaatggtaggaaaaatgaccttatctttgaaaggctggaccgtgtgtgtgggaattcagattggtttgatatgtttccattaatgaaagttcaccatttggatcgcattaattcggatcattgccctctcctcctcatggattccgatcccaatctaaagacgactaatgcgattagatggcgaactcgatttcattttgagagcgcttgggctgaagatgatgagtgcacgaagattgtgcattcggtgtggcaaaaagacgagcagctttctaatgcgaatgagcttaaaaacaggctgggtaagtgtggggaggctcttcaccaatggaacaagataaagaagcaagagatgacaaggcaactaagggaatgtgaagataaaattgctatactgtccaaaagtaccaacgaaatggactggcaacaaatgcaagagctagaaaggaaacagaatgtttggttagataaggaggagaaatt

SEQ ID NO: 250908 - DNA, 1513 bp, Cannabis indica
atcctgctttggtgttgaaagcaggtctgaggttctttgagacagtaaggccattaatttttgacactgcatgacactcaagcttgacaccagatcctgacctccttgcatagcatctccactgttattttcatttcctccagagttacccacaacattagcagcagatggcttaacattgccatttccagtcggttcagcattccgatttggaaattttccatacaatttgtggccaggaggatatccgtgcaatctatagcactttggcatgatgtgacgagcaacaccacaatggtgacacaccgttttaggcttgaaaggctgaacactgccagaaaattgaccagaacttgaatcgcctgtagatttctcagcatcaaatagaggagacaccgattgagaaacattggttagagatctttgtctctcctcctggataatagaggcataagctctattaatatttggaagagggtcctgcatcagaatttgcgatcgagcagcactatatgattcattgaatcctaccagaaattcaagaacacgatcctcctcttgatgttcttgaaaagtttttaaagctccacaggtacaagccggttgaggtcgatattcttgaatgagatcccaaaggcttttgagacaagtgaagtaattagtgacagtgcttgttccttgagccaaggattgtttggctctgattgcttcgaaaacgcgtggtgcattcttctgattgaatctctcttccagattcgtccatatcgtcgtggcattctccatgtacatgatgctctctgctatttcactcgacacaacatgaagaatccaagatatcatggtgctgttacatcgatgccacagctcaaaattatcatcgtcttcttctggttctggaatcttgccgttgacgaacttctacttatttctcgcaatcaaagcaacagtcatagctctatgccatgagctgtaattctcacatcctttaaggatcttaggaactagactagctccaggatgatcactatttgacagaaaataaggatttctagcatcatcggaaaaggatcggccacaaggatccaaagtagagaaacgatttgaattttcagtagagcttcgagtgtgagctcctccacctcgagccatgaaagaaaaagaaggaagaagaagacaagaatggagtttacacagagtctagctctgatactattttacgaaatagagagaaaggaaaatgaagaactctgtgtaatttccattgattacaacacaaaatataagaacaaatttatatacaaactggtataaaccagtaacaccatgaccactgaataacagactatgcaactgaataacagactctaactaactaatacagctggcaaaaccacttcctaacaaactcaaagacactaaactaacaactgtgattgttgatatgaatccatgcgtttaaaataaacccacgaagtagtaaacctcgaaataggcatagatttagcacactgaa

SEQ ID NO: 250909 - DNA, 1546 bp, Cannabis indica
agatttgacgtataataatataactaattactcatccaaactaaataaaaatactaattagttcgattggacgttggatgtattgaatttttagataccccatccaccatccgacctgatccaattggatatttaaaaataacatccaatccgatccgatcacaattggatatctaatatttggcgatcggttgtaattggatcggtcggttctcattagattagatcaatttatgcacacccctagatgttggcccataacttctacaacaggttgagcggtaatacctgcacacttataaatgttgccgctgatggggcatttatgaggaaaagtgctaatgatgtaatgttctactcatagaaaggccacatgtcgtgattacaatctactaatcccgttaatcgggacctataagccaagtgatttgaaataagtaaataataaacttaattaaataaataacttgcaataaacatacacatttaactttaaactaaaataatttaaatttacataaccaaggatcctgtaaaattattttcaaaatattataagttattttgtggaagtcaacctaagtaaaaaataggatttctatacaattcatgttggacccaaccctcgtggtctagcttggccggaatatgtacaagtcatcctcaaagtcctcgatctcatggctgaccctacactactttacccttacctgcacattcaagcactcgtgagccaagtcccaacgagacagaaaataatacagtatgataattatatttcatacagtacgccactgcgtatatattgtgccactacactttatattacattattctatatagtaatgtcactataataagtgtctatgtagcatagacctacgtgttacgctcacaagtcttttttatatttaaggccttactagagtttgtctcggttataatcactgagtttaacccagttatgccttacatacataactctacacagatattcaattaacagattattgcacatttatataatatgcacttagggtaataaccctgggtcgcgacttctcaataacaatcaaatatcatataattgcaccatcacactatatgttatgtgcttagtttgatgtcttacctaattttcaaagtatgtggataaatcttgatccactggtgattctaaccaagagtcagtaatcctagtcacagtttttgggttttacaaactagggttaatccccaaaaaattacattcataatattcacaattaagactccaatactggaccaaagaatagagctcaaaacaaggtttcaaatgatatatagaacgttcaaaacggagttcggagtcaaaagttatgcacaaaataaaatagaaaaaaaaaatatggaactgtcaatgccatggtcgcgaccacacttgtggcggtcgtgattagagcctaaacaggggctcaccctctctggttttgtgcaaggtcgtgaccacataaattggtcgcgactactaggtttaaaaaactcaaaaaatgcccagaaaatcata

SEQ ID NO: 250910 - DNA, 1088 bp, Cannabis indica
ttttgacactttttctccagttgctaaaatggtcacctttaaattgcttttggctatttcaacaatcaaacaatggcctattcttcaactggacatcaacaatgcttttcttaatggagacctccaagaagaagtatacatgacactcccccaaggacttattctgcctactactgcccatccatccaacaccactcttgtttgcaagttgcacaaatcaatatatggtcttaaacaatcgtcaagacaatggtatcgcaaactttcagatgctctaatcgaagatggctttcagcaatcaaaagcagattatactctctttactaaaggctctcatgatgacttcactgctctacttgtttatgtcgatgacattattatcactggacctagtctctctctcctacaccaactacaagggtctctcaataataaattcagcctcaaagctctcggccccctgaaatatttccttggttttgagatagctcgatcaaccgaaggactctttttatctcaaaggaaatatactattcaacttcttgaagatactggatacatcaacagcaaacccacaaaaactcctatggatccaagattacgacttgatgatgaacaaggtgaacctctagatgatccttctccatatcgtcaattaattggaagattactctacttaactttatcaagacccgacatcacctatgccgtcaataatctaagtcaattcatggctaagcctcgcactcctcaccttcaagttgtccaccacctcatccgataccttaaaggcagtccgggacaaggcctcctatacacacctacctccacattgaatctgcgggctttttcagattttgattgggcctcttgccccactacaagaagatcaaccaccgatttttgtgtctttttaggagattgtctcatatcatggcgcaccaaaaagaaacctacaatctcaaaaagttctgctgaagcagaataccgcgcccttgctgccacgggcagcgagcttacttggctccaatacctccttcaagatctccaaattccacaacatggtccagcctttatatattgtgata

SEQ ID NO: 250911 - DNA, 1312 bp, Cannabis indica
gacctaaaaagattagaaaaacataagctctaatttttcatataatattatctttgagtttttatttaatttattttttagttgtattttttcaattttttgtgctatttattattatgtatttatttttttatttatttttcatatatttttagttgatgtattttttaaattgattttgagtttatgtgtttagttttgtctacttttatatttttattttgttttgtagcctgtcattgattaaagaaaaatgaatatatgtttagtttttaaatgatttgttaactttttagaattgtattatagtaaatttatcaagttgattttgtgtttaagcataatttttcatagatatttttttaagttgattgtaaataatatctatgtttgctttcatatatttaagattgttatctagttggtttttaattaaacatatttttgttaattaaattaagttttttaaagtattattttagtatagtttttattaactaaatatttttttagcttatgtgttcataattttctatatttattgtaaagaatttataaaatatttttttttgcaatctttttataattttcatttgtcttatagcagaatcaatatttaattgatttgtattttaaagtttgattattgtgaagttgttgtttcgttgctaattagttgttgttgcattatcgttgtattgagaaagaagcccaacacgcatccaagtgcacttcatccaaacttgccacgtggcatccactgttgcgttctgacgctgcaatcatgcgcgcgtcagccaactttgatggtttggtcccccactcgcgtgtgagtttcactcgcccgcataggccacatgtatctcattttctccttttgcatgtgtgatttcatagtggccaagttttattgcccacttgagtaaccggccagatgcttcaggtttctgaagtacctgtcgaagggttggtcagtatacacttttattggatgagcttggaagtaaggtcttagctttctcaaagctaagagcaagtagtatatcagtttttaaatgagtggatatggactctcagcgtcaataagtctcttgctaacatagtatactgggtgctgaatgctattttcttctctaatgagaaccacactcagagcaaactccgtgactgccaagtatatgcccaattcctcgttgtatagaggttttgacaggatgggtggttgagctagttgtttttttagctcttggaaagaagcttcacacttctctgtccattcaaattttttatttcctctaagtatgttgaagaa

SEQ ID NO: 250912 - DNA, 810 bp, Cannabis indica
tttgaggaagcgtggtgtcaagaagaagaatgtgcggagattgttgatcgagtatggcaagacagtaatggaaggggacggcctgctgctattcgatgtaaaattaacaaatgtggcaagacatttcatggttggaataagaaaaagaagcgtggattaaatactgagattgagaggacgaagaaagtgttacatgaactcactatgcagcaacatccgggtgtgtgggagatgattcaaaaagaggaggataaattaaatgggttgcttgagaaggatgagcaatattggagacagcgaagtcgggctctttggttgcaatggggggatagaaatacgaagtattttcatcacaaagcatcctctcgacgtaaaaagaatgacattaaaggacttcaagatcatatgggcatttggcaagatgataaggtgttggtttgtaagatagtggaggattattatgcacggttattcactagctcagagttaaatgaggaggtatttcaagaggttattggagtgatacaaccgaaggtgacttcggctatgaatgatggtctaatggctgatttcacagaggaagaaattgtgggagcagtgaaggaaatgaatcctactaaggcaccgggtgcggatggacttccagcacttttttatcagaagttctggtcgaaacttaaggaagatgttattgctgtatgtttgaatgtgctgaattatggggctgatttgaagtgtcttaatgacacggtggtagcattgatcccgaaagttgataagccgcaacgaattgaggagtttagacctatt

SEQ ID NO: 250913 - DNA, 596 bp, Cannabis indica
atatcccgctcttatcattctagtagtctcgaattagcggaattagggtttcaatatcagtttgcgtagcgtgcctaattgttagggcattacaaacgccctaatatatagtgacgccacatgggtaattttataaactagttttgtactaatagattaattagttattaaaatctatgattatattaagaacttcactaacataaaacactaaaaacggacatcataatgacactaaaactgtgttctgaagatccctattataaaagttttacaaaaagtttatatacagcgacaagtcaaaatacaaaataaaaatacacggtagatacaacctaaaataactcttggcaactcggcacacaagcttgtagggttgatatgtacattcgtcggagaagactatcgcctcatggatgctctaatttcaccttgcccttatctgcaccataaagcacccgtgagtcacgaggactcagcaagaaaagtaataaaagtaatatgtatgataattagattttcactttactgccattacgtaatataatcaaccgtatatatagaaatgagaaataactatcttcattacatcacat

SEQ ID NO: 250914 - DNA, 654 bp, Cannabis indica
tgtggagaagacaaacatgatttggcttggattcatcaacaaatcctggtggttgctgcatgaaaacagtttcagataaatggccattgagcaaagcattacttacatctaactggttaactatccaattttcagttacatcaagagttaaaacagtcctgacagtaaccggtttcacaactggggaaaacgtttcctcatagtcaattccaggagcttgtaagtatcccttagcaacaagcctggatttgaatcgatctaatgaaccatccgcattaagcttgatcctatgcacccatttatttccaatgatgtgcatgccctgttggaaaggtacaagtgtccatgtaccagccttttttaaggcatagaattcagtttgcattgaattaagccatctagggtctttaagagcagcttgtaatgacctcggttcagatggcaataaggattcaggcaatggatgttttgttgccaagtaagcttttcgtttgacaatgccatttttggatcgagtgaccatctggtgtgagttggttgaggattgtggtatttctgagatattatttttgttagaagggatagatgatgggattaatggaacggtaacaggtggaatgtaggcaacaggggcaatatctgtggtgttttgtt

SEQ ID NO: 250915 - DNA, 843 bp, Cannabis indica
acaatggatttaaaaacacattcaaaaggtgaaaaattgaatcaacccatacctggtaatgaagtcaaaggcccccaattgatctttgatggttctggatagcgcaagcaagcatacctttcaggaagacggttggctagggaaatcaatgaatcgattcgagaattaaaattgatattcgccagttcactcctctgaagatgcataatcactgggggtggatggtttggaagaagaagatttctcaggcaaaaagcaattcgaagaagatcatcaagggctgggttcattcactactgaaaattttcaccctattttgctctcaagaaaatttgaatttgagcgattgaaaatatgaaatgtgaaaaagtggtaaattgtatcttttagggatacttatactcgagataattatccacgtgtagaaaaatgaaggatccaaaattgtctctctaaaatgaatgatccaagaaaattgaatgatccaagattgtctctctaaaagcacaaatatatccaatccaatggctcgaaagtccaacagccaggcatgtcacacatttaatgccccctggaaccgaggtccaaattaatgatggaaatacttttcttaatttttgcaccaatgttaaacaaatgtcaaaataaagcttttctagaaagtaactctttggtaaatgcacccctccaccactaggtgactgccgcgtttacttcccaaagctgaagatggaagttcaactttcgcgatcaactaacacctggaaagcaataagaatattacttttaacctccacatgtccactcatatggattggggcaagcttccacaatacacatcat

SEQ ID NO: 250916 - DNA, 591 bp, Cannabis indica
ccaagtattttctttgttgatctcaagtccttcatgtcaaatttcttactcaaagcttgtttaactttattgatctcccttattagtttgctttcaataagcatatcatcaacataaagaagcaagtacactagatcccttgagtttttcacatacacacaaccgtcatatgaactccttttgaagccaattttggttacaaactcatcaaatcttctgtaccattgcttggtgactgctttaggccatagagagatctttttaagtaaacacacatgatcttccctctttttttcttcatacccttcaggctgcttcatgtagatctcttcatctagatctccatggaggaatgctgttttgacatctaactattcaagctctaggtcttcacttgctactagactaagtagaattctaattgaagtgtgcttgactacaggtgagaaaatctcatggtagtctatcccttctctttgtgtgtatccctgagccacaagtctggctttatatatagtttccttaaccccatgtatgccttctttgtacctgaaaacccacttgcagtcaaaaattttctgtccaattggc

SEQ ID NO: 250917 - DNA, 556 bp, Cannabis indica
aatatttctcaaaaaaaaaaaaaaaaaattaaaagcaggcgggaattcatgatttaccgggactaccagcgggtgtgaagtttgatcctacggatcaagaaatacttgagcatttagaggcaaaagtacactcagatatttcgggtaagcttcatcccctcattgatgaattcataccaacacttgaaggagaaaatgggatttgctacactcacccagaaaagctcccaggtaattattaattaaataacgaatgttttaattctccagttaaacgctatgtaagtatattttttatatgactttataaatttgtggagccagcagaataatataaggatataaattgcattttttctctttatagaacttcattgatcttattacgagagaactatataaacctaaatcaaatagagtacacaatattagttacaatattgtcaaatttagtttaatgtgtttgtacaatatatacacaaaacaatttctaataatttattgccattgcgaaatttcgtaatttattagaaatttagaagcgtgcaacatcttt

SEQ ID NO: 250918 - DNA, 752 bp, Cannabis indica
atgatgccaaacatgcactaagattccaggaattactcaagtctacaaatgaactttattcagtggcgaaaccaggccacaaaataaggaggggccaaacaaagtgtatttttacctattttgtttttagtatatagtattatataaattaatataagaagttaattaaagagctttatccaacacatataaaataatataacatatgcaaatatatattattgattgagaaaatataaagatatatataaatatatatcatgcaaaataatacattgtttaaaactgcaacctacgttcttttaaagaaacaaaatcatcaagtattgaatctaaatcaaaagtctcagctatctctctttcaatataaacaactaaattgtttgctggaaaatcatcttcaattttattccgaagccttgttttaataatcttcatagctgaaaaggctcgttcacaggtcattgtagatactggctgaagagttaaaataaggcgaattagtctatcaataagatagtatatctttgatttatctgtctccgttaatcttcgacataattctgcgatgattgacaaattttggaacttcaaattagtaagcacatcaagttcaaaatgcttcaattgaaaccttaaattaattctctcattctcagaaaaatcaagaggataatactcttctgcaagacaacatatatcatcaatattgaaagatttaaaagcatcctttggatccaaagctgaggtaa

SEQ ID NO: 250919 - DNA, 805 bp, Cannabis indica
atagatcagattatgattaagttttattttgataaaaaaaattagtgcatggtcctatttgtacaattttagaaaatataggatttattttgtcatttaacaaaataatttgttcaattggtcaattttgcaaaacacaggatccaaaatagtatttaccctttaataaatatatatcctagaactaagactagcagcacataaatataggtatctagcattgttttagaaaataatattacgaaaacatagaggcttttaagttgtattttcagttaaaagtaagaatagaaaaaaaaaattgttattttaaaaaaattaatggtgtttgactcaagtttttaaaactattttaatttttttttcttaaaaaaaaaatacaataccttacaccatactatgacatgaactcatcctgcctcaaaaacaaaattataaataaagagtcgtttgaaaacctctacataaaaaggggttttgaaatctcttgatctctgatatacttctcaggatatttgagtcgttgattcggtcatttgaatacttgtcctctaccgtttcgagttttctctttggcttcgttctctccgttctcgccttgcatctgtattctcttcgccttcttcgtgccctgtcaggtctggtcccctattcgacgatgccccagtagagagatgccttgcagatgtgaacttttgaggctcccttcagatgacagtggagagtttggtgcccgtcgaagctctgtttgtggccttagttttgagcggtcttgaaggtattagtttctaacgggtgttggctg

SEQ ID NO: 250920 - DNA, 3591 bp, Cannabis indica
ttacaatctcttaattaaccttcacgttcaaaaatacatgttacaaatattttttttttcaaatattttttcgtatgcttataatattatctctagtaaatttttaaaatttttaaatagtttacagtgaccgaaaatacatttaaagttttttaaacgtgacgtggtaaattgaaatatcaaaaactctgttttcagtactataaactattcgaaaatttttcaaaaatttcagagatgatactgtaactataacgaataccgttatgaaaaaaaatttgaaaaaaaatattttaacatgtgatttctgatgtaaaatgttgtaattaacattcctcgtatatttatatagagtgatttggagaagaagaggaaaatttattgaaactacttaaaattatatttattttatattttcttttaccagctttttacttgtatttttttcaaaagaaaaaaatcaggaaaacatattatttttgtaaaataataaaaaaaatatgatccgagaaaaaaatataaatttgttattttgtagatattgttgaaaaatatcctaaaaataaaacaaaaactcaaggacccatttgcaaatagtttacgaagatatattttgggtgtattttattacaattggaataaaatgaggatacaaaaatggtataaagaagaaattaaaccctaaaccaggcaacaaagtaattaaaatttttacactgttcaactgatttggtatgaaggaatattgctctaattttctttttgtctttaggaaatcttttccttaaatcttgtcgtattccaatcttgttagctatatatgcattatttttaaatataaagtgttttatgggcaaatattcttttcccacttttttttttttgaactgatattctttttccactttggttgctaataatgtctttatcttatttgggcatgcaataaaaatggatttagtgtccacaccactttgcaaaaagggggaaagagcataatgtcatcaaaattattaaagttgtaggaaagagtctaaatattttaaaagctttccttccatcgccaactccatcttcaatcttttaataaaacatgaatggaccaaatgtacttgccttgaatttgcggtactcatttttgggtccatgtccttctaattctatgataacattttgtggtagtcatttttcgtctatgtccttctaattctatgataagtttgtgtgagttttacatatattctgttgtcatctttttaatctatgattattttgttttttataattatgatttatatatatgttaatctcaaaaattaacacgtctaatttttgagattatttaagcgacaatcggtagattaacgagaacgtgcccaaagatcacgcggcatgctgtgcaaggaagtcactcgacatggtcatcatacaagtcacatgacatggttacaatgcaagtcacatggcatgccattcttgcatgtcactcaacatgccattaaagaaggttactcagcatgccattcaagagagtaagtcgacatgccattcttgcatgtcgctcgacatgccattcaagaagattactcagcatgccattcaagaaggtcactcgacatgccattcaagagagtcactcggcatgccattcaagaatgtcactcggcatgccattcaaaaaagtcacttgacatgccattctggcatgtcactcaacatgcactctaccccaagtcacttggcatgcattttatgcaagtcactcgacatgaactttatattgtcaatcggccatgaccacacataaggagatatgcttctgcaacaacataactatacttagtgaaattttctaaagtatgggaaatggaggtaacaagggtacggtcacatgcgaagtgtgtacaatcacgtctcttaaaagatctgaaagtaaggaggtacaagtagcgaaagcaccacacctacaaggcctgatcacccgaccaagggtacacaacatccacaacacataaggagatatgcttccgcaacaacataactatacttagtgaaattttctaaagtatgggaaatggaggtaacaaggggtacgatcacaaggacaagacatgcatgcgaagtgtgtacaatcacatctcttaaaagatctgaaagtaaggaggtacaagtagtggaagcaccacacctgcaaggcttgatcacccgaccaagggtacacaacatccaccacacataaggagatatgcttccgcaacaacataactatacttagtgaaattttctaaagtatgggaaatggaggtaacaagggtacgatcacaaggacaagacatgcatgcgaagtgtgtacaatcacgtctcttaaaagctctgaaagtaaggaggtacaaggagtggaagcaccacacctgcaaggcatgatcacccaaccaagggtacacaacatccaccactcctacaacctaggaccacctgacacaagacaaaggtacaagacgtaagactacctcctgcaacctgaagcttacagacgatggatgtcgttgttgggattttatgccctaaataaattttatttcaatataatcagatttactaattaataaaagattaaaaattattttatgttgtatgattaacatgattactttcatgattatatgtttaatatataatttttattaaatcttatacatatagttattcatgattatagtgttgtctacacagtgaaaaattatcatgattatatgttttaaaattctatgtcccatgatttatcagtacactagatttacactgacatgataatcagcgataaagtttacttacactttaaataagtggtattaggacattagcaaaatatgctagtatcggatgtgtggagtatacatcggactggaccgatattaacattagatatcgttatatctttctaagtctcttaggtcaatagatcttaattctgagatggttaggttctgatttaaatttattattcatgttctttgacttgttcgtttaagttgaccaagtggatctttctagtacttacattttgagaacaaagtaatacaattgagtgggagtgctaatcatagatatagaatctatagcttctataactatttagaagtgaaacgataatttccttcgagcttggattaacgcaataaatgattgagtgctcatttcagtaataatattagtttactgaaatatcatttacaagtagctaaagtgttttaaggataaatacattgaagggtagaacagtaattttgtccctactcgatgtagatcatctatataggatctttgattatttggattgaaataatatgtaattcaaagcgcatctattgttttttggtatatagggtgttctatgtaattaggagtgtaatttcgaatctataatggagtcaggatgaattaataaattaagaaatttacttggtaaattttagatctacttattgggagcttcattacatagggtcatggtccccacactgagataatattattttgtagtctcaattaattggttttaattaatcaattaaaattctaaataagact

SEQ ID NO: 250921 - DNA, 1003 bp, Cannabis indica
gaaatttgagctcttgccttagttaattttcttgtaattctcatgaataataaaaacttgaagtagacgcaactccattaccgtcgcgatacgaggagtgaactactataaattctttatgctcactttaaatatttacttaactcattacttatcttgccaatctagcgagctggtgtttgtgagatatctacgtcaatattttggtactttcatttagagcccacttctcattttcttgaacaagttggttgctacaagatcaacaagtgttgagagaagcacaagaactggcctatctgttaggggcacatcaactattggaacaggaactatgacgacccttgcatcttagatgccacataaaggccttggaactagttctacaacttaaccccccaataataactactagtaatgatcccaatattcacgttcctcctggtgaacctcatgtggagctagaggacactaagcaagttgaacctctagttgaacaatttagtcaatcagttgctaacttgcaatccaagctacgagaatctctcgacaagcagcatgaatagttccaaaccaaagttgctccatatcttaatgataaaaaatactaaaagatagtgggttagattcaagttattgaagtttgaacttccatactagagatcccgaagtaaaccttggcgcagggctagggtccttcccaggtcgactgctatgactcgggtatactcaacttcgtgacgttatccttcatgccaaatgtcaaatattgatgttcatgtcaccagggaaaaaattctgagttaacaaatatttacatttaataactgattgaggaaatctctacaccgcttgagagaatatccaaactacttttcaaattcaaatatttaaccattgaattaattaatcaattagcccaaaaagacaaaaccaatagggactcctcatagcatgtggcacttgcactgtgtttggatatagtgcatgtggtgtcatcttt

SEQ ID NO: 250922 - DNA, 1071 bp, Cannabis indica
ctccactcttcacttacaccttggccatttatgagatgggggatggacattgcaggcaaaatgccaactgctctagggcagaggtagtaggaattcatgcttgccgttaaactgactacgttacaccaaaatgggtagaagctcaagcctttgcataagttagagattgagaggtaaaaaactttatctgaaaaaaaaatatgtaggttcagaattccaaaggagatagttacggacaacggtccacagttcataagccaagacttctagaacttttgtgcagaatgggggatacaattatcattctcaactccacgataccaaaatcaaccaacaaaacaatagtcaacacgctcaagaaatgactagagaaagtcgaagggagatgggcagatgagttaccaggggtactgtggtcttaccgaacaacaacaaagacctcgactggagagaccccatttgcattgacatatggaactgaagcggtcatccaagcagaaattgaaataacaaccatcagatttggacactcgacggatgatctaaatcaataactcagaagttgatttgttagacgaaaagagagaataagtgcttatcagaatagtagcataccagcaaaaggtggcccaacatttcaataaaaacattagggtccaacaattcaaggaaggaaaatgggtactaggactagtgtttcaaaacatgaaggaagaaggagtaggcaaattaggacctaattgggaggggccttaccagattacaaagattgttggccaaggagcatacaaactccgaacagcagatggaagaaacataagatatagctggaacgtcgtacaccttaagaaataccatttctaatcacatgtatggaaaaacaatgccccacttgtacaatctcattttacgtagtggatttttgcatgctccgcccgtggttttttccaaaaagggtttccacgtaaatacctaagtcaattattttaagtgtttgttatattttagagctaaaaaacgtaaagtaaatgcaataacaagcgagccatgctcaactagaatattcactta

SEQ ID NO: 250923 - DNA, 1424 bp, Cannabis indica
tgactaataaaaattatatgtacacgttaataaaagacaatagaaatagaactaaataatattttttaaaaataattaatataccgtataacaaaaaatacatatatcactcactaacatatatactaacaataataataaaaaaatatattactaatatatatgtatactatactaatcaaattatataccacaattaaaatatatataccatgaatcaaatttatgtaccaccattgtatataataaaataatatctaattaaatattatttaaaatgataatatattatagaatttaaatatataaaaataataactaagcatatgtagcatgtcaacaaaattatatgctaacaaaattatatatcactattatacatagtaaaataaaaaatagatatcatctaagaataataatataccatacaacaaaatacaaatatactgtacaatgaaatttatatagcaacaactcacaacaactcataaaaattaaaaacaaattgatataattttaaaataaaaaaaaattaaataaaactcatatagatataccataatctttaagtaatttgtttctaattctaaaaaaaaaataatgaaaaaaaaaaattaattgatttttttatatggcaaaagataatataaataataaatattataaaaaggtcatgtatctacaagttttgaaatgagaatatttacttacatagtgctatataattttgggtcatttgttataatttctcttgattttatagtttacaaaagttattaattaaactatctgttttgataaataataaattgaattatgtatttttcaaaatatagtattaaatagtaccttgaattgatctattaaaataaaatttaacaataatccgatttagaggtgttataaaggttatgtttactgcatttgttcgtgttaagaattatttttaagtggttatattaaaaaaaaaaatcaaaacttgagcttaaaattctatttatacaattttaaaaaatataaaatttattttataatttaataatagagaatctaatcaataatttttgtaaaataaatagtttaaaataatattacccttcatcacttcatctatcttatcaatacaaagtaattcttgatgctatttttttttttagcttacaaagaaacttcattaactcaataattaaatgagaagaattatgtcaaaaaaaaaaatgagaagagttcatccaataagattaacactagtattgaataacatcattgaaaataagggaataccattttagatcgtgtgttttgtaaaagttataaattgaaacctcagttttgttaattgataaaatagactttgtatttttcaaaatagtacaaataggactctaaactaattttttgtcaaaacaaaatttaataataat

SEQ ID NO: 250924 - DNA, 956 bp, Cannabis indica
aatcaggagaatatttacctcgcacatgagcagaaaggtggcctttggcaaatccgaacctataaggaatttgagaagcaaaagagatcctaacaaatattttaaattccataaagatattgggcatatgaccgatgaatgttgccaactgaaacatgagatagaaaatctcatcgctcaaggccattttaagcagtacgtgaaaagacagggctagggatacaaccagtccagtctgcccaataacccaaacaaccaggggttacaacctattcttgtggaaggagaggacatcctggttattttgggagggtcacatatcgcaggggaaagcaataacacccgaaaagatatgtgaaagaaataaaggatgagcaatcggcctttgccctagaaccttccaagaaggtgaaaatcaaggaacctcccattacattcatggaggaagatgagaaaaatgtgagatatcctcacgtttatccattggttataaccattcagcttgctaataaaaggattaagaaagtattaatagataatgggagctcggtaaatatcctttataaggagactctaaagaaaatggggctcgaaaaagccaagttaaggccttgtatggtaaatctttgtggattcatcggagacagcatcgctagccttagcataaccaagcttgcattaaccttaggcaaggcacctctatctgctactgttatgcaagacttcttagttgtcgatctgccctccgcttacaatctattgttgggtcgtccagcactaatcggattaggggcagtctgttcgaataagcacctatccttgaaatttgggagtggtacgtggtgaccagatgctgactcgcgattgcaatcccatagagctacaacatagaaaagccaatcatcagttgatggcaattttggcagaataaactgagaagaaagataaagatcttg

SEQ ID NO: 250925 - DNA, 1461 bp, Cannabis indica
ccaacttattggacacgatcttgacgaaatcttgttcaccggcgttccaccacccaagaaccttgtcacaggcgtaccaaatccccaatacagtcaatggagaaggaaagatcagctcctcctctcttggctccgatcttccatgacagaaagtgtgcttgcttcagtcgccaattaccaaagttcctttgctgtgtggcaagccttggaacagaaattttccagccaaaccaaggcccgtcgtcttcaactcaaagggcaattctccaatattcacaagggaagtctttctatctctgaatatgttgataaaattcagtctattactgatgctctaactcttgctggctcacctgttagtgatcaagacttaattttacaattgctcaatggtctcggacccgaattcgattctgttgtctcaggaataacgtcaaggagtgacaatctgaccattgaagaagttcaagctctccttctctctcatgaaagtcggcttgaacaccatcaatccatgactgatttggctgttaaaatgcaagcaaacctgacgtttggcaatggtagatcaggtggtgttcgaccatttgccaactccaagaatcaagctgaaaattctcaatccactcacggccgtggtagaggatatcctcgatacaaccaacaacgtgtgatttgtcaggtgtgccttcgatctgggcatacggcaccagtttgccactatcgtttcgataaaaactggaatgtgccaagaaacaatcaacctgcaagagccaatcttgctgaggttgaattcgattgcgatccacaggcatactcgactactctcgtctaagattttggggatgatcattcttggtacgcagacacgggggctactgcgcatgttacctttgatgctgcaaatttagacagtcaacaagtctatcatggttctgagactcttgccgtcggtgatggtaagaaactcaaaatctctcatattggtcattcctttcttccttcatttaactcttcttgtcctctgcaattgaattctgtgttacaagttccttctatcactaagaatctagtcagcatctctaaacttgttgatgataatgatatttttctagaatttcatcgaaattgctgttttgttaaggacaagaaaacaggtgctcctctcctaaaaggaaggcgtaaggaaggactctacatgctcagtgaagaccttggattacacactcagaccccacaatgtcaccttaccactctatctagtaataaagatgatcactactgtactgatcaatctactccttgtaaccacaatatgcatttgtccaatgattgtaatcagttcactattaataaagattcttgtccactttcttcacaatctgttttctatgctgcttcttttaatgatatcaacacttggcattgtaaattgggtcacccctccacaacaaccttgtc

SEQ ID NO: 250926 - DNA, 837 bp, Cannabis indica
tattctattaattctgaaaaaatggaataaaaaatattaaaaaacctataaaaatattaaattaattaaaaaaatatcaatttcatttaaaacactttaaattatacctaaaaaactattttcaaactttattttatttataatcaggtatcttaaaatatcaaagtaaaattattgagaatctaataaataattaaataaactgagatttttttaagaaaaaattaaacttatttatatttataaactcgtatcttaacaaataaagaaaataattaaaaaaattaataaaaatataaaattattttgaaaaaaagttataaattaaactaaattttttttatgtttacttaaataaatctacattttttgagaagaacaaaatatattcaagtttttcctgttgttgaaggaattttacaacaccaaaataaattataataataataaaaactgatgaacaagtgcgagtattcaacctagaatggggagtactcaaactgggaacacaaatatttaacaaataggccgaaaagaataataaatacaagagaattatagtggttcagtcagatcacggactgcttagtccactgttgcaaagattgtgtgtcacggtggattactcctttatatacaaagcaagtgtcctatcatttacacaaggattgcattcatcgtcaatccgtttataccttgatttacaattaattaagttaaaacgtaaacatttataaatgaagaacagtttccagttttattcactaaatacaacaacgtacgcgacttctatagtgcgagttggctgttcacattcttgcataagctcgcaggttt

SEQ ID NO: 250927 - DNA, 713 bp, Cannabis indica
tttttttaaatatatatagatatattattgatttcaattacactcatagtatctaattactaaggtagtctttggttggaagtaataaaaacatcaaaatagaaataagaattagaataagaaaagaaatggtatgaaattaaattttaaaatgtataaaaaattgacaaaaatattatcaattttttattctatttcgaaatagaatagccatttcaccaaaatgatagaaaatgcattctattagaatgacattctaatactttaaaatataacaaaataaataaatggaatacaaattgtttttttttcttcatttcattccatttattacctccaaccaaagaccacttaaaattttattatggtgttaagacttggtaactataagaaagtatatgagcattgctctagtacctaacaccaccttgaggtaacatcttgtaaatagttagtaatattctataatagttattaaattaaattatctgaggtctaatacttaattgcaccaattaaaagttttaaatatttgtctgttttacaagtataaataattttttaaatagatttcaatcacacaaataatatttaatcagtaaaattctattataaggttaagactttgtaactatgagaaaatatatgagcattgctatggtgcttgtgttggaattatattttaccaggaacttagatctactcacaagtat

SEQ ID NO: 250928 - DNA, 950 bp, Cannabis indica
ctcgagcaaccttccccgaatcttccccaaccgttcatagtctcttatcaaagctgagaatccttctgcacacagaaggaaaagatagggtgaaaggggatcaccctatcaaagacctcttgtaggaattataggcccaatttcatgaacccctgatgtgattgtgtaggagatagaaccaacacactgcattaacaacttcaccacatgctcatcaaatcccaatctcctcaacatagcttgtaaaaggcctcactccacccgaccataagccttgctcatgtccaacttaagtgccataaaccctccctcctcatttggttccttttcaaataatgcatcaccttgaaagagattaagatattatcagttatcagtcttccgggtaagaaggcgttttgagtttcagaaataacaccaggaagaacaactttcaaccgattggccagcaccttaaaaacaatcttataagccacattacacaaagcaattggtcttagatcactcatgctttcgggtttagacttcttcgggataagcacaatgttcgttttcttttaaatgattaggaaattcaccaaagtaaagaaagtgttgaactaaccgaatgatatccatactaacgatatcctaaaacttctgataaagcccaggattaaagccatcaggatcaggagattgatcaggatgcatttgaaagagtgctttctgaacctcctcaacgtcaaccggaatagtaaaagactcattcatagcagtcgacacccgattatgcacacaagtcgtgaccctaccccaatcaatctccgaagctgtgaacaactgttgggttttgtgccctaaataaaacccattacaatctaattagttatcaatgtaagaattttgaagtgatttatgtttgcatgagtttttcatgcttgtggtttaatatgtttaatatatgcaca

SEQ ID NO: 250929 - DNA, 1461 bp, Cannabis indica
tgttgcaaggttatcaaagaaaatgttctctcatgtatttagagaaaaaagggatattgtgattatatgtgaaaattgtagggtgatttgattgaagaagcgtatggtatacatgagcctaaatgagatttttcatctacccttacctaaatttaacggtaactcattaaagttcttttgattttaaaacatatgttgttgacattagtggataaggctgaataatggaagtttaatgataatcagtttttcgataagttggattaactttgagcatgtatattaatttctaatggttttcgacatttgtgagttatatttttattccaagtttgatagataaggttagtattggagaaattggattgaaaatctggtattacaacagttgagtcatgcaagtgatggcagtgtggtgtgaataaaagttaaggcttaatttgtttgtctttgttcatttttatttagaatagtgtcaatctttactcgagggcgagtaaagattaagtttggaagagtttgataggcttgttttaagagcattttatgaagtgttttaaaggtgtgttttagttgattataattattttgtgtagaattacgcttgttttctacttgtttcaggtgtaaatggtaaaatttataatatgaactaaaaataagaagaaacatgttaaatgaaatgaatatgatagatttatcatgaaatttggagttctaagatataatgggtgaaattttcttagttttggatgctcaacacgctctgtttgtgatcgaaaattaagtatgaagttccaagctaatttttgactattatttgttcacttttagaaaaaatattgtgaataaaagttttagatctctctttcaggtttccaaaatatcttgaatcgtccaattctaaataatagtaagagagttatggccaaaatattatcagttgtcgcactagaaatcatgctgcccaaaaatagccttcaggggccgtgacatggagtgtcaatgtcgtggcctgctatggtcagaatgaaaaaattaggcttttaaaccctaactttgagatttaaaagagacctttgatactttttgggaactacactttaagggacaaaaattgaaagtagaaatcggctatggagacttttaacaatattttttcgacgagttctttcttctactttattttcttatgttcttaattaattttcatcatgtaaactccaagttcttgtctaacctatctttttcatatttagatttattttatcttgatttaagcttgaatataaaaagaacaaaatcaaagattcaacaccagaactttacaagcttcacttgccctagaaactcattctaggcggctagtgcttgggttccccgaatcagggtaataactttcactatattcaaagatgtatcttacaaaaaccaacaatattgtaaacaatacactctttt

SEQ ID NO: 250930 - DNA, 1862 bp, Cannabis indica
cgtctcctttctcctctcttccacggcaaagaagaagagaatctttcataagctaatcacttagaagaatgatcgtgatgacgatactagcatgaaagatgaattagagaacaagagtgaagctgagaattgagtagggttagaactgattgtaaaagctgttgcagaggaggactcaactcagattagggattgctttgatcttgacctgagtactgaacctaaatctcagaccaagctagatagggcaaaatatgtggaagatgatgataatggtaaaactagaaagtattagtttcaagaatctgcaaggtacaattgggattaatttaccaaacataacacgatttattatgtccctatgttgacatatactaaacctatagttaagaatgatatgaagattgcccaagtcaatctagaggaggtcatggaacaaggaacagcctacaatacaacagtcatttgtatggttcttggagctaattccccaatggctatttttgagagattcatcaaaagaatttgggggcaccttcctatagctcacattgctaaaatgacattgagactgattatggttagatttaatgatgaagccactagggatcaagtgctcgagtcaggggttcttcaatttgatagaaaaccagtaatagttaagccttggtctactaatttgaatgtgtagaagatggttcgatcagtccctttatggattcgtctccatgatctaagtctccaatactgggggaataattgcatgagtgtgttcgctagtactgttgggaaattatagactctcctttgaactctattccctatctcaatgaatatggtcaattgatggagcaaagaattcaatatgagttgctacctgtgaaatataaaaatttctctggcttcagacatatcatggaagattatagaaagaatggttcaaagtcaaaggaacaaggtgctgctactagacaacaggttagtaagtcaaataaacagtaggatcgtggttctactactgttattaacaaagacggggaggataaaccaactgagactaggggagataatgacactcaagtgacaaaagaatggcagaccctgaggagaatagttcatcaatccaaggttcaatctaaggaaggtgatggatgcttagatataaggtagaagtctgtgaatatatttgatgttctatacgaagatgaagggtataaggaacaagatcagttggaaaagaggtagatctaggtattaccattagcttactatggataatttcaaattagctagttggaaatgttaggggtgttaataaaaaagagaaacaagatgttgttgtggagttttgtagaaaaaataaaatttgtattggagctttattagaaactaaattgaaatataataaagtcaaggagatgatggattctatgtttgtcaattgggagtatttttctagcccaactactgaagggcgattgctgataatttggaggagaagctttgttagattgatttttaatgctgagacacctcaatcggtccactgttatgttcatatttcaggtcaagaaaaggctttctgcattactttcatctatggcttcaacacccttgatgagaggaaaagtctttggactgatgttctgagtttaaagctacctatgaaaccttcgattttgctacatgatttcaacaatgtgtttaacttggcggataaaaccagaggaaaccccgattcagtatagtgatttacttgattcttctcaatggcttgctcaagcccatgtggagacacttaataaactggctcaacatttacctggactaattatcaagatagttttagtagaatacactta

SEQ ID NO: 250931 - DNA, 668 bp, Cannabis indica
cactgtccaggacaattttgaagcgagcaaatttatcccgggttagtagttggtcattagcagcctgctagaaaatgaacctatgtttgggcactatgacactgcttccaaatactactgcttgatctacaaaaatagtatggtacagttttgctattgtatagacttcttcgtgttgagtcggcctttggcatctccagcattagtaagctcatgaggagtaaacttttctcttaaatgacaaagttttctccaataccaactagcatcatttttaaggtcataggtccaaatggaattgttcttgagatatatattattaacccatttcacccaaagaatgtcacttttggttgaaatggcccaaatatatttggctaggatagcttgattccatttgaccccatctttgaatcctaaaccaacataattcttcagaagaaaaactttctcccacgaggccacatgcaacttcctcttgttaccattcaagtgttgggttttgtgccctaaataaaatccattacaatctgatagttatcaatttaagagttttgaagtgattatgattacatgtattttacatgcttatggtttaatatatatacacacaaaatcagttaagtccagaacatatatttattcacaattacagtattgtcaacata

SEQ ID NO: 250932 - DNA, 1095 bp, Cannabis indica
ctaatatagatataccataatatttaaataatttgcttctaattctaaaaaaaaaatattaataatgattttgaaatgaggacatttactaacatagtcttataatttagggtcatttgctatatttttttaaaatgaagacataaactaacatagtcctatgatttggggccatttactataatttcccttattataaattctacccgacagagtgtttgatatttcaatttactatgtttgtttaagaaaattaaatctattttcgacataataaattatttgaattttttaaaaattacaaaaataataaagtaactataatgaaaattgcaataaaatttttttaaaaaatattccaacattttcaaggaagagagttgtaataaaagattgacggcatttttttaagtaaaaactcacaaagtaagaaaactcacacatttctcaaaatatattttaaacacaaaaccaggttaatttataatatgtagaattctaaggaagcttcatttactaaggagtaatgatatgtaacaagtcacttccattaatatgttaagtgtgtgtcacatgtatcattactgtttagttcttaaatcataaaattcaatttagaggtggtgaacttgagttcatgttatctgaattaaatcccaattagtcttactgttaatttttcttaggattccacgctttattgttgtaggttttgtcccaatgagctaatgctaaatcatcattctattcaactattgacattagttagttaagctagttatctagcttgacacctaagctctacctacttgattcaaccaatgcctataaaaggaagcaccaagacctcattcaagagtagtccaatccgagcctctcatctaaaattctctttctttctctctaatttctataccaatcttgtgagtgtttaggagggttgtaaaagtagaattgctcatccattgagatgacttctaccatgtgaggtttgatatgtaatgtgttctacacttagactcaattgagtgcatgaatcggattgcaaaggtgctagacatttgaataaagtttcatttgattcaatgctaagtc

SEQ ID NO: 250933 - DNA, 4692 bp, Cannabis indica
aaaaaaaagagatatttcttaacttatcctattttaaattctatattttacaaaaattactaatgagatataccatattaaataatgaaataaatttatattttaaaaaatgatacaaaatagtaggggtgagcaaaaaatctaaaaaaccgaccatccgaacaccgaaaaaacgacactgaaaaaatcgaaaaccaaaaaaaccgccttcggttaaaaccgtcttaacatggtcggttttagtgtcaatgacaaaccgaccgaacatatatattatatataatatatattatttttgtatatatttaatatacaattttattaaactagttttacttatatcttttttatttaaagtctcaattattcattgttttattttgttatagtttgatgcatttacatattatatatacacattcataaaataatacaaattttttaatataataactcattaccatataatagcacaaataatttgaacaaattttaaaaaatttattttacattatttatttaactaagaaagttttattcttaaatatatgatattcgatacaatactctaatttttttagttttcacttataaaaaattaaatttttttttttttttaagtaaaaattgatgttcggtttggtcgatttaaaccaaccaaacagtgtattaaaagagtcagttttttttttacattttatataatagttagtcggttttcgaattataatcgtgaaaatcgaaaatcgaaaatccaattttaattttttttttgtttttgttgtaaaaaaccaatttagtcaaccctacaatatagtaacataaccacgatttttaacaatatgaactttatgcaaaaaaaaaaattaaatatataatcataaaaaacgaaaccctaaaccctccatcacagccgcctctctccacatttctcaccctctccttttctctcttcacttcgccggccggtccggtccggtcgtccacaactctggtccttcttccttttcttcatcactaactgatcggacagtaggaattccgttttaactatagaccgttgggttgtcgaacttctgcgcttcattcacaggtacggtaattggtgaaaagcttctctttttttttcattttctcacttgtggttaataaaagttggtttcttgtctgtaatatataaagaaatgatgagcggtagtagtgccagctgatatgtctatttgcatagatttttatattaaaattttgtttatgggtattgcttggaatgagtaatcttattttgtactacttaaactcttgttgatagatacattgttctgttgagtttcccagaaattgattctttgcctatatggagttctttttgtgtgatgtgaaaacatgtgtttgtagtttgtactatttgaatattgcattgttcttcagagtgaaatttgccaaactaacaatgtggaatattaaaatttgtaaaataatttcacttaatttactctgccaccatgatagtggttttgtgaccataataaacatttatggtcgcaccgtgtaattcatcgtcgtttctgcaactatcattttgctaataaaaatatttgaagtcattttactaataaaaattttgataaaggttattttactgaaggacttgattttctactatccaaaaataaatacataaatcagctaaaaacaaaccgaaaaaaagggcaagaatcaatttcaaggaaaaaagggccctacaagaacgaaactgattcttgcttataggaagttccttttgggtgatgtgaagatatgtgtttgcagtttgttttgttttataactactgaaatatagctttatcttgcagcattgaaagccatacaagaaatactcaaatgtcttttattgtgaaagtcccaacaagcactgttggaatatatagtgaaaccaaccaatggatgaaaatgcggaatcatagtcgaatttcgtcattagctatgagaccacgtgcttcaatggctgcaccgaaaattcagccactgagtaaatctgtctctaacattcaaatcatggtttgcctcaccaacttatctgtattcccttagttcttgtacttaacttagatttgtgacaaatatcatatggatcttgttttgtcatcaattaggtaaatggttgtactggaaaaatgggtcaggctgttattaatgcagcagattctgctggtcttaacattgttcctgtatcatttggctctaaagaagagtctgggacgattgtgcaagtttgtgggaaggatatcacggtgcaaggcccttctaaaagagaaagcactctggcctctctttatactgagtatccaaatttgattgttgtggattacactgtgcctgcagcagtcaatggtattttctccaataaaagctaactagataaagaaaaatgatatatattctgtacttcttttgaaaattttgtttagtatttagtttaaatttcaagaaagaaagtgggttattgtgtgagaatccatttagttttcttttcccccttttagcctggaaaagataattgtgcacgaatttattgagacctagtggcattgactcttttcgtgtagatgacatctggttgacactagcctagaatataaatgcttttataaaggaatactactcttgttctgtagaataacaataactgatgaaccaagaaacattgatttagaaactagattgtggctcacttttctctaataaaagttttaattggttgtcattagttaagccaagtgcgatccttatggttgtgctgttttgtaaattacataaagagtgtcgttttttcccctttctgtttctcatttataaccctttttctgtttatgagtttgccttttgagtttccttgcattttgttttgccatggtgcagataatgcagagctatattccagtgtcggggtgccatttgtgatgggaaccactggtggagacagggatcgtttatataagactgttgatgagtccaaaatttatgcagttatatctccacaaatgggaaaacaggtatcctaataaagggacagcaggtaatcagaattggatacctatattgattgaagtatgctttgcgttcacgagtatttaatgggctgttattttctttaggttgttgcatttcttgcagccatggaaattatggctgagcaatttcctggtgctttctctggttactctctacaggtactctttgtaaatatttcattttgacaattaagataatggtgatgattttgataataatgaagctttaaactttcttattatgggccttcttcaatctcttttaatatgtatatattgagttttcatatttcagcatgctaccacaaaaactttattagattcgaactttgaaacgcttaaaacaacataaagtcagggtaacttatgttctattagctgaattcgagtactaacaaacatgcctctgattaacctgttatgtattaggtgatggaatcccatcaatctagcaaggtagacacttcaggaactgccaaagctgtcatttcatgcttccaaaaattgggggtttcttttgacatggatcaggtatgttgatggacaataaggattctacattgaataagataatttttcgtattatgaggattactagcccataatgcattgccattattcataatcatcttattagctttagatgcacttcgagcagtcacacatgatgaaattcgtagattattattatttagttttttactttgtcaaatggtttgcttattcatgttccaatcttgtgaagggaaatatacataacatctagtttcagatgcgaattgagtagcgtaatgtcttatcttcttaataatggtcatgcgaccaagtgtttctcctgatgtgatgagtaactttttttttcgacactttgagtaggtacaactcattagagatccaaagctacagagagagatggttggagtcccggaggagcatttgtctggccatgcatttcatatgtaccatctcacttcacccgatgaaacgtaattagaggcatccttatctctttcaaatttgcatttttgcccttaactccggaacatttaagatcaacttcatttctctcttggcagagtttcttttgagtttcaacacaacgtttgtggacgatcaatatatgctgaaggaactgtcgatgctgtgctctttctcgccaagaaggtgccaacaatttcttaagttacactgctcatttgttatgttatgattgaagtgttgaacagctctaacagtaatttactttcagtactattgtctcataacaaatgatgcaatattcttatcattaatctcttttctgaagaaaaaagttttcatgtaacaatttcagattcaatcaaaggcagagaagcggatttacgacatgattgatgtcttacgagagggcaacatgcgttgatattcgtatctcggccactaccagtgaggagatgtaggcggaactcgggttggtagtaataatgattagcaaattttgtaacttgtctagtttttgttaatattcttatttctagctgtgctttctgattaaatttagtttatggttaaaagagaatattaacttcgttatgagaagtaatcaaaggttggaatattcttgaaaccttaaccatggaat

SEQ ID NO: 250934 - DNA, 584 bp, Cannabis indica
tcttagatcagttgacaaaaaaccacgtcaacagtatacaattatgcataatcataacagcaaacatgcacttaaaaaaaatatgataaaaatttgtggttccaatacacacgattctaaaattattgcttattcaagaatttgtgaagtattttttttttttttgaaaactgaatttataaagtattgattgataaatttttttttaaataaaatgctcaattttaatttttggcccaaggcccccaaaatgtttggaccgatctcgaaaacagattaggcatgcgcttaggggtgttcattagatcatattaagtagatttgaactcatccgatccgatcatatctaatctaattatttattagatattagattttgtcaaccggtccaatcaaatcaaaatgactcaatcgatctgattggatccaatagatgaattgaattggattgattctaatcattaaatgcattaactgattttctattgaactaaattggatccattcaatcttttttagtgatcatttaaattaatttcattaaaaaaaataaaatataagaaaacatagtttaaaatgcaatt

SEQ ID NO: 250935 - DNA, 810 bp, Cannabis indica
attacataattatactctttctgttaggttctgtttcttttactcatgaactttgatcaataaaaaaaaaaatttctccccttttattaaaaaaaaaataattttaaaaattatatattctattaattctgagaaaattaatattttttcaaaaaaaaaaatagataaaaatattaaatttacttaaaaattttaaattatccccaaaaaaatatttcgaaattttattttatttataaacatgtatcttaaaaaatcaaactaaaattattaaaaatccaacaaataatttaaacaaattaagatttttttgaaaaaatatcaaacttttttatatttataaactcataccgtaaaaatgtaatgaaaaataattaaaaattcaataaaaatataaaatattttgaaaaaaagttcgaaattaaactaaaaaaattaggtttactaaaataaatctagatttttggaggaaaaaaaatagactcaatctagattttaaatcgcttaattatttgtcaaaatttgagggatacgatatgatagctgtcaaagtttaggcggcaaatttattaattaacaaagatacatcaacattcaaacaaaaaaataggacgaaacctaacaaaagaattaaatttctgtaaatgtaagaattcaggggtgttgaccgaggttttcggcaatcaatataataataataatttagagagctataagaacttaatagagagaattttacgtggttggggcgttaataagtcttagtccacgagtctgtatatttatgatagtatttattacagagaatgt

SEQ ID NO: 250936 - DNA, 826 bp, Cannabis indica
aaagagttttatttagggcataaaacccaacagagcttacaactaattgacccacatatgtacacatggagagaataactacattcattcatcttgccctatatacattgaagtaaccacctcgctaataccatcatgatcaaagagtactgcgaggagatttatatctatacttagcattttttctacaaagacaataaagaaagacaacttgtacttagcgaggaacaaccagcacagtcagcataaccgtttaaggataaagacaaaaaagttattgggtggtcattaaatattatcccatgtgcataaaaatgaaatgtggggaatgtccacgtttcatgagaagttgtgaatgattagatcctaaagaaaataagtgtcaccttatacacctataaatagagatagaatccagggtaaaagggacgataaatttgagagaaaaagctatatattatattcattgaggtaattgtactctgtatccagttatcatccctaataagacggactcgtggagtatgtagattttaactacaaaaccacgtaaaatatttggtttcatttcaattaattctgtagtatatttattacgaaaaagtttatatatttagttaacaaaaatctgcattaacatacccctatctgttttggaagatagaaatttttttatggtagtctatgttatagttatctgagacatccagtcaaattttgattcagaaaatttaacatgccaaaaatggtgttcaaatagtctgctgcactgcacgtatgatttatttattttatatgtgtgcgaaatagactgtttgaaccatgt

SEQ ID NO: 250937 - DNA, 1110 bp, Cannabis indica
taaatttaattaatgtaaaaaaaaaagtatatatcaacttctctctaaaattattattgtaaatcttctcattaattattacaaattacaatagacattatgcctccaaagaagaagaagacagttttttttttttagagagaagaagaagacagtttcggttaagaaggaactatccaagttgtcctacaggaaacccaaaacggcaccgttttagacagcaaagctttcaacactagtcttttaccacaacaacgacagctaatactattcctgtacaaaacgacagcgtttttgaagagaaaatttgtcaacaaagagttaaacgacaacgtttgagacagcaaagcttttcaacactcttctaccacaaaacgacaccgtttgaacaacaacaaaaacgacagtgtttggaaaagaagttgtggacaacaagaggtcaaaacgacagcgttttgaagaagaagaagaagaagaaggttaaagaagagaagaaataacattagtaataataaagaggagagtcagtagtgagagaaagtgaatttagagagagaaagagaagagagttaggtttagggttttgtgggtttggagaccagagaactcaaacaatgggcagcgagagattgaacggaactgtcaagtggttcaatgatcaaaagggttacggcttcataaccccttccgatggaaccgaagacttgttcgttcaccaatccgccatccgatccgacggtttccgaagcctcgctgacggagaaaccgtagagtttcagatcgagacggagaataatcgtaccaaggcagtcgatgtcaccggtcctaacgagggtcccgttcagggaacccgcggtggaagtggcggaggcggtggaagaggaggatctcgcggtggttatggcggtggtggtagaggcggcagaggcggtggtgatggcggttgttttaagtgcggtgaaagtggtcacatggccagggattgcttccagggaggatcaagcggtggtggaggaggaaggtacggcggtggcggcggtggtagcggcggtggtggtggtggaaactgcttcaactgtggtgggactggcattttgctcgggaatgccc

SEQ ID NO: 250938 - DNA, 1316 bp, Cannabis indica
acctgtaataagcatgcagacaaacaaatactcgggggccttttccactttagttacttccgcattaaaacacttaaaataatcttgtaaagtctcacctacgtcttgttttgtgttttccaaagtcgtatatggtagtttatacgtcatggttgcttagaagtgtgttagaaacaagtccacaaatgtctcccacgtcgagatggaatgctttgggtaactaggtgaaccagtcgtgtacgttaacctccaaggtcgcgacaacgatacgacacttagccaattggggtacctagtcaacttccataataatgttaaatttaacaagacaataaatgggattggatgtacctttatacctaagcgacttagagagcctgaagctctttaggagcctggcttgttgcacttcctcaatgaagggcgacgtttcatgcagcttatggatgctctttctctgctgctcaatcattcttacggctcgtagaaggttctcttgatcaatccctcttggtagtgtgggattattggcaggtacaacttggtttcctattggtagaatagccattgctcctatgtacatgggtaccacaacatcgttgagcacagctggtgcaagcggcaggttaacgtcaattattttgttgtttgcatttgtagggggctgtcctttgaggggcacactttaatcaaccaacaggggatcatagggttcctcctccacgttccagttccttgtagtctgggaatgagcgagaaatgctttgttgaggcagtcttgtagatcacctctatgcataaggtatctccctcctaatcttatgaacatcagtcctaacctggcgtaaacactatagaaaggttgttagtccttgaagaggagaaattagattctagattgtttgcgtcaatatgtggttgcgcataactatgtggtttgcatcgttcaggatgctcctcttcacgtagtctttccaccctccaactaggtttgtcgatttatgttaggaacaaaatggcctctacaacatgcagggtcacaaataggttaattcaagtcgatcccatctgggttgttctcacctgagtgttccctgaaattacgagtcacattagtacgttcattacgacacctagtatcattagttacaaaattatcagtgcgacattggcttgtgactcatggtggatgtcgggctcaaatttgatctcttctggtgatttttgcctgtaatgcctacatctgctcctgcatagtcatgtattacatgattgttagttggatgatgccatcagaggctaagacaggtgttatt

SEQ ID NO: 250939 - DNA, 981 bp, Cannabis indica
aaaaagttgcacgtattatgatcctgcatagtattagtcctgtatagttaaggaactatcaatcattaatgagattaataattaatagttgttgagtgcataaaaatcatattgtattatataaaaaataatagtatactatattaattattacaatcatttaaatcatattatttaatacataaaaaataactcatattagcaaagtcgatcataaaatataacagctcatagaaaaaaaaatatttttaaacttttagttttaaaaaattagtatattccaaaataagtaaaataaatgtataattttaaaagtagaaatatttttaattaggcccttaggttaggtgagctctaggcacatgcctagtttgcttatgcccaaggtcgggtatgcgtatttgcttgtattataatatttacaaagagtatggggttaatcccggtctcgaccctagccccagaccttgaactcgggcccctacctttaccatggtcttggacctatacccaaacccgaatctggaccttaacggacttgaacccgaaccccgacccaaatctaggctcgaattcggactcagaccccagaccaagacttagacccaaacccccgacctcaaccccgatcccgaacactagactcggacctggatccaaactaggacctcggactcaaacccaaacaccaagaccttgacccaaatcctggactcagacttgaatagagacccagaccccagaccctgaaccccaagtttgggtccatgttctgggtttggaacctgaggtttggaatctgggtcctagttcaagtttgggtctagatcttgattccgcgttcgagtctgaggtcttggttgtgttcgggtccaaggtctgagtttgagttcaaatttggatctagggtcaaggtcccagttcgggttcgtggtttgggtctgaggcatgttctgttatattatttataaataatataat

SEQ ID NO: 250940 - DNA, 518 bp, Cannabis indica
gggcgatcgagtcatgtggtcgatatatgaaagaatggtatggtatgatataactgaagttgtaaattacttgttgcgccaattgaaatgatatctcagtgctgagaaacgacatcttgccttccatccatgctgtcaaatttaattaataaaattttattattatgattaaaatatcttcaatttatgtaagttataaatttaattatttaatttttagataaatgaacacagatttgtcaaattgataatttctttcttagttaaatctaagattaggctaccaaatacttatattttcaaaatatatataacgtattatatgaacataattaaagacataatgtaaagtatttatattttaataaataaagtaacaagtatcaaaattaataagtgtcttcctcaattgttattttttttttttttttttttttaaccttataaagttaagattaacaactgtaacaaagttacacaaaaagggaattcttccattcaagaaagttcattgtcta

SEQ ID NO: 250941 - DNA, 1264 bp, Cannabis indica
atactgctgacttgtaaactgctgaatgttggtgaggtctttcctggtttttcagagccacaagcttcttccaatgccaacttgcatggatggaagccacgtggctccaccaatcctccttcttgagatatacactatgcacccatctcatccatagactttcctgtctatttgcaatcgcccaaacatacttagtcatggcagctctattccattcttcaacttttttaattcctaaacccccaacagatttaggagagcaaaccttgttccattcaatggaaccacctcctccatagtttgcaagacctgtccacaaaaaggatctgcaaattgcttctattctcctatataccttctttggcaagatgcaaatttgactccaataagcttggatggctagtaaaacagaatttatcaacactgttctagctacaaacgacaagttccttgtactccaattacgaattcttgcagtcattttctccacaagaatctcacaatcagccccagatattctctttgcattaattggtattcccaagtaagtaaaaggcaacatgcctcttgtgaaacccgaggctctaataatatgctcaatgtcttcttccttcatattactacaatagagagcagttttgctaggattcgggacaagaccagcagttaatgagaacagcttcaaggcttgtagcatatactccacacttttactctctcctttgcaaaagagcaatacatcatcggcaaaagccaagtgattaatcttcaattccccacacctatcatgaaaagagaaatcctctttttctcctatcttccccatgagcctagataagtattccatgcctattacaaagagaagaggcgaaatcggatctccttgtcttagccccctcctagtttcaaagaatccatgaagtgtaccattaaacatcaatgaacacctaggagttgaaatgcattgcataattagcttcacaaacttaggagggaattgcaagccatttagcatttcttcaagaaatccccattcaattgtatcataggccttttgaatatctagttttatcaagcagcttggtttatttgctttcctcccataatgacgaaccaagtcttgacaaatcataatgttgtgaccgatgaatctccctttaataaagccaccttgtgaggaagaaataagagaaggaaggacatccttaagcctggaacacagcatcttagtagcaatcttgtagataacattacaacaggctat

SEQ ID NO: 250942 - DNA, 768 bp, Cannabis indica
taagtatttttagtgtcgtcgctatctctttcacgtaacgaggttaaggcctcgtcatgaacgtatgcacttacatggtttctcatcaatacagtaaattagcagttcgtatgtttctgtctcgtgggaggctattcagccagccgagttataaacctaccctactaattatatttccaacgaattgttccatgcttagcgtacttgtcgtttgtgtgtttgagttcttcccagctcgacacgtgtcctcctctgatgtgcttaccgaactttgggtataacagtttcaatgataatactataatactatgttattgacttagtctagaaggaatttattattccagataaagataaaatgtcacaacaagatttctctaagtaccaatagtaagaggataaatacacacatgtgtatgcactaaactagactcctactgttgagtgggaccaatcaaagatgtaatcgaacaaggaacatagggagataatcaagaaagaatctctaaaagtggcctatatgttagatgataggggtgtatttagaatctatatatctacacaaactcaaaacttgatatcagagatggtgattactctaggggtggagaaattattttactagggtgtagaaacccatctataataattttgttctaccagtaaagctaaataacagagtcgcttttaaaagacactagaaagttattcaaactgaagaaagttctcgactgtttttaatgtctattcctttttttggatagaatg

SEQ ID NO: 250943 - DNA, 1375 bp, Cannabis indica
agaagggcaataaagtaatttcaatgtaaattattagtgtttggcgccttgaagactcatcatcattatgattccttgctttggtcaatacataatgcctctcttctttttattcaaactttacttttttattaattaaaaattaattaattattatttttagtttagaccagtcttaaggaccactatctaagctaattattagtatttttttcccaaaaaagacaaattatgagatcaacaacggcaacttttgcacatagaaaacaaataatgaagacaaaacatatcaacacaaaaaataaaatacaaaacttcaccaattattgcttaagacactaatgtcgttttatgttaataatttattttaaataataataaatgctaaacgacattcgtagtgtctaacatctcataagttataatttataaatatcgaatctcatataatttaatataataacttttaaagaatattactaatcaattgtgtagtgacatatctaaaggtaccagacatcactgaacatcactaatgtaaaatactctaataatattcatgggtcatgttacttgtgtttcattaataatattataaatattttattaagtgtgactatcacttttttctttctttatttactcactaccattattttgtataataaaaattaattactgtgaaatattaaaaatggtcactttgttttatttttccacaccctaaaattattgttaaaaaaaacgagatacttatcaaaaattatatatttttttttggaaaatatattaatgtttttaatcaaagagattcaacaataataatagaaagtaattcatcaaaagcattactcaaactgaaagtgcaacctctagaaaaataagagtcacgaacaacatagtgaacggttttctttacataacgtttaacaaaacaattcttaattaactttaaaaaggcaaataacaacatgcagtcaagaacttccaaaccaaaagaagaaggcatttggattgaactccttaaacaatcacaagacaatcggtttcaagttgaacatcttcccacccttttcgtttgatccgattaaaacctccttgatgttaaacatctcagcaaaagcagttgctacacaccatttactaacggaaaaggcttccaaaagcataccgaaattgtcccgagccacatcaccagccccaaaccaaccttcccactcaaagatcgcaccatgagcattcaccttaattgtattcaacaccaatttcatccaataatgctccacgtcttcatccattcccagtaggaataaaccaagggccctgtctttattgattgagcatttgtccattgattaaggccaacctctgctac

SEQ ID NO: 250944 - DNA, 1080 bp, Cannabis indica
gcatattgagtataggctgacattatggtcgatagtattgtcgtatgaacgttctagactcagtaccgtgtgggacacggggattagggttatgatcgggtgtatgggcgccaggttataacccgggttatttgtatgtttatgttatgtttttcttactgagtctgtcgactcacagtgctatctttatgtgtaggtaagggcaaggctaaagctgaggagccatgagtacgagcaggtgaagattgtacatgtcagggcggttaggcctggagcgtacgatctttgggacatcgaggcttttgctgcatagtcgttgggcgacaaacttttgtttatgtgtatagaaaacttttaaaaagtattttgtaaacgggatcccggaattttatatatgtaattctttaagtttctaattaaataagaaattttttaattattcacgtttttcattaacctcgctgatcagcaacgagctgcacaatacgtttaaaatcacgctaacacacctattctagttagggtgttacatctgacgtaacatgttttgaaataggctctagataagtgattgagtagtacttggtggtgtttatatattgtggataggcgtttttagatagattagttagccattggtagtttagtttgtgagcgcatttgtatcaggctagaatgtatcaagctttatatgttttggccctttagagaaaatgtttgtattgtattttatggagttctttcactagctaaagggttatccctttggctagttttttccttttttcatttatctttcttttttgcattgttggctttatcgtttatttgggttgagtttctcgtggtagtttctgtcgatagtttctacttatagcttatcattgtggtgttttctagttgttttgtgtttaggtagtatctctgtattacaagcggagaccttgacccttttggttggacttaattgggctctttcatgcagaatccaagttaaagaggtttcttccaattctttgtctctagtcacaactataaacaaagaaagagtctttttcaacgagctgggtgttctactag

SEQ ID NO: 250945 - DNA, 2812 bp, Cannabis indica
ttgctgaatcttgtttcgatttagttcattttgacatatggggacccttttatgtccaaagcattgaaggttatagatatttcctaactattgtggatgatcacaacaaacatacttgggtttatatgttacaatccaaatctaatgtgcaatacttaatcccacaattttataacctcatctcaactcaatttactaaaaatattaaggctgtcagatgtgataatgcaaaggagctcaatataaaatcttttatgttcaaaaaagtattcaagtgtataattcatgtgttgaaaggcctcaacaaaactcagttcttgagcgaaaacatcaacacattttaaatgttgctagggccttggcttttcaatcttccttagccttggtctatttaccatatctcataaacactgcagtataccttataaatagaacaccttctacactattgcagcatctatctccctttcaactgcttcataataagcctcctacatatgatcaccttagaaattttgggtgtcttgcctatgcttcatctctcaccagttcaagacacaaattttctcctcgtgcacatgcatgcatattcattggttatccaaatggaatgaaagcatacacacacctcgatcttgccacaaagaaaattttccattctcgagatggtgtcttttatgagcaaatttttccactcaagggctctcttaatctcaatcaatcggatactttattttcatcaaatttatccaaaccagcacctgtagttcatgattccactactgctgatattcacattcctgcaattgatcctgttgttcctcaaaaatcagcagcagctcctgatgcgattccatccccagcagtgcctactgctgacaatggaattgactctgccgttattccaaaatcagcatcagctcatgatgcagttctcacaccagcagtgcctactgttgacactggaattgcacctgctgttactcaaaaatcagcacctgctactgatgacatttttacatcagcaccatctcttcctaagatcaatttgcctattcatactacaaaggcagggcgccaaacaaccaccccaactcattttaaggactacatttgccatacctctactgcccaccccttgatcaaatatctcaattatgacaaacttagcatttcatttcgaaatgccatttttcatgcttatactgagatcgaacccaccactttcaaacaggcatcaaaatttgtccaatggttaaaagccatggattctgaattctttgcactcaagaaaaacaatacttggactgttgtatcattaccacctggttacccacccattggtaacaaatgggtctataaaattaaatacaactcccaaggtgaagttgagaggtacaaggcacgccttgttgccaaaggttacttacaaactcatggcatagattatgctgaaacttttgctccagttgctaaatttaatactctcaaattcttcttagcactggctgccctcaacaattggtcattacaccaaatggacattgataatgtttttttgcatggtgaccttgatgagaaagtttacatgacactccctaaaggatatgtccatgagggggagctcccccctaatcatgtgtgcctcttacataagagcctttatggtcttaaacaggcttctcgtcaatggtttgctaaactcagcacaacattacttaatcatggcttcaaaaaatctgcctttgaccactctctcttcatcaaacaaacttcaacaagctttcttgctcttctcgtatatgttgatgatatagtcattgctagtaccaatgattccgatgttgctgccttcaaaatatttttaaactccaagttcaaattaaaagatcttggccctctaagattcttcttaggactcgagatagcacgatcaaaagctggtatatttgtgtcccaaagaccatttgccattcaactactcactgaaactggtcttcttggatccaaagcagtgtccttacccatggatgcaaatacttctcttagcaaagacattggcccattagtaaatgatgctacttcttatcgaagcctcattggaaaacttcttttcctcaccatcactcgcccagacattgcttatgccgttaaccgactcagtcagtttgttagtgctcctcgtcaacctcacctcaaagctgcacatcgcattgttcaatacatcaaaggcactcctggtcaaggtctcatttttcactccaacaactctacttcaccctctgcagcccgacccttccaacttcaagcgtatgctgatgctgactggggttcttgcattgataccagacgttccataaccggtttctgcatcttcttaggccaatcacttatctcttggaaatcaaagaaacagtccactgtctcgaaatcctctgcagaagctgaataccggtccattgccaacaccacctgtgaaatactttggctccacaacattctatctgactttggcatctctcaaactcaaccaatagttctttactgtgacaatcaagctaccatccacatatttgaaaatgttgtcttccatgaacgtaccaagcatgttgacatcaactgccacattgttcgtgaacaagtcaacaaaaatcgaatcaaactctcttacgttccttctcgacacaacactgcagatataatgacaaaggctctcttcccaaaccagttccatacattgttgtccaagatgagtgttaccaatttatacactccatcttgtggggaagtcttagatatagctaatacattg

SEQ ID NO: 250946 - DNA, 3488 bp, Cannabis indica
gtttgctcattcttgttggagtaggtcaagtattagtgtagggactgtgtctgcttaggatttttagagttggttttctgatttgttgcggtaataggctttgagtgtgcatgaggagctagctatggtggcttgggcgatttggaaggaaaagaatgatattgtttggatggataagacttcttctacattggaggttattctgtcagccaaaatggtgcttaatcaatggaaaagtactcaagaaaggaaattggccgagtcattatttattcatgggtaaataatgtcttagggcattggactaaactatatttaaatacaattaagataaatattaatagtgcaatctttgattccaaaagtcttttcggagcaggtggggtagctcgagatggtaatggtcgtttagtggaagctttttctataaattgggttagttgtataattaatcaactcgctatggcagaaatagttgggattaaggagactttgagtttgattaagcgtaagaattaacatattattattgaaattgattgctcagttcttgttcaaacaattcatagtacgggtgcatatgtcatcttcgtttgattctttagttaattaatgattataagcttcttttagcttctttaagttttgttaaattttattttgttaaatgttctatgaataagattgcacattgtgttacttgtggctcttgttcattcataataatgctgaagcttgattgattaataaaatttcattcaatttaaaaaacaaagtaataataataacctgatctagagatattatgacaaggctggttacactttctgcatttgttcgtgttaggaattgccttcatcaagttagttattataatttattttatttatttttgttttattttttaatattaaatttataataaaatttttatcctttaaattataccttacaaaataactatcatatattataatttaactcaaaatggtaatttagttaatttaagcattccgattacatttcctaataaaataaacaagataaataactattattccatttctaaacagttttagtaaataacatattacaaatattgatttcgattattcttcatttattctgttacttttttccattaatttattctgattccgaatactgtatattaaacgtgccataaataatgtccatcaaatattaaacgacgtttgttagatagttctacacaatgattatgtgtggaaacttaataacatatacaagatacatgaactatttcactcattgataactagttttgagataaaaccataataatacgtctcaccttatattacgttctcaactacattctccacattctaacatgttgttaggacaaaacaaaacttaaatctacttgtaatgtggaaatattgaacaataaaagtgtcggttgtgatcgagtcgtatgctaacatagtgccacaacgataatgtgtggaaacttaacactacttgtaaaattatgtgctatacctattgctaattagttttgagatatttccatgaaaatgaggtgggtaataggcggggagtgctaccccttccctattctcgttaactattttgactcatctccgcatatatttcctatcggaggtggggtggtgaattcccgttgggatgggtaatctcgaactcctattaggggtgggtattcacagggtcgtcattacaataaatgtcacttttaccagcacagttcgctactgcgctggtgaaagtaacttttaccagcgcatttcgcaaactgcactgccaaagaggtcaaagttttaccagcgtacatttgcagtggctaaaatttaacttttaccagcgcatttacgagctgggaaaagttatttttgtcagcgcttttcattttatgctgacaaaagttctaataccaacattaatttgccaaccccttctgtcaacacatcacaagtaaattctattttactagcataataccaaaagtgacatttcttgtagtgcgtaattgcatttaaaatttgcatccctacatacacctcaccccacataactacatcaacatcgatcataaggactatcactattcaatccattataattatggggaataaataattacaagatcagtaaagtaagtactttaagctcaaggttacatttacaatatgtgttaacaaacttcatgcaagattacatttacaaaatgttttaacaaaattgcaagagaacatactaaaacaaactaatacaggcattatatatccatcccagtgattttctaaaaaatttcaaccaataaacaacacattaacatgatcaatatcagtgaataaacactatacaggagaaaaaaaaatgtacttttagaactaatatttaagttaatgaaaagtactgtgaggaaatattgaaggagtacataccaggtggttgttaatgatctgtaagtatactgagattagcaaaaacataatgttgttaattagttctgaagatatgttggtgcagcttttctctgtaattaagcagccttccctacatagctacctacctttctgtgtatatttcacttcacactaaaactagatgatggttggtaccaattttgtgacaattataataatggttttttttttccttataagttaattaagcataataagatcatcaatatgactaatattaattaatattataattttataattttttttggcttaataaatattgattggtaattcacatgcatcatgcaatatggcacgtgatcaaaatttaatatcacgtgatttattgttggattgagtttcattgtgccaccacccgacatggcaccaacaagtgagaaagagataatttatattgaaaagaaaagagaaccaaaaaaaagtgataggaatcttgtgttcccaatatgagatctattcttgggatgtatggtatcatttttagaccacttgttgacttgtccctcaatttagctcctagctagttgacttttttaattcaacaattattaacttagctaggtatactataattaatttgttatatctgttatttatgcctagtgcccacacagatttttccttgttattattttctcagagagaaaatataccctatcactaatgtaagttataacgtttagtaaactcccaatgatcacagtttttaataactccgttgtcccaaaatttagaaaaaacacgtggcaacgcttaagactgttccaagtggcaagggacccacctgccattactacaaaaaaaaagtttttaaaggtgttttccttaagcaattttggagaaatttataattgttgtcgtttcatgaattgctaaagtgggagttaatcgaaagtataagccctatatggcagcagttattttataataatcgtagtcttgcttaaacacgaatcaactcctatagtgtcgattattaaccgatatcctata

SEQ ID NO: 250947 - DNA, 517 bp, Cannabis indica
atattatatgtcaattataataaataatcatatatatgtagtcattaattaattatacattgttaatttgttatatttagtagctaactaacgcttatttagttacggtgtcagtttcaatatttgtcattatatagagtgttaatattattgggtattagtttattaaattaatatacatttgagaaatttaataatatattataatagtatgacatgtgaaacattaattatatattggtcactctgtagtatttgaagtcctttttagtttttatatgtgttaattaaaattctacattaacttgttaataaagcattatggtgcttaattaatacaaaaaccggcctccatattatttaaatatattgtattttattttatttcttttctatattatttttcacattcttattttttaaaataatctaaaaatataatagttttagtataccaatagtgtcaagcgccagactattaattaacggtattttataaaaattattatattatatt

SEQ ID NO: 250948 - DNA, 767 bp, Cannabis indica
gtgttctagggtttcaaagaaaaaatggccaaaactaagaatgcccaaccgtccaagaagccctctcgtggctctgcctctgcttctccgatcagcccgcctgcgccgcctgcaccagcaaccggagcttctggttcgtcttctgctccgacgaagtctgccagaaaatcgaagacccaagctcgaaaatcagtggcaaatttctcctctccacttgttggtgcctctcctattgcttcttcaacacctgggtttggtgatcatgatgaatcccattcatccgatcacacattgtcgaagtcctcttcttcgaatggtgctcctaatgtcgacaaagctttggtgaccttgcccacggtgagttctcgaacaaggtccaaggtttccactcctcaaaagctcgaagtggttcaacctaaaattgtatccaaagggaaaaaggtggtttcttcatcttcaaaggccaaaaatctcaaggagaatcccccttcggtctcatcctcggattctgaaccagaagaaactgaggaggatcatgattcagagggcttgtccgattcaagtgaagaatttgtgcccaaagatcaacctgctgttgatgattctggatccgagagtgaagaaccagagactgatcctgtcactacagagcctgttcctgtccctgctgcagttccaaagaaggacaaaggaaaaaggcccattgtctctccaaatcctgttcttcctcagaaaagaaagaggccctctggtatttctcttgataa

SEQ ID NO: 250949 - DNA, 597 bp, Cannabis indica
tgtcactatatagtgtcaaaagcttaatttgtagtagtgatcctggcaccccaaggaggcacatcgggacatacgacgagcatgctccttagtaggaatatcaaagtagggagtgatcgactctgctagccgggtcgcagtctctttgcgacgacacatataactaccaagaatactctttgtagctaggcctttcttaagcttggaaagaagggagcggggccatcagggaggctagaagaagatgcacctttcttcgacgcaatgggaggcttcttacgagagcctctcttggagacaatcccctcacgtcgaaccaccacaactgacgaaagagccgcaacatccccaacattatcactctctcctcggggatcgtagagggcccaaggggggggggagagtaggtaggatacccccgagggaggggttccgtaatcgaaactagagcccccgcaaaaagtaggacatttgtaagatcggactctttcaggtgtcgtggaattaagagatttttggaagcccttgcgtcctcagaaagctcaaaatatttttgtatggcgcttagggacttgctgctcaggacggggatctcct

SEQ ID NO: 250950 - DNA, 591 bp, Cannabis indica
cataaaacccaacagtaactaccaattagattgtgtcaaatagctgctatacatcctacttctataaatagcagcaaaaaatgtaaacggaacaacaattctgtgtatagataccatctgccaaaatttatactttattattcagagtataaatgaattgtagactctatagatttaactacaaagccacgtaaaaaatattaatctcttcttatttctttgccacattctatatatcatttattgtttatactattatggagaattaattaccaagtctcattaatgttgatgaaattctaagttaactctttgtgatagcactaatgcgatagtcaatagtaagaaacctaaaagtcacaagagaagtgagcatataaagaggaagttccgcataattagagattttgtagccaggggacacgtgctagtggagaaggtttcaaataaagaaaacctagctgatcctttctcgaggacactacctaaagcgacttttgagaactacgtaaatatggtttaatccattcacatggggtaacctaaagttttctattacaaggacgtaaaaggaaattttcgttaataagt

SEQ ID NO: 250951 - DNA, 1350 bp, Cannabis indica
aaagatcgtcgaagcaatttctttgctggaactatgcttggcacacgaaaacccattgtgatcgatgtatgtagagaagttaagaacaagaacagttgagaattaagaatggatagaagatctcaaagaaggtggaaaagctttggttatgcttgatgtggtttagcttgcaatgttatgcttatttatattagaaacaagtagaatgaggatatcttgtgttggtttgaatgagtggttgatagagtgagttaggcttatgaagtggggtagtgatatcatcacatcacatggtgttgtcttacaactcttctttattataaatttaatgaaggagacaccatgtccattgcaaggactttgatgttgctttggacctaaacatgtttattgctaacaactatctttgaatgactctgtaacatccaacttaagctcataggcattttgacgtggtttattgagaaacattatcttagcatacataatcacatgtaatgtctaaacatgaagataatgcaaaataatgattttgattgcacagttgcaaacccaatcacgtttttttttttagttttttatcactagtcaatatttaaatagttggttcattttgtcaattatcacagccaaaaaaaaaaaaagtatatcacataaattattaagaacaatttaagttaaaggttcaaggttcaattattaagaacatatatatatatataattttgaaaatgattaaataatcttataagtatttgactcaaaatatggtcaaaaagaaagaaagaaaacttaataaaaatgtagactcattctacaattaaatttaatattgaaattggcatgactccaatacttcagtgtaaagttcttcaatacattttgtccttgatctacatttttatccaacaacttataaatttgaaacaatagaataggatatgggcaagaaaataaacatcaaccaatagaattgaatgaagaaaaagtgttgtagtattgatttttatcaatcttagggacattcttaacttttggtccccaagcaaaaatatttacatagtattggcaatgtctgccttacaaaattgtaacaataatttttgttagagactgtcaataatcagtgtgtaagcaaaataattaggcattcaagcgagaaataagatcgatgaaggcatcttcattgcagggaattgtaagagctcccattgggtgatcgaatccgaattcttcttcagcttgagttagaaagtcttggaatgatggctggttcaaatatgccacagggatcacaaatctcttcattctgttttccccaacataaaccgccaaatgccctcttggaac

SEQ ID NO: 250952 - DNA, 986 bp, Cannabis indica
gctcaaagataaggcattaaaatacatataatcatgcatcaaaacccactatataccttgaaaattcagattaaatatcacacaataacaagcttctcctaagagcaaacaccatcaaaactcaagcttaataacatgagcttcaaacctattaaaccttattttctttccagcaacaatacaccaaatagaaaatgaattcaactatgagaaataccctaaaattccatctaaagctcaacaaataatatccaaaatatagacatgtaataaaggctaaaacttatcaaaatcaaagatgattctatgcattcaaggaaatacaaaccatatactccatcaatttcagcaaagaaattcaaattaaaaactgtaattactacctcaaaacttagcaagaacaacccccaaatccaagctccaagagttagcaccaattcacactaatttccaacaaaatcaaagtttggaaaaatagaattagggagagagagaggggtcggttgggctgagggtaatgagcagaaaattaactctattttcctcaaaattcatctcttttattaagtgtaaatcaagggtcaaaaagatcaaattgcccctcgggccaaaatgcacacacataaacacttaagggaaaaaatatcatttcacacataaataaacccaattaatttttagatttctcacacataaatgcaatgtcaataattaatcccaaaattgtattttggtcccaaacctagttcggcctgaaatacccggttgtgactataccgcgccaacctgtcagaacacacttgaaaaaaatacacaggcatactatataataatatagtcccataagcacgttaatgaattaattccattgtattacccttctcgtgtcaaaattactaaaatgccactggctcaccacggggtcttaacatttctaattaaatatttctcatatattaaattatataatgatataatttctcaat

SEQ ID NO: 250953 - DNA, 703 bp, Cannabis indica
actccgaagggcagttgttcaaataaaaaacacgatctgtcaaggaacaagcactacgcgcaaggaaatgcgccgccttgttagcagaacgttttacaaacttaacattaacaaaattcaagtcacttaaaaagtttctgcaatcttcaaccagtaggccaaaggatgaaggcatatgaataccactgctaattgcctgaacagcaaccaggcagtcagtctccaaagtaacctcttgccatccgttgaacttgatccaactgagcgcctccttaatgccaaaggtctcagcaatttcaagtgacactcggcctggacagcttttggaaatgccttcaattagtcttccttccgagtctcgagcaagaaagccatagccaaaacgattttccacttcaaatatagagccatcaacatttaccttaatcatattttccacaggtttagtccaatgctcattctccaaaacttgattattgtaaacaagtaaaggatccattcttctttgttgagcacataaccattgattaagattcgaccttgctgaaagaactacactcgcagctgaacttatcttttgtttccacaaaacgtcatttcttgcattccaaatctgccaagcaaccatcaaaacttcagcagccgcactgctattcgcagcaacagtaacgttaacaaaccaagtcttgaaatcagtcacatt

SEQ ID NO: 250954 - DNA, 710 bp, Cannabis indica
cttttgcattgtccgaaactttaggccaaggggcctgctgcaatgggagcccatgtgtgttgggattgtgatcagacgtcataggctgctgtgatgggggcgcatatgtgttgggattgcgatcagatggcataggctgctgcaatggggggccatatgtgttggcattgtgatagggtggtgtaggctgctgcaatgggagcccgtatgtgttgggattgtgatagggtggcgtaggctgctgcagtgggagcccgtatgtgttgggattgtgatagggtggcgtaggctgctgcagtgggagcccgtatgtgttgggattgtgataaggcggtgtaggctgctgcagtgggagcccgtatgtgttgggattgtgatggggtggcataggttgctgcaatgggaaaccatatgtattgggatagtgatagagtggcagaggctgctgcgatggggccccatacatgtagggatattgatagggcgttggaggaagttgttgtgaggcagagttatacatgttgggatagtaaggcgtcgaagaaggctgctgggatggtggtggcatagacatctgcccctgatactgagaagccgagggtccatgaatgttagagtggcttgtcaaaggctgagaagatgaaacggatccatttccaaacatgcgagacatgtgatgttgagactgcctagttgaatgcatattccca

SEQ ID NO: 250955 - DNA, 855 bp, Cannabis indica
actaaactttatggtgggtgggcagaaggtgttcgacacatgttaattttccaaatagttttcatgttgattgtgtgggtaagagtggaggtttgttgttgatgtggaatgatgattgggaggtgtcggttaaatcatattcggttggacatattgatgctttggtgcaatgtccggggaggagtttgtggcgattcactggcttttatggaaatcctaaggcaagttgtcgatctgaatcttggagattgttgtgtcggcttaaggatctttttactctcccttgggtctgtggtggtgattttaatgaaattctttctattaatgagaagaaaggaggcgctgatagaagcttatctactatgtctgattttcaacaagctctggataagtgttccttggttgatatggggtttgaaggacaatgctttacttggctaaataagaggcaaggtgtggcgcatgtacaagagcgacttgaccgttatttttgtaaccaggactggcataatttgtatccatcggttcgagttctcaatggtgacttgattcattcggatcatcgacctgtggtggcttcccttgagaatgttattaggaatcagcagaatgataggaagagatgctttcggtttgaaactcattggttgaaagatgatgattgtcacgacattgttcatcagacttggttggctccaaatgtttcatcaccgttagatagtcaagatggtattcttgatatttttggtaggtgtgcggatcagttggggcgtggaataagggtaagtttgggtcgattccccgacttgtgagagatacacagaaacagttggatgatctgttggaaattatttt

SEQ ID NO: 250956 - DNA, 1058 bp, Cannabis indica
ctcaattatacataattatctagttatggttttgctaatcctttttcttaatttcgggtattacagtctttacaccaaaattaataaagtaaaataaagaagaataaaaggacaaaaattttgtataataactctaggtaaaatctgatgcccttcacatttccaaagggctaatatttatagtgatgatttgctcctagaattaatatttacgtgcatagtatagtgggataattgattagctggagatggctgtaatgggatcatgttgaactgagattatggcatgtgagttattacgaaacgtggcacatgaattgcatatatctcggcttagactcgttgtggcgaatatcaatgagttaatgagtaaggctttttcttgaatcacatcagatgacttgggcctccaattaactagcggaacaatgttttattatgttgggtcttcatgagtttgaaatgaaatccaattgggatgcggatggactttaaccaattcatttgggctcgcattctttactttcaattgtaccaatttgtgtacgaaatctgaaaaataacacaaaattagattaagtaaaatatttcgaagttaaataattttggcaagtaaactcatcaaaatagataatttaattctaattattcatcgaattacacttaataatatgaaattttacacactgatcacaaccccaaacaagcttattgctagtctctagcaattcaagcgaaaagaatgtcaacgtgatatttttatatgtcaaaaattctaaaaatagcacaaatattcaagcaaaatgttagtaaaaagccaataaaaactatacaaaattaccttgaataaagctagagttgtgagtgtgtgcaccaaacttggaccttcttaccgcaaaccataacacatagatgctttcgaaaaatataccaagcaaaagtctcaactccattagcctcataggtgtttgaaaatatttattcatggctaaggatttcactcatggagttcgaaattgaaaggtgagcactcgaaatggatagattaatttaggaca

SEQ ID NO: 250957 - DNA, 603 bp, Cannabis indica
agtggccacaacatctttagttgattcacacttgtcaaaagtgtgtggtcctccacaaatctcacacccagttgaggcttgaacaactttagcaacttccattgtcttctacaattgcttagtgagagtagttacctgggctatcaaagcagcaatgaaatccaattcatgaataccacctctcttctttctagttgctctttcatcaaacaattggtgattgttcattgccatgtcttcaattaattcaaaagcgacagttgcacttttgttcatgaatgtgtttctagatgcagcatcaatagtggtcttggtagtaggatataaatcattataaaagtttttgaaccaccatgcactgcttcataccatggtgagggcatcttctcaatagatctttaaatcgctccaaagcttcatacaaagacttaccattattctgacaaaagttatttatttctcccctcaatttagcagcttttgaatgagggaaaaatttagataagaacttttgagtcaaatcttgccaagaaaaaattaaattttgttgtagagaattctgccagctttttgctctttccttagggagaatggaaaaagcct

SEQ ID NO: 250958 - DNA, 845 bp, Cannabis indica
aaatactattatattaatttggaaacaaattacataacagtcataagaggaggtggaatttcctccaaccaaatacattctgtatccaccgtaagagcaaacttaaccaaaaaatgtgcttcgttattagcagatctaaaaacatgtgagatctgtgctcgtgggaaattggacacaagaaagtgaacatccttaagaatggcatgaaaagccaagagagaagttgtagccttctttaaattctgaacaaccatcaaagaatttgtttctatgagatgcactggcattgaagctgtagcagtgtttttaaactccatgacacaagataagtgttgttaatcattatgaataattaaaaaattataacaccttctaagtaaacgtggctagatatacaatcctaattaaattattattattattttttattagtatcacttatatagactttagtggattgtaacttctctataactacttctatccattatttagcacaaactagtaagacaaaaagaaagatgagagttcattgtcaaaaaaaaaaaaaagaaagatgagagaaactctctcttcattagaaatctattggttatgggtaatcctttcaagaattcacatatattgttcctacttttctattttagaatataggtttgaaccatttatacaaatttatattttatgggatatgattttgttccgtgattgtactttcacggaatgcattctgtgatctacggcagccgttagataagtgagttatttgatctgacggctgaaattgatctagaggtaattagtgttaaaaagtaaaaacgtaccctgacactcatttaatgtac

SEQ ID NO: 250959 - DNA, 807 bp, Cannabis indica
aaatgagtgtttactgctaaactaaattacaaataaaactcaagttttttattttatggtattttggactggaggttgtgggatttggaaggtgtaatctaattaatagttcgtatttacaagagcatatggatagtcaggtttacagctttgagcatggattattattttttattgctttcacatagaatattactttcaacattctaacttctaatacatcaagcaattgcattcgcatatagcagaatattcttgcaatttgtgtgtttggaattttaatattttctcatgatggtacagtttagtaaaataattttgtaagatgatttcaacctaagctacaagacaaacaaactcaatctttgggtatttgattactattaacattttgggtatagcatcaatcaggtgggtttaaattgactgatgaaaataaaatgttacgttgttaaataaatttgatgaaactcacagagaataaatctatggagatttatccaaccacacaggatgatacaaaagttgtagcaacactttaccaacttctggttttcctttctcttatactacatacatactcaaaaacattgctaacaccacaaacataataatctatgtagagtgaggcaattttaatacatggggtggaacaagtgtggtggaattgaatttaaatttcattaattcttttatatgatcaagataagcttatcaacactaattcattagaattgctatatctttaatggaatccattactatatcaaacaacacccaaagtattaaatttatgaaccaaaagca

SEQ ID NO: 250960 - DNA, 948 bp, Cannabis indica
cacagagggatgagcactgatcgttttcgaaagagatgtcacaatcggaggagaacaaggcagagcgacgacatcgaaagtggtagcgtcaatggacaagatgtcttgactggagatgacggtcgaaggtggtgatgtctcactgacggaggcgacagcaatggaggagttccttgttcttggagcaatggaagaagatgaagagtcggctggggttggtgattggcagttgataccatattagagatgaaacctctcatttactgctatgtgaaacacgaaaaaataccaaaaagttatctgtaggatttacaaatgagatttatatataaggcataaaataggaatcccacaatacaattgggccaaaaatatggggcctacttatcctaatatagggtttttcttttgtgtatatataattaaacaatgataacatactaccgatagagaggggcttagtgcactgttgagaataggatttgttaatactgttaggattagttaatgttgttagttagttgctttcggttactactgtttagttactaactatcattgtaactaactttgtaagtaatctttagctttaactaatcctgcattatctgtatatatacactgatctatttatcattgaactgtaattttatttatacaatcaacactacagtacactgttattcaactctattttgttatgtctttcattctctccaaatcaacatggtatcagagctatttttattctaatgatatatgcgacatcatctgattctattcgttctaatggatccaacttgttaccaagatctggaggcaccgggtttatattgctatcaaaggtcattgtcttcttaaattctttaatccaaaaaagagatcctcccaaatttacgatagcagaggatcaaatctctgagagtttcttgaatgggatgttcaaga

SEQ ID NO: 250961 - DNA, 682 bp, Cannabis indica
aaataatttccaacacttctatcataagccattcaactttggctttggtgacgctcctcaggataggcatagagaaactacgtttgtacattatcccatctaggatcagatacctagcagcttttcttcttagtttgccagcctcatttttttcttttggtaaggcttcaatttggaggtaagttgcgataggtgtcatccatgttagggtgtcatccagcatgtcgacttcctatgagacaacaatgatgggttcttttaggaactgtatgggcaccaagtttgctttatcagttatggtactgctcgctaggcgagcaagtgcatctgttgtgccattctattcttttgggatcttcttgatcgtgtagcctttgagttgacttaacaagtctttgattttgctcaagtatgccaccattctattaccttgagctgtgtattcacccaggacttgattcccaactaattgagaattgctaaatatgtccaggtggtcagcccatacttcatgtgctaactatcaaggctttgtattcagcctcattatttgaggctttgaagccaaatttgattgctccatgtagttgttgcctctaggtgttgtaagggcaatgcctgcaccagcaatcggttagtgtagcttctgcctacatggattttccatgttagatctttgaga

SEQ ID NO: 250962 - DNA, 1150 bp, Cannabis indica
cctgacatatcattatgttatgacctataaatctcctttcaatgaatccaccctaattttgagaaactaaatcaggaagaattactttcaatgtagaacacaaaagctttgttgccattttgtacacaacattacaacaagctattcgtctaatgtctttgacagtatttagacatttcattttaggcactacagttgaactgtagaattgatctctttgagtatcttaccagattccaagaaagatgtgattgcttcatacacttcatcaccaactagttcccagttgtcctgaaagaagaagcttaagaaagcatttggcctgggagctttgtcacctggaatcccaaacacagcttgtttcaccttttccatagtgaatttctgtgtgagcatgtctgcctggttctgggataggatgtttcctctgtttattattttggtgctgactttcctcgttccttctagttgagtccccaaaaaatctctatagtaagaaacaaaggcatttgtaacttgttgaggttcatgtgctcttgtcccatcttgttgctcgagaagatttcattctacctgattctttgctttatacttgcatggaatagggatgtatttgaatctccattctgtatccatgtaattttggctctctactgcaaaaaagaagtataatctctttgcacctgcataaaacgggttctaacttcctattcagtatccagcaatgcatggtttagggtccatatgttgtcgaagcagtaatcggagtcagattttataaattgactcaactcgatggctcgctgataaagaactactagaacgtagaacatttgcgaccctactaccaataaataaatgatgtaactcgcattactgatgtaaactttaaacttcacttatgaataaagagaatcatttatattgagtaaaaataaagttttattctttaaaattactcaaggggcatttatgtatgattaaccggaattgatctggaaatacattatataatgcaaacccgtcatttcaatttttttttttttgaaattcaaaggttcacgactaaacctctttgacaaaagtggagtcgaaccgttataactccctgaccaaacctttttgaggagagaggggtcgaatcgttata

SEQ ID NO: 250963 - DNA, 509 bp, Cannabis indica
tcccattaatttgttatcaaaagtgccagcaaagctcgtaaatggtttttttattattttttttaataatttgtaatttatttatttgtaatttatttatttattttttataagtgaatgttataagcttaaaattgtttgatcagtcatgacctgaatatgatttgaagtggtttgtgattgcaattgtttcttattaatatgatttttctatgttcattggtgtttgagaagttctaattggtttgatgcaatgtaggtactcttagattcctgttgtgcaatgttagcaccctatgctcattgctcgaatagagaagcctagcaggttagccagcctcccatggtagaatttttaggcatagaatactgaactcaatcattttcagaagttttccatggcatatttttttcttatataggaagagctcaaagactttgcaaggaccctattgtgttatatagttcatatcattaaaaacaatctaattaataagataatataatac

SEQ ID NO: 250964 - DNA, 1469 bp, Cannabis indica
ctagtcggcattaaaaatgtgggatctttagcaataggagaaaacatgcatttaatatatttcaatgtttaaacattaattttcgtactccctcttcgggccagatctgtgtctccacaggagagaaggtacagccgagacaggtcgtactctcgttctccaccatataatggatcaagaagcccaagtcgaagcccagctaggggtccaagtggagctagaagtccaagccatagtcgaagcagaagccgaagcccaaagagaagccttagccgaagtccaaatcgctacccagatgaaccaaatggtagtaggtctccatctccatgagagaagcccccgatatgcttttgttgtctgatttcatgtaggtaatataaaccgagttgttgtttgtcaagccgccattgttgggattttcttaaacttgtttgtgatttctgttcagattagagaggattatgacatctgatgttagaaaatattgattctctatccttgaaagaatttgtgctgctaacgtttgatcttcatgctaaataactttgatagcatttaaggtttttgtttggtcacacttctcatgttgaccaacaaaaaaaaaaaaacaagtcatatctcatatcccttctaacctttaaaggagctgttttttttaattctttttctatttttacaaccttttttcttgtcttctatttctatactttggcttttaaactcttactttataaactgtttttctatttcagttttacggtctctttctattttcctcagttctttagtctctcactcttcttcttgaatttcagtagcgttaacagctaaagtcttctttttctctgaactttttctgtgtagcaacttttgtggtaaaaatgttattgaattttagtttcataatatctgattaaaaggtggtttagtgaccccaaaagcctaaaatggttttagtagagttttctgaattaatatctgtatttttttttttttgcaatcctaaatttccactcatactgcaagatttctaaaattgaaatccaattcccatgtatccctcaatttcaagaatttgaaacactaaatcatcattgcaaccgatattgttggcttaattagggtatgtgttcttttatcattctcattctttcttagccaaaatgggatttgtctcatttgcaccactcataattgcctaactttagaaagccctcttctattattcatttttgtaatcttaaatcgtaatgtgcattacaaattaagtcacgatcttaatggcaattcaagttgcagtccaaaatgtaacaaattgtagccttaatcgcaattcaagccgcaatttaaaatggtaaccaaatcataatttaagcaactcaagtggcaatacaaattacaaacgggaaatttcaatttttgaccctaataatacaagccatatcaaaatttatacccttccttaattt

SEQ ID NO: 250965 - DNA, 554 bp, Cannabis indica
ttcaaatcatgtgacaaattcttctaaatttttttgaatcatatataccttgtgcaggagatcaaaaagttgaaatagttgatggtaatttctcatccattgtaggaaagggtttaattaagatttctaaggggatagatcttaaatctgtcctccatgttcctaaacttacttgcaatctcttatctgtcagcaaattatctttctaattgttgtgtagtattctgtgaatctcattgtgtttttcagaaccagagttcggggaagacgattggcagggctaggattattaatggactctattattttgaagataaggcttctgaaaataaaattgctcaaagatttagtagcattagttctctttctgtatatgatcaaataatagtttggcattatagattaagccatcctagtttttttttaaaaaacatttgtttccagcactatttaaacggttaaatcctttatattttcaatgtgaaagttgtttaatggccaaaagccaacgtaaatcttatattaaatctatttatcatccttcaaaaccgttt

SEQ ID NO: 250966 - DNA, 1147 bp, Cannabis indica
gggtgtagggtgatattaatttcaccagaaggttttaagtttcactataccttgaaatttcaattcgacgcatcaaacaacaaggctgagtatgaagccttgatcgctggtttgaggatggctgaagtgttgaaagttaaaaatctcatatgtcatagtgattcacagctgagagtaaatcaagttctcggggaataccaggttaatggcttaaaaatggccaagtacgtaaagaaagttcagaagaacttggaaaagttcaattatttcaaaatcgagcaaataccaagagaacaaaactctattgtcgatgccttagcaaaactggcctcgcagaatgaattggataaatttagcttagttctggtggagattttaaatgaaccaagtatatgtgaaaaggaagatgtcgagatgatagatagctcgcccatgtggatgactctcataatcaactatctactcaatggacaacttccaactgacaaaaatgaggcacgaaaactcctgtattcagtgcctcgctacacaatagtagaaggcaaattgtataggaggggctatttaatgcctctcctacggtgtgttcttctcgtagaagcaaacgagatcatcaaggaaatccatgaaggcttttgtggggatcatgcaggttggtaaagtctatcaaaaaagattattagacaagaatattactggccaaccataaacaaggacacccgtgaatttgtcaagaagtgtgataagtgtcagagatttttgcatatacctcgcgtaccaccaacagaactgagaatgatgaccttgccttacccatttgcaatatgagggattgatttgattggggcacttcccacaggacgaggaggagccaagtacgtaatggtggctttcaatttctttacaaaatgcacggaggctgaacctctagtttccataacctgcaaaaatgttctcaactttgtggtcaaaaacataatttgtaggtttggaatacccattaagataatatctgataacaaaactcagtttgatggtcaattattcactgagtactgtgaaagtaacaagataatcaaaagcttctcatcagtatccaggccataggcgaatggacaagtggaagctgttaacaagaccttgaagg

SEQ ID NO: 250967 - DNA, 542 bp, Cannabis indica
agtgaagattaataaacttatttacaatgtatagaacaataatatatttaaaatgattcctaaacaatgtgaaattatttctaaaatatttatcatcaaacttttttcacaaaaaagctttacaaactagtaaaaatagaaagaaaattatattaaaactcacctattttattttttgctttctatcatatatatatatatatataaaatatatagattttatatgaactataataaaatattaggaagttgatattgataaaaaaacttacaaagattactgctttaatattgtcttttgttagggtgaaccgcccaagatcatctccattcttatgaaacttcaaaagaacatcaaccaaatcttcatcctttccaattttctcaaatgaaatttccttctcttttatatgctccttgatgatattttccattattcttgaagatcttagtttgatgctctcaaaaataggacgacttttccaatcaagaaatctcaaagcaggaaacacttctgcaaattcaaagcctccagctgcctc

SEQ ID NO: 250968 - DNA, 594 bp, Cannabis indica
ttcggtgtcttccgattgatgtggacactaaagatttttttttaaattaataaaaatctaaataaaatataattaaaatttaaagtaaagaatgtcttgatttggtaattaaagcatcctgcatattgatttatgaattaattaaaatttaaaaaagtagattctctacaaagtatagatgacaaataaattaattgtgtcacctcggtccaatcatgaaatacaagcatcctgcatatttgtttgtatatgcgcacacagatacacacacatgtgcaatagaaaatgatgaaccataatgttaggcctcaatatatgctcacacaacaaatcagctagagagttagtacagtttaaattcctatacgcctggttgtattgctagttagttaaaaaaaatttattcttttcagttagtggctgtgtctatataaaggctagtcctatattcccagaggtatcagttagaatatgtgttaaagaaagcgaaatactttctacagagaataccaactatctcgaaaagttgggaactttgtatactctttctttgatgttgataaaatgcctattttctaattctttttgagagct

SEQ ID NO: 250969 - DNA, 738 bp, Cannabis indica
tctaacctctaggtgaacaccctcgataattcttacaaagattcctatcgaaccaaaaagtgacacgttttagatttatcaacttgtaagtgcataaatcttatattgtagtatagatattataaaaaacaaggtcgaactcatggaaattgcgtgaaattgaaaaaatacttatttaatctaaattatttaaattctaacatagttccgaaaataatgtgatttttggtaataaaataaaataaaagatttaacagattaaaataataagtaaatgatatttttaattatatttagaggaatcattaagattttagaatccacctaactataaataaaaatatttgtgattatattgattctcataattaattaaaaattaatctaattattttataacaaaaaaagattttccttcgctttaaaattataacttctaagtataaatgtgaaacaatttaatgtaaatatagataatcaaagaatattattttttatttattcaaaaaaaaaatattattttttataaaatatagagccaagtattaataattttaactaaaaaaaattacatgatattaaatatgaaagtaatttcttaaagaagcgaatatcataaatgtatattataatattgaaaattaatataattataaatacttaattaaatgcactaagtttcattgtccaccttaataataagcgtttactgaaattttaaaaactaaatatttaaga

SEQ ID NO: 250970 - DNA, 3637 bp, Cannabis indica
gcaagaaagtattagactttgtgtgaagacattatatgcggtacggacttcctcaaaaaaattgtgtcagacaatggaattgtaaaaagcttctcgatagtcgcacacccccaaacaaatgggcaagttgaagtagtgaacaaaatgctcaaggacactctaaaaaatatcttgaaaaaagctaagggtaattggcctgaagaattacccaaggtactctagtcgtatagaactactgaaagaacggctactaggcaaacacattttgctctagcctatggctatgaagtcatgttgcccatggaactagaacctccgtcccacaaaagattaatctatgaaatctcctaatggaatcactaaacaaactttaagaatggagagatctggcaaacttaaagctacaagctcatcaacaaaaaatagctagatacttcaacaagtaagtgagataaaggaaattctttttgggagacacggtactcagaagagtgctcctcaacacaaaagacagtgtgatgggtgtgcggggaccaaattgggaagggtcgtaccaagtaactaaagttacatcatcaggagcatacaaattgcatcggtatgataaaaacatggaactgattctagtcccacagtattggaatagtgaatatctgagaaaatactaccaataaatgcaaaggtcaaaagaccacgtaattgcataatgcccaaatatcactcatgagtcatggccttctgaacagtcaccgttaaaaggtttgaaaaattagtgctaagatctgaatggccactttcaaagcacaacttattgtaaaaagcattactctttagtaatgtcttctaaacggtgttaatcatccaaaagttttttatttgctaagatcaaatcatgtaatagctttttattatcaaatatacgtaagttactttagtaacaacagattcctaccaaaaaatgaataaaataattaattatcgttcaaattataacaaatttatatatgatggcttaacaaagtttagtgatttcttttttagtcacaaaactacctacatgtgtacaaataggttcatccaagcataaggtccaaatagaaaaatatggaacacttaggttaatctgcaagtgactaagagtctaaaagcttgctcggtcatttgagggaacctacatccatacaatattagtaagttggcatcaaaaatacttaagcaaaaatttaaaatttagaaagctaagtaaatatactccgaataggcatcaaaaggctagattaaagcttgagattaaaggctgctcagtcagccatgtgtataaataagaaaataaactaactttaaaggtctcttggtcagcttacttccataaaaataaaggctcataggctgaacaaaaataataataaaaaaaggtcttgataacggatgagaattagcacattggatttgccagtttcaggtcctcgatggtcccaatgccttcttaatctatgactgacaaatcaggatcaactgcttcaacttgctcggtgtttccactagtagtttcattagtaagttgaccagttttcttttctccagctaccttagtttcctcctcggccttcatctagttacaacttttcaacaaggaatcatggtcgttcttatccatgtaatcaaacttggctttagggttttccttccataattcatagaaaagctctgtggagatctccgagtacttctcaaggtcttgggtacgacctttgatttcctcatttaaggcttcttccttcatggctacaagtgctttttcctttgccacttctaaagtcaattctttgactttctgctcaaagtctttaacactctaaattttgaatgagtgtacgtaaagtggccctctcctcgaccaactcattagtccgcctagccttagcctccaagctagcttctaatttttctaccataggcgcgttggatagctattgttccaattctttaattttcttagaagacttgaacaacttcttgttgactttgcacaaggccttttccttttctttaacttggccttgaaatttttccagtttagccttatctgtagtggactgggcggctacaactttggtctgagaatacaagtaggtgagctggagattcacttgaaagaataaacaagtgagaagatctacacggtatagtccaaacaaaaggtaagtgcaagccataaaaaattattattaacttggtatgctccttcaaaagggtggaagctaggaaatctatgggcatcatatctgaccccttcagcttctcaataagctcctactggatatgttcctaatagaagctaatcatgtcctttgccattttcatctcagaaggaattggcacgggtgttttctcttttgttttctggctcggaggagcgagaggaggctttaagttcttcttcactaggggctgaacgacaaccataggaactaagaattttttaacaacaacctcgtcttcaatgataaaggagctagggcagagctgagggatggtccttcttggacaaacctttatcgtctttcttttggactttaccggactcttttgccttgatggtctaccaaccttcctttttaacatggtattgagcttggacgacatagttgcacaaaaaaaaagtgacttagttagttttcacaaaaatatatagcaaaaggcaaggtaaaattctcaaaaaatataccctaaacctctgggggagcaccttcttggactattcctaaaggggcattgtcagccaaagagtcgacttccaacacttcctcaacaacccttttgcccttcccagcagaaacttgcacgatgggacgtgcagcctcctcaacaacctctctaattgaaataggcctcacaaccggagcttatttattcttcttacttttctttttcgactctggtatttctcatgtaggagtagaaggcacggccataggaaaatcttcatcaatcccctcagacagatacagcttgaaccaaatgaaattctccattgtggtcaacatagatatgttgcgagcccttctcaacagccaaagaatgacttgtgcccttaaccgtagactgaaagtgaaagggggatgatagtatgtcttcgtcaactggaaggacaggtggtagacctccatctcttctacactatagtaatctctgatgaacccacctattttagtgacctcattagcaatcgtgccagtaaactagggatgttctagcttagaaaggaaagtaactcgagcatttatgccccgagcaagactttaatttgaacatccaattagtgtcatggggtgatggaattccccattacctctttacatacaggatgaatagcgcagcaagatatttgatcacctttgatgtgaattgcgtagggcaaatcttatagtagtcgactatcctcctaaagtatgcatgaaggggtaggatcgcaccatgttgggcatgtggtttggaccacacatagttcgcttcccctggatcagtggcaagttttgcattgtagggaagaaaggtttccacattctcaagtaggcccttggcctgcatagtttttaatcttttctacgagaggttggatggaggaaaaacctac

SEQ ID NO: 250971 - DNA, 851 bp, Cannabis indica
acacaatctctgttcaaaactaacttaaaagattcattcttaaaagattatctttctcaaaataatttcagtagcaaagtgaaaaatggtctttgaggagtaaaattcaaacaaataatacctcaaatttacaaccacatgctgtaattagaaaaagtttccaattcattaaattaaaagagaccataacaacgttatatggagaagacgaagagcaaaagatcaccatttaacaacgaaattttattttatgcagcaaataatagttgttgtaatgctagtgaggtaactcaactataatttgtttttagaaactatttggcaaaacaaagtattttacagcaatgagactaaagtaaacactcgcaaaagaactagaaaatacctcttttactcaattttgtaaaagtgcataggactctaatggtcggcacgatagggatagcaacctaaggcaggggaaagaaagtcataattaacactcaaatagagaaataaagaatatttgttcttgagagaactatcagtatgaaatactaaaaaataattttttatatactatcaagatataattaaaccgtgtcaagtaatagaaaatcagtccctacaccgttactagagaagctcactgtcataagacaatgcttagcacattcaagtgtaacagaagatccaaacatcaaaagaccaaatgaatttttaaaatcatgcgagtcaaattaccaattaaatttcagccattttaaaatgctggaactacatggccaacacctgcagatttcagcatgaacgctacaagtgacatgaactaaccaagaaaaaaacaacgacacgacaaaccttctatttaa

SEQ ID NO: 250972 - DNA, 566 bp, Cannabis indica
atagacaggatgtggcgtaatggttttccgactgaggaatatcttcgcctgagggttaccctgaatctgaaaaaacccctgctggttggcttgcatattccaatggaggaaggggtatccctttggtgttattttaaattcgagaatctcccatgctgttgtttcaaatgtggaatgataggccatgaggagatgttctgcagaaggcgaaggagactcataacggacgactttaatcatacggttcccatgtatggcccgtggatgagatttgggtctcggataaaacattgcttcgaaagggtccaggcagaagaggcggctagagagttcgaaattctccctgaaaggggccctgagccactagaagagttgggtgaccgcccagttcagaggaatatggaagattttgagcctgggctggtgaatagtgtcatacaccaggaggctttactggaaagatcggtgggcacgtctagcggtgttgatgcggtggcggttgtcgaaagctcaatcgacccgttatcgattccggtgactgagaaggaaggtacgttgcggggtga

SEQ ID NO: 250973 - DNA, 13429 bp, Cannabis indica
acagaaaaagattgcatcatcggcataaaaaaggtgtgtaatcagcgttgcattccgagacacttttgccccattcaaatccccattattctcggctctaaggataagcttcgataagacctcgctacacaggatgaaaagaaacagagatagcgggtccccttgtcggaggcctcgtttaggattgaagggagtcaaaggggccccattaaggagcaccgaataagttaccgaggtcacacaagccatgatgatagagcatacatgatcgctgaatccgtttgttttcaaaacccgaaggaggaaggtccattccaagtggtcatacactttgctcatgtcagtttttatcgccatcaccccatgttttcctttctttctcttaaaactttgaagaacctcttgagccatgatagaacattccgctatccatctactcgggacgaaagtagactggaaaggggagactaatctatcaataacttttttcaatctgtccgtaaggatccgagagatgattttatagcagaagttacataagctaataggccgaaattgatcaaatcgagaggcattagtaaccttaggaatcaaacacaaaaatgtgtgatttaagttaggacaaatcgattgatcttcaaaaaaaccttgcaccatcttgcagacttcagccccaacaatccgccaatatttacgatagaagatgccagagaaaccatctagtcttggcgatttaagaggatgcatagcaaaaaccacacttctaatttcttcaacggtcgggcacctgctaatactagcattttcctcagccgaaacaccttctgtaaagagggaatcaaaataagcaccaatgacgggattctaagattcatacacttgcataaaattttcatacaccctaattgatttggtgtgtgtattgatgacattactataggaaattacataaagtggatcttatagttatttttaatgctaaactattatttaacgtagatagtaatgacttatatcatgcaaactatgaatttatgattagaatatacctatagagtatgacacagtggaattgactcctctcgttcaatgatctaatctttgtatcctttttattgtaaggtattatcaattactgaacatgaattttcttcaaaacccagacatgagcaccaaaaatattaacagtattcctcaatgatctaggtgttgtaataactaagagggttattttcaacattagatgacataatatatatagagcattagagtgtggccgctcgggtagaaaagagaaagaagatattttcttttcttacaagaaatttaaaaagccattaatgttgtaaaatgctcttccttctcatcctttatataggcaaccattaagcctattatacttacccattttaattaattataagtaagaagataatattagataaattagcctccatagcccaaacccaataaggcttgggctatgaattttgctctccaacttatttaagtccaacaaacttaaagggataagttgataaatatctcttttttgtatccattaatcaaatatacactcatattgtttttttttaattaaaatatacccactttttatagtagattgcctaatataccctcactctctacttaagtctaacatataatttacataacctaaagggtctaatggggacatcatccataaaagtgggtatacctaaaaaaatataaaaatagaggtaaaaattaaaacaaattaaataatttcatattttgttcactcaaaatcttgttaacataaataagacttaataattaatgatatgtattgagtacttaataataattatatactttactataaattctaatatgagatatatagaattttacgtgattttgtagttgaaatctacatactccacaagtcttttttatttataaatttcttggatacaaattatactttggcagaattttctctaaggtataaaattgatcattttatgtgtattgtgattacagatatttataggagtatgatagcaattattttaatcctatctagacaacagttatgaaatatggatattcctcacgttccatttatcttttaaaagatgagaaataaacatgtaattactttaattttaaataagtcactaaatgatgttgctcactaggatttttaatgtgtaatggacgaagtgatctatagcgatatttttctactcgggagacaatctgatggggaaatgtagtcatcatactggcagaaattccttgcccctaaagattatgcgacagggttattattggctaactttacaagaagatgcgattaattttgccaaaaaatgcaaaaaaaaaaaaaggccaaataatttccacgtatgtgcataggtcaccaagccctttaaattctatcaccagccagtggctattcggggtatggggcatagatttaattggtgagttaccaaaggaaaatggaggagttaaatatgtagtggtcgtagtagactactttaccaagtgggttgaggccgaagccttagcaacaataacagcagcaaaactatgcgagtttgtctatcaaaaattatctgtaggtttggtattccttataagttaatttctaataatagaaaacaatttgattgtaaagaaatgcagagattgtgcgatcatttagggatacaaaaggcttttgcagcagttgcatatcctcaaagtaatgggcaaactgaagcggtcaacaaaatcattaaacataccataaaaggcaatcttgaggaatgaaaaggtgtttggctaaaagactactgcaagttttgtggtcatacaacacaattcctcactccacgactggcgaaacccccatctcactttcttatgggtgcgaagccatttttccagttgaggtaggagctggatacttgagatgagatgtttttaacattgaaaacatcgaggagaacaagttactccaacttgatctaatagaagaaaagtgtgatcaggctcagatgaaaagtgcagcctatcaacagcgtacaacacgctattttaactccaaggttaaagaaaggagtttacgagtagggaatttggtgttgcgaaaagtcattcctaatacacgcaattttgtgcatgaggttttcagcgacaattggaaaggtccttacctaatcactgaaaatattggaaacgtaacataccagttattcgatctcaacgatttagtcttcgataaagcctggaacggagaacatttgaagtattattactaatagtatctacatgtatatacttagtcaattttttctaaattatctaagtataggggtatatatattctgtcattgtactattgattgttcaatgaattgctaatttttaaaaattgatatttttattttgatcatttattgtttgcatatattttggtgttgtcattgtactattgattattctgtgattcattgttttagggatagaatgtgtatgaaacaaataggctcattattaaagaggaaataattttcctttttttttatttgaggcaatcgtatgtactttaatctattgcgagtcgctttaactgtagtggcattttccccgacaaatatctttgaagatgtagatattagtctacaaagtttttttaatgagcgagctaaaccattagcttcattaattgtgggatttcatatacttgttatatgattgaacccatttatttattgctcgaaatatgagaataacatatttaagcactaagatttttttaataatcacaaaataatatttatcaaataaaaaaaatttaaatattattattaattatgataaaaaaaatgtcttaatcaataaaaactttttttaattttcttctatttcaccatgaaaattcttgaaattgattaaatcaaaattgtgaatattaattaattaaataaattaattattgagacctactattcaacaatagcctagatattatagggacaataagcctataaaatgaagctcttaataattaaatctaaaatttaatagataaatttcctaatttattaatttctcatgactcaactaaagactcaaattgtactcctaatttaacagaacgctctatatacataatatagatacactataaatcatccattatttctatcatatcaattaaaaatcctctgtagattgtctataatgagtaaggactaatattaccattttacccttcacttataatttatgcttaaaataattaatataaatgatatttcagtaaactactgtaattactaaaatgagcgctctatcatttattattttaaccaaaatcaaaggaaaccatcactccacttctaacaaatagaagttatagatgtccatatcaatgactaatacttcaactcatttacactatcaagttcccgagatagaggtatgtcttagtccgtacggtaagctggtaacgaacaaatcaaagaactcaaattatagaattagcttaaactttaattatcttaggattcagatctaatttacctatggtaaactaactaatatatatatagatttagaataaatataatagtatgattataatatctattgtactttaaatatttgtccaattcgatataaatctatatatttgagtctaatctatttttccaattccctggaaaaagcataccactagtcttagtgtaaataaaccatattgatgattatcatgtcaatataaatttagtgcactgataaatttcgtgacttaaattattcaaagcataaaattacaattatttttcattgtgaagatattactataattataaataactatatgtctagattcaatagatttaatattaagcatgtaatcacataaaataaacatgtgaactaagaaattgataaagtcataaataatttctatatctttgtttataaatagagagaatacataggaaaggttttatttaggtcacaaaccttaatagtgagatccacaaatttctcattctggatgattgatgatgtcagtagaattgtattcatgcctatgtgatgatcagggaaacctcatgtgagttgagtctagttggttggaatattccttttgggccttgggcctttcttatttagtgaggaaacgctgatcgaaatctttgggcttaaaattgcccttcaactccagtataattgaggatattgtcatcttttaaaataatagtgtttgttgtaacaaatactttcttttctttgtggctatagaatagtccaaccctactctcttcaagataagtaataaataagaaaatctcagtttggatttctagcttttcttcctttttgctaaggacatgagcagggcaacccaatattttaaaatgaggtaactagtttggctacgattacaaaattctaaaggtgtcttgggaacaaacttagatggagtaaaaattaaaaggccatttgatgtatgtaaggcatgtcatttccaacaatgtgttgttcagacgctccaacacaccattttgttgtggactttttagggcagtaagtttggatataattgcaagttcaattaaatgataattgaacttcatattcaagtattctccactactatcaacttacaagatctttaacgttttgctaaatttgtttcgcaccatagcaagaaattctttgaacttctttagagtttttgattatctgttcactacttaaagattagagtatctagagcaatcatctatgaaggtgacaaaatactcataaccactcctagcttgttgattgaatggtccatagagatttgaatgaaccatctcaaggggttgtttggctctatttccctttacaacgaagggtcgtttggtcattttgccttctaggcaggtttcacatacaggtaactcaccaaaggtgagtttgtttaaggttaaatctcttgtatatctgagaatcctatcatagtcaatatgaacaagatgcaaattttatagatatgtcaatttatcgttattggtcttttgacatttggcatatttaggtctagttattagggtttatggcatggaaagtctgtaatgatattttagttttaaatataagttgaacaattagatatgtatttgaatgttaaattctttagtaacaatttctatataaatataagaaaatttcttattcatatacgaggctgcaactttgtaatgtatatagaattgagattacgagatatgaacaaaatagtcagcaacatatttgttatccaaaattttatccacctgacgtgacatgtccacatagtcaaaactaacgatacgtagaatataacttgtcaataaaaggacaaagtcaccttacgcgacatgtgaactatcaagagttctaaagtcatcgagcaaagttgtcaataaacaaaaggagttgagtaggccatcaagaacttggctaaccatgtctggctggccaagggaagcttgtaggccagcccgatcttgagaacaagctggtgtgcaaagaatggatgtcagtccaaagaggcctgtttaacgaaggaggccacacatttgcaaggaaagttgtacaaagaagctaaacaacatggaaatggctgggcgaaccatacctggccgacccatagaaggccataggccggccaggtcttaaaaatagggctgggcgactaacttgtgcaaacgattccaaaaagctgaatgaattacgagacaagtccagcagctcatgaagatagggatattccctcatgttaatatccctattttaaagggatatctttacctatttgaatcaaaatattttgtaagccctacactataaaaagggcattagataacataaaaaggggcgaagcctaagctacacgtatgaagcctctctctcttgaaccacatactccatctatacctcctagacactaagtcaagttttttttttcataagcctttcacaagatctcatcagttctttatctgtaatacattgttctcataatcgtaatattgaagagagccatagctagaaatcataaggtttaacctatgatcttcatggtataatctcaagagtgaatacaactatgagtaggttattacttgctaattaaaggggaaaaacatctataaatctctgtctcttttactatttgttactattatttacatgtagtgataatgaataattaataaggctctactgtcaattgaccaaattctaagtttacaatttagtgccttcattgagatcattgtttgtcattctaactaatgactatggttataactaggagagccacaacctccacctcctcgggtcatcctcaagattctatgatggttgatcctagtgtttgagctcctcccactacagaaggtctcaccgatctgactaaaatcgtcaatcctacaaaccctacaaaccccataaattcagcaccactaatcctgtggatcccactaaccccgtgaatcttgatgatcagcccttacggaccagaacagattcaccaacatcacctcgaataaaaggtcctctcaacacggaacaaccttcacaatgcacagctgggactattcctcagtattatgtaggtgacataggaccaggaattggcgaaccaactatttacgaacctcatgtagacctgggagaggatattgagctggccaggctcagagaagctgtaggccaggtcacccagacaaaagaaccacacgttattggttgcaatgctttttcccaatagagacatgaattcctaaggtggatggatgaccaggaggccatcctctgggtccatcaggcagaattgaactgctgtaatagggaggccagtgatgtgctagggtagtttaatgagagaactacaggaagaggccaagattcgataagaaatcccttacaaggaaggctcattaataggttaggcaccgtctaccagcaggtagaatacagatagatagtccaactaggtccctcgaacaaaaggaaagacctcaccctgcctgaggacagacaagtcttgcttgacagaccgtacgacaagaatgatcgattcctaacacaaggcaacaattaaagatgagagaaccgaagtgactttgttccaccactgaacaataatttcaagaatgtggatccaccaacctcaagaaattggtacaatcaacctcccattaacccatagactagcctagccggccaggggaatctagctaatttggtcggccaaagaagagcaactagcctaggcctgtcggccatagccaactacctagccaagggttggccgcccaagggtatctatccgtctaggaaaatttgttcgggcaagagccaactagagtagatccatctgtgcaagcacagttggttcaactcaaaagacatgatcaaaggcttaattgatctaaatctgtctgacctacatctagacaagtgaaggggaccaccctttacaacataaattaatgcacttccccttccttagttcaaaattcctacttggaagatgtacacggggaaagaagatcccctagcacacataaaatactttgcgatccaaacagatctccaaaaagtaactagagatgtgcgatgtcaaatctttccagtaactctgttcgaggcagcccatcggtggtatttcaagctggccccaagaaggtttaactcttgggaagaattctctcgagaattctatacctagttctctgcatcaaaataaatatcttgacaactggaagatcttgtcaaaatataaaataagacaaggtgaacccttgaaagactacagtcaaaggttcatggatgaggccactgaggtcaaaggcctattagaagaaggttgacatacatccatacttagaggcatattgtcgttgagtgaattctagagagatattagaaggatctcaccaaacaacatgaaagagttccttgagcaagttgatggcttcataaagttagaaaaagctatccgccaagctcagtcaagaaggcaggctagtggtggacaggctcagggtgtcaaacaaccccatgttctgtccaacctaccggccattataggcaatactagctagccctccaataataagaataatggaggcaaatgaaacaacaatggctcatgatgaaataatggaaaaaatggaaattcaacaattcccctactccacaaaaccagaaggaatagaggtacacatacttcactctcctaacagaatcccaaagcatcttgccaactatttaggtaggccattgaacttggctagtatgagatcacttaccagtcaagagtgactataaagttccaagctcttgttgactttgtggctgaatgcataggcatatctcctaaatttttcaagattcaagagaaaattaagagccagagaagaagcaagagtaagaaattttagcatgtaagttgcatgttcaaggaagctgtactgaccatctgtccggagcagacattcccctcattacacttagggcaacaactgcacgaggcaataaacttcagtttcaaagcctataataatgaggataaatataaagctctaattgatggactcaagttagcacacaaagtgtaggaagattatcttgacatatacagtgactttctgttggtcgttaatcatatcttaggtgaatatacagctcaaggcagaaaaatgatggttaatttgagtaagattcaagacttattaagtcagctgaaaggctatactataaggcaagtttcgaagaaagatgcaatagccaatgcattgctcgactagccagtagcaccttgatagctaaggccaacttgatgcccattcagtccttaaaagaactgagaatcactattttaaaagaaatagagatgctgaatgacacccatagcggtataccttcaaacatgaatcttgcctaaaagcaagaacaaagtaaaaaaaattgggacgaaagctgctaggtatctaatcctggatgaggttatctatagaatggtttctcaatgccacttccaagatgtgtcaccaaggtagaagctgaacgactattaataaaagtgcatgaaggcttttgcgacaatcacgttgggggcaaaacctatctcaaaagatactcaggaaagggtatttttaacaaattatgaccaagaagtaaagcacaccttgctggcgaaatccctttgacaaaatagaagaaaaaaagagacgaagccaacttaaagatgcatgccattagcaaaaagttgctaggtactttaataaataggtcaaggaagttgaattcttcgtaggagacttagtgcttcgaaaagtattcctgaataccaaaggtcccgcagcaggagtgtttgggaaaaattgggaagttctgtaccaagttaccaagataacaagcgaaggtgcgtacaagcttggcatgtaccatgagaacatggaattagttcttctaccatgaaactggaatggagaacaggtcagaaagtactacgagtgaccatattatcaaaacattactctttagtaggagttcctgtacgtctcaccgtataggaattagctatgtttccatcactcttcagtggtggcccccacccggtatgctgcgcaggggtagccaaaatgatgattgaaagcagactttataattgtaagcttttattatcaaaaaaatatctgttgcacaacaacaacatatatgtaagacttataaatggataaaatactttctctttccaaattgtgtcaaataacttgctaaaactataacttttaaaagttaatcttgatttttagttcaataggcatgcaaacaggtccctccaaaaaatacacaagtaaaggtctatagtacttggtgaattgcaagtaaccaagagaccataagtctgctcgatcacttggggtgcacccacaccatatagcattaaataagcacaactaaacttgatccatatttaaagctttgataagaaaaaaaataaaagctaagaaagtgcgaatggaatactttagattagacataaaaaaagcaagttcggacacctccatgtctaacgaaagaagttaacgccagtattaaagacttcttagccagtcgcctattcaaaagtaaagagccctaaggccatacaagaacaaaaatatcatttgttagaaagtaaagggcctaaaggccatacaagaacaaaagatgaactatgtgaaatataagcataaaaacaaacaacaaagtcctcaaatgtcttcagaataataattggagttagcgggttcaaagctataccataagaactagctgtccaaagtaagtaagtcttcgtcaatctgattgtcacctcccccaaaagtcgtgtaggttcatccctacaaaaaggcatagggaggcaaacaaccagagaacttaaaaagacttagaaaaaagacgggttacttggccaaaaccttagggtaaccagacaacattaaaatacaaagttgatgattggaaaagtatcaaataaacaatcatgaatcggacagagctcctacaaagggctaagtaccagacaggggtatacaacaaatccaactcatggatagagtttctagggaggttctaagttctagacaaagttcctaggcaagatctaagtcctggacagagttcctatgtaatgaccacattattagatcatgggaattaacatataattaaggatttaaatattaatttatattatgtacttcttagtagacattagggtttattgtcaaaaataggccttgggaaaatattttctcaattacggagataggtttgaattctagatgcattgtatatgttatatatgaaattttatattttttatgttttgtgccttgtaatagtggaatgcgatgatttggccaaagaattacttagttatgagtgagtatcatagaattagcgaggctacataattagacttttagaatgtcgagatttatttagggctatgttttggaccattttacccttatctttgaggttactttgtattgaagtaaaagggtaaaaatgtcatttggtttatatttttagtgaatggattttcttgataaatcctttgtttttgtctttttattaagtggaatggttgtattatacttatgcttttcttaactgattaagattaaaacataaaataaaaaaaaataaaaaaaataatcaacctcttcactccctctctctttctagtgtcggccaagattgaacccaagataaaacaaagatttcctcatcatctttaaaccaaaaaccagaatcattaacaaggtttgtgctaggttggtggagaggaagatcaaaggtaagcctagtaacctttcttccttgaattttatagttgaaaggttaggttttcatgcaatttgtgagattttcagttctcctcgttttgggattttagagaaggttttcttgggttgtttttgagttatatatgtggttatatactgatttgaatggttatggtagagattgaactaggtttgggcttttgagttcaagtttagctctttaatggtgattttgcctccatggggttaaggatgcttttatctattaaaataggttttttagccttttttgaagttctggacagtttgggaaggttaggattcaagttcggataattttgatgtatggggaaaaatctactatgaaaatagtaggccatttctatgaaaacggcctaccctttttctaggttgaaaacccagaaagacggcctgtccttttttggggtactttttctaaaatccaatttttttagctattttctagatatgtagggtttagtcgtgctatttatagataggaatacttttagtttcaagtttagagtccccaaaagtgatttagcgtatcacttactagttttacataaattatgacttagggccttaaattatcgagttggagtttccagttagggttacctacacacttgcatttagaatcaaggtaagattagtataataattgcatatatgtatacatgtttagtgttcatgtagttgtcgttagaataacatatcactgtatcaatgacgtgtacatagagttgcagtgagatgccaacaaatatatgctaggcaaatcaatagccaatagattagcatattagggtatcagtgaagaataaatagagttgcaccgagatgccaacaaatatatgctaggcttttagatagtatgatcaattaactactaccatagtacgactagagtactgagcataggctggattcacaattagtcatacttattcgagaacgttcctagcccagttatcagattgtgagtaggtttatgggtgcctaattacggtctggatatatgtttatgt

SEQ ID NO: 250974 - DNA, 922 bp, Cannabis indica
  modified_base (28)..(28): a, c, t, g, unknown or other
ggatgccgatgaagccagacttcaatgnggggctgccgaatggaactgggagaagcaacaagaaacttctgctgccgaggaagaaggtggctgagctaactaaagatctacaggcttctgatcaacttgaaactgccattgcctccttgtcaaaagaagtgaccagcctccaggaagaaagggaggttcttcgagctgtcttccgcaggttggaagcagagaggaagtctaaggaggaggagcttaaagctgaggttgacaagtacaagtcagagggcaagcagcaaagaacataagtggggaggttcagagggaaggtaaatgccttcgagacagcgggtcttgagattttttatgacttttggaaggctaatcccaaggaaaactttgattacttggaatattccaaaggcatgtttttcgagtattgtgcttctcaggtggcttatggaggatccgaggctaccacttctacctctggccataacattgacatgccccctgctcagacaacagatcctctagctcctactagcccagaacacccatataaagagcctgggactccaaccgtctgaatacttatcttttttatcttttttatttctgtccagccataaggcctttttaaagacaaagtgagcagccaagcggtctttaaacttggaattatttttcatttttagacaatgggctgactggacagcctttaatcccagctttacgtgctttgggtatctttaatgaatttcatcctgtgtttatattcatcgtgcaagtgtgtgtattttatttttaccaaatgctttgtacaggtataggtgccccccaagtgactgagcagacttatgactcttggtcacttataattttttgcaagtatgctcttttgtctattggaggttttgggttcgaccaaacc

SEQ ID NO: 250975 - DNA, 591 bp, Cannabis indica
agccatggagaaagattttttcttttggttaggagggttgtttctgagctttttttatgtagggtctcattgaaagcaccaaactgtgaacgcagatttttgttaacgaataaagcctatttcatgattaatttgcacagaaattatagtaaataaaataagaaattaaaacacaaagctttttacgttgttttacagttaaaattgtgcatagtttatgagtcaatcttattcagattattctgatacaaactagggttcttttctctcaaggatttttcatccctttttcagtactttcttcccctatttgtagtaacatacggtggcagttaactacaatcaaatacgaatcccacaataatatttcctcaaaattgtgggctttaattacgccccacgcaaataaatacgattattattatttgaaaatcatgcagctgtgatttatccacttttactgggtcaatactgacgtaaattcagatacgctacaaggtgcatctcgttagggcatctcgctgggatagcaacaacaaccatgacagcgagctggagcttttcccatgtctttccgaggttgataatgta

SEQ ID NO: 250976 - DNA, 1505 bp, Cannabis indica
ctggtctccatcaaaaaaagacattggtcgatgattcttgaccaattgggagagacgattgaatgctcgaggactccccaaacctcgagcattccaactcataaaactcatttttctgggcgggtgtgctccgcatcacccgcctgttcaaatgtttcaacagaagagacaccaccagattcagactcaccagcacgagctcgcttaagcatggaccgcagagaaccaccaacttgagcttgaaaaggctgaaaacatggccttttaacaccagaagcacaggccagccctttccccttaacctgcagatcaggctgtaaagcctcctccacagcagcctgagaaacaccctcagcatgtcccaaacccaaacttggcattgctgcagccaaagaatgagcagcatggatcatatcaggagtaacagaggcaggggtgtcactgacaatagtggagtcagtgacaacaggttgactcacaaagagattcgggttcataggagtgggaatcataacactagaagatctcccatgagcactcaaattagaaagagaggccatttgagaattaagcagtgaggtgaaaccaacagagtgagcaaggaaagggttgcttggttggccctcatgaggaaagtcagtgatatcaagatcaactatagtaatagctggagcatgagggtactcaaaaggtagaggtttctcagatagcttctctttaccacaaagtaacctatcatagggacagtgtggtgggacaatggactcatcacatttttgtaaataagcatgacaatactttttagtatggtcaagcttaccacaataaaatcaaaagtcaggtaatcgctcatacttaaagtctagccacttagtgaactctctgcccattttaatgaaacaaatattaattcccctcctaataggcttgttaacatccaacagatatctagccctaagataaggcccagtcccatccttaagagtagtgttatccacttgaatcaaatcccctaccccagtggctataagttttgctaaatcataggatttacatctaaaggggatcccatacacctgcacccaaaagggcacataatgcatctggtcaggggtaataggaaaggaagtatcaggggctgcaaagatggtgagactttgggcaaaatgccaaggctgcccatcaaggatcctacgcttatccccttcacagagaaaagtgacaagaaaaaggccatcagagtgttcagaaatagtaacagggaaacggcattgggaggtccagattggggctagagttttaatcaatgaggctcgattaaaatgcttaacagtgcagagtttaagaagaaggctaatatcaggggaggtgtcatcttgaatttcagtcatggtatagaccatgttctcatcaggagtgagcatcaaagggggaacagtagaagaacttagggaattcatattgagcatgaagaagttttttaacccagacagagaaagaaaaac

SEQ ID NO: 250977 - DNA, 506 bp, Cannabis indica
aggggtgaaggcccgatggtaccctaaattttttttaggtttgttgttttgggggtcaggtccgatggcaccctaaaatttttcatttttgttgttttggggtcgggtccgatggcacccctaaaatttttcagttttgtttttttttggaggccgcgtccgatgggcccgatggcacccctaaaatttttcagttttgttttttttggggtcgggtccgatggggtgcccgatggaaccctaggatttttcagttttattttttgtggtgggtcgggtccattgggcccaatgagggtccgatttgggtccggtgggaccccaaaaattggttttttgtttaatttttgggatcgggcccaattttgtctgatggtagtgttcgattttgtccgattgttttcatatttattgcaatgaaagattttgggtaacttatcgatgagatttttgttctaaattgtaattgtatttttttaaatatatgtggcaggttcaactgttaa

SEQ ID NO: 250978 - DNA, 1307 bp, Cannabis indica
aaaaaaagagcaaaaaaattaataattaataacaaaagaaaaagtacaaaacttagggcatatatataaaaatagagtaccattttgaatcctgtgtctaaacttagggcatgtttgatagacaagataatatgttgtaaggatagaggcaaaacagatgaaaattgaaaaattaagacaaatttcgagaaatataatataatttatttttaacaaaaaaaaaaagagaggctagggaaaggccgccctagtatgcactcgccttaatccttccaagtttaggattattttctcgagttttttgtttaggtgtttacaaaagattaaaagttgcttgaatataagattttgattaaatagtataggaatcaaagacaaaactcaaagaataatttttttttcatccatattattctaatcaagatttataattaagtatcaagaaatctccattaaaataatttaaaaaaaaaaaaaacatagtgaattaattatatttgtcttctttgttaatattaatattttggattttgtgtttttgtaaaagttaacattggactctttaatttgttaaatagtaaattggaccatgtattttctaaaatagtattaatagtaccctaaactaattcttttgtaaaataaaacttaataataacctgatatagagatgctatgacaaatttgttacattttttctacatctattcgtgttaaaattatcttcaaaagttaaccatattatgaaaattattgaaaattgagttcaatatcctatttatactattttaaaaatactgaattcattttattatttaataaataaaaagtccaatcaacaatttttataaaatacacatccaaggtattaatccataaaaatatatgtatcttcttgatcaagtggttattaatacctaattatattaattattagataattaatatgtgtagtggctattttattctacctatcaataataataagtacgtggcaacaattctattatattttggtaaacattcatatactatatggaaatgattatatatcatgagtactcattcttatattaactaagtgggaaaattacaatgccaacattagttgaattgtatatataatttataaatatatagagtaatttatggcgtaaatatataattaagtttaatttttagtgataaataaatatttaagtttaattttttacaataataatatttaaattatattttttaaaacttctgtaagtacttgacaattaagtgtcaagttaatgatcatatgacatatttcctaatta

SEQ ID NO: 250979 - DNA, 1547 bp, Cannabis indica
ttcatttctttctctttgttctgctcttctctttctactactgcgtttgattgttgttcagcaatggcaaagatattcaataccagtgtagtccaacgccctatttctaccccattatcaccctatataatggctagtaccgagttcattttttgggcattactcaagtcttcaaagttttgtcttgctaaaagaacaatatcatcaacactaggccaattatcattccataccagtttgttttggtgataccaaattgaccaacgcaccattgaagcttcaattctcagcccttcaaaccaggttgcgaacaatactgtagcaatccctacctcagaatcccacgacaatctccaataaaatttaagcaaacgaacacctaactagcacatgtgaaataatctcagatgcctcattacaaaatggataaatagaggaaataggaacatgtttcctattgtcaattagaatcaggtaggaatgttatttaaacaagctctccataaaatattctgcactttttgaggtacttttatctgccacaactttctctaaaagccagagtttggacttacaaactatttacctttgagttgttgaagaatattgtaggcacactttactgaaaacaaacccagctctttcgtttaaccaaaaccaggaatcactttctatcgagccactaaatggtaattgccacaccagctccacagccaagaccatcactttgcaacaaaaaactaactctgttatgaaataaagtcggatgcctcgattgaatgtatcctcatcaaacagtcaatgatcatttaaaatatttgtttgatgtcccatcccaaaacaatgacgtacaccacgcttgatgtgtcccaccttttactttactacattcatggtgttgtttttctttaacaacacttactaatcagcctgatctagcctttgtgtcattttgggatgtggactcattgtcaatctcaaataatcaaattcgcaagagtaatctcaattgtaaaaatggaatgggtgatacacgagagtgaattggaaccaacagaaattgaaaatgaaatcgcagctttacaatcgttatgaacaggcctatatatgatctcattttgttttcgtgaccacctttgttaacacattgttgaaggtatttgctaattctctaaatttttcccaatcaagaatcacctttcttgaaaagtatttttaatgagcatatgagtaatttaaggttgttaaattttatttggactgtttaataatttttatataaaaattataatttattagttatgttataattaaatatgatattaaaaaattaaatctaaatctttttttttttaaatgaaaacgttgattgatagcagaacttagacctctcggtcattacaaaggatagcattagggatggtcgaggcctccacgataccggaaatagtttgagtataagcccatctagcgacattgtgagccgcaaagttacagtttctggaaataaaagaaaaattacaagataaaaacttcttagagagttg

SEQ ID NO: 250980 - DNA, 606 bp, Cannabis indica
ctaaagaataggctgtgaattgattcaacattttatcttgtaaagtagctaaagattggctaataatagctcttactaaggtcatataaaatgttgtaaacacacaatataaattatacaataatttcaaacaaagataagcaagatcaagaaataagaaagacaatcacaagcggaaaataataatcaaatacaaaagcaacacaacagatacaactactaaaatcgtagttccaaaactattgacctaaattcaattactccatgggtctcactatttctaataatctttttaggggctaaagaactcagattgaatctatacgatttattctgaaaactgaaaactaaaaacacagctaaaaatgtctcagttcacaaaaaaagcacaaaaaagctctcagaccgaattttgttcaaggctcaaaactctcccttcacttttcttagagttctctcgaaattcgacttaaaataaagagtttacatatggctggtctataagaataaactcagataaacaattaagaaagagaatgtgttataagaaaaatgaaagcttcggaattctttttaaaatgaaatggttgatagtcatgaatatct

SEQ ID NO: 250981 - DNA, 1478 bp, Cannabis indica
tcaggtttccgtgtctcgctgatcaggtggaatttcttcaatagctataccttctatcaagaagtcagcaaagcttggcccttgatggatgttcgaggatggtatgttatgtcaaactggcccagttcaatcgaccattttatcaatcttccagaagcatttggtttgataaaacttgtctcaaaggctaatcggttaacacctttatggggtgagcctagaagtatggctgaagcttacgagatgcatggactaggcataacgcgagtttttctaaagggggataccaggattttgcccctagtaagcttttacttacatagtaaatatgttatgtggtgcctgcccacttctcgcaccatagctgcactaatcgcatcatccgagatggctaaatagagaaacaacgtctcttcagttatcggtttcgccaaaactggaggcattgctagatgcctttttatattctgaaaggcctcttcgcaatcttttttccacttgaactttttattacctcgtaatatgttgaaatggcacacatttatcagttgactttgaaatgaatctgttaagtgcggccatccttcctgtcagggcttgtacttccttaggctttgtcggtgattacatgtctattaatgtcttgattttttcaggatttgcctcaataccccttgcattaactatgaatcccaaaaactttctcgaggagactccaaaggaacattttttgggtttagcttcatgttatacttttttaatattttaaagcattccgcgaaatctcaggtatgatccttacttttcatcaattttactaacataccatcgatgtaaaccttcatgtttcgccctatttggtttgcgaacatttcgtttaccaatcgctgattcgttgcctcagcgttcttcagcccgaacgccataactttataacaatagagtcccatgttggttactgttatcccgatttttgcactttgacgtggcatcacacaatggtaacacgtggaatcgactctgggtacctgctcgcaagacacagcccaaacagggcatctcatacacttgcttggatgaagtcctctaaatcgggcagtgagcaatctatgcagcacgccaaacacttagcaaattcagctttcgcatcgtgagtcatcaaagaaatccctataactttgggataagattaacagagatatggcaagctatctaaatcccacattcagtgtattttgtatttactatgcaatctttctacttatatcaattgtaactagaagggaaatacttcccctccaagcttatagccctataaaatagtgatttatactcactgggcagggggtcgaaccattttgtctaataactcatattcagagatataattgtaagagctttaagaaaaggaaccattctccttattcttaagtcaatacaaataacgaggattaggctattaccgaactgcttggggc

SEQ ID NO: 250982 - DNA, 1506 bp, Cannabis indica
cacttaacatatagcattttaaacatggcatcatatatcacataaatacttcagatgctcacatattgcctaaaatggaaagcgctaaataaatgatcacataagcagtaaagcatttactctcaacagttactacacattaagtcgagcttgtctctgacgatgattgtacatgttcggccagtctacaggaagtttaaaaaccttggtgctctgataacaaattgtaatgccctaacaattaggcactctaccaaagatgattaagaaaccctaatcgcctaaacgggattactaataaatttagcgcgagaaattaaacttttaacaaaacggaatgaaaatgaactggtaataattttaacattacaacaaaaatttacatggttcgggatcccaaaaataattcacaaaatattacaagtcttttccccttagccgacctaagcggcaaaacagagttacgaaaatttcaacactggtagacctcaacccgcttggtctagtgtggcccaaacatgtacatacatcgtcaagctcctgcactcatggctgattagaaatagatttacacttacctgcacattagagcacacgtgagccaagcccaacaagatattataattatcaataatcataaccaacacatcacataaatattaatgccatttcatatttttttgtatgacacagacctacgtgttaaactcacacgcctatttatgtctctatggcatagacctacgtgttatgctcacacatcttttacaataaggccttggaacggttcatctcggttttagttaccgagtgcaacacaattatgccttgaacacataaccctaaatttaaatatacatctgtatacatcatggcacaacaattacatattaacaatatactagcgtaataaccctaagccaataaaccactcactttagagtaataactctaatcccggtttctagtttctcatatatatcatattccatataagccccattgaacatatctctacgtgccaactactatcttaactgatgtctcgtaaatatggagattccaaatccctgggtgctcctgaccaagtgccagtaatcctagtgacaatctcgggatacacaagtagaaggttaatccctaaatccatttccaaaaattataaaattggcatttaaattaaatattttaacatagagctcgaaacagcattctaacgatataaagaacgtcccaaacggagtcccgagtcaaaagttatgacaaaaacaaaaacctaaaaaaatacaataagctgccataaaatagctgcgactactgggtttaaaaacccaagaaaatgcatccaaaaacaccaattttcatgcttaaccagcccacaatcatagtaaccttttacctagcataaatccaataattagagaagaattacacctaattcactctccaacaacaccaaaaaccagcaacacaaaatcagcccaaacacacctaaagccaaccaaa

SEQ ID NO: 250983 - DNA, 803 bp, Cannabis indica
ggatcggatcggatggtaaaatctaacatccaatatataattggatcggatctggataggacctaaaaacattggatgtgactccaatcgaacacccctagacgtaaatattcagattaccctcattttgtatcacttttcaatttaaaaaaaaaaaaaatcgcattggatcttcttatttttcaattgagaaatgctaatcttacgtgtcaatatcgctattggtccaaattaagtattggatcccatataacttaatataatagctattaggaagtatcgttagacaatcgcaacgcgacatatcgagaaggtgctaggcaccactggtgcctaatagcaatgctcttttcaattatggggacatatgaacgaattaagaacttccgttaaaaattagtgtttcataattattaaatctatcaaagtttaacacatcaattaattagtgtcgtttggtaacattttgattttttaattttttaatcacaaaatgaaagtaaaatttttgtatttaaatttttttttttttgtaaaaataaaaatgcattttgtaactatttttgtttttcaattttaaaaacagaaaacaaaagtgtgttctgtaaaattcattttcattttcatttttttttattttatttaagttcgggtataggttcgaggtcgaattcaagttcgggttagaggccgggttcagtgctaagactatgggaggatttgggtccgaacctagtcggagtccaaaatattgattaagaaaaaaaaactgtttaaaaaaatattgaaagtaattttctttt

SEQ ID NO: 250984 - DNA, 1358 bp, Cannabis indica
tgaatttaatgagaacagaaaaacaacttttaaaaaataaaaactaaagcctaattaaggtgtgaacaacccatgtaagctttggcttcattgtgctcaagaaataaacttttatttaaaattcatcataaaagaagaaaccaaagaaatgacagattagtgtctaaaaatgcctaaaaagttgagaaactaaatgcaattttaaggcatgattctatattggatcaagtctccccttttcaccaaaacttaccatttcatggcatttaactacagcttgagtaatctgttcaaatgtttcagttggcattccagtcaaacgacgaagttcactttcatttgggctaaagatatctactgaattcagcagttcctgcgggaccggagagtccactcctccagcatccaaaatgactggaactccagcacttctggcagcctaaatatcatgaaataaatacaaaacatgaaatacaaagcaatgagctttgctttgaacactgagaaaatatgatgtctcagaatacaaggaagcaagaaatagaccatagaattgaaaatcacatgcaacaaaaccaacatagttaagttcattaaactattcaaaacaaatgcagatggggaaaagaaaaaacaaaaccaaagaataattaatgatatgggaaacagaaaagagagtggacacaaaaatatggtatccaaaatgggatgaacactttcaaggatagacgttagcagaatcgtagcaaaaacacaaacaaggtcagttgttagaaaatataaatgtatcttcatgaaaataaagacataatcctgcatgtataggctgtacagtataactattcattagttacattgttaagtggaagtataacaaaatctgcatgtataataagctgtttgaaatagttgcctttgggaattaaaaaaaaaaaaatttctaatggctgctgtgtatatgaacacttaaagtacctgtcctgttctgaaaaacaggaatgcaattcattgagaaataacattgtaaacaaaagcctaggaacaaagagtttctaaatcagaaaaaagtaacactaacagtattgggaagtctaattaccaatcatttattagcatgatctccttcacagaaaggaaaaggcatatagatagaacaaactactgctaacggtgccattggatatctagattcaaagaataaaggacatagattacaacagtaaaacagttttgtggctcttttcataatgctacaaaactgtgtgagagagggctgagtacaccattaacattttcagaattcatattagcttcaaactcaaactcataattctagccaattggagaatttttccagc

SEQ ID NO: 250985 - DNA, 870 bp, Cannabis indica
taaattaaaataaaacatcaagtaaaccattcatttttcaaaggaaaaattaaacaatacgaggtgttatatcgagtcttgtataatttaatttaaaaattttaaaaaaataacttctaaatacgtaattgtaaaatattacttataaacactgctaatactcaataataatactctaccaaaaaaaatctttaacttattccatggatgcaggttaggtgataggtagttaaaatgtaaaagccattgactaataaacttgtgattatctatataatacatatatttatttgtgtatgattgtgaggtcacatgattcatattattatcccaacttacatgctttttcttgtaaagttaagattccgtcttctctctaattaggagagagtattatatatcttgcttatatatacgtgtatatatatacagagggccagctctaagtatagataagttcgcgcttaggatttactcattttatgggtccaaaataaaaaatcttttaatatatatatttttaataaattttaaaaatatcatttatctttatagtaagagtcaaaaaataaattttgcctatggcctattttaactcaaaataaatcggccctgtatactcgtacatgtcatgcagtgtagtagtagggaaatatttactatcatcttttattttttgggtcaaaagtttgaatcccactataatatctcattgtgaagaattatgctttgtcttttggaaagctaacttattgggggtagtgtcatctttaatagaatagaaattcatcatgacgtccataatgataatctaattaagactggataagatctctataattagaacgtgatcttcgaaattatcaaagc

SEQ ID NO: 250986 - DNA, 1135 bp, Cannabis indica
cacaagtgcggattttagatttttcaatccaatccaatccgcacaaatgcggatacccgcattttgcggattgaattggattagatcgtacagattggattggatcggatactttgtgaacacccctaattaagtgggtctagaaaggcgttaatagacttagatagcctttggagcaagaggtgtagacttccttaaaacagggttatataaacaaactgggaatggacattctacttcaatctggtttgacccatgggtccctaaggggatcacaactccgattctcattaaagattatagaaacttattaatagaagctattaagaacacaacaaagaaaatgaattgagttacaagacttgcaaaagcttagcttatctttgagctcaaggcctttatatatagagaaggtaatacatgattgagagttgttacgacaactattctgttactaactttctaaactaaaacaaacagaggatgaaacaaagtgaaaaatacataattgtttattctgtattatccccctcaaacgaaagggtgtagaatacacgttaaatttgaaaaatctattttgaattggcaaaatagtaatttatttttggaataaataattttttttaaaaaaaaatcaattaaatagggaaaagataaaaagttttaaaacaaaatttatcaagacaatatttgtttagataaaagttgataggacaaaagacaccatccagtaggccctatactttatctttttgggttgattaattatttaattaatttaattggataaatatttaaatttaaaaagtggttatagatatttcaaaattgttgagatattttctcaagtagttgagagattctctcataaatatcagtaaccgaatatattttcttggagcttttctacttcttttaatgcatgtgtgcactctttgtctagtagttttcttttctgctatacgggaacaaaattgggatcaatgttgaggacatgagaaattacggttggatcgatcccgaccatgtcttcgtgcggtaaggaaaaaatgtcaaggtttgctctgacaaattttatcaaagtagattttatttcgagaaacaaacctttcccaattttgagcttcctggtcgg

SEQ ID NO: 250987 - DNA, 694 bp, Cannabis indica
catggaggtcaccatgtaagaagacattattgacatctaattggtggagagtccagtcattcatggcagcaaaatatcaatagatcttttatttaaatagttagttatcctttaaattaaataattatccaataatatatttaattaataattaaaagataatttacttaatttaatttaaattatttaactcaataaaataattaaactaaattaatcatgagcatttatatgtcactctacatgtgtagaatagttctacacctgtgagtcatattttaaagtccaaaattagtttctcaattttgtcacaaataattattatttattctgccaataaataataatagattaattctcattaatatctcatttcacaaggattaaaataaatattattttctctaaaataatacattttctctttgatttctttctttaatattatttaactaattaatataattttatccaataaaattaaatagttaaatactattaaatatacaatttataattgccataattaattaaaataataatttcacaaattactattttgcccttaaaaatttatttcccataaaaattaattctaactcgaaatccatttctcaaataaaaaatttccatgtacagtgctgtataaatgtgactccgtgaccatgaacctatatttcaaagctcaaataaa

SEQ ID NO: 250988 - DNA, 845 bp, Cannabis indica
agaaacaagattagtctcttatgtgttactttatggcatataaaaatacatatgaaaagcttaatatgttattgccatttagtcttgatgtgatggttcaatagcgctaatgagagcagatgattattataagttttcttgcaggactttcatttgaatttgactctacaaagtcataagttttttctggttttgatgtctcctctttacaagatgtgtttactcgtgttcttcgtacaaaaactacctcttcagttccttttaatagcgccttggtgtgtcgtaacaattctgcactaggaaaaaactctaccccaagtggatacaaaggaagtaattcacaaggaccttatacttgaataccaaatttcgagaatgtgcaactattgtaagaaaccaggccgcatctaacaaatcaacaaaaacattctgctaatattgcaagcactagtgatgcatctaacaaatgagtccttatttctcttgatgaatttgccaagttctcgaggtattaggagtcatttaagtgttcatctccttctgtcactgcgatagctaattcaggtaaccctaatacatgccttctttccacatcctcaaagtgggtcattgattctagtactacagatcatatgacaggtaattccagtctcttttttacttttcaatctcatagtcccacttctactattactttagctaattgatcaccatctagtagcctgtttgttcttgatccacttccattagcttctattgtttgtccgagtgttgcttccacttttgaggctcattgttgtttgggtcatccatctatttctctgtttaagaaactttgaatggag

SEQ ID NO: 250989 - DNA, 555 bp, Cannabis indica
ttttaggttaaattttcttaggaatataagtaatgtattgtgtgtaatgtaataaaaaaatatattcgcgacaaaactacttaaactctataataagtgacatttaatcacacaaattgattttttgttaataaaacccttcaaaccttacttttgatgttatttacccattccgttcaaaaagttttgttaattgtcacggtggacatgccacagtgtacactacatggtcaatttttagtgggcgacacaacgacaaccctctaaatctcacttttgttagctatttatcccttcaaatcaaaatgttctaataagtgttacgttgaacatgccagccaaactacttgaatcttatggagaagggtaaatggcggcaaaaccctcaatactttcgttttagtttcattaaaccccaaaacccaaatttctgcgggtaaacccccaaaaccagtaaactattagcaatttaacacttccgtccaaatttagctgttaactgtcaggttggattgtccacgtggacacaatatacacgtggcccaattttattgg

SEQ ID NO: 250990 - DNA, 524 bp, Cannabis indica
tggcatgcaaaaggtgttgagtgaaatactcaaaggcaaaatccaagcctcacactttttgtacaaagcccccagcaagagcacggggtcctaactgcgcctattggtggaggtaactccatgtcatcaacagataacacccctaaggatgagagtggaaaagggcccatccttagacaaggaccccataggtcatacaagacaagattgtaatgagggaaacatctcgtgatcttataaagggacttcaccgaaagagtctcacgatgggggcactgtgcctgcacccccctttcaagagaaaagcaaacgaaaggttttatccttcaaccatggtgggaagccacacaacgatgggattgttggggtgtatgccttaaaaacaagtattcaatggataatatattatagaatatatgaaatgcaattataagataaatgaatacattaattatataagtataattaacaaatatctaaaaatttcttatttatatggagatggtataatcttgtaaggtcat

SEQ ID NO: 250991 - DNA, 517 bp, Cannabis indica
atggtggacgaggaggtcctacgagtttggattgaggctatagactcgacgatgaacgagtgactcgttttgacacagacggagggggtgacgacagagaacgacaagcctttttagacagtggaggagccttcccttgaaacgtatgaggtttctggatgattggccatgaaggcggggacggagtcgacacaggactcgaattgtgagtagaaccaccaacctccgattggtaaaggacaatgtcacgacagggattatacatattagtctcgagtgtagattcaactgcaggatcaacagtagttgacacagatggaacgaacatggcaatatggggtactacaatgggagtggtattctccatttcagagagagttgtgaatgttgccagacttaggttttctaagagtaaagtgaaagagtgagactattcactttccttaggccttaaatataggctccctgacaccagctgaccaggcaaagaaaactaatgatgatttttttaaaaaaa

SEQ ID NO: 250992 - DNA, 741 bp, Cannabis indica
acacacatctaagactcatatatgcatccctatatattaagtttttttttttaaaaaaaacacaaaatacttaattttgatttcaattatattaaatatattaattattgctgattttatctctctaagagtaggattgacatcaattagattatttatgatctttattcttgaatataaattattttaaaattttttatattatttgttggattgttagaatttggagaataagatgaatgaggttccatcccaaaatcaattggcagtggaaggagtagccttttcattttatatatcacaatttatttctacacatgcattaacaatgtgagactaacttgaatttgatatcacaagtgtattgatatatattttttttttaatataatgcaaataggatgtaattgatgatgaatattattattactattatatatgcatataatacgatgtgataatcaatttgtgtagaataaataaatttcatagcaattttctaaaaatgataaaaaagacactacaatattcaataattaattttagaatcatttatggattagaaagaaaataaaaaattattattggaatcaaatatatataattcaataaaagtcaatatttatataagttacctatttatttgtattttttaaaagaataaattatttattgtatttaatatttttattcataatattaactattagatcaacatccaaagattctaaactaattaat

SEQ ID NO: 250993 - DNA, 502 bp, Cannabis indica
taatttctatttttagtttaaacatggatttgattgttgaagttatgaactaatttctcaatttaggaatatgatgaatattgattaattttattacaatttgttaatgtttctttttgaatcttgtgatttgttcatatttgtgttaatacatgttttagattgactacttttaacatgatttatgatcctaatataaaatctgagaagtgaatataaggaatgctctaattgaacaaacatcagtttttatgtaaaagagagtattcacatagcttgtgtgacctttagattgttttttaatgcaaactatatgttattctatctcagagatgcaatagatgatgtatagtttaggaccttaatgatctttgaacagttagggttatttttataatctgtcaacacttaaagaaaaaagactagtaaattgcatttaacaattgagtaaattgattcaacaagattcatattcctcatctctcatccatatttgaacaac

SEQ ID NO: 250994 - DNA, 1586 bp, Cannabis indica
aaaaaaataatatattttaagaaaaatactaattagtattattggagcataaaccttatatcattacccgtgtaaatagtgatatatcacatccttaactaaattacatcaatcatgtcgtttgctagacactatcgtaaaacaaagtgaataaaaaatgaatgatttcataaatacaccaaaatcgtaaattgttttacattttgatagatttaatgtttttttttacatttatacggatttatttaatttttttataaaaatataaaatgttattttttaaaaaatgttcttccttcgtcacttactcttttgcattcccctttgtttgtgtgagaaatactactactgaacgtggtagtttccccttccaatccttcctccaaaattgcctttcctttatcactattgttggtcttccctaatcgtcgatctctttctttccaccagctcctttatataatattttctctttttatcgggttgagtcatgttcttctccactaccgtcaaaatctatagacttgtgtccattatcaccaagacagcgcatagcatttgtattatatttaatggtagtgattgtgccactcttattaatgataggcccaatcttatccaccaaggaactttgcatgtgattggcatgtagtcatgtgaatcgttagttgtgtacccattgatttcagaccatccacttcccttctctcccacgatggagttagtactaggggaaaccgtcgcttcttcgatcaccatcgcttcttcgatcacgctctctaatcgagaagccatcctcaccaagtcaattctgcctttgtgcgtggttgtctccaccccctagtgcgcttggtcttgtgaatgtgccatgatgcaattcgaaattagatcatcttcacttagccatgttccatatcgtggcattagacccccattaccatcatcttccattaaatgttcccctacaaactctagttgttcatgatcccattttttacaactaaagcatagcacaaacaaacactcgaattttagttgtacccaattattaaccctctcccactttaataaatcagccaacaaagatacaaggatcatactccttcacatgggattgtaatgctctcaatgtccaggggttcccaattccttggacattccaactgatatatttattgctctcggcggccttgcattgcaaggttcaccgctctcttagaattagccagcaatgagaaattcgataattgataaataccaaccgtttgattgaaacccactatccccaccaccccatcagtagaaatatcattcccaaatacaaaaccagagttctgatcatataatacctttgcttattcctgtcataacagtagtattctttgattggcctcgagctctgttattgatggagatgttcttccttcgccccttaccctttgcacctcccctttgtttgtgtgaaaaataccactattgaacgtggtggtttccccttccaatccttcctctaaaattgcctttcctttatcaccatcgctggtcttccctaatcgtcgatctgtttcttccaccagctccttcgt

SEQ ID NO: 250995 - DNA, 587 bp, Cannabis indica
tagctttagtatttttagaaagtatattcttatcattttcatcatatgcctcataagtcttgattacttctacaccatttataacatgtttagcaatgtaaggaccactagacacaatatgccacaaatcatagtgtatagattgaacgtaagtttccatactaattttccaataagggaaatgtactccgttgaagtatggtgctctatttgtgctaaaaccttctaacatgttattttctgaattacttggaaacgccatgctctagattatgaaacctaatcaaataatttgagcccttgctctgatacaaattgttagcccaagttatgtttccaagtggggagtgaattagaaatttaaaataatttcggtatattaaaacttttaacacaaaattaagtaattaaacacttaatcaaataaatgtaagtaatatattataacaaataattaaacttgtaaaataaagagtttaagggttagaaattgcaaactctcgatttttacaaggttcggtagaaccaagccacctaggtccttggtcttcaaagctattggacctagctttgagttccaatatcga

SEQ ID NO: 250996 - DNA, 903 bp, Cannabis indica
gattgactttgagtaaatgacttcttgagttattttatttaactggtttttgtgtgtgagtttttatcttagttgctttacggaactagtttttttgtctcaaatttttaactagttgataaatataaccggtttctttatattatatttgagttattgtgtgttattatttgtgtttatttattttgttatggaaccggttcttttcatatttatgtctcaatattttttggaattgatccccacttttttcttaaaaaaattataaccagttttatgagatattatgtgttatgaggtattttattgtggaactagttttgtttttaattatgtttcagtattttaggaactgattttctctttattttttaattgtagtcggtttgaattattgcatgttacttgtttgtattcattatgttatataaccggatttattttatttataatctgtttgagttatttactactatttatttttattcattataacactgttatagaaccgattctatttttattataactaatttgagttattgtgtattacttatttttattcattatgttacagaaccaatcatatttcaattataactggttgagttattttgtgtcatttatttttattcaatatgttatagaaccgattatatttttatttatatttgagacatctacttctaatgacttttccagtaacttttccgatgatggtgacttttaggaaaaattttcggtgacgatgactttttcagtgatttttccagcgacaataacttttctggtactagcgattttttcgatgacttatctggaaaaacttattattattttacaaatgtgagattttcactcttttttttttacaaaaatataaaataaaaaatccatataaat

SEQ ID NO: 250997 - DNA, 620 bp, Cannabis indica
ttaagagtttgccttctactaataaaaccatctacagtgaaacctctatataagtgtactatgtataacaataatctttacttattataaaaaaaaaaaaaaaaaaagttgtaaccaacttaggcaattataaagagtacttctaaatagtaactagttataattaggcaatcaaatgttgttttcaatcgctacccaatgagaataattatagatgaaaatgttatgaaaaaaataaaaaattaattctttcaagagctctatagggtaaatcaatgtgtgaactcttttacataaaatttttcaaataataattattagggagtttttactgttatttttattaaagataaatttgaattctttaatactaatatctccatttagtataacccctcaattaattttcttagttttcttatatagaggatttactttactgtaaacagataaaatccaatcagacaatgaccaaaactgcatagaactatgtcctattgcaaaaaaaaaaaaaaaacaaaaaaaaaaaccaagagaggtcaaggtcatgaagactatatcaatttcatacaatacaagacaggaataacaacaccctaacctatagcaaggcagaccag

SEQ ID NO: 250998 - DNA, 1146 bp, Cannabis indica
cttcagttcaggtctccaatattttttccacaagggtttatttcagaagaacgaaagttattagtttgatcatcttcagaggcaaaacaaaaacatatagaacatcctaaagtgtcaacagtttccaaattttcaggaaaatacagcattttgcagtactaaatccatagctcactcatcctcatcatcaaattaatgttcatttctaatcctagaaaagaagttgaaaattataaaactaagcttagcctcttcagttcaggtctccaatatttttccgcatggaatatctcggaagaacgaaagttattagtttgatcatccccagaggcactaccatattaaaacctttttacacttgaatccccaaataaaattcaaatctgactggcactaaaatcgagctcaagaacaactaagtgaagaaacactctgcaataacccaattccaaaaacaatcagaaaaccaaaagaaacaattcaaatctaaagaaaaccaagaatttgcaaacacatccaacattacaatcgttccaaatcactagagcacacaaatcaacagaaaacccctaaaatcaagaaatgaaaaatacaacaattcaaagagagagaaagagctgtataccttgcggaactcaattcgaagagtctgagctgagttgagtagggtagagatgagatctacaatttgaaaatggttgggagcgaagactacttggctttatagtgtttgaacacaaaaccctaacctttacgatggtgcagtaggggttttccgccgactcctctaaattcgattttgggcctaagagtcggcccattagtgtgtgggctgaaattgcataaagggttgagccctattcgaacaaagtaagagatgtttttcataaatgacaaaacaattataaaaatatggatatacaacagtttcctcaacaattttatagatttgaactctattttaaaaatgtaagtgtaattaaaagaaattagtaaaaatgtaaaacaaaaacagaaattgtaaaaaagaaaatatcattttagacattttgtgtaaaaagcccaacaagtaaagaaatttcctttgttttctattcaattataattttaggttagcacttccagggaaattacattgtatactca

SEQ ID NO: 250999 - DNA, 514 bp, Cannabis indica
gataggctaggtcctaggataagcgaaaatgcacaggaacaagaacttaagtgattttgttccacctctgaacaataattctagataggtggacccaccaaacccaagcaattggtacgaccaacctcctattaacccacagactggcctggccagctaggggattctggccagtttggtcggctaaaggagggtaaccggcctaggactgtccaatctagggctggccggtcaaagccaattgcccaatctatggctggtcatattttaccaaaatacattagtactcgctagataagtaatataatacaataaaaagaaactctgtttaataaaatcttgtgttttactaattattacaaccacaagttttgattcaatgaattatattatttcatgttagagattttattacaatggaagataaattaaatatatgtacaactcaattgtaaaataatacaaggatcaacaaagagattaaataaatgttacaacacataatatacaatat

SEQ ID NO: 251000 - DNA, 915 bp, Cannabis indica
ggggtgattgtgacagttagtagtctcgtgattcgtaaggggaaatactaggtaagttgtgcaatcccacaccgtctgggaaaggtcaagtgggatgattctaagactatataagtatggaactacacaattgaagagagcataaatggattgattggtactacctatatcaataaggtgcatcttattttttggtagcccatcacaaaagaactccacggttaagtgtgcttaacctggggtaaactcaggatgggtgacctcatggaaagtattctcaggaagtgtgcgagtgaggacaaagcatgctggaaacactcgtgttagtttgtatggttagtcatcattccatgaagcatccaaagtgatgtactcgtgtataagagccatcatttagtgggtgtaagggcctaatagagacttaaagcggggacgttaggttgaagatcgaagccagctcaataggagttgatcttttcgtttccaggaggtgaattctggattaacagttccattgacaagagttcaaattggggccacacaagtgagaagaatgtcattgaggccatgaccgatgacagtggggattacttgtgatttccacacaagaaagtttgttcgatctaatcgaacagtgagagatgaattcagagaattctgaaacagcaaccgttgctgaattggcggagtagtcggagttgcatcagcagtggtgtgagcagtaggtttaaggtgacgagcatccatgattgacgttggtcaagagcttcctaataccatataaaattagaggaacttatctctgcaagtctaaaaggacacaagaagagattgaatcacaagacttgtaaaagttaagcaagtcttgaatggaggtttgtatttatagtgcgatgtttacagagttagttacag

SEQ ID NO: 251001 - DNA, 840 bp, Cannabis indica
tcttggttcaggtttgggtccggttctggatccgggtttgagacctggtctaagtcccagatccagaagccgactacaggtcaggtccaagccccaagtccagatctagatcccggcctcggttcctgttcttgttccactttgggtccaggttctagtcaaggacccggcttgggtgccgatctttgtttgggtcttggactggatctaagtcgagttctaattcgggtctgggtttgggtcttggtcccgttcttgttcctattccaaggtcctggtccggttatggttcaatttctaattttgattcctggatctataaccaattcttggtctgtgttagggtcctagttcgagtccctgatcccacgaccgactgcaggtctagtccaagccctgattctcggatcgagtcaagattcatatcctagtcatgtgtcccggtcttattccagttaaggtcctaggtcctggtccatgtcccaagtctaggtccaagttcgagtctcacaccgagactggggttcagtactggtccccagtcctgttccatgttcgagtctaggttcgggtctgtgttcgggtctcgactctcgatccatgtttcgatccaagtctgggtcccagttcgggtatgggtgtgggtctggtctgggtttgagtccggttaccattctaagtctaggtccaggtcgtggtctcggtcctattttggggtccaatttcgcttctgattctagttctagtttcgtgtcacggaataaggatttgggtctacgtttgggtctgggtctgggttcgggtctaggtcttggttcggttctgagtcaaggtgtgggt

SEQ ID NO: 251002 - DNA, 833 bp, Cannabis indica
ctcctagtgagtctactacttgaaacagtacgtacacttgcgtgtgcaaaatatcgcaacagtagtctcagctgtagagttgcagaataaacaatggctctgaactagaacacgcttaatttgaagcttaacacgggttgccaagcaatctgttaagactcgccaagcaaagtggaggactttaggagggactttaatcttccaaaaattcttccacaagttcgaactatcatccatagaccagttacccttcataacttgcaggtgcttataagcacttttcaccgagtagaaaccagttggttctttgctccaataccaaacatcttcgatggaattgctattaagtgggatatggagtatgatctgtgcctctcttgagttgaaaagatcgtatatcacttcagagtcccattctttaacatcagtcttcattagttgatagactttgcaagtctgcagagaaggatgatcagagttaacataagaagacgtatctgatgggagccaaggagtagtgaggacattagtttctagacccgaaccaatacgaattctagcacctgctttgattagttcttgtgactcaaagatgctcttccaaatgaagcttaggttgcttccaagtgaggaagtaaggaaatttccttgaggataatatctcgctttatacacacgtcccaaaagagtatgatcattaagaagaaggcgccagccttgtttgccgagtaaggaaagattgtaatcatgaaggctacaaaatcccattcctccatcgtttttactcttcgtaagcctcttccaactcatccaggtgatgccacgggtgtctt

SEQ ID NO: 251003 - DNA, 684 bp, Cannabis indica
aaaactgcaacttcccattcaattttcctttcaacgtccctgtttctcaagttcttgtagacccctttaacttacatgaccaagtttaaggtgccaaagactggtttgatcaatctcttgatctattatggcaggtgcaacattccccatcacagtcttggcaattaaagaatatagaccattctttaattctcctttcatcacaggtgtgaaatcctttgagatcacaagggttccaccttccaccttgatgatgcaaccaatgatgtccaacatacctattgacagcaggtttctcttcaaattaggtacatatctgacattcttaagtgtccttgatatgcactcaaacatagtgatcatgacagatccaacgccaagcacactgcaagctttataatttcccaaaatgacagtcccacctgagatcttcttgagatcactgaacattttagctttgggaaacatgtggaatgaacaacccgagtccaagatccactcttcttcacatgatcttcttgaaacaactaatacatcagcagacatctaatctacgcaagcaatgtcagcttctccatgtttcttgcctttttctttggcaagctttgctttgaatgccttgcactcactcctaaaatgcccttcttttctacaataaaaacatttctttcctgatttgaactt

SEQ ID NO: 251004 - DNA, 1739 bp, Cannabis indica
taatcatctcgaacagtcattcctggtattggaaaaatataatatgaaactcaaccctgccaagtgttcttttggtgtttccttgggtagatttctaggatacttggtgacaagagttaaagcaaacccagatcaaatgcgctccatacaaaacattcaatcaccaaaatcaatcaaggacatccaacgccttactgggaggatagcaatactcaaccgttttattttaaaatcttctgaacgatgtcacttgttcttctcaacactgagaaaaacaaaggactttaagtggtcaaaggaacatgaagatgcacttagacaacttaaagaatatctcgcctgacctccgctcttagaaaaacctaaagatggagaagcactttacatatacctagcagtctctgaaacagcagtcagtgctgtgctaatcagagaagaggaaggcaacaacttgtctactatgtctcaaagactcttctagatgcagaaacaagatacaaccaacttgagaaactggtactagcacttatcacaacaggacgcaaactcagaccatattttcaatgccaccctattattgtgttgacacaatatccactttgtagcatcctacacaagtcggagctttcaggaagactcaccaagtgggcagtagaactcagtgaatatgacatcacattccaaccaaaaacaacaatcaaatcttaggtattagctgactttattgctgacttttccagtgacatgcaggtccaagcagtaaaagagttgttgtgcttgaaagagcaatctaactctaagtggaggttgtcagtagatggctcaagcaatagcagaggatgtggcttagacattgttctcacctcaccctaaggagatgtcattcaatgagcaatcaagtgtgacttcaaggcaacgaataatgaaaatgagtacgaagtgctccttactaggcttgacctcgccaaagagatgaatatcaaagctcttgagatcatgtcggactcccactcatagtcaaccaattcaatggcacataccaggccaaggactcaaagatggtgacgtacctccaagctgttaaagaaagactgtcgagctttactgaaatgtcaattaatcaagtatcaaggatcgacaatagtcatgaaaatgcacttgtgaacctagggtcagcaattcaaacaaagagtggagtcacagttccagtcatctacatacaatggccagcagtttagaagcctcaagaagaagtcaaggatgtgtcagagaacattagctggatgacacccataagtcagtatttggctgatggaaaactcccgcaagataggagtcaatctcgaaagatcacagccaaagcagtaagattcactctttatggcagcaatttgtacaaatggtcatatttcgggcccttacttaggtgtctcaatccaacagaggctcattatgttcttactgaattacatgaaggtgcgtgcggtaaccacttaggttcaagaagtctcggtaatagggcacttactaccagttactattggccaaccatgagagccgattccctcagctttgtgctgaaatgtgatagatgccaacggttcacccaagtttcacatatgccaccagaaaagcttcattcacttctagcatcctagcctttcatgaagtggggaatggacatagtagggaagatgttgaatgctccaggacaatgagtctttatgctagcactaaca

SEQ ID NO: 251005 - DNA, 858 bp, Cannabis indica
tctggtattatacatccgaagctaaacaacactttcgtttgcttaatacccaaagtggaatttccccagagagtggaacagtttagaccaataagtctatgtaatttctcctataaagttattgcaaagatcttatccaatagactgaggccgctcatgaatgatttggtttccccgctccaatctgcttttattcctggaagatggatagcagaatcttcgatccttacacaagagattattcacaagattcgcaataaaagaggtttagggggccttatggctctgaaacttgatatgcacaaagcctatgacaaaatggaatggggttttttagaaaaagttctcaatgcgaatggtttcaatgaaagaagtaggaaaattttgatggcatgtgtctcaagcgtctcatactcggttcttctaaatggtagtcctctcaaaaagattgttcctcaaagaggtcttcgacaaggggatccgctttccccattcttgtttctcctctgtcaggaggttctatccaaacttatctgcagagcggaagagagaggtcttattcatggcattaagattgctcatacagcccccccggtgtctcaccttatgttcgcagatgacacaattctctttgcccgggcgaatgaagaagaggccaagaacctgatggagtgcatctcgatttatgagaagtggtcgggacagtcttgcagcaaaccaaaatcgagtgtactcttctctaaaaacttaacagttcaaaggaggaatcgtattcttggcaatttaaacatagatcaagtcaatggggaagagagacatttgggcaatccgtttgtctttagtagaaggaagaaggag

SEQ ID NO: 251006 - DNA, 1035 bp, Cannabis indica
aaccagatcaaagaccgatcttagagaagacagtccttccccaaaattaatcatcataacttctattcttgacattactcttcgccatgaatttatttagtttccaatcaatcaatacacacttgtaaagttccattcttcttcttcacaaacaaaactggcgtactccagaatggggtactcagtctaacaatttaaagcccaacatctagcatcccctgtaattaaaccttcaaccatttcaactcaacaaatttcatctaatatggagtttaagacacagactctgcctcaggtaccagatccatttcaaagtcaatttcccactctgtagcaacccctgtaactcccctgaaaaggcattcaaaaactctcagaccactggagtgtgttccagtcccataggtattcttcataacactacctcactaactaagaaactgacacatccatctcacaacaaatctcttgccttaaacactgaaattaatggaattcaggttccttgaaccttgcccacgaacacgaatgggtcctcaccttctggttcaagagttaccatctttctttcacaatcgataattgcattaaactttacaaattaatccattcctaatatatcctcaaaatcctctaattttagctcaactaacataaccaagcattcccttttccccacaacttaggaagggagtttaaccacctgctggagaataactagttctccagtaaatagtaaggtaccggaaccacttgcaacacatcattaactttatacaaactttccaatcactcttctcgaaatataggaatacgtttcatcaaaatcaattaaaactatcaacaaagtatattccatagaagttcaacttctcaatctaggtcaagcaaacacccaaacaagaactaaaatgccatcaccccttcattccggttgctgcaacagtaagcatattctttctaaatggcctactacgccacattaaaagcaggctcaagtttagctaggggtgtacatcaaaccgctcaaaccgc

SEQ ID NO: 251007 - DNA, 1728 bp, Cannabis indica
tagttaaaccatgtgtactgatacatcataagaattcatttaatcagacgatcttgattactttccactgtgttgacaatacaataaacaagaatattagtgtgataaggatttggatgaatttaaaaaatcaaataaataaataaatgatcacattaacaaaataacacattaaataagtaatgatattaaatttgcttcattaatgataattgaatagaaaagattatattgaaaaagagttttatttagggcacaaagcccaacaaactcccacttgcactaacctaaaactatcattacatttcaattaatcctaaattcagtccgtgcttttcaaatgtagttacagtcaaaacttttgtgaatggatcaactaagttttcttcagtatccactttctccactagtacatcccctcttgccacatattctctaaggatgtggtatttcctctctatgtgtttccttctcttgtggcttcgaggctctaaactgttggctatagcactagtgttgtcacaaaataaaactagtggtttttccattctaggaaaaacatcaagtcttgagtcttgagaagaactttcttagccagaccagttccttagcagcctcagcggcagctatgtattcgacctccttggtagagtctgatattgcgattagcttaacacttctccaaacaactgctccaccccaagagtaaatacccttgtagactaagacataatgcctagtacttttcaaatattttagaatatgctcaactgtagtccaatgtttctctccttggtttttctgataccttctcacaatccctacttcatagcaaatgtcaggtcagtgcataatattgcatacattaaacttacaattgttgaagcataaggaacccttctcatgtcctctatctcttgaggatcaatgggacagtgttccttagatagacggataccaggtttagaaggcatcatttcccctttagcatatgtcatggagaatctttcaaacaccttatcaatgtaagttgtttgagagagagcaagggatctattcttccgatttctgatgatctgaataccaacaacataagcagcttcacccaaatctttcatttcgaattgagtgtcaagccattctttaatgtcaatcattttcttgatattgttgtcaataataaaattgtcaccaacataaaggagtaggaatactaccacttgattatccttaagttggtaaatacaaggttcatcatcgttttggtgaaagccgtaggttttgattatttcatcaaaccttttgttccaagagcgagaagcttgcttaaatccataaatagacctattaagtttccaaactttctcttcctgccctagaagcttataaccttctggttgctccatatagatggtttcttcaagaattccattaaggatagttgtcttgacatccatttgaaaattttcataatcaaaagcagcagctatggagagaagaattctgatggatttgaacatggtgatcggactaaaagtatcctgatagtccacaccttctctttgggtataaccctttgcgaccagtctagctttaaaagtttcgacttcgccaccagcaactcttttcttcttataaacccacttacatccaattggacaatattcatcaggcgtgtctacatattcccagactttgttctttttcatggaatccatttctgaatcc

SEQ ID NO: 251008 - DNA, 718 bp, Cannabis indica
aagtaaactcacatcatcagaatcaaataatcgtacattaatcacatatttaaatttgaatcattacatatattcaaaaataatgaatgtcaatataaagatatacaattaccagcccaacaatattaattataaccattactttataaagtaatcctttttaccacttatcgagcaaattaatctcaatacctcacctgacatacgaatgtaaatactattatttagtaaaatcaccctgatattcaaaaataataatccaatgtctaaatttaggatataattaaacaacaatattctaatagtcatattgttaggattttatgccctaaataaaactcattttaatataatttgatttactaattaaataaaagatcagaaattattttatgttgcatggttcacatgattaatttaatgattatatgtttaatatatgtattctattaaatcctgaacatataattattcatgattataatgttgtctatatagtagaaattaatcatgattatatgcttcaaactacttagtcccacgatttatcaatgtactggatttatactgacgtaataatcagcgatgtggtttacttacacttgcatacgtggaatattctttctaggtcattagcaaaataaactagtatcgatcggatgtatcggttgtacgtcggactagaccgatattgacagtggaaaagatatcataaact

SEQ ID NO: 251009 - DNA, 3223 bp, Cannabis indica
gaaatgacgcaaaatcatttgtgtcatttcaaaattgacactaaaaacttatatcgtcagttttttaaatgacgcaaaagttgctgaaatgctcttttttttcacctattgtgtctgttataaaatgaagcataaatataggtaaggaaaaattgtagatttctatgcaattttccctttgtccattttcaaattttaaaaggattttatataatacaaaaaataaaataaaataacatttataaaacttacattccatgtatcataaaaactaactataaactaattacatttcaaaaaaaaaaaactataaactaattacataatgaaaaagagttaaatagcaataatcataaaacttatttcccatgtgtcataataaaaagtggtaaccttgtactcaattaataattaaaggcttcacaaatttagctcactcatcccgtactacattgatcttctcgttaatgtagggagcgtctaacttaaactgtaaaacaaaaaataaaaaatattaatcataattgtatatgcatataatatatacatttaaagagatcgagtataacacatagattaatttttttattaagcattaaaaaaattaacaactataatattgtttctccaataaaatagtaagcaataataaataaacctacagaattcctaatcttaaatcacattgcttggttaataacatatagcataaaaaaattaaggtagatagattagactagcttaaagggagacatatatatggattttgagaattaaactacagaatcatgattatacatcacggaattaaaatcaccaagtcataaatacatggacataatttctaactcaaacataacttgaaaaaacttacactgaataaaaaaagtctctaaaacagagagcaatatttcatacaatcagtcaatcacatactccatgtcgatagacacttcatacaaacattgtaaagtgtaatactatttagaattaaatcaaccaaaataaattaacaccataaaaagtctcagcaaattattgtacaaaagagatgaaaaagaaaggcccaaatcttcaagtaacaagtgcaaatatactctccaaatgagaacataaacacttttttttaacaaggcacacataatattgacaactatgactgtaggaaaatgtatgtacctttctggcaatgcatttgccaaagcccatagaagggaatgaggccagtaaggcatatgcagtgaggtttgtaacctatccaatgcatgactggtcgagcatagccatcaatcgatggaacaaagaaggaagatctcttgattgatgccatctttgttaccacatacaatggaacctgcataaaaaaagaacacctaagttcgacatgataaataaagtcctaatcttttggcaaacttccaaagcattgtagttacaaaccaaactatgatatagaatagcaaacaagacatgaaatttggaaccatattaaaagcaagaaacaaaaattcttcaaagtgatgaaatttacacaactgatcaatttaaaccacaagattaagcattagatgaatttgtatttgtgcccttatcccaagttcaaagcaaacttttagtattagttccattaccttaaaaaaccagtcatcaatacaataaaacaatgttaattaacatttcgtgtgtgtaatattaacaaatttaacaagtcaaccaccaagaacttaaccgcaaattagtattatatgctccaataaattaaaaaacacaagagctgaaatgaggaatgaatatgcatgcacaaaaaaaggtagagactcaacaccaccatgaactaccacaaatgaacatcctaataaagagtaagagaataggcaggccttatcctcattaaaatcaaagaggctaaaatttactaccaagtcaagtcatagcacaatatactattaacaaacacaaagataagcacaataacaaacctaatagaagtataatatctcataaggggagaagaaagaatctgtaataaagaaaatgatacaactcccaacaagaataggtaacccctgtacactcattcagtttaccactattcgaaagaaactagctcatgaaacaattctaaaaatctcccctaaaaccttgagtcctaaccaatggacttagaaaatcaagaactcagatcaaacatgattttctattctaacaagtaactaatttgttatttataatgtctaactatacacacacacaaacaagatgataatttacgttccgaaaatatttttgcagtaaaagattaaagaaaattattaccttgtaatgataccgaatttgacatgccctgctgaaaaactcatttgacaaaaacaaattatagaaagaagaaaaatacatttcataatctcattataatttagtcacttcatcccaagtttgataactttaattctacaaaagttggtatcgagcagcctccatctaatttatccaaccatatattttactttacgtaatgcacaaataggtggcatattctagctttttcttgctatcacaaccatgaaaagtgacttattgaaaataattagcttaacaacaaaaaaataaagagacactacacaatgggatagtcaaaaagatatatctacctatattttacatataactgattgttaagtgcaaagaagttagaacttattgatgatttttaattgaccatttttttagtagaaacttaatagccatgtatataatatatatatatatattaattaggagatacttatcttttctaagagcttaaacacttattccaaaaaatgtctctcatcctttggtactgtactaccacttcatcaagcacaggctagcaattgcctcaaccaccactattgtttatctccaatcagacaatacttaaattcattttctaaatatttctcctaaacatggacaccaaaacttcattcataaagagacttgtcatgagaatcaacagggatttcaataataaaaaagaaaaaagttaggtacagaaatgatattgattttttttatggatatgaggatttaccaagaacagtttgaactagaatttagatacagtaaacacatgtataaaccctcctaaactaatcaacagattctactgcatacacaatcaaaatactattttagttcaaaagaaaactacaagtagtgtacaatatatatatatata

SEQ ID NO: 251010 - DNA, 691 bp, Cannabis indica
tgttccgcaacacttttttcttcatgtccaggatctgaaccggttgttcttcgtatgacaaatatgtctgaagctcaatatcttcatagcttagaacatgagtggtatcagacacatacttctgaagcatcaagatgtggaacacgttgtgaactctagataaagtagggagtaaggctagtcgataggctacctgaccaaccctttctagaatctcaaataaatctgggactcaacttttccttctttccaaacctctgaattcccttcattggggacactcgaaggaagacaaaatccccaacctggaattcaataactctatgatgtggataagcgtagctcttctgtctactctatgaggcaagcatatgagctcgaatcttctcaatggtgtcactcgttctttggattgcatcaggtccaaggtacctccattcaccagcttcatcccaatgaatgggtgaatgacactttctcccataaagcattttgtatggtgccgtgccaatagtactttgataattgttgttatacaaaaactcgatcagagggagatacttattccaggaaccttcaaagtctaatacacacgtccgtagaatttcttcaagtaactatatagttctctcaaaattaccatcagtttcaggatgaaggttgtcctaaactttaacttattacccattgc

SEQ ID NO: 251011 - DNA, 1754 bp, Cannabis indica
gactatgaaaggtccttaattatcatgaaagggagattgtaatggatatatgcttacaaggcaccacaaagaaaaatcaagctaatgttattgcaactgatggagaggatcaaaccttagtatggcacataaggcttggtcatgtcagttatggtggtttgaagatactaggcaagaaaggtgttcatgagttttagtcattcatctctccctacttaaacaaatcatcactcttccaatgctactaaagtttaagcaaacacctgctcaaattgtactgtcaatatttttttttttcaatttggcatattagattaggacacccttcaccaagattgttcaaactgttctcaccaattgcaatgtgcctcataataataataataatgacataaacaaagtttgttcagcttgttgccttggaaaaatttacaagttaccctttcctaaagcttctctcactgaatatacaacacctctccaacttgtggtgtctaatttgtagggtccctcacacactttatctagtggctacaagtattatatacatttcgttgatgtttattctagactcacctagttgtatcttcttaaacacaaatctaatgcttttaaagtgttttaaaactttaaggttgagagtgagttacaattaggcaccaatctaaagacactacaaacaaagttgggagagctgggggagagaatatagaacttttacaatctttcttgaatcccatggagttatacatagacgtcatattgccttacaagctaggaataaaatggactagctaaaagaaaatatagccatattgtggataatggattaaccttacttgctcaagcatctatgccattaaagtacttggatgaagcctttagaatagtagtctatctttcaataggtttctaactcatgttctcaaaagcaagtcacccttggaaattttgtttaatcaaacacctgattaccaagcccttagaacctttaagtgtgcttgttttctcaacataagaccttacaataaatataagttggatttcagatgaaccacttgcacttttcttgggtatatccttacaaaggatacaagtgtctagattctaatggcatgctttacatatcagagatgtcgcctttaatgaaaagttttttccatttgccgaaacttctcaatatgatcaaacccccattacctattcctatgattgcctacctcctggtattattcttaccagtaaaggtcatttctctcatgtgcctatgtccaatgatgttgctcctatactaaataacgaagcttcttcttcctcatctgttggtttaggttttgaacacactcattctcttccaaacatgcttgaccaatctggttctgttgacaattctcattatttatatagcagtggtgctcctactcaaacttctaaattcttgttgatgtagttgttgcacaagattttggccttacagatgttacaattgcacaacctcctacagttgatgttgtagttgatcatgcatgctcttctttgaggtttcaagctactccaagcactacaagctcatcaaccactcctgatttgtctctaactactacttctgctcccacttctgcagtcaataccagggtagtaaattctcactccatccagtccaaagggaagtcttgtattaatttctaagccaaaggtgttcatgacctcttgtgaacctgagtctcttgctgatgccttactcaatgagcatt

SEQ ID NO: 251012 - DNA, 976 bp, Cannabis indica
cctgagcgagcattggtgtccatcctttgcatttctattggtccagtgacatcaccacttacaagtgatccacgtcagaagtctaaacagaagcagccgtgcacgtggatttatcttccacgtgtcagaatatgcttccacacctccattccttgctagctaaggctcacaaacgcgcttccttcccaaataccattaatttattaagttaaaaacaaaatggattggctcattttcgtcaattagaaaatagactagattagcaaactctcttggagaccaaagcatcgtttgttgatggaattgggtgatgaattgatcgaaggtatcgattgggatgctttgttggagtgggagccccccgttctcactactgattcctcaacttcttcaccctcgtccgacccttcgtcctggatcgatgagattgaaaacttgttgatgaaggaagacgatcaggagaccactgatcccaaccctgaccacgaagaagacaacgaattttgtcaaaactttcttgcagatatacttgtagaatctcctgccaacgaatctgatgaggtccacactgccgccgagaatgatgccaacgtttttagcgatggaaattgtaattccggggaggaggcagtagctactgaggccgacaaccaagacgccgatgatcctgtctccaaaaaacgcagaaggtaccagtaattatgttcaagttactgagagcttttgaattgagttactttttgtttgattgtgttagtcagattaggttaaaaaaatatatcattaggtttttttattaaaaaattataataaagtaaaagtactgtgtgtgaatgtacgaaatgaatgaatgaattagggtggtgtgaatataggcaggtgaggaatagagatgcggctgtgagatcaagggagaggaagaagatgtatgtgaaggaattggagatgaaaagcaaatatttagaaggagaatgcc

SEQ ID NO: 251013 - DNA, 814 bp, Cannabis indica
ggctcttgaacgaaaattttgggcagcgagcaattaacgtttccaagcctgaacactgaatctcaatattgaggcccgcctataaacttgttatacacaaccctcctatcaattttttgccttttagtgccctgagattgaactttaatgttgagtcgctaccactttccaatttcttaacattagaagctccaattgcactagatcttttggatttctttcttggattgtttttatggtgctctagcgacaaaacttaatttaactaattcttcttgcacattttttcttgaatttgttctattattctctaatactaaaacttaaaaatattaccaaccaaaagcataaaattgcacaaacacaactaaaaactaatgaaaagcaccttaaaaacctactcaaaaatggtactaattaagtcctaacacaagtatcaaattttgattggtggagaggctgtacttggtctttactattattatcattattatatgcttggtcgctttttttatttatttattttttaaggatatacttggtcattgtgatttagggatattcataaaatagctaatttaatttaatttgcacgattcaatccaatccataaagtgtagatatctatatttgtacagattggatattgactaacatataaaactaaggggtaagttgaaaaataccacttttattaatcaattaatcaaatttacctctaattttatatttaattgaaacatacctctttttatatgtattatacctaaaatatcctgacataagagaatcacatggagagtatcttgaagtg

SEQ ID NO: 251014 - DNA, 540 bp, Cannabis indica
gatattgacacggtaggagggtgttaggcaccagtagtgccctttagctatttctcttttatttatatttgtaattgttagatatataaattctatacataaatttacagtagggaattttctaaaaatatctatactagggaaaggtcacatgtgcaactcttttagtatactatataatatataaacttataataaggtacaaccaacaaaatatatatggtgtgattaataggttattttttttaatttaagatttcgattaattttataattttatttttttttataatattatattgattaattttatttatcttgaatatctggatgtagaattaatcatttatattaattaagagtttttttattcttacattttaaaataatttttttatatatatttttataaaaatttacattaaaactcacgtagcaactaaatgattaacttaaatcacaactaaaatctacataataaagaacaattcaaaccgtaaatttaagaaaaaaaaaagttaaaaaatattatgtaaagta

SEQ ID NO: 251015 - DNA, 1916 bp, Cannabis indica
accacatttttttttgcggtgcgggcggtttaagcggtttgagcggtttgatgaacacccctatattttagtaaactaatataattacgaaaatgagcgctctatcatttatctcgttaagccaagctctaatgaaaccattgtttcacttctaatagttatagaagttatagattctatatctatgactagtgtcaagggctcactttttcaagtagcggaacacatgtgcgataccttgacttctctaagccaagatcaatcttccaactatccgagtaacaatgggctcattttttgcgttgaataactcccaccgagtcatgctcacaagcacccatgagtgcatccatacattgagactctctagccaagatactcgcgctgtccataagttctcactattataaggcaaattccaacatcgtcactcacctagtcactcgtgaccaaggtagcatgggtggcaagatgcaacactaagctaacgtgtcgacgcttctaatcatgccccattagatattatccgaatagtctccctcatcgcccaaggactcccatacgtccatggtccaatgctcaaggcaccatgcctctacgcatgttggcaggccctcgagacaagccaccaaactagtagcatacgttagacctctgtctcttcccaacatggtgcatccgtcccatgcgcgtatgtaagccaacccacgaatgactacctgtgtcatctcgtgttgagactcatggccaaggtgcaccacaacgtctcttggaggtttaggccacgttccattcaagcagcataccagtaagccaatggaaatgtaccctctaacctctagcagcattcttagatgcactaccgggttagcccgataatcaaagagtattccaactcatggagacatatgagtatataatgtgcttcatgtctccatgctaagaaaatatacatcaaactcgacccatattctgagttgtgacgatgttaaacttcagataaatttattatatgggaaaaatatcttgaccaggttttggactagaaagaggaggtactatgaaatgagacagttccactagttaagaaagtgctgcagaaaaaaaaatatagcaagatagaaagagcaatttgagagttaaaatgataaataaaaggtaatttttcgaattgtttaaataaatttcgaggatgatatttctataaggagggaatggttataatatcccaataagcctaatggtaaataattaggatttatatttatattatggattaatcaggtaataagtaggattatgatcctactaatttatttcagcataaaatttaaatggaaaatttgactttttatgcttacaaatacctaatattttttctctaaacacataacatgtaatatttgtgggatattacacattttacaatatccctaaagtacccccatttacattatcccctatcccatctcttcttctctctttcttcatacccatcggaccccaatcggggtccccatcggacccgtcggacccaaaagtttttccagtacatgcatcggacccgtcggacccaaaagctaaatttttttgcacatgcatcggacccccatcggggtccccatcggaccccatcaggccatcgtcttccccaaactgcgatttccccaaatcgtagatctgaaccttagacattgttgggcaccgttcgggtctccgtgttgaagtgggtctccttcgtaatgcggtgatgagggttggaatggtgggtgtgggtcttggtcggggtggtcagtcgaagtgggttgtgtggggggttgtgcgatgtgggttcaggcgaaaggcggtgatgagggtcggaatggtgggtgtgggtctcggtcggagtggtcaatcggagtgggttgtgtgggggg

SEQ ID NO: 251016 - DNA, 518 bp, Cannabis indica
gtttaattcttgggtcaattttgtttaaaaataaaattttggaaaaaaaaaaataccatcatgatatgtgaaataaatattttgctataacaatttttctaaaattcacataataacttgatgaatagattttaaatttataattgaaaatatattttcaatattgaattaattatataagcttaatttctattcatatttttttataaactattttcaatgtgcaatttttgaggatgttttgatatcaccaaattaaaataataaaaaaatgtgtatttttaatttttcttttacttgagaactaacaaaattttaagtttagggctgtgataattctaaaaattagagttatttttcacattttttaactaaaattggtttagtccttgagtttataattaatttagtgagtttttaattatttttgaatttattagttttattttaattttatagatttttatgcattattatagttaattttataattgtgttatttatttttaaggtttttt

SEQ ID NO: 251017 - DNA, 677 bp, Cannabis indica
tttatttaatagtatattttttggcaaatatatggccaaatgaaaatgcacttttatgattccaaggcattttatagggtagtagactagtgtcttatcaaaaaatacttttaatcctcactttttcaattgggtgtgagatttttttctttttttttaaaaaaagaaaattttgataaactttgtgaagaagtgttgcttttagcaaaaataaactttgtggattggtatgatgctcaaaaagaagacatggattctttattgatgccaatagatatcaaaatgagcactggacaccccagatttcaaccaaatcaaagtaaatgtggatggcgtactttttgctaatgagaggaggtacgacataagattggttgctcgttcttcagatggagcaactattcgggcaaaaaatatgaataaggttggtacttttccgccccatgaagtagaagctattggaataattaaaagaggctttgagttggatcaagaatatgggttgacctaatgtgattgttgagtctgattgtttgagagtgattaatgatttaaataagaataaaactatggcctctccatatggcaaaataatttctgattgtaaggctttgttggccgatgttagtagtgtttctttccaatttgttaagcggtatgctaataaggttgcgcat

SEQ ID NO: 251018 - DNA, 536 bp, Cannabis indica
tgtggcatggtggggcatttcaagaaagatttccctaagtcaaagatggaagagcagaagccagaggcaatacccgtacctgcttgggtgtttgtcatcactcaagctgatgctgctgccagtccttacgtggtgacaggtcagcttcttgttaacaactcctatttaattgttttatttgactcgggagctacacactcatgtgtggcaacacgggtaattaatctattgggtaggccttgtgattttatttaaagagggtttggaaccctattgcctagcggggagttggttatctccagtaggcgaattaggtctatgccagttaggcttgaagataaggagttgagtgcagacctagtagagctagaattagcgaaatttgataacatacttggaatggatttcctccaagtattcgaccagcattgattgtaagtggaaaatggtaacctttcaaccggagggtgaagatccatttgtttatgttagatttgttcaggggtctcgaaacctgattattttagtcttaaggg

SEQ ID NO: 251019 - DNA, 1041 bp, Cannabis indica
agggtataaaacccaacaattatatcatttcatctttcctctcccttctttcttccctaccaaacacatgatttatctcttcttctactcaaaaatccttcctaccaaatataggattacatttatctattaggagtatcaaatttttgatgtcttccttccctaatacatccatttaccatatttcaagatctttcaatcatattgctcacaattgtgccaagatagcattaaggttggacagtaaaataatctagaatggcactattctaaattctattataaatcttgtaactataaactgagaatttcttatcaatggaagctacagattccaaaaaaaaacactatgttggtgagatggatggagaagataaagaatggagatttgagggaggatagagagtataagggatggagagtaaggttgcacatgggtagggttgggtcgacaaacccgcccaacccaacccaaatttgggccgaaaaggctctaaatataacgggatgaattgatatgggttgaaaaaaggttgcgtcgatttagtatggtcagaattaggttgggccaatttaatagggtcggaactgagctgggccacgtgtgtatttttgaaacatagtttagtaatagtagattgattatttaattaaattcatgataatagtaaaaacttcactatagtagaaccataacaatgaataggattcaattactaaaactttgtttcgaagattccctgttacaaaagttttacaaaaagggctataaacaagagtaaatcaaaatacacatcaggtgcagcccaaaataattcctgacaactcgaccacacaaattggataagttgatatgtacatttaccagagaagattgttattgttggggattatttaccaggatctagatttactaacaagcctgttgattaacatcctaaatatgaattctctaaaacaatgaaataaacacataagggttaaagaaaatcttacattgattgcagcggaatacaatgactccttccgttcaagatctct

SEQ ID NO: 251020 - DNA, 976 bp, Cannabis indica
atcgtggcaatatcggtaagtatgtggttcatatagttcaattaataaataattcacgattagccgtagatgtttggattcagaaaatcttgaaaatgaatcacgcccttctggctaaatggggtcgggcttttcttattgaagagaaatcgttgtgttgtgttcgttgtgttgtaatcttgaaaatcttgattttgctctctaataaaatagttacgtaattgcttcttttgttaatttctgtttttttactataaaaattaatattttacctctaaattttaactaatacaaaattttgcttcctttaattgaataaaaagttataatattttattaattccaaaaaaaaaatattaaaaaattgaataaaaatattaaattaataaaaagtactaattttactttaaaaaatatttttaaactttattttatttatcaacacgtattttaaaaatcaaactaaattattgagaatctaataaataatttaaatgaacttaaattttttttttaaaaaaaatcaaacttatttatatatatataaactcgtactttaacaagtaaaaaaaagttaaaaatttaataaaaatatatttttttttggaaaaaaattataaattaaattaaacaaatattatgtttacttaaacaaatctacattttttataaaaacaaaaggctaattaggatttttactcctgaactttgacatctaccaaatcatactccctaaattttttcggcagttaaaaattctccctgaactattgagattgttggatttaaggacttttgtctaatttcattcaatttaactaatttggtgattgtccatgaactaaatcatgcccctcggactttgatatctaccaaattatgcccatcaaactttgacatgtgtcaaattatgcccctcaaattttgatatgtgtcaaatcatgcccctgaactttcatccatgttagacttttct

SEQ ID NO: 251021 - DNA, 1748 bp, Cannabis indica
atgttttttttctttttgccactgttgcgtcattgatcttttatctttgtctctataggaatggacgtagattttgagagcatgtttagaggttctccccgagccgacaagaaatcccgaaagaaggtaaccccaattggcgaggttgtggattgtattaaagaacccaaatggctgaagaccaaagcttacacgaggaaatcttcgagccagccaaccacttctgttgttaaacttctcgagtctgggaatgagatctcggccgcagggaatgagaactctgctacaggaaatgggatcttctaaaggtctctgctgcagagaataaggtttatgcaacaagaattgtaaagggacatcctactgagttagtacattagtttgagtccttttgcttggagccgatatttctcgagctctcctgtctcctataaataaccttgtactctttatttaggaaactggctgaatggtttgcccctagtggcatttttgtaatgacaagtttgtaaaccaacttggttttctttcttatcttaaatgccttgtacttttacatttgaacttaatatatttgtgttggcttgcatttttattcacaatgtaaacacaaatatttttatcaaatatagagtacatttggtctttccattgctcctaattttcctaatcaagtagttagtaatctattatgtgtgcgggcagcttattatctaccagacttttgatttacgagcagttatcaattttgcctcgcaatgacagttataatctagcttaagcaaacatgaatatacttttaatgattttatcactttgtacatttttgattcctgatatgaatagttagattgtctattcattcattaggtttaagtacttttatcgagacaccttgatgtctcctttaatactttcctatcttgcgcgaaccgttaatattcagctgcgtacacaagttatgagttatatctcatttataacttttgattttcctttctcgtcagacaagtttaaatcaaaaagttatgatggtttgatccccttcttgtcagaaaggtttgaccaaaaactttaaaaaaaaattaagttgtgggtttgcattatatcatgtatttctagatgaattccggttaatcatacacaaatgcccctttagtaattttaaagagtaacactttgtaattacttgaataaaagtaataattctctttattgataactgaagttcaaaatattacatcagcaatgtgagttacatcattaatttactggtagtagggtcgcaaatgctccacgttacagtagttctttattaacgagccatttagccgagccaatttgtaaactccgattcctactactgcagacgcaaatgcatctctcgtgtttgcaaaaacttgccttagcaccaagtttctaacattgaatagccttttcttgactcttttgttgaagtatcttataactcggtgttgatacgctgcattagagacttgcgtctttgtttgtttttcatcaagcagattcaaagataactttaggagttcttggttttctttttgattataaaactctcatttatgagtcgatatgttcacttcaacaagtagcattgctttcgagccgaatgctagcgagaagggaatgtgtcccgttgttgtcttctcggtagttttgtgagcccaaagtacttgtagctcgtcgacccacctgcctttggcagcatctaacttcttcttgatagt

SEQ ID NO: 251022 - DNA, 1090 bp, Cannabis indica
tcccaaaaacccttgaatttttttcccaagccctctgaaattccagaaaactatccctgtgaattaaaatttcttacttttacatttcttaaacttctcttttttaaaagtcaataaaactttttttgagttgtaagcaacttgaaattttggagttaacatggctaggatgaaaagaagtagaagattgtttgatgaatatgatacccatatggctcagttcattagagtcaacttaactgtgcccaagtctaagaatttagacaaggcacatggtgggaagataatggcaattgaactccttaatgttgctatcgaaagtgaggacccgagagatcaagcttttggattaagacctctcgtgtttagcactcttactgaacatcaagcttaattattctagaatgattattgtcttcctgaaattgtcttctgaaagccacaatatggtggtcacaatcactcttagaacacttgctatagtgcatggtcgaggttccatatgaatatgggtatttacttgcccttacatccatgattcatatcaatcgcagatttctttggagtttatccctacaaaataaatccaaatggctatagaattcatgcaaccttcttcatcttttactgcctgagaaattggcctatcccaacccctcacgaaataaacctcctttgtaacttgaaaagaagtcctgctcgaaaaggagaaggcttctttcccttccaccagttcagcccatacatagagatgtcaccaaaagtaactacagactttacctccaggaatatttctacaccccagttcttccataaagacacataactttccaaaagactggccctttcaaaagacctactcctctaattaacatgaagaggagagttgatgacatgctgatgggagaactttgttcaattttgaaagtcttcgaaaggttggactgataatgtcttgccaatgagtgtatgttgatactagcttccctgatgaatcctggacaacgccacttgagcaggatgatgaggatgttcaaagtgcaactgtcatcctatctcaaacagtgtcagaagatgtgacctcaattcg

SEQ ID NO: 251023 - DNA, 807 bp, Cannabis indica
taagggcattttggtcttttaactcattagattattatcaacaaaagagattgttcttgtctaatttgaaggaaatttctggtattttttttcagccttgaccgaacccctagtctctctctcttccatctttttcacttcaatctcccctcatttttgtgttgttgagcttgttggagcttggaggattttggtgtgcattgattgtgtgaactttgaggtagttttcttctatgttactgaattttattgttgaattttgaaataaaattatgtgtgaaatgccatgattgtgttttatttgcatggtgaaagaatgagtttattttgatgaatttgtgagttgttgaggcttcaattttgtggttttcctttagattattttgtatgagttttgggttgttaattggggtttaagactactgaaattgaagtggattccttggagtttaagcttgtgatttcagcttgttgctcaagttgttaggtttgatgttatgtggaattttagctcaatgtttggagcttattttgaagttattaatctgatgtttttcatgtatgttggttgtggattaatgcatgaaattggtattttaaatctctattttgttgagttataattatgggttataatttgtgagtttgtggaaattttggacatgttttggtgtgtttgggctgaatttcgaagtctgtttttttttttttttgggattttcctgagttttggaacccaggcgccgcggcccgcctccttggaaatctgggtttcaacacaggtgccgcggccccgatcgtggggag

SEQ ID NO: 251024 - DNA, 718 bp, Cannabis indica
gtgacggtcttccggcgagcgtgctcggtgtaagtaacggcgtcacggatgacgttctctagaaagatcttgagtacgccacgagtctcctcgtagatgagaccgctgatacgcttaacgccgccacgtctggccaaacggcggatggcgggcttggtgatgccctggatgttgtctctgaggaccttgcgatgcctcttggctcctccctttcccaaaccctttccacctttgcctcttcctgacatttttggttcctttctttctctgcaacttttctctgtggagtggtgaatgagtttttgttgttgttaatggaaatgaggtttcggagctatctatagatgttgagttgtgttattaggaccgttggattaggttgcaatccgcgtgtggagtcagtttggcttttgtgaccgttagattagattagatttaattatgagaaaagctgattggtaaaatgcgccaaagttttgtgaatgtgtctaggctgtggcgggaaatttcaattctttgtaatgtaaaattaagaccttcaattctacatctaaattgttctcaaaaaatatatatatactacatctaagtgttaaaaaaaatatattgtattttgtagaaattgtaaaaaaaaattaagatgaaatagaaatattaagaggattttgaataatgtagagaggattttaatttgttttttaattttcttaaaataaaa

SEQ ID NO: 251025 - DNA, 560 bp, Cannabis indica
tccatagaatattgtttagagttcttgttttatatccacaattaaaagaagtgggattgcaagggaagaacccatgaatagatttttaggtatgaattatatatttctatggttatttagatattactagagttttttttaaaaaatttatccgatgtaataagtaacatcgactaatgtgttgttggcatgagcattattttatttcatcaaaaatgtttgctcactcccattcttttatcaatataatggtaattaaaatcttactcatcttgtccaattggaaattaaatttctctttttggagaaaggtatgatgaaactataagtggaagattaatttaattaaaacaatactatttctatttgtcattttttttaattatagatgtaatgagattttctacaaattctcttttaaaaatatcgtcaaaggtaatcgtatttagaaattagatatctttgtatagataaaataagtttaataaagcgtccactaatttatttagaattagtttaataagttgttttaagatttatagtaatagccatagtttttt

SEQ ID NO: 251026 - DNA, 520 bp, Cannabis indica
ttgttgaccaatttgattttgattgctttaaagtcagtagtccattcgttacggtgtaccgcgaaagattggaatattttcgggagtggacacgtcatcttatctatgcttgttcttttgtcagtcagaaagaaaaggcgatttttgaatgttctttctaacggtgtagttaagttttattaattattttaatatttaaaatatagatattttaggtacctattgaggagtaaattataaacttagcaaaaacattaatgatgaggaccatgcaggagaaatgataaccagccataataaatcattttttagaataaaaaattaaattaaaaataatatatttttgttaatttggttaccagattcaacctacttgaaatgtataggtattagatgctatgaaattagttagggaattagcttatactcctaggatatattggtgtggtcccaaattgaggactcatatatatatatggatattttatgatctgatatattttgtaagaatttaaacaac

SEQ ID NO: 251027 - DNA, 831 bp, Cannabis indica
ttttttttttttttttcaggtgtattgttgtctatattactatttattgttgttgtgatacgatcttggatcgttcattcttcctcacgtggatagccaccttgggtataatttgagagataccatataacacttttctcctaattttagattttcagttgaattcaaattttcccgagagcaaacacacaaagaggagttttagcggtgaatgaaccagtcttcgacgtcctactctaaattgccttttgcctgagaaattgttattttccaaatcatcctcccccagtgatcaatcgtttctagaggagtgaattggcgaacatcgattttaactctaaaatggactccttgattgccctagccaaccgtcttcgtgcccagtgtgcttgcttgcctctaccagaaccaatcagtttggtaccgttgattccaccataaggtatgtattcatttacctccatgccttttaaactcaggtccaacaaatattgagaataaaggagcttcaacaaattgtaattgaaccctaaaaaatagggatatttatttattgtcactccatttacggagccaaatgtaacaactttctccttataaatagtgaatgaattcataaggggaaagggcaaaaaagaagaagaaataagaaagaagaagaagaaaaagaaaaaaaataattttttaattttttttagattaaaaaatgtagaaaaagaaaaaaaaaatctgattttttttaattattttaaatatttataattatttttttaaaattaatattacgtggacagtccaccgtgacacttaactgtgatttttggacggagg

SEQ ID NO: 251028 - DNA, 677 bp, Cannabis indica
tttcctattttacatttacaacatgtagaaatcccacaaaaatagggatttaattgaaaaatataaatcgataatatccctaaaattgtttctcaatcgcgttcaccttggtcggagtgtgcgacttcgctgagatcagaagttgcttgaatagttttattcaccctattcggatgttctagattaatctttaaatgagtttttttagataataaatcactcaagacagcacaccgagaaatgtacggtccatctaggtcataaaatgttctccacgtgtcactcagaagaataccacgtcaccttgtgccaaaattaggataacatttcccccgccccaagtccccatgggaactttttggtcgtacgtggacttgcttgacccacgtgctaggcaaatggggtgacatgtgctcagactatgaggcgtgtgaatagggctatcccttcgtatctttgagcatttattacttctcctcgaaagttgcatcttgatctgcgtgctaacggttatactctcccatttgtaatgattatactgttggaatttcttttactaggatcttagatctactcacaagtatgttgtttaaaacaccctaaatatgaactttcaaaaacgataaaataaacacatataaagctaagaaaaccttacattgatgcagcggaattaa

SEQ ID NO: 251029 - DNA, 503 bp, Cannabis indica
tgtgcacaacaattagaaaatcattgtaacgatcctaatcaagtagaacacggtaagtcctcgctttcctgatttcactctctccatcttgttctctcggatccaatctcattgtattgtgtattgtgattagggtttgtttaggaattttttattatgattatagggtgtgtgttatggatttgtgtattgttattctttttttattaagttttttactgattcttttgtatatggggtttctcggggtggggtcttgctggggttggggtttttcgagggggtgtgtcgttggagggttttttggggcgggttctcgccaagagttgggtttctcatggtcagatctttgaattatttattagttatttttcaaaaaaataaaaaataaaaaaaaaaattcataggactcattatttataattttgataaaaagtagtatataaattattgtgcaattaattaataaataattataaaataaattaaattttataatattt

SEQ ID NO: 251030 - DNA, 1348 bp, Cannabis indica
aggattatgccttctcaatatgaatatggaatttacagatattcattaattatatttctataattaacatattcatttattttatatttgtatttcgtatgttctctaatatattatccattaaatacttgctttcagagcataaatcttaaaaatctcatacttccactaaaagtaactgcaacaccttccataactcttatagatgttattcctcatccgtctattcaagctaatcttttgaagttatagatcccggagacaccaccacactatcattggacgaatatacagaattaattttattatattttgcttatttcttctcttacttccatcaagttcatttctctagactaatcatttaatattgtagaaaaattaaatattcgattccgatttaaaaatataaaattttgaaacagaataatcttagaccctctattagccacatctaatcatttataaattatcgtaattaataatcttgtaagatcccatgattattcatattagatgctaaaatcagttattctactctacaacttcttcggttaaatcattgattgaatcaatgatttcattatttaagttcttacccagaaactaaccctagtgatgtagacatcaatatttgacacgtgtaaagaagaaaaatatttacaaaatttagtgccccaagttatagcagtcaacctcgatggggtcccttgccctgcacccaggttgacttcggtacctttggaatgggtttagatcccacaaagttttttctaactgaccatccttcaatattttgaacaaagaagtaaagacgaatccaagtctcaaccctaagaattgaaaagagtcaaaacaacctcctgaaagtcaacctgagcacctaacaccgaggttgacatcccgggctaaggtttaaatttttgggccaatcttagtgaaaatgactcaaactttgtacttagacatgaatgaccttccataaacatgctagaggcaacaaaatcagaattataacatttcccattagaagcacttgggcacctgatgcccaaatcacctggtgatgcacccagtgcctaggttgacatgttgtcaacctagggcgcttccaaccacattatttaaggtatttcctgagaattatattcatcttcttctaaaatgaggaaaaaagtactttcgggaaagaaatagatcgacctaaaggcaaaaaatagggacccgaacacccactgttggtcatattatcaacttgggccgatttaaaactaacaattttagtatgaagtcttctgggcgatattctccacttttattcaataattaagatataggtgctttctgg

SEQ ID NO: 251031 - DNA, 555 bp, Cannabis indica
tatttttgtgataaattttaattggaggactaaaatttaatattatttgttaaaataaaataaaagttagaatgcaaagaaagttttatactaaattggtgtagattcaaaatctaacactattaatggtataaaatttggtgcacactaatttagtgcgtaggtaatgtagtgtgtcatcaaagtgaaatagtgtaaagattctacactaatttggtgaaatagtgtatcattggagatgctctaagaccatttcaaaaggttacactaatttggtgtggaatctagaattttttagtttttggtgcaataactccaataattcacaccaaatagtttacaaaataaatatatttaaatgatctgatattttatattacttacattaataactaaaaatagataatttatgaaataattagttagaattatatcatggctactagtaagaattttaaatcttaaaataatatttattaaattaattaaatgctatttttttttaaaaaaaaaaaaaaaaatacttacttgaagttctatagttgatcttaatat

SEQ ID NO: 251032 - DNA, 608 bp, Cannabis indica
ttccagagccagggttgctaccaacaagccttacatgtcttaaaatctggtttgctcattgtcttaaaaccataaacaagaaggggtttcgagaactcaagtccttgaaagaactacacatttataggtgccctgagttgtggtcacttccagtaaaagggctgccaccatcttttgaaggttcattgccaccctcttttgaaactttctttatggatggttgcccttacttggaagaaaagtatgaatgggaaggaaatggtgatcttaagaagattcgttgcatcgctcagccttaactgtgcatcagtccttaattaagccatgattcaactggtaaagtccaattatgtttgatccattgcttgaagcctcacatgaattcaaagcaaccaatactggtatggaggtaggtactgttatttaacatgcatgagtatttcttttggagtttcaaatcattatgtattgttgagctggtttaaaatgtagtgtataattaatttattttttttgctttatattgattattcaggaggttggaatggatgatcatctttgtgaaaggttgaaatgtttggaaaggtatgatatgtaatgatactctc

SEQ ID NO: 251033 - DNA, 574 bp, Cannabis indica
gaacacccctagttttgagtgatctgctagcccatgttttcagtttccagtgctctgtttttttcttcttttggttctttaacagttgtacaatggcaccaaacatggctgaagttttcgccattaaagaggcgttaagttggatcaaggatcatgaatggcataatgtcaagctcgagtccgattgtctctcaattgtccaagctattcgaagtaacatcaccatggtttcgcctcttgggggagtggcgatggactgtcgaaagcttctatctattttcaaaccatgtttctttattttttttattaaatgatctgctaatatgactgcgcacagctttgctagagtgtcatattcttttccatatcgagtttttagtgggagggatgttcctactgaattacagtcttgtcttttggctgatttagcaaattataaaattccaatttgcattaaaaaacaaaaataaattgttatctttaaagtttatttttatttttatttttttgattttatttaagtttggtttaggtccgggatcagattcgaattcgagtcagaggccgggttcaa

SEQ ID NO: 251034 - DNA, 1552 bp, Cannabis indica
ccaagattatggctattataatctgacttgacatagaaaacgaagaacaaagttcagaacaaaaaagaaatcatggtaagaaataacatactgaaatttgattctttaagttctttcgaagatttacctggcatataagcattacaattccaccactaataagtagaactctgcggccaaatctgtcaactactgtcatagatagcattgttgaaagaacaagagttgttccaattatgactgaagaatacaagagagactttctttcgtatcacatgtttaaaaacaagagtgatgtgtaataaagcagagaatttatgcctgtaaggctttgaaacataggcatgaagattgccaagacaagttgcggcctgttctttctccaaaaaatgcttctaaaaggagtcttaactgtactagcaagttcacttgcagcaaccatgtcttgaaactctgcctctacttgttcacttcctctgagtttctccaacacttctctccctttctctttcgatccttggtgaactaagctattgggtgtttcagtaaggaatattgctgtcactatcatcaacaacgcgagtgctgcaacaaaaccgaatgagacagtatagcccttgtagatatccaaactccacggttcgaggtatctagctgcatagttgacaatgtttgttgtcaacattccaatggaaatcgctaactgaaacatgaagtttgagcctcctcggaaatgtgttggggctatctctgatagatacaaaggaattgccttaacagaatcaataaaaaaggactatattagtttagtttggaataatatctctaatatgtatcatacaaagataataagataataaaatacctgagctccaaaaccaattcctagaccaagcaagacttggcctatgataatagtagaagttatttttgtggaggcaagtaatagagctgctgagacacaaaaaatggctgcactgactattatactctttttatgaccatattttcttgtaataggagaagctatgaatgcagctcctataccagggaggtatactatcaagaacactccaaatgtcattcttgcatcatacttgcagtaatattcgaaattgttttcttttatgtatatgtattcaccgaacatttcatagtatccttctgttgctgtaaccaaacctgcttatataatgttagagagtcggaaagataatagaatatatgaaaggaacatactattcttttcattgacagttggttttgagttctaacatagtatcagagcaaaaaaaaaactataacgattatcctactcgaaaaaaattcgatcgaaatagagcaaaaaaaaatgagccaccaaaaatctaaaaaaactgatctaagagccaaaagtcaaaaaatgccacttgttatttagggatagtgagcggaaaaaaaaccggatattagagagtctcacattgctaatgtgtggaaagataatagaataatatataagaggaacggactactcctcccgttgccaattagttttgagatagaatctcat

SEQ ID NO: 251035 - DNA, 1423 bp, Cannabis indica
accaaaatgaaatgcttctcggctttgttgaggaggatgaggttcgcatggctttgtttcaaatgcatcctgacaaatcgcctggtccggatgggatgagtccggggttttatcagaaattttgggatattgttgggagtgatgtggttcggttggtacgggagtttatggatacgggggtgcttcctatcggtctcaatgataccaatttggtattgattccgaaaaagagtagtccttgtaatatgggcgagttaaggcctatttcattatgcaatgtggtttataaggtcctttcgaaagtgttggctaatcgcttaaagaaggttcttgatcaagttgtctctgattttcaaagtgcgtttattccaggaagactaatatcagacaacattatggtttcctttgaagtcatgcactacttaaaaaggaaaactagtggtaagcaaggttatatggcgctcaaacttgatatgagcaaagcttacgacagagtggagtggcgatttttgaaggatatgttgagaaggatgggttttgctgagaagtgggtggatcttgtgcttcaatgtgtggtttcggttcggtatcacatcatccatgggggtaggaagctggggccgattgtcccgtctcgaggtatccgtcaaggcgatcctatatcgccttatttgtttattgtttgtgccgaaggattttccgctcttgtgaggagatttgaaaggaatcagttgctacatggctgccgtgttgctaatggggccccgagggtgtctcacatgttgttcgcggatgatagttacttgtattgtcaagcttcggttgaagaagctactcgtgttatggagcttctccgtttgtttgaattggcttcgggtcaagtggttaataaagagaagtcatctgtgttctttagctctaacacaaggggagatgttcgtcagatcatatgttcggtattgggtatgatcgaagcaggtgaaaatagctcttacttgggacttcctaatactatggggaggaataagaatgctgtgttggggtttctcaaggaaaaggtgctcaagaggatcaagagttgggacactaaattcctttctcgcgcgggtaaggaagtattgataaaaacggttgttcaatcgttacctacttatgcaatgaatgtattccttctcccggttggagtgtgtaaggaaattgagagcctaatggctagattttggtggaagtcttcttggaatcaaaataagggcattagttggatgagttggtctcggttggtgaagcataagcttgaaggtggaatggggtttagaagtcttcgtgagtttaatatcgctatgttgggtaagcaagggtggcgtcttgtcactaacccttcttccttggtgagtcgtgtttataaagcgagatattttgctca

SEQ ID NO: 251036 - DNA, 653 bp, Cannabis indica
gtctactacctactttcctttaatagcaaatacaatcaatacaatttatacaaagcacatgtaaaaaccaagtactgattcattcatacctgtaaaagcaatgaaatcagggttttcagcttggatcattctgcgcaaaaaccaagtagagtttagatcggagcaatggcggaagccggagatgggaatgtcacggcagcgagaagtgggtccgttgccgtagtgcaaatcagcaacctggaggattttgaaagtgccatcgggacggaagcgaaggggatgaggagggttcttcttgatgcgaagaagaagatgggattcatgggggaggagaacgtaggagtggaggaggtagagaatggccaaaatgaagaagaagtagagtaatgaaaaaactgagtggttccatttttgagttgcagactccattctagctaattctagtaatgaacaagtcttggtttgtttgataaaaataacacttatttctttctttctttctttcagctcttcttcattataagtttaagtaattagttgtaattaatacacctgttagtttaagagtttgttaaatgaaccttcaaaaatccaatcataggcatatatcatgattaaattagccctttcactattatttactactatattct

SEQ ID NO: 251037 - DNA, 525 bp, Cannabis indica
agaggtatgtttcaaataaatataaaattagagacaaatttagttaattaattaataaaagaagcatttttcaatttaccccatttttatactggtacacgttagaaattacatactgtacgatttatactttctttttttaaaaagtatgaaatttttattgtacccataatgccacgtcttattttgcatgcccttatgtatttcttttttttttattaattaattttttaaaaacatttctaatgtaatgttcatggtcaaatcatgacaatttactttttttttttaaaaaaaataacaaataaaataaaaaaaacttaatgtattattatttgttttgtaatcacacgttaccccctcatttgttatttcatcgtttcatattttttttcatcatcacctttatttttaagcttttcatctctctttcatgttcatcttcttcttattttttttttacaaatccatacagttgtttagactttagtcacaagatgtgcttgatgtgtgtgtgtgtgtgtg

SEQ ID NO: 251038 - DNA, 934 bp, Cannabis indica
catatatagaatattacgtaattgattctgtccagatttaatgaatataaaatattcatttatcagaatcaataatattattttatttccttaattagaaatattctaataattaagtctagtactaagtttaatataaacaccacaaattatttacacaccagcaaacatcatccttgagtcttcacttttttttttcactagaatttggtcgttcttcagtgttcacctttttttaccctaccctatattattttattaatttatataattttttattttggcacactgaacgtggtgactttcaacactttccatactaaggcaaatatgtttttttccataagttatggctttgtgtgatttttcttaaaataaagttgaaaaagaataagtgctaaaaatagtatttatatttaatatataatcaaattatagtgagtggtggagttgaactatatatgccactttatcaattatggcacacatagtttagggctgagatcataaccaaccaaaattgtactatactacttggcaattaattataaaaggacatcccacatccataccaaaactcatcccacccattttttatttttattacttatcccaaataacatcacacaaaaactagttaagaaaaaataaagaaagaaagaaaaagaacccctttagctagctatacacattaactaatcaatattagtactataaaagagagatgaagagtggtagtagtttgatcataggccatccaatcatggcatcattagaaacccaaaagccttatattgctatgatttttgtacaagttgtttatgcaggcatggctttgttttccaaggctgcaattgctcaaggaatgaatccttttgtttttgttgtttatcgtcaagcctttgcagctttcgccttggctccttttgctttc

SEQ ID NO: 251039 - DNA, 880 bp, Cannabis indica
gggttatgaggttacttagcggggaagtaagggcattttagtatttttgtcctttgattagtcaccttatttttgagttgagagtggttgtgactctatttagataagtgtatacatcttccctctctgatcgagagggacactgacggtgtctcggtggcagcccacttgtcctaggttgagtcttgggatttctctcgttaccacaagggattccctgatccctaggtcgaggctatcttgcatcctcattcatgcgagaagcttctagtatgtcattttgttcgttatcttggtttgtaaatccttgggatccttgaggaacgtcttgtcgttgctcttgattatttgtctgattatccattggaacatcccttgtacaccaaggttgttcttcctgggtgttttgggaattttcgtggtttgcttcctgtcttctggttcttgaacctcgaggtctgcctcgtgatcttcttactccaagatcaggttgattctgaggatttgttccttgtgtcgcccttgccgctgcagcctctctttctaattcagcgtgtcgtcagttagactcggctaaacgttgtcgaagttttctattttttagttccactaatggtacatacctagttagatcataaccatcctcacttctaggcacatacccagcagtattatgggtatcttcattctttctttctggattttgactatcaccaccatagtttcctcttaaacgtgatgttccagtggtatggagtctttgagatcccattggttcttttctagggcagtgagtagtttcttcagggaaatttccatcattttgattgttatcaaccatcaaaatatggatgaaattctgtttgtaaggtgggatttt

SEQ ID NO: 251040 - DNA, 875 bp, Cannabis indica
gatcacaaagcacccaaacaagacagaatattgttatcagagaacaagcagggacacacggtagagcagcccatagaagaataacacaaagtcccaagctaatttagcaacattagtccattgaggcatttttacaaacacataatatgcatcacaaaagaagaacccaatgaataaattacttacattattctgactttccgatttctattctgagtttgctctggtttggtggttaacggcggaggggtctcggtggacgtcgccgatagtcctggctaagtctcgctcgggtaaggggtggtggtgcagccggaacaggatgggatttagtgcttatttcagtttcagaggtttggctcttgggtcggatctatgggctcgggttagtggttgggggccgggctatagcttgtgaaggtggtggtgcaaaaatcggttccaattttgggctttcttatgaaaccaaaaaaaataaaataaaagagaaaacaatcaaacatcataggaaaaaaaataaaaataaataaataaatatagggtctctttttcttttttaacgataaacacattcaaaataatttgtgtaatacatatcatcatagaaaaaagttgagatttcatccatttatattagttcattatctattgtgagtgctctaattcatgcatataacaaacataacttgagatgtctcaaaaaattagataactaagaatatactctatgaaagatttttaataacaaaaaaaaaatgaatctctaagagaatgtaataggcagttcgcatgcgagttgaagagcagaatttggttatgctaattttctaagtgaaaattgctccaattctatcaatatgtacacataatttgta

SEQ ID NO: 251041 - DNA, 771 bp, Cannabis indica
tataaataatttgaaattaggaaaagaaaattaaaataaataaaatataaaacataattaaattaaaactaaagaaaccctaattttgaaacctaaaattatcacacatccacatctctctctcaaccgcatcttccaccctctccttcattatcgcacctctccctctgttcattattgtacagccacccatccattctccgaccaccccaaaaacccatccacggcaaaaatggaagccaaaccaccatctgaataatccaactaccatcaccaaacacaatcacacatcgcatatccaaacaaagaaaaaagaaacaaaaacctatttgtttttctctctctaacttcttcatcatctttcctgcatcaaatcaactcccaaacaaaaaattgattccacattccaatttaacatttgaaatctctaataaatttcttttaacattctgaatgccaaacaattagcaaaaaaaaaataataggaacaagatttggtctctcaatggtgttcttccacctggttttcactacaaaaaaaccctcttttgccggcgcaaggcatttttgcgccagcaaaagtacactaactgcgccggcaaagcttatctgggaagcttggtcggtaaaggactttttaccagcgcatagagtaaatgcgctggtaaaacttccttttaccggcgagtaattacgccggtgaaaaaaaagcgctggtgttaaaaaatgcccttatttgctatgaacctgctttgataagcttttgccggc

SEQ ID NO: 251042 - DNA, 917 bp, Cannabis indica
caattctctcccaaagacatttctcttgttcaatcaagttgtcaactgatcctaagaggaataagagaacaataacataattattaaaatctagctgaacaactaggttcgacacaaaaaaaacactctcctacaacaaaagaaaatatgaaaaaaatgaaaactaaaagagctaaatcgattggctgttctcttagttatatgtatggaacatagcaaccctagagataggtacaaatttgatttcacaactgtacaacactttcctaaaaaattcatgatttgcagcatcagaatcggactctgcagcaacagagtaggaccagaaaggaaactttccaaaaaaaagagcacgatcataaatatggacttcaaacttgccaaatacattatgtttgatctaatcttatcaaaacacagccaaaatcattaaagagaaagaggaaattcaaagttaccaaacatagacaactttccataagagaattcattctcttacaagaagttctctaaacaaaaaggagacaactgaaaaggaatcttttctaagaagaaaatgagcaataaaagcacgaaatcaatgtaaataaatcagttcaaatgcagaagaaaatcacatataaaaaaatattttgacacctaatttgctaaaaaaatgactttaaaatcttcccatttcgtactttagataattaaaatatttttaagtaatatacaccaacaaaataaagttagcaaaaccatacaattaaactacccctgagaaacacatcattaaatagaaatagaatgcaaactgattaaagcacaaatttgtacattttaaatctttaattatgcatataaattaatataaattaaatatttcataatttttatggtaaatttatttttattagaaatatttaatttacttt

SEQ ID NO: 251043 - DNA, 1108 bp, Cannabis indica
aaagtagaaaccaacaaattgtggtgagcagcccaatctaatcccgtgagtaaagctttagcttccatttcttgtgacttgtatctacctgtgaatgactttgaataagccgcaacaatttgaccagaagagtttcgaacaataataccaacaccaattttgttacgggaaacatcacaagctgcatcaacattcatttttaattcattcagaggtggccgaatccatttagattgagtagccgcacctgtagagatcataggtgagttctgaatcgtagaatgatgctgaaaattgcagtaataggcagcagatttcgcccatatttgtgatggagagaggaccggtttgccatgtatgtaattgttcctatcagtccataaaaaccacatcgtgcaaaacatttgttccatttcagaagtggttttaagggtggataacaaaaccagacaatcactgaatttcattcgtgcaagcatatcataatcaagagaataaccagcagaatgccaaactttcttggcatgtttacagagaagcagtgcgtgttttatagactcccaggcattagagcaaagactacatgctgcagaatcaattatcttcatgttacataatgaagcagcagtaggaatagctcgatgaaaagctttccacacaaaattttaactttggaaggcaatttcagattccaaaagtatttccaccatgaatgctgagaagtagaagaagtaggaagctcggattcatcaagttcagttgcaaggtggtagcccgtttgtacagtatactcacttgaattagtaaaatgccatatccattggtctctcacatgagaagaagatagaggaatagaaagaataaaatcaatgtctacagcagaaaagtcacaggtgagtaatggcaagttccattctttgtcttcagtaatatagaacgaaaccagattctgggggtctcccgagtagtagaaaggtgtaaattcagaatgcctaggaatccaagggtctgaagaacatgtaacactagaaccatcaccaatttttaacctcaaacctttcacaagaagatcacgaccccaacaaataccttgccaagtgagagatga

SEQ ID NO: 251044 - DNA, 946 bp, Cannabis indica
aatttatcagaaaaagtctttttgacatattggggaatgtttcctgcttacactttcacacacttatgcttgacacattttgtggtaaaatcttttctatcctcgaaaatggtgttataaagctgttacatactgtttaattttctttaatattcttggtgactgagtcaattttttcctgcataactggtatgacctcattctactacttcattagcttgataaaataatttctgactattcttatgagtttgattttttcattagggacaaagacaagcggacattgtgaattttagttcaaaaaatatcaaggctatttcattttctgtcttttatataaaaatatatatatacatataataaaaattgtgaacgattctatcaattgagctttcttaaaaattcttgttatttttcttgttatgttttattattttcttaggcactattttttttctcttacgtgttgattagtgctttatgtgtctccattttctctcttgttcattatttgcaaattattttggtgggcattttttgaaataataaagaaaaaggggggcatatttcttcgatattttttcgattctttgttaatatttttcttttcttttttcatttatggaaacatgtttttttttgcattctttattttgtgtttcctttatttttggaaatttttttttggtattttaggaaactttttcttaaataattaattattttgtggtttcctttttggtggcaatttcggttttggtagggtgtttatttcttagattttgtggggatatgttgtttcctttttcctttttaggaaaccttgaccaatttttgaaaaatctttttggtttccctttttcctctccacacgtggtgtctaaggtaaggaagttactttccttttccattttattttctgattttgggtaagtcaaatcaa

SEQ ID NO: 251045 - DNA, 1037 bp, Cannabis indica
aataatattataaaaataaataatttttttaaagtaatttaaaacaataaaaataaatatataaataattttttcttttttttcttcctcttactccaatcgcccaaacccaaatcacccaaaccccaacccaaattcaaaatagaaagaagacccaaataacaatgatttgtattgattttacgtaaaaatgttttaggtcttctttgttatgtaattaaatcgaatagaaagtatatcgaaaaatgcaaataattaaatcgatcccacaaaaattgtaactaagtaccaataattaaattaatcccattctcgtcttatatcgaaatctatgtctattcactatagcataataacactcacttatcagattttacattgaaatcataaaacatttaattggtgatcaagcaattaaaagtaattaagtacaaatgaaatatatgcgcataaaaaattagacaagaactaaattacattaaaactaaaataaagtgtcaaacaatctccattaacaacctagtaaaaatcaagctactcataatcattgaaaacatccgataacaattaagtaagaacataagaaaaatagaagaaagtaaagaactcttcgaaaaataaatgttgaaagtctttagagtcgttttttgtttctaatttttgtactctttaatcgtttaaatgttaaaaaataatcttgctaaaaaagataaaaaaatatatatttatatatatattaaaaaaataaatatttaaataaataaattataataaaataaataatatttaaatatatattttttattttgtattttatatttttaatattattattccacatatatgtttgagtttgtgatttttatttttttactatgtaataaaatataatttaaagtattataatttattaaatactgctaaacttttttttactacagttcttattgtcaactcttttcttactatacaactgtgccaactatccttaaacctacacttagagcactcccaacaacttctttactttattcttt

SEQ ID NO: 251046 - DNA, 645 bp, Cannabis indica
gtttataacctttttaccccatcaaggtagccaagaaatcagcatttgattagcgttggttgtaacttgcttgcttgatgtgaacataggcagacgcacccaaatacctttatgtgaccacaattaggaagcctattagtccatttttcttgaggtgtttttaaatcaattgcagcagcgggagacctattcaccaagtagcatgttgtcttgatagcttctccccaaaactatctttccaaaccagctccagtcagcatacaccacactctttctatgagggttttattcattctctttaccaaactattttgttgggagtctttggagctatatgatgccttggtatatcttatttgacacaatattctttgaacatcccaaagcagtactcaaggccattgtttgttctgagtttcttgatcttattcccaatctattttttaatcagtttcttccaatgtataaaggtctcaaaagtttcatccttgcttttgagtaagaagatccataccttcctagagtaatgatcaaataatattcaagaagtagcttgctccaccaagtgtctttactcttgatggtccccataggtcacaatgtatataattcagatgttgttttaatgtgtgcacaccagttggg

SEQ ID NO: 251047 - DNA, 701 bp, Cannabis indica
atttcattgcaatttgcttacaaattttatttatcagcaaaacatgagtcgcattgagaattggaaagtttgtcacacaaagaagggcagagacgagtttgttaacgagcatgccaaagaaaaatatgtaatattatgtaaactaattacttttgaatatattcaaataattgtaagtttgtttggtttctaacttattcttaaaataggtacggatgaagacaagatatgacagtcaatctagtccttctgagcgtggacaagatgttgagatttagatacttcatgagactcttggagagaggcatggcaatgagcgaggagtgggacgcaaatcgaaagggcaatcaggaagacggcgctcacaacctgctgtagccactgaacaacctgacttaagccaaaccatatttcatctgcaaagacatctttaggcgatgacacaagtattgacacctaaacaacatgcccatgtggagacagtgatgagtgacgctgctccaacgcaaccaacgcaaccaatgcgtccacaactgtcttacttttatacgcctggagatggatctggttcatcaccaatgggtttcagcatcaacagtcgcagcaagctccactttcatttaagcgattgttacagcagccgtttcagcagccttagcaactccctgaacaaatagctcatcaattttaacaattttaga

SEQ ID NO: 251048 - DNA, 553 bp, Cannabis indica
attttctatttaataaagttaggtgatgtttggttcattgtaatggtaatcgtaatcgtaatgaatagatccattacattgtttgtttttcctttttaacttttgtaatccattaatactcaatacaatgtaatgtttattacattgagtattgtaatgataattacataccaataccaatgtaataccgattacaattacactcaattataaagaaaaaaaaatattttaataaaactatagtaaaaaaagtaaaagtctatattacccttttttaaaaatattttataattttataataaaagtaataaggttattttattcaattaatacacattttattccattacattcttatgctaaattaaacacaataattctattacaatgttcattctaactaacaaatcaaacatatataattgtaatcaattgtaattaataaagcttatgtactttgagtatagagaatgtcccaattgagctgttgtcatgtttggtagcagaatttgaagtttaataaagcttatgaatattcattcaaaaaaaaaaa

SEQ ID NO: 251049 - DNA, 1144 bp, Cannabis indica
gtctgagtcctggtttgagtctgggtccgggtctcggtccaggcccgaatcccagtctgggtcttagttcgtgtcgaggtccgagttagggtcccgggtgttggtccatgtctatgtctgggtcaaggtctcagtccggatctaggtcccaagtttcgatcctagtctaggtctgggcctgggttcgagtctgggttcgtatccaaatccctatctagctttaagtctgggtctaggatcaagtcccaagtctaggtctgggtccaggtctcgatcctggtctgggtacacaactgtgtctgggcctgagtttcggtctcagtttggttctggggctaggttcgagttcagttctaggtttgagtccgggccttggtcaatatcctagtcttgttcgagggtcctagtttggcagttcttgtttaggttcccgtgttgggtcccgagtttgggtcagggtcccggtttgggtcctagtctgggttcgggtcctggtttgagtcccaaatctggatccctgtcacgtgtcccggtctggttctggttcaggtccctggtcccaggtccgagtttgggttcgggaccgagactggggtgcggttctaggtcccgaccccatttctgtgtcccgagtctcgttccatgtttggttctgagttcgggcccagggtcggcaccgagtccagatcttggttgagatctaagtctggttcccggttaaggtctaggtctgggttggagtctgggtcctggtccggctatggttccgggtttaggtccaagtctggtaacgattctaggtccaggtcgatgtcttggttccggtcccgttcttgggtcccggtctacttccgattttggttccaatttcgagtcatagggtacaggttaaggtccaggtttggatctgggactgggttcgggtcttgatctaggggtccggggctggttcccagatccagacactgactacaggttaggtccaagccctggatccatatttggatcccgatctcgggtcccagtctagttccatttcgggtgccaggtcacgagcccgaccctacgattcaagtccgtgtctagggtcgggtcgttaggtgacggtcgatagtttcggttcccaggtccctatcctgattct

SEQ ID NO: 251050 - DNA, 1135 bp, Cannabis indica
ctaaaaatacctatagtgacatgctaggcaggtcgggacatgctttcccagtccgttttggcggactctataggttggtatttttaatataaagaaattaaaaattatcggtattactctttagtgacacttcatatttttgtgacccacattacaggacactaacactaaaatttagagtctaattatgaaggtcactaaaaatcactcctaacactttaatgacccacagtttttgtgggggtcactaaatagtgtcactaaaagtccaaattgtagtagtaattgctagccgaccttggtagcaccatagaggggttggctggctagtgttgccttctggcactaatcttgaccttgttttgtttttaggcctttatgaagcttagtttctcgcatgggaactccaaggggtcctccagtgctctctgagagcaggtaaagaccctggaggctgagctcctagtgaggggtgaggttgtgaccaacttggaggctcttgttcaatagaattgggacatgatttctagtttagagctcatgatcaacaccaagaatcaggagaatacctcgctcactattgacgtttccaggctagggactaaactcaagagaagtgaaaagaagctgaagcttgcccttgatgggcagaaggccataaaggacgagtaggtcgacttatctttggagatcatctacaatttcaagatgcacaatcccagagctgatctttcttacatgagggatgtttctttctttgagagcacactagcccaagggaaagcgttgtatgagagcaagatgaaggcaaaccaaacaactatctagctataaggatcatcattggggcagtttaatgaggccatagctagcccacccaggtgcacagccaaggttttgaccaagtgaccggccagcctacaaaggctatgggccgacccacacttcagcgatctgggcactgcaacttctaactcagctccacatgaacttgcacacatgtaacttcagtttattagtaattttagctttatgattttattagcatatacattttattttatgttctatatggcctattggcctttttacattttaaaacactacttatgttcagccttagggctttcatgtt

SEQ ID NO: 251051 - DNA, 736 bp, Cannabis indica
ttcctagacgagtcgtgtctgagggcagccctgcccgtgtcttcacacacaggatttgccccatgttcgcgcgcgtaaggggtcttgtccgaagcttttggtgtgtgcatgcaccaagcttcaacacccatggcatccaatttttaaaccaccataactttgtcaatttttatcgaaatcgagttccgtaaaaactaaaattgcttattttttcacaaggaatccaagtaaaatattttcagaacaaaaataaaattatcttcatggaatatttttgtaattcacatatattcatcaaataagacataaatcaacatgaacacatccaaatcaacacaaaaacaatattcatcgttttaaattcatattttatgaaagtaaatcattaccatagctctgatgccggttgttgggaatattttaccagaatctaaatttactaacaagtatgttgaattaacatcctaaatatgaatatctctaaaataataaaataaacacataagggttaagaaaaccttacattgattgcagcggaatataatgactccttgcgttcaagatctctagccatcaagcagaactgaactgctagaatagggaggctaatgatttgaatagatgactcaatgagagggtcgaatctcaagttgaggagctacccctcataagttatcccctttaggaaaaaggtccttatttatgaattttcaataagcaatggcttaattgtgaa

SEQ ID NO: 251052 - DNA, 1370 bp, Cannabis indica
actcagctagtgtacagattcttcagccaaagtatagcactactcggacagattctcttaccactcacactaggacaagtgcccacaagcacattagtaatggcacagttcttagtgatcaaaattccttcaacttttaatgtcatgttgggctgaccaacctatatgacataagagccatcacattagtctttcacctctgtgttaaatttcaaacaaagagtggagtgggctatttaaaaggaaatcagagaactgcacaagaatgctacaacctttctctatttcaggccaagaaagaagatagttcttgccatagtttaaaaaatggaaaaagcatcgcctaataggaatttgtccaaggcggggatgaagatatggatccccgacttggggaaacaaacacaaatgttgggccagtggaagaactagaagaggtggagattgatccaatcatgtcgaccaggaagctcaaaatttgcaaaggtttgttatttaaaataaaattatcttcaataatatttctaagagcaaaccttgacatttttgcttggtcacatgaggatatggtcgagattggtcaaactatcatgtctcatgctctaaacattgatccaaactttcatcccatctagtagaaaaggatattgctagaaaagaacgtgcacaatcactgaaagaagaggtagaaagtctctgtataaacaagttcattattgaagctttctacccaacctgggtggctaatcttgtactgtgcccaaggcaaacaataaatgatgagtatgtattgacttcaccgacctcaataaggcatgtccaaaagctacttccacttcaagaatcgatcaacttatggatctaacaactgggcatgatatcctaagcttcatggatgcttattctgggtacaatcagataggaattctccacgtaattaagaacacactagctttcaaacagaattggtctatattgttacaaagtcatgccatttggtctcaataatgttggagatacctacaaaaggttagtcaacaagatgcttaaggaacagattggacaaaacaaggaagtctatgtggatgacatgctcgtcaaatctaggaaggatggggggctcatagaggattgaatcaatgcttcaaaatcctcaaaaattaccatatgaaactcaatcccttaaagtgttccatcggggttagcttgggtaagtttctttgattcattactaatgctcgagggatagaagctaacccacagaagattcaagccctcttaaatatgatgttgccaaaaaaagtgaaggaagtgcaaagcctaacttgtaggatagccgcactcagcagatttgtttcaaaatcaagaga

SEQ ID NO: 251053 - DNA, 608 bp, Cannabis indica
tctctctctctctctctttttgccctaaaccacaaacctcattgatgtcgaagaactctccttcgctctttcctcgcactctcgttctctcctcctttcaggtctcctttcctaattttctctgttgctccctcgggttgtaagctcatctcttacgtcaatgggcaattctacttctactttatcgttaacacgaggcatcattaaaagctatacaaatacatatatatatatatagaaaattcaatatgtgtatatatattttacatgtataaattcatttatggtgaatttttgttttgtgttggttgccatttcttttttctagtttagtttctttcttagttttttcttgaaatgatttcttagttgctttatatggattgtttgaattttatgtattaatcaatgttgggattaaactcacttaacctgcaagtcagtatgtttatctatttgctcatcagatgaatctaaagaaaattgatgctacttataacagttagaatttaataccaacttaaaggggacccaccaacaactatatataggggttcctctattctcaaagagagttctgagttaagagttctgatctctaatctcta

SEQ ID NO: 251054 - DNA, 574 bp, Cannabis indica
tcacacccaaagataagattcataaaatggatctcaaaaacacaaaataattgacttatgcataaatagactctctcttattatatgccacaatgattaagccataagaagggccttcatttctgcaacaaagtactcatcctttcttgtcgtgatagaggtgatgaatacatcatattcagcgggaagactgttaaagatggcttgaatatgatcctccagaatttgcttgtgatcgatagttgctatgagatcaacaagacctttgatctatgaggagttagtcgttcaaagatctagtcatcttggtgttttgcaactgagttttgtgctggccgatattagcagcattgagagcaatgtagtactcactgaaagattaccaaattttaactatggtgtctgagtcaatcatgtgatttatgatttttttcaaacatagatgagagtagccacgagataagtaaattatcttgttgttttttaatcctcatatgtaaggttcaaagtattagttttttcatcttgagtgagaaattttaagagaatttgagtgaaatcaaggtatttaaag

SEQ ID NO: 251055 - DNA, 622 bp, Cannabis indica
atgtgatttaggtgagttctgaagaaaaattccaatccttttgtggagtacatctttagttttggataagtaaagctttattatatttagtgttttactagcaggagtgagacgagcaagccacagtctaaggttcatacggacgaaaatttgagttttcttgctcatccatcatttggctcttcatcatttacaatatgtgatgttgcaccatctcaaatttgttctgattatcattcaacacaagatccagtgtccttcagtaatactactgtttctgacgaaccagaggaagctcagagtaacgatggaaggtcaaaaacaatggtaaagttagtataataaataaatattagtattattatgaagaaatgaaatattatatttgatagactgatctatgttaattaatgaatttcaggttgctgaggacttgtttgatttcgaagtgtatgacggaaatgttgcatctggtatgtaataataaagtagctgcagcagcctgctatattttctactgtattttatgtgagtctcatttatttttttcctcttaaatgtggactttcaggtcaatgtgttggcaaatttcaacccaaccccaagttggggaaagggaaaa

SEQ ID NO: 251056 - DNA, 791 bp, Cannabis indica
aggaaggttctgatcctttgaacaagggaggataaagaagaattatcttgccaattaccattcaccttggtaataaggttaaggcaatctgagaagacaaaccgtggttgcaaattagaagcaacacaccacttcaaaccttcatagagagcttgagcttctgcaaaaaggggggaagacgctccgtgtctgaaaatctttgtagactgatggacttgagagagaccctgcataaaaaccaaaccaaaaccagtgggaggggtatgagtattaagtgcagcatcaacaaaaagtgccgtggtagagggggtcaaaacttgatccaatacagcagagcagtaagtgatagtgtggtgggagctagggggaatagcttgggcttcctggtagtcctgcaaaaaacttacaaccgattcttgaacattagcctgaggggagtgtttttgaaagagacaggcatttctgatgttccaaatttgccagattataccaagaaacaagggaatttggtctttgggaagctgcaaaagactgagaagatagaagtctttaatgtcaagcctggaatggtcttgaaaaaactgcttaaagatggtgtgatgccaaatttgtttaactttggtacagtgaaggagagcatgagaaacagattctgcttccaccccacataaagaacaagtaggagaagggatagagtgtttaaggaacaggtttaaagaacatgggagaaggtggttgaaagctttccaagtgaaatgtttaattttaggagggattttcaaggtccaaag

SEQ ID NO: 251057 - DNA, 665 bp, Cannabis indica
gtagggatgagatgaagaagaagatgactactaaggataaaccgaaaccaggtattactcagcagcaggttactgatgtggtttctaattcggtttctgaacctgagaacaagttggatgagtccacacaggtgcaaactaaagctgaagttaatggtcagggggtttggcataaacccaagaagactattcagggaaacattaagaaaaatctgactggtaatgatgaattacagcagcagcaggtagttatgaattcttttagtgctttacaacaaggcagtagggaggaagctaatctagatcatgagcaagaagggcacaagatttctactcaattaccccatggatagttgcaagatagcttgttggaatgttaggggtattaacaataaggagaagcaagaagttgttgctgaattttgtaaagttaataaagtaggagttggtgcttttttagagaccaaactcaaagagaataagattaaagagatgatggataataggtttgtcaattgggattattacacaagtgcaactatagaaggaagacttttgattgtttggagaaaaggctatgtgcgaactttagttattgctgaatctcctcaattggttcactgtttcatccaaatgtcaggttgtgaagaagctttttgtgctac

SEQ ID NO: 251058 - DNA, 1142 bp, Cannabis indica
gatttcgtccagaatttatagtttgtagttttttatcgtttttggtttttcattttggttgttttgcagttttgaacgatcgcggtattttcacttcatggttcgctctgacagctgaaggcttagtgaatgtggtatttttgtaaatatttgtatgtggactgtataaatatttaatgggccggcccactagtattttgtaatttttttcctttttgtattttctattttttcctatttttaagaataatgaaattagaaaaaaaaagttaaaaaaaattaatataattaaagatattaatttaaataaaataaaagttattaaaatagggtgcctttagaaatttttgagctgtaaataaaatttccctttcataaatcttgaattctttataaaactttacataaataggctttttaaaaaaaaataaaataaaataaacatatgtaattagaaaggaagtttttaaaatttgaaaatttttggattacttcaataagaatttctcgattttcatgccattttctcttttatattttttaatatctctctaaaagctctcctagcttcttcctcgcgagaatttacattcctattgacgagcttaaagattttaggtcgcatttggttaggatgaataaaaatattaaaataagaataggaataggaatggaataaaatttaaaatacataaaaaaaattgttaatttttttctcataatatattagaatggtctttccttccatttaaaaatagaataatcattccatcaaaatagtgaaaaggtcattccattggaatcgcattccaatactttaatatgcaaccaaacaaaagaattgaatgaaaattatttcctttccatttcatttcattacctccaaccaaacactaccttaatgtcttcttcctcttccattaatttccaacaaccctaatctaattttgtgctatcactttcatttcacacatttaatgtacatatacatatatattatattaaatattgctattttctttttaaaggaaatagtaataacttcataaattaataagcttcaatcaatacaatagattaaagattaggaggagcagaactactctcactgaaaaatacaatctggatacaaacaagagcta

SEQ ID NO: 251059 - DNA, 591 bp, Cannabis indica
gcttggattgaaagagaaacagaaggagaaatataaatttatgtgtacttttttttgtcttagtactttgtttctacagaattcattcttattctatctattactttgtaataataataataataataataaagagataaatattaaaaataatctattaacttaaagctcaattaattaatatcctggtaaattattatttaccgttcaacacaccatcacactaaaatagattctataaagctaaattggttattaataaataacctatttatgtaggatgttattttaacatgatttaaatttactgacatgtatgtttgattatataattatagggtaaatctactgtaaggcgtattgttactacctcatgatatggggaaggtaattcgaccagtaagattaaaataaattaattgtccaactgatgtaggtgtattcttatacagttgattttctctttaaattaaaaataaaataaatgcagctactttattacttgtgggtcctacgtgtatggccttcagagaatgaatgagagaaagagtgcggttggccaagggagagaaagagagatcaatcacaaga

SEQ ID NO: 251060 - DNA, 655 bp, Cannabis indica
cacctatccaggggcccaaaaaaaaatatttacctttaaaaattataccatttttttttactgattttgaaaaataccatatttttttctaaataagggcccaaaataatttttttttctatggcccactaaaagtcagggccgccctgaatacccactatcttcttcttcttcttttttagttttattaattaaaagtagatcacataggtgaacatctccatataatcaccatctttaatctcccattcatacctcaaagaaaccatctcaccctcttatagaaacgctaaacaattgctattttcactctccactataataatgtaccgaaatatatgaaattggcggtgagtttgtacaattatgagtttgatttattttttttatctttgaatgtgttttatgggtgtgattaatttaaatttgttaatgaataatttcatgatttattcttttgacatttttgcagtaatcaaaggaatactaataaagatagacacatgatggaactttatatttgcttcactcatttatatatttgtgttttacttaataatagattttatttgtaattctcctggtgtgtttgtagagtattaacctaaaaaacttattattagtctctgtttttatattctgattaccttgcata

SEQ ID NO: 251061 - DNA, 1806 bp, Cannabis indica
ttttttaatggcctactaaaaaaagtgccttttgattttcattactctctcttttgttttttgaaaaataaaagtatatatacaatactttatgtacataattaattctttcattcttaaagaaataacacataaaaagatatataaaatattccaacccccaattggtgcttggttgattatattgaatatataaatataaataatgtaataaataaattaattaatatattttattatttttgcacttttttcttaaaaaaaggtctttttttctttcttgaaataatattaaaagaaaaacctttttatgtggggggaatcaaattagaaagagaaaaaaaaaaatgatggatactttggtcattgaaataattaaagatcaataaataaaatcataaaaaggtttccatcaaaagcaactttagtgtgtatatatatgtatttcttcatcacttcatataaaaccctaaatagcttttgaccaattatatatttctcttatagtaaattgcggcatatctttgtcaattattatcatcatcatatataataatgaaaattgatttggaactttcacaattaatatatatatatataataaatacataaaataaaaatcatcttccaaattattatggtaattatgtaaacctatataccctatattagaaaaagtttttaggatttgatatatgagcataagccctagctatatatatgtatattatagggttaatcctatatctatatcattatttgccaatgtcttgtaaaataatgattttttttttttaataatggccaaacttaattaataaagcaacaatttgttggccctatactatatcaccttatatattattgatcaatttgtataatacaactaatggaataaatatgtatatgaaatgtttgcaaatgagtaattaattgtatacatttgttatttaatcatataatattagttatattaatatggttattattactatagtatactgaatttgtagttggtttgaggttatagattaatagaaatgtatttggctgtattttggaatgcacacgggacagaaaattaatagtattctctcgttctcattctcattaagaattttaactctcatatcccattgaagacggagcgataaattttctaatgtaaaaataaaataaaatttatatatgtataattatataaataaatttaaaataaaatattatattattttacagacataatgacatacatatagaacaaacaacttgtttttattggtgtaggtatatgtattttttattttattttttttaataataatttcacctatatctttttatttatttttttgaggaaacatattagatgaaaattatagtttttttttttttttctggtcctaagatcattgatgataatcacatgtatcagaaaactaaaaacagaaaacaaatcagcttttttcacacacatatgataggcttcttatttggttggtagttctatataatacatatatatatatacacatataatattgttcacacaagcttcaaaagcttatgtatatgtacctttcatataaatatatacatatataaataaatatatatatatataacagaatataccttattcttcagcttcttgagacaatatatataacaatatcttttttatgtcacaagttttaatgagagaattgtaattattagcttacaaattaaaatatatatatttctatggtataatattgtcttaggtaaaaatatataagaatatggactactttcatttataac

SEQ ID NO: 251062 - DNA, 754 bp, Cannabis indica
ccctcttttcacttcggccaaccgtatcaaggataaccagtatgtagttgataaagctcttcaacgagtacaaggttggaaagcaaagctcctatccagcgcgggcaagatgtgcttaatcaaatcggtgggatcagcaatttccaattacgtcgcctcctctgatgtgatcccaattaccattgccaataaggtaggcaaagctctacgagacttttggtggggagactcgattgaaaaaagaactttgcagtccatcgcttgggatgttctttgtcgtcccaaggtgtgtggaggactgggatttcgctccacagaagctaccaacaaaacttttctcatgaagtgggcttggaaaattatgggagacaactcaagcctatggagccaagttatagaagctaaatacttaaaaaaatcaatgcttcttggatatcgaatccaactcctcagactccctgctttggaaaggcattttaaaagttagagatattctctccaaaggactttgcaggaaaattggagatgggaagtctacttctatttggtttcatccatgggtaccaaagggcactctccaaccccagcctttgcctggatgcctcggtcaacataagccttgtaagtaacttcatcgtccgtaatcattaggacgaagaccgggtgagactctggttccattactgaagatgctaaaaggatacttaatatcaccctccctatgcacccgacagctgaactcttaggatgtgga

SEQ ID NO: 251063 - DNA, 831 bp, Cannabis indica
ttattttaatatgtatttattgttattgctattattacaattgaattgagtatatatattttacatggagaaaatatatagtattcaccatatatatttaaagtgtttgaatatgtggttcctagcttcgggaagaaagcttgaaactagaatgttaaaaactgtttccagtatatagatcaaatggtagtttaaactatttgtagagaatgaatacaaaacaaagattatataaattaaaggtgtccaccatagtaatggggtttgccacaagaaatttataattttttttagtagtcaatatggataatagagatactgtatggatgcgtttatgtgagtacatggattaaatttttttaacatgtggaataacacatcattggctattgtattatctattagtaatactttaaaaaaaaattgggtcattatgaaaattaaaaaaaaaattgaacaattattctaataaacttcttcttcttcttcttcttcttctttaattattctaataaacttcttcttctccttctccttctccttcttcttcttcttcttcttaaagtcattagatgtgaaaaagaagtccttgaaaagttagatgcaaagacttctaaatggaagaacaagactctcggggattatttcttctaatattactatttcatcttacattaatagtttgtaatttgtaatttttattataatttttatttacaattttagtatagtttatgaatttttttttagttttaaccaataaaaaagtaataatattattaaaatacttttagttggccaaataaacaaatatatagtccaaataaaaaa

SEQ ID NO: 251064 - DNA, 4173 bp, Cannabis indica
aataaaatatgtttagagcaattaatattttataaatgtagaacatgaataatatatttaaaaaaactttaaaataagaaagaaatttaaaatatatgatatagcgtatttttagtacaattttttaaaaagaaaaaaatatatgaaataattacttagaaaatataaattgacactttatttacaaaaacacctccataagatgtggacaacattcatactttttatgtaattttaattaagcaacattcaaataataatattgataatattaaaaaattgataccaaacaacattcaaataataatattgaatactacaagagataagattataaaatgtgaaagaaaaacacttaaacgccacttgctaaaaacaagcctttaaaaattcaaaatacatgtaaaatgaaataaattaaattttgaattaccatttaacatgaatataatttgaactgaaataaatagggtaagtctgcattgaccctacagtaaactgtttctttgagctttataaattcgtatgctcgatccaagaattccatcattgaccctacaataagtctttttatgtctttctataattgtcctagaggttcaatacctcctaggattgcggccagcctcccttcctcggttaatcccttcactttttgtagcttcattcatgaatctactgatgtaagctcttgagagttgtcctagtatttgtttcacttcgaccaagtcttttaagtgagatgggagttgcctagaggaggagaattgcgcgtgaaattctaccatgaaggagttccatgaagaaaatttctatgaagccagcttgtaggtacactgataggcgacctccgccaaggtagctgagaaaactctacaccgtatgtcacctctcaccacttgtaagtcatttgcattttaaaatatttaatgtgacataaaggatcctctttgcccgtatatattttccacgttggcattttgaacttgggttgtaggccgagagcattgatttttggtgagaacagtgatcctctggtcaggtcaagttctagatctatgtgttttgggtcggttaggcattaaataagactcttaagttgatctatttgggcttgcaccaatggattaacttaaccttcttgttgaccgacttgtgtcacatgtggacctcttagaaaatggtctggtacataattatccgtattatttggctgaacaataggagggatgtcgtgcccgtctaatcctcttctgcgatttaaatcattactgaggtcatgaacagtacccattggtcaaagactgattcacttggaggccttcttgtctgcctattgtgaattatgggttagttcaatacatttgtctaaggacagacaatatcctaattatttcctcccaagtaatgagttggcaagacttgctcgtctaccatgtggcccactgactgaccctgtgacagtggattggaaaactcattaacttgggttttatgagtgtgtccagctagatgctcttctagctcgtactgtagctcagtaggaatgtaagtatctacccctgactgttgcccggtaacttgataggatctcttgatcagtacagtggcctgcctagaatgattatcgattgttgcttgtttggctctcatatttaccatctctcgatccctccactattcaaactagcgtctttactcataataggcaatatttatagctgctaaagtatctttttgatcgcaaagattgtattgtggccttgcatttgccttaatgtagctcgcaaattctgtagttcggtgtcatcatcgattggcctttatgtatttgtagtagatggaattccattattgggggcaatctactcggtctgagtactagtgattccagtttcttgcacacctagagtgaacccaactagaggggtggttactccttaccctactgtctattggcctgttagtggctgagaattagtcggatcgagatctgtctttactggatctctgggatttgtaggtatctagacattaggatctgtagtcattgggttagtagtgtcaatctaatttcccctccgtgtttgtacaaccatcttgtgttttgaaaaaagacttaaaacaaagacttgtatttttttgctctaaatgaaagtaccaacgacaataagtcaaattaaagcgatttaagaataattaaaataacaaatatgaataatgtaaagtaaagaaaataccaaatttatagaagttcatccccttgatgatggtaatagcccactccgctttagttttattgactgaagagtagagaagcaagaaacttgatctccctcgaaagctcttacaatgatccctgagtagttcactcttgaatttaactttttctcgtgtgttttctctgaaagattttatgtccctgaatagtgagatgattccactatttatagaaattaattacatcaattagtttcccgaaattagtagaaataaagcgagaaaactattactttctataattccaatgagaaaaatgaggaactaggcaggttgcctttcttatttgatattgcgtacatatcccatgagaatatggatcttctcgtgtctttcagccacggagatatgcaagatatctcctcttaaaatgttcaactcgcaccctctggtcaactaatgcgagctgccttcatgatggagctagtcgggtgttcagctccttcttactttgagtgttagatctctctgcacagttcaccaagagtagaatatttcatccaggtcatgaaatttgtcacgtgtcacccaaatagatgtcacatcaccccatgtagaaatataaataacaatatttaaagagaatatgacagtaagtttaagacgcacatgattttttggtttagaaaccaagatggaatggcaattattctattggggtcaagatatgctgcaattatccacactagtggttgaatctgcaatggctttccccttttcatgattagtgaccaagagaggaagaataggtggttgtctagtatgaagaatgatcagagtaattgtgttacgagccaatcgcgtaacgaaagttcgaggcctcgccttagaaaaatcctgcctataatggtcatatccgaactttgaaagtgcaacaccctccaaccaaggaccataaggaagattcagatctattccttcatccaacttttctaagaatattggacaattattaaaaacatggccaattattccacattcataacaaaagtctaagagtcgctcatagcaataatcaagccatagttcatcaaccatctacaaaaaagtaaccatttgaccccggatgagtagcttgtagacataaatacccatctgtattctcaaaaaaggattccatctttcatttaaaattcctcatgaacttcaataaaactactaatcaagtctctaatcactcaggcaaaagtcccagatttactaaaaagggcaaacgaagaacttggatccaaaatagagtggtagtcataaattccaagaagcattatgcaaattacaaaactaggtaggcataaaacacatgttgattatgaaatttctatagttctttggataaaactctcctcaatcaccttcacaactaaaagtgatcgtataagattcaaactcatatggaaagatatcaattgcaaatctaccttctaattgtttaaaaatgaaattctttaattgtttaggattttaaccccttttagagtgtatcttgcaaagcaagcaatgagatgaagaatgtggaggaggaatggggacattagatatgttaacaattttcctttctctatcagtgagagcattctagatgtcaggtaggaaaaaaatcatggctaaaggaagaaaacgaaatcaatcatcgaggcagaaaaagaacagagaaagaaaccaaattacaaggaagaaggcgagagtagttattgggagaaatacaaggaaaaaaaagaagcagacttaaagagttaaaaataaaacttttactaacagccacaaagcaaacattaattgcataattactttgttagaaagggaatgagctttaagggagtattttctattaaattgtgtactttcacttagtaatggaaaaatttagtgggtcctacctaaattaaggagaaa

SEQ ID NO: 251065 - DNA, 724 bp, Cannabis indica
tctcttcttcatgatagcatgaatgtagttagagttctcatcgccaaacctatgccaattaatttttgaattctgatgtaaatagcttacataagttttttgagtagccaagtatctttgatgcacttccttctcattttgaatgagcacagggcaagagggattgccagccggttgttcttgcgcacttatgaattcctcttttgcagccatatacaaggttttcaagtctccgttctctgagttatgccaatttttcaaagcatgtttaaccctgtagagtttcttcacaatgttttggaaattagtagccttagagtccttccaccctttaagcactacctctttgaacccctctctaaacatccaaaagttacaaaatctgaacgttctgttacaatagttaccaacctcagtaggtttaataatgtagtagctatggtccaaaattttcctccatctgtagctggcttcagtatttgggaattgatctaaccaagcctcattagcaaagattgtctagttttgagtagatcctcaccccctcttcatgcttgtttgaccaagtaaagtaagtccccaaacttttcaactaatcaacttgacccatggcgagccagtcttgagcatcttgaattttagagggtttgacttgtctacctccacttctatccttataatagaacattacattgaagtctccaataatgattcacgactcatt

SEQ ID NO: 251066 - DNA, 527 bp, Cannabis indica
atttcctatatttatatatataaatatattgaggcatgcctctacataaacccccctttccctctgccttttattatctttttccacgtatgaaataaatacctttatatatactgaaggaaatggtcttaaaaaattgtataacaattttagccttctaaaccaaccaaattctactgcctcaaaataaaatgatagatccctaaccactcaaaatgtgacttcagattgacactttccatattgaataagactctgaacattaaataacttctctacattatttggagaaatgctgaagcagcttaaggtggaaacattgcaaaaagtgataaatcgttataagtgcaatttaatattgagtcctacatattttaatttaataaataatataaaaaactgctaaccatacaacgcactacatcaatatagtgttagacatcttaaagtacttaatagcaatgctcctaataaagttttacatatagacgagttttttaaataggtgtcaatataagtgtccacga

SEQ ID NO: 251067 - DNA, 525 bp, Cannabis indica
acaatttgggctctcaacttgagaagaaaggtggaagggcgtatccggatagtctcataactggttttgtgggggcgttgagtgattgcaacttggtcgaccttcccattgttggctacccgtttacatgggagaagggaagaaatagtggagagtggatagaggaaaggcttgacaaagctttggtgaatcccgaatggttggctatgtttgctaggccggttctctacaacctcgaattctctacgtctgatcattgtcccatacagttggtatttaaaggtgtgtttccagctacttcctttcattcttttcggttcgaaaatgcttggctccgagagcctttgtgtaaacaacttgtggaagggtgctgggtgggttcgggacatacaagtattcaaagaaaaattcatgagtgtggggaggttttggagagatggggtcgggacattactgggagtttcaagagccgtatagcccagtgtaagaatcggattaagagcactaaatggggcagggattcgg

SEQ ID NO: 251068 - DNA, 721 bp, Cannabis indica
ctttattgatgttgaataaaatagattacattgaaatggagttttatttagggcataaaacccaacagctcagattcccctaaatatacgtggtcgtggtagaggtctcagaggtagggcacgtggccggggtgatgctaacccgccacaagctgcccaagctgcaagctaggatcaatgagagagatgaagagattcggtgattgagacagtagggtgctcttacagttcctactccagaaataccaatagctcctgcccttgctgtgcaagccgaacctgtagttgcagtaaaccgagtggagcctctgtatgaaaggttccgaaagtaggcacctccaatttttctaggaggtcccgatgtcataaaagtcgagtagtggctaactgtcatcactagaatcttaaactttatgggcgtcaccgataatgatagggtggcttgtgcccctttccaatttcaagaagacgcactggtttggtgggacatggtgtgtatgatacatgatgttactacaatgacctaggagaagttcgaggaactgttcaatgccaaatattacaatcaggcagtcagaagtgctaaaagaaatgaattcacatagctgacccagaaggagaacatgagtgttactgaatacacactcaatttgatcgcttggcaaggttggcctcgagaattgtgccaaccaattttaagaaagagaaatacctggatggg

SEQ ID NO: 251069 - DNA, 891 bp, Cannabis indica
ttagctttatttttagctgccgcgaccgaacgtttctaaataaataaaaaataaatgatatcatatgatgttaatactatattattaataaacatatataaagtataaattatacctaccagctagcattaccaaagatattgtcacacaaccagtgccaatcttggtccgtgattctataatttaaaggtcgattagctagtggatcctttccttctttgacaacatctttataataagcatgaagttagtttctataatttttgtaacgatttgaacaatgtcgttcaatgacgtcatgcatgtgtctttcttccttcggatcaattttgaatttatcctacataaataaattaaaataattacaatatttattgaaagataaaagttatgtaaaagaagaaaaaataaaaagaattatgtagaaaagaagttatttttgaaaaagttaagtaaccttaatacgagtatgaataagtgccttatcctctggtgggacattcttccaccctttatatttaagaggtgcatgatttcttactataaaaccaatttctgatgctaattttgaagcattgtctcctaccgggtgaagttctccctttctagctgttactggcaacttactttttgtatccgcaactactttacttgtgcctttacttctattttggccacgagttcttttcttggttggggctataaaaataaatacaaaatgtctcagagaaatatttgataaagatatattaatacaaatttattaatttacaaattaattaataataataattataaaaaaaaagcataccagtagattctaaatcctcttgttcattttgagtactctctgttggttgtgttgtagtggaataattagggatatcaatt

SEQ ID NO: 251070 - DNA, 823 bp, Cannabis indica
aaataggttgtttgaacattgttttctatattataaattattcaaaatttcttaaaattttgtaggttatcttaaatagttataacgtacatgaatatgaaaaaaaaaaatagactaaaaatcttttttggataccgaaacaagggtgtatcagtacatcccttttaagggggtgcattgtagaatcccccaaaattattaattacatttttgttttgttaaatgataaaataaaatccgtattttttaaaatggtaaaaataaaatcacgagcttaattttgacaatttttttaatataatcaatttaaagacaattcctataacagatacagaaaatgtttttggttttgtcataacatctttagatcatattattattaaattttattttgacgaaaaatcagttcagggtcctatttgtaccattttgaaaaagacagggtctattttgtcatttaacaaaatagaggatctaattggtaactttacaaaacacaggatctaaaatggtatttacgcttgcaaaagtgtatcattgcacattttttgttgttttattgttattgatgtaattaattattagatcccataaaactttaaaaaaaatagtttttaagaaatattttaactattagtatagtgccacttatagaaagtgttgggcaccaaaccaatagcaatacttaaagttttcaattttttaattttatggttgtctttatcatttaagaaagttttcataagagcatctccaatgataacatagtgtgctaaaattttctacatcatgcaaaaatataatattttattatatctctctt

SEQ ID NO: 251071 - DNA, 644 bp, Cannabis indica
aactatataaacaaagacaacactaaataaaaaagcaacaaaaaatagtattgtgaatcttctattacaaacattgaaataaataccaactaaaacagaaatatttacaaaaaatttcaacttttatagtaattgaatgacaacattgagtcatcaagttgggtatccgatttacatgaaatctgcaagaaaataccaaacatgtaaatacctttgcacatttaaaataatatttaatgaatggtaaactattattctaaaatcatattgacttaccataaatgttgttggccatgcaatggaccctccaacagcatcatagattgtctttatacatccatatagtttaatcagtagttcattaggcttgataggaactttaacaataacttcagaaaaaaaaaagatctaagttcttctcctccaaaacttttagatggatctttgctacaaacgataactgttgttggccatgcgattgacttaccataaatgttgttggccatgcaatggaccctccaacagcatcatggattgtctttatacatccatatagtttaatcagtagttcattaggcttgataggaactttaacaataacttcaggaaaaaaaaagatctaagttcttctcctccaacttttt

SEQ ID NO: 251072 - DNA, 579 bp, Cannabis indica
ctctctctctctctctctctgatggaaaagggaatcgagccaaaaggccccatctcagcccttcaatcattgaagtcggtgggcattgaactcatcgttgaggatgaaagagttaacatcgatctccactaggttgatagcgtcttcgccgagatcagaactgaacaaaagatttttttatggttctctgtcgtcgcaatagaggtgccaaagttgcaaattggagattttgaagatatgacaagtgttgtatagtattagtgttgatgtattaaaatggttcttaaaacccaaatgattagcaccactttctttattttttagatttggatctgtgggctttttttaattagaaaaaatgttaatggtggtggtaatgatagagtggcggtgataatggtggtggtattggtagtgtggtggtattggtagtgtggtcgtagtggtggctgtggtgtgacggtggcctgtggtgttaatggtggtgatgtggtggtgatgtagtggttaaggtgataatggttgttacagtgataaagttgaagaaggaagaagaaatttttttttaagaataataat

SEQ ID NO: 251073 - DNA, 1644 bp, Cannabis indica
aatcttaccattaaaaaggaaaaattattttgtatcacctaacttgccaaaaaaggactttacaacagtaaaatactctagccttgagagtactaagtcatgatcttcaagctaagaaccttggccaagtcacaactctcctcaaacacacaattatttctattacaccaaatgtaataggaccacagttgtctatgacagcagatttagtcgcttctaacagggttattctgattccctcttggcccaaacaaccaatcttcaagatttttaggccaattaaattgactcaaccaactagaaacttcaaaaatgacactcttagagtaatagcaatcaaagaaaatcagtttccaaacacactagatagagaggagaatcaagctccaaaaaacctggccaagagatcccaagttaaaagattggtgttcagagcctgcaacaatatgaatttgtgctttgaaactttgagcttgtgccagatttctttatagtaagaaaccttcataaccgaaatatgtaaaagataaaactttttaactttagaaacacatgtcagccctgctttaattatggtctgcctactaattttatctcaaagatttacaagcttgcaaaagtaccaacttgtatccaaacttggcttgaaagtccaaaagtcctcatttttcataaaaatggcattcactcaatggacccaaagattatcttgttttatagaaggacccaaatgtatttagccatgagagcaacattttatttttttttccccttctctaaagccaatacctccaaataccttagataaacacactttttcccaagaacaaaatggaacttgcttcggtttccagaggaattccaaataaaatctctgcaaagtttgtcaatagtcactttttgaggtaagatgaatatgctcatccaataatttctaatgcccaaaaaaaatgaacgaactaattgagctctgccagcaaaggaaaagttcttactactccatccatgaagacttttatgaatttttcaattaagccaacacaatcagtatatttccatttagtaggacatattcttccgtatttataatgtccaaaaggtgcttgttgagattagccgagatacctccaaagtagatggaagatttagtctacccttcttgaaaatgtatattctataacccttggtacctaagacatagcataggaaagtttccttaactgatctaggttccagtttgtcaatagattagtgtacatacgctgtacacccaaaggttcttaaatgcattaggactttagtgtggcaaggaaatcctctaatgcaatcatatctctgccatatttaataccaggcttgacttcttgatatgcgattgggagagatctcaacaaaatgatggcatggctttcttcatcaactttatgatatatattagtcaatcctacaataatcttattaaacatgtcaatattatcatctaaaatagagaagaaatcatcataaaatcatataacatttctaccaaactaatcttgctagcaatcgatggcttcatgtagaactcttcaagcttgtttcaaattccttgtcgtcttttcagtgacaagctttctcctcacactgttggataggtacatgatg

SEQ ID NO: 251074 - DNA, 704 bp, Cannabis indica
aaaattcaacgtgactctcacatacacattgtttttcgtgcaggaaagatcaataggggtacaatacttcttcaaccctcattcccagaatggaaggattgcttgaagtctaagctagaatttgtatgcaacttcagtcttccttcccagaagccaaagcttgcttcctaaaaattcaacatgactctcgcatggactttgttttttgtgcaagaaagatcattgggggtacgataggtcttgaacccttcttatcgtaatggaaggattgcttaaagtctatcctaatcctcgtgattctttctctttgatcttttgaagggaattctgtgcttgaatttttatgcaacttcagccttccttcacaaaagctgaagcttgcttcatgaaaattaaacgtgactctcgcatgcacattgtttttcatgcaagaaagatcactaagggtacgattcatctttaacactccttcccggagtggaaggactgcttgaagtctatcctactactcgttacgctttcgctttgatcttttcaattaaattccaagcttgaatgcaagttcagccttccttcccggaagccgaagcttgtttcataaaaatttatcgtgactctcgcatgaattttatttttcgtgcaagaaagataactaggggtacgatactgttgggttttatgccctaaataaaactcatttcaat

SEQ ID NO: 251075 - DNA, 616 bp, Cannabis indica
taaaacagaaacagttttcaaaattgataacaactttttacactccaaaatgagttgaccaaagggggaaatcatgtccgttgagcttctaagtgcttgaactaccgtaagacaatcagtttccaatgtagcatgttgccacccatgactttttatccaactcaatgcttcccgtataccaattgattcagcaagctccggggaagccgaacctgtgaacaagagtgttttcccttggactagcataccatggtgatctagcaacaaatccgcaaccatacttgttactgctattaaacaacgcagcgtcaacgttgaccttgattttattttcacttggaacaacccattgctcagctccgtcattcgtcgtataacccgaccaagacgtctcgataagagtattctgagctttactccattgatcaaggaatcccgttgctgtgttcaaaatagcagaagcagtagcagttttttgctgccacacaaagtcgtttcttgcactccatatcgcccagcagagaaccggcagcaacttctttttatctgcatcagccgtagcaaaaaactggatgcaccagtccagaaaattgcccgcaccagtagctgcaattgc

SEQ ID NO: 251076 - DNA, 568 bp, Cannabis indica
gagctctcttcaaggaagatcccacagagggatccatacttttcttgaaccatgtaaacttgacccctgtgtatcccagatcaactaacccggttcgatggaccattcttcttaagtcgaaggagtacctcgttgtattggaggcattggcataattcaagttttctccatcttttaaagtgccattaaggtctcccattaagagcagaggaaagttgcagcgatcaatatactccccaacctttttccaaaattcctccttttccccgaaagaaggaggcccatagattcccatgatgatccatggtcgctccggaggatcggaggatataattccaatgactttattcttatcggcatcctgtatattacaatccacacccaatttccagcaaagcgctagcctgcccccagttccctgcggagggacatagcatattcctggaaaatgcagttttcccatgagcccgtgtaactttacttctgctagcctaacttctgaaaggatcaaaacttcgggatttgacttccggatgagttccttgagttgtcgaactgtcgcggcatt

SEQ ID NO: 251077 - DNA, 534 bp, Cannabis indica
gtgtttctccagtagacacgatttagcttggttcttccagctacatattctgaagacatggatataatatttcatttaaagaggaggtgacaacacttttattcggaggtatacctaaatagatgtgtcatcatacttcacattttccccataaggagttattggtcggtggcaagttgcaggtgataaccacactaacttttagtggaatgacagcatattgaatttaattcgaggagatgatgtccaatacttggacaattggaagaataaagagaatgtatatgatcctcttcttcgatagtgcaaagagttgagtgacattagaagcagattttgatcattgcatgttgaacatatttgactcgagccttggtcgatttcttcaaatgaattgaagagtcacttgacattgtggtaaaagttattcctaattttgatactgcagtccgacctattcgagaatcatgaaatgatcgtcatgcctcaactgaccgtctcagagagccaggttagaaattttagttcaacagt

SEQ ID NO: 251078 - DNA, 1016 bp, Cannabis indica
aagtaattaattcctaattaaatcaaatttttatcaaaatattttctaatataatccctatttatagagagatcaatataaaataaatataaaaataacaatgaaactcattcttttacttttatatacatatataatcacatctaaagagtacaatatagacgcaatagctaaaataatttatcaaatatcaaaatctcaaattctatttcaaaaattaaaaaataaaaatacattatctaattaaaaaaattgaacatacatatattacacttaatatcacttaattaaacctaattaaaaagaaaattaattaattatgcgtacattgcacgtaacattaacctaataaatatatatatacacaaaactaattatttcaattttttcataataaagtacagaaggcataaggttcgtgttatttttattttaattaatatttatatttataaatccaattttgatttataagtattctattattcatttgtaattaatattttaattatattttttttattattgtaagtttctaatacacatttaagatattctaataaacttaaattcaaaatacatcagaaatatttggaaatataaatttgaaatttacaataagtatgatacaatactttttgaataattcttagtctattattaattaaaaataacttatatataatatattaattaatacatactttttgaatgttttaatttggttaaagtacactacaaaaaagtcacttttacaagtactgttcgctactacactggtaaaagtaacttttattatcagcgcatttcgcaaactgcgctcacaaaaatcaaagttttatcagcgcatacttacagtggctaaaatctaacttttactagcgcacttacgcggtggaaaaagtcattttcgccaacgattttcattttgtgctagcaaaagttctaataccaacgttaatttgccaaccccttttgccaacacattagaagtaaattccattttaccagcgcaa

SEQ ID NO: 251079 - DNA, 735 bp, Cannabis indica
tgaagatcagcaagaactgcacatacttcagatagcagaccaggcctgtctgtaccagagagttcgatcgaggtgtgctcttgagagggcatcacaccgacagactctctaactgaaggtgcagaaccatcattgctttcaagtctctgcaacaagaacatcaaaatgcaaaaattatcatatttattagcagatgttgactcataaggagactactttgcacttttcacatgggctattgagcctgaattgttttaacacaagcctggctcgcctatacctaagatcagctgctatgcacacaagttgctcaacctcacactcatttctcactgtaataatatatcagggtttgcagtgataacttggtatatctatcataccattattaaataaaatatgtctatggttaactaattggcgggcttgagaaataatcgaagccatacctaatctaaaaaggatgttatctaatgacatttgaagtcattgtagtaaaactaccctgttgacccttctgcttttccggtgatacaggcgtatttaagtaattaatcttcggtaagaccataatgaaagcgcaattctcttctctctcaatctcacttacaggaaattggataatctactacctctacaattaaactccacaaatccaatattcccaattaacacatctaagagaagcaaaataaaaccacatttactgaatccaatgaagaaaaacataagaat

SEQ ID NO: 251080 - DNA, 2648 bp, Cannabis indica
aaaaaaaatgatcatcacatttataaataatgtccccaatgcattattaaaggaaccaataaattttttttttttatatataaaaaagagccaataaaaattaacttaaatttatatgaaagaaactatgcatgttcaaaaattactaaaatatatatgtataatttaaaatggaaatattaaatgtgacttttagtcacaataaaaagttagactagtcacaacaaaaaattactaaaatatagtatttagatacaaattattaccaatttagttttagtcagactacaaatacatttagtctcaacaaattataattttattgtgactaaaagtaaaatttataatcagtcacaacttttttacttttaatcacaaattttattgtgactaaaaagtaagattttaatttgtagtagctataaaaatataatatatgacttttttttataaacattttaatttgtttattcaaattaaataaataaatttaaaaaactttttaataatgtgttattcaaaattaaaaaagaaaacctttttatttgtttgaaatttttagtttagataaatatcatcacagaaatgaagagtagtcttctccgttacgttaattaatctacaataaaaattaaaaaggtatgtgcaaacatatttcacaaacaaaaaacaaagatttaatttaaatgattgaaatttcctcatatattattagcattaaactagaataaactaattaaaccgaaaataataatgggttcaactaaagaagattcaaagtgattttaatacttcatcaccttagaaaagctaagttaatgtttaaaactaagcaaaaaaacataaatacgtacaaataatgcatatcataattctctctagcgtcttcgatttcgagattcttgaaggtagttaaaaaatagatcatccaaaatgacctgacgagcttcagcatcatcatcaagatattcattgaatatcatcctgttgatcattagacgatgatcataatcatgatcgtgctgttcatgttgttcatgttgttgttgtcgttgttcatgttgttgttgttcatgttgttgttgttgctcatgttcttgttgttgctcatgttgttgtggttcacgttgttcatgttcgtgttgttgttgttgttgttgttcatgttgttgtggttcacgttgttcatgtttgtgttgttgttgttgttcatgttcgtgttgttgttgttcatgttcgtgttgttgtggttcacgttgttcatgttcgtgttgttgtggtggttcacgttgttcatgttcgtgttgtggttgttgttggtggtcgtggtcgtggagatggtggtgtttacctctcaataaatccaaaaattcatacaaatgttcattttcatccattgtattataattaattacgtacttcctaatgaattaagctatatatatagatcaatctcttatcttataactatatagctaccacttttcatcaaattcatcctaaattctattcatattcaaattaatctgttaagatatttatttgaatccttattctaatcctattattactctatatatattaactaattatatacacgtaggttgattaaattttaaatttgaaatttgatttttttttaacaatatgttaaccgtatatttctaatttaatttattttatttttgataaataaactttattttaacaaactgaatttgaaattaacaaaaaaaattaaaaaattatttcttttttatttattttcgtattgatctgatttcaacctaaccctattttttccaaatgttagtgtagaatatatgtgtataaattcctaattagttggtgggactaagatgaaggttgattatctttgttctttttacatattcacaatttttaaaaattccatcaaattatgagtacatgcaagtttttttgagatgataccactgatattgcttttcaaacttaatattcttaatatcagaaactaaatgttacttatttcaaaaaaaaaaaaaataaagagagatacaaaactaaattactataactgagtgaattagtgcagtatatgtgaaaattattatgagtatttagttttttttttttttaaactaagtagtatatatattagtttacgatattaagaatattaagttttaaaataaaaaaaaaatgtaatgtatctgtaccttctatatgttaacggaagtggtaataatggatgtaaaagaatagtaacattgactatttttgcctccaaaaataaaaattaaatatttaagtgtataaaatctgaaacataatttacccattaatttacaaatgatttcgtgaagaaagcaatgcaattaagagttaagttcgggttctacgattgggtgggggtcttaaaaaatgaaaatttattggaccctttatttaaaaattaagtgatatttttgaaaaaggaaaacttataaaaatactagaatttgagttaatttttacaaaaatactatcacatggaaattttttcaaaaatactgtatttttataaaacaatagtggaacacaaaatagaacaactaaaaacaacagtagaacaactaaaaaactaatagtagaacatcagtaaaaacttaacacactacacagta

SEQ ID NO: 251081 - DNA, 1080 bp, Cannabis indica
ctcatcaaatagtattttactatgttctaagaaattatgtcatttttagaattttatagatcattatgcgctttagtgtagtccattttgaatgagacttagaacaaacataatttgtttgaaccgcattatatggcatgataattaagtggtcaaggtgaataatgagttgttacataaatatcaatcgtggataaatatttattttaaaatctagtaatctattagttatatattcaagtaatggacacttgaatgatatatgggaattaagttatatgaacaaatatatgatatgatttgtagtatagtaggaattgaatagaaggcttcatatgttcattttgatatataggatagaatgatattatttaagataaatatataaaggtagttattgtaggaggtatcaagtttgaacttagttttatattttgagagatgcaagaagaataattagacttattaagattaggcatatagagtagaacatgcattcaaagtttagaattttaaatcttaagatttagtgaacacaacgtggtagcagtagagagatatgctcactttaataactaaggagaatatcaatttctagcataacattcacttggtttgggaaaggattaaaggagtcttagtttatatttaaatattgtacatgcggtggtggacattgataaaatagtagacttggtcatggtagagtaagataggtgaaagattattagacagtaaaagaattcaaatttgaaattggtattatgcggttgcatgggaggtggggagctttgttatcacctcgactgactttgtgaagattatcagaacagttaggatctaaaatgagtattagcatattattcaaaattaaaatcttagctaagggatacgatataggtaagtggggtggggtatgagaagcctataaataaaaccttaattattcattcatctcaacacttataagacctagactcaaaaatctctctcttcattctgaactgctgtctgttggatttttatgccctaaataaaactccatttcaatgtaatctttattatttaaatatcaataaa

SEQ ID NO: 251082 - DNA, 634 bp, Cannabis indica
aataaaaagaatgctcatataatctgccaactcacatgccctaacaacaacattatatagatagatagaaagattttatgcacataattaagcgtttcttttccattttcaattagattattcgtaattagagctatttcaatttttttttaaaaaaaaatacttggagaaaatagatatttgtacaaaaaaaaatgaaattcttttcaaataattccatgtaaacgggtcgcggagaggcaaggtctgaaacggctaccgcggcccggccactgccccctctccattagaggataccttaataaaaaaaattgatttttttttctgaaattataaaagaaattaaaataataataaatttaaaactataccatttatttttaataatatttatattagaaaataacttaaaataaaattaaagtaaacggagcaatcaaacgggtcatatctcttctctgttctatgacaataccttatggggtggctccgttgctttgcctgtagaagctgttcatgagactaaaaggtctgcaaggcaggccacgatcgacttcaacaaagccatcgcagccgatccttaaatccaaatctcccttgtttccattattaatgatggcatcaccatttgcaa

SEQ ID NO: 251083 - DNA, 1685 bp, Cannabis indica
tctccatggctccaggcgaactgctcctggttcgcctttagaaagcttattagctgctatttgagctgcttgtcaaggttcttcccaatgtatacacactttgtgggatttcctgggtcgagaatgacctcttccaattcctcgattggttttagcaggtttttctcatcttaaacttgagggtcaagatcttcgactttatgttcagtttcttctgccaagatcaccatcaactgatgactagcttttctatgctgcagttttatgcgatagcaatcgcgagacaacatctggtctccacgcaccactcccatgccatctggtgttcggaatttcaaggataggtgctttatcaaactgactgcccctagtccaatcagtgctggacgacccaaaaatatgttgtaagctgaggacaggtcgacaactaagaagtcttgcataatagtagcagataaaggtgcttaacctaaagttaatgcgagctcgattatgccaaggctagcaatgctgtctccggtgaatccgcaaaggttcaccatacaagaccttaatttggcttttttgagccccattttctttagagtctccttataaaggatatttaccgaactcccattgtctattaatactctcttgatcctattattggcgagttgaatggttatcaccaacggatcgacgtgaggatatctcacgtttttctcatcttcctccgtcaatgtaatgggaggatcctcgattttcaccttctttgaaggttctagggcagaggtcgattgctcgttctttatctctttcacatatcttttcagggcattattgcttttccctgcaatatgtggccctcccgaaataaccaagaagtcctctccctcaacgggaataggttgtaacccctagttgttttggttattgggcagactgggctggttgtatccatggccctatcttgtaacgtactgcttaaaatgactttctatctcatctttcagttggcgacattcgtcggtcgtatgccaaatatccttatagaatttataatacttgttaggatccctcttactcctcgaactcctcatgggctcgggcttactgaaggccaccttctgttcatgtgcgaggtaaatattctcttgagtttcattaagctcgatataaatagtatacactggcacatacttatcatgcttcttctatttttttttatccttcacggttccttaactctgtcctttctcttcaaactagaagcccccgagttatcaattctcgtggaaacagttcctgttgaaacattgctgggtttgcctcccgagcttgttttcaacagattcatttccttttgggcttcttccttccaaactaacacctgagccctttcgttgaactcagtgatgcttctcactaggcatccttgtacgtcatcccataactctccccttgcggttaatagattagtagagatccctgcctgaagggctgtaagttgcgtgctgtcatccaaattcctaaccctagctgcagccgtgctaaaatgacttaagtacgccttaagtgttttgctgggttgctgctttatattggatagcgaggccgctttaggtcgcctatctctagcagcctgaaattgtttcttgaaactcctggacagctgctccgaggaagttattgaatgatgagta

SEQ ID NO: 251084 - DNA, 1112 bp, Cannabis indica
caagatacgatcatgatcgttcgcgagttagttggttatgaaagtaaagagacaatcattaccgttatgaaaccaaagagacggtcattactgttatgaaagtaaagaggcagtcattactgtaacaccctgtcccaccaagacgccacgtgtgtgcttttacaaacttatatttaacttaatttattagcttaagaaaagtgcggtttaatttaaacttttaatttaaataaacataaatggtattaaacataaaaccaccgttacgtatgagaattccctgtataaaacttttacattctgttctaaaatttattttacaaaataagattacatttcaaaatactgccaaaaggggtggatcctgtccactggtagtcgtgacactgcgattgatatgtacactgctggtaaacctctaactcatggttgctttgctttacccttccctttacctgcaccacgaagcacccatgagttacagagactcagcaagaaaagctattaaattacacacagtgtaaaatataagtaatcacatctaaattataacatacatactcatcattcaacatatattcaacaatgcataatcaattaaacgtctacaagacgagacaatctcagtgcctcataaagcaccattaccactcttatttcacgagctacatatgtcactatcattgcccaaagtaaacgataagtaagaaacctatttgcgatttcaaacgagtaattactcataacgataatgaccatttctatccctcaatcataatcgaggcataacaaatacatataattaactcgatcataatcgaggcactaacgattataatcgtttcttatctgacaaacttagcagtgcataaaacttttcttgccttagtccagaaatcatatgtgcatgccaacctgaatggaaacaatgctcgataatcgcaggtgctatgtcatgataacgaaatccagtaaatactttaaccaatttctgacacaaaccctaaaaccaaaaccggacaaccctaacttctaataactccaaaataggctatacaacactaaaacaacctaaactagtgttgggttttatgccataaataaaactcatt

SEQ ID NO: 251085 - DNA, 937 bp, Cannabis indica
aaaattatttatgctaaataataacttaatcagtaatttaaaataaatactaattttttaaaatattgatataaattttctagtaatgtaaaaggaatatctaattttattatcgtattgtttctcttaaaataaatttaagtaactattatttaattaatattattttaaattttaaaaatttatgcatgataatttaaattttttacaattatactaattttaatgaataagtttttgataatttttttctaaataaatttgcagtaattctttcatttaaattcttagtaagtttttgataaggagcttgcgacttattggaggcatatgtggaaattaaaaatcccgccaaaagtcaaaaacttgatgtggagggctggtatgaactgcttgccaacaatggtacaattgcgcaccaagcatctgcatgtgacctccctatgccctatttgtcaaagtgaagatgagactatccttcatagactggtctcttctcctgaatctacactttgttggaatcgggtgggaataggcactagtagtacgcccgataacacttttcttgactggtgtattatttcctttaaggctttggatgtggaaaaacgttgtgtcttagccatgatttgttgggccatttgggaagctaggaatgacttggtgtggaacaaaaaggtaacgcgggctggtgacattgttgcttcagcaaatagatatcttgatcaacggagacatgctcaaaaactctactatagaggaatcatggcctggtagttaggcgggtgatggggttgagcattagattttaccacaggttaatagtatcaagatcaatgtggatgcagctatgtttgaaagggagaatggctgtggatttggcatggtggctcgagattcaaatggctttctgctcgaaggtcgcactaccttcttg

SEQ ID NO: 251086 - DNA, 1297 bp, Cannabis indica
agtcgtggatcaggggggtgttgtatgaccataaaacttgcgaaagctcgtctggccatacccccttacgttcttcaagttttcctttaatagtgtgctttattatcttgttgattgcttcagttttttcgttgctctgcggataggggactgctgagaatgcttttttaattcccaagtcatcgcataactgccgcatctccttacagtcaaactgctttccattatctgaaattagcttgtaagggacgctgaatcgacagattatggagttgtagacaaactcgcgcaacttagtcaccgtaatggttgctagtgctttggcctcagcccattttgtgaagtagtcgaccgcgactacaatatacttgactctaccttttcctttaggtagttcacctatcaagtcgatgccccatactgcaaagggccatgggcttgtgatggaatgcaagtggctcggaggttgatgggtatatgtggctatccattgacatttgtcgcatttctttgcgaaagtgaaagcgtcttgtcgcaaggtaggccagtaatatccctgccgcatgatttttagggcaaggaaattaccacaagtatgatttccacaaatacccccgtgcacctcacggggtatgtagtcgcagttttccccgtcgatccatttgagtagcggctgactgaagcttctgcgatataatcttccatcatagatgtcatatcgggcagcccgctgccgcagcttccttgctaccattttgtcatcgggcaagatacctttctccggatatgcaattatcggagtcatccaggtgacttcttgggcggtatctatctccattatctcttctcgatttatcgttgggtgagccaatacgtcaataggaattacatcgagtaattaagcttctctagtcgaggccaaacgggccaatgcgtctgcgtgtgagttatgagcacgcggtacacgggacacgactactttcttgaatttctgcatcagctcgcatactatggcgtgatacttaaccaatcgcccgcctctggccagatattcttcattcacctgacacacgacgatttgggaatcgctgaaagcctacaagtactcgattctcatctcgagagtgagcttcaatccagcaattaaagcctcatactcggcttcattgttagatgcagaaaactcaaaaacataaagcagcgtgtaccgtaaaattgttgggactgattagtatgattccaccgccggtaaccttggctattgaagccccatcgacgtacaacgtccatcctctcc

SEQ ID NO: 251087 - DNA, 1091 bp, Cannabis indica
tgcctactcgatcgattatgtcctcgagaccttgaacatcctgaacttgaacttgcttcatcttgtatcggccttctcctacgaaagaggttagatacacgtccattattcaagtacgtgtatacatcctctctctctttgttcgagaaggacgttgagggtgtctcggaggtagcccacttgaccttggttaatttctagggttgctctcattaccacgaggtattccctggttctttggtcgaggttgtctcacctcttcattcctacgagatgcctctgacacatcagtttgcttattcccttggtttttaaaatccatgggaactttgaggaacatctcaccattgttcttgattatttgtttgattatccattgggacatcccttgtatccccaggttgttcttcttgggtgtttgaggattcccctagtttgtttcctgtctcctggttctagagcctcgaggtcgtcctcgtggtctttttactacacgatcaggttgattctgagaaatcgttccctgtgccgccctgactgctgtagcctctctctccaactcagcgtttcgtcggttagattcaactaaacgttgtcgaagttgcctattctccaactccaccaatggtacatatctagttgggtcataaacatcttcactcataggcacgtatctagtagaattattagcatcttcattccttctttcaagaatttgatcgccaccaccatcgttccttcttgaacatgatgctccagtggtatagggtcttagagatcccatgggttcttttctagggcgacgagttatttctttagggtaattttcatcgttttgattgtcattagctattgaatgtgattagatcaagtttataaggagatatttttctgagttttatcaccaaggctctcaatgaaagcactaaactattaatgtaaaatgtagatttttgttaaccaaaatataatagcctttatgtaataaattctctacaaaatatatatataagtaataaatgatcagataacaccagatactttttacgttgttttgtagttaaaatctacatactccacgagtccttatt

SEQ ID NO: 251088 - DNA, 567 bp, Cannabis indica
ccgagccgtctgaattctaatcaccttgccaaaatgatctcttgcaacaacagcgatacacagactatgtaggcccaccttcacatcacagttcagcttgatccaatccagaggaggaggggaccaagcttccgttagatctggggatggactaggtagtaaagaggcatgaaaatctgcataagaattacaaatactgtcaatacatttttttatatcaggtgaacagttattatgaaccttctcgtttcgcactctccagatagtatccacaacaatcgaggcatatagaaaaaccgcatcagcatcgatgccttttattggtatatatttgttttaaattatatttaatactataaaagaacaagttctatttcttcgttaattaattttgatgaaactttaatctttatcaattatatttagcaacttaattattagactcatactctttattttattggtatatatttgttttaaattatatttaatacgataaaagaacaagttctatttcttcattaattttgataaaacttttagtgtattattttatttttaataaaa

SEQ ID NO: 251089 - DNA, 725 bp, Cannabis indica
catgacatggagcaacatatggcgaaattctggtggaagacttaaaacacaaaggatagaggaatccattggatgtcttgggataggctatgtcaacataaaagtgtaggaggaatgagctttcgtaatttaagagaccataatcttgctcttttgggaaagcaaggttggagactactcaccaatactaattcattggtctcaagaattttcaaagctagatactacccgaatggatcttatctcacggcaactattggtaacaatccgagttttatttggcgtagtatccttaaagctcaaagtgttgttaaaatgggggctcgttggaagattggccttgatagtgtggtggctgtcaaaggagagtcgtggctctcattggaagaagacctgtatgtcacctctgagcatccagcattaaccacggctgtagtggggaatttgatggagattgggagaagttcatgggacatggagctgctacaagacctgtttaacggtagagatatagcagcggtggctgctgtttcgattctgcagcaaacggcagcagacaaaatggtgtggcactatgagttaaatggtgtttattctgtcaaaagtgctttcaacttgcttcaaaaagctaagggagcttggaataatgttgaagcttcagatttttggaatgaactgtggcgtttaaaaattcctccaaaagttaagaacttgatatggagagg

SEQ ID NO: 251090 - DNA, 961 bp, Cannabis indica
aggattcaaacagtttattgcatatataaaaagacttttgaatcttttactttgatattttaaattattcgaaattttatgaaactttatacatgaaatgtgatatataaaagtagtgattaaaaacaaatatgtttactactataggatatagttatttgttctaagcaaatgattatagaaatatatataatagtttgctaattaatgataatctttccaaacaattactctaagtaaatgattaatgaaaatgaatagtttgctttataatatattcatatgtatatttatagattatatatataaaaaggatgagtaattaatcaagcaatgtatctatatgtagggtacaattattattactttcttatttttgtaacatttaatatattaattaagaataattgaaattatatttacttggttaatttattatagatatctaaccttaaataacattaattaattaaattacattatattgtgttacaatttcaggagcccaaattggtgtttgctatggaatgttaggcaatgacttgccttccaagcaagaagtgatagacctctttaaacaaaacaacatccaaagaatgagaatttatgatccaaaccaagaggccctccaagccctaagaggcaccaacattgagcttatactcgaccttccaaactctgaccttcaaaagatggcctcgagccaaccagaagctgacacgtgggtacaaaacaacatccaaaactacaacgatgtcaatatcaaatacatcgctgtaggaaatgaagtcgatcctaatggacaaaacgcccaataccttttcccagccatgcaaaacatccaaaactcaatcaacaacgccggtctcacagacagggtcaaagtctccacatctctcaagtacgatttcataggagacgattcatttccgccatcaaaagggtcaatcaggtcgaccta

SEQ ID NO: 251091 - DNA, 661 bp, Cannabis indica
tggaaatcagccattaaaaaaacaactcaacaaggctactactggtcaaatttgtcatttggataggtaaatgttctcttcttgttattcaattagagatataatcttgatttgatggaattatcgaattcttttgttaaagtgttaccacatatgtagtctttatgtcccgtcatcttcaagagtttttccatatctctaatttcagtttttcttgttgaatttgtcattgtattggtctttagatgtaggtattggtgaggattgtggtttatgtataattttgatctttaatttaacttaacggtggaatgatattaatgattttttgtggaatgtatatgtaagacctcatttttatctcatacttaaatagtgatatttgtgtgcattccttttgttatttttgtgttgaaatagttcttgtatcagttgattattggaaagtattgctttcaaggactatagttaattgtataattgttttatttcattgtgcatattatattcttcttcaggtatgttttaataattgtaacatagaaaagttttttcttttattttttcttacagttacacaattgtaatggagttgtaaggaccctcttttattagtgtatgatacagggtaatgaaacataatttgtagaccatcaaaatt

SEQ ID NO: 251092 - DNA, 528 bp, Cannabis indica
  modified_base (405)..(405): a, c, t, g, unknown or other
tatcacacactggataaatacccaaggagacgaacgccagaaatggagagtcacctcacaggaaagaaacaggtgttcgatggattcaccatcccttccacagaggggacaactttgatcttctaaatgaaatctagtgccgagcacaactcttaccgggagggcactagacaggatacaccaccataagaccttatgtcgctctagaattttgctattccagagcttattccaaagctttggggcgacatcacaatggggagctctttccaaggcttgagcaaggtaggcagacttgcaagagaattgcccatgactctccagagtccaaatccatctatcaaccccgacaccagagggtttccctcctttgaggatggctgtaaccgtatcattgtcaaaccngtaattcagcttttgggtatcccattggccattgtcaagaacaagatcagccacatggttgaggttgggggggggggggggtcgggccctcccgttgttcggtacgacgaacgttaacttagt

SEQ ID NO: 251093 - DNA, 1776 bp, Cannabis indica
ttttttttatcttttttaattacgttaaattctaaacctaaacctagtatctccctataaatagaataagatggctcttattttcttaaaaattcaataattgacttcagactactttgtcagacaaaagtagaaaacaaagaaagcctcttgaaattcaaaattctccttcttctctattgaatgtttcgaagcctatggtgaatatagagtatgtccactcatgtcaaagcaatacctagcatagttaggaagactgtgtctaatcaaattgaaagaaagaagatccaggttcaaatcttgataatgctctgctacagacaagaatcaagggctagagatctgaatagaaggagtcattatattttgctgccatcaatgtaaggatttcttaatctcttatgtgtgtattttattgttttaggaaattcatatttagagtgttagatcatagattataatcaaatatacatgttagtaaatctagatcctggtaaaataagttccgagaccatcctctttgccaagtcctaaaaaagccaaaatcctcatggagactgctaaagtgggcaatggaggtcagccaattttacattcactagcgaccaagaatttatatcaaagaccaagctttagggaattttattgtggaaggcattgagatcaatgatgatccggaagaactagttctagagttggtaatctggaatgtctatgttgagagagccttaaatgaaaaagggtcctgagctggaattatcctaattttcctcaaggtctcaagctccaaagtgctctccgaatttttcatgtctaaaaacaaagcagagcatgaagcaatgatcagtggtttgcaacgaggcaaggaaatcagggccgaaaacattgagttttatagcgactcccagttggttatgaatcaaatatcagacgaatgtcaaactatgagggaaaagatggatgtctatgtctcctgatcacgacaatcactctagaatctctaaagatatacaatctggctggtccctagagaccaaaactcctttatgataaatttttgagtactggagagttaccagcaaatagagcagctgcaagaaaaatcaagtatcaagctcccatgtacattactttagataggaaactgtacagaagaggtttgtttgtatcgtacctgaggtgtattttcagaaaaaagataagtacaattatccacgagatacatgaaggtttctacgaagaccacacttccagacaacactactacaaaaagcacattgcccgtcagtttttaattgacattaaaagttttttcttcggttcccccaatcgacgtgtatactatagatgcaaaaaacgtctatatttgcattggttatcaatcgtcatttcacattatttctgtcacttttcaacactcgcaaataattataaaaaataatttttacacttatcttgtcggtttataacagacacactaaatagacaaacaaaaaaaattcatatctaagaccatacaaaccaaatttaagcacaattaaaaacaaaaataaacacaaattaatacccagatctcaaatattacacaatataaatacaaatattacacaatgtatatacaaatattacacaatgtatattacatgaaaattatcagatatatattgtgtaaagcacaaataaaatgtttgtagagaagctaccaccaaccatcgtcgctcagaccgcgagccaccaaccacctgaaaaaattaagaggcggtgagagagtgctag

SEQ ID NO: 251094 - DNA, 653 bp, Cannabis indica
cctaaactaactcctaactaacatgatggagtttccttggtgagttgagtaagagaatgaatatgaaataaatatttttgattatggttattgtgtgagatttttatttaactttgcttgatggtcaatttatctgtgaatagtttatggagtcaaaattgtacaacttagtgaagttgaagtggcgcatatgcatttttattagtattgtactttactagttttagaaatggcaaagaatcggagaaatttcgaaggaaacataaagagtaaagttactgatggaagaaaacaaagaactaacaatattgatgtgaggtcttcgatgaacaaatttaagggattctaatgttgagtttcaccttgttgaagtataattacttttacacattatttagttgaatggtatttgcattctttctctgtgaagttttgtaatgttggatttgtatattgcattattgaagcacctcatcaagttaagaatactagaatagaattagaattcatgattgaaattaaagtttttatgggaaaaggatgagactaactactaccatttaacccaaagttgcaatatagttatatgcttttgtgttatatcattcgagaaaaatgactcatattttatgattgtgcaacatagacaactc

SEQ ID NO: 251095 - DNA, 2149 bp, Cannabis indica
atccaaaaatttttctgtcaattcaaaaatttggtcattgtttttccttagttcgagttaatttacgccaattcgttttgttgttttttcttttaaaaaaaaataatgcatcatctgtgtttttttttaatgttgcttcatttggaattatttttcttttttaaacaatgctttctttttttttttttttaggaaatcttttaaatgatgcttcaatatttgggattagcctttcttttttttttttttacaaaaaaaaaaatggtatatgcttcatttgagatcggatcaatgaaatgaacatattttattattattaattaaaataaaaaaataatcattgactagatatatcatataccaatacatgataaactgagagtgatatttatatatgaatttaatatatagctaatacctgttagttgcacgactttttgatgcatggtaaagacaatattttgagaaaatatttttggatttagtatgaattttgcattattttttgttttctttctaaaattgtgttttaagaattgagaacataaaatcaatgttttaaaaacagtgtttttatatttttttactaaaacaaaagaacattaatattgcacaccaaccatgagaatagaaaacaagttgtgtagctttcaaaatattaaacgtgtttggttaataattttaaatttttttttttttcactaaaaagtcttagcacgaacccaatcccaccccgatctcggtacatacgctggacattgacccttcagccaactcggactctaactctagacctagacccagacctcgacccccagctcgttcccgcccctagcagcaggcccaaacccgcccccacccgcaccctctaacttggcccaaactttgtcctagtccctagacccgaccccgaccttggaatctagagtcaactccaaaccccaagcttcaaatccaaatcctgatctggaaccaaacttgactctggacccatagtcaatctcgaacccaacccaaacttagaccttagacctaatctcagatcccgaactcgatcccagccctaaacttgggcatgtgagagaatatgttaaaaaaatatgttagacaagaaaataaaaattattttagaaataaaaacagcattgtgatattttctaattttttttgttattttatttaattcaattttcaaaaaaatattattaaaatttttggccacacccgtattttcctttcctgaaagtaatgttttgttattatgaaatgtaaataatttttaaattatgaaatcaaacaccccatgctattttgttgttgttgttcaaacttatagcaagttatcttcattttttttaagtactttgttaagttttactattgttttacaattgttttttagttgttccactgttatttttaattgttctatttttattttactattgttttataaaaaagagtatattttgtaaaaaaaatagtgtaataataaaattgtaaatttttgtcaaaaatacaatttttttataaaaaactcctttaaaatatatagatttttatatagttttcttcgttaactgaattttatgatgagatttacgtaaaagtttcgtgcttattattacttgcacgctatatatactgaaattgttaagatatatagttagtatatatattgtatttatatatgcatgttttggttagaagcagggagagagacctggatgttggcgagtaaacgcatcccatatatttggtccctttccatctaagaatgctgccccttcagactgaacatcacaaattattttaaattaaaataaaaataaagacttaagttcttgatatacatatttatatgtatgcgtaaaagtagtgaatatatatacatagatatatttatatatacctgataagcagcagttccagctccaaaaatgaacccttctggaaaactagtcttatttagaggttgggaataaggaacaggctttgtagaagaagaagtggcttcagagagagccaaagagaaaacaatgaagaaaattagagggaatgccatgcttgctaccaatggctaatgttctctactcccttaaaatctaaaacccctcattcaggcttgcaaaatcggcttgcccagaat

SEQ ID NO: 251096 - DNA, 627 bp, Cannabis indica
gtgggagattgttggaacttagtgaaatcttacaaaatgagaagtgaagtgtgtgagtgtattgagtcctacatggaataagaatattttattagaagtgtatataatgtaaaaatttggaatatgggtcggggccctaaggggtacccagttttgtgcgcatgggtgaggactcacacgccagagcaccacacatgcacaagcgcgctgttgccgccacctgtctgaccgatcaagctggggacgagtgtggtgttactttattttttggagaaaatttatttataaaattattatttttaatgtaattaattaaaacagttttttaaacatgtttatgaaatgataggactagcaactgctagtgaagaatcaagttggttgagaagcttgctaagtgagatccctttatgggaaagaccgataccagttgtgttgatgtactgtgatagtaccgcgactattgtaaaagttcagaactgttattataatagtaagagacgacaattacgtcgtaaacatagtactattagagaattcttctctattgaagcagtaagagtggatcatgtacgcactgatgaaaacttagctgatcctttgactaaaggattagctagagagaaa

SEQ ID NO: 251097 - DNA, 1038 bp, Cannabis indica
attggcagctaaactacctgaactttacggtttgtaacacttaaccacaaaaaccaaatttttggcggctaaattacctaaacccggttccgttttgctctgcacacctctgtccaaaaatcactgttaagtgccacggtggactgtccacgtgtacacaattgtacacgtggaaaatttttagtggtctacgtaattttaattttaaatatacttaaaataatttaaaaattaaaaaaataataatttataaaaatttaaaattttttttttctttttctttttcattctctttctctttcttctcgacaaaacccccctcccctaacccttcttcttcttcttcttcttcttaaggtgttcttggtgagttctctttctttaccctcttttcctttccactcccaaatctgattataacaatcaccaaacacccaatttcttgttgaaaaataagtaactttcacaaactagtggcacatgacaccgtgcaggcatgtttttgtattccttctccataaactatattagaataataaaaagaaaatacagttaatttaacaaacaaaaacataataagaataataagaataataagaaaattacagttcccattttccagtcgcaatgtccagcgcaagccaccatcacctccttcgcctggccctttcatgtcaaaaaatcacagctcaagtgacgagcccttcctcctcttcaatcgtagctatggcttcctccaccgagcaggagttcttgtcccactaccgcgccaagctcaaccgattccctcgttcacacaacttctgggacgccaagatcgcctcccgcgttggtgagaagctagcctttcgtctcaaagaaatcggcgtcaccgccatatagatcgaccttcgcgaggaactttctcgccaagtccatagatttaggaagctaagaaaaaaatcttctgagggttgtttctgtttctgtcgagaggaagaagaagaagaagaagggttaggggaggggggttctgtcgagaagaaagagaaagaaaaa

SEQ ID NO: 251098 - DNA, 532 bp, Cannabis indica
ggttctactgtaaattatttgttgggtatagaatcgtaattttctctaataatttatgattgggcttttgcgttttgggctgcgtgcaaagcccatacatatgtccctcccaatagtccacccctaatattgtctttcctctgtgtttttctttttcttggattggacagggaaggctagggcgattggtcgttcctttttctttcttgactgactgagatagagagagagagagagctatactccttccttcctcctcaacctaacccttacatctctctcacctaaccaaagaaaccctaacctccttaccccaaaccttcgtaagagagaacgtttctgcagctacactacataaggttagaacccttctactgtgtttgtgtttggatacaatttagtatatatataacacacgctaatttttaaaaattaatcccatcaaccaattcttcaactaaaaaccccaaatttttatgtgtgatttttattcacaaaacacagttgcatatttgagctatcaacgtagtat

SEQ ID NO: 251099 - DNA, 880 bp, Cannabis indica
catctcagaatcccatacacatttctacaaaattcaagtcagttagagttgaggcatttgagattggagaagcagaagaaaaatacttcagatttgaaatataaaaaaagaatggttgaaatcaagagagatttataaatgcaacaacaatataattttgttcttttgatttcaaatctctcttgattttaacaattcttttgttcttgaagagtatatttcgaatgtgaagcacttttcttcttcttctccaatctcaaatgcctcaactgtcactaacttgaattctgtagaaatgtgtatgggattcagaggtggatcaaaagctaaagatataatgttgtcaagtaatcctaactcattttcgtcatttccttgtttaatggattgcaaatgtagattgttaagtcttgagtagggaagcaactcctgcaataaatgagaccctgacacgatgacaataccacaacatcctcagggtgaaaatttaagattttctgtttgaattgaaagccttcttcatcaacaggaatgtgtttgacatttttgatatctttgttgagccatgagaacttgtctttggaagatgaattttgagatagagatttttgtcttttgtaattgagattggataaaagaacgatcagatgtcaagttgttccaagatttagatacatatttcaattgaaacaatgtctttgttgctaataggaatagcagttcgaggaatacataattatttaaacaccttatctttctcatttcctgaaaaagaaaatcagatttcatcgttaattatatatataacatgtgccactactaaacaagtaaaagatcttaattcaaaatctttaacaacaaaaactgctatgcaccatac

SEQ ID NO: 251100 - DNA, 872 bp, Cannabis indica
aaaaaataaatattatagtaatttgaaaacaaaagaatcaatgtttaaagtattatgaagagaaaatataatagtaaattaggaaaattaaaagaaaataatgtgtaaattgtataagaagaaaatataatagtaatttttagaagaaaatcttaaaagtagaatatttatgatttaagataactaatttggagacttttaatcttgagagtttccaaattctgtataaacaattgcattaacaactgcaaaataaacatccttttgggaatttggaatgtggacatctcttgatccaagtcaagactttgtccagttcaaaacaattcaccacaatttctgcccaacataaaataatgtgtaaagtccttttttggcaagttagttgacaaaataatttttccttttatggtaagattgttgtgcattcatacccgaattcttaccttataaattcggtttttagttgctcttttccttgttaggaaagttgcactttcagctgaactttcctttgttgaaaacttcttaaaagagaagcaattctcttttggaaagttgtcttttttagggaaactttgattattgccttttccttattgatttcgattgtatcttgatacaatcagaatatctaatctgtttttggcaggaatcaagcattgatagaagatcggacccgattatagcaagtttcccgtttctggtgtgatctgctgcgtcagcatccgaatctgatgtagcagattgtgttttcttaggaaagtttttgtacagctgtagattcgaacttgtggctgtctctaaggtttctatgttctataaataaacctagagagcagccattcaaattaactcttccattattcatt

SEQ ID NO: 251101 - DNA, 753 bp, Cannabis indica
ttttctcgagaaagtgacggaaagtgagaaagagtaggaatttgagtagtgaagaaatgaaatggtgtgagaacattggggtatttaagagaagggaatattttaatgtgttgtgcggtagggtactttcgaaaaagtcaaggcttgtgaaaatacgaaaatacccttgagtttttgggattattacttaattgttcttcttctttatgctgtttctcaaggccatgtggctggtatcaccataaaaactcaacggctaacatgggaattatttcattactttactaattctggtttcaacatataaaaaacactaatttaatatacacatattcttttttatcaataatttaatatttttgttataaagatagtggcaaattttacaatacacttatttataatgggtgtatcgatgtatttttatctatttcgatatctaaaaaaatacttagttcaatttttttattgtatacattatagttatttaagacatatagcaaaattttaaaaaattcagaaaaatttaacacgtcaaaaacagtgtttaaagaatttgttgcacgcttcacttttttattttatacacatgtgaaatagacggttgaaacattaatttaaatattgtaaattattctgaatttctcaaaattttacaggatgtcttaaataactacaacgtccacgactatgaaaaaatttagactaaaaaaattcttatagatactaaaacagttaggggttgtatcagta

SEQ ID NO: 251102 - DNA, 1254 bp, Cannabis indica
tcgtttgaatttcattgacgccggtctgtgttctggttttttgcacaatttgcgacgtatcgcgactatgttaacgacatagcgcaacatcgtcttgaaatcgaggatttattagaaccgtctttttatcgacgtgttggcgatacattaacgacacacttcgcgatatatagtgtttagtacgtaggtttcatgaatttatcgacttatatgtgtttcgcgacatgtttgcgattataggcgattctgttagcgatatataacaatcgtacctaggaatcttgttttttatcgtcctgtttgttgttagcgatatagtagcgatatattagcgacatatttagcgatatgattagcagtaactaggattatgtttcacgataatttgcaacatactgcgatatctttcacgattttaatttgtttgatttctaacaatattgttgacaattttgcagatggctcctgaacttaaacttccagtttcccagcatttcacgggacgtcttacctatcgggggacagataggtttagatatatcaaggccaagtttactgagcttgatttggttgacacagtaaaggctagtcctttcggacacttttgggaagctggagagttgactttctccagggcgttggtccacagcctcctcttacgaaaaatgaaagtggacacaaaaaaggaggatgaggtttggtttcatgtagggagaaatgacacgagattcggacggatagagtttggactcattactggcttacctatgggtagtgcccctacagacgaggaaatacacgccaagtcccacaaccatctagttcggacttattttgaagggaagagttctattcagttcgattgccttatgctccaacttgagaggtgcgaagataaagatgatgcctacaagtttggactgatcgctttcattgaaggtgtattagtatcaaaggagggcaatgtccaagtttggcctgagatgttgaagtttgttaacgatctcaaattcttcttcaagtatccgtggggcgagcgcgcttttcgtaagctgatggagacattaggtaagaatatgcaacattataaggataatgttgacaagaagaaagggaagaagattgctcaggaggcaaagtacactattagtggctatgtacctgtctttcagtactgggcatacgaagcaattgagaagttggggaagaagtatgctcactgcaacgggaccaagttccccagaatgttgagct

SEQ ID NO: 251103 - DNA, 1342 bp, Cannabis indica
tttttttttttccaaaatatgtaaattgagtaaaaagatagggttgaaaatggaattctgaaaaccgaaaaaatcgttcaaactgacctatcgaacgtggtaccgaaattggcagaaccaaaaacaaaaaacaaaaaaaccactaacagctaaaaccgccattgaacgatctgttttttttaacaataaaccgaccgttatacatgtatattaatttattaaagtttttttttttcctttatgtattgtaattactcataatatataataatatattattatattattattaaagttaaaaaaataagataataaattttgaacaattactttatatagttgtagttgtagaatgatgtgcttaagatcatgctttaaaagaaaaaaaaaattcagtttggacagtttaaaccgatcaaacccaaattcaaaacgatcaattttaaaataaattttgcattaactagttagttttcaaattgcaccaatccagagcaaaaaccaattacaagatttttatatagataaaatctaactaaatagaccgatgctcagtcctataaaaagaaatttttgttatgtacctttaaatttaaattgtaatattaaaaaaattatatacacaataaaaaaaaataaagtactaaatttaaatttagatttgatattttgaaaaataaaaaaaaaattaaaccaatttactttctatagcaaatataaaacaatgtaagagagaaatataagaaggtagctttccaaggaataaagataatgtgatattaagaaaaaaaaaaactagatacaaatattggcgggaatatagatgaaatgaatcaacagcttaaaaccaactactttgcacttgactaaaaaacaacctttgccccacatttcatataaaaaaacgcaagagggaaactagaaaatagaaactgctttccaaaagctcacatttcacgcctattaaaaacagttaaaccccataaaattcaacccccacaggccacaggcaaccatttagctaaaagcaaaataacagaccatactgtcaaccctggatcccgacaccgcccccccttgagcggccacccatccgtcctcgcccacggccataccctcttccccctcctccaccccttcctctatcatatcctgttcctgtacctctttcgtaacctccacctcttcctccttcatatcctgtacctctttcgtaacctccacctcttcctccttcatatcctgcaactttttcgtaatttccatttccacctcgttcgtatcctgtacctccgcctctgcctcctccacctcttcctccttcatatcctgtaactttttc

SEQ ID NO: 251104 - DNA, 858 bp, Cannabis indica
tctctctctctctctctccggcgttcgacatttcctaccatacatcatctcgtaaggtgccatattaatggtactctgataagtgtcattatatgaaaactcaatcaagggtaggaacctgctcctagatccttcaaaatctattacacatgctcgcaacatgtcttcaaatatttgaatggttctctcaaactgaccatctgtctgagggtgaaaagttgtactgaatctcaacttggttcccatagctttctgtaaactctcctagaacatggaagtaaatttgggatcacggtctaaaacaattaactttggagcaccatggagtctcactatttccttaatgtacaatttggcatactgctccacagtataagtcactcagacaggtaaaaagtgcgctgacttggtgaatctattcgctatcacccatatggaatcatataacccagtagtcctaggcaaccccactgcgaagtctatagttatgtctttccatttccattcaggtattctcaagggctaaagaaaacctgccggcctttgatgtttagccttaacctgctgacaggttaaacactttgaaaaatattcaacaatatcactcttcattctcggccaccaatatattggcttggtgtcatgatacatctttgttgtccccgcgtgtagggaatacagagtagtatggaactcatcaagaatttcccttctgatctgatcatttgtcggaacacaaattctacccttatatcttagtagtccacttggattcatagtggaatcctttgtagcaccaatctcaactttctttatgagttcaatcaattcaggaaacttgattgaacaagagaaagg

SEQ ID NO: 251105 - DNA, 675 bp, Cannabis indica
aacttagtaggatcccttcccactaaaaaaggaggagtccaatatgccataggtgttgttgactacttcacccaaagggtagaggtagagcccatgaatacagtcgcatgcaagaaggccttggactttttaatcaaaaaaatcatgtgccacttcaaacttccacataagattgtttgagataatgggaggcaatttgacagtgatcacttcaccaacttctgtaaccaacacggaatcgtgaagagcttctcatttgttgccaaaccacatgaaaatggacaagtcgaagctgtgtataagatcttgaagacaacgttgaagaagaaactccaagcttgtaaaacttattgcctagagggagcttttgcgagtattccgagcatacagagccatgaagagaacttcaacagggcacacactgtattcgatgacttatgggcatgaagaagtcatccctgtagaaaccacaattccctctccacgaaaagtcacgagttcaaatcaagatgtaccaaggaaagatcacaaggtacttaaattctaaagtcaagattcgtacatttgacattggagatcttgtcttgagaagagttttcccagctttacaagaaacgagagtgggggtcttaggacctaattgggaaggtgttggaatttattttaccaggatct

SEQ ID NO: 251106 - DNA, 860 bp, Cannabis indica
gtgaattagttcatgtattactgtctcgttagtgccccaccaaagttttttgttttttcttgcattattttaaaaatttgttaatttttttccatattagtagtatttaaaattgtatactactattaattaatatgtttatgtataataataaaaaaattagaacttagatattcatccgtattgaagtaggttctgtgataaatatattgtgattggatggataaattattattttgtgtatgtattgttctggattgtttgtttattcagtgtgatgatgtcattagttttttctgagaatataattcatacgtttaataaaatatttttaattatttttgttttacaattttataatggttctaaattttataaacttataatatttaatttaatttatttttttttttgtaaaaaatcgtaattaataagaagagaatgaaatcctttcaaattaatctttatcctattaaaaattcaaagtcaaaaacaagggagctgtatagttttacttgtgagaggaaactttgtttcatttttttataattagtaagttacagtacacaataatcattttttcgtgctatgtaaaaatcatctagaatatgtatatagtcagtttttttgatggaaaatgtatatatatatatatatatatatagtctaatgagtagttatctatttacaaaataaaaattagaagtagttggaatattatgaacatagaatgtataggtttgttagtaaaatatttgagtcactatcgttaggttttgtacttaaaagtaagtaagtagtaagttaaaaggtcggtacgtgtaattatatgtattacgtttggtatataattaaatagg

SEQ ID NO: 251107 - DNA, 1168 bp, Cannabis indica
aagaaaagaagatagagaataaataatgctgaaaaccctctgcagaatgtctccagtattgacttttgtctctgaaatttgtactcctttttccctctaaaattgcgtgaccaaaactattgaagtccactttttatatagccaaaaaatgataaaataagataaaaattgctgaagagaaaaaacctatcctccttaggattagaaaacctatttttcttaggattagaagaggaggtgattttttctactgcgtcactgatagttttttggccataactctcttgatattactcagaattggacgattcaagatgttctggaaagataaaagagtgatctagaacttttatgtttcgactttttctaaaatctaatcagaacatagtcgtattcaggtttgaagtgttagctttattttcttgcacaagtttctctattttaaatatcatctttttgtgagatatttttatctttttcctatctttttcctctgatatttttctaatcttcttttattttaaatctgcaaaaataaaagataacaagcgtaaaaatgctccaaacatgatttaaactaaattaaaaatatattaaaattaatctaaaattaatactaaaaataaactaacaattagcgatttatcgttatatgcatttcatttttatttatttgttatctttttctatgaaactttgttcaagcaagagacatttaagagtttttacttcaaatatttatccatattgcccaccctttatgagtctcttaaggggattggctgtattgatctttttaattagaagaaactataagggagatcttgatacgcttcaatttccttagaatagcagtaaaatttttatcttcatgaacttggtttcattattttaggttcatatgcctttttaataatcacaactttcacacttcccacaagattgatagtttatgattaactatatatttcattaggtcctcttaagacatatacatctgatagtgatacttaattgtaatgcttgatcattaataataactcttattgtgggatagttttgctaatatgtataattatattttttaacctacttgtagcaaaatcggatgcgagccttaaactatataaacgaagaaactgatgataacctctatgatgctcacagt

SEQ ID NO: 251108 - DNA, 1196 bp, Cannabis indica
cgtacgtcgagagcctttcaccatggtgagctttcagatctgggtcatgtttagtaggatctttaccggtggggtttcttctcaggtgaaggtttgtctgctgcggtggagattagggatttctagggctccaagatttggtttcctccagttcccaggtgtctctcccccgcattggaatcgatcgattcgtctctcctgcatttgggtcgactggttcgtctgttgtagcgtttgagttgatctaaacctcaaaagaaaagaaaagagaagaagaacgaagaagaacaagagatgcgtttgaggttcagaattcagatcttacttttttttaattataatttaattaagtcaagtttactgagatgtcatgtgcgacgtggcattagtttagggatttaattaatgattgttaatttaatttaattaaaatacaaattttaatatatattattacatttgtttgatttttaaatactttttatttaattcttaaaattttaaatgaatttttaattaaaaaatacaaattaatgacgtggaccaataagggaatgacagttggactcttacatgtcacttaacggtcaggtacctacggaagttccaaaaccttaacagaaggtatttttaccgccaaaaatttttgttaggtatttatctgcaactacaagttaaacttgggtagttttgccgcaaattactcaataaaaaataacatagtgacagttttttgaaagttaagatataccggataagtctagagcaaaagggaaatttcaagggatttcttcatatataaccttattagggtcatactttacatttttattaccataagagaaataaactaaattagaaaactattttttttttcaaaaacacgggagtcttcttccctaaagaacttcttcttgacagaacaaaataaagtgagttgctctctattgtagacaacttcaccaaacaatcatgtgatgggaattaacatccaccaaagatgtaaaatctttttgtgatcttcatgaatgccgactaggaactttgggctgatctccatcaacgtcggcgagaagtttttcttcgatattctgccatggcagtaggattaccgtggggagatctccatgaagccgacgagaaaggatcaaaaatcaaggaggagatctagtggaatcattgaatatcaacgattg

SEQ ID NO: 251109 - DNA, 981 bp, Cannabis indica
acaacacaggcatactatataataatatagttccattaagcacgtaattaattaatttcttcaatttacccttctcgggtgatatttaccaaactgcccctggctcaccaacggggtcttaacatataataaatcatattaattcacataaattgcaccacgtgattatataatttctcaattattcataattatctaattagggttttgctaatctatttcttaattctagggtattacaaaggatgtgcaaagcttgactggaaaggtttatgccttatgtcgattcatttcctaatcaactgacaagtgcatccctttcttcaacattttaaagaagtgccaaaaatttgagtggactgatgaataagaggaggcattcaaaaaactaaaagagcacatgtcgaaacaactgatattgtcgaaaccagttcacggagaagacttgttactatacttggccgtctctaagaatgtcgtcagcatagccctagtccgggaagaggataaagtccagcatccggtgtactatgttagcaagcgcatgataggagctaagatacggtatcccttaattgagaaattagctttttgcctcctgatggcatcgacgaagttgagaccctacttcgaggcccatcccattaaggtacttacaaacgatccacttcgtcaagtgttgctgaagccggaagccttaggacgactccttaaatgggccatggaattgagccagtttgacatacattacgttccacgcatttccataaaaggacaggccctagctgacttcataacggaatgcaatgaagcagaggccagttcaaggacgccagtaccgcaaacaccagaatggaaggtgtttgttgatggagcatcaaatgaaagcggattcggtgctgggatagcaatgatatcgccagatggacttcaaatctaggcagccctgcacttcacattcccagcctctaacaatgaaaa

SEQ ID NO: 251110 - DNA, 900 bp, Cannabis indica
ttcattcctgtagatgtagcatcggctggcagatttgtttcctgattttcctcacagtggactgtcttgccagatctcagccacggagaagcagtcaagaagttttgtcgtcggagaggggctttcatctctaagctatacggtttgacaagttgactggcagggatgtcatacactttgttgcagagcttctcggcatggcccatgattccacagatgaaacaaaaagtgggcactcgttcatacttgaaataagcatagaaccagtcaccatttctgctacgaaacttcatacgtcttttgagtggttcagtcacattaatcttaacacgcacccgcaaataatcacgccacactccttgaaagttattaggatcagaactgacatacgtaccaatgtatttggctgcctctctaatagcccattcggttttgaaccctggcctcaattcatgaatttgaacccacatttcgatgaaattcagagcaaccattcttggatctccacctggtttgagcctttcaatcaccagttgttttctgtcatatgtccacgggcttccatcaattattcgttgaatatcgatttcgtgataaaattggaatagaaatcgattttgttcaagaatttttatcgtaattcctttccctggtttccacaaatcagccataatattttgaaaaattttgaaatctgaaacttttccagataatagtcggcctacaaggcaccacctatcatcaaaactagtatcttcttcctctatacagtcatcatcatacagtacttcatgttcttcttcctcctccaaacaaatgtcagcccatttcttagtgagattttccccattactggatgaagccatctgcaatacacacagactaagcaggcagccaaaa

SEQ ID NO: 251111 - DNA, 936 bp, Cannabis indica
ctatgagaatgattgattagtggctaggattcgtgaatcttttcttaaatgattgaagggacggttggattagcctactacaagcttctactacaagatctttcttatgaggaatgtctcctttcttttctatttaaactttagaatttcttataaatccttacccttacatccctcgattagtatctcctctctcaaaacactgctcctggtctaccttcaaagtttactccttactcaaaatgaatatgttatccatgaattcgttgaagataaccctattcttgatcacaaaaacaaagcctaatgtattgttttttgggttcttactcctagaactatcaagctcgagtggcttaaagatgttatgaggaacgcttgggtcataagagcacctcttaccttctcgcaatccaagccctaggtcgtggcagatatataatattcataacttgggtggtcaaagatcacactttgaccattgtaagaagataacacttataaattatcctttaatttatatcacaaaatacttatttaacaataaagaagtaactcttataccgataagaaaatattagtaataaaatcacgttcactcattaatacaaaagaataataatatccccacagtatatgtagtcaccaaatagatagatttaataggtcaataaaatacaaaaattatatctagcatccatcattctttatttctaactagcacacagctaatttaattttatccagaccatcaattcaaacttaaatactaaattcttttcattggaagtttaataagaagtataagactaaacgaataacgactttcttccttaacgataccatcctcatccactagtatcaagctgagttcttagaataggagaaaatagggggctagcttataaagcccggtaagaaaacaactaatatcaa

SEQ ID NO: 251112 - DNA, 842 bp, Cannabis indica
acactacaccaaaatattaaataagtgacattttaaagtggtactattttttactttttgttatattttcattaaatagtgacatttgggcaaatgtaatatatttgcatgtcactaatccgtcaaatgtcactattttccatgtattagtgacatctgtcaataaatattttaatttattttaaaagaattctaattttattttgtaaaaatagaattagtgacattttataaatgttactttagaaaaagttattaaaaactataattaattattttttaaaaaatttatatttgtattgtacaaatactacctattatttaacaactttgacaaatcaaattaagtagacatttcatcaaacaaatattattgaaaagaaaataataattccacaaaaagatacaatctgtttttcaaatttatattgtactaaacattggaacaatactcaaataattttacaaattcatcatcgaagtaataattttcatataagcctttgagtacttcaatattctgcatcctgcaagagtgacgactttactatattgactttcctacaaaaaaaaaataaacataatcagtaaaattttagtatatgaacttacaataaatgttcactaaaacaaatagtatccgctacaaaatataaattgaaaatactttatctcaaattacttaacaaagagaatattagaagatgtgaacaaagactatctacataccaagatggagatgcatttagtctttcaaggacggtctgtagccaaagcttgaaacaactgaaaaaatatgtacatattgattcatagcaattatcgtaatttgatagtgcaat

SEQ ID NO: 251113 - DNA, 786 bp, Cannabis indica
tggtaaaataattccaacaacatatacactaaacatatacatacattcagatattcatatcacacattatatacaattcttacattcttttcagattcaagtgtgctggccgacctgtacggaaagtcttgcgctagatggatgccctaatcacataatgaaactctgtaaatcacatgattcaaaaacctaatccgggaaacccgaacccaccactctaggttctgttatactctctagggattacactaactcaagaaataggaaaacacccaactacgacacagaatggacgagaattgagaaaacgagacactcggggaacattgccaaaattggctaaccggttttacaggtacgtgtaaaaccggttatccggtttacaccagttcacccaaaaaatctcatttcttgctcaaaactccaccaaatgtaaccaaaccttccagagtacctaattaaggtatcagcaacatattccaaccagtatttcatagaaaagcttagtgaatcaaattatgtcattaaagatcaaaacttaggtttttaaattcaaacttgcataaatccaaccccatacaccaaaaccagctgcaagaagctatattcaactcaaaccctaacaacctctaattttcaaaatcacctactcaaaccaaagtaaaagtatcaaaaacacaagtatatggattctagggttaccttagcttaaatcccacttgaattccttgctgaaaacaccaaagattagcagcaactcccctggtttttggctggttcgaagag

SEQ ID NO: 251114 - DNA, 549 bp, Cannabis indica
tttactagtatatatatataggaattgagggtatggttttacttttttttagtatacataaataacactattataagcaggaaagaaatcatccattctgaaaatagatctcaccaaaaagctagaggtttgtgaaaaataacaactttgagccgcccttttatatacaaaatctagtgacaagatagctaaagattgggaaatctaacggttggaagatgggcaaaatatgaagagatgaatcataatgatcctcgaaactgtacaactgctagaatcaaaggatgcgtttttcccaagaaggattttgacgaaaatgtccttgtaattttaaaaagctcttttactaaaaagaacttttaagggcaaattgttatacccaaaattctgctgccacctcaatgaaggacacgtgtcaagatgaaggaaatgtgaatcgatgcaattgctctatggaataactcattaatcacataagagtcagagtatatttgtaactcgctgactgtaaggtcttaggcgaggaatcaatgtacaagctggcactta

SEQ ID NO: 251115 - DNA, 755 bp, Cannabis indica
agatcctggtaaaataatatccaacagtattttcttcattcatggggtcatcatggtcttcatcctcatattctgtctatctcctactcaccatgttggtaagtggtgattaacacttgtgttcactgctctcagtgaaaataccaaactgttaatgcgattttttgtcaacggatctaagaagatcatacacgagcaagatgaacacaaataatagttaatcaaaataaatcggtttataaaagtaaattcgacaaagatgaacacgagaatcttatagtggttcaccattttttggcagtaataggctagtccacttggagtgttattgatttcaatgcttaaggagagttctccagagttatgttctccaagagttcaaacctcaagtgaattttttagaatgagagaatgggagctcttgaatgtgattttgtgagtattaaattcaaggtctctttacaagtgatttcactcccttgtataggttttcttctaggatttaaaatccttaaccataggtgcctcttcccataactatagttgggttaagtttaaaatacaaaataatattaaaataatcattcaaaaaaatatatcttcaattaatatttctcgactatattttcgaaatagctttaagagcacgtctctttcgcatttggcaaactcgaattgtcatgggcacacgtggggagccaattgggtctcttaatggtccatgccaattaagtccttgaggtgatttggtagct

SEQ ID NO: 251116 - DNA, 679 bp, Cannabis indica
tatgcatatcataataaatcttataaaatataaaatgcacacattcttaaaatagcatatatatatccacataataatatagtatattaacattttattattttatatactaccttgtaaatatatatgtatatatttaatttaatcaacttattagttcattgatgcatatcgacaaataatatattaatgcatgccacgtgttcatgaaaccgctcaaactgcctgtccgcaccgcaaaaaaaatgcaattcaaaattttttgtggtgtagtcgcaatttgaatttttcttaaaatgcgcagtgcggtttacaattttgaattgttaatatgcggttcaaattgcaccacacccatattataaaaataccaatttttatgtttatttaggtccaatatgtgaaggtccagcctaaatccactaattattgtattgttgaaacttgaaacttttttttatatttattttcaagccttatggtatttttgacaagtgttgttcaagctttgttgtatttgtgacagtttaattatttggtgaaagtcaaaaccacataaactgcactgcaccgcactattttttgtggtgcgatttctgcgatttcttagtttcgcggtgtgggtgcggtttgagaattaaaaaaactgcatgtgcgggttggtttgaaaaaatagtta

SEQ ID NO: 251117 - DNA, 1129 bp, Cannabis indica
aggcttgaaacggggacgttacaatcaacattcacttatatctataaaaaaatttacttttagtcgcaacaaaatttgtgactaaaagtaaaaatattatgactaattataaattatcattcgtatgttgtgactgaaaggtccatggttaaaagtattagtcacaaaaattataatttattgtgactaattagtcataatacttgttgtgactaaaattaaattagtgacaacttgtatcgaaatactatattttagtcacaagtaacattttgttgtgaccacaactcacatttagtcaaaaaataaattacgcagtgaccaaaaaattgtcaccaaaaataacattttttttgtagtgtatgtgaaattaacttgaagctctatgtgtcacacatttttaaaaaattaaaattgatattttggtaatttttatgtgaaaagttattccaaaaataaaataaaaataaatagaaattatacaaattatggaaaaacttaaagagtttagttttttgtgacatatttttttaaattcaatttgttatggacttttacaaatatttacatttttatggtttaaaatatatcatatttttgtaataaaaaactatcgtttaaaatatatcatacttttaaaatgacaagtgagagtattaaaagttagggttagatgagtgagaaaaaaataaatatgatatttaattaataataacaaataaaatatgacaaaataaatagcataaaatgataaaagaaatgcttaagtccataaaaagcagacacacataaaattgctatatttttcaaataaagtttcaaaattccatattaggtgtaattttctcttttattattttgtttgtttttgtattttcattttttttttatttttaccaccttggaggacaaggtgattttgaaagggtgggaaagtgttatgaaaataatataggaacttattagtaatttgtaaatagtgtgaaagcctataaatatgtaattgtgtaactattattggatagagaatgagaaattagaactttagttcaatcgagagattgacaactgtctcgaagagtgtattttaaaaatttgtcttgtctcgaagaggatccgttacctatca

SEQ ID NO: 251118 - DNA, 713 bp, Cannabis indica
aaattttaacaaaagtcttactttttttttaaaaaaatgataactttaatgtcaagtatcacattgttataactaaagagcattattattgggcactagtggtgcccaacacctttgataagtgacaccctacgattggttatcgatatttcctgaatcttattttttaaagttacatggaacctgctacttaattacactaatagtggtatgatactagtaaggatgtttgccttttagcatttctcataattaaaatatcacactttttatattttttctttttttaattaagatattaaaaaataataaatattttttaaaaacatattaattaataataacagaataaactaatgaaatatctcatatgtcttaaaaatattaaaaaaaaaatatttaaaattcgaaatgaaatctaagattaagatataaatttgggaaatataatagaaacgactacaagtgaactacgataatgacaatggatgagatacagtgataacgggtgagatatggtgatgaaaataagtgagatacaataatagtaatagttttgaatgatcgagatataaaaataatttcttttaacaaaataattaaaaatactacatataataaattttaaacttcttaataaataattctaaataataattaataaaattttacatttaatttttaataaataaattattaataataatatgaaa

SEQ ID NO: 251119 - DNA, 517 bp, Cannabis indica
gagacaggaaaatgcccaagaagaataacctagggaaaatgagatttcccctaaaaatcagaatgaccagccagaaccttctcacagaaatgagaatgggaggcaactagaaactaatgaacgagaaatttcccatgaagatgaggaagatcttgggactcaacctggagaatgcaggtcacctgcaagaactcaccagcattcttcccaaacccatagagagagggctcgtacaaactctaatgggggaaatacgacaaaccacactcagggggaaagaacagagcgtgaagaagcaagtgtgacctcagaacggtcaaggacccacagtcgatcaactcgaagaggagaaaatactcacgagctaatgatccagaatgtatgggaaaccagtaaatccgcgagccactgaaggacgaagtccatgagcagaacaaggtccatgagtaagaaacaatctacgagtaaaacgatgtctgtcaggaactactccgaaccagatctgcgagagcacttg

SEQ ID NO: 251120 - DNA, 810 bp, Cannabis indica
gccagtaaaagtatccccactagccacgtcaaagtccacacgttttgtttaatacttttgccggcgcaagtctgcgccggtaaaagtttccccacctaccaaggaaatccacgcgggaagtttccctcttttttttttgggacttttaccggcgcatatctgcgccggtaaaagtatataagcgccacaataaatgaaatgaaaggcggcaaacttttcgcgcctgttggcgcttcatttcatcacttttaccggcgcattattcattgttgcgccggcaaaacaaagttataccggcgcaatgcgccggcaaaaataaagcataaatgcaaatgggatttcagtttttgctttacctcgacaacttttaccggcgcatttgacgaagtgcgccggtaaaaaatccttttcctgtagtgtctacatcggaagaatagataagattttcttagaatataagtgcacccaaaataaaactgtgagagtttagacccaataaaataaatgaatggggcccaataaattattcgcaagacgtcaccttgtagtaatactaagcactactgatatctaatagcaatgctcgtacatatatcattactcaatcaaaaatatctacacactcattttaatcatcaaactctataattaaattttaaaaatatattatgaataaaatactatttaatacgggaaatttgattttctatacttagaaaatcaaaaaatttgatttctaaaccaataatttaaaccctaaaaaaactatacctttttttttcaaaatcccaaaaatacccccaaactctc

SEQ ID NO: 251121 - DNA, 830 bp, Cannabis indica
taaatatttaagtttaattttcgattacagttatatttctgttacttctgtaggtacccgcccattaaatgtcaagttattatcaacgtgttatttcttattggtatatttatattaatttttaaataaaaaaaattaatgatctggactaatcagagtgtcatgtggccattgacttgacacttaacggtcaagtacctataaaagtttcagaaacataacttataaggtactattattgtcaaaaaattaaacttaggtatttatctgcatacggagttatatttaagtatttatgcggtaaattactctttaatacaaaaacttttagggatatttgcggcgaaactcccttaacatttataattattacacatgtgaccctaataaaaagaaaattggcggcataagtactttattttacgattttgttacggtcatacccttttttggtcattaagtgttagctcataaacatgtagcgacatattattggacaacgtattaaataagttaaggaaatatgtcaccgcttgttttttgagctggcacttaacgggcttaattggcacttaacatccaaaaaattgtacgattgcaacaaaatcgtaagataatgtacttttgctgccactttttttattaaatcatatgtgtaataattgtaaatattaaataaaattcgccgcaaatatccctaacttttatggaatactcctataccacactgaaggtgtcaccttagtggtgcggtacctaatactaatactcttattctatttttaggttgcattactgaaggaaaagcttggttttgacgacgcattcaa

SEQ ID NO: 251122 - DNA, 851 bp, Cannabis indica
ctatgaagtgatgctttaaaataatgttagcggttctctataatctttattaaagtaaaatatatgaaactcgatatattaaattacactaataataatattacacatcaaaagtgtgtagacaccatgggtgggtgccctttagtatttctcaatgtgaaagagcattgctacgaaacactaaagtatctaactccactatgaaataacactttataattaattatcaaatttctataatatttattaaaataaaatatacgagactcaatatcaaattatattatagatttgtcctatctcgaagagaatctgtaacctatgaaactaggggcatgaaaggaaaaacttaaggccacataagaaatgaacccatagagttacattcaatttctctgttcccctgtaacgttaatagggttctgagaatcttgaggaaagtgcctataatatttcttattttctctctctctctctctcatatggtgaaattaagggcacaattttccaagtaatgttgttaattattattattataattataataaagttagagaaaaaccaatacatgtcatgcaagtgtcctaactataaagctacctatccatctattaatttatacacaaatacaaatccaaactaaacaaacaaaagaaaaagttgtgtctatatataatgccactcatcttcaccccaaatatactccatcatcatatatctcaccacttctactacaaatctttttctctctctctttctctctgtttttataagtacttgtccaaatcttgacagcttaggttattagtttcattaaattttgtctttattatatagtcatcatcatcatc

SEQ ID NO: 251123 - DNA, 614 bp, Cannabis indica
agtgtcccttattttatcttaagggttcatgttctatctctcctatccataatgtgtaacattcttaactaagatatttaagtcattaatctttatatgttctctatccattatgtaagtcatctattttggatataccttctatcttggacgtaagtcacaattttatttatgtttatgtcatcttgtccatggtatgtcatcccatacaaagtatatcatctcatctgaccgactgagatataagtcatctaaccgattgagataggtcggccgaccgagatatgccatccgaccgagataggtcggccgaccgagatatgccatccgaccgagataggtcggccgaccgagatatgcctggcaaccgagatacgcccgccgaccaagataggcctgccgactgagataggcctgccgatcgagatacatatctcatctaagataagtcatctcttatgagctatctcatccaacttgagatatgtcatctatctaatatctaactctcccacctatatgcttattttatctagaatacatcttatatagtgtttctttttagaatgtgccttttataacttttgggcctttttataataatttggacttgc

SEQ ID NO: 251124 - DNA, 1090 bp, Cannabis indica
ttttgatgcctaagtgatatgttgacatcacttagtcaatttcatagttttcgtgaagttgttcaccaatcctcggtgatgtcacttttttgtaaaatcaggttgactcaaaactccctaattttgttgatatttgaccttgttgaaaagttaaaatatcaaagtgtgaatttaacttgtcatcgtagctctcgtttattatgaaaaaatagttagattcttaagacagaatcagaatcaaataatcagaacccaactcaccaggctatacgttaacctgggcgctgagtgctccttagcggacttcttggggcttattttgatacttttatggaatttaagattgtgatgagctctcttaccctatttttgaccaaaataagaagaatccctagagtagaatttgtgtttgaggagcataaacatgaatactaggttatacatcaacctatgcgcatggcccagcacttatgtcaacttaggcactggcgctctattttggctccctaagaatctcctttgctccccgagatcacttgcattttcaatttttttttaaaacggaaaagatgcctggagcactgttttgataaaacacttggaactggctcaagttgataaaatatcaacttgggtgctgggtcctagtttttcccactagatgctttcgagtgattcttgaaaatacttgtatcacagttattggtgaaaagaagaatatgcctggaagaattctcaaaaaaatgtttggaaatggcctaggttgacaatatgtcaacttgggcattgggcctagcactaggtcaacgtgggtgttgggtcccagttctgactcccagaaggctccgtttgtttctcgaaagcacccatatcttaattattgatgaaaacagtgaacattcttggaagaatttgcttgaacttgttagttttatggtattaaatcaggtccatagcggaataaaagtttctgattactatcgtaccatatccttaggatcaccatatatattacatctaaaataaaatagacaaaaaaattaatttaacctcttgaagcctatcgaggtatcctcgagtctttttgtat

SEQ ID NO: 251125 - DNA, 1364 bp, Cannabis indica
gaaactcccagataatcagaatggagctcgaaaaaatgagaggaaagctgcacggtatatcatagtagagggaattatgtacagaagaggattctcaatgccattgctcagatgtgttactcaagaagaagctgcatgactcctatctgaggtccatgatggattctgtggaaatcatgccgccgggcaaagtttatctaagaaaattctaagggaaggttacttctggccaacaatgattgaagattcaaaagcgtatgttaagaaatgtgacaaatgctagagatattcaaagatacctcgagctccacctaacgagttgactcagatgtagagttcgtggccctttgccatttggggaattgacctgatcggacaattacccaaaggcaaaggaggagtatagtatgtagtggtagcagttgattacttcactaaatggatggaagccaaaccactcacaaccattacatcaaagaaagttcaagactttattgtgaagaacataatctgccggttcgaactgccgtacaagacagtttcggacaatggcaagcagttcgacacccaatccttcaatgacttttgtgcgaaccatggtatcatcaaaactttctctgcactggcacttcctcaagcgaatggtcaagttaaagtagtcaacaagaccttgaaggatacactgaagaaaaaactcaaagatgcgaaggaaattggccaaaagagcttccttaagttttattgtcatatcggaaaactgagaaaatggcaaccggacagacaccattcgctatgtcatacggatatgaagctatgctgcctgtagaactcgagccaccatcccacagaagattgatgtataaccaagataccaatcactcctggccgaatcacttaatgaaatcgaaaagagacgagctactgcaaacttgaagttgatggcccatcaacaaaaattagctcgatatttcaacaaacaagtaaaagctcgaaaaattctttgtgggagatatggtcctaagaagggtattcttaaacaccaaagacaatacggtagatgtacttggacttaactgggaaggaccatatcaagtggtcgaacttctcgaatctggagcatacaaattaggtaggtataattaaaaactgaaactcgttctagtaccacggtattggaatggggaacatttaagaaaatactaccaataaagtaccgggtcggatgaccacgctaagtactgaatgaacatttactcttaagtgaatggcctgctgggcggactacgctcaaaggttttgacaaaagtaaaaaagtactcaggtcaggtgaccaccatttaaagtacaatttctatttctacaat

SEQ ID NO: 251126 - DNA, 844 bp, Cannabis indica
acttggtgactagggaaaaatttattttagagagaaggttagaaaggctcaaacgtccaaagatagcctaaatcatttctaagggacaagtctaactaggatttcgcttcaaggagatgcactaaccaattatagatgctaaaagtatatatgcggcaatcgtatgaaaaatgcaaagcatgttgggaaaataaaagtatccattattcaggagagactaaggagaaacatccatgatatccaacgatttcaacatgcaaatgcaacatataaaattaggcaacacataaatggaatgagcggaaaaaatcatcatcgagcagaacactaggccacagaaaaactcttaaatctctcactgtcaaactaacaaacatataaatcacatggcataccaatttaaaacacaaaagacaacacacaattggcacaatacaaactaaaaacgacacataacagaaaaatataaaatagcttaggtattaggaaactccctctactcggagtcctcgtggggctcctccggattcgaagccgatggcactgcccacgggtcgagaacctgttgaggaatctgcaagaacttggcagccacaacaaatgccccctaatccaacacacttcccaagccacaccaaattgacttcaattcattcatacaaaccattcacacatcaatcggccatggtgcattccctttgtatatattaatcacaatccaatctatccaaaacacaacacttccaacactgcaccaactcaagatttaaagcactgacactaataagcaccaccacaattagccacggcaaagaacaactcccaattttttttttttttgttt

SEQ ID NO: 251127 - DNA, 658 bp, Cannabis indica
gaaagggtgattcaccaccatatgtgtttttgatttctgcagaaggcttttagcacttcatgacaagctgagagtcgaagagacatactaggcttaaaagtggccaattttgctccttctattacacatctcttttttactgatgatagcatgataattgtaagagcattagagagatctttggtccctatacaaagaattttttccctttattcggaatttatcacgacaggtatgcaaaattatattattatttgcttagttagtctatcattttaacgcaaaatttaaataatggttttatcttatatttatgtgtgttaggcaggtaatcaatttcaataaaaccattctttttttcactcctaatacacctgcgaatattcagttgatgtatatggctaatcttgaaatgagaaggacagataaaattgaaacatatttgggtataccaatgatgtggggagaaataagaaaattatgttcaggccaataaaggatacgatttggtaaaagttaaatttgtagaaggctaaattgttttcacaagttggaaaggaaatctgtaatacccggaattaagaaaaggattagcaaaatcctaattagataattataaattaattgaggaattatattattatataattcaatatat

SEQ ID NO: 251128 - DNA, 559 bp, Cannabis indica
tgagcctcatagtgcgcaccaaacggtttggccagagaaatggtctcctcctagctttccctttatcaaagtaaatgtcgacgaagtgattcaaaggagcgatttggagtggggctggtggctcgtcctgctgatggcttggttatccaagcaacaacgttgatcaaaatgggttcgttacagccgcatgaggttgaggccatcaggataaaagaagcattgagttggataaaagctaatgaatggagtgcggtcattcttgaatcagactgtctaagggttatagctgatattcaaagtaataaaaatatggcttctctttatggccatattatttcaaaatgtaaggcgttgtttgtcgagattggtaatatctttttgagttttgtgaagcgatatgctaatagggttgcgcattgtttagcgcaatcctctcttgaggctgatcgtgttttaaatagtctctctttacctattgtaatttcatctttagttttagatgatttgaattaataaattaccattattattaaaaaaaaaatgtgtgaaaatgtgaaat

SEQ ID NO: 251129 - DNA, 613 bp, Cannabis indica
tttttttgaaagaaaaaacaaaaatggttcaaaaataaaaattttacttttaattttgtgattaaaaaatttaaaaacaaaagtgttactactaaaatataacttttttttcttgcttttttctttccattatcatacatgtagggagcaagtactatagattttaatattgggggagaaattataatctattctttttatatatatttatgaattttcttttgatgtatattttgtatggagtgaagtattttttatttaattttcggaaaataaaattattttcactttatagaattatgatataatatttcaacaacgtaaaaataatatatttttttttaaaacaactaaaaattaactgtaggtgtttttgtaaagtataacttttttaatatactaatgtattattaaatcgaatttggatttgcttcgaaaccgtgagcacatcattcaaacatagatttttacataaatatgaggtcctgagatgtggctgttcaattcaaggtggtgtttgattgaaataagtaaatcttaatgagatgagatgagtgtgagggtaatattttaatttcatttttatttttatatcatcaaagattatcattag

SEQ ID NO: 251130 - DNA, 743 bp, Cannabis indica
aagaaatgaggcgagtaggaacagaaaggaacatcaaatgaaagaggagataggggtaataaatgcaagacagaaaggaaacagaaaagaaaagaaaataaaagaaagagaaactaagagactcaaacttgagaaagaagaaactgagattcaggcaaacaaaccgatatccgtgcataaccagagcaaagcctgtaggaagcttcaagaagaagattagatatacattaatcttttccgattttcatagttgatgactcttattaagtgttgggaataatccaacactactataactatgataataatcttttaaaataaaaaaaataaacaataaatatctatctaataatattattgagaagtaaaacttaaacaattgttacagaaaatatatataatacaaaagataattaatatatatatataaaagaccagatgtgtattaattatcaattccaaaaaaaaaaacatttatcacataatattaaaaattaagctcactcgctcatcatataatttatttttcatagcatagaaacaataagtgctagaaaagaagctagcataagatgtgaaaaggcagaataagctgatgaagtaggaaggttaatattattattattattattattggccttggaagaagggttgggataatgagatgggtctgtagtagtagtaggggtggcctggggtgagtaagctgaggtcggagcgtaagcttgattattctcatgaac

SEQ ID NO: 251131 - DNA, 669 bp, Cannabis indica
aaaaatcagctatctaattcctaaatcgtttgataaaaaaaaattgataaaaaaattgcaacattacaattaactttaaaaacacttatattctatttcatttaccccttagaagatataatagtaaacattgtttcaacatcataatttgagcactcaattatagtgtaccttttaattggagaaaaattattatcacttatcactaattatacaaagcttttcatattttttatgagcttttcatacaaagtatatcaatttttttaagaaaataattttgtcattaatttcaaaaacattaatttaacaataataatttaatagaaaagaaaaataattacttaaattaaatggtctagttatcttgttggaggcaaaatgtctttgggtctccaatcaaactctattttgttcatttttctaacaataactatgttattcttttgagacatatttaataaaaccaaataatgttgaatgaaattaaaattaattatgtaatttacttaaatatacaaagaaacaaaattgatttaaaaataatccttatttttattattgttagtgctaatacagttgaaataataataaatatgtatctacctacacatatataggctcgcccttgagataatttgtttttatcactcatatcaaaccttcatt

SEQ ID NO: 251132 - DNA, 1988 bp, Cannabis indica
taagttagttaggtaataactaatttaaccaactcttttttgagcgagatctccacgtaagcataaagggtgcatctgagagtgagtatgagggctcccgaagtcacagatgaaggcactcgctaaaagatctcaaagaggaacgagccaacaggagacgactctccggaactacctttccaagaggaacaactagccatccagaactcatttttagaggaggactaactttcctgaagtctacacccagagagcaagaaaattgtctgagaacaaggtttctggagacaaacaactttacaataatgacttttagtcaaccattttttttaaggaactataccgcaaatacaaataaaaaacaacccctttggtaacctgctagccacaatcaaatcaaaatgtcgagtaaaactagaatcttaaaatatttaatcaaaataatcacttactgagaaaatagaaaatatatttaatttcttgtgtaattgatgacgttaattagacaagaaataataataattgaagacatgcatgagtataacagaacccatttttatactaccaaagatacacactttgaaatagataacataaattattatagtaaataataaaaatgtccacgttcgtagatagtatttatttatatatatgtgtatatttatggactttatttatagaaacagataactaggaaagccagtgttttacgacagtggaggaatactttgctcatttctaaagaaatttgttggatcaaccatagtcttgacatgtaccaatctattaaagttgttttggccgaaatatttgaccccccaaatgctggcttgagcataagttgccgtacccttgttgctattccttccaatatcaaggtctctataattaatataagctgatctaggatttttggacacaaacggagtcatgtaattgtaaagtcttctaatccaacttatgtgcttttccactactattccactattctcttcttcttcccaataaatcaaatactgaattttatacatgttcccacctctatgcccaaatggaagctcagattctggaatctcactcattttcccaccataaggactcattatcacaacaccacttccaacatcttcttcgtataacctttcccatattccttccaaacccttttccggaattggctccttcacataatcagattttgctttgaaagacaatcttgattgaggtgttcgatcaagcaaaatctctggagactgctcacttggtagtccagcaacgaagagagctgactgaatccagctcatttgggtgcaatcttctctcaccagacctaactcagggaatcgtttttccatcaagtaaagaagaccatcaactcttccaaggaacaccgaaatgaatgtggcttgaagctttttcatttcactcccttttttagtagaattcacagtttgaaacctaaccgctaagagtagttctttaggtagtttgtgtgctatgtattgccacctatgaacaagtttggtaaggttatgttcaaggttcctattaatggagaaaacggtcaccgttccggggacgcgaactaacagaactttccaagcgagaattactccaaagcttgctccacctccaccacgtatggcccaaaaaagctcttcccccatagtttctctatcgagaactctaccctcaacgtctactaactgagcatcaataacattatcagctgcaaggccatattttcgaaagattgcgccataacctccgccagttatgtggccgccaacacctattgtagggcatgctccgcctggaaaggctagggttttactttttttgttgatttcataataaagctcgcctagggtagctccggtttgaacccaacctgttcttctctcaacgtctacagtgattgaccggaagtttatcatatcgattacgataaatgggatttcagagacataggacagaccctcgta

SEQ ID NO: 251133 - DNA, 757 bp, Cannabis indica
gttgtcttccatgaaaccatttttcccttggtttcaccaacatctacatctgaaataaaccaattgtttgctgacattgttcttccaacatttaaaccaatacaacaacaggcccctacaacaaaacctacaactgaagcatcttacccatctggtttcacaccagcaaccgagttctccaactcatctggtgtcacaccagatcctactactcacaaaatacaacctcaaccactccaatgtggttctgaccatctggtttccacaccagaaactcaccaagggaacatttcagatactggtagcattcaagaactagtacctaccatcaattcccacaaacaacacacaacttctactcctgaagccattcccaaaaataccctgcaaaatgacagtacaccagcatcaacaactccagcctccacatccgaagccaccactactggtcctaacaaacaagctgtcacaacagcagcccaaacacctctaaaaactaccaaaactggtagaattttgcacaaacctaagcatctcaaagattatgtttgtcatgcttcatctacatcacatccaattgaacctttcctatcatatatcaagttacatcctcaattcgagcagctgtacttgcagcatattctgaagttgagcctaaaaactatgctaaagcagctcaatgttgacattggctgcttgccatggataaagaacaaccgcccttgaaaaaacacacttgggtcattaccaagctacc

SEQ ID NO: 251134 - DNA, 825 bp, Cannabis indica
tttcttttttttttcttttgtgaccctcgacatctcttcttcttcttctaccaaataccaccaccaaaaattcgacgtacccgaatccaaaaaatttccacctcaatctgtttcaccatgaattttcaggccaaccactccaaacgaatcgtcgtatgcggcgacagattcattggagtatgcacaactcacttgctagccaaaaacggcgcccccgtaaccctcgtcaagaaatcttcaatcgccgacgccgcctcaggtaaagcaggaggctttctcgctgtagactggtgcgacagcagacccgtctcttctctcgcccaagctagcttcaatcttcccagttcgctcttcgaagaacttgatggccacaaatcgtacggttatagaacccttgacattctagtctcaatatctttgaaaccctaaacaaaaatcctccctcctacggttctcgatcctccaaattaaagtcgtggatcgacagtagtacagctcggagcccaagaacgatcagaatagtcgaaaccacggctcaggtttatccccaactccttgatttcaaaagcggtggagagttacggcgttgagattgtgattgggaaggtagaacgagttgagttggaggaggaaggaggacaagttaactcagtggttcttaaaggtggaagtgtgattgagtcgaacgccgtcgttttggcactcaggccatggagtgggaagtttgagcttctgtcttgtttgtgtagggtttttggtttatggggagcacaatcgaatttttgggggtggtattggtagaagaagaaaaagagaagaagaaga

SEQ ID NO: 251135 - DNA, 809 bp, Cannabis indica
tcattcaagtcagagttggtgataaaactgacattgtcaacactgggtctagtagaggaataagcaaatctaagggaacaactgatgatggaacatctgtctttgctgagacaatcgattctggtagaatggttggctctgtaggcaatgccttgttgtcaaatcctttgttaacataatcatcagacccatcaaaatcgataagttcttcatccctagagctagaagctccaaagcaagtaacagatggcggcatctctgaactttgagtaagtgggaaggatacatcttcaatatgattagaatcatcatgctttgcacgtttcactcgtttgaaatgcggagctaaagaatggtcattttctgatccaatgtccgattcagtatcgacatagttggcaccagtgatggcatagtcagcatcagtaaaatcatgctttttaggagtacatcttagaaaaacctcatcaagggtggaataaattgctcgaatgtccttaatgacatacttaggatcctcctccatatagggtttcttggttaactccaaatggagatttctcacatgtaacaccctaactagcataggcgtatgacgtgatttttaaacatgttgtgcagctcgtttctaatcaaggaggtttatggaaaacacgattaattaaaatttttgctttttaattaaacttgtaaaatatttatacaaaatactcgggattccgattacaaaaccatttacaaaagtttactgtctatacaaaatataagtcgcctagcgactaattacaaaaatagcctcgctgtcccga

SEQ ID NO: 251136 - DNA, 703 bp, Cannabis indica
aaaaaaaaaaaacaaacacagttccacaaacaattatcataacaagaaactatattcattgaaaaaagataacaaagcacggtaaatctaggattaaaggctgcccagtcagccagttgtcttaaaaatgaaaaacatattccaattttgaaagctgcttggccggtcattttatctcaaaagaaggactatgggacgtacaaacatatataaaaaatgagaaaatattcaaacaccaggagtcccaagctctttgtacggatcgccttggtctgagggggccagaggatcaacactctgagcgacggagagttcgatgctctagtcaactagaactgtggaggtagttacctcggggttttctttggcaacctgagtcgtgcggaagtcaaggtacatgttcttggatttaccaaggtaatcaaaattttcttcaggattagccttccaaaaatcatagaaaacctaaagaggagctgtctccagggtctccacctctttctcttgctcctcttccctggtctgcttattcctgacctccttctccagttcctcctcactggtctgtttattcttgacatccttctccagtttggaaaaaagagtcaggagactctccctctaatctttaagattattgacctccttggacaaagaaaattatcagcctccagctgcttggccaaaggcatatctcgcagga

SEQ ID NO: 251137 - DNA, 517 bp, Cannabis indica
atttaaatcaggtacaatctgctgcaacttttcctacagctacattttccactcaatctgcccagttttttaatcaaactaatgttccatctgttattgttgctgagccacatgactctcctcaaattgatgctcctgctgtgcactctgcaccatcttccagtagcctgtctacaaccccaactcagcatctgtcagctccaactgaatcacaattgcccattcccacagtcttagttccttctgcagacataccttccagttctgctgcccccatcagaactcatccaatgcaaactcgatctcaacatggcattttcaaacctaaggcatacatggctaccaaacacaaactgccagaatcattaatgcctcgtgaacctaagtctctcaagtctgctcttcaaaattctgcttggaatgctgctatgaccagtgaagttgctgcccttaaaaagaatggtacttggactttagtaccatatcaaagtcatatgcatctcattgacaataagtg

SEQ ID NO: 251138 - DNA, 1639 bp, Cannabis indica
tcaaattcaaagacctcggcccccttaaatttttccttggactcgaaattgcaagatctcaaattggtatctcagtgtctcaacgacccttcgccctacaactcttgcaagataccagttttttgggtactaaacctgcctccactccaatggagcctaacaataaactcagcagtgatttgggtgaaattcttccaccccacttcttatcgaagtttaataggcaaactcatccacctaacaatcactcgccctgatataacctttgcagtaaacaaacttagtcaattcatgactacacctcgacttccccatcttcatgctgcacacagtgtgctccaatacatcaaaggcacaccaggccaaggattattcttctaccccaaaaaccccccccacctcactgcctatactgcatctgatatccctgatcacagcatctccctcaaagtgttctctaatgcggattgggacacctgcctcggcactcgaagatcaatcacgggctacaacgtcttcttaggtgattctctcatatatcatggaaaattaaagatcaagcaactgtctctcgttcctctgcagaagccaaataccgtgcaatggccaatgccacatgcgaggtcacttggatcacgactctcctccaagacttccccatcactcatcatcttcctacaaatctctactgtaataatgctgcagctatctacatctgtgagaatcccgtattccacgaacgcaccaaacacgtagaaatcgattgtcacatagttcgctccaagctccaagctccaagctgggacactcaaactgctctatgtctatacaaaactcaacattgccgacttgctcaccaaacatctgcatccctctcagttcaacaatttattatccaaaatgaatgtaaaaaaacatttacatataatatttaagggagtattagacatagaatatattcagttagttaggtaattcaattagctagttccaattaactcctaccacttagacatggctatataaagaggattacttcctcttcctctgtatattcttttacaataataaagaattattgtttcatttctgttatttgtgagtgtaagaagtatataatagatataatatattgtgctgaggtttatttttttttttcattagcttaatttatgactacatttttactaataaaatcattataaacatcatcatggctacagtgagagttggttttgcaatataattaattaattaattacgcaattccctctcttttcactacatattacaaaataagagttattgcttttacacttgtaaaattaatgtttataaaatatatatttatattaatattaggattatctgaattaataatattaatttcacttgtgaggggtgacggtagatcattgtgttaagcaacatatattataatttggcataaaattaattaaaatatggaagtatcttatttttaaagcaatatataaacttatcataaagtaattaatttttgtagataatatttacgatatgtaatttcattgtcatatagttcgatctctcactgtacggaacttaattacattatatagaatgttattaattatagagtaatttgcggcataaatac

SEQ ID NO: 251139 - DNA, 853 bp, Cannabis indica
ggcttgatcattagcgactctagcgcttttagccaacccatccgccaaagagtttaaactacgattaataaaaaagaacttacacactaagagtttttttgacacattaacaatagaaaagaaaatactagcagacttccactcatgaggccttccttcatcagctaaagctttgactgctaacatagagtctgaaaggatgtgtacctcttgccaaccaacttcaacagcccaagacaaggccaaataaatggatttaagttcagcttcaagtgtagagtgtgaattggttttttgagcattgacgaaccaacttccattttaacgatccactccaactgcaacaaccccagcatctccattaatccaggacgcattaataaaaatgacgtgattcacctcctcttcacgcgggcacattacaactccctggtcagcaactagctcagggtcgtaaacatgttctctggtgtcccccacattgtagctacacaaattcttcatttcccaggctgctttgtcgattcttaaaagagttaagaagggattagcagcagtgttccttacacaaagagcattcctttggtgccagatcttggagaacacacagccaacaaaattcagaagctcatttctttcaacaagtggtagagcaaatatgagcatttcaaaaaaactaatcatgttatctcttggaatgcaatcaattcttaatggatagtaccctcctagtgttgggttttatgccctaaataaaactacatttcaatgtaatctctattattcaatatcaataaagaaacaaaaggaattttcattcatttgtgtgttatttggttcatgttatcaatta

SEQ ID NO: 251140 - DNA, 626 bp, Cannabis indica
ttcaccgtaataaccataagtaagtcccctaaaaccctaaaaaccctaaatttaacatttagggtaacaaaatttccccaaattcaaaaattagaatttgattcccaaacacctaaattgggattcaaactactcgaattgaaattaatgagatgagatgagacaagagccttaatttgcatggagttgatatgaggtgaatcaatggagccagcgtcattaacatgagcagcacgaacaggagtggaagtgaaaatcttccgacgaccaccagtgcgaaaatccaaacccgattgaactcgaccatggaattctctactcgacaaagtaatgaaggttattctggtagtggtaatgctccccaaccattgattcgtctgtgtaaccctagccagtataggaaccgattcacgcattctcgtcaacaatggattagttgctcctgtaaaaacgtatgaacgcgccattaacgtcttcgccgacattttcaaagcttcttcttcttcaatatcttcagaaactgaaaagaagaatcaaacaagagtggaaaatctcttcggtagaggtggaggagaactgggccaactacattaggcccaatacataatgagctgaaagggtccatg

SEQ ID NO: 251141 - DNA, 1019 bp, Cannabis indica
tgcaactgaactagaacctaaccatctcaggattaagatcaattgatctaggatcaactaggtgatattgaattgaacagatattatggtaaatttatcatatctagttcaagttaaatatcggtcccttttgatgtatactccatgcatccaaccccagcttaatttaaccaatgccctagaaaggacatatcacttatccaagctacaagtaaactacattgtagattttcgtatcagttaaaccatgtgaactgataaatcataggaatacatttaataacataatcttgattactttccactgtgctgacgacacaataaacaagaatatcaatgtgataaggatttggatgaatttataaatcaaataaacatataactaatcacatgaacaaaaaatgatactgaataaataatgaaaataaatttgtttcttcattgataattgaatagaaaagattacattgaaataaaattttatttagggcacaaaacccaatactttctaatctctccactgacatgcggtcctcctataatagttaaaatattgcgagggctcaagaaccactcgtatcatttgcatcagtattatcatctactcagggatgattttctcgattcttcttatacatggctgaatttccctcgtctaattaattgttcaatgttgtcttgaagaaactagcactccaaagttgtgtggccaatatctttgtgatatttacagaatttcttgggatctctcttgttgcgattaccctgaattggcggtggtttcctgaaaatgccattttgttcctctattgaataaatgtggtcgcgaggagcagacaactcagtagaattgacaaaatgtggaccccctttcctcttcgatgatgtctctttcttagaaggggatttggcgagctttggactctgccaccttgatagactacatcttcttgggctttgacctctagagactcacgtttctcctttcctctttccaactcggccaaagaattctcaat

SEQ ID NO: 251142 - DNA, 2292 bp, Cannabis indica
ttgttagtactgtatttttgcatattcctgaagtaattatttgtgtgagatgttcacacttcagttatttacgtagagttctaaattccaattttccttctcgtgctaaactgaaataacatttatcgtagggttgtattacagccaagggttttattgagtctaaagtattttctgatcttgtcatgcattttgtaaaatgcaagtgtctgatgtcatctgatataattattctcttactctcaaagaatgcaagatctgtaaagttggaacttgaatgcttcgtgatattagttgaacactgataacccttctatttgtattacttctagttgtaagaaaactaatgagtgatgtcttattagcttagctggcaggtttgggcactgaccaggtagtttgttataaaagtttctgtgtgtattaaaagaggcacgactccgaagagagggtatgactgatctaagttgtaaccgagctttgtcgtgggagtctttcaaatactctatatctgtttgcttaccgtggttcagtaatacacaaatttattttctcttcagtttccatttctctgctttggtatcactttgccctaccaacacgtcagcatgtatttgagaataatctatgttattgaagtgcttagcctgtggagccactgtagtttatcaagagatccttcctttgcactagcctcattaacaaaatcatctacatatttttgagtatagcagttttttaggagtcctacttaaggaagataatattgtttgagtagtggttatttgggaatcaaagttacatcctaatatgtcaagtagagtactgctacagccctttggaaccagttttgtggattttaataaaaagagcacagccatcaattccaaattcagttattattagtcaatttttactgttcaaggttgtgttaaaagttgattgttatttatttggctacacagtcttggtaaatcattggtaaattttggtagttttctccaatagtttttttaacaactccgttctttgtttaatttgtttggaccacgtttccacatgaacaatgcacatatcagtttctgttatttgtttcttgctttgagcattttgctcttttttgatatggttgtttcctttataaatttgaattgatgattcactgttgtttaactgttctatacagctcatcacgaatggtattgcttaaagggtttgatgagaatggttttgtctggttagtatggtagtgtactttcagcagtagtgcttgtaatacctttctgtataaatggacctaattttgttctcttgttcccatatgcaggttcaccaattatgagagtcgaaaggctcatgaattatcagaaaatcctcatgcatcacttcttttttattgggatggattaaatcggcaggtagtacaagttctatcagatatgccttcgtacatacattcttatcagtcaaaaagaatttcttatataattaaattggatgtggaaaactgctttggttatgtgacattccttccgtaatcctgaatcttaagtcagtcgacaattgttccagcacttttatttattttgtgtagctatgtatgttcaagcacaatgttgaatggtaattcaaaatctcactttctttttagggttatgggaagtttaacttctaactttgaatggaagatccagggatttattgcatactatagtatatggaaatatcttttctcttaaaatttaatattattaataacttttacggtcacaataatcttgccttgtgggaactctaatcttttatctgaaattctctttcctagtggtaccaattgggattgattaaagcacaatagtattaccgatgaagcatttgagtggattttcccaagagaagtctattagtgtaaatgacttttccacaatgtgttattttcttttctttcaacagtaaggctcctttgctatttaggaaatgtatacctttctaattttcatttccacattcatgccttcgtgttttgctatcaaagcataataattaccatttcacgtgattgtcttagcaattgattacacttgtaaatgaagagactgccttacattaacttttgatttgtaggtaagagtggaaggatctgtccagaaagtttctgaagaggaatctgaacaatactttcattcccgtccccgaggaagtcaaattggagcaatagttagcaagcaggttctatttttctcagtcctctttatttatgtgtaaggcgcattcccttcaatctaaaaaatt

SEQ ID NO: 251143 - DNA, 541 bp, Cannabis indica
atagtattcagttgtcacaatataatggacagattaagtaatttagttaagtattatataatggtttttaatttataatgggattgaatctataagcaaagcagcaatgctttctttgagcacttttccaacatttgtgtattgatcatcgccctctttgtaaagaagatctactgtttttgtaaaattaagaacacgaactaagataggaaaaggcacaacagttggcctaataaagtcttcattaatttctttccagtgggtgtccactcttttattaagttctttaattgcctcttcctctgataccccatattgtttcatgtaacaatccactgtagatggtatgtgatttctcttttgctcaaactatatacataaaaaaaaaaaatattatttcatgtttattatttagaaaatatatagacatgtgagttatcatcatataaaaaatcatttactctaattaaattaaataatagtcattttaaaagatattgatcttgttaggcacgtcgagattggacatacaatctcagtg

SEQ ID NO: 251144 - DNA, 678 bp, Cannabis indica
ctaggtccaatttcagttatgattccatgtctaagtcctagttccagtcccggtcaacttccaattttgggtcacagggtacgggttcgggtccacttttaggtttgggactgggtttaggtcctcgtgtgggttcgcgtcctcgtcaaggttgaggtcaagggctgggttccaaatcaagacaccgactatgggttttgtccaagccctgggtcgagatccatatccaatctcgggtcccagggttgttcgatttctagtgccgggtcacgagctaggtcctaggttcaagttcgggtctgggtcgcgtactaggttccggtccagatttcagtctaggtctagactaagctccgtgtgtgggttcgcgtcctgattcttggtctatgctgggtccgagtccaaagttccaatcccgatctgagtttggatttagttctcggtctaagtcgttggttctgaacctggtttgggttcgagtttgggtccggctccgggtctagctttgggtctgattctaggtgtgggtttgagttcgggtctgagtctgtgtgggtttatgtccaggtctagaccccgatctgggtctggattcgggtccatgtccaagtgggggtccaagttttggtttgggtcacgatctcggtcaagatctaggtccagcatttcgatcccagt

SEQ ID NO: 251145 - DNA, 803 bp, Cannabis indica
tatttgaatatcgcgttcgaatctgcccagaaacaagggggtgggtcgcggcactccccacatggggccgtggcacctgggttcaaatcccaggccacaagacagaggcgggctgccgcgcccaaggatctaggccgcggcccctgggttccaaacccagaaaaacccactttcagcttcgaatttcatgcttaaacacacctaactcaagccaaatttacatatgattcaaaatcatcctcaacaaactagcaagtactaaagcagggcattaaaatacatataacatgcatcaaaatccaagaataacatgctctaaaatcagatttaaatatacttaaacataagctcacacatgagcaaatctttacaccatgtaaattcaagaacatgaaaatcacaacatgcttcaccatcattcaaaccacaatgaagagaatcaaaaatcagattctcaaacttaaattttaaacattaaactcagtccaagttccaaataatcacaacaataaattgaaccccatctagctagaggaaatagcataagcatcttaattccatccatttctttattcatgcaatcaagagcaaaacaacaattaaacatatttaaacaacttcaaactcgagcaattaaattcaaaatcaaaggtgaaaattacctcaaaccttctcaaaaccaagctctagatcctaagcttcaataccactaactcaaatgcaaagaacaatcaaagcaaagcaaatttgagagaaagagagcgaggggggggggggtcagctagggcaagaacaaagcagaa

SEQ ID NO: 251146 - DNA, 568 bp, Cannabis indica
agaattctatcaatgtctgcctggccaaagttagcagcaacagctgtaaaatcccattgtctatgtgagttgataagatcagcaacttgcaaagaactatcagttcctatgaagctgaatggtgtaaagtcagtatgtccaggaagccaaggatccgttttgcaattgatctgagtaccagtacctactctccatcgaaggcccttaacaagaagctctttaccccagacaatgcttctccaagtaagagatggacaagtgcccaaaccagcagtaagcaaattaccatgtaaataatatctgtgatgcaatatacgactgaggagagaattaggtgattccaatagacgccaagcttgcttagctagtagagcttgattgaagtcaatgaaatttcggaagcctaaaccaccttgaaccttagccttacaaagagaattccaatttttccaatgaattgcattaccagatgctgttgatccccaccagaaattggccatcatgctctcaatttgatgacacagtgtagctggcaaacaaaagcagctcattgcatatgtaggaattg

SEQ ID NO: 251147 - DNA, 556 bp, Cannabis indica
aataaaaaaaatatatattattaatatgtatatgtatactatactaactaattatataccacaattaaaatatatatatcatggcaataaaattatataccacttgtatataataaaataaaaattaattaaagattatttaaaataaataatatatcgatacaataaacatttataaatataataattaaatatatgcatcataccaataaaattatatacatacattaaaatatttgtatttgttaacaaaattatataccactattatacatagcaaaataaaaaaataagtattatctaaaaataataatataccatacaacaagaaatataatatactatacaacaaactttatatatcaataacccataacaacttataaaaaattaaaaaaaatcgacatagttttaagataaaaaagattttaacaaaactatatagatatacgtacataatctttaagtaatttaattctaattccaaaaaaaaaatatgaaaaaagatattaatttttggggtcttttttatttttacacttcaaaatagtttttt

SEQ ID NO: 251148 - DNA, 650 bp, Cannabis indica
ccaaccgaataaccctcttaaggaaaaattaaataaagctgtttaatttaatcaaagcaaatgactttacagtatttgtcatcatcatcgtaatagaatgacataacaaagaagtatactgaaaccaaatcaaatttctaacccataagaccacgatctgagctaaattatctagttcactgtgaattaacatcaaaaccacatttgccaaacaaactgaatcaaaacaagggagagagagagcatatgtcataccttctcaacagcatgaagcgcagcaccatggccaccgacgccagctccaataatgagcaagtcgtaatcgaatgacttggaagcccttccattatcagacgaagaagccgcggctacaactaagttcccggagcgcggcgcacgtgtggtggagtttcgaggtgtgtgggaggcggattgtttgagagaagagaatccaaacacctccctcctgagaccacagaatcggaggttaataataggcttggaaggaaccaaaccggaggagtgagagaagtgagttgatccagcaatggctggagctgtggaaagagaaagcgaatactgcattttggagagatctacggagagagagagagagttgttatggaaatgaaggaaaggaaggaagaaac

SEQ ID NO: 251149 - DNA, 534 bp, Cannabis indica
gactaaaaagtctgtagctaaattgtgactaaatatatttttagtcgcaataattgttatgactaaaactaaattagtgacaattatagttaaatactatgttttagtcacaagtaactttttgttgtgactaaaaatcacatttagtcacaaaaatttatgtttataactaaacatttatcactaaaattagctgttttttgtagtggtactttattccatattatttacagccaaatgcaataaaatttcaaactttattttggtcacgacatattattgaaaaaaatttaaaattttaaaaaatatcttaaataactaccataaacataaaaaaaaacatttataaaataaacttgagtttatagatatctaaaagtcaaggatacaatgaagtacaaccatgcatctttttgagaatgctatataaatatatatatatatatatatatttatatgaatgaagactgaacaaattaaaaagatagaaataatgaaaagtaggaaagtgtaacaccctaactatcttaggcg

SEQ ID NO: 251150 - DNA, 665 bp, Cannabis indica
atttggtacttcatattttattaaactatactgcactatttatatttttgataatgtttgttatggtttttgtgttttatgtaaatacacattcaattcaaatttaatcagtatatatgaacaaattaattgtacgcagctatgtacatttttaattcaaatttaattgcttaactaaatctaaacaaatttaaattggtcatatgataaatttgataaatttttgggaagttgacaataatatatattgtttgtatctaatttacaataataacgttaatactattattgacgtgccacatcaaccaaagttaaagtttctgatttttttgaaatttttcaattttttttaattttttaatatttatgtatttttaaaagtaactttttggttactaatagtattgataagaaactaattggttacctttatataaaaaaaaattcatttttatatcatataatttgagaaatattttggttcctcccttaaaaaacttatttgtatacatcttagtaactaattagttatatttctaagttatattatggtagattataatttaaaatagatttaggtaactttattaaaaattcaaaattagtgatcagttgtcatgtaatataacaaactactatttttatatatcaattattttatagaa

SEQ ID NO: 251151 - DNA, 612 bp, Cannabis indica
tttgcattttttgtcatctctttgacaatcctatatgttgaagaaatggtccatctgacttttgggccattgaaagttacagaagaagagtggtgcataggagatcgggatggaatactatctcgtaggagctattgtaagggacgacatgtgtaccaagatcatcgcccttggacttgcaatgaagggtcagatcgcttggatcagaatccagaccgttgattatcactacatgcgtttttggttgaaaataccatgctctcacatttgttgttttgcatgataaaaacaaaaggaatgcaacaagcactagctggagtagtccttgtgctttgtgtgacatagagaaaaggtttaagggagtagaactactcatatttaatttagacttatatatttaatttgtagtaatgcttattggaatttggtttacaagtttttgtggggaagaagaaacacatttatagaaaataacagagggagagggtaaatccatacacatttctatcttatccgcttattatgtgaatctagtcaaggattactcgtttcattcaaaactaattggaaagagcaataaaatcaaaatccaaaatggaataaataaataaa

SEQ ID NO: 251152 - DNA, 880 bp, Cannabis indica
tgtttgtcatgatttatttatttaacgttaatttcattgttcctcatcagaattaatagttatttctaggtgttctcatattgttgtagtggttctatccgtgagtgtggaagatgaaggctataaatacattttttttgttctcttcgactttttttgtggtttttttatttatgatctcctataaatacgtttgacgagttcattgacaaaaaaaatttgaagtgtgtggttcttttatatttttttaagtagttatatatgcttcatcgttttacatttgtttttgtgttgttttggtaatttttttttattctgatgtttcaggactgaacttgcaaaaaaaaaaataattgttattgcattgcatctagtgttgaggttgtgcaaatgggtgttagttttttttaattattttttcctttcatatttttttatttgttttagtattgttttacagttgttttgtcatgattatttatttaatgtcaattttatttttttttctcaatctcgccaaaattaatagttgttttccggctttctagtgttgctgtgatggttctatttgtgggtacagaagatgggggccttttttttgtgtgtgtttacagtttaaaagacaaaaaaaaaaatagacaatatcgtaaaattgtaaaattttacccaaaatctaataattttgtaaaaacctcattatttagtgaaaaatgttaaaaaaaaaaacacttttggtgcataatattcttgtaaagcaaaaaaattaaggattatttcacaaatacactaaaacaacaaaaaaattacagaaatacaatttcacggaattttatacatttttacgatttgttttattctatttacagaaaatacggtcttt

SEQ ID NO: 251153 - DNA, 630 bp, Cannabis indica
aaaaaaaatattaaaagcataaatatattatttctaattagatgatatattaaaagaatgttttatatttaaacatactaatctaaatttccatatctgataaaataaaaataacaaaagggagttttactaagccttttacttttgaagataaaggaagatcttgtaaagtggtccagtgaaaacaataagctgtgagcctgtgaaaatcctcccttattcataaaaacatgaaaggatggtctgacccaagaactgtgggagcacaaccgaataaacccataccaacagcagtgggctgcagcagcctctgttcctagctcattcacttcgatattagttataaagtataatcaactacgtttgagaaatctgcatcttccttactaaatggcaatgttataattataatcctttttgtttaatcatcaacatcacatgagaattttattgagatgtgagaagtagtcattactccactcccctcatcaagaagaaacatttacagagagagagctgtttcacatgatgtgtgctttcactgagaactttaaaatcttcattggatgcacaatagtagtggcaaaaactgtgagtatgttagccaaaaaaaggttggaatatatgtag

SEQ ID NO: 251154 - DNA, 570 bp, Cannabis indica
tggatgaatccgccctcaggccgactgaagctaaacactgatgcgaaagttaacacaatgaataacaaaactggtttcggagcagtccttcgtaacatcacaggagatataatagttgcaatggctatgccttttcaaggatgttttcgaccaaaagttatggaagctatggctttgatttatagcttgcaatggcttaaagaccttcaattactagttcactacatagagactgattctctattagtggttctgattttcattgcttgttaaataatgtttcacttttagtatccaatttccttggggcacagatctctcagatttatagatctgttaataatgcagctcacctgttagccaaatttgctctttcggtggattctaattgtacatggtggggaagattacctcccccaattatgcctcttgtattctaacttagttatcaatatattggcattttatcgaaaaaaaaatacacatgattttaaaaattttacctattaattggtaatttttttaataatatgtcttattttaattattcgtcaaagccatgcttcgctc

SEQ ID NO: 251155 - DNA, 530 bp, Cannabis indica
tttttttttttttgaaaagtagaacgtttataaataaagagaaaccagttagacctcacgatcattacaaaagataaaatttgatatagaagagagtttaactataccggttacatgattcgcgaaagcccacttagcaacattgtgggttgcgaaattacaaagtctaggaataagcaaaaaattacaatttaacaaaagagcagagagttgtttacatatttgaatataattatcaatactccaagtggagtgaactccctttagagcattgataaccttctcggaatcactctcaactagaacaaaaaggtgcttcatcatacctactgtctccaaagctagagtacacgctgcagcttctccaataagcagatctgagaaattgaacctgttaactgctacctacaaaatagaccatgtatgatcccttgctaaggccaccacacacatggagctactaccaactttgatatcacaattaattttaatccaatcaacaggagagggggaccaaacaggaggcacaa

SEQ ID NO: 251156 - DNA, 555 bp, Cannabis indica
aatcacgtaatacgcctatgttagttagggtgttacatatggaacttctgcaaattttggtacagagcaacggtcattgggatgacaacaagcactgtgttgattacaaatcaagtggagaattaatatcaagggattgcaattttgctgaattgtgcagataatgatggaggagctacaacaacttaaatacaattgaaatatcagttaaaggaagattgccaaccactccaaattaaggataacaaaagtctagtgttttacataaagttattaaccaaggaaactgatttcacacggtatccattatgtgtgaacacatccagcaacagagaaacacaatcttttggcagtcacccaaataatggtgtgcatcaatgtgataatgactgtgtgaacacattcagcaacagagaaacacaatctttgtagtcaccaaacacaatctagtacaatcaactaaacaactttaatctgcttcaagaggggatcagtttaaagatatatttgttaacgaacttcaactttgaccgtaaataaccatatagcaatgag

SEQ ID NO: 251157 - DNA, 715 bp, Cannabis indica
caacacgtttcctcccatgcggcattaaatgcgagatgactgctcaggggaagcctgacacctcgcggatatgctttgatgttatttaggcctccaggagcatagggggcttcgggtgccttctccgggaagcaagtcccggatattgccttccttcataaagacttagcaaataattcaagtgttaagatcttttggtccacgtgtccctgtctggttggtccatgtatattgggcaaaatcagggacaacaatatctataacaaaattttgttaccgatattttcgataaggaaatctctcaactaacttcgatggaatatctcaaccaaattgaaatatctttaacaaagtttcaatagatttgtatttttttactcatcggagtttgagatatatatctcagatctaatgtgtgtgtaaaaaatgtggcggcttaaaaccgttggctatagtgccattattgccaacagttttaaactgtcagtaaaaatttcaccgactgttttaaactgtagcctattctactcaattttataacagtcaaatatttgacggttataaagaccaacgacaatacataagctaactgtttgaaactatcaagaaatctattttatagtagtgtacccatggaaaacactcctgaagcaacaacttgtttaaccaactccacacatctgcctccacaatgtgctatatttttttataaaaa

SEQ ID NO: 251158 - DNA, 3458 bp, Cannabis indica
aattacaaaaattcaaaggaaaagaagagaatttgcttaccaagagttgttgcttcctaacccgaagaattatctcaccaaaaaacttctgatttgctgaagaaaagtaagaaatttccccaagcttcaaagcttctaggtgaccgacccccaaagagagagagaaaagaggtttacttgtattttctttaatttatttttaatttctaaatcaaatcctatccctatttcagcaaaacatatgctcactagaggacaaactaggaatttgataatcttaattcaaataataaatcatttacaagttaacatgaaatgacctaaatacccctttcttaaaataaagataaccttaagacctaggggcattatggtccaaaaccataaccccgaacactctcgaccttctaaatgtccactatataccccataaaatcaaaagttctaaaccagaaccaagtgactctataggccgcacgttgcattccactgttgccgagcatacaacatgaaattcataaaaattgacatataacataattaatgcatctagtattcaaatatatctcttaaattgagaaaatattttcctaagacttatttctgacaataagccctaattcctacttaaaaacacaaaattatataataattattgaacttcttaattttctgttaattcccatgatttaactacgcggtcattacattggcaaaccttgttgacaccaaatgcaatgtcaggccgagttatggttgcatattgaagggtcccaagaatagatttgcaagctgaggcatcaaccacaaggtcacttccaaagttagaaagtcttagaccattgttcattggggaattttgagttttaacaccctgtatttcagctttgcacaataagtcttgaatgtatttctattgggacaaaattaggccttctatagtagaagtaatttgaatgcccaaaaaaaaattgagatgccccaagtcctttagagcaaaaatcaaagtgatatgatgagaatcacttcctgttataagaatctcatcggcatacactaagacatacagacagctttaaggggagagcttgacaaatcgagagtgatcttttttggctgaggaaaacccaaagctgtgtatggcagtagacaaccatcaaaccaagctcacagagcttgctttagtccataaagagccttatacaatttgcaaactttgtttggatgattaggatcaacaaagtctgctagttgagtcatgtatatctcttcctataggtcaccattaaggagaggattgtccacatcaagttgatggacatttcagccattagacatagccaacgtgagtacaattctgatggtgatgggcttaacaaatggactaaaggtttcattgaagtcaagactagcttattggtgataccctttggtaacaagtctggatttcttgataatagtaacatcaggggtttctttcactctaaagacttatttgtagctaatgggaactcgattaggtgacagtttaaccaaggtccgggttctgttcttcttgagagcaacatgcttagtttaaatggcttaaaaccattttggatcttgcaaggcagtctttatagtgaagggtgtgatggaggccatcaaaacctttggttttctgattcaaaactttgatttggttgtcattgagtgagcactagtacctactagaggtacaaaagtggtggtttgatcaactatgggagcaacttgaataacaacttctgatactgcaacaggaacaacagttggtagagaagaggttgtaattattgtggctgctagagttgctgatgtaaacctgtgatgactagagcttgcaagagatccatgagtaataataggtaaagtagatagaatatcaacatcaatcaaactagatttagtgtcagattaagaggaaatactaggtgtagcatgattggtaggattgaggttagggaatgggggctagacaattggtgtagtggtgggagatgacacaattggagggtttcaaaatgtggatgaaccagggatagatggagaagataaacgagatgagacattagtagagtacgaaaataccttttcatcaaagagaacatctcgaaagataaagtctaccctctttagaaagacatttgtagcctttttgtgccaagctttagccaataaaagtacatggttaagatttaaattccattttatttttgttatggggcctcaaatttggaaagaatatgcaaccaaatatttttagagtgaaatagtcaggtttgacctgaaataatttctcactaggagagatgtaaccaagctgaggagtgagcattctgttgattaaaaacactactaatttgtaggcttcatcccaaaattttaagggtaaaaaggcttgagcaagaaaggcaaggcctatttaaacaatatatctatgtttatgctcaactataccatttttctcatgagtaaggggacaagacacacaatgtaagatgacattttcttgaagaaaaccagtgaaggcttgatattttcctctccagttagattgaatgagtttaatcttagcgtctgattgcagttcaatatgtgatttgaaactaatgagggtaggtaaggcttcatttttagctcttaacatatagatccaggtgtgtgtattatatacatcaacaaaacatatataatacttgtagccataagatgaagtaacacgagtaggtccccatagatcaaagtgtaaggcttgtaaaggtgcactgtaaatgctataaaaaaaaagggaaagggagtttgtgatgtttacaaagacaacaagcattacacagatcataagatgtttttattggtattcaacttgattttacaagaggcaagagtggcttggacaattacaaaagagtgatgtccaagtctcttgtgccatagagaaaattcgtcatttgaattatttaaagaatgagaattacaagacaatgattgacctggaaaaatagcagaaggttgagagtttgatgagcaagagagctccggagttgatcaaagtaggtcaagttgagtggagtcaaacttgtaatggcctttgtctaagtttctcaaatattaaaatcctccgagtaacttgatctctaacaaaacaataagaatagtgaaattaaaagaaaacaattttgtcattagaaaattgagagacacttaagagatttttgattatagcatgcacatgaagtaaattctttaaaacaatacactaagatttaaagggagaaagaaaggtatattggccaatgttaccgacattcgaacctgttctatttaaggaaatatgtttctatttaaggaaataaaataaataattgattttgtgataaatgaatattttatattcattgaatctcgacaaaatcaattatgtaatattctatatatgg

SEQ ID NO: 251159 - DNA, 769 bp, Cannabis indica
cggtcttggtctggttcatatctggatcccattctaagtctgagtttatgtcgtggatcgggtcccaaatttaggtctaggtctaggcctgagttccaatttttgtttgggctggggctaggtccgagttcggtgttaagtttgggtttgggtccttgtcagcgtcctagtcttgttccaaggtcctggtccggcggttcttattcatgttacagtatcgtgtctagctctaggtccgggttcaggacctggtccaggtttgggtcctagtccgggttcgggtcctagtctaagtcttagatctaaaaactgactacgggtttgttccaagcccctttcctggatcccaattcaagatctggatccctatcaggggtctcggttttgtttggttcagttcccgggtcccgagtctgtgtttggatccggaattgagattggggtgcagttttaggtccaggccccggttttgtgtcccaagtctggttccatttttgggtctgagtttgggtcccgattccaggtttgggtagggaactgggtctacgacccagttcgggtctaggtctgagttggactccaagttctggtcgagttacggttccggatctatgtcctggtctagttacagttccaggtctaagtcctggttgtggtcccgttccagggtcccggtctactcccaatttttgttccaatttcgggtcaaaaggtacgggttcgggtctaggtttgggtctgggactaggttcaggtctgggtctgggtt

SEQ ID NO: 251160 - DNA, 707 bp, Cannabis indica
tcatatatgaggttgtggcttgtggctacacagagaactaagaccatttagctatgaatgaaacagttagtaacatattaaagatatagaatctttaatcaatggttgctagtacggatcactaatgcccgttctacggtgtaagtaattttggttcagattactgatatagtgagacatctaagtgaaggtgctgtatataatagagattatatatgacaaggaccgatataaatgaagctttcattatgaacatgccatttactgtaaagacctaattcatatcataatgatgatcaatagtagattagctcgcctaaatcctgagtaattatgaactcttgttcatgttattagtttctttgattcactcgttaaagtttcttagagaagatgattcttacaacttctgctatgggaatctaataacatggatagctggaaacatgatgtatagttatggaatcccgactttcttaacggatcgaatattggttcctcttatgtgttaattttggtactggaaagttacatgcaaattcagatgggattttgaattatatctccactagtgaattaatagaactaaaggataaagaagtaattagaagattaaaatgatattttcaccaaaactaattacgaaccaacacatggaggactagtcattagaattgattatatcaatcgacactgcagttaaactc

SEQ ID NO: 251161 - DNA, 531 bp, Cannabis indica
tagtgctaaagctaagcactcttttatctcactaaacttcccaaatataacgtgtgaaaatgaatgttagtactctccctcaaaatggtagcgagcatttgaaattcattgctagtatgaacggggcaggtgaagtgttacactcagaaacagtgttaagaacattgactctaagacaactgggaaacgtataaactcttatacacaagtagctggaatccatattttattaggttgaggacttgggtttggggccctgtctactcttgaaagtaaattcaaagatagttgatccagcaaatgtacacgtactggaggaagttattggggttttgacccttgcagtggcagtagatattgaatctgtgattgctatcataattttgacaaccgtggagttccccaaataggatattgaaatagacagtcattggtttagttgattcgagatgttgtggttgtagttggttgaactcattattattacaacataggagtaacccaaaccggacattgtgtaatgtgtgtgag

SEQ ID NO: 251162 - DNA, 586 bp, Cannabis indica
cgtataaacccatcccttcaaaacccacttctaaattagagttgaacaatgctagggttagggaacacgtagtgagaacccactaggaagatattgctagtcgctacaggcatttcttgcaagaaatatccaaaggcaaacgccgattcttacgagaagcagcctggccagaaccttccagcgtttcctttattcctgtggtaaagcctttatttttacccaacgtcacaattgcttttgaaccaggtgacttgtattttgaaattatgcctcccaagacacgtacatcaaagactctccatgaccccaatgtcaactttgaggttgagttgatagaattgaaggtgcgatctatctcaggctacacgggtgacatgctgaaaacctgcgggatcgaacttgggcagtcatgccaagttagatcagtacgagagggtgagtttagttgtttccctcctacgcatttttcaagcagtaacccggggacccatggtgagactagtaccaatggttcgactggtatgggcgcctggagccttgagcatatcagttcaggggccagacttcctctttgggactacttcaa

SEQ ID NO: 251163 - DNA, 659 bp, Cannabis indica
aagacacgaaatgtctctatcgacgagatggtagaaatgtttccatatattttagcgcaccatcataagaaccgggttgtttgttttagtttcaatagatcacgaaaaactataagcaaatacttttataagtatttaaaagcaatgattcgctgccataaagaatttttagagaacacctgagccaatattagcgaccaacaaatatgcgtcgtagatctagtgacagtactactagtaaccaacaacgtggtaagaataaaaaaactaaggtactggttatggatgatatttctacaaatgttggtgcattagcagattctatatctaatattgtcccgaagtttcaaggaataattgatgcaatatgcgataaggatgtagctgagatgcaaataaccaatttattcacagaaataagcaagattaatggcctaactctaatccaatgtgttcaagcaaccaacatattagttaaagaagttccattgatgcgagtattttacgcaatatcagatgagatgaaactactatatatccttaatatgttgcaaaatgatgtataattttataattactagacagttgcgtttctggttatctttatgtttcacattagaacattgtcacgtggaaattttatttatggtttggtcata

SEQ ID NO: 251164 - DNA, 1317 bp, Cannabis indica
ggagagaattaaaaagaaattgccaacaacagagagagaagaaaggaatcttatgttttttagtacagggattaactaacataacttttacttttctaataaacttgttgatctacggattattttgccatctttctctttaacttatatccatccacaggttcttccaaatgaattcaaatgaaagagattttaaagctttattctttcgaattatactgctctgcagtttctcatttaaatgcttctcagccattaataacataacatcatcccaagctttatctcagggccaaactctggtctcctccaaccaagttttcgagttaggcttctttagtcccaataattctgcaaataagtacgtgggaatctggtataagcaaatctcacccattaaagctgtgtgggtggcaaacagagacaaccctgtttcagttgcagactctccatcaactctaactattggcagcaacggaaatcttgagctcttggatagaaaccgaaactctgtttggtcaaccaatatcaatatccaatctaataataccacggtggcaattctttcagattatggaaacttaattctgaaagatggtacacagaacttatgggagagctttaagcatcctggggacacattcttaccaggagcagagttgggttttaatgtcaaaactggggagaattttgccttgacttcatggaaaagcaatagtgacccttcagttggaaaattcactgcagaaatttcaaaattgaaaccaccacaagctgtcatttggattaacggatcaacgccacactggagaagtggaccatgggctaaaactaagttcacgggtataccggacatggatacagattatggaagtcttttcaatattgtagaagatgcagaagaaggaacgataagtctccaatataattgggattacaacacctccaatatggcagtgggaaatttattcatttcatctagtggtgttctaacccttgcgtcaaaagaaatagatggaaccggttactgggatacggactgggaggcaccagcgactctgtgcgatgtctatggagtttgtggaccttttggagtatgcaacgactccgggtctcccatttgcaagtgtttgaaaggttttgaaccaaaattatttgaggagtggaacaaaggaaattggactggagggtgcttgagacgaaaccaattactttgtgacaaaaataccactggtttagcttcacacagaggtaaaaaagatggattttttaagataagtaatgtgaaacttcccgatttttatgaatatgttgagt

SEQ ID NO: 251165 - DNA, 583 bp, Cannabis indica
  modified_base (491)..(491): a, c, t, g, unknown or other
atgcaagtctccggcctactgatcttaaaattgggctgggagctttgataaggaactttgaagggtctgttattgcagcagaaatccaacagcaacatggcgcttattcagttgaggcagctgaagctttagctcttcgaatgggcattcagctggcggtgcaaacaggggcggttcctttcatcatcaacactgattgtcttcgagtggccgaggtgctaaaaaggtaacaaacagatcaaaacggattggagcgctttgctggaggaaatcaaggactcccctgctttctcaaattgcaattctataattcattagggaggcaaaacaataaggctgcccattctttagccaaattggctctttcttcaaattgtaataagttgtggttgggagattatccctcttgtgcgtctgcctttgtcatggcggacttgcctaaactcttgtagttttttcgttaatgaatatccatttgtaaaaaaaaaatntatatattcaacgtaaaatatatgtacgcatataaatcgtaaaaataaatgaatatattatatatataagaacgttaacatgaatatatata

SEQ ID NO: 251166 - DNA, 2516 bp, Cannabis indica
tatctggttgattaagagaattttttaaattatgaaaaaaaaaaggataatttaaaaaatatatatatacaaaaataacaaaaaaaaaaaataaaaaatacagttatacgaaatttaaatattttaacaatttttaatattttatatacatatactagaacaacgacaatcttttattctcttactttgaggaataagcttgaatttgcgtgtgccatgatgtaatcactctccactaaaaacttagcaatcttgccataccgcgctcttggagcatgcttcaaaccatagagcgcctttttcagtttacaaacatagtttggatgagctctatcctcaaatcctcttggttgcaccatgtatatctctcaatctagttctccatgttaaaagacattcttcacatccatctaccatagccttcagtctttactggttgtgagtgctaatagaacccacactgttgtaatcctagcgaccgggacaaatatcttgtcataatctagctcatactgttcagagaatcctcaaactactaaccgagccttgtatctctcaattgaaccatcatgataagtttttaccttgtaggcccatttgtacaaaatgggtttcacttctttcgacttttgcaccatctctcaagtctgattctttttagcgtgcttatctcttttttcatagcttctagacacttagagctttggtatgcctctttatattgtatattgctgattttttttactttcttgctcgagtatgataattaaaagagtaaaattcaataaacattagttgaaagatgataaatccaaagagttttatatatatatatatgtatatatatatatatttatatcaacactcaattcttgcatatatgacacctattctgcatattcagaaatacatatactattctatttctagtctcaactatattcaataaagagagtagtgaagctcggatcatggccaacaagaattgttgtctcttaacaaaatgttttcccaaattaaagttgagcttaaacccttcactatagctaatggactagtgtccatttcccttaatttttattttacttttacattttttttgaaacattttatgtattggataagattttagtttttctgatttgaatattgtgatgtgtcctagattttaacactgcttttaatatacatgattgacgattaataatatttgattagatttcatagcttccattcaagcctactgctatgaaaattgttaaaatactaatattatggtatggagagaaaaaataaattagacaaaaagaaaaatatgtgtttcattaaattaaataataataatgataatactttactttattaagactcttttctcttatactagatctattaaaacacttattaaactatcttttaaggctccaaaagaagatgattctgttgaaattatttttgaaagaagccaaacaaaattacgtaactgtttttgcacccaatatgtcatcacacccatccagccaacaaatgcagagatcaaggatttcgattcccaatgaaagctaatatatgtttttaaatcctcaaacaagcataaatactgggatgtttgtaactgcaaaaattgtctagatgatgatgagtcctcacgacgtcccactccaagaaagtgactcaaacgaaagctagaaaagggtgacaaaaatatcggtctattaggccaacaatctttaaaatttgactatatagtcaaatactctgtaccgaagagctacaaataacctacactagaactcaccagatgggatttagacaattccttaataactttgcaaccacaattagtattgccttgttaaaaaaaacaagcaaaatggatgacaaaagcttttaaacttttcaaacttaaatttgatcgatccaagtgggttgaaataaacagtttagaagatgaagctttgtttattggtgatagtacatcagtatctgtggatacatcatcaatttttacacaatgtcatagtattctgagatcaaagctacagttcttaagcttttacacaatgggatattgccccctatgtggcaatgggtttgtactagtttgttcggtttttttaataaaatgacttaattaacaataaaaaaaaacataatagcaattacctaaacaatcccattttaatcataagctacatacaatcaaattaattaattaatactaaatatttgtgtcccacataaaggaaaaagtaaatccttctacttatactctcctatataaataatcaagctccattcaaataatcaatattaaaaaaattgaaagaaattaaatgtcaaaattagaaaaaactgaaattttatttatttattgaatatgttaattttgaatgaatgatatacacaattacaaatctaaactaaaaaaacacttatacttcaatatacaaatcagtagatatagatatatatttttactagtaaaaagttatgtgcgagacacgtatattaaa

SEQ ID NO: 251167 - DNA, 689 bp, Cannabis indica
ctaagttctggtggcaaacagacacgttcgtagaacgagggttagttggatgagttgggatcgactgagtcgtcacaaacatgttggaggttttggttttcgaagtctacgggactttaatatggccctgttgggaaaatattgttggaggttgttggttaatgatacgtccttggtgagtaaagtttttaaagctaaatactatgccaacgaaactcttctttcagctgaattgggggacaattcgagcttcgtatggaaggagtattttttgaagtaaaaggactgatacaggctggggtaatacgtacgataggcacgggtgaacatacttcaattttatgtaacccttggcttccacacaacacgaatgtctatgttatttcttcacatcctgcacttgttaatcagactgtaaccagcctttttaaaattgaattctcgagagtgggatgaagaggcaattaaggatctttttgatgatagagatcaagagctgatttttttctatacaattgagttctactgcaatatccgattattggaactggtggtttgaacgattggggcactactaggttaagagtgcctacaagttcttacaagaagaaaaaggagcttggcctataatggagctatgggtttttggaagggattaatagagtttaagagttctccctaaagtcagc

SEQ ID NO: 251168 - DNA, 616 bp, Cannabis indica
gctgctcccaaattatcacaccagaggactggacattgagaaagttggatatcactacgaaaaattgctatttttagtgacaaccttttagtcacaacaaaaagttacttgtgactaaaacatagtatttagttacaagttatcactaatttagttttagtcacaacaaatactgtgactaaaaacatatttagtcacaacaaattgtaatttttgtaactaatacttttagccacatacctttcacaacacaataatgataatttataattagccacaacctttttatatttagttacaaattttgttgtgactaaaagtaagattttttatagtgatattatctgggaaaccaattctttaaacccaaaaaactagttaccccagtaaaatgaaacttttataggtggttgttcaggaaatgcacaggcaaaaccccttttccttgtagtgttttcacataaatgacctgcaaatagagttaatcttcagcagtagctattcatcgacagtatcataattatgtattgcaatgagcatggaattaattaatgtagctctccctgcaaatgatctattccttgtactccatgtctgaattctcttgatcattttt

SEQ ID NO: 251169 - DNA, 830 bp, Cannabis indica
gagctataaatgtggtgtattatcatttttttagaatattttgttaaaatttaatgtgtgtcaaatttggcccgagctaaaaattgtgtcaaatttggcacaaaaatagcatgagccaaattttaacccacaataaatacttctattttttaattacctctttatcactcattaatactattcatcaatgaaaaatatttttatatttataagatattaaaataatataaataaattaattattttgtatattttcaataagcattaatattgacttttatagctaatttgtaccttgcatattagaacacaaatacaaaaattgagccaaatataattttatggtatattttggatcaaatttaactcaaaatatacatcatccattaaagatggtcttacttgcgtgtttctagtccgtcgttggaaaatggttcaacttggtgtgtgtttgactatttttgatggattctccacttggtttgattatattctttgaaatcttagcaaagaaaaggtgtgtgaaaagggcagtttgtattttaagttttatggaatgctagaaatgcgttagtttggaattaaaagaagaagcgtgtggagaaggaaaacacttttcgacttgtttgcctattgagattaggggtgatggagcagattctttggttaagtcgcatctaaatgtgatcaaaattattgtggatgtggcactctttggtgtccaaaatgcttatgtatcatttcggctagtggctcgggatgctaatgaatatttggtggaggctctgattggtttgcaatttggtagagtaaagtggttctggaagtta

SEQ ID NO: 251170 - DNA, 510 bp, Cannabis indica
ggagataacgggctcctggcgaagaccccgttgaggcttcaatttcctaagcggacagccatttaatagaaccgaataggagacacttgtcacacaggccatcacgagcttcttacttctatcatcaaacccaacagcggtgagaactttttcaagaaatccccactccattcgatcgtaagctttatgcatatcaagcttcaaagccataaggcccccaagaccccttttgttctttattttgtggatgatttcctgtgtaagtatggatgattccgctatccaccttcccggaataaaggcagattgatagggtgagacgagattgttcataagtggcctcaatctattagataaaatctttgcaataactttgtaggaaaaattgcaaagacttatcggtctaaattgatctacactcataggaaaatctactttaggaataagacagatgaacgtgttgttaagcttcggatgcaggataccacttgaaaaaaattcttttactgt

SEQ ID NO: 251171 - DNA, 527 bp, Cannabis indica
ctatcaattggtgaaaagatgggataaactggaggaaagtctattgaagctgacaattttgcttcagtagtcgtgaccaccaaaattcatagtcgcgatgaattatgtggtcgcaactatggtcgcgactatgaagctaggcagaatgctcaatttttgaggtttgcctatggtcgcgactatggactaaacacgattcggagatattagtcctaatttctatataaggtctcatgttttagaagaaaaatactgaaaaatagaaccctaaaactaaagaaggcggcaaagaaagtaattgtggcgacccgaagcaagatcaccaactaactttttctattcccttgtttatttctttatgtcaatttctatttcaattattataggatttgattatgaacttcccaatttagggatacatgaatgttagatgacatttcttcaatttagttaatgtgattgttgatttttttttctttcctatattgggtgattcgtttctatttatttaattacatagtttagac

SEQ ID NO: 251172 - DNA, 649 bp, Cannabis indica
gaggattcacaccctcaccgccagtcccgagcccaaaaagctcacggttaaccctaccagattgcctcgggtgcataatctaatacaactgcaaccataactttccaacatttacattcttccaaactgaaaccaatgttaataagtatttttgtacttgtatatacataccgtcattatttttgaaacctaccatgctcttttaataactcctacatttcaagtatgcaaatatttcaagtaattaacacataatctaataatcaattaacaattaacacttactataccatgagtcttcacagccaatgtacatatccaactaatcttcaagatctttaaaccttggtcgctccaataccatgttgtaacgccctgaaccgtaagggcgccacgtgtgtgtgtgtgttttaattaattagttataataataaactaacggtttaagaaaagtgtagtttaataaaaacttttaataaaattatttaattcataacttaaactttgttacaaaataccactagtttcagggatccccttaattataaacttttacaaaatactacaaaacagcttattacattgtcgggagacctctaactcatggttggtccaatttctccttccccttacctgcaccatagagcac

SEQ ID NO: 251173 - DNA, 973 bp, Cannabis indica
ttgctaggaaactttaatcatcccttgccttgagaacaaacaaattattccatttcaagatttatgtgcttagtttcaataggacaacaaaaacattagtaatattatttatattttagtttctattaacaattttggtattatgtaattagttatagttagttttatcgttattgatcatagaattgattactacttataaaaattttatataagttttataatcgttattttaacttttttttagtattatgtatttactattatataaaatgattctaaaatctaaaaatggaggtagggtaaattggatggaaatctgcatttttcccttacttgcacttatgcttcattttataaccgacacaataggtgaaaaaaaaaatatttgcagcaagttatgcatcatttaagaactgacagtataaggtttttgtgtcagttttgaaatggcacaaccctttttataccactttcaaaccgacgcataatgttataaagaacattttatatttcgcgtcagtttctaaatgacgaaaattgttttttgcgtctcttttgaaacgacgcaaataaaaaactatttgcgtctacggcttatacgtcgattttgtagaccgacgcaaaatctttatatgtcacttagaaaccgacgaaaatacctctttttgtagtagtggggaatggtttcggctatagagaaagaaggcttaaaattttactgatggagtgagatgcatcagcaatcaatcttctcttaagccatcactatctacttataggtaaccacctaagtttaggttagaattatttggcattaaaataacagaaaaataaatggtaattgcttagtatggtcggccataggatgtggattgggccccactttgcaattttaccagttttgacatttttccataccacttttcacaaaaatacaaattttccaatttaaccacttaaatgccaattc

SEQ ID NO: 251174 - DNA, 559 bp, Cannabis indica
aaagtataatactggagcttgcgttggacctccaaataatttacgtaatttaattatctatcgattgacatttatatatataagtatatatatatatataatattattaataaagtcaatcgtataagtaagtgtaatgaataataataatgttatatttctaattgtacatgtgcatgaatatccatgcatgcctaagtacgctatatccatcttatatgtgggtgtaactttataacattatgtatcttttatcgttaataaaatagaatattatatagaaattaatattgtacagttacttaaaaaaaaaaaatcatgctgcctcatagtaccacttatgaaaattcaaagtccaaaccaaaactccatcatcatgtaaacaaaatgcactatagaaaaatcaacaaagcccctagctccttactcaaaacagtcccacactcgaaagagctattattgagaaacagagcattcacatatgatcgacctcaaacatgtacatcctcttaacgcatgaaaggtagtctccacaagttcattacaaaaggggcacaat

SEQ ID NO: 251175 - DNA, 647 bp, Cannabis indica
tgacaggggaaaattggtaaaatgttaaaaaatagaggtaaaaatgatagattttaaaaagagggtaaaaataaaataggacaatataaaaagggtatagagtgtaatttcctctttagaataaaacaaggaggaaattaatataagaacttttaacaacaaaaaataccatataaattggtcaaacttaaaattaccatatttaatataagaacttttaaaatttcacagtgtaatttcctctaataataatattaataataatttagaagaaaaaatgaggaaattacattgtacacccatttgttttaattttttttacctctattttcatatttttttttagatatatctacttttatggatgatatctccattagaccccttaggttatgtaaattatatgctaaacttaagtagagagtgaaagtatattaagcaatctacttaaaaaaaagtaggtatattttaatgaaaaaataatataaagatatttttgattaatgaataaaaaaaaatgtatatttcaacttatcccagaaaaaacactttaaatcggcccaatccatgaaattatgggcttttagaataaaacaaggcccaacttttgtcaggtcccccactggccaccggcctcctccaactcc

SEQ ID NO: 251176 - DNA, 999 bp, Cannabis indica
gcataaaacccaacatagaggccgtcaacaaaatactgaaggtcaccctaaagaaaagctactggcctgcaaaaacaactggcctaaagaactgcttcaagtattatgggcctaccagaccactccaagaaccacaaccggacactctccattctcaatggtgtagggatgtgaagccatggtaccagtagaaaccttgctcccatcccatagaagggcaacgtatgatccggcaatgaacaaagccttattacatgaaacactggatcaaatagacgagctttgggatgagtctctgatacggatggtagcttatcaaagaaatgtggctaaatacttcaacaccaaggtcaaagaaagaaaattctccattggcgaactagtcctacgaagggtctttccagcgaccccagaacccggagtgggggtacttgggccaaattgggaagggacatacgaaattgaggatgaaatcagctccgggacctataagctaaaaagaatggatggatccatagtgcctagggcctagaatgccgaccacctctgcaaatactatcagtagttaaaaaaaagtttatattctgtaaaagagcctgtgtcggacaaatcaatgcgatctcctatgcgaatatcaagctaagtgacctaaaaaaatcttttcatgtccttaggggggtattaaggcataatatatgggaaaaaataggataaatataagaaagtaaaaggctaaataaacttaaagtcgtacaaattgttcaaaagacaaacagtaaaggcctagggccggaccataaaaagtctccccttaaaagaaagtagaattgtcttataaataggggtaggataacataaaagataattaataattacttaatcaactcgtggaggaagaagaggacccttgctttcctccaataccgcctgaagctttttgtttttctctcgaaaataggccaaagcttcatcaggcttagggtagaaaggaagacgagg

SEQ ID NO: 251177 - DNA, 743 bp, Cannabis indica
gtgaatacttgatggagtgacctgaaaatatggcctcagctttcttgatgaataaggagatagaaagctagcttttcgatcatggggtactgaatttctgcccctatcatgcgtttactgacataatacaccaagtgttgaatctttttttcttcccaaaccagtgatgcgctaaacgcgttctcaaagacagcgagatatagatacatgtcctctccgtaaacgggtttggactacactggtggcttggccatgtgttcttttaactttttaaacgcctcctcacagtcttctgtccactcaaacttttggcactttttctagatgttgaagaatgggatgcacttgtcggtggaatgggagatgaagcgactcagggcaactaccttcctggtcaagctttgtacatctttatgtcttctttggggggcatacttaacaaggcctgctttttttaggtttgcctctattccgcgctggctcactataaaccctagaaatttccctgatttgacactgaaagtacacttcttgggattgagcttcatcccatactttccgaagggcatgactaggtaacagtatacccccttatcggtcctgaagctagtgcactcctggtctgaccgtatgcatctctatttagattatacccggcataggcgtccatgaaggatagcagtttgaatccagaagtggcgatctaccatctagtcgatcctgggcagcgggaagcagtacct

SEQ ID NO: 251178 - DNA, 752 bp, Cannabis indica
cgtcacataagtcatgcaaataccttcgttttacataaacctagattatccaaattttagcattctcaattctcacttttcagatttcgaattgagatcatagacatgcaaaaggtgatcaagcttaaacatggaaataacacaaataaggataatttcacaatcaaaatgaacaggaatggcaattaacattaactagggaaaactttaacaaacattcatcatcttccctaaatggaagattagctcatgttcaaatccataaccattccaaaaacaaaatttaacataaagaaattaaaaaggaagaaagaaagaaactgttggtggaatgaatctggatctccactttgctcctccagccgctcttgactgcgttttaggtctccaaatcgcttcccttcatttccaatcgcagttttctttttatttctcattttcaggattcaaaagacgaaatcgccctcacttgtacgggctctcgtcgcggccatagcttccctcgccgcggcgagtgatgatgtggccacggcagtggaacgtctcgctgcggctactgattcaacccaaaaccgtctctctgcccaaactatttagctgtggccagaagtaaggtttgcggccaaaagtgcaccgaacataaattttgcgtttttcttgtctccacttgtcttttgctgcacttttgtggcccggagcttccttagcttcgagaaacctgaaaacatcaaaaacaagcgtaattctgtcct

SEQ ID NO: 251179 - DNA, 717 bp, Cannabis indica
cgatctgaccaggctagctcttgttttgcaggctattctaatagaatggatgtcaggcaaaacacgaggagcaagggtaactcggtcggacctagtggcgttcagggagtttagattccctcgaacataagaggccctcgaggtaaggcacgcggtcggggagatgttaacccaccgtaggctgcctaggaatgggaaaataggtttgtagcaatgcaagccaagataattgagcaagacaaagaaattatatgcctgaggaagcaaggtgctcatgcaatgcctgctccaaaaatgtaggtggctcctgcccctgctgtagcggtagggctaattgctgcagtgaatcggatggaaccaatgtatgaaaggttctgcaagcaggcacctctagtctttctaggaggtcccgatgtgatgaaagctaagcaatggctgacaattattacaagaatcttgaattttattggcatctccggtaatgatagagtggcctattccacattccaattttttaaagaatgccctggttggtgggcttggtgtccctgactcgagatgttaccactgttacttgggtaaagagttctaggagttgtttaatgccagtactcaacgaggcaatcgaaagtgcaaagaggaaagaattttacccagctcacctagaaagagaatatgagcgttccgaaatcacaactcaatttgatggattgtcta

SEQ ID NO: 251180 - DNA, 984 bp, Cannabis indica
gagccacagtggtaggggaggcttttgacaaggcctgagcaagataggcagatttcgtagaaaagcgactagaaaatccttagtccagatccacttatcgttgccctgacccctgggccttccccctttgaggatattattgattgtctcctggtcaaaaagatagttgagtttggaaatatcccaattctcattatccgtaagaagatccgctactctctcccaaccctctagtcatccatttttgggatgaggatgaaagtcttgaccatgaatcacccacggctcattccaaatgtctgtatctttcccatccgatgtgagcttacaggctcctttcttaagaatttatatagctttcacaacattcttccagaaccacgaatctaaattcttgtatgaacacttcgggaaaggtctaccttttaggtacttgacacttaaaaccttgcaacataaacaattatccttattcaggagagcccaaccccatttagccagaaaagcctgattcatttccaaggtcctctggaagccaagtccacccctagacttggggaggcacaactaatcccaagccttaagataaatatcatggtttccctgctcatggacccaccaaaaatctctaaccatgccatatattttagttgccaggttcttggacaactttatcatttgcatggcctaaactggtaaagaaagtcccactgatttaatcaaagtagcatgaccagctttagataaggatttaaacttccacccatgtagcttagagaccaagttatccatgatgaaattgaaatctgcatctttcttacgactttgaaataacgggagacccatgtagttaatgatacctacaaccaggttgagcccgagatcctgcttaataccacgcttcatcccatcactggtattcttgctaaagaagatggatgttttgtttttattaatacgttggcccgaccaattgcagaattt

SEQ ID NO: 251181 - DNA, 793 bp, Cannabis indica
tttacccttatgtctaaaagtttcttatttcatttctaaacatcaagtctttgatactttaaataaaaatagttttaaaaattatcaaatctttcatattttgtagtgctctagttaataaaagagttgtcttccaaaagagcataagacacttatttagagtatttagctatcaccttcaaaattcaaatacaacacatataatagtagaagttaccaacttttaaaatggtattaaaagattaaagggagggatttaggctcacctgttatgtttttagcaagttacaatttggaactcgaataaaagaaattctaaatattcgtaaccttttatacacacaaatgatgattttaatcttaatcttcaagatataggtatcatgatatttacacttaattagtaatattaaggttaatttagagttttgtccttaaactttgacatgtaccaaatcatgtctcttgaatttttttagtcggtaagaattcccttggaactgttgagattattggatttaaagacttttgttcaattttacttaagaaaatcttacgtgaatgaaaatttaggaagcacaattcggtacatgttaaaatttagggggcgtgattttataaatatcaaagttcgaggtgtacgattagtacacagacaatcaccatattaggaaaattaaataaaattagataaaagtctttaaatccaacaatctcaatagtttagaaaaaatttataacgatctaaaaagttcaggaatataatttagtacaaagtttaaggataaaaatt

SEQ ID NO: 251182 - DNA, 656 bp, Cannabis indica
ttccagtggtgtacatatcaactgtgtagtcttggcttttgagaagcaggatcaatccttttctatgtttggaaatgtaatctacttttgtattaatggttttgtaattaattgtaaatgaattttattagcaaaggatccccatattatgatagaattttgaataaaagttttaatttaaatttaaccaaaggttttaattaaaccacacttttcctaaattaatagattagtgataataagattgtaaaagcacacacgtggcgtcccagagagtgagggtgttacaatttgagtactcataaacaccatgggggactcaatttttgtaatttgagaggtttcaatttgtccatgttaggaaagcaagcttggcatcttttatcaaatgattcttctctttttgctcacttatataaagcccgcaattattctgggggttctttccttactgctacgttaggaaataacctaatttttatttggacgaacatttttgaaactcaagcattaatataatttggtgcttgtagggcggttggatctggtttagatataaattttctaagagatctgtggattcatgatgcctttcatccctatgttacttcatctctaactggccttgatgattaacctgtaacgccctgtccaac

SEQ ID NO: 251183 - DNA, 1171 bp, Cannabis indica
gtaacctgttattacaggttaaagaaaaatgtaaccatatgggtacaaataaaaatgtaaccattgaatagtcacccatatatatatataattaacttttaattctaaaaaaataccaatcatttttttatatgcctaaaaaaagattttattttactacattgataattatttgatctcaaaaattacactattataatctactccttaaagtgatcattttaatatataagaatcatatatttatttggtgtcaccaaaaaaataaccaaaattaatagtaacattttagtttcttttaaggcccatttggtacagttcttttttttttttttatagcagagttgtgtcaaactagtctttaatcattaattaaacaatagtaaagcttaaacaaaatataatatgtatcaaacaacctcataagatactaaaaagtattttgtcataatctaaataaaattatttttgtaaaataattttgatagatttctaaaataactaataaggaaattcaattgcatcttaaacattatatattttacactaaaaaaaattcaactagtacataatttcttatatttttattgtaacttatcgtttaactaaaagtgtaaaaaaaaaagtaacaccatattatcttgacttaaacaataaaataacgcaatataacctacaaatctaaaaataaaattatagttttaaagttaactatgagatattaaaaatatcataaattatatgtatgaaataagtaaccaaatgtattatcaataaaaaagagagagttactaaaatatatgattcccacatctcaaaatatatttataatttttaaaataaaaaaaaaaaaacgtcaaagtatcttaaataataaaataacataatataataagtaaccaaatgtgtatgagataaaattcttaaaataaattttctaatagaaaagtaatcaattgatatcttattcaaatcaaaagctcttataaaataatatagaatagataagaagaaataagaagaagatgaagagagaaagagaaagtgaatgagaatttctcagttgtttattccaatggggtgaactcctatttatacaaatacaagatcaaatattaagaaactaagaaaaagggaaactaagaaaaagatgaatgttaattacataatg

SEQ ID NO: 251184 - DNA, 787 bp, Cannabis indica
tataaataaaaaataaaaaattagtaattacaaataagtaataaaataataaataaaaaataatatttattataaattaaaatataatctttattatattttgtgctaaatttaacataatttttaatacatactaaatttaaactatattagtatattatacatcaccattaaaattcaatttttttgaacatgagctaaaatttttctatatatgtatatatatttataccattaatggagatactttgatcatagaaggagccactttgttaatattaatttgactatttcattttgtttcatatcctacgaatcgtggaccacgattgatttacgaggctacgctctgtctccaactccaactttgatatatatttatgcatattattaattattaattattatatgaatatagtaaggtcgaccaaaccaaaccacacgatttcaaattaacaggtggggattttcccgcattaaataacctcatcaaagcattgctattaggtaccagtggtgcctagcacctttgtgacatgttgcgttgcgattggctagcgatactccctaaaaactattatattaaattatatgggacccgatacttagttgtaccaatagcgatattgacacataggaaggtgctaggcaccactggtgccctttagcatttctctaataatatatttgccggtattgtcattttatatatatattttttaatttttttattttttaaaaaaccattaattttataacggtcggatctcctaagtctgtcggtaat

SEQ ID NO: 251185 - DNA, 648 bp, Cannabis indica
caaaaaatatatagaatatgtgagtagcatatggttacattaatattttttcttccagtatttttaaataaaaagaaagcacaatacttaaaaacaaaatgaaatcaaacaatagatgtatagtatagtgtagacaatactacactataattactgtacacaaaatttgtgtgattaatttttctttttaatttttatttatgtatatgtttcaataaaaaaataaataataaataaaataatatattatatatgatgataatggtgatggtgatggtgatcatatatacatatggtgatggtaatggtgatggtgatgataatgtaccatgatatatgatccatatggtgatgataacggtgagatggtgttgtgccgtgaatgtcatcatatatatacatatgtcttatctatcacatatgttatatgtctaacaaataaagaaagagatgtgattttttttaatataaaaaagatgatgttgatagtgaagtttcgtcaaaaaaataatgagaaaatgaaaaagaaaataaaaactgacctgatgtgatgttgcaacagaggttgtagaagaaagaaaagaaagaatacctaatgtgtaaagtgagaaaaaaaaaagaagagacatgtattaaaaatattggcag

SEQ ID NO: 251186 - DNA, 650 bp, Cannabis indica
atgttatgtgttgatttggatgatttcatgtggtttatgtgttaattgatgaatttatgtgttgtgcaaaaccttttttccatgaaaaatatttttctgtttttgaaaatattttatttggattgattgtgaaaaattaagcatgtttcatttttacggaacttaattccgataaaaaattgagaaagttatgaattttggaaaattgggtgtcatggctgtcgagagaggtgcatcaatcgcaccaggctctcggaaaaccagggttacgcgagcgtggcctcggacatcactccttgtctgaagccgtgtccgcctgaggagcaccctgcagatctgcccagacgaccctgccaacgccgacctttcccgcacacgcaccctgcatattcccttcgtccgcacgcgtaagggctgctagcagcccaggtgcagcctactaggcagccaacacctccaacaagaattttgtgggattttttccaaaaattcgatttttccaattttcaaaccctaaatttaaaataaaatattatttttaaatatatttgaacttaaatatcatattttaaattaataatatttattttttcaatagattattattaattttgatattttgacgtttaaattttaaaattgattatttt

SEQ ID NO: 251187 - DNA, 734 bp, Cannabis indica
taaaataaaaatagtacaataggaaatttaacttttttttttcgtaaaatgaatttcgtttttcttgaaattgtgctattactatattataaaaaaaaaaagattgtactattatatatgttaaatgtattttataaaattataaaaataaaatgtaagtggaatatggaaaaaaaaaaattaatttggagtgtaattattttttgtagagcataaaaaaataaactaataacagattaaacaaattaaacaaattagaattagtaatggggttttttaattattgtatctaaaattaatcttatttacaaaaatactttgatatgttctctatttatggttgcttaattaaattggtatatatgatatgttctctaatttatggttatttaattaagttttgcacatcgaataaagtattcctccaaattaaataaagtcgcatacttatgcatccgcataattatcaataatttaagataattatgtaacaatcattttttcaacaacttaattttgtaatgtgtaccaatattaattgatttttatttatgaccccaaataattaaacatgacgcatactcatcatttaccaaatggaagattattgccttataactaatgttagcgcattacattcaataagcacagatgtttccgcttacaacccaatggagaattgagttctacgacacttgcaaagatactatagcttcgcacacaagtatgcggtg

SEQ ID NO: 251188 - DNA, 743 bp, Cannabis indica
gataactaatcagattgtaaagagttttatttagggcataaaacccaacatcttggtcttaagattggtggaccttggttgatccttggggacgttaattttgttttgaaaagctctgaaaggatgggttcaaggggaagagatcagtttttgccggtcattactgagttggtcaatagttcgggattaattgatttgcctgttaaaggcgattttctaacgtgggataaccatcgtgatggtgaggctcatgtcaaatcggcccttgacaagactttatccaatgctcagtggctgagcctttttccgaaggcggttgttcattcctgccacacttgcaattcggatcaccgtcccctggtaatcagtactgtggaccaggattccaagcctagaaagcttttccgctttgaagcctggtggacgagggattcccgtagtacgcttgttgtggagagtgcctggggctctctctctcatagtcggccatcggcaagaattttcaaaaaggtgggagctactcgaatggcgcttagtaattggagcaggaaccagtttgggaaattagatgctcgaattactcagcttgaacgacacctgaacctaattcaaggtcggccggcgggaactagggcttgggctgaagagatgaaagctcgagagtctcttaacgaggccttgagacaaagagctgtgtactggcagcaaagatcccgggtgtcttggatcaaggatggtgataa

SEQ ID NO: 251189 - DNA, 971 bp, Cannabis indica
gcataaaacccaacagtatttccctcgttttggtttcattttggttgtgttgctgatttgaacgatcgagatctgttcttcttgatcgttccttccttgcagctgaaggtttagagcatgtggtatttttgtatatatttgtatgtgggctgtataaatgtttaaagggccggtagtatgtaatttttttccttttttgtactttcctgtttttttccataaatattaacttaattcatatttctctctcattcttatatgatatatgatctcttcatctctcaaatttaatttatttctctctcattcttataggatatatgatttccatcatcttcatctctcatatttaatttattggtgttttttttctttttcttttttcagattgagaaaccaaaaaagacgaagaagtcgtcgccgccatcatattagtacgtattgtattagtatattatgttattaacccttttctattttaattttctctattgtcatatgaataaatatttaattcatcatattatttataaattattattgttgttattgcattaccttcttcctaaaaattgaaatgataagagtttgaagagatcatagtttgtgtgtagtaatcgaattatcaatctatcttttctttaactgaccgcatatatagccttaattatttaagttttatttttatatatatataacctaatctttatactataattcaactttcaattttcttcttttttcctcatctttcaatcacacccatgtatcatattcaatcacttatatactatgtagtcaaaaaaaattcatcatataaatttatagtgtaatagttctaaagctaacgtattgtatattattagtatgtaatcttcaataattgatattaaatttcaacatacgatcgatgctatttttttctttgagattgacaatgttggtaaaattttaactctctctctctctct

SEQ ID NO: 251190 - DNA, 1077 bp, Cannabis indica
atttttaattaatacgaggatattcctcgtcgacggggtccctcacttcttttctttgctttgtatctctcttgtgtttgggtcttaaatgttggtccatatcatttgtttattgaaattataggctttgggtttgtagcccaaaatcacaggatccatatcactacatttttttttaaatatatttattatatgtatactctggaggttgttttatttggttcctcaagttactagtgctagttgtcatgttaactttggagatccaagatcaaatttataagacaactctaatgtcaaaagttaaatctaaggttaaatcaacactaaatttacactaaaaaatattctttattattatattattttattaaattatctcacattataatatatatataaatttagaataattaatatttttatcctctaaactttttatttaacactacataattttaccctttaaaatatacaatttattaaaaatttctcttaaaatataacaattacataatctaaattttttgagaaaaaacagactcaaacttgttctcataaaatttagtttttataaaaattaaattttaatatattttttataatgggattttttaataaaaaaataatttttaaatcgattaattagttttacattttaatttcttttttaattttttaatcattcaaaatgatttttttaagatctaaattaattttaaaatttactaaaaaaaatgttgaatctttctcatttttattttaaatagtgttattccaatatttcgagcattgaatacggacatgacacgttgatttaagcctcaaaaattaaagaacttataagcgtgaggaattcaataggtttctcgccttcaggatgtgctacaattaatgatgtgtttgtctcgtcctgtattataatatggctgcccaataaaagtgataaaattataaatacaatgattagcgagataacaacatcataatttcatctcaaacttgaccgagataaacaagacatgtatgagatacgaaggaatgagtcgctggaaaggtttagataatgagtttttt

SEQ ID NO: 251191 - DNA, 666 bp, Cannabis indica
ccttcacttcacatttctcatgctcactcgtgggtctcgcacgacacggctcgcacacgagcctcacacacagctcacatgcaagcccttcacacaccacacacggctcgtctgcgagtccctcacaccttgcatgccatgacttgcatgcgagtctcgcgtagacgtctcgcatgcatcatgacttgcacgaatgctccaccacttgcacaaaggctccacaactcacacgaatgctccccaacttgcacaaatgctcctcgactttcacaaaggcacaccggcttgcacaaaggcacactggctcatacacaagcacaccggctcgcacactggctcgcacaaagacacaccagctcgcacacctactgtcacattttagtggtcttagtattttagccataaatttctcgatatatacattagaaatggacgattcaaaattcgttggaaaagataagaaaaacatttatgaattttatgtctttaacaagatctaattctaaacgtatcattatttctccaacaatctccacttaataagtaagttggtcttactaactctacacgcaagcctcgcacacaccacacacaactcacatgtgagcccttcacacaccacacacaactcgcatgtgagcccttaacaccttgcatgcaatggct

SEQ ID NO: 251192 - DNA, 894 bp, Cannabis indica
agatggtgtcttttacagctgggacactctgggtaagtgtatcgagtttcggtgctactctggcgattgcttcgaccctggttcccccagaacctcttgttctgaccctagaccactggttgcagtggatgccttccttttgtgatccatggcagaaccactacctcccctgctaaaacctgatgcaggaggggtaggagccccgccaacagctagagtcacaccagactctatcatgcacccaactgcgccctcgactcgcagtgccttatgcaccattttagcataggtggtttgtcatcagtagtaatcattaaatcgtgtcccgaggccaacctcgccaaaagatcaaactgagtcatatactcagtaacactcatgttttccttctgggtcaagtgggtgaattcttttctcttggcacttctgactgcctcattataatacttggcattgaataactcctggaatttctcccaggtcattgtagtaacgtcatgtatcatggacaccatgtcccaccaaactaaagcatcttcttgaaactgaaaagtggcagagaccactctatcattcccagtgacgcccataaaattcaggatccccatgatcacagttagccattgctcggctttcataacatttggacctcccaggaagactagaggtgcctgcttacggaacctttcatacaggggttccatcccgttcgttacagcaaaccggttcagcctacacagcaggggcaggagctactggtatctctggtgcaggaactacaggagcaccctactatcttaattgtcggatcacttcctcttgttcattgattctagtttgcatttctgcaaacctgttttcccaattctgggcatcctgagcagcttgggcagc

SEQ ID NO: 251193 - DNA, 897 bp, Cannabis indica
aataggcctaagttgagtcatattctctgaatttttctttttagggatcaacacaatattaactttgctacaacccggatcaaactcccttgtcgaaaaaaatctctgaacagcctttacaacatcacggcccacaatgctccaacatttctggtaaaacgcaggtgtcatgccgtctggactaggacttttatcaggatgcatctgaaaaatcgcctttttaacctcctcttcagaaacagccgtactcaactcctcatgaacaaggctaggcaccgagctattgatactatcaatcacttcttggcaagtcgaattagaagcttgaaatagagttgagaaatagtcaatcctcacctgagcgagcctattatcccaacctacacggactccattatcattcttcaaagtaacaattttgttgtgtctcttcctagttgtggcagccttatgaaaatagctactattatgatcaccttccttcaaccatagctgtttagaacgctgcttccaaaaagattctctctgatcaagaacatgaaacaactcctcctttacttctttgtgtcgctgaatagaggcagtgtcccttttattggccaatctttgaatctctttcttacaccgagagatacgaaccttgaaatttccagtcacctccttcccccaaatactcaacttatctgcacaccgagtcaacttatttggcaaactatcatcacccccactctcccaacaatcccgtacaatttcaaagcacattggctccttgagccaagcgttttcaaacttgaaattacgatttggagtgtaacaatgattgagttcaagtccaaaaaagataggacaatgatcagaagatgagatttcaagattaagaagagaagcaccttggaa

SEQ ID NO: 251194 - DNA, 458 bp, Cannabis indica
ggcacaaaacccaacaatatgctcctctctatgggcggaagccgctctttgatgagtacttctccaaaagtcgagctagcgactttaaatcaagcgcttcttgcgaggcaacccaagtttcttaactttgtttttaatcttataactctagttgatttcctttgataaaaaaagttatgtttaatttctattgtcaatttctagattttattttatttttgtgtggattttacactttgtgttgtgttttaggtgcttcaagaaacaaaatttggtggtttggccaagttttgaaacctggtggttttgttgaaattttgttgcaattttgctacagcaaaatgtgagcttacaattcaaaaaccttagtggacaatcacgatagatattattttaccaggatcttagatctactcacaagtatgtttattaacatcctaaacatgaactttctaaaa

SEQ ID NO: 251195 - DNA, 1396 bp, Cannabis indica
atttttatgcaacagcagattaaggtaatttatagtattctcagatatataaatctcaattagatgcaaaattttcactctcgtgataaattaaacatgtaacagacattaaacacagaaaccctataagctatttaaaccataggcactctcatcatatatcgaaattcagttctatttcaccatagcataatcgacacacacttctcagatctacgtcataatcatagacatttatttggtgatcaagcaattaaagtaattaagtacgaatgaaataaaatacatagaaattgaggaaaaattaaatcatattaaaactaaaaatcaatgtcaaaacaatatccatctaaaccctaataaactgtttagctactcatgttcattgtagcaaattcacacatattaattatagaaaagagaagaaaatatagaagaaaagaatgctgaaaaccccgttgaaaaagcctctgcattgatttttatctctaattttcgtcctccttgattgcttcttgaaaactattgaagtccacttcttttatagccaaaaaatgattaaaaaaaaaatgcaaaatgctgaaaaaaaaaaaaacctattctgcttggcattagaaaggacgggccgcggtatgctcatcatgcaccgtggctgtggcatgaccccctttatttggacagtgagttttttactgcatcgactgatatattttgaccataactctctcgatattgttcgaacttagacgattcaagatgtcccgaaaagataaaagagagatttagaacttgtatgttttaactttttctaaaatccgatcacgacatagtctatttaggcttgaaatgtcaactttatttctagctacaattttctctatttatggatcatcttttgtgagatcttttatatttttccatcttattcttttgatattttaaattttctttattttaaatctgtaaaaataaatgataaaaaaataaaattactccaatatttaatactattatttaataaaataaatcaaaaaatctaatatttaaataatatagagaaaaagaaataaaaaaattaacgtatgatttaataatgttaaattattttattattttcttaaaattttaaataaagtattattaatgaaaatttatgtatatactagaaagtatgtaatggtgcaatgcttaaattttactataaaaaataattaccacaaaaaaaggtcattattggtttctagtaactgtttcatgtttccttaaatagtttctatcggtcttctctattatttaatttcgatgaagatcttgtctattattgttagtagcttaattattattataaatcgataagctagctcttattattattttacttttttacattttaatc

SEQ ID NO: 251196 - DNA, 654 bp, Cannabis indica
gaaatgggtcataggaaaaaaaatatatttttggacccattattaaaaaaatatgtatgtttttttttatttgggccccctaaaatcaatgtgccctaggcgcgggcctagcccacattaacctaggaccggtcctaaccgctaccttacttgacttccatattagtataatattatccgttttgggcctaaaccctcactgtgttgtttttggacacttcctaaaaggccttatatactaatgaagtagatgtaacactaatatttaagacaactcttgtttattcttccaatgtataacttgaattgataattcaacaaaaagttcttcctctgttccagtaaaaaaaagtaaatttaagttatagttttattgaaattggttggaaaggtttacaaaagtgtcaaatgacaaattttgtaattattttttggccaatgaccagtccgaagatgttatgtggctagaaaaaccttattcaatcgtgatatgaacaacatactttagttaatattttccaaagcattactattagataccagtggtgcttaacatcttctcgacatgtcgcattacgattggctagtgatactccctaaaaactattgtattaaattatatgagacacggtacttagttgaaccaataacgat

SEQ ID NO: 251197 - DNA, 572 bp, Cannabis indica
aaaacaattttttagttatgatgccaaacatgcactaagtttttgtacttaaatatgtttcagggttagtgttttacgagaaataatgattgccatctaagagggagaatagttgttagctggaatctggcaatgtttcaagtaaatattataggcaaggagagttttcaagtcacttcatgtatggaatgaataaagaagaagctaggaaaaaattatggaaatagctaatggagttggctcaagaagctaaaaagttacgccaaagaaattataagactacttttacacggtacaacaattttccaagctatcttccacatggtcttttcagcaacagtctattgcaaagcttcatccttgtgcagatatttgtaggcatatttaaccaagtaaacaccagtgactttgagagaccaataccaactatcagttacaacatagctaattggaattttacaaattaactcggtccactacaagaaatatcacttttggcagcacatttttatgctgtcataagttggtattgcgctggtaaaatagaatttactcttgtgatgtgttggcaa

SEQ ID NO: 251198 - DNA, 629 bp, Cannabis indica
aaaaataccattttttttctaaataagggcccaaaataatttttttcctatagcccactacattttagggccggccctaccttccggtttcgtgagacttcgataccaagtaacttttgaattggctcaagctcttttatctcaaattttcttttaagcttgattttaatacttttgattactagttatgcttacatatattcgtgttaaaaattatttttaaattggttacattaaaaaaattatcaaaaattaaaataaaaaatcttatttatattatttttaaaaatacaaaatttattaatttattatttaacaaaataaaatatttaattgatagtaacttttataaaattattcaaaattcaaatatttgaggctcaaaatgaataataataataataatggtgtgtgtcgtttagtagagagtagtttgagtttgacgtaagggataatccaatcaaattatgatcaatattattcaatagtgccatcttcaatatcattttaaccattggatttcatcaatattattggaaagccgtattaagtcgtattgtattgtattgtattatattgaattggaatatatattatatttttatataatactatgttaaactttaatt

SEQ ID NO: 251199 - DNA, 864 bp, Cannabis indica
attttttttaaaaaaaaatgatacagtggcgtcttttgagtgtcactgtatcataaaatgattaataaaaaaaataaataaatggatatagtgacacgcatagtgtgcagttgttatttttacagtttgacaaggggtgactctgaaagcctatagtgacgctcactgagtgactctagaagggtttagtgacccactatgaagggtcactaaatattacttttccagtcacccacaatagtgacgcgcagtgaagtgtcactaaaacgttttagagtcactcaatgtgtgtgactgaaacccatttttgtagtagtgaacaagggttagagatctgcgtggaaggaatcattatattccactacaaccaatgtaaggtttctcaaaactttatatgtgttttaagttttattgttttagaaattcatatttaggatgttattaaacatacttgttagtaagtctagattctggtaaaatatattctaatattttgaacttctcgtgcattatctattgactttgtatgaaaacgtttagcccttacaatgtacgcttcatgctttgctaccacaaaatttgcttcaagagcaatatgactcaactcattggatactccatgtttagattcgttcaactttgctagcatggtattccttaaccacccaatgaaagtttggtgatgctcgtctgttacccatttttgtttatttttatgatgtctttgaaccattgattataataactccttatggtcactgtaaaacatgtaattttaatcaagttattgttcatcgtgactaattaaaggttaagtcaaaggaaaaggtacctatacttacgttatatatggttgaacctctg

SEQ ID NO: 251200 - DNA, 617 bp, Cannabis indica
tctccttttgttttagaacattgtggactaggtttccgagttcctctttgaatatcttggcttgtgctctcatcacttgaccgactggaacttgacttggatctttagtcttggtttcctaatcacaacaactcctaattcaattaagatttaagccaattgaaagtttaaaaggataagataaatgacaggtaaaacataattctcttatctcttcttctttttctctttaatttcgaatggtatatactaaagggagtatgatttaaactcaattagtcataattccatgaggattccatgcaaattttgagtttttaaaggagaagataaaagatgagtaaaaaattataagttttttcctcttttcccttactaaaaaatcttaaaaaatttccaaacacaagggcaatggaatttgaaattctaatcatcttaagaattcttgaacaatagagacaattgcttaagtttctcaaaatggattccctctggtagtttcgaaagaatcgagatcaatttacgtcatcaagtcaacttcacacaagtatgaagttgacatgggggcaaatgttaacccaaaacttaccctgttgatgtgcacatcaatgtttgac

SEQ ID NO: 251201 - DNA, 1325 bp, Cannabis indica
taatatagatataaacaagataacgattaggcgcccatcccccaaccataacccttccctgcactctaggcgatattgagttaataacgttcaaacaacagtactattgaccataatattagactatactcagtacgctagtcatactctattcgtaccgatgtgatagtgtcaaatagtacttgagccaaacatacatttatcggtatccaataccactctacgtatattgatacaactatcaatgtaatctagcaggcttaacaaacatgcacgctaaacatgtaaacacatatgcatatcattatactaatcttacctcattttttgaattcaagtgtgctggtcaacctgagtggaacaactgctcgacgatttacaggtccctaaattacaatatttgtaaacgaatgagtgacacgataaatctcttttcatggacttaaaaccataactaaaagtttctttatcgatggataacatggaaataccctgaatattgtaaaaatgggaaaatctggggtgccctaaaatgccccaaccagtagaccggttccccaaccagaagaccggtgtcgtggggtctgcctagggatgaactgaaattctagttcttaatggtcccactaaaccaatcaaccggtttaatgaaaaatccacaaaaacaccaaaaacaacacaattcgaccctaaatgaatccaaaccttccagaccacctatttataccacaataagtagaatccatgcaataaaaccaaacaataccctctgtagcaaaattcaccatgagagagcaaagtttgagctctaaagtttcaactttgctcaaacacaacaacaacacccaaatccaacttaaatcagcttaaataaccttcgaacaacttctgaaaacataatccatacacaatcaaacacgcaacacctaaaccatagaaaatcatacaaagaacctaacttagaacttaagaaatcaaagagaagtgagcttgatggatacgttggattagatctctaaaaagctgattagaacagcctaaatcaagctgaggaaatccctaacccctattggtttcttgagagggagagagagagagaataagagaaatgtgacttttttttttttttctaatgttataactttgagcaaaagaataaatcttattaactatctaacatatattgacttaattcagattatctaataattaataaccactaaaggacaaataacttaaatagtaaaaagacaattttgcccttgcctaagccaaaaaggcatccttaccacctaggggtaatttggtcaaaataaatacttcga

SEQ ID NO: 251202 - DNA, 995 bp, Cannabis indica
cagcttccacctgaaataccaaggagtaagacatcaactctgtaagaatagaacaaactatgaaaagatgttatccagtaaaaaagaggatgacttaattgccaataaaatatattttctcggtaggaagaaacaagtatattcacttcaatgaactaagaggaaagaattgaaacctcttgccagctactataatgattgtctgcacttaatatgtgactgtatctctgcaaagcttgtttcatgtgcatcacctaaccatccaaaaatattatggagaagcaaaatattaaaatgttatacaactgaataaacatgtttagaaactagtgatggcagaatataatatagcaaaaaccagcaagcatgctgtaatataaaacagacctcattggtaatcggatcgcttttaggcaggtggcagctgcacatggtaagaacatccaaggcagcatcaagctcccatctatgcatatacctggaataaatatgtgacaaatctaatataagtatctagaggcacaagctttcaacacagtttatgatctggcattagttcatgcataaattttattagaccattaagtttacaataccaattgtaccgtaaatagcaaatgtttgaagatgcaaactgaacctatataaagtgagcagaattcacctaagataaaagtacataattttaactttgagaaaacaggccttttccacaaaagaaaattttttaaaaaaatgttgtgtcttcttccagaattatcatgtaaaccaaacagccgtagcattcacaacaagtaagaaaacgtgaaacaatttacttacttgagggcaactctagcagctagctgcttgtccttcaaccgcaggcaatactgccaactattgctccaaatgccatggcctccataactttggttttgcccagagattgactgattctcttcccctcgttcaataagtagctgcagcaactgatctgaggctcccttacgtag

SEQ ID NO: 251203 - DNA, 638 bp, Cannabis indica
cctatttttttttatttcaacttttgtaatattatcagtattcagtaccctctgtttttcactgaatctgaaggtcattcattgtaatatgcattttcctggaattctatattattttggatttacaaatataaatatatggattaagcatagatcttacccttcctgtattgattattcagctcctctcctcaccccatctttgtatccttgtaatcacctattcttttaagttactaaaacgatataagaacatagagatactcaagatatatagtaagagagaaaggtttcatttgccagtcaattcaaagtatctatgcttcaggattttatctattcctttacatcaaaatgtactcgaatcagatcatgactaagaaaacttgcataaccctgtttatacaaatagccattccaggacacaaaatccaaatggatatgcatcaacttaccctgctctacttctacagtcatattaaacgcctacttcgtaaagaactgactcaagggtagatcaggcattcaaccacagaatcctcagacctgagaagaagtgcagtccctggaccagtgccctggcttaccacatttaaagcatgtgccagaagcagcagaagcagaagcagatcttcctc

SEQ ID NO: 251204 - DNA, 872 bp, Cannabis indica
aggcccagatagtggcctatgggggatactatcctaccgggatagcaggatatgtacccggagctcagcttccaggaaccttggcaacagccgctccaccaatgagcggcatacaattttctgctactctcggatatagtcaaggccagaccttggcccctgcatcttcccactttggaaatccctcagggataagtgggcaacccccgtcgcactccgctccgaccgcaagtttagcaggtccttctcaaggctctcggagaaagaggtcctcaaaaggtagcaatcggtcggaagataagcggcagaaaagggggtacactccccaatatacctagtacacgaagctaacggactcccaagagcgttgctaccaggcaaaatacgtactaccggagaccgcctcctctgtacaaggacaactcccggagggaccccaataaaagattcgagtaccacaacgacattgggcacagcaccaatgaatgcaaaaacctcaaggacgagatcgaaaacttgatccgattgggacacctctacgaatggatcaagaaccggttgcctcacctcaacccggctcaagcagcaggagctttacctcaagggggtgtagccggtgttggaattattttaccaggagcattatcaagatctgagcccgaatgtccttcttgttgaattggattcttcacgatcttccacattatgattgaggtactacttgttgtgtgtgggcactactctatcactaagaggtttcgaaacaatcaaagaagaagaagaaaagagagtggcagctaggtttagtgagatggctcaggtttttctctgaaaggaataagatgcattgttacttttcctgaagccatcac

SEQ ID NO: 251205 - DNA, 673 bp, Cannabis indica
ttttttttttgtttttttttttttgaaaataaagaattattacagaaaactagagctacacagatatgggaaggtcagccttacacgaatcggctaaccacctaggaaaagaattgtgaaaaaaattagaggctttgtcatctaggcatttcctatacaacaaattaacactctcgttattatttctctttacaaaaattatgttcgtacaggatgaagatctcataagagtcttgatttggtgaagaacaattcctagtgagtttaactagtttttcgttttcttgatggcttccaccaccactttgcaatttgaatgaatctcaaaggacttggtatcagtcttcggtagcaccttcagcgcttccaggatagccaggcctctgcaacagccaccgaacattggctgggaatgaaaaccatcccagccgagatcaaattaccaccccagtcacgccacaggaaaccaattccaactccaacttgcccttgattgatggctgcatcacaattagcacaaatcacaccagtaggggtaattcagtgggtctgaggtgaatacgaggccattgttgggttcgagacttctccttatttggctgtagaagcagggtaacattgaagacccaatccagtagttcaatctcctgttgtgcttttcccaaagagccca

SEQ ID NO: 251206 - DNA, 781 bp, Cannabis indica
cgaccgcaccacaaagaatttcaaactgcattttttttttgcagtgcggtgtagtgcaggtggtttgagcggtttgatgaacacccctatctcatgtaactcaaggtcaaaatgagcaacaagtgccaatattatcctaaaagaatctttcgatgaaacaggagagaaagtctctgtataagaaatgtcttattttttagtatagccttatgctacaagacgtgccttaaatcttaccacattaccatattcatccttcttgattttaaatatccatttacaaccaattggttttacacctgctcgtaatgggacaacttcccaaaacttaatgtcttgcatagacttattctcttggcatggtgtattatggggcagtaccacattcctctaggaattcaacaaatggtcctagacgttgttcacctgagccatcatacctgcgatagtactcaccaccatgatcagatttgacatttttaatacttttgttgagttgattctcaacttcagctttgtaagctttgaacacgtccacagactgagatttttcatgaatgagatataggtacccataacgtgagtaatcgtctatgaatgatataaaatatttctgaccattccaagatatcgtagggaatggcctacaaatatctgtgtgaatcaattctaagaaatctgaattattattggcacctaatctcttagttttggtctattttctcttgatacaatctacacaaacattgaaatcagtgaagtcaagagactctaaaatgtc

SEQ ID NO: 251207 - DNA, 552 bp, Cannabis indica
gctacttcggctagtgatgatcacattaatgaagtgttggctgatgtgcaaccgaaggttactaatgagatgaatgaaaatttgcttgctgaatttgaggaggcggacattgttagagcggttaaagaaatgaatccgactaaggctcctggggttgatgggttaccggcattgttctatcagaagttctggaatactctcaaggacgaggtcattgcggtttgtcttcgctgccttaatgaaggtgcggattttagttgcttaaatgataccatcattgctttgatacccaaagttgagaaggccgaacgggttgaggaattccgaccaattagtctctgcaatgttatctacaagattatctccaaatgtctagctaatcgattgcgaagcacgttggatggggtgatctcggaaacacaaaatgcatttgtaaaagggcgcctcatacatgataatgctattattgggtatgaagctttacattgtatgcggaaaaatcggtttcaaaatagacaaaaagtggaaaaaataagttatgactatagtttc

SEQ ID NO: 251208 - DNA, 699 bp, Cannabis indica
tttttcagttttttgctagtttgttttccaattttcttgaggcatccctagtttatgtctgtttctcatgaattagttgtgcatgcacttagggtggatgacgaattagcttattaaactctaattcttgttaataagagtttaatttacaaaaaaaaaaaaaagttgaaaatgtaaaataattttttttttcatgttgaagtatttttgtaattttttaaaaaattttttggtcaattatataaattttctattaattaacttgtgggttgactttatggttttagttttacatttttaaaaaaatttaaatatagaattatagtatttaatgttatatttaaattccattattagtttaatttattaatttataatttataaatatatataattatcaaatataaagttttttaatatttcacatcgtatcgtgaattttgagtttgtcgattagtgtattcgtgtttatgtgttatattttttgtgtttcgtaccctgtcgcgcttaggcatatatttttcgtatcatgttgttctaatttatagtattgtgccatgacgtgtttaagcttatatttttttcgtgtctacctgactcgtactagattcgtaccgtatcaaaaagtatgacccatatctaaagtactatgaccaataccaatagtaggtgtcacttaaaaaatagagaaatactaaa

SEQ ID NO: 251209 - DNA, 643 bp, Cannabis indica
ttttttaatacaaaagtattattttttattttttaaatgactgattaattgtaccaccgagtgtgtagtgtagttggttggaatagtttgcatgaggtttcttatttgtttgttcttagagtttgagtctccatggtaacacttatcttgggccttaaaattaggttattttagtaataaattttttttgaagattcagcaaaatagtcaatgtaataagaaatgttttaaaactttacattaatatgtcaaatatgatgttgataatacattatgtttctgttaatattttggatagggcatacaacattaaaacaactattgtgcaactaatgagttgctcattgcaaagaatgaggtgttgttgattgttgttatgttgctgaccatgttcacacacaatggataccttgtgaggtaagtttctttcaattttagttatatgtagaagaataggcttggattgtcaattatcctcaatagtttgtatccttctttcacatggtatttcagttatagttgagtattttcatagtagcattccatcaccttttttaacttgtgtaatagttcttcatatttgtaatctattaaaatgtattagccagtacgtagcttcgtaatttacataatttgttccttg

SEQ ID NO: 251210 - DNA, 1217 bp, Cannabis indica
atggagctgagagaaagagatagagaacctgggagatcgcataggaacagggttgaaaaattgggtggggaaggagaaggaggccgaaccacattgccaaagagtggcggagacttaggccctcccctccgattgccggccctgattgcttcccaaatccagagtaagccatttttcttcttcctcctcaaattctagggcattgcttttcttgtactggtatgaaagaagtggtttcttcttgttcaactgtgattcagtgaatgtatctttatttattttcaaaaaccaaggaataaatcagggaagaagaagtccgaaatcactgatgatacgaaaaaattgggtctttgcgaagtgcaacaacaaccaagtcgttttaagagtacggcctctattttctttcctttttttttttctttttttgaaacaaagcatttatatattagataaaatcagtcagacctcacagtcattataaaagatagtattcgaaatagtagaaatctctaccataccataaacattgtcaaaaaacgatttaacaccttttaggttcttgatcacaatctcagaatcactctccaccataacaaaaagataatgcatcgagaccgccgtctccaaggctaacatacaagtcgccgcttccctgataagaggatcagagaagtaaagcttgtttgtcgccacccacaaaatcgactccgtatggtccctcgcaatcgccacaacgcacatagtttcccttccgactctgacatcgcagttgattttgacctaatcctctggcgaggggaccaacccagagtaccatcaacctggtgagacttgaacagacaggatccataatttgtgtaacaataatatataaagtcaatataatgtatcaagctacccatagtgttattatgaaccttgtcattacaagccctccaaatcgtgtcaaccacaactgaagcgtaaaggaataaaccatcagtatccactcctctggacctaaggttccaaagaaagctaacctaatcccacatgcgagccccagattccgcaataggcataaccccccaaggggaagatctcctaaggtgggacgccaaatcgcaatagagaaacaaatgttccatagtttcatctccattaccgcaaatggggcaggagatctcatcaataaccattctctttgagaggagggccctaacaggtagagcattcga

SEQ ID NO: 251211 - DNA, 2235 bp, Cannabis indica
tcctggcctgggttcgagtcctggtctgagtccctgatctagatccctgtcacgtgtcccgatcttgttctggttcaggtcttggccccaagtccaagtttggtttcgggaaggtgcagtctaggtcccgacccaagtttgtgtcacgagtttggttcaatgtttggctcagagtttgggtccaggttttggtcctgagtccaggtctgggtggggagccggggctggttcccagttcgagtctaggtctgggttggagtcttggtaatggtccgactacagttcccggtcatggtctaggtctggttacggttccaagtccagatccaagtcctggttctagtcccattccaaggtcccggtctacttccagtttcggttccaattttaggtcacagggtacgggtttgggtccagggtttggtatggtgctaggtttcagtccgcgtctgggttcgggtctgaggctggtcccagatctagacaccaactacgggttcggtccaagccccggttccagatccagatccatatcccgatctcgggtccggacctgattccattttgggtgccgggtcacgagctgggtcctaggttcaagtcaaggtctagggtcgggtattgggtcccggtcctagtttcgctgcccaagtccctatcctgattttaggtcaaggtcccagtttttgtcgggtttttggtcccgatctaggtacgggtttgggtcctagtcatgattcgggtttgggtctcagtctacgtttttatttaggtttgggttcgggtctgggtctttgtcctggtcctcgtcctagtccttgtctggttctagttccagttgcgattctgagttcgagtttgggttagagttcgggtcgcggttcgagttcggttcggcgttcgagtactggtccaagtttgggttcaggtccggatcgggctacggctgtgggttagggtcctaggtctgggtccaagttcgggtccgagtcccaggttttgatctcgatctaagtcagggtttagttccgggtctaggtcctgggtccggatcctggtctgggttcgagtatatgtcttggtgcaggtctaggtttgggtctcattttgggtttgggtctgagttcgagtctcgggttcgggtttgattttgtgttcaggtctaggttcgggttcgattctagtatggattcctgtccaggttcttgtcatgatttgggtccagggcaggtttttgttgtgggtctgggtctgactttgaattcctgggtccaagtcaggtcctggttcgggttcgaatctcgaatttagatctaggtttgggtttcgaggcctgggtccctggtctatgtcccccatctgtgtctggttcctaggtcttcgtttgggtctaggttcgagtttgggtcccgagtcttggttttagtctaggtcccggtctaggttcgagtccaggtcttggtcccaatcatggtctgtgttcaggtttgggtccttgtcagggtttggatccttgtctgggtcatgggtctcaggttccagcaagggtttaggaccacgtcgagtccaggtcccggtctaggttcgggtcccaggtctcaggtcccaggtctagttatggtttgggttcgattctgctctcagctatgggttctagtcagagttccaattctgattccgggtctgggtttggttctgggtccgggtctgggtccaggttgtggtcgcggtatgagtcttagtttgagtacgggtgacgggttttttagattccaatttcagtcgaggttcgtgtctcgggtcagggtctgcgtctggtggtccaggtcctgtgttttgatcctggtctgggtctgagtcgatattccggtccgggtctgggttcgtgtcaatgtcctggtctgaatcccagttgaggttaggggcttggtctaggtccaggatcgagtcccgagttcgagttcgagttcaggttgaagtctcaattttagtttgggtccgggactgagttcgagcacgagttttggggctgggttctggtctacttttgtgtcccagtcttggtccagatcctggtcactatcctgatcatggtccaaggtcctcataatgttttggttcaggtttcggttttgggtcgcaggtttgggtctgggtccaggtcctgctccagcttcgggtccttctttgagtccccgatcaagaaaccgactatgggtattgtccaagccccgg

SEQ ID NO: 251212 - DNA, 612 bp, Cannabis indica
aagatgaacttaaacaaattttacccaaaaaaaactaaatgtataaaaaaaatttgccgccatacttatatttttatggaaaattttcaattatatacttaaatacaataaaaattacataaataacaaaaatcaaattaattatgtatgagaaatttgactattcatgcttaaataaggttatggtcttttagtatcccacttcaaaacatataggggtttaatactcaaaaattctttaaactccaaaataccctcctcattcaaacacacccattctaactctccctctttctctcagctatctctccctctctctttctctaactctcaccaaatccacccaaaaaaacccacgaccactgcaccattgccgttcggctgcccatttggacgaaactcactcctctctacccttgacaaaacctaggaggccatccgaaacccactcctcttttgttgtttgtggttgattgtaagaaaatttatttggattaggttcgatatgtaatgaccggtttagtaatttagattagtaaaggcaattaacactaatttttattattttattattatttgtgaattaatttaattgtggaccccaatatttag

SEQ ID NO: 251213 - DNA, 603 bp, Cannabis indica
ttgaagcggggacgttacacgaagtaaacaacacattgagtcaattgctggttgggtggaattagaaaagtgattgaaaatgaagttaacaattgatgcaagtttagaagaacaagtctatctagatagaaatatgtattagagagactaattgctattgtgaaaagatctggacaaaataatttagcatttcgagggagatcgtgaaaaattatatgagaataacaatgaaaatttctaacaaattatagaattacttgctgaatttgatctaactatgcaagaatatgttcgtcgcattttgagaggtgagattcattatcattatttgagaacaagattaaaaatgaaatgatacagttattggcaaatgaggtgaaaggcttgataattagtagaattaaagaagcaaaatatttttcagtcatactagattgtactccaaatgcaagtaatgatgaacatatgtctcttgttgtaagatgtatgaatatttcagaaactccaatatttgttgatgagtattttttagaattcataaaggttcatgacacatcaaggcttggttttcttaatgaacttttagatgcattaaatattctt

SEQ ID NO: 251214 - DNA, 946 bp, Cannabis indica
tcacacagagatcttaccatgtccgccaagtgattaatttcttctgcaagtggtagtttattccctcttcctaaaatggttggggtgagtttcggcaataaggagagtattagtgactccaaccctaaaatgagggatcccaatgccatttgtaatcaaaatgtgtcatgtcattcaacagagttattatatcatcattgtttcttcttaacaaagactctagagttacccttctccataatccatccaattttttttatcatccaatccattataaaagaacaaaataagacactcacttgagaaattgtgataacatcctctaccaatgcatagaatgactcattatattattgagaaaaacttacaaggtaatcttgatgtagtatttcttatgtacattgcaagacaaactcatataatacaaatattagtaaaattaaactaaaagaaatcaaattagaataaaatttaattattttgatattagctaaaacattcattgataatggtgccaaaaacttgttaaaaaaattctagtacacaagtacacgtagtcgaatcaagtaatataatgataagtaaaatatcgttctcacaaagactgtagttaattaacaaacaattaaattcctaaattctatttggtgacaataataataacaaagaaggtttaaattataatgtaaagaaaacaaataattaaaatacaattaacaatgatcaaagtttagggtgattaatttcacttgaatctactttctatggtttaatatagtttaattccaatttccaattttcatgtaataacaaatttactaaagagacttatattcgagttaggacatataaatctcgatctatatgtaaactttctatgtctgtcataaatttaaacatatagaggacattaagcataaaaatcctaaatgctacacaaaccata

SEQ ID NO: 251215 - DNA, 698 bp, Cannabis indica
aaaaaaaaaaaaaaattggtgatcgtggtgaggcacaacaagagtagtagacttggtagccaatgccatatccgaatcttcaccttgaaaactccgccgatggttgaaaacaaccaagataggaacacctggacgcgattgctgtgaagaattgaaatatgtacatggtcttttagaacatctaccaagatttttctttttcttttgaatttgggttatcaatggggtataaatttgggtattagggtttcaaatcaagtttgtaacatcaatttacaaaattaatcgcttaaatcgttgattgtttaaatattttgcttttgattaaacattgaaaatattaattaatccttaatttgttttataaaaatattatagtaaagctgtcttttttattcttattggtacaaattgcttatgccaaagcagtaaaaatagttgtacttagtcaaataatttgatatttataatttatgtattcatgcttgcttatgatttgtatattaactgatatgttgttctgactatttttgaagatttgaattgtggttcatacatttgggtttctgatctcatcagtttttggtggtttcttttacaggttgttagctatggagtttagaaatgagatgaggagatcatgcagtgatagctatattgttcaagtgagtatgaaaacttatataactcaattttct

SEQ ID NO: 251216 - DNA, 523 bp, Cannabis indica
gatgttaatgaaacatacttgttagtaaatctagatcttggtaaaatatatccaacacattctactataaaatctgcaaggtcatagcccttgatggagactctctattggtattgaatgtcgaactggctaagctctgttgcccacttcagtagtctccctgagaatttagcttttgtaggacttggtggagagggtgagttgttagtacccaaatcgcatgagcccgaaagtatgatgtgggagtatgatgtgggagtaggaaagattctcaaacagaagtcgttggaggaaattagtaagctgtaggaaagcttcttaatcagaagtgttaacccaatttttgcactctgacgtggcatcacacgatggagacacgtagaatcaaccttgattatctgcacggagggtatagtccgagtaggatgccctgtaggcctatcaggagcaaagcgatcaacaatccgtagagagccatcaacacgtagtgcatttagctctgcatcgtcagtcatcaaagaaa

SEQ ID NO: 251217 - DNA, 666 bp, Cannabis indica
ttttgagctattagaaaggctcccaaacattcaaaacgcatgcagttgtatgctgaaaaaaacagtaactagttactaattaccgtttctccaaagtattccaaattactttcccttaattttgaaccatttatatgccttatatatatgaataaatcaagttttcaaaaactatattttcaatagttatcattcattcacatttatagacaattagtatcatcttttattaatataagagtaataatgtggcgaggagagttacacaatttatcatcatcatttctgaagaatttacaacttatttttatgatcattatcaacacatttgtaacttcacaatgcatgttacaatttaaaaaaattaataatttatcacacttagttatttaatttaaatattatattatataaataacataatactagccccatcctatagattctaaccacaacatgggcaaacctcaacccacacctttgttaggaatatatagtccacacactataataaattgtctatcaagggaaaattgaaacatgatttaaggaacatttgtatgaggcgtcgcgaaccacactcccacgtagttggacaccgtacaaacacaaaggcaaggtccttttagttggagcaatcaatgtgcacaaaaacgtcgacaacac

SEQ ID NO: 251218 - DNA, 537 bp, Cannabis indica
aaatcaataaactgtaactttataataataataattccagcattgttagtgttgttattcatattgatcaaatcaataaaggatacagcttttcacgcatgcatggcccaaattttcacagtataacaagttggtctgttagttagaaatttgggaccatttgcaaaggcactaaaatagtgtgttatatattattataatcttttgctaaaatttataccaaattaaaaaaccaatgttgcttattgagataaattatagcaataagacaaataaatacaggctctgtataattaacttatatcaaagaggacaatttgtattataaagttaggatattataaaagttgtaccaatattgtcagattaaataacattggataaaaagtaattatgaaaagaagtaagcatgtgctaatctgatagtagttaccataatttatatggcaataaaatattataacattgaaatcaaaagaagcattagataccatcgtttccattacttacctcattctttgactactcttttcctct

SEQ ID NO: 251219 - DNA, 552 bp, Cannabis indica
tgcacatgtagaaatcatccccatagaaagcccttaacccatcgaagaaactcatctcaggtttcctgggaaagtaagcaacacctaagatcaccatagcttttactctgtcaggcctgaacaagctcaagtaccaagcagtgaaagctccccaatcatggccaaccaacaagacttggttgatacccagatggtccagaaggccgatcaggtcgccaacgatgtgtaaaacactgtaagactccggagacggcggcgcgtcagtgtcaccgtaaccacggagatcgggggctatacagcggaaacctaatgaggagagagagagcatgtggtggcgccaggagtaccagagctcagggaagccatggaggaacaagaccgtcggaccggtcccgattgacgccacgtgcatgtttattccgtttgtggtgaccgtcgagtgctcaattttctccattttgtccaaagtgtttctttttcagatgaggatatttgggtagctaactaaagagcatcataaagcaattcttttttacttttaaaacaggtaaa

SEQ ID NO: 251220 - DNA, 807 bp, Cannabis indica
tcattacccgctattaaaggcaacctctataaaaaatctatgtgttccttacttttacattctatttgtgtaacatgtgggaagcattagatccatacgaccccgttgtcagttgatcacgatttgaggttaatagtttggtgctttcattgagagtgtggatatcgtatctgatcaaatgtcatggttaacacgagaagaacccaaatcgcaccatctgcatcttcgagtctccctcaagacacacagactgtagatctgaatgctcatgttccagtcacaactagagtcccaatgaacattgcagatgtggtaaatcctattaccacaacacgcaccacaagcgtggccactacagttggccaaactgatacgagaatcccggtggatccaaatagcaggcccttgcctccaagggaagacccaccattggtacctcccattgaaggaaggactcatgggaaatagcccacagaaacaacaaatggatctcgtctctagtattacgctagagagacaggaccaggggttagagtttgcgattggcgagccccgcgtggacttaagagaagatctctagttagccagactcagagaagctgcaaggccatgttggcctaactgaaggaccacgtgctgctaatttcaatgtatttacacagcagcgatgcaaattcttgagatgactaggagtacatcctttgatcttaccgagacaaattggattgtcgcaatagagaaaccaatgatttgataaggggattcaaccaaagaaccgatggaagcggtcaggatctcattagagat

SEQ ID NO: 251221 - DNA, 616 bp, Cannabis indica
accatataccaaatcaccgagtttctcgaatcttattgcaccattgtatttgtagacctaaataaatggctaacacaaattctcgtcccaatctggataatattgaagatatttaccaaaataccactgctgtacaaactaagcatcatcatggtaccagcatgcacaccaacatgcgccaccacttgaccactatttggccagcttgtgggcatcacctagcttgtaacgtgccatcttagaacgcacgttatactgagcaatggcgtactccaaatgttaatacgattaaggtaaacactgatgttgccctctttgcaaactcaaactgttttagctatgcatttgtggcccaaaaccatgcttgctgtttggaaatagctagggtcgtctatactcgatgtaccgcacaaccaaagatcgtagaagtggtgtgcattcgtgaagctttgaaccaacaatagaggagtgttaatcttgaaacggattgtcttatagtcgtccgagctatcagaagttcaactgtcatgttatcctattttggcaaagttattaatgaccgtaaaaaattattaattgagttgaatggtagctatatttctttaaaatttattaa

SEQ ID NO: 251222 - DNA, 894 bp, Cannabis indica
gatgactttcctgaagtccgcaccagttttcaaccgcaagccaaagactggaacagcgacgacatctcctattgttccccagaagagaaagagcgatgttgtggctacccctgccgcggactcctctaagaagccaactaaggctatgaggacaagggaagaaagtcgtgattgatccagctgttcgaactcgcgacttcctagttctgcaggaaaagtttgtggcgaggagttcatgtccaaggttgagaggactccttctgaggagcttattctgcgttctgtgagttggttcgcaatccatgaccatgttcatgaaagcctttgctgctggctctaaggaagtcgaactattaaagaggcagaatgctcagcttgaggagagcatcaagaagctgaaacaggaagcggctgacaaggacaaggagcacgaggaatttcataaacgagtcgaactcgaagccaggaactccaaggcgaagattgaggaggtgtctcgcgacttagaggtcgagaaggagaatggaaagaagcagtacgaataggcggtctctgattacatctacacaactctttccaagattccagacttcgacttctcgatccttggagcggaggcggctgaggcttttcgagccatgtcgcccacgcagactcagggaagtggaagaaatcttttcccgaggatgctgatgctgccgacaatgaggaagtcctggacggggctgccagcgaagtcgctgatgagtctaccactccaactgcccccattgctcccaatgcttagcttttactttattacttttgacagacttttttttaagcggtacaagggtactcgcaattttaactaaacaaatttatgttatttttcttttgaacaaattgacatcc

SEQ ID NO: 251223 - DNA, 1176 bp, Cannabis indica
taggttgatgaaaaaagaaaagagtgatatgagagagagataggtaccgtagcaatatatggttatcctagtaatattattgaatgtaccgtagcaataaaaaatattatatgatatatgatatatggttattttttatttatttaattttttttttaaaaaaaaagtaaatatgaagagaacttgaaatctttcaactgggtatttgacggtgaagacccttttctcagttttccaagttataggcttagttagtaaccaagggtatgtggtgaggaggtttgttgtttctaacgttggattttgtaatgatcaggttgatttggtggacttcattgactagtctggggttgaatgcctcaaccaaagcacgagtcactctcttgcaaacgcgctcaagcaggtaagttttgggtgttttctattgtaaataaatataattcaggggccttgatctgggtatctctcttgtgcttttattgaaaaacttttaaaatcataaaatccaaggtaggattttaattttatctttagaaactttttccgttgttattgtttgtacgtatttgcctactctcgaataaagaaggaatgagggttgtgactcttgaataattagcatcaaatatcagtttaaatattaatgggatttgttttatttttattttattattttattatatataaataatattttattattttattaaatataaataaaaagttatccatgaatttctcataaaccaagaattcaattatataggcacactttatatagaatagatacatatataaagacatattttaaattttattttgaatattgtaaatcattgtagattaacttttaaagctgataaaatatgtggtattactttatatataataacctctactataatgtcctaccataaatttttcaacacttatttgtatgtattatatatatctgtgattaatataaagtttatttattttaataataattataaaatacagcaaatcttttctagaaacacgttgtgacagtcagtagtcccgtgatccgtaaggggaaataccgggtaagctgtgcaatcctacatcgcctggggaaggtcaagtgtgatgattcagactgtgtaggtatgggactgcatagttgaagagagcttaaatggattgattggtact

SEQ ID NO: 251224 - DNA, 1163 bp, Cannabis indica
attagtatttatggaataatagaaaaaaaataaaaaacttaagaaaatgcattatttttatttaaataaatacaaattaattaaattttaaataaatattctcattaaaattattgtgatatattttatgttaaaaatattttgtttggatttaattttatttgtgtttgaagaaaaaaaaagagcatttatagaaaggtgaagaaagaaataaaaatggtaaaaatatggcccaaagaaggaaaaatgacatttttgaaatccagtaacaacacaaaggacaaaagcccaaaaaagggccgaatttctctcagccgacagcctcgccaagtggcgggctgtcatttgctccgtaggcccacgacaggcgcactagggggactgtccccctcttcttcctcacgcgcgtgtgatgcgcacgaccccttttgggcctctcatctgcctcacgcgccagaggcgcgactggtcctccgtgaccgcttcccttcagcagcccaaatacttaattttttcagccaaccaagcaatgacacgtggcaccgcctaagtcaaagcaaccaatcagcgggtgccacgtgtcactccgaattaacttttatgtatttacatttttactcaaatgcaatttgtaataagtttaattgcgcatcagtcattttactcttctataaataaaagcttaggattttagaattcagttacagttttagtttcagacagaaaaatctagagaaaacgctcaaagcgtcagtgttagtttactgcttttgttagttaattttcttatgagtttttaagttcccttattattaaggaggacgatgaaacctagtgtatttaattaagtatttatttttattttgattctcagttcaatatatgcctatgattaaattatgagaatcaatataaacataaatatttttatatacacttaagtagattctgaaccgttaataatatcaccaaatatcactcaaaatatttgtttctcacgcatttctatgggttcgacctcgttcttcacaatctctatactacaataaagattcgtgcgcttgcaagttgataattgtaaaacgtaacactttcggtcacaataagtttttggcgccgttgccgaaaaattgcaagaagagaaactattttaatccagatta

SEQ ID NO: 251225 - DNA, 1483 bp, Cannabis indica
aaacaaaacgtttacaaagttaaaatatatatatcttgttaaacacaattattaattaggggtgtcttaacaaattaacaaaattttatgatttttattttagttttttaaaaagaataattattttaagctatggtggtccaagttatacaaacaagttatatagaggcagatcccatcagctattatataacaatacatacaatcaataatatatataatatggagagcaagattaagattagcaacatggtggtggtcgtcatggcggcgacggctatggtggttctaatgcttgttccgtccgctattatataacaatacatacaaaatctgagaagttaatattgattatgctatagtgaaatggacaaagatttcaagataggacaagagtacttatatagtttgtgtaccatttaggatttttatgcttaatgcttcctatgtgtttaaatttttcacgagagtagaaaatttacatatatgttgagatttatatgtcctagtccgaatataagtttctttagtaaatccgtgtttggggggtaaaaaccgagcacaggaacaaaaggcccaatagattaaaataaaaacgtcaaaaggcccacacaggttgagtacataaagacccaagatcaaaatacgtcagagaaggcccaacacggtgcggcccaagcactgaacctcaagggagcgctacggacaaaaaaggaaagggagcgctaaacgacaaggaaaatgagtaagcaccaacggaaattgaaggaagaggggaacagaagaattggtcgacagagtaaaaagtcgaatgtaggatgtattacaaatgagaacccaataaggacccctagatgacctgccgacgagggatgtacctaaaatgtaataagaaaaggaacgccgggatgataccacgattaggacaaacacccctgacggaaggaaactcggatcatctcaaataggggagttccgacggaagaaggagattctggacacaaaggaaaaaatcagtatttttgagggtatgataccgtcggatcgagagaaagcagcagcattatagctaccagttgaaacacggatacgtagcatagcagaaagaacagtgaggaaaaacacgtgtcaacagcagaataggtatatgatagattacccatgtaatcaaaaagacgtaccaaataaatagagaaggatcatgtaaagaaaagcagattaggaactggaaaagaaagaacccacaaaagaacaaatagtgactattcttcgaccaaaacagctatcacattaaaattagaatttgagaattaaattatgttaaaccagataaaatagattcaattaaaattaattaccctaagttttaatcattgttaatttcactttaactatttgtgttttttttttcaatagattttgaactcttttttctcaattattattgttgctaaatagaacttaagaatttaattgtttagta

SEQ ID NO: 251226 - DNA, 580 bp, Cannabis indica
aagagaaataagaggaataaagagattgtcattgtaaacacttgtaatactcaaatactttccaaagaaggctaatacaactgactcgtggactaaggatcattaacgcctaaaccatgtaaaaaatctacttgtttattatttactatcttgtaattccttaagttcttattaatacgtttctaaaaatcttggtaaatattttggtgttttcattgagagctgagaaaagatctaaacttgcattgtggttgttatcactagcctaaaaattatgaagaagaagagatcacaaatgaaatggagaaaggtcatggcttggcaacctactaggcccaaagatccaaccagaggaggttgtgttaaggacccatcgattgagggtgttgttgagaataatagagatagttctacaaaggctgacaccccttccctggctaaaggagaagggaaggtgaatgtaggaagtcttggggtttctaccatttccatgtttcttcgaaaaagcatgagtctgaccgatcgaccctctgaggatgcaaaaggccagcggtgcttttaagcctaggcgccctttttg

SEQ ID NO: 251227 - DNA, 1341 bp, Cannabis indica
aaaaaaaaatatatatgtatggaggaaacatagagataatttaaaacacttagactagttttagtggtggtaatagttaccgcaaaaatactaattagcgttaaaacgatgtatattttttaataaatcggggtatgcatttgatttgggattcattacttggaaacaaaccattatgatcatataattgtcgttgatatattattattattgatgatataaagatatactattttttggaagaatgttttgttatgttgtaacaggtggacctttgtggtggggtttattgtttgaatattattgcattgcatttagtgaaacaaatggacacatctctgaaaatgaaaatgaaagaatgaatgagtaattaggaaattttagtaaaagaagaataaaataaaacaagatatatagaatgaaaatttggggccctttcagaaaaaaaaaaaaaaaatggggtcttttctggtagaattaaagtggccgaagtcatgagatgagtgattcaattcaatggcgttgatgtagggagagagaatatgatacaatttggtaattgtatcgaattgcactcttcgagtcagtgccaaactccaataggaattatcctaatttttctcatttcattcattgatttccatttgtgtaatagtattacatatttatactaactaagcaatattaacaattgctaactagtccctataacttttcatgtaacactccccaacccttcaaaatcaccttgtcctcaaggtggtaaaaataaaaattactactaaaataagcacaaatataaaagataaaaaaaaactaattacatcccaattattcctttaatattcagcccatttctttgtaattttctactaaattctcagcccaagtccaagcccaagcccaaaattcctagggcagcatcaccttcttctccaaatactgtgcgcatcccccgcccccccttttttttttttttttttgaatgcacttgaaaccaaaagctatttgcgttgaccagcattgtattctccttagcttcatctgtaatgtgtactgtatatatatattcccatcatcaatgtatatgtatttccatcaattaagtgatgaaaaaatgtatttgtatattttccagcaaactgtgaacaaaagagcccagtagtcgtccctttccttcgacggtcttcagcgatccggcgcgaccatgcctccgtccgtccgccagtaaccagcaccctccttccctcttcaacactctctgtttctctggggagctccatttttttctttttcgctaatctcccactgtggtcgccattattgttcgaaaatttcaga

SEQ ID NO: 251228 - DNA, 2714 bp, Cannabis indica
aagtgtacgtaccaaagaagtagtttactttgagctcggtcagaaaaataaagtccggggagtgcgaccgaatcagggacttcaactcacgaactgtagaggtctgccttaaccctctacagttccaagcaacgcctctcatggctcctgtggaggagtgatgaccatctcctccacaggggtatgagagtgagccgacccgagagagccagagccgccaatcagaaaagtgccaaccaaaggtcgttccaataaatcgtttcttcctttggaactcccatcaagcagctcatcagattggttgatagagatcgagttgtcatctgatgattcttccaccgcaaccttagtagcatgttcctggctaggtgtatcctaaggaaattctcgaatcacccccaagtgttgtcgtggtatcttatgaggtctagagcaaatagaggaagagccatcaaataactttcttttcttgaatggagtagctctagcattaattttagaggtcggcatgatcccaatgtcacctctaatattactaatctcatataggtccaagcaccaaaattgtttaagcttttgcaataaagtagcttgggcttgaaagaaattagataaaaccttttcgtcatcatgctgaaagttgagtatggctcttttaaatgtaggacatatgtattttccaaaaatgagtattaaaaaaatataaaatcaaactacttcaggagtagggagcaatacaaagtttcatttcaacgtacgatattatacagaacagacagaacatcataaatcaatcactcactctcatctccttcctttcatggcggctatatcggtctccgcctcaggctcagcctcactctcaacttttcacaatcccagaccttcttctgcatcggatcatcttcttcccctaccgaaaaccgccgccttcttcttctcttcttcctcaactttccatggacaccataaactcaccttctctgcaagagccatcgaccccaagattgccgatgccgctttaccagtcaacggctcccttccttcgtctgcgtcaacaactctatcaaagtaggtctattgttgctatcttatttatttcatatggtatatctgtttagattgtgaccatttttcgttaatttcgatgtttgctttgctgcccagagtgagaaggcatacgatatcagtgttcgttggggacgagagtggaatgattaacaggattgcgggagtttttgcgaggagaggatacaacatagagtccctagcagttggtctgaacatagacagggctctcttcacaatagttgtctctggcactgaaagggtcttgcaacaagtcattgaacagcttaataagcttgtcaatgtcttgaaggttctatctctaatctataatctattacccctaaatcatcactgacttcctgaacctatattgttactggattcataagatttagagtcaagttttatgtatttgtttgaatctatatgtgtataacaatgtcaattatgattcttcggtgaacaggttgacgatatttctaatgagcctcaggtggaacgtgaactcatgcttattaaagtcagtgctgatccatcttaccgtgctgaggtacttcgaatttgactataactataagactatgagaatctttctactttctagtgattttgagctgagttgaagattttttgggtttttacaaattttcagattatgtggttagtagacacattcagagcaaaaattgtggatatatcagaacactcattaactattgaggtaattatcaggacaccaagggtacccctttgtaataggttttcctattttattttatttaaatgaacaataacaagcaaattataatgacttgtgatattttatgacatttcatgatgaatttgaattatcaaaagctcttgactgtgtttagaatttcacttttaattacagttatggtattgttttcttatgatctccaggtgactggagatccaggaaagatggttgcattgcaaagaaatttaagcaagtttggaatcaaagaagttgccagaactggaaaggtttggaagcataaaacgtgtataaaatacttaataatgtttttgagtagttgtctttgactttgttgtgaaaaaacaaagttaatctctaaatttatgaaattctttctttattagatcgccttgagaagggaaaagttgggcgcttcagctccattttggcgatactcagcagcttcatatccagatcttgaaggaacaactcctgttgatgctcttgcaggaattgaaagtagatcaatcaaaagtgaatctgataagtctgttggggtatgcaatagtagttaatatttaatctgaaatgtctcgtctttttttctgtttaattctttcttttccttttcccaatagattcattaactcttctatatctctttgttcataaagggtgatgtttatcctgtggagtcatatgatgtctctacgttcaatcatgttcttgatgctcactggggtgttctcaatgatgaagatgtaagaattgtcaccagcattgatatagggtattttaaaaaagatatgtgtagtgtgcaatcataagtcgttagtaattatcatttatcactattataaagcataggaaacactgttgttatgttgtcaacatactcaacttccctaactagcttcagggc

SEQ ID NO: 251229 - DNA, 822 bp, Cannabis indica
ttcataatgtatatttgaaacatggtagttggtgggactatgatccacctatggattgctgctggtcatggaaaaagattgtaggagtgaagaacaagttgaaacaaaaagtggatgttgctggttttgtacaacagagacatacaattcaacacacctataaacttctttttgaaggcagggataagatttcttggtccaagattgtttgggatagattcatcattcccaaacacaagtttattctttggcttgtgttttggggaagattgaacaccaaagaaaggataggcaaatacaacacaaccatcgatttgacatgtatgctttgtggacaagaagaggaaacaagcaaccatttattctttgaatgtgagtatagccgaagctttttgaagggcttaagacttggctgcaatggagatcgactacaacaaatatgcagcagctagcaaagattttcagcaagaacaaaacagtgcctactgctagaagaagtgtcttgaagactgctcttgctgggctggtataccatatctggaaagccagaaatgatgtattttggcatcaaaaactgtggcatacaagaatcatcatccaacgggtccaacaagatagtaaactccggattttggggctgcctaacaagcttaatgatgatgataagcaatggttgttaggaaattaattagattgaatttgtatgtattgattgagtttgaagttgtatagattaatagaaaccaacttacctatagtagaatactaagaagataagagatatgattgaggaaagtgatgtaaaatgtaaatgttttggat

SEQ ID NO: 251230 - DNA, 662 bp, Cannabis indica
ggagtatcaaagttgttcgtttgttagttagttggttgattagctgtcataacagttagaatttgttactacaagttgcagtgtttgttttctttctgtttctattattagtagctatatatagcttgtcttttctttgtattaatttgttggaaataatcaataatagcagctatattttctactattttttctctagatttctctgtattttctcagctggttttaccagctaacatgaaaggatactatttttaataaccctcaaagtacatcattgtagactatttttgtagtggtgtatattaaaaacaagcaaagggcaatttaagaaatgaaaataccaaaaatcaaacaagaacattagaacatatatatatatatatataatattaaacattaggaaatataagaaacaaaaggggactatacttattgtagttcatgtagcccaaccttagtaaataatacatagtttctcatatttttaacacacacacagcatgcatacagtagtacgaatgaatacacgtactatatatacttgataattgatgagagtggatgatgatcatcatcaatttgtgtagttcgatgatgatcatcaatattatttatatttttagggcaaatatcatattggactttgtgttttgcaaaag

SEQ ID NO: 251231 - DNA, 703 bp, Cannabis indica
tttgaactgggcagagatcgcaaaagatcaagtgctgaagctaaggataaacttcaacaacttactgtttcttggaaatatagtttggaatcctccaaagaagacgaactgacgctcacagaagggatataccacataggcagagcactcgttcatgaaaagagattaccaactcttagcctccgccatcacaatctattcatgctccttcttcccaattgcctagagataagatgagtcttctacaacttcctccttctaatattgttttgtcagtttgtgcttccttattgtcgaaagaggtgtctgctcatatggatgcatcaaataagttttacctcaagagattcgacttcgaatatgaagaaatgaggaaaaaaagcatcctttctttcaactaggtggagtgcctaattttttgatgcttcaaaattgaacgaccaacttcctactatttttaactgttaggtggttgcttagaggctctggccactgtaggttcagatctagttctatttatagtagacttattggacctaaatgttgctacatgtaccaggttatgtactcataagttcgctataagtggcaagtgaaaattcaatcttcatggtagacactctcaaaagccacagtgttgctataagcatgctaaattttgcttgagctatatctttcacgcctttctatatacgtctaattc

SEQ ID NO: 251232 - DNA, 922 bp, Cannabis indica
tataaatatctgattttttttttcaaaaaatcttagtttgtttacattattggttggattttcaataatttttgtttgattttttaagatacgtgtttataaataaaattaagtttggaaatatatatttaggaataaattaggttttttttttggtaaacttaatattttttaataaatttaatattttaatcaggtttttttaataatttttattaattttctgaggattaataggaatattataatttttaaaattaatttttttttataaaaggaggtaaaattttgtattggtcaaagttcaaagggtaaagatactaacttttaatggtaaaagaaatagaacttaacatgaatgagctcatctagacaaagtcctacttgtaatcaatctatgagagtgaaaaaacaaagacttgtaaaagctacagagtctttgatatgaccctttatttatagggaaaaaacccaaagaagcagtagaaaatacagttgaaaataacaaaaaaataaaagaacaagaactgttattacaacttgaaactacagctcacaacacaggctaagtaacaaaattagttacactatcatcccccctaaagacgaaagggtgatacacacacttgaagcttggtcttgaggtaattgaacctgtcagtcgacaattacttggtcaagatattagctatttgatcaattgaaaggaacatagcgcacctcaagctactttgccaaaattaggtcccgaacgaagtggagttctatctcaatatgcttagagcgagcatgaaaaaactagggttggcgagcaagagaggcagcaccttggttgtctacccaaacttattggtgaagagggtaattgaatattaagttcttttagttacagagcaccaccattttatctcagaggcgagtg

SEQ ID NO: 251233 - DNA, 651 bp, Cannabis indica
cgcacctgctgataactttcaaagaactttttagtgtgtgtgctttagctttagaatgtgtcgttcagcatcatgagtccactttttcatttaagtgctcacctttttgaatcttcagtatgggcctttgtgttttaattagactagggtcgcaagagtgaagaacaagctgccctgccatagacatgagtctgtttatagtcgcgactgttgtcatagtcaacaaggttaaaacttttaggaaaatacttaaaattgggagggcgatccccctgaggaactgactgtaccccaaactgacgtaggtgagcaagtagagtatagtaaggcgcttgagagaaccatgtcaaagtcactcagtaaaatgaccctgtaattttgggagaaaggggtgctctcctttattttaattaggaaagtgatacatacaagggggtagcgactatttattaaaaacacaagactctgctaagtagtaacacgatgtatagagtctaaaacatgctagtgctagaaggtcaaaatgagaagtgttataagctccttccccagagaaagccccattggtggcctcgagaaagaaaaaaaaaggaaaaataaaagaaacatctggtcaaagcaaactactactcaaaagaaagagagagaaga

SEQ ID NO: 251234 - DNA, 704 bp, Cannabis indica
atttcaagctcttgaacaagagccttatctccataattcaaatcatttccagccatgaaaacatctcaaggatacatgattctaagctagaaactaccttgcaattataatccatgcacaacaacttaaatcatgcaattcataccaaaactcaccaagattaacattcaaagctatgaacatgcaatttcacaaactcaataattcaaaacatactttcccatgcttttacaaccataaaattcaggaagacaagattaaaaactttcaaaagctacctcaaacaaagcttgaactcccttcaactctaagctccaaaaatctcccaatcccaagcttcaaatcaaacaattaacaacaccaacaataaactttcaagagagggtttgagagcgggagagggtcggccaagagagagagatgcacagccagaattttctattttgttttcctcaaaattccattttccaaacataacaattagaggtcaaacgaccaaaatgccccaagggccaaaactcacacatgcaccctcacaagggtaatttagtcatttaatactcaattatttccaaataaatttcagattccatattatcaaataaaatgccaaataatgcaatccaatttacatttcgggcctgaacccagttcggcccgaaatgtccgattgtgactataccgcgctaacctgtcagaacaca

SEQ ID NO: 251235 - DNA, 583 bp, Cannabis indica
caactagaagaccctgaactgattaaagctctagaagatgtcttagcaggcaaagctaaggacttttcggtctctagtagcgggatgttattgtttaaaactcaggtgtgttttcaacttcagagagaaattttggatgaggcacacgactccccttactcactgcatcagggaaccacccagatgtttaaagatctaaagccctatttctggtggtacgggatgaaaagggacgtggtggattatgtgactaaatgcttaacctaccaacaaattaaagcagaacatcagcgactagcaggattacttcaaccattatcacttcctgaatggaagtgggaagacaatgcgatagattttgtggttggattgcccaggaccacaggaatgtacgactcaggaatgtacgaacaaaggtaacatatataatggatcagtattctaacttgtatgtgaaagagattgtttgccttcatggggtaccaaaaactattgtctcggacagataccctaaatttacatcaaagttttgggtgactttacagaaggccatgggtactagtttgaagttcagcacgacctt

SEQ ID NO: 251236 - DNA, 700 bp, Cannabis indica
ttttagtttttatgtcaataaaataccacaattacctgtaaatataggttagattttccgacataatacaaaatcgacactagtctagaagaatttaagatttaactgtaattggtgttcaaacttgatgttgaaactagttttttctatattttttcaataaattaattattaattattgtaagtataatttgttgagaattagaatcaaaatgtaacagcgcagcaccaataaagatgaacaactacttcaacttgtaacaccatttagtttgagattccattttacaccaatttttttttctcctttttaattttattattaataacttgtttgcttatgtttcaatcaaaatcagttgcaaatttcacacaaaaaaatgatgggaaccaagcaaaatatcatttcaagatattacttcttatctaaatgttagttgagtatagattcaactataagtgacttaaccacgacattgaaaccaacatttgtttggaagctacttcggtgttaaatttttatagcaactataaaagtctttatcttttataagaatgccattataatggaatgaattttaatatagagctattttatttaaaatgaaaaaaatatcattataatttgttagagagtctcacattgctaatgtgtagaaaagtaataaaatatataagaggaatgagctactcctcccat

SEQ ID NO: 251237 - DNA, 518 bp, Cannabis indica
ggatagaagttggttaaatattaaggtaagttcttgatacttttccccttgaatttcttgaattttagggtaggttttggctagggttgtaaggatttcggggctgggatataagttgagtttaaaacctatttttaggcttggtttaaagcttgtctagatttgaactggttggatgtaagggctgcttagcttgggatgagctaaatgatgttttatgagttttatttcacttggatatacaatttttaataaatggatgaattgtggtgttttgatgcattgattatgttgtgttttaagatattatattgatctggagtagttggaaaggtttggttaggtttggagcaagttttgggactttgaagatctgaaattttcgagtttctggtgtgccaaattggaattccagatggtacagggccgcaccaaccggaattccggatggtcaacttttaagaatcgccgattttcgtattttagccacaacttttcactcgggtgtccgttttaca

SEQ ID NO: 251238 - DNA, 1433 bp, Cannabis indica
agtaaaacaaactgaatttaattcgagaaaatgaaatcaatgtattgtcattaaggcactcctcattaaccaatacaaagaaatgagattacaagagttggtggttgaatcaacaagatgaagagaagagtacatcagtatgacacacactagaaaccaattttgccagaaccagaatcaacaattactctctcttatctctctctcactgatttacaaaattgaaaaaaatgaaccacacaaacatagaattaggagtgactatttataggcaccaactaccataactgttttaactgaaaagtagttaaaacagttagagaagtcctaaacagtaagtgcccacctaagacttagtttctaggccacaatacaacaattccaccttggcatagacacttagacttaggtgtttagagaattatggactttgatgaaagatggaaactctaccaatttccttgaagttgaccaagtctaaacaatgtctaaacttggtttgagtgacacattttgtgaaaatatcagctgggttgtgttcagtgctgatcttctttacctttacctctccattagcaatgatctctctgataaagtgtaatttgatgtcaatgtgctttgacctatcatggaacataggatttttcatctagtgcaatgcactttggttgtcacagtggacagtcatgtcttcagaactaaatccaagctcctttgagagacctttcaaccataatgcttcttttattgcctcggttgcatccatgtactcggcctctgtggatgacagggctacacccttttgtagattcgacttccagctgatgcatccacccagagcagtgaatatgtagcctgtcaatgatcttctagtgtctatgcagcctgcatagtctgagtcaacgaatccttcaacctcacatccaccttttcagctgttttgtagatcaaacccatgttcagagaccctttaacatacctcataaccaatttgactgcatcccagtgcagttgtctagggtcagcaacaaatcgactcacaatgctcatggcataggccaagtcaggccttgtgcataccatgtcatacatcaaacatcctacacagttagcatatggtatgccatccatgtttcttctttcttcttcagtctgaggggcctgttctttagtgagtttgaagtgttgagccaatggtgtcatcacaggtttggcatcattcatgttgaacttcattagaactttcttcaagtatccctgctgtgttaacatgatgaagccagggtcttttccttctgattttcgattccaagaattttcttggcttctcccatatccttcatctcgaattcacctttgagttgacacttcaactcactgattttgtgtttatccttgcctactattagcatgtcatcaacatacagtagcag

SEQ ID NO: 251239 - DNA, 529 bp, Cannabis indica
tcaaagcacgttcacaggaaaaaacccaaaagccactaatgctagacccacacacggagccattatttacgaatcgaattattcggcattcctgaaagaattgattctgatattaaatttaaatatatgtaataattatataaaatagattttatgtgggttgtcgatatgtttttctcattttgtagaagacgaacaacacttgagaaaattaaaaggaaaactactcatcttcttcctcttaaattcttaattttaaaagaacttcctttcaatctcccactacatctattaagttcattctcataacactattgctatcaaatttacaactattgaatgataattgcatggaaaagtaagggagtgacaacggaacaaattattgggctctcggtagaggagacaggggcagttgtagtttcctatcaacaataaaaaaatttctctgaaatggtggcagtacactattgagaagatgatggtttttttttctccctatcaaatcaacttagatttgaatattttt

SEQ ID NO: 251240 - DNA, 562 bp, Cannabis indica
taaactaataatatatccccaaaaatatataccctccaaataaattttttttttgacaatatttaacataaagagacaaaatcccatgcatatgaaaagaccattttgccctttaccctagttacttaaattaatcaaagcttaagggtaaatttgtaatttctaactaaccaccaaactgataactcaaaattttaatctagtccggtatactttcaacttaatttattttatgttgtcatgacatttctgaccactccgtcgagtttccacagttgttgggcctgaaaccatttaatttcagaaacagtatttacgatacccacatagtctaataaaatatccctaattaataaattacgctttatttaaccatttactaaattcacacaaatcaacctatgtataattataatcttacttcatttactagattaagtacatatttaataaaatatgcccaattataaatatcgtattatttttcgggatattacaactatcccctccttatagaaatttcaccctcgaaatttactagaaaagctcgggatacaactcc

SEQ ID NO: 251241 - DNA, 585 bp, Cannabis indica
tattgtaaattatttcaaattttgtaagatatcttaaatagttataacatacatgaatatgaaaaaaattagactgaatatttttttaaatgccgaaacaagtagatggtacataaatacatcccttttaatatgaggtgcattgtagaatcacccaaaaatgttaatgttatttttaataataattttaaatttattaaagcaataacttttaaaaaaaaacgaaatgtaaattgcataaatacctttaaaacagtttaaacaaatagaaatatcatatttaaataccttatataaaaaataattatcaattagacaaatatttttttttatgcggtgatcaaaattacacatgattaacaaagcagcaatccacaatcggcgagacacctcctcgaaccaggatagctgatcgtctaactgaagggcatgctttgccaaatcatgtactgcagaattctaatcccgagccacatgggacaaaattgtccccggaaatttagacaatcaagctataacgtcttcaaaatagcaccacatcacattgaaaaaataccttcctattattaataattgtctccagag

SEQ ID NO: 251242 - DNA, 832 bp, Cannabis indica
tttagttatatcgaatcggtaatgtttttcgtcccaatcactatactcaattttaaccgttatatgtagttcaataaactccattctagccatcatacttttcatttttacttatatcaaataacgttcgtcttcctattatattttctcaatccattcttctatataatgcgattaaactgatgagagatatacatcttttcatactaaaaaaaatacaaacacagttttcttacaaaagaaaaaaaattcatctgcgatatcatattgtgagagtgtattcgacggttctcaactgtgtagtggagatccaatgcagtatacgattaggctgttttatcctggggacaactggtaatttttgatgtgcacattcatgggtagtattgcgaccgtcttaaagaaagcgacataatctgcgactaaacctagaaatttcatttggtacttgataggctagtttaggtgcattttatatagtgttttagaggtgtgtttcaattgattatattcattttgtgaagaattactcttattttctactttttcaggtttaaatggtaaaattcataatatgaattgaaaatgagaagaaacatgttaaattagatgaatatgatgaatttattatggaatttggagttctaaggtttaatgatgagaaagaatctaagttttggatgatcaacacactctgtttgtgatcgaaaatcaagtccgaagcttcaagcaaatttttgactatggtgtgttaacttttaggaaaaatattaagaataaaagttctagatctctctttcggctttatgaaacatcttgaatcgtttaattt

SEQ ID NO: 251243 - DNA, 1297 bp, Cannabis indica
aattaaaaaaaaaaaaagattatttacctaaaattgagagtgggtcatcgatagaatatatatatatatataaaacatgaaaataaaaatataaccataatgaaaatctgaattgaaattttaaaacaattaggccaaatataactataatgagatctcaccgtggttgttactaatattcatacctggaggtgcccaaatcagacgagagtgatggtgagagggagaaaggagggatcgagtgggaggaaaggggtgggtttgggggtttctggggtggggatctacgtggtgaggtccatcgggacctggggtggccggagcacttccgtctagcgagcagagctgctcgagaaaagaggccagagagagaggataaaagaagaggcaggaggaagaagaagaggaaatagggtttagattagggttttcatatttttccttttatacccttaaatttatttaccaaaatatttacattaaacctggttatttattttctcaaaagaaattttgattatttattaattatactttatttcattttactcccaattaattaattaattattttagagatattttatttatctcaaaaacactttattttaataatttttattataaaatatatatttttaattatactaaattttttaaatatttttattttacttcacattcttaaaatatacctatcaaacaaaaataaattatatactaagttctatttatacccctctttttttttctttttatagctgaaacatatttttttttagttatttttctttaattaaatataatttttttattaagtaaaaaattaaaaagaaaaaaaataataagaattttattaactacaattttttataactaaattcacatgaattgtacaataatattttataatgttctatttatatcttttttttttggtttaaatcgctgaaacgtttttttttattaatttttaattaaatataaatttcttatataaagcaaaaaaaaaaagtatataaatttcttttactaaataaaatttttgtaactaaattcaaaataattctaagacctcaaataattatccaatagtattttagtccttatttttctttttcacaataatttttttcgaataactttcacaataaatttttaaatacaaataatttctaaaattatcctctaattaaaatatataaattctaaatttctcaaattttataaatttattaagcaaaaaaaaattctttttctattttttaaattctgaaactttttttttaaggtaatt

SEQ ID NO: 251244 - DNA, 955 bp, Cannabis indica
ttatgagtataaatattatatattttaaggtatgcctatataaataaattcttggtttaggtttatgagaaatttatggtgactttttatttatatataataaaataataaaataaaaataaaacaaattccattaatatttgaattgatatttatatataataaaataataaaataaaaataaaacaaatctgattaatatttgaactgatatttgatactaattattccagtcacaacactctttgagttttctattcaaaaataacagttttttggtatccgaaacccataccaagttactctctctcctcttcgatttcaccggcgatttctctacggcatctccgggtacatattccaattcattcgcctcctcgcattaatttcattcactattaaaagtaagttatactacacacactcagactcgctctatatctatatatctatatgcgggtatgtgtatatgtatatagaagaaatgtacgaacgatatatgtctgctttgggatttgtttttttttttgttttgtttttgtatttaggcgtatgcatgtgaatcaatcggattgatatatacatagagtaaaagaatggggaacaagaagagaaatcttgcggtgcgtcctaaacaatcgccggcggcttcaccgacggcggtgactaagcaggttgtcgacgaagcatatattattatataattatatatttgattattggtattttaatttgtttcctcttttcagatgtttttaatcttttaagaaaaaattcgttgcttgctgctaataaaagggcgtatactttataaaaattggaacaataaaagaaatgtagcataagaccaggaaaggttccatggattagtgttgtgatgtgtatttcatatcatatccataaaaaactaatcaaaaagaaagtctcattccatacaattagaagtcaaacaatc

SEQ ID NO: 251245 - DNA, 806 bp, Cannabis indica
atacgcctaagttagttagggtgttacataaaagtttatatccaagagaaagatgatacctggattgtgtgaactgttgaacattcaccaatgttttaatctaattcttggcctttacaacttttttccagtactaactcccttgaatggaggcattgtagccccacgaatcgtctccccgaatgtatacactatgtatccatcgaacccacatgttatcttccttgttagcaatcgcccacacatatttaaacattgctgctctgttccattctgctacctttttgaacccgattcctccttcagacttagcttggcaaacaaactcccaagctattaaacccaaaccagtcattgaatgttggccctttcatagaaacgctctacaaaatagcttctatctcattcactatcttcttaggtaaaatcattatctggctccaatatgagtgaatggtcatgagaactgaattcactagaaccgcccttcttgcaaaagagagattcctagtactccaagttttaattcaggatgtcattttctcagcaagctctttgcaatcttttcttgaaattcttttggcacatattggcactcccagataactaaatagggcattgtgtctacagaaaccagacatatctaatattcgttgtatttccctgtcatgcattccactaaagtagacagcagttttggtaggattaggatgcaaatctgaggataataagaatagcttcagtccttgtagcatgagataaacacttttgaaatcacccttactgaacaagagcacatcatctgc

SEQ ID NO: 251246 - DNA, 932 bp, Cannabis indica
gaacctttcttggtgttctgtagatgactcatcagatgtataagacaagctcatgatgttgttccaaacagttgctcaaaagtgtaccatagctcatgagcagaggtgcaattgataacatgacccagcataatttcagagatggaagatattatagaaagaagaaattgatctaatctcatccattgagtgaattcaaggttgctcaccattgttgtttgctgaggagcttaacgaattcatggttgtgggggagtttaattgggaagaatctgttcaagatcgtgagcccatatagctggaagcacctgagaatgccagaagaagtagtttttacgatttaggcgaagtggagggagaaacattgttgtgggaacaacaaaggtgttggctaaatcattgttgccgtaggaagccatggaagaaccttcgacttctgataccaagttgagagagtctgaatttgaaaatgacttttctttattaaattttctgaatgagtcaactttacaattgtagctgctatttatagcagttcggtgttatggtgaatcaaagagacacacaaatagagaatactaaatattgaggtatgtttattattatgtaacgccctaaataaaatgattgatttgggatgtttatcagcattaattgtgtttattattattgataatacaatgctcattgtgtttaaattttacatttgtcccatatactttccacactacctaattctgcccctaaaatataagacttgttaattttttttcataaaatataaacaacatgcacccacttatacattttatagtacattttccatcaaaaataaaattataagtaacaagagtttcaaatacctccacaatccaacacttctcctactattaacaactctaaagtgtcaactatgagatgacatatatatc

SEQ ID NO: 251247 - DNA, 1268 bp, Cannabis indica
atataatagaatttttggtttatgaaaaattattgggtgactttttttttttaaaaaaaaaatctattcaaaaataatactttttttattaagatgtattttaatactaatttttaaataaattaatattacttttaaagtctaagtcaccaatatttttagtttaaccaaaatatactataacttaacagaatattcctaattaatttatattattttaaatgcatataattaacatctccgttaacttttcatctacctctaccatccaccttgtatattattaattaaggaaacaattactttctaattttataattttataataataaaattataatttttctccctccttattgcgattgacctatattctatccatctcccaaactcaaatctatccgccgatcaactcctctgatgtcaatcgcattgatggtatcaagaatattagaaagcaattcaagatggatgataaatatttacttactaaaagtaaagatctaatcattttattttaaaaattcttaatttcatactttcatctatttacttttagccattatcaattataagtttggtatcacaataattgaacttagtaataacaccatggtttcgtacttaaagtgcattctacttctattgttaattatgcatttgtaaagttatgttgtaaccttcatgtgaattaacattgtaaattgtagataagatcaatttatttcttacatatcttttaattattagctgctattataggtgtactatttagctactgattaatacttcgtgtgaaatagaggaaagaaagtaaagaaagaaaattacaaaaagagacatatgcagtgtgggtcgtctgagatctaaccatatattattttttcttgttttgttcgatagtttatcaagtcgttcatttacaattttataaatttttgcaatatacaaggtttgatattgttgtcaaatttaagaatgattactttaatcaatgacaaaagaattgttgtatacaaggtaatttgcataaagtatctaaagttatttaaacttcaaaaaaatataactgatttatgtaaaatttactattctctccattgaatggaaacagttgaatattttatttataaaactataaagatttttttcttcaaatttttgcatttgaagtttccatttcatactttatattacacttttttattttcttttattatatgatatttttataataacaattaaaaaataacaaaattaatttatgt

SEQ ID NO: 251248 - DNA, 689 bp, Cannabis indica
cacatttaaagcacataaatggtgattcttcatacttgaaagcgatccatattttctttccggaatatagcaaggggaaaccaagacacaccggtttattaattgacatccatacccgaaatcgaaagaacccatccgccaccatttttgaaacatctgaattctggacttgaataacctcccctgctttatttgccattctcactgtgttattcttagtcaagaaatcgattggtactcccatggcctttccccaaatcgggaagttggtcaaatcatttttccaagactcattagaattttccatctttcccaaaatcaacaatccgtttgataaatgcgatggcattttagatagaactctgttttgaattgacttagaggcgaaagtaaaagttaagaaaagacctgaattgaatttttctttgaccttgatgttccattccgtctccttcaatcgccatattcctcccagcactctcttcagaaatccactgctatgttcagtattagtgcataagcgctccctcagattgaattttgcaatcgtaattgacaaactcttatctatttcccattcttcttcatcggtgacctgaagattatgggttttctccagcacttcgtccatggtgaaggtggaaacaccaatcccgacaaacgggaacccttcgaagacgagagaggag

SEQ ID NO: 251249 - DNA, 1032 bp, Cannabis indica
catttggttgacacttgtgacagaaacttttgaacaccactgaaaaagtaaatctaaccattcatatggataacaataacttatcagaattatgagaataagatagtagaattcttgcatagtctattcgaatgacttgggcaagaattcttaatcctcataaaatattatggtatctctatttgtttacttaatttcttacaagtattttacactcaatttaaaataccagattgctatgttgatgacttagtctagaaggaacttacagcttcagactaagataatatgtcacaacaagatatccctcgaaacaatagtaagaggttaaatgtacttttatgtatgaatttaaccagactcctactgttcactaggagctatatgagatgtaatcaaaacaaggaacattaagggacaatcaaaaaagatttatgaatgtgacctatatgttatatattaaggatgtatatattagtagtccttatatctacaccaactcataaaattcgagatggtggttactctggggatggaggaattattctagaagactataaaaacccatctataataatttaaggttcatcagtgaagatacataactttgaaaattcgaaataccagaaagttattcaactgaagaaaattctacactgcattatctctatttcattttttaatagaatgagagatatatcttctgttttaacagatgcccttaataagcagtaaagatttcagtatctcttgatgagtaatgcatatagtaaaggatgttgcataatgttttatgaacatggtacccgaaattttggttgagtcaaatatattacacttgatctgaagatcaagataatagattgattgaaatgcacaacttgttttatgttagtgcaagtgggagtttgtttggattttatgccctaaataaaacccattacaatctaatctaatttatcaacaataaaaagattagaaatcatttatgcttacatgttgtattcatgtttatggtttaatttatatata

SEQ ID NO: 251250 - DNA, 1382 bp, Cannabis indica
taatctcaagaacttccccattaattgcttattttatcaatcctctaagagcacctggttttgataaaataggttttgttgttcagggtcaatcccttagatactcccacaattatttcaataggagggtcaatccctaacatatcttggggttccaggtgaagtaatcatgttattatttctgacttcgactgccactggttaacgtccagttatggaaaccatagcaagccaatatctactcaggtcgcaattcttttacaagtttgttttaccagagtaacagccccttgtattcttgtgaatcgctcccttttgatatcgagctaatcatggacatcgtcttgcccctttatatattgttgtacacgtccttgtgatatgagaccttctatctcatctttcagctgatgacattcttccatggtatgaccaatatctccatgatattcacaccgtttagttggatcccttttacgcctcgcatatttcataggttttggcttgctaaaaatgacttcatgtacgtgtgcaaggtaaatattttcttgagtttcactaagctcggtatatttagtataaagtgggatatacttgttggatttcttatcattgggcagccttttggaattgttttttctctttgatcccgaggcttcccaatcaagttctccaacattatcgtgcccgggatgtcttctaggtttcgtgacctgatgccctctgaacttattctccaactcattcatcgcaaattgaatgaatccttttgctttgaactgagtcattgtcaaaggtcaggcttctttaagttcagatgttctcgtagatcactcttgtcgtgagtgcggtcggaccttgcccttcctctcaatgtttgattcacctttttctccctataagggtttgtgcaatttctttcttatgagcctgaagagagggttagcgatttttgtctgatgttccacgtatctcaggctgtgtctctagattttcctcagtttcctcaggttgcatctcctcagagttctgagtatatctttggattctcccatgccccttggtttgcgagctacgaggtttgcctcgtcaatctcttctcctagggtcaggttgattttgggtaccatcctcctgcgctacttttactgcagctatttcatgctctaactcggcattaggccagtttacttcctccaatcgacgcctaagatggcgagattctaattccatgattgttatatatctggttgggtcgtaggcaccatcctcatcaacctggttaggaattggccaattgttgtttatccaaggtccgtcaagccaggggcctcaatactgggtcttctggggcttgcagatatgccaacaggttcgaaaga

SEQ ID NO: 251251 - DNA, 886 bp, Cannabis indica
tgtttaaacaacatacttgtgagtagatctaagatcctggtaaagttctatataagaatgtttttcctgtccctcctggcccgtctacgaagaacgcttgtgctttgtttgatgaaatatgttccatcactgcattatacacttgtcgttgctctgcatttagggagtgggaagctgttatatcttcttcgggtatttcaactcccaattcatcgttgatttctctagattgaaattcttcatcgtcatcgaacgagatgtcctcgtcaagaagctggtaggaattgatgtcttttcccatggattctattgtagaagagatggactttagaactttatttctcacaatagatagagaatcttcttcagatttcaaatcggcagacatttcttcctcgtaacgttcccataggtctctagggttcgttggattgcaataaactaatatcgttgcgaatagtcgtctcagactcgaaggcgcttggtatagagatgcttcatgtaaacaatcttccaagcagttgtctctttgtaacagcccaagcatcgtcgctgcctcacgatacgttgggccagaactccgttcactgtccttagatcttcgaatgacaacgaccctcttacatggttcaacaatatgcgtagataatatctctcaccctcaaatggatttgctgttacaatacgtcctatgactgttttttttagtagaccatatcttgtgttgttggttccaaacataactttctgggatttgtttgtatagtaatgagtttgcatttttatcagatcgattttttaaaatgttagccttgattttttaaaatgttctgaagtggaaatgtttgatgggtcttgatctactctgaaagttactgggtgttga

SEQ ID NO: 251252 - DNA, 585 bp, Cannabis indica
aaaggggagttcttcggactgtcttccgtcggctggaagaagaaaaggaaaactaaggaggaggagcttacagcggaggtcgagaagtacaaattggagacaacgaggatagaagagaaagtacatgccctagagacgctggtctcaagattttttatgaattttggaaagctaatcctcaggcaagttttgattacctgggcgaggccaacgacatgtatatcgagtactatgcttcccaagtggcttatggtgaacctgaggtgactacttctaggtctagccagaacgttcatgttccttcctttcaaacaacagatcctccagctcctgccggcccagaagacccgaaccaagagcctgagattccagctatttaaatgcttctctttttatcttctcttctttatatatcttattcgaccgtaaggccttttttaacacatcatgaacggtgaagcggtctttaaacttggaattatttctcattttacagacaataggctgatcgggtagcttttaatgccgatattacgtgctttttctatctttaatgaatttcattctctgtttacaatcatcgtg

SEQ ID NO: 251253 - DNA, 709 bp, Cannabis indica
ccagtcggtgaagtcaccacctccgactccgaggctcggagaagaagaagttttttgacgagtttggacttggatgttagggacgccggactgcccaccgcttggatgcgaccccgccggagaagagaagcagtcgccgcccgtccatcgccgcccttggagaagaagaagcttaagggaggtgactcttggtgtactgacttataactagtgatttcgtaaatcgtaaggcaaagtaagaatttgaataggcattttgttttgaataataaagtctgaaagtaaatattatagtaaatattaatatattattaagtttttaataaaataaaaaagtttattttttaaagttgttcgagtttacgggttacaacccgaataaaaaaaactaatttactatacccgaacccgaaaccggtgtggggtattttcgggttgaacccgacccgaccacacgagttttcagattttcaattttttggtcggtgggtggccgggtttttcgggtttgcgggtctaaatgttcagccctacttgtgaaagttgaactgtattgtattctggaaacagaaatgcaaaatttctatttggagtctaaaatttaaagtcaaagacttaattttataccaaatgtacaatgagttttattctaacttggaccactactactaatctaactctaagtttaatttacctaaagtaagcatat

SEQ ID NO: 251254 - DNA, 936 bp, Cannabis indica
tttgtaattataataaactagattaaaatattatcattattgtaatataatcttaacaactcacagcactttaaaaattataatttaccaaacactcagctcagcttttttccacagttctgctacagctgctttttccaacagcacagctacagctgcttttccccacagcacagctgtgccaaactggcccataatctcctatgctttttccaacaaaagctatgtacaccttctctcttttaggttatgattgatgaaaatagttttcctatagtataagtgcaatacattagaacctataatagaaataccctatatatatatatatatctttttggaaccccataacaataaaaacttgtatgagagaggaaagtcgatgatggaaggattattggcctgaacaccagccacgacttgggtgagagaggcgagggggtcgttggaggctgactaataaagtaatataattaaatattcttattgtttgctattttattgtgtgatgatatataaaatcaatatgatttggtgagatatttaagtgaaaattatatggaatatttgaaaaaatatacataaaataccttaaaattttatgcctaaactaatgtatttcaaaatttaaaaaatatgacaactttataataaaccaaaaaatactcttctcattttcaaacctcaactctctctcttcctctatctctctcgattctctctcaacatctcacccttaccaaaatcgaatctacccctcaccgcctacacagaccgcctacacagacgaccaccgtgagacccgactacctccgagatgttgaagtcttcagcctatttttttttattatttttgtcattgtttttttttttttggtgtgatttatgatgggcaatgtcaagaataaattgaatgattaatgtttattatttgtg

SEQ ID NO: 251255 - DNA, 669 bp, Cannabis indica
tggcgggttataagaagataaaaatgtttttttgtaatgatttttgtatatgttatattaatttattaattttatttaatttgaaaatgattaataagtttttgagttttggtaaatataactacattggccaatgtttgagtgatcattgttgcgtaggtaaaataagggtataacggagttttgtagacaataccttaaaaatgctaacataataatactttaaagggtttttctaccgaaatttgaggttcaaggattaattgcaagtgaattgagagttcggaagatttaaccgcaaatcactctttaataaattatatatataccttgcgagaaccaatatcatccatgaacctagcaaggagagtggaagctgaaacaattttagggtctttggagagccaatttagagtttcatgtgttacaatatcatacattcctacataacttgtggctatcaacaaaacgtaaccacaagaaacatatgaaactctcaaatgctcatccaaccttggcaaatatccttcactcaaccatcgagcttcttcaaaataagctccaataattcttttcatctgtacaattagtaattaaccatgcataattatatatttatattataaaattttgtgaataaggtatatatatgtatatatgaatatatat

SEQ ID NO: 251256 - DNA, 558 bp, Cannabis indica
ttaataacggtagttttttaacaaatgtcataattgattttaggaggaaaaaataaatttttttaaaattttcgcctgcattagtattcacgatatatttataaaatatatattgtagtacaatattatctaataaaattcataatattaatttattttacaggagggtagaatgtaacactaagtttaatttttcaataattatgtgtgacaatattaatttgatagtaattgcttataattattttacttgtgtgatgaaaaggaaatgattggataatttagaaagtttacatttttttagactgatcaatattatggtattattcaaagttcatagtagatatatcatcaagaacttaaatataatgtacagtgatgaatgaatggagtttgaccaaatataatttaatcttatataattaagattacatagtaattaagtagaggttataaatattgtttgcgtgttataactaattgattaaagataagtattgatctttttattcttgttatttttgttgtggagatggatgtgtagagagagaaaatagg

SEQ ID NO: 251257 - DNA, 596 bp, Cannabis indica
ctctcatggtatcagaagacacaacttcatccatggccagaccatctaccagatcacaagatggcattcttccatcaaatcttgagcatcaccagtccgagactctgcctgaagacatctctgcttcgattcctccctcttccgtcgcccctcgtcaatctacaaggcctcgatcgcagcttggtcctgattcatctgctccttctcccgtcgcaccagatccctcttccagatccactcacgatcgaggcaccatcgacgacgtttcgagtccctatttcctcagttctggcgatcatccaggccttgtattggtctcctccatcctcaatggcactaactacaaatcatggaaaagaggcatcaccatggcccttgctgcaaaaaataagacagccttcatcaatggatcactgcctcggccagctactggtaatcatcttaattcttggtctcgaaattgctcggactaaacaagacatatcagtttctcaacgccctttcacccttcaactattgaaggatacggggtacttaggagacaaaccagcttcctctcccacggagtacaacctcaaactcaacaaagataaatg

SEQ ID NO: 251258 - DNA, 1325 bp, Cannabis indica
atataatgcaatataaatagtctatcgctctccttaaccaatatctatatgtatatatacttgtcatatatatatatatatatagaaaaacaaacaaaaaagtaaaattgttattggttttttattgtattagctatcatcactttggtggcagttttgctgatggctctcgtatcattttcattcactttccaaatgtctagctaattaatagcacttggtcatacatatacaatatatacacacatgtatgtatatatttatctcactcttaaaagaatgacaagtggatatacatatagttacattatatatattttggtcaatttagctacatcaaaaacgcaactttggacggttagctaggttaaaagaaaaagtaaacgataaacaatatatatatatatattgatcataaatatatatatatgtatatatcatcgtatcttactattgggattctctcttattaatcaacccaaaaagtacggtgaacttagtaaaccctaatcatattcctcagtaaatacgtggactaatcacaattggacacaatgacatgcatattataatataattaagcaattaactacttacttacttatattaatatatctatagttaattataatcaagttggttaatatcctaattattaagataatatatacataggcaatgcaaatatgaaaagagactatacccttataatattttaaaggtcatcgtcccaaaaaggaatggtccctcaaatatgtatgactgccactaatattgacacgtgttagaataatggtatgggcaaatctaacacgtgttatatcaccaaactcccaccgtatcagatctcaaccctgtctttgcagcccaccaatagtgtgaactctatgtcttataataattataaatttttctatatataataataataatattataattattattataaaagtaatgccatctcttccatccaccaatgctccaatttgaggttttttttttatataagaacaatcaaatcaaatcataactattaattattcaacaacaaaaatcattatgattaattaatttatatactatttataattatatagcaaaaaaccccattatgaaacaaatctttaattgcctagtggcgtaataacacgcttatgccttaaaaaaacaagaaatttaattactactttttatttattcacacccaaaattatatatataaaaattccaacttaataaccataagttggctttgtgtcaggtatattacattatataaaggagttttttttttacttttttacatttttttatgtttatct

SEQ ID NO: 251259 - DNA, 562 bp, Cannabis indica
gttaagttaaaaatcacgttaacacgcctaaactagtagggtgtacaccgaaactacatctcaaccgtcagagatactccaccgttgaccgcaacccagaggcccaagatgaaccaccgtcgattgggaaggctataattttgaaatcaaacaatcgtggtggtggtgctggtttggggtttcacaactccactaaacgagcaccacgcttcagtaaatcttttgataccaaattggatcttgtcccctgcgtcaaaccatggtagtgcgtgtacgtgctctgtagctcctttttgtccaacgaattgtatatacaccaactttgcaaggtgaaatctttaggcgacacgtgtccttagtcctacgagttgggaagcagcagctatacattgtacgatgagtagattccctacctacgaacggtcagatcgtcgagttgtagaggtcagctaatgaaatgtgttgagtataaatccctaggtgggtaaagggtatgccctcacccacgcatgttcgtataagtaccccaatttgttcatattgaaagggtgaataattttac

SEQ ID NO: 251260 - DNA, 971 bp, Cannabis indica
ttttttatctttttctaacaaagatttttccccacatgtgactctccctgatggaaatcaaatatttgttaaaggaattggtacagttcaaataaatccacatcttattctttatgatgtattatttgttccaacctttaacatcaatctattgttcattccaacattcctccttagtgacacggctaacatggtctactttcaccatgatttttggatattacaggctcattctccgagtgtggtgattgggacagctaaaagacttggaaagctatatgttcttctccaagatttcatacctattgcaagttttcattgctctttactttcttgtaataatggagacatggcacaaacgccttggtcatccctccatgtacatttccaatacaatcaataaaaagttcttttcttgttcaaatatttcaaaaaaccagcattgtcacatatgtcatatggccaaataaaaaaaggttgccattcatatcaaaccataattttgttgatgatatatttgaccttattcacatggatatttggggacccttcaatgtcattagcattgaaggatataaatattttctcaccattgttgatgacaaatctcgattacatggacctttatgcttaaaaataaatccgttgtgcaatctatccttcccatgttctatcacatgatttgcacacaatactcaaaacccataaaatttattcgctccgacaatgctaaagaactcaacatgcattctttctatgcctctaaaggtattgttcattatcattcttgtgttgagagaccacaacaaaattctgttgtggaaagaaaacatcaacacattttgaacattgctagagctctttgctttcaatccaatttacccctcccttattggccatatctgtaacgtccccgcttcaagcctccattgggcccttacacccacgtgatgaatggctcttatacacga

SEQ ID NO: 251261 - DNA, 908 bp, Cannabis indica
tagaaccgattctataacaatgtcataataaataaaaacaaataatacgaaataattcaaaccggttataaataaaatagaaccagttatataacatattaataaaaaataatttaaggtagatatggtatgagtgtaattatttagtgggttggaatatgttgaatgaatatttttgtttgagctattttatttaattggtctttgtgtgtgaatttttatcttagttgcttactatgactctgcttcaaaataagcttgagtgtgataagttgaatttacaaaccaacttcaattaagttgcattagttttgtcttaataaatcacacaagttgtcctaaaatgagcattaatattattactacaaactacaagttgttcataaccacaccagcaagcacaccccctctacccacctgatccccttcacccaactgaacgcctccttcaacgccataacttcagccaaaaatgggtcgggttgaccataagttttaaccactaaagcatcaatgaataaaccattatgatcccgagcaattcaacccaaaccgatactattgtcatcctcaaagacagcagcatcacaattaacctttatctcaccaaaacgagatttagcccattgctcacacccggttgtatttggaccagaaactggcgaaacaactctattttccagctgagcattcttccaagaattaagataagtaattgcagcattcactacccattctatcgacaaagccttattactccaaaccaagtcattacgagctccccaaactccccaaagaagcatagcaagcctctcaatacgttccataggctgaaccttacaaacattatcaaaccagctaccaaaaatagcagcttcaccccctccaaccgtccctcccagcatcct

SEQ ID NO: 251262 - DNA, 654 bp, Cannabis indica
cagaacctgccttttacaggtctagccagccatggaggagcactgtacggccagaccctaccaaatgtaggtttgcccaacaaagcacaacaaccaggtgtaagcctagccagcctaggtcaactcccatacttgggaatagtcaaccagggtttgcagggcatggctgatcttcaccatacattttccctgggtatggccagccagtccctatcttttcaaaatctgtagcctccccaaggagggccagtcaaacatgtcggcgtagcaactattccatatgtgcaagcacaattagaccaactcacggacatgatccagggcatagctggcccaaagccttcaaaccttgaacttgatcggtcaagaggatcagcattctcggcatacataaatgccttacccttgccgaagttcaaaattctggtatggaagatgtatactggacaagaggacccgctggctcacatcaagtactttaagatgcagcttgacctccaaaaggtcactggtgatgtgcgttgtcgcatattcccagccacactatcggagacagcccaaccgtggcactttcaactcaccccggggagattcaactcatgggttgagttctcacgagaattctacacacaattctctaatggaatttatttt

SEQ ID NO: 251263 - DNA, 553 bp, Cannabis indica
ttataagttaggtttttatgctttaattttggagttagggttttgtaggttttagagatgtttgattttgtatttggaggatgttttgttgttattgtgagttgttttaagagctaaaatttttctctctcatggtgatttttgtttaagaggttttattcagttcttgtgcttggattatgtttattgtgcccttattaggtactctggaaagttttggatgatttggtgtcaaattgagttgtttagaaggtttttgggagtcttgtactaaactagttgactgattgagtatggacctgtaggaactggaattcctgttcatccataggaaggccccacagaattggttttcgagttaggaaccgctctaccagttagggcagtttaggacaccctagattttcctatttttacgatatttggggtatttccatgttatgcatatatgattacatgtttcacatgcatgtttataaagcctgttagattacattgatagtggtatcgatatatgtattgttgtacttgataccaataaatgtatgtttgg

SEQ ID NO: 251264 - DNA, 1403 bp, Cannabis indica
agaaaaaaaaagaaccaaaaattatacaacgtctcttcctcttctctctctctcttcgaaccaaccataaaccagggaattgattgctgatttctggtgttttcagcaaggaattcaaggggaaatcaagttgagataattcctaggtcaattgttcttagtttttcaagctttggtgttggtttaatattgtgattttgagttataggggctgttagggtttgatttgtgtttgattcaatttgtgagctttgtttaggttgattttaagctctggatactagttttggtgtatggtaatagaattgtgcaaggttgagctttgaaactcaagtttaggtctttaatggcatgtttagtttctgtgtgtttttctgggattttttggttggaatatattatgtataccctatttaggtactctggaaagtttggaggcaattggacaagttttgagcaaattggaggttttttggggaggacagatagaaatcggttaatcagtttaccagtacctgtaaatttggttaaccggttttggcaagttccccgaaaaactggttttctcaattctcgtccatttcagtgccttagttgggtgtttatctgtttcctaggttaatataatccctagagagtataacagagccttgagttgtagactcgggtatcttggattagggtttcggacatgtgatttacccggttttattatgtgattagggcatccatccagcacgacactttccgttcaggtcggccaactcgcttgaatctggaaaggaggtaagaactatatataatgtgtgatatgaaaatgtgaatgtgtgtatgtgttattgtatatgcatgcttgttgtgattcatacactaccaacacttgtatggtagcggtacagagtgcattgataacgtgtatgatgtctgaagagtacatcacggtgttaccagcactagtacggaaaggtacaaggtatgtggtacaacacttaatagtactcaaggtgcgattcataccctacctacactagtacgatggtagtactgaatgtatgtggtacattggtacatggtcgtatcttaggtagaacgttcttactcatctgttaagccttgtaaataggtgtatgggcgcctagatacaagttgatattatatgatatgttatatgcttttcttactgagtctgtcgactcacaattctgcttccatgtgtaggtaaaggaaaggcaaaagctgaacaggagtgagcctgagctgggatgaggttgtacatgtcatggcggtgtgacctagagtgttcggtctcgggacatctgggatttattattttgtagtcggtgtgcgacctggttattttgtataaaagttttaaaatgcaatcccagcacttgtaaatgatt

SEQ ID NO: 251265 - DNA, 639 bp, Cannabis indica
tcaactaattccacatcgacataactaatctaacataatggaaaataataacccaatattttggttattacataaagtcaattcatacattacagattcaatttgcttcaaatcaaacaagggaccagtctagtaaacctgacctgaaatgacttaagaactccacatacagatgataacaacaactaacaattgggtgtggataagctcataagcagcttacactaaaaatctcatatcaccgtttcattttctctcaacttgtttcggccaaagcggtggttgctatcttaaggcgttgaacttcttccctcaatttttcgttcagagctgtaaataagaaatagaaaagagcaacatggatttcattccttagaaaaaccgaaaccatagaagagaatttggtctgaaattgttaatagctagaaccaacaaaaaggaaaaatattcattttccattaaaggcttttcagtcacactctgttggcagtgaatatatagtttcacattgttcatatataatatctgtatttctaaaaaaaaaaagaaaaaatttgacatacactgaaactaattaatatctaaactaaaggcatggaaaaaaaaagcatacctactaaaacacattgcacggtggtt

SEQ ID NO: 251266 - DNA, 1368 bp, Cannabis indica
ggatcttattcgtactctgaaaagggagagtaatttgccttggtgtattgttggggatattaataatgttacgtctcaacaagacaaaaatggaggtaactcatacccgaattggttgattaatggcttttgtgatacgttggaagagtgtggtctacatgacttggatttgaatggctacccttatacgtgggaacggggtagaggaactgattcgtgggttgaggctcggcttgatagagcccttgtttctcatagttggctcgcaaagtttcctttggctaagctctataatatggaggtgtccacttcggaccattgccctcttcatttggtccttatagccgaaacattgcaagtgtcaaggagaagttttcgattcgaaaattcttggttgaaggagcctctatgctttaaagttgtggaagatagttgggagttgtctcatggccttactcttactgagaaaattcgtgactgtggtaatgctcttcttgattggggaagagactacacgggcaattttggcaaaaggattaaagattgtaaagccgagatcaagatgtggaagagaggaagggactctaattctgtagcttgttacaaagctgctgagttaaagttaaataatctctacttgcaaagagaagtcttttggaagcagagaagtaagcagttgtggctgcgtgagggtgatcgcaattccaagtactttcatgccaaagctacatcccgacgacgatctaatttaatccagaggctgaagaattctaatggtgactgggttggttgggacgatggtctttctacggtggtggtggattattttcagcaattattcactcatgttggtggtgatgtttctccagtcatcaattgtgtttcccattcggtcactgaggaccaaaatgctgtattgcttgaggaggtgactcgtaaggaagttaagacggcattgttccaaatgcatccagataagtctccaggacctgacggaatgacaccaggattttatcaaaaattttggcacttgataggtgatgatgtggtgcggctggttcaagcgttctttgctactggtgagttccctttagttttgaatgagactaatattgtgcttatccctaagaagaagtgtcctgaacaaatgggtgatcttcggcctatttctctttgtaatgtcctttataaggttgtttccaagatgattgcaaataggcttaaagttgtattgcctagtgtcatatctacaaaccagagtgcttttttgccagggcggttgatatctgacaacattatgatctcttatgaggtgatgcattatatgaaacgaaagaggaagggtaaagatggttttatggcagttaa

SEQ ID NO: 251267 - DNA, 768 bp, Cannabis indica
caaactttctaaaacttagattcctattttaatgtactcatcagtagcatctgctggtacaccatatgccaaaattcgaaatatagctattactttttgtaaacccgataatctgagtttaccaataccatctcttcgttggacaaagtagtcgtcatgcattgctattgcatcaaaaatatgaaggaataaagaacgacccatccgaaatcgtcgtcgaaacatcgactctggaaattgaggattctttgcaaaatagtcactgaagagattgcgatcagcattttcccgatcacgattgataactatatggccaggaactgagcctcgatgtgatccttggttattttgattttcagtgatgaaaaaattattgttagcggtaacttgacataccacttgcttttctagatcatcgtaataatcattatctgaagatgataaataagatgaactaccaatatcagaattcatttttttttatgaaaactaatatgtattacattttttttttcaaatatgaggtccataatttatagtgtgtacaatcttatcttcattttctaaatcttaaagataagaaacttatcaattttatattggtcactggatttatttgatcaccatctcaaccattggatggtatagtcaaatcaaatccaaaattttactcttcacaaaattttaagttaagatacttgacgaataaatttggaccactggatttatttgatcatcatctcaaccattggatggtatagtcaaatc

SEQ ID NO: 251268 - DNA, 632 bp, Cannabis indica
cgacttcccagttttgttatatcacggtggataaccgtgtattttataacacttttctatggtgtgtccatgcaaattacagtgtgtgcaaaagggcctgccacgttttggtggttgatttttcgaagaatctggttttcatgtactcttttctccttgaaaggcaaaagccatactaccattcgggtctgaagatatattttgtcctcccctttgattttcttcctgtgaaactaagtgaaaaactctattaatttcaggtaaaggatccataacaagaatattacctctgacttgggcataaaaatcagatagccccatgagaaatgacataatgtactccatgttgtaatggtcttgcaatttcttgactccaacacatgagcatccattgcaggtacaactaggtctgaaattggtcaattgttcccaaacggttttgagtctagtgaagtacatgctcacggtttgactttcttccttcaagttcatcaagtcttttctgagattgtagatatgagcaccattttttttgttggaatcttactttgagatcgttccaaatagcagaggtcgattcatcatataaaatgctagataaaatttctgtagaaaccgagttaatgatccaa

SEQ ID NO: 251269 - DNA, 701 bp, Cannabis indica
aaagaacataataatactattaaaaggcacaaagtcaaaaaagactcaaatacaaaggagcgacaaaaattaaacaactaaatccatagggaagcttagccaccgaacacgaaattcatctaaaccaagagccctcttaactaaagaatgagaaacaaagattttagaccttttacaatgaggtaaggaaatactagtaaaagaattccaaacatgagcaacatcatcaagtcaacttgttccttcagctgtcattgttcttatcccggaagtttcttcagcgtatgctttggtcctttattcatgaagcatgcctctcatccagagagttttatcttgaactgacgtggagatattgttacaaagagttcgttaagtttgttaagttgtaactgacttaacaacttagttgttgcagtcaccgactttagaatccatatcacatatctataaataccaccatactcatcatttctgaagtgtgattaagaagtgactttgaggttgaagattgagaacacaaagagatagaacctcattcatctaataccaaattctaacaataaatattagtatttagataaaaaaaaattatatataataataatagcaacatatgaaactaaaataattatagtttggaatagaattcaaaaccattaaccacactacaattttgatgaacaatcctaattatttat

SEQ ID NO: 251270 - DNA, 550 bp, Cannabis indica
aggagtcattatattcggctgcaaactaatgtaaggttctctaactcctatgtgtttaatttcatcattttggagatattgatattttggagaatgttaatgaacatacttgttagtcaatctagatcctgataaaatattcccaacaactggcctcaaagccatggtaatgatttactttcatgtaatatggatttaaaatgatgaatgttttaactttatttatttggatgtgttcatgttggtttatgtgttatttgatgattgtatgtgatgtacaaaacttttctacgaaagtaatttattttcattctgaaaaatattttatttgaattccttgtgaaaaattaagcaattttggtttttattgaacccaattccaataaaaattgaaatagttatgaaggtttaaaaactgggtgcacatggtgttgagatggtgccaatcacaccagcatctcggacaagaaacactcatgcgcgcccagattcaggcattttctgtctgaagcgcacgctaatgcctcttgctaagacacgggatgcgtgc

SEQ ID NO: 251271 - DNA, 735 bp, Cannabis indica
tattttaatgatatattatcaattgtagatacgaaaaataaaaaatatatatatattgaaaaatattttattagatttatggatgtatgtattatttataggataaatactattttagattctgtgttttgtaaaagttgctagttagaccatctattttcttaaatgacaaaattaatcctgtatttttcaaagttgtacaaataggaccctgatctgattttttatcaaaataaaacttaataataatctaatctaaagatgttatgataaaattagtatctgttcgtgtgagaaattgtcttcaagttggttatatttaaaaataaaattgttaaaaattgagttcagaaaatatagggtctattttgtcatttaacaaaatagaaggtttaattggtaacttttgcaaaacacaaggtccaaaataatatttacccttatttatatatgaatgtttgatttgtttatttttctactagctaatcaaatagtattaatatatttttaagtatatttgctaggatgatgctgattttgtaccatgttgcttttttatggctgaatggaaatattcaaaattacaatatgagtgtgatatatgacttgaaagatcttgggaagatatttaaatgcaagttgaatcgcatcaatcagatcaatactgagtgagttatggcaatttactgaaggatattcgccaaccaacgcccaggttgacattctgatgtcaac

SEQ ID NO: 251272 - DNA, 1123 bp, Cannabis indica
taatattattttattatataaaacttatcagtttcactaataagtatatctctatacattatacgttatacatttataaatagaagaagaaccaaaatgaaaccctcctccttcgtcaacaaattctctcttctcttatatccatttttttcgatttctaatccaaaacctagcgatctaagctccggtagtagcaggatagaaaatcattctagcgggaaagattaaggtaagatttaatttcattttaagtgtaaaacaattggtttcgtataggttttgcgaattggaatagttataaaggttctgaccttataagattgttctcgtgtagtcatgagactagttctgatgttttcttgctaacattgaggtgaattttgattaaaaattgagtttagaaatttttataacttaggtccgaacactagtagtgtttgctaattacaggctcgattttagattctattacgtaagtatggtagtatatatggtatatatatgtgccctatgaagtttggggtgatttggacagtttctggtagcgttttggtgagtgcgtaaacttaaaaaatcatatttttgcccctgataaaccggtcaatcagtttgtaaacgggtcaaccggttctggtgaacctggtttaccatttcaggcagccccaagatctcgggaatcgtattttagtcataacttatcactcggttgtccattttggacgttctatataccgttttgaagcatgcaatgagatctaccatatggtgtatgttttaaagccaaaatataagttttattttagtgtatttgaaatacagaatttgataggaacccctaggttgtcctttgcaactgttatgcagtgttttgggataaacacttattagtttattattgttatgacatatggccaagatcattgatcgtactccaagtaggtcgaccaatataactgaactagaacatgaggtaagaaaagtaattatactgcatagtacgttgtatgtaatacaattagtattgttattaattgattaatattgagatatagttaatattgttatataatgaaaagactgattggttgaatattgataatgtgataatattatgcatgtgata

SEQ ID NO: 251273 - DNA, 559 bp, Cannabis indica
aagaagatcgtaaaaaataagagtactgcgatgaattaatttagctaaataaaatcgcgataaataaaaaggatatgagggatttatagtagttcactaccatgtcgcgatagtaatagagttacgtctactttgtttttattaattgaatctgatacactaaagttatattctcaagagtgtgtggaaaatagtacaaaaaagatttctaagtgaaatctgtatcgagacttatgaacacaaggctcatgggagacccaatattcacaaatctgataaagatagtggttgtaaggtccttaagagcaacaaacctataagacactactacaaaaatagatgtacattcaaaggtggatatgagttatcgcgaaattcttaaaacaatcactctagatattaaccttatgcaaaaaaaaaaattgaaatgtttgagaagtttcatgaatttctggcaaatggtaacaataattaaggtaggtggttaaagatcttgcgagctgatgggtggagaaatatttggttatgcagttcaaagatcattaagttgaacttcgaa

SEQ ID NO: 251274 - DNA, 4308 bp, Cannabis indica
aaaaaaatattaatttcgtttacttttgaatgaatggcttagagtccttatttgactttttctctggttagaaagttctatccaattagtttttgtatttgaaagttcgagtctttgtttcattttctagtagggcctacaaggtttgatctttctagtttttgattttgtttgccgccaaaattatccgttgcaggtgtaatctgttgtaattttttaattctagggtttttgattgagttctgcatttatcccctttttcttatttgtgaagtttttgataaaaaacaagaattgggttcttcttgtttttctcactttttccaattttcacatctttggtatacatgtttgaaacaaatttggtagttagagtccgctttctgtagaagaaaagtacgtatttttatatggggaaggttaaccgagcaagtaaacttttgaggcggttacggaaaacagtcgtgtttgaagctatctctttggtctttgtttgtatagaaagaaaatatttttgctttcattcatgtaaataacagaggaaaacacctatatatctttacagaaagtaatctcttttttcttcgttaccgccattgaacaaaatatattaaagatttattttctgggtttattggcatttttgttgtaggtttcgatttgcataggtttggttgatttttgtgaattgctaattgtgatcaagagagatttggtttgatgggtggcaagagttcaaaagaagatagtagttataggacgaggtcattaggttcaagggctagttcttcttcttggaatgagtatcctgaatctacttatgaacaagggattccaaactatgcatctcaacaatactatgcacctcaacaccaaccccaacaatcttatgcgccgccagaatcctttgtgcaaccggagtattatgcttccccgccgccgcccccacctcaggccgccccttctggtgtaagaagattggacaggaggtattcaagaattgctgataactacaattctttggatgaagtgagtataataatatgcattatgtatgctcttttttttatatataacaattctctggatgtgtgttaaatatttaaaaattgctgatagtttgctttagtaggtaacattttgatatcttttgttttgataagaaatagaattaccttttttttttagtttattttcaagtggtaatggattgggtggagtaggaaagtatgaattttttctactaaaaaattgtaatggggtcttagtgattggttgataatatgcacatgggcttatatgtaagtattttctaatgggctgaatgctgatgcttgctcaatgatttgacgcgaaagcgagtcttcttgtcttgatgaaacagttgctataaagtgaagtttatttcttttttgcaggtgactgcggctcttgccaatgctggcctcgagtcttccaatcttattgttggtattgattttacgaagagcaatgagtggacaggttagtctggaacttatcaaatacattaagtatgttttatgatgccttgtacttgttaggggacatgctgagttttgttttgtggataataggtgcgaagtcgttcaacagaaaaagcttgcatcacattggagatactttgaatccctatgaacaagcaatatccattattgggaaaaccttggctgcatttgatgaagataacatgattccttgttttgggtttggagatggtaattttaaaccacttctttgctctgttatgtcctttaagacttctttttttgaaatttctttagagttataaccttgttttgtttggcagcatctacgcatgatcgggatgtgtttagcttttatcctgatgagaggttttgcaacggctttgaggaagtcttgagtcgatacagagaagttgttccccatctaaaacttgcaggttcgatcattactcttttacttcagtatcaggctgtcatttatttaaatacctttaacattttaccaaacctctgtaacacgcttttcctatcattttacgacaggccctacttcatttgcaccagtagttgagatggccatgaccattgtagagcagagtggtggccaataccatgttctagtgataatcgcagatggccaggtaatctttctccatgtggatatgttagtttggttgtacaaatatgacattgacaagacatgtttagaaaacagtctgatgctaacagtgtcttttaacattggtttgttaggtgactagaagtgttaatactgagcacggccagctaagtccccaggagcggaagactgttgaagccattgttgaagctaggtgtgtatggttgatttgatgttgcatcatgattattgattgcatcggttttctgattggctttctcattgcagcaaattccctctttcaataattttagtcggtgttggagatggtccatgggacatgatgaaggaattcgatgataatatccctgctcgggcctttgataattttcaggtgtgtgctctgaattcttcattttatgtttgcaacttctgcatataatcaaaaggcgcattataacgacactatttcctttttcttttatgttttttcagtttgtgaatttcacagaaataatgtcgaagaaagttcccccattacgaaaagagactgaatttgctctgtcagcattaatggaaattcctgctcagtataaagcaacaatggatctcaacttattggggtaactgttttctctctgttttacttcatattctttcatcatacaattttaatagattttgattcatcactatttcgtcttccaggaatctacagggtagatcaccccaaagggttcctctccctcctcctgtatatggcgcgtcatcttttcctagctctaaaccctcttatgctagcttcagcaagcctactgtgcctagcgttccatcttatcccgtagaaagcacctcctccgtcagctcggctccccctgctcccagtacaacttatgataaccaggtgcgttgaatcttgaaactttctataaggatcatatgaactcttaatcttaacaagtaaactataaataatattcaaagccaaaccttatgatgatttgatatgtttaagctgttttaattctgttgaaagaatcaacctttggttagtcttgagttatctttacatgtttttctcgaacaggtttgccccatctgcttaactgatccaaaggacatggccttcggttgtgggcatcaggtacacacacactatggtttattttcatttgtataaactcgaaaaagatgagtgaaaatactaactttgttatgtaaacattcagacgtgttgtgaatgtggaaaagatcttgagacatgcccaatatgtcgaagcacgatcagtacaagaataaaactctactaagcagctgctgcttctgtctgacctgagtcgagcttcttttccttgcccaactggattggtgttttagtctattttctagtaccaacattcttttaattctttacttaaattttgttcagaatgttatgttagtattaggtaaggttgtcattgtacaaaggtgtttgctctgtgttcaattggttttttcacactacaagttttttattgttgatatgatatgtgacttgatcatggaaagaagaagaagaagggtacatacaagctaatgctaaaattccatttatgttaaaacgagtcttgttgataatgtcacttttgaattactacaatttaacatcttctttattctaagtatgaatgaatgaactcacaagtgacaacttagtctaatggttggttgggatactcatactttacttgcatatttgccaatgtggaatgtgaattaatagatttttgacatgattacattaccaatgtaaaggacaccatgttgggtactgcaactgcaagattggcctctatttgcttctgatcatgatcatgaaaaattcaatgccattgaattaaaaatgggtgaatattatcttgaagttttgcataagttactgattagattttttgtcttgataaatgataattaaattttatatttttaaaatggtataaataatactttgtattaaactatttatatattttttttgtcaactgttcatgttaaaaactgtctttaaattgtttatattaaaaaaaatagattaaaattgaactcaaggtattatttttgaatttttttaacaaaggagagttaactttaataaaatataagatctaaaacacattaaaaatagaatggtagttaatagtt

SEQ ID NO: 251275 - DNA, 382 bp, Cannabis indica
aaactttggccatgacagaggttataaagttgtgccatgtgtgtcatggctgtattgaattctaaagaaatttagaagaaggggccccggggatgagaaaggagagaccaatggagaaggattactcattgttaaggaaaaattccccaagagagaatacaagggaattcataactcaaatggctataaaggttattcaagatccaattctagaaactttacaatagggccaagctctaacagagctgcaagaaagcaatgatattactggaagaaggagggcgaccttagttatgattgtttagctttgaaggctaaattgaaaagagaaaatcatcataagtccaaaaggcatggagttgttgatgttgcagatgattat

SEQ ID NO: 251276 - DNA, 861 bp, Cannabis indica
aagaaaaaaaatatatatttttgtgaattttttagcataaaaatgaaaatttccattaggattttaagatttatgggctttaacaaactttggtaaattttaggggttttgggattatgggctttctttaatattgaagttcaaactgattaatactatgttctcctctccactgctatgttcttctcctctccatccacataagcactgaactgtgataattagctagttaaagaactgtacaaactaggaaaggacaaaataaagacttgtgttgtgcttgggaaaagaatgtttcatcatcatggtccaacacaactttgcaaggttgatacagctggctgcatgcaattctatcaaaaagtgaaactcaccaccaatatatatcttacctattggctataaaacggtaagagttgagttaggatctcacaatgactaagtatgagatttgttcttgtggtttaacagatttttcaatttttccgtttgatttaacaattttataagaaaaatgtcagtacttacctactaaaaagacatgtcccaaatataacaatgcaaatatttgaaaaggtgtcacagattattctctttgtctagattatcaattgttgcttcctttcaattgtttgattaaatttccctccaaataatatatattttttccctccaaatactaaattttttccctccataatattttacctacccattttcattagtagcaaagcataaatctgagataacttttacaactttcaccaaccaataattcgtacaattaatattggtagaaaaaactcaacttttcttaccaataaaaaattgtaggtaacaaataggtagataaaagcaaaa

SEQ ID NO: 251277 - DNA, 1228 bp, Cannabis indica
agttggaggtaccttgacgttaattatgttatcccgaaaacttactctggtgacatggacatcaatgtttgacatgtgggaagaaagaaaaaacccaacagttgagtagttctgagtcatggcagtcaacctggaggggtccctagccctgcacacctaagttaactctgggaactccaaaatggatgtttggatcccactaagttatttctaattcactatctttcagtattatgtaccttgaagacatgaagaatttaaatccaaggattggaaattgaaaaatacacgaaacaacaacctataagtaatgcaggtgtccagcacccaagttgacaaacctactagggttttggtttctggtccgtcttagtgaaaatgagccaaactttttactgggacatgaattagatctgtcacaaatatatttgaggtaacgaaatcagaatcgaagtacttttagttttgagcacccgaaacaccaggcatcgagtgctcaagttgacatattgtcaacctagggcagttccaaccacaatactatagaactatctcgagcaatttcttcgtgtttattcaaaacgaagaaacaagtgcttttggaagagaaatggatcaacctggatgccaaagcggggacctagagcataggttgacactttgtcaacctggcccatttccaaggagtttctctaagaactcttttggctatattcttcgttttcatcaaagattaagatacacctggttcgaagaatcaaacagaatcatttggtggctagaaactagacccaacgtgtaatgaccgcatacttaggatatagattagtaagacaattaatactaattaattatattttatgattaaatgtaaatattttgttatatgggccatatttttaagaaatagacattacagttataatttctctattcgaaagattttattaaactctaagtgtattatttatgttgtgtgtgtaatttattgtctttgttatctttctcggtaacaatagaaatgtgacggtttaatcattaaaatcacacgggtttggtttagaatctttaggtaccctgtgttttattaaaatgtcagtttggtaccttttattattaataatactcagttggtatcctctattataaaaaagagtaaaaaatggtaccttttgttaaaatttgatgaataatttttatattatgactagattgcccttttatgaat

SEQ ID NO: 251278 - DNA, 155 bp, Cannabis indica
atattgtcactattttttgagcccactccatcagggccattagaacccacctcatttgtccttcttcttttagtatcaattacaagcaaaggagaagcctcactcccacgtgaataggatcagcaacatcattaattccttgaatatttgacttg

SEQ ID NO: 251279 - DNA, 563 bp, Cannabis indica
ttagggtataaaacccaacatgttgaacctttatttcaacaaatcttggaatgtgaagatggaacatcttaatgcacaattcttgaactgtgagattgccaaggacgtttacaagctagggttaaaatgaaggctaaaatgaaagcttatgtattatattcagaaagacatggttaaaatgaaggctaagttaaaaaagaaggaagtcactgagtcggcggggtacacaatttatggctacaacaatacaatattgggcctacgaggcaattttagaagttcgaaatgggatacaagattccagaatgcttagctggagcagtaaggatattgatggaagttatgacattccaaagaaaatacttgcttcaatattttctaaaagggtatgattttttctattattattgtattatttatactttattgatatcattgataagttgtatattttctctctgttgtattctgttttttttatttatgataggtttgcgaaatgattctaacatgtttttttttcaacggcaactgattgttttaagagtgttactttctcgctc

SEQ ID NO: 251280 - DNA, 680 bp, Cannabis indica
cgcctaaggtagttagggtgttacaatatatatttaatttcattaattttattattactaaacagaatatgaccacacgtgaagcgcgatttgttttctagttaagagaaaaatagataaaaatattgaagcatggtctataaataggtaagaaagaacaaaaattatatatataattaaaacaaatcataagcatatatacatttaaaataaattataattataattatataattaaaacataatatcaacggttataaatcataaattaaagttatcattttttttaaaaaaaaaaacatatatatatttatacatatatataaagtttgatttaaaataattttttcgaaaaacaaaatactaaaaataaatatataaagagtgatagaaatatatataatgaagaataggggtatcatatgagaatgaggaaaaaaagttacaatattcttttcatcacttttcatgaatttatcaataaaaaattacttttttacatcaaataatttatactaatgagtaaatcatgaataattcgaagatatcgatgatagtaaagttgtcaacataaaaaagaagtttatatgtcttcaaattataaaaaaatatttaaaatcgaggtcttactatttatgttactatcaagatgtcatgtatacatcaaaaattaatagtta

SEQ ID NO: 251281 - DNA, 1303 bp, Cannabis indica
aatggctataaataatttcatgattaaacataaacaactgctagtttccaaattaactaagcgggctttacaatatatttatatatttatataaaattgtgatagttgggacaaaaacagatgatcatgcaaaccaaagaccaacaaagatggtgttaatcggtgatgaacgatgctgttatgatagattttggaaagcgggcaatgaataataattttagagagtaatattgaccagcaaacgacaaccaacgactacaaacaataaacaatgatgtgattgatagatttatattttctaattttagttttatttttttattttcctttttatgttttctattcatttatttttccagtttagtttattgttattaactatttacttacttcaattttattatcaataattaatatattaatattaatatctatctatatctatatataaaggaaagtattatagaggttagatgacactttacattttatttcatcaaccttttctattttctcaaaattttatatttttatttcttttgtattcataaaaattattataattagtgataataaatattcaattacaacctttcaatttattttaatgtaattagtgataaatatttaactacaacctttcaacttattcataattttacaacctttcaactcattcataactcttttatttattgcattttatcacaatatatgtagatatatatttcctcttttatgcaatatatatattttgatttgtgctctattatgtattgtttttccccaaatctttgctaggcaacttatatgtaatattttaagtgtataaatatatttatggaaaattcacattccaataaaaataaaattaagatttataaaaaatgtgatgctttcatttttataccaaagtgtaccgttttgggtaccgttttcaatttaattcatttttttaaaaaaaggaaaaaaaattgaaaaagctgactgacgtgtgtgatgtgtgctgacgtcatgatatcacgtccttcacgtcttctgttgttgcaggcttcaactgttcacgcgcccaattttttgcagttgtaattcaaattgcagtcgatttttaaaggtttataatcattattttcttttatttttatattttattttacgatttctatagttttctaggtgtttgtataaataggtaaagtttgtttataaatatacatttttcagttttatttgctctgttttccttttatgcagagtattacgggttagggtttcatcttcttggggtggtttattttcgtgt

SEQ ID NO: 251282 - DNA, 1422 bp, Cannabis indica
tcttaaaccaaacacaggattactttcagcataatccaatcttgtccagtccagtccaatccttttcagtccaattcagtccaatcctgcgtaccaaacgggcccatatagtaaaaatataacaatcaagtagaaataaaaattgactatattcatatatgtatattagaactatatgggaaagaataaaggtttgtgaggcaacaaaccttggagagttcttttatccaagaaaactttgtcttttttattggtcccttcagaagatgcatcaatttgttattaagtatttgacacgaaaaataaaagaaaaattaacgcataaattctaacaataataaaaagaatgagaaattgctataaataaaataaaataaaagatataagcacttgaatgaggaaagataaataatttttcaagtatgataacaaaagaaaaaaaaaaaattggacccattccatttatcacataaaaaatatgaaaatataaaaatttaaaccttagcaatatattgataagaaagctaagaaacaccatatacaatacaaccaacataaaataaataataataaaaaagaataaaatatcatgatattaatcatcaataatagaaaaaaataaacgtacaaattaagaaataagaacaaataaaaatacctgtaaaagactttcattgtcttattgtcttgtttatataaagaaatcatagtttttgtcttgcacattggcttcttgtagaaaatgaaacatagaaaatactttagtgaaatagatatatataaaatttgagagtctttttaagaaatgaataatcttcttcatctttaaatattgagataattaggagttacaaaatagaagcctaaaagatatttgatggaaattaatgaactatggggagtggaagagtttttttaattagttaaaagaaatagaaaaaatttataaacattcatcaataattttttaatttttaatccttaattagttattaattaatagttaaatgggataataaaatttttaattattgaaatgaaagaaaaattgagaaaattaaaaattgggaaagaaactcattgaagttgccacatcaaactctataaaacactcctttatatatattgattgattgatattgattattaaaaaattatttatcaagatgtaacaaacattgttaaatataatataaatattatatagacatttatataataaataagatattagacttaattaagtttaattttaaatttagactaattaggtttaattatgtcaaatatatatagaatttttagggatttcttttccggaaggttaaagtatttaagtttgcaattccatactaaaaaataaaagagattgcaaatgcaaattagtttttgcattgtaaaaatgaaattatagaaatagag

SEQ ID NO: 251283 - DNA, 671 bp, Cannabis indica
ttttgaatggagaattgagagagcacgtctatatgtctcaacctaaaagattcaaggaaaatagaaatgaaaatttggtttgtaaattgaaatgatcaatttataatttcaaactggcatctcgctaatggtacttgaagtttgataaggttgtgatattgtttagttttatagagaataagtttaaccaatgtatttatataaagatcagtaggagtcgttatatctttttattttttacgtggatgccattttacttgacagtagtgatttttcattactaaatgagaccaaaaaaatttttatctaccaactttgatataaaggatcttggagaggcatcattttgttttggggagtgagatttatcatgacaagaatcaaaaagttcttggcttatctcaagaagcttacattaatcgtgtcctcaaaaggttcaacatgaatttgtgtaaggctatttctgttcctattctgaaaggggacatttagtaacagcaatgccctaagaacgacttggaaatgtatgcaatgaagaacatccaatatgcaagtagagtaagaatttttacgtatgcttaagtttgtactagacctgacattacttttgtagtcaatattcttaggagatatatatctgatcttgggcatgatcattgagttgcaaccaa

SEQ ID NO: 251284 - DNA, 511 bp, Cannabis indica
aaaaaaaaaaaaaattaatccaatttttttcatattcgtgtacgttataattatttaagatattctacaaaattttaaaaaaatcgaaataatttacaatataaaaagtagtattcaaacaatttattttacacgtgtataaaataaatagtcatacgtacaacacactatttgaaccttgttttcaaggtgttaaatttttttaaatttcttaaaattttacagaatgtcttaaataattagacaccaaaacagatagaagtgcatctatgtattccttttaagagaatgcattataaaattttctaataattttttacatatgtaataaaaattaaaattattaaaatatttttaacttcattttaaagaaaattaaattaaaaatattttaacttaacattaaataacttaatatatattttacatgccaaacgtgtcaaatttgtgttaaacgaaacatattggtgccgtttggtaacactttcgctttttaattttttaatcacaa

SEQ ID NO: 251285 - DNA, 738 bp, Cannabis indica
ttttttttcgacaaatataatacaatttttacgtatcctattggagatgttcttgcaaacttatatataataataataaaaaaaaagtctagtattcaaaattaataaagatatgtagattttaattacaaaaatatttagggacacattaaggtgtcaaacactacaaaatgtagcataccgttataagtgcatttcaatatcaactcatgcaaattttaattcaataaatgatttagaaaactgtaaaaaattattggatactccatagatatagtattgagcaccttaaagtgccacttaatacaaaaaattatttactaaaaaaaattaaacaaaaatcattcataataaataaagaaaaagaaaaaaagaaaaaagataatagagactaataaaaatatatacatattaataacaataatattaaaaggcacatttaagtgtcaagtaccacaaaagacagcatactgttattggtgcactttaatatcactttttgcaaattttagtttaataaatgatttagaaaactattaatcaattagtatatatgcgaatcagtgtagtattaaaattttaaggtatcatataatgatacaaaattgtgacagtcagtagtcccgtgatccgtaaggggaaataccgggtaagctgtacaatctcacaccgcctggggaaggtcaagtgggatgatctaagactgtgtaggtatgggactacacagttgaagaagac

SEQ ID NO: 251286 - DNA, 670 bp, Cannabis indica
atttgacctacgctaagtaggttttgatcaatgttgggcaccaagagtccatcattgatgtatctcttgccttttttagtgtcaatggcaatggtgcctttgccgactgcttccatgatgtcaccattactgattttgactttagtcttggatctatcaagactacaaatgatgctttcatttttcgtcatgtggttactgcaaccactatcaagataacattaacaagtatctttttcttcttttgatgcagcttggcagacatagaagagattactttcatcatttttctcttcacaaaaattaacttgatgggatttctttaaatgataagttttctcagtgtggcaaaattttttacaatttcggcactgtggttttcctttaaaccagcagtctttctccaactgactttttcatttacaaatgccatatggaggatacttgtcgttattttctttttgtttttcttctgtccttttcccatcaggttttggtttttgagatcgcgaattgattttaaactgaaaggcattttcagcttcactttccttatgaccttttcatctactttcatatgcttcaagagagcctataagtttagttggtgatagagtttctaaatctttatagtttctgtctatcaccgaaactattgaatcatattttt

SEQ ID NO: 251287 - DNA, 545 bp, Cannabis indica
atggagctgggtgaggtcaacaacaagctttttacaactaagaagtaaatagtcgagttgactaaggacctcgaggcttctgactagctcgaagttaccatcggcatcctatcgacagaattgaatagccttcaagaggaaatgggagttcttcggatcatctttcgtcagctcgaagcagagaagaagactaaggaggaggagcttagtgctgaggtcgagaagcataaatcagaggtggcgaagctggaagagaaagtacatcccttagagatagtgggtctcaaaattttttatgactttcggaaagctaacgcttaggcaaatttcgattaccttggcaaggccaaagacatgtatctcgagtactatgcttctcgagtggcttatggtgaacctgaggcaactactttcacttctggccagaatgctgatgtaccttccgctcaaacaacagatcctccagcccctaccagcccaaaaaacctgaacaaagaacctgggactccagctgtttaaatacatctctttttatctttcttttt

SEQ ID NO: 251288 - DNA, 1170 bp, Cannabis indica
gcgagttgggtggaggaggtggaaaaaatagattttcaagcttcagctaaggatgcttggagtaaaatcaatgtgaattaggtaagaaccctttcttcacgattagattttgccaaacctttgagagttggagatcaagttgttgctaattggatttagaggaagttgaaattgaggcttcttactagaaatcatcgattgtttgtatagttttgggagcaaatcccctattcagagtgttttaagggtttattaagagaatttaggggaatttaggagtggaaaagattgtgaggatacattctagttttacttttgtaagctttagaaaagaagttactagagatgtaatccttgagactgtagtgattcactttgataagaaaccagtggttctaagaccatggacaactaatatggatacgatgcaaatggtgaggtctgtctctgtttaggttaggcttaatggattaaggctcaaatattgggggaagaataatttgagtgctttagtgagcactataaaaaacctatcatggtggacaaagtcactctagaaaggccaatgatcaaatatgctagagttttggttgatgttgaagttcaaataatcctccaaagtttattacctacattaacgagaggaaacaactcgttgagcagtaggctgaatacgagtggcttccatccaagtgttcaggttgtgccttattgggtcacacggtagctaactataataaagggaaacatttagtttggaaaaagaaaccaaagggggaaaagaagggtaccacaagaggtgataatctagacccagctgtagaaaatagttcagtgcagatacaggaggctgttgttcttccattaggtttgcaaactaaggatttgtagaattctagaggatgttgttcaagatcagggaaggggtgctgataagaatgtgcctagcatagaggtgtagtcaagaaacatgtctatgttcattagttctgaaatagggaagtggattattgaacgaaggaagggttctaaagttgttatggatactcgaccaaaagctaatactagcaatggtcatgaggttcttaatgatgttgaggatggggtttgtaataaccaaaatattcaggtattattttttttatgctagtctaaatatctcgatgtgga

SEQ ID NO: 251289 - DNA, 611 bp, Cannabis indica
aaagtaattttagaataatattgatgtaatacataggatagatattgatgagtgctaaggataaatatagtaagctaaagaagaaaaaagaaatacaaaaaaaggtctattgggatttaaacttgtgaccaaaaggatacattgataagtctttaccaatataccaaaacacaatctttgtataaattagctactatgattttatttaaatattagaagagatataaaaagaaattagtattacaattttcattgtggtagaattaacaaatacattataaatattgattctaatacttaacataaaaattctattagtttattttaagtaaaataacaaaataaaacataaaaaattgggtgaaagaggtgcataacatgaatttattatacaaacagcattttttgaaaaattggttggccaaactgccttagactgtttgggatgcgtagaaagcgaaaaaataaaaaagttaacaaaatgcctcaaatggacaactggatcaaaagttattgatgttcaaagttttcaagaaatttcatgcaaagaacaacacttcctctgattttttccatttattctggtccttaaattattgtttcattttatt

SEQ ID NO: 251290 - DNA, 557 bp, Cannabis indica
ctttgtctaataatcttctttttcgttgaacgagacagaaatttgaatcaatgtttagggcatgaatattacagaaggatcgataccgaccatgttctcgtgcgaccaagaaaaactatctaggttttctcttagaaattttattaaagctaattttactccgagaaacaaacttttgccaattttgagtttcctgttcgggacatttgggttgatttctatctcttccaattcttccactggccctacatttgtatttggttccccaagttagggatccacatcctcgtccctaccttcggtgacttcctattgggcaatatttttctctttacctgaactctggccagaggaatttttctttttggccttagtcaggtcaagttatagcattcctgtgcaatttgttgattccctttgaagcaccctaccccattctttgttgggaacataatgcatgaatacaaaattgatgtgatagctttcaggtcatataaggatggtcggcctaacatgacgttaaaagctaatggcacatcaattatcagaaattgtgc

SEQ ID NO: 251291 - DNA, 895 bp, Cannabis indica
cataattaatcatggcttcgtcttgtccgaatttggaggtatagacaaggtcgtgaagatcctgcaggacctgtctgctgaaaggctggcgttccaggaggaggttgagcgaaaggaggctctcgctaaggcaaagctcgaggaggaggctaaacaaaggaaagcctaggtggaagcgatgctccgagaggaggtcctttggagggataggctggaggcgaggcaccgggaggcgctgagagcggagggtgaggctaccgccaaggccaaacgcgagcttcggggggccagagaggccttagacgagatggccgccaaggtgaggtccttagaggaattgcaccaggcagacttggagtccagggctaacctagccgtggagattaaggagctcaaggactttagagaccaagccttaaagaaggctaagagagatgagctcctctcccctgtttcctgcaagcgttgtatcaagcactttgatgatggtgtctacatggcctggttggtaaatggccagaatatcaagcttgacttctacccaaaacctgtggagatgattgccaaatttcgggagaagaagaagaaacttgacgccatgcttgaggcgcgcattggtcctcgccttcctcctcgcattgattaggctgcttgaaaccagctcacttcaccaaactttatcttatttttttttatttacagctatttttcttttatttcagacaatctttactagctgcctttattttctaaggggagacaatggttaaggcctatccccgggccctttgtatgtatatattattttttttacctgtccttggggcaggattcttatatggatgatctatctcttttttttcgatgcatgctctttctttcggacctgcccttt

SEQ ID NO: 251292 - DNA, 549 bp, Cannabis indica
aaatgtgtattgcagcctggttgtcacaatgaatgactgttggttgggaagaacaaatgccaaaatcagagaggatgttgtgtaaccataggatttcgcatgtagtgttggcaagagaccggtactcagcttcagcggatgatttggagaccgtggactgcttcttggacttccaggagatgagagacgggccaaggaaaatacaaaaaccagtgattgaacgccttgtatcaggacatgagccccagtctgcgtccgagaaagcctggagatgaagcaaacgatcgagaggaagttgttgctgatagcttgagtgaaacatgagtccctgacctggagtacctttaaggtactgaacaatcctgtatgctgctttaagatgtggttgacgcggagcactgagatactgactaagtcgattgacagcgtagctaatgtcgggtcttgtaattgttaagaacaataattttccaatgaggctgcgatatgaagtagcatcattgacagggggaccgacatccttacaaagagaaatattagcatccattg

SEQ ID NO: 251293 - DNA, 743 bp, Cannabis indica
tcacgtcagtgtaaatcctgtgcattgataaattgtgagactatatagtttgaagcatataatcatgcttattttctaatgtgtagacaacaatataatcatgaataactatatgttcggaatttaatagaatttatatattaaacatataatcatgaaaataatcatatgaaccatacatcataaaatgatttttgatcttttagtaattagtaaatctaattatgttaaaataagttttatttagggcataaagtcctaacatttaatccagctcattctctcctatttttgaggatgtgtggtgtcttcaagttgatgcctatgttgtcaactcgaaagctcgttttgtgattttctataagaattttcaggtattggatgaggcttgggttgttgttggcttttctgtctctggtgtgcttgaaggtaagctgcgtggtatatagctttggctttgcaggtggctcgggacaaaggtactactaatcttcgtactgaaatagactcaaaggtggttgctttggccttcaaagttgggtcgttaccttttggtagtgtgcctttcctcttttctcttgtataaatcttttttatttttttgagtttgttgaagtgtctttgtgttgcggtctgctaaccgttttgtagatactctagctgggtgggttagaattgctaaggctaacgttgttggttgtctaagaaaagtagctccttttgtagtcactagtttgagttag

SEQ ID NO: 251294 - DNA, 562 bp, Cannabis indica
aaatcatgtcccttagaactttgatatctaagtaaatcatgcccttcaatctttacaaaagtataaaattgtgccccccaaaagtataaaatcaggggaaatttttaacgtcctaaaatgttcagggagcatgatttagtacatatcaaagttcagaggccaaaaatccaaattagccttaaaaaaatgataagcctggagaaggactagaggctagaaatgagtttctaacaaagacgatcatgaaaataacaattcgtttccacatatccaagcacccttctaccgtaagctcctcacaatttagctttgtcgatccatacaccgacatcgttgttgaagtacggatttccgacatgcgacctctgaattttacctgtcgctaggaagaaccgaccgaacagttcaaacaacaatcttttaagctcttcgacggttattatatttctaccgttgccagtgcaagtcgacaaaactactagtttcttatattatattagcaatttcttgtaatttaagagtttgtgagatttttaagtctgaattaaaatatatatatata

SEQ ID NO: 251295 - DNA, 600 bp, Cannabis indica
aatcatatgttggttatggaaataccatggtttttggacagaactcttctaagatctccttcacagccaaaggagaccatataagcatcaaattcgtaatttgatatggtcacatcaaatctttgtttccattgagtagtgatgaaattgttgaattcctttgggttgtagccttttttggaaaaaaatcctgcaaataagtcggtgggaaacaaggcatggcggaggaatagcaatgttagtagattgataacttcacgctttctgactgagagtgcattggacaaatcgggatgaaaggaatccatgaagaaaactaagaaattgaaaaagaactgaaggaaagtaatggagagataaagaaaaggcaggtgatagtgaatagaaataatgaaataaagattgagaagcagttatctacggtggagtatggtggctagagaagttatggacggtggatagagaagttatgggtgatgggagtggaaataaactgtcaagaaacagttaaaaagatgaaagagaaacaactgccacagagcaaacatcaatggcagacaatgcttaatttcctttattttattgggtgactattcaatg

SEQ ID NO: 251296 - DNA, 920 bp, Cannabis indica
agaatcctcaaagggtcatgactacaaagatgaattttaatgctcaatctgtcactgatcacataatgtatcacatagaattatcagtagacatttatggctgtaattcatgttaattcaccacttttacttgatctttttgaccaagtgaaatctgactcaacctaaggagtgatccaaaaggtcattatgatgttagaatctgatcctgttctattggaatagtgacatgaactgaaaccattgctcacaggtaaatcttgtagattggctgaaattgatggtagggagccggcgctcagaagaagtggtagacccaaacattgaggtaagaccatcaacaagagccctaaagcgagcacttttgactgcgttaaggtgtgttgatccagattctgaaaaaagaccgaagatgggccaagttgttcgaatgctcgagtcagaggaatatcctatatcaagagaggtatggcacattttcgtattcaacttcataaatcccatatctgaatcttataacttttgaccaaaagctttttgtaacaaatctagcttgtttcatttcaggatcgaaggcaccgtagagcccaagcgggcagcatggagattgattcgcaaaaagaattttcagatactgataggagtgaaaatccaggttcaagatcaggtagcagaagctaccaaaggtcatgagttccattaccaactacaagtcatatgatgagtatctattatctgatgggcaacacttaatttaaaattcttgaaattctttcaactcttttaatttcttgggcttgtattgtatatctatcttgagccaatatatttgccattttggcatttgaggggccatggttaggggactggttggtttgatcttttttggctcttttttttggtttttgctatcttaattg

SEQ ID NO: 251297 - DNA, 1019 bp, Cannabis indica
ctaccatagcttgctagaaacaataattaagaagacattatttcttgttgtggagtaaagatcatataagattttcaaccaggcggcctcttgattggaaggtcatgtctcatgtgcatatatcattgagagttttggagattatgaaaacaattgttgtgcttataataactctattatgaaaaagctgttaatgctatcgcagatagcatggcaaaaataggtgtacaattagtgaagctatgacctctacatagaaggggtagaagggaggggaaacccctttgtggttcctaattttcattagccttaatgattatcagttgtaatctttccaaataaaaaatgaggataataatagagatacttatttgtccaagtaatagtattaataataataacagacacgtcaaaaaaaatattaacagagagatgtaagttttaaaatataatattatttgaaaatgacttcaaaatataataataattaataaacaatcttgttctattcgctagctctatatatatgttcaattcttattctgtaaatatcacaattctcaacatcaaaatatacattaagctgaatcttaacccattttagaaaaaaatgttgaatcataacaaaagataaaccagataatttaaaaaaaaacacaaaagttacaaaaaaaaaaaatttttttacaaaaattcggtatgtaaagaatttttagcatttttatgatttttttagattttatttacataaaatgtaatttttagtatatttttatgtggtaatattgttattttgttgttaatctttttgttatttgtatattaatttttttttatgttgttttgatattgttttcttgttactttcatttatttttttatattttcataaaatattgtaaaaatatatataaaaaaaatatttgaaggtaaaatgtaatatttttataaaaagtggtattttatgtaaattgtcaaaagaaaaagccattatccgttagacttttacaaaagaagag

SEQ ID NO: 251298 - DNA, 1231 bp, Cannabis indica
taatatttaaatatcttattaatttttttattttttcttaaaaaatattttatattttatatttttaatattaacattccacatcaacctaaaatttcttatatagtttacatgtgataaaaatttaatttaaaaatattataattttatttttatcaaatacatataaatttatacttttgagaaaaaataattaaaattatataaaaaaaattatataacacaagattttataaatttgtgattataataaactagattataatattataattatcattattaatataatagaatttaattactcacaacactttaaaatttataatttaccaaacactctactcaggattttctatagttctgctgcaacttatttttttggtcacaacacagctataattacttttactcatcacacagttattacttttactcatcacacagttgtgcccaactgacccatatatatatgcgatttaaaagttctagctttgataaatacatataaaggttttattttttaaggaaaaaaatatatataagggttaataacattttagattatgtgtttaacaaaaactactaattatattctattctgttaaatgaaaaaatatttagattattcatttttttaaaattaaatacaaaataggaccatgagctcaattttcgataatttttttattataatgaataaacttattacaaatttaagttgacaaaactctataattaagaagagaacaacaaatcttattagttttttttttttttgtaactaagagaacaaatcttatttgttcttaatattattacatttccaactattaattcaaaattacatatgagacataacaagaaaaacaaaattaaaacatctaattatattgcatcacatcttcacgtcttctacctcccattcgctttcaaacttttcttttttttttttatctgcagaaaaaagaaaatggtactataaaaaatgataatggtggcagccatcataccacatacggtaccaatatatacaaatatatacattaatgactataaataataaagatatagctatcaaaatctgtttgttaggaattaaaaaccaatcacacatttgaaaaacaaaacaaaatgattaaataatataagcacaaatgtaaaagcttgaagattgacatgtaagcatatatggttatataatacaaatagattccacaattgatattat

SEQ ID NO: 251299 - DNA, 614 bp, Cannabis indica
aaatgttcgatttgtaaattctcctgtaggttccagggtattctacattgaggcgaaatcttctacttctttctcctcggtatgattcttaaatcgactttcattcaaataaaccttaagtgatggggttttagtttaacttattgacttgtattggattgagttttttcaatgtattgcagattttaggcttctgaagtattctttctaataattctgaaagttttggtttgtttctgttttgatttcggtaattataattagaaattttgggatatttatttatatttagagttggggtttggctaccgagaaaattttggatagaaaagaaaggagctgtagaatttgagattaattcgagtaattgaggaacactggaagtgcaaatatatggtgttttggggcttatgaaattagttggtattttaaacagatcgagtttgttagatgtgagctgatgaatagttttacgaatctttatgactccacttgcagctaacgaattacagatttgtagtatcttattgtaaagaaacaatgagaccgagcatgaatcttgtgacttttattttttcaacctcaattattgaaaccaaaagatattcttacac

SEQ ID NO: 251300 - DNA, 3948 bp, Cannabis indica
aaaaaaattgtaataaatgatttcagtatagatacatcaaaataaatagaaaaaacttttatttacacccttacttaaaaaaaaagaacaaaaagaaacttatatcttacatacaaatcaaaaatttactaacaataacaaagaaatttcttccaactaaactaactacattatttctgagtaaatagaatttgaaatttctcatgtgttaaattatggtgtaaaccgcaaaggaaaaatttaactttagaattgcacacaattaatcgacaataattcaatgttaaaattagaattgatcatatatcttgctaacataccccaaaataaagtttataaaaattttacatatattaggcataccaaaatgtagttgtttattaatacattttgatataagctatagtgttgagctaaattacaaaatctattatataactcacatgatagtttgcagtgttttctttgattggagtcctcttaaaaatgtaagtaaggataagtttatgctaatatagtttgtagttgtttgtagtttgtaccataaattatgtgtgaatatttaggtgatgtttaataatatttttattttttattttttttaaaagaatataaatatgttctataattaattttatttgtaaattaaaaaataaaaaataaaattatgttctgtgaattttatttttatatttatttttactttttaatttatttaagttgtgtctggggtttaggtttatttaattatttatagaattaatatctttgcacatttttttttttgcacaattatgtgaaaaagtcccatatagaaaactttttcattttccttttttagaagaaatataagtattgataggcttataactttttttattttaccattgctttttttttattttctgattttttctaataaaaagagtaagttactaatacattatataaattcaatgaataatgatagccgttaactaatcatacttttattaatcaacgattcaaaatactcctgtgtttgtataacggtacggtaataagtaatttgacctgttattttttttaatatatatatatttatttgttttttttttaataaactgtaatagcttaagaaagaagagagaagggagaaagtgttaggacaatacggctgtccatccatagaagctgaaagaagacaattccgatcatctgctttgtcagtagtgtctgtaatcttttattttctcacactttcatgttagccaaacagaaaaataaaagactttcttttattttatttttgtctgtaaaattaatttaattttttgttttttgttttttgtattgatttcttttgatgatagcttcaattctgatgagtccgcggccaccgtacgcttgattttccacaacgggcggctggggcctatcttaaatgtctatcgttgagggccctcctactcttgccgccgccgatcataatcaccaccaccccaaccacaatcacaaccgtgtagcgtcgaaacggaagttggacgatatggtgggcccaacttcgaagacgacgatgatacgaaggggaaggagacgtcgttttctcggacctagtttctgtaagaatgagaagagatgagcgtaacgccttccattcctcgggggactgtggagccggtggcggtggcggtggcggtggtggcggtccatcctctgagcaactcgattcgagggtttctgatgcccaatcggcttcctcatcttcctatggtcttagctcaactcgctttgggttgactcgctccccttctaggttgcaattcttcatcaggatgatctccgagggcaagaatttggtaataactgccgatgccgacgatacagtgaaatcgctacacgatcggattctgtccatcactgggattcctctcagcgaccagagactaatttacagagggaagctgcttcagtgggagcagtcactggccgagtgttcgattcaaaacgacgccggattgcaactcgtgggtcgcatgcgcagcacggttcatccccacgcttggcaactgattgacgacatgatttcgatggtttgtcggctctgtagaggggaaatgattccttcagcactgaaagacatcaagaactgtatgaacgagtacttcaacatgactggcaaggaaggccaacgcgacgccggtgaacacctcaagatattcatgtcttcttcggcacctgcggctttggttatgctctatgcttcgtccataaagggtaataaagagtatggtgacaattccattaagcttttcttaactttgattcgtacttcattggcaaaagcattgcataatcaatgtgcacctatattgttagagttttgtaagttgcttaggagagttggacaagaggaccctttgtatgtcgcttgcagaagtgctttagggtccgttgttggagaattttgttacttcaaatactgggtctgtatgcgcggacaatgttggtgaattgattggggtacaagatcttttcccttttgtcagtgagctggctgacagattgtgggtagatttgtgttcaaatatggagttgccaaactctggaccgatggtaagtgatgctcgtgattttagcgcgttcttgctccccctgcgcactgtgataggccagaaagtcaatttcaatggtaaaatttgtgaaggggattttaaacatccgttgtatggacaagagattaagtatctaagggatatgtttaacaagttgctaagtgggatggacgagtgtcttttcggaatggaagagcatttagctgagactgatggtgatgcaagtcttactagatggtctcagtgtctttccattttgaaggatctatatagcatttctgaattatatgatggtgctgaagaagaattttggatagtgttgatgcaaagaaagtattcacttcgagcgctaatcatcaaatatgcaaagagaactgatgatcatcagtggattcttagtcacaaggatgtgcttgattttgaatcaagaaggcatttggctatgatgatgttccccgaggtaaaagaagattacgaggaactgcatgagatgctcattgacagatctcaactgttggcagaatctttcgagtatatattaaagactgaacctcagtcattacatggaggtctgttcatggaattcaaaaatgaggaagccacaggtccaggtgtactgagggagtggttctttttagtatgccaagctatatttaatccagaaaatgcactatttgtagcttgccccaatgattgtagaaggttttatcctaatcctggtgagcttcatatgcctttcaagggattattgctcccaaaaactttcagctcttccttttaatatatttatttctttatgtatgctatgttaaaaaatactatcttgtttgcaaagggatgactaaatcttagatgtcattattacattcaatctgttagaggcagatgccatatgggtgtgtgtctctgacagtagagaagagactggtgagaggagcatttttgtgtttaaagttcacgttaaatgataatcagaatgcttttgattcctagttctttggttggtttgctgaaatattttagcacatttcatttttgactgtaagagattaaagtaatgtggaagtcttgataagttctcctcttgccatgatagctagtgccataataaggatggtgaaaaaattataagataatgactcatgccttgtcagtaaatatattggtcctgctgtatgaatgctgtgtaagaaaattagaacaacctatttgcaggaaagtgaacttcaattatatttcagggacatttgtgttgccatcttgttttcgttcttcatggataatggtatattagtatattagaattcactgtcctcggtcttttcaatttaagctcctttttggacaaagatga

SEQ ID NO: 251301 - DNA, 575 bp, Cannabis indica
aaattacttttgtttagggatattttcggtgcagatagtatactttttagttatttttttaaactaaactgcgtatgtaatttttataattttctaaattaggatcgcaaacctaaaaactacaaagaccacaccacaaaaatgtagtgtgatgttcaatttttagtaattagaaagaaagaataactaatatttaattttttttttcagtagtcgagttaattctaacattttgggatattggaactcgaacctatgacctccaacacacacctacctatggctcaagtggtttaaaatactaaagtaaacatatttttattgtaacatacttacagaatttttttggccgtataaaaattgtattgtattaaataataaataatattacgtttggataaaatattatattgcaaaaaaatttatgctcataaatttattatattgtaaattgtattttttaaatagagtaaataacttaagatacaattttcatataaaaaaaatactaacaccactacaagtccacaagtatatatcactaaaaccaactaagtgcacctatattataaagg

SEQ ID NO: 251302 - DNA, 929 bp, Cannabis indica
ctaatcattgttatttgctatttttatgttattttattatattcaaacaatacaaattttgtttgtcaaattagaactaaaaattcaattaattggtatttagctaaagtacttgtgggatcgactttactcatgtgagttttatcacttgaaaacgatatgcatatttgagtatttgattttcacaataagtgtgtataattctttttataaaattacatgtgatatcatatagaaagttggagtttcaatccaacaccaatctcaaattcctgcacactaaaacacaataaactagaagtgcagcacaaacacaagaacaacacaattcgaaccaaattataaatgtttcctccaacaatggttggagagtctattcctctcttctgaaacaatggattcaaatttgcactatcacattcaagactgaagttacaaaatcaggcaactaaactagtcccttgagaaactttctgtacggacataactatacaactcccaaattcatctcacaccggcagtatacactctctctgtttctctctactgctctttctcttactacaatctagagtcctagaactcttctcttttttctcccttggcttgcttttatatataggctaactagttttacgtgttaattaagactcaactaacattacagaacaactaaaaaaataagaaaccaagaacccaaaacttacagccacacttaactaaatgcattatgtgcatacatatataaacatataatgaaaggcagaaagttaggattatatatcagcatgatttgagaggtgtaataataatatatagatatagaaaaactataatctagaaccaatcaataataagttgatgatgcaaatgcaacaacaaaagttgggtgcttgtaataagctaggtggctagcaattagcaactag

SEQ ID NO: 251303 - DNA, 939 bp, Cannabis indica
gtaatgggttttatttagggcacaaaacccaacaattttaacttcagaaaacatagataaacaccagtagcaacaacaacaaccaattcctcaaaacatgcataatcaattatattacaattcaagaaataaaaaaaaagagttgtaaagaggttaccttggcttggatttaacataaggctgctggaatttgtaaggatttgaagaataaaaatcaaaaccctagctgatctagggggttcgaaaatgagagagagaatttgagagtgtaatgcttcctttccaagtttttcttatttttgaataaatgaaataaaactttgttttattaaatatagcagcccatttatttaataaaaatctgaatttattaattaataacaaaccactaaatcaacaaactaatggggcaaaatgaccattttgtccctcccacactaaaagtcataaaatggcacttaggggcattttgagaaattctaaaatccagaatattttcgacattcccaatgcttaaattattgccttctatactaaaaatactaggatgtgattctaatagccaaacaccacgctctaatgttgtcgggcaaaaatcatacaaaattatgaaatttctatatatgacataaaaatgcattctaaattcaaataaatcatcataaataattaattcaatattgataaataattttcataattaaaccataattatccgctaattccaaattaaagctaggcggtctttacaattatccctccttaaaaggatttcgtcctcgaaatctaacctgaacaactctggatattaagctctcatgtctgattctaactcccaggtggcttcctccaccttgctatttctccagagtactttgaccaaagccatggtcttattccgaaggaccttatcctttctgtcaaggatctgaactggct

SEQ ID NO: 251304 - DNA, 536 bp, Cannabis indica
attgtttgatgcttcaaggctttaggtattggtagcttattatcttttattattccaattggattagatggtttccgttctgtccagcttgatttctgttatccagactcagatgccttggatattttttttcaactggtatcttggtatgctaacaggtgggactttctcgggctcgaaggcttgcccagggtcagtcaatcaagatacagctacttgctgcatttcctgttcaaattgatggggaaccatggtttcagcaatcatgtacattggctatatctcatcatggccaggttcactctctctctctctctctggcattaaataatttcgtttatcttgatctagttgttattacattattgcttgtctattgcaagagtggtgacctatttcacttcgagtaaaatggttattactggtttctctagttttggctgttctgtttgtttttttttaaataataataattattattattattattaccagtagatatctggtctcctgattaaataattttgcgccttaat

SEQ ID NO: 251305 - DNA, 982 bp, Cannabis indica
aaatagtaaaattgaatgaaattagacaaaagtccttaaatttaacaatcaaataaagtttaatacatattaaagtttagagagtaaaaattctaattaacttgtatgaacttcaaaaggattttgctatgatttagaagaaaaaaaaaaggattttgctatggagacatatatgattctaagtccacgtggtcacacaccccatttagtagcataaatatatatggtgtcccctaccagatcaccatctctgctattattatatttgacctacaaaaccttcaataattcaaatttcaaactccccattctctctctcaactaaaaaaaattcaaactccccacttttattctttatttaattaatatgctaataacttgcaagaaagtgttgagaaactaataaagaatacaaaacaaaacaaaaattattaagaaaaattgtgttatcatataaatctttaatgatgcagtaatattttctttagaatttttgtaaaagtagatttcaataatggcatgctaaaaaaaatgggttaaatatgacaaatgctaaaaaattgaattcatcacatattcattgatgcatacattataattatagatatattattttaatctacaacctgacagaaaaaaaaaataaaaaaaaaaaaattactttgataactacgcaatctctttgtaaatttgatatttgacctccaaaatttataatacattcttgatataaccttatttgtaggagtgttgaaaacaattttcacatattcacaataaagaaaacaaaaaccaactaaagtaatgtgagacataactttgttatggtttgttagaatttgggattaaagtgtgattaaggtgtatggagttctatcctaaattaattggtaatagaaggagtagtccattcattttgtatatggtaatttatttcctacacattagtaatgtaggattaactctaatacacctcttcaca

SEQ ID NO: 251306 - DNA, 677 bp, Cannabis indica
gatcttgggttaattgttaatttatttaacacaaattagttaagatatcttattttatggcactatggcaattttaggaaactcataagaacactaactaaccatttagtgtcggactcacacccaaatgtgcccaacctaagatttatggggccgcacaagagttttcatcctaggggcatctattcaacaaggaaatcaataaggccttgactcatttagtcataaaaaggctaaaacttgaacataaagtcaagaatccgcaagaaggccattccccatagcatgaccgacctatgccatattttggtagaaaaagacagcacagacctctactctcaaaccaccaaaggaaacttgtccaaatgtgttttcctaataccaaggagcataacacaattgaaaagaaactattttccatttattatcaagcctagccgacttgtgccacttcattgtaagggaagagagattctttgccaaatttactttttctacaccaagacatcaaaattaagtgagcaaagtctcaaagtggtatagaaaccacctagccgacttgtgccatctttggacacaatggagtggcacaggtcgacgacatgagatggtgaagtttttctttggccaagtatatttccaacatcaaggtaccaaaaatgtgacagtcagtagtc

SEQ ID NO: 251307 - DNA, 620 bp, Cannabis indica
aatcttccaatggattttagaacatgtctctattgttccccaccataaattagccatcatcaattccaattggttacaagtggttattggaattcaaaaacagctcatagcaaaagtaagaattgattgcacaactgctttgagcacatgcactaagtacttgtcccatactagtattagtagggctgaaccgtaccccaagtgctactgagtgttgtaccacatgcactaagtacttgtcccatactagtgatggtagggatgaaccataccccgagtactactgagtgttgcacctcatgcactacgtacttgtcacgtactagtgttggtaacactgtatcgtaccctgaacatcatatactgtaccaacactactacaaaaataatttttccccaacgtttttaaacagttgtttaaagtatttctatcggtttctataatcgtcgcctatacgaccgtcgcaaaacgggcgaaatctgttttttctcctattttttttcaagcatcatttttataattttacctaaattaaaataaaacaactaattaattttaataacaactaactttaaaatacattaaattaatacaataaaaaaatacatatataataaat

SEQ ID NO: 251308 - DNA, 623 bp, Cannabis indica
agccttggcttcagctactacaggggcaactaaaccagtaaccggcttaattaaccttgcaaccacctgatctgaatcattcttcaccacagcacttagactataaacctgcttctcaccatcgattgctgcatccgtgaaaacctaccagcccaaagaacatctctcaacttcagaaggatcccgatcacactgattacgagaagtgattctcttctgttgagcatccagatactggagaagaaagttttgacaccaggcaaacatttcttttggatcaagaattaaatgattaaagaaagcattattcctttgattccaaattttccataagaaacataacacaagatctgtagaacctttatctaaacttgaaaaaacgttagtaataaaatgcataatatccaagtgtttattgtgcaagtaaaaatgagcaaagtctgaagccttccaagcttttctggctctaggacactctagcaaaccatgcataacaatttcagggtaattcttacacaagggacataagtgagaaggaataatatgtctttggaaaagcaatacagccacaggtacagaattagtaacaattctccacacaaaatgtttaactttaggaggaa

SEQ ID NO: 251309 - DNA, 555 bp, Cannabis indica
  modified_base (538)..(538): a, c, t, g, unknown or other
tgaaatctaattcacacttgtaagacacgtagcctgtttttctgtggtctgagatcaaatcattgtgccctagtctatctttctctgtttgttttctcaaactctaactctcatcaatctatgttgtgtgtgtgtgattgtgttcttgatactctgtgtgtttgatttttattttgtgtgtgtgatcgatttgtgagatcgtaagtgtgtggaacccgagggtttctgtctttgagggagacgaagcatcgagattgaatctcgagtatctgagttgcttaactcaggtattagggtgttgtgttttgctcattgggttggatcgagtttagttgtggactcttgtttttagtttttctacttttcacgaatgcatgtaaagtttgcaaaaacaccatattatgcttattgtgtactaatttgtattttgatgagttataagctgcatattctaatagtggtatcagagctagtgttttttgcaagaaacaagatacaaattaatatagtttacaagcagactggaagaaagcaattnttaagcactgagaggaa

SEQ ID NO: 251310 - DNA, 762 bp, Cannabis indica
cgacccaatgaacacgggttgctaaaattccaacccatttcaatttcggcccaaattttagtgggttgttcgacccattttcggtgtgggttggccgggttggtcggcccaccgggttgcatgctcagccctaggggagaccacaagtatgtagtctttggtttgaggggaaattgttagggtatcaacccaagtctcacatctcacattggaagaataggcaagagtagtagtttttgatataagtgtttcacctactccattatatgagactttttgggaaggtgtccaaaaaacaaaaccgtgagagaagatttaggccaaaaacggacaatatcatactaatgcgagagtcaagataagatacgaacatgataaggtgaaagaactaggcccaacaacttgattactggtacaaagattaatgtggacgccgcaatctttgaagaggaaggccaagaggaaggccggtcagtatggccttggttttggggttcgagagggggctgggcgcgtacgtatggtggtctcacaaactagatgtaaccacaagggacagtgtcacacggttggtattaaagaagcattgagttagttgaaaactcaatctttttcttcagatcttggagacggatagcttgttagtggtgaaggttatttgtaaattgtagctctatttagtgctcttcgtttaattcgtttgttgtttgagaattgtaagcggttgttgctttcattaagaaatgtttatcttttgtcacc

SEQ ID NO: 251311 - DNA, 820 bp, Cannabis indica
gtaagcactttttactaagtaaacaccagtctttctttgctccaagtccatccatccttttgaacagttagaggcagaagaatgctgatgattaaattacgatctcggtcatcaaacatatcatctaaaatctccttgtcccactgatgtctatcgatacaaattaaggaagaaaccttatgattcacaagcccaagatgagaggtacggacaaaaggatctgtggcatcaggaagccacgggtcctctaagatagaagtttcaaagcctttggcaatgcttttccttgcaccagcaagaataagttgtttggtttcaaagatgcttctccacacatagctaggattattccctaaagatgatgtcaagaaggaaccattaggaaaataccttgccttgaaaaccttgctaactagagcagtatcatttacaagtagtctccatgcctgcttaccaagaagagcaaggttatactctctcaaatctttaaagcctaaatcgctagtactattgtgtttgcaaagctttttccaactcatccaagaaacccctctgatttgtttagatgatttccaccagtagctactcataacagactccaaagatttgcaagtgttcataggcaaaagaaacactgacatagcatgattagggagagcttgagcaattatttttagtaaaatctcttttccagcttttgataaaaatttgccttcccaactttgaatccgtttgcataatttgtcttttaggaagccaaatactgccttcttgttcctgttgattatgcagggtaatcccaggtagagactagaatcat

SEQ ID NO: 251312 - DNA, 667 bp, Cannabis indica
actcatgctattccatctctaaagactttgttttcagtctagaattgggattttgggactctttattgttttgtattaagagttctttcttttaagatttgtatttgtggagttcaacttgtaatgttcgatttcaaacatttttatatcaatttgtttttttctttttataatggttaaccaacatgaaacacattgcatttataccaattctagtgtttagtttcagtttagaattggtgtatatttcgtaattaattaccaaagcctatgatgttgattatgggaagaaatgtttaaatctatatatgatcagctcataaatcatcatgaacaaagattaaaagatatttgaaacatctttgtatagattacaaatttgcaatagcattcacaaaaacatgtgatttgattgtcacacaaaattgcttgtttaaaagtgaagttaagaaatgaaagggtaaaaaaaagttagaaatagaacaatgtagctagtaatttcagtagtatcactaaatagaaccaaaaacaaaaacaaaacatcatactaataatagtaatttttggacagtaaaaattgaaaagtaagaaggaaagctccaagaaacgaaaaatgttaaggcgcgaagtaccacaagatgtgatatattgttattggtacatttta

SEQ ID NO: 251313 - DNA, 794 bp, Cannabis indica
atgtacaatcttcatctactcgagctcattgttgttcagccttagcttttcccatacctacacatgcaaaaaataaatatgagtcgatagactcagtaagaaaagcataatcataatcacaaatgcaactcgcattacaattaggcgcccatacacccaaccgtaaacctatccccgcgtcctatgcagtactgagtctagaacattggtgttagtactattgaccagaatatcagcctatactcggcactctagtcgtaccgatgtgagagcatcaatcagtacttaagctaaacatacatttatcggtatccaatataactttacgtatattaatactgctatcaatgtaatctaacaggctttataaacatgcacgctaaatgtgtaatcatatatgcatattattatactaatcttaccttgtttctgaatttaggtgtgccgatcaaccagagtggaactactgctcaacgatttataggcccctaagtcacaatattcgttaaactggtgagtgacacactaaatcactttttggggacttaaaaacaaagctaaaagttttcctatcaatggataacatggcaataccctaaagatcgtaaaaacatgaaaatctaaggtgccctaagatgccccaatcgctagaccagttcccaaccaaaaaactggttctgtggggtctacttagggacgaactgatagaccagttcctactagtgaaaactgaaccggtagaccggttcaatacaagaaccataaaaactcttttaaacaacccaatttaaccc

SEQ ID NO: 251314 - DNA, 1192 bp, Cannabis indica
tataatatttatgtattatttttctattattgttaggttgtaagattttgttctattattgtaaagttgttagttatgattattttgtgagttaacaaaaaaaaaagtttgaatttgagaaatgttagaggattattggtctttataaaaagtctaatgaagatatagagatcatatttgttgactcggaaatttagacacagatctttgagccatacccgctccctaaattaacgagaataaaatatgagttaagtataagtagagagaaacaataatttattgtaatttacttcctgtatcacaacagtgatggacttacgtctacttcgagttttatttttcacgagatggattacaaaaaaatggtgaagtctggatgctttaatttctagagagagaaactagagagagatactctgaccttatggctacttttctcaacttaaaaaatgagctagtggagttctctttttataggtgaaggaggtcctattaaatgggaataaaattatccaaggtatagaaaatacatttatgctatttttgaccgtagatgatgatctaacggtcaaaattaacttacggagttaattgttaatttttggagtttgaggcgcgctggagggacttgctccgggtaagttacaacttaaattcgtaactcccttgggggtaaaatttagagtcgataatttcataattgtgattgaagtgtgagatataacttgatataacattgaaatagcaaaacgcaagtttaatcgcatcaattagatattgagtgagttatgaattttactgaaggttgttttggaccaagcgcccaggttgacatcccagtgcccagattgacatgtgatgtcaacttggatgctgggtgagtgggaaaatatgctagggatatagtttttgatgcctaagtgacattttgacatcatttagtccatttatgtgttctagcgaagctagtcaccaattctcaggcatattgctactttgaagaaacaagagacttgaaactactcgatttctgagttaatcaacttgttagaaaagtaaaatatgaagttgtgaaattgactcttctgaattcatggctctcagtttttatgaaaaattagaagaacggtcaagacagaataagaataagataagcaaaatccagtacaccaagccatttgttaacttg

SEQ ID NO: 251315 - DNA, 3316 bp, Cannabis indica
taacacaaggcagggtaggttacctcatgtctgatcaacatgagtgcatagctgattatcgtatgtgagtataatgtgcggtatgagacttgatttatgcatgtgagaacaacatgcgttgtggatatatttaatggaatgtgaattactgttgattaatattaaagagtaacttatatcaagtaactagttaggacagttatgtcctgcatagctcttcttactgggcgttagctcatgggtactctgtgtgcaggtaaggataaggctaagcagtgagattgaagagctcgaggcgtggactgcatgttagggggctggcgcagtattttgcttttaatgtttttaaatgctaaacattgtggatccgttattttagtttaactagatcttatttaagattacagtactaaaaatattttgttttaaacagtgagatgtcatgcttagatattttttaataaagaagtatttattttgtctttatcttattaaattgttttatacggactatcctatgtgacatcttgggaaatcggggtgttacatgtcttcatagcaaccaggatctccttcaactcttcatatcaacggttgctcaaccttagccttgcacttacctacacatgcaaacaatatctgtcagtcgacagactcagtaagaaaagcataaacaataacatagcaataacccagattataatcaggtgcctatacacccaaccataatcctatccctgtgtctaacacggtactgagtctagaacgtcgtacgacaatactatcaaccataatattagcctatactcagtacgctagtcatactctatccatactgatgttatagcgtctatcagtatctaagccaaacatacatctattagtatccaatataattcaatgaatactgatactgatagacttaataaacatgtaccctaaacatgtaaacacatatgcacatcattatactaatcttacatcgttaccgaattcaggtgtgccgaccaacctgagtggaacagctgctcgacgaattacaggcccctaaatcacataattcggaaaactggtgagtgacacgctaaatcactttttggggacataaacttgaaactaaaagtttccctatcgataaataacatggcaatatcctaaatatcacaaaaagggaaaaattagggttcccaaaaatacccccaccggtagaccggttccctaactggaattttggttatgcatggtttcctagggaccaaccggacggccggttcctataggtccccctgaactgattaatcgattcagagcaagaaacacagaaaaattcactacaccctcaattcaataccaaaccttccacacctgcttaatataccacaatagacatattccatgcaacaaaacaactcatcatactctaaatcaaaaattgccattaaagaccaaagtttgagttctaaaactcaaactttgtctaaaaacccaagcaagccacaacctagcctcaaattagctcaaataacataatttaaacctcagaacataaacccaagcagcaagaacaaaaccagaacctaacacccataatcatacaaaaccttaacttacaacttaagaaattcaagggagaagatgctagagtggttacctccaattagaacattaaatccttgctataatcctctgaattgctgaagaaaaactcagtttcttgttggcttctagggttcacgagagaaagaaaaagaaggaaagggaggtgttgattgatttttgtatttttcttatttgaataaatgagttactaaaaatacatttcctaactaataataacataagggattcatatcaaatcttattaggaatatccttatgagcaacatatctcaaacaaaaaaattcctttctttcacttgtttgttgaagtaccgagccactttttgctgatgaactagtagctttagatttgctaaatctcttttttccttaactttgtcaagttattttgccaggagggcatggttagtctcctagtcgtatgtcaatcttttatgggatggagactctaattcaactggaaacattccttcatagccataggccatggaaaaggtgtttgcctaattattgtcctgttagttgttctgtacgacctaagtacctgtgatagttcctctggctgattcccattggcctcttcaagttgtttcttcatggtgtctttcaatgtcttgttgactgctttgactatccatttgtttggggatgtgcaactatcgagaacttttgacgattccatgtgttgtgcaaaagtctatgaacatctggctatcaaattgttttccattatttgaattaatttttgtggaagtttgtgtcggcatatgaatttttttaccacaaaatccaaaacattcttggatgttattgttgccaatggctcagtttctgtccgcttggtgaaataatccacaaccacaacggcgtattgtactccaccttttcctttgggcaattttctgatcagatctattccccatatagcaaacggccaccgactttgcaactgcattaactcattagaaggtgctcgagggattttggaaaatctctagcattagtcaccttttttacatgggcctttgaatcttcaatcaattttggctagaagtaaccttgtcttagtatgttcttataaaaactttgcccctagcatgatttccacaaaagcctttatgaacttcaaacaagagtcgtgcaacttcttcttttgtaacacacctcaacaacggcatggagaaacctcttctgtacaatacaccatccactattatgtactgtgtagcctttctcataatttttcaagcctcatttctattgttaggaagttctccggtgttaagataggctactatgagagtcatccaatttggtgtgttgtctatcatctcgatttcattcgtgcatgtgatgatgggctcttctagaaattggattgggactaacttatctttgtttgttgctgtgttgctcaccaaccgtgctagtgcattagctgttacattttcctccttttgaatctgcttgagggcataccgttttaattatgtgagcaggtcatggatcttacttagatatgcaaccattttttctcctcaagtcgtgtattcccttaggaaatgatttaccaccaactgtgagtcactatagatttctaaatatttagcaggaacttccctaaaaagttttaacctagcaatgagtgctttatactctaccttgtgttgggttttgtgtcctaaataaaacccat

SEQ ID NO: 251316 - DNA, 621 bp, Cannabis indica
ttaggtcaaattttggttaacaaaaatcagcattaacacttacccttctagtaatcccgttttaggggattagggtttcataatctgttgtcgtggcgtgcctaattgttagggcgttataaacacagtgtatattagaagattttccattgaaataaaatacaaatatagcacaaaaccttgttttggcatcataaattatggaaaagaacacaagtgtgactgtagagaaacgcttaatatatgtcactacagagatctagagaaaatgcctgttatagctacaacatatgaaaaagaaacacttaaatactttcagctacaacatggtctgcagaaaattattgtatttctattgtaactttggactatatgatgaagttgattttcaaagctagagtgcttggtttgtgaacaaattataggtgtgctctgcttgtttaagagcagttggttgtttaattaattgcttgcaatgttggacagattgtaggtgtacattcaccaaggtagttagtagataaaaagaagcagaaaactgagatagattcactaatgttaacaacttcaaattcactagtttattgaaaaaatgattaagaaaaaacatgatatcaatat

SEQ ID NO: 251317 - DNA, 1375 bp, Cannabis indica
atcatgattatattccactgtgctgacaacactataatcatgaataaatacatatattctggacctaatagaatttatacattaaatataaacatgaaataaatcatgtgaaccatgcaacataaaatgtgatttctgatctttattaattagtaaatctgattatattgaaatgggttttatttagggcacaaaacccaacaaagatctcaacgatgtgtcctgtgtgctcatctcaagttgaatccacaagccacgtcttcacttcttgtccaattgcccttgcttgctggcgtagactcaggattaattttgtttttgaccctggtggaagtttttgcagctggttggagttaattttccaaacactttcggaggaaaatgtgtgtagtgttgcaatggtttgttggtctatatggaaggcaagaaataaaacagttaggaagaagaaaagcacatatgttatggaagtaattgcatttgcaagaacaactctcgatcaatggaaaaaagcttaagataaattcattcttaattccctgtgtctcgaatacaagggtgatggagctgagctatggaccaaacctgaagaaaactcaatcaagataaatgttgatgcagcgacttttgaacaagagaacaaatatggctctggtattgttgctcgtaatcaccttggcaaccttataactgctctctggctgttatggaggtaactttgcagctgaattcattgaagtcatggcaatcaaagaggcactcagttgggtaaaaggccaacactgggaacgggtaataattgagacagacagcttgatatcagtgcaagctatacgcagtcagcaaaaatgttctcaacttttggcttgattgttggggattacaaagttctactctgtacattacataatgtttagttactgtttatcaaacaattagcgaatcgggtggcacattacgttgctaggaacgcccgtttcaatactggttgtaacatttatgtttttcatgtttcaaaagacttaaaaaatcttatgtattcagaatgctaattatttcaatgaagttgatatttcatttaaaaaatatataaaattatatactttaatttaataaataatataaaaaattgctcatcacttgtaatagaattagttacacaaattaaaatacccaatacttaaattttactaaatgtcctctacaacgttttattttaccaagttgtcaatcctaattttatttatttatttcagcaggttaaacctgatggtttcacgtacttttctgttaaggttgcgatatttccttgtgttgtgttcctttgtaacttggtgttgttgcccaaatgatttttaattgcggtgattaaaaa

SEQ ID NO: 251318 - DNA, 637 bp, Cannabis indica
accggttgctggagattgtttagtgagacaatagcaacttgatgtttaaaaggcacatgatgcacactaatttctttgtggatcactttgtctaatctcaatatgcttggtcctaacatggagaataagatttgtagcaagcattatagaacttaaattgtcgcactagactgtaggagttaagggggacttgatctgcaacttagtgagaagagattgtatccaggtaagctcagagacaagacaatagctgccaaacttcgaaactaagcttcagttcaagatcttgagatggttgtttgctttctaaactgccaaggaatcaaaatttcttcaagaaatctgcaaaatccagtagtagacctcttatcatcaaggtcaactcccaatcaacatcacagaaggcttgcaattgaagagaagaggttttggtcaagtacaaaccatagtcaagagtctttgctagatatctcaatattctttactaccaaatgaacttgtaatggattatggataaataggcagactttattgatataagctatgttaggtcttgtgattgtggcatattggagtgccccaacattgagagagtcttaggtcagaattcatgagagaattttaagtattgactctt

SEQ ID NO: 251319 - DNA, 1259 bp, Cannabis indica
cgcctaagatagttagggtgttacaaatttgtcacatagactgtctctattttgtctgttaggactcagaaagtagtaaatttagaggaattttctgtaggatgctgctcgacattgctagtgaatttgcctttctttccatcactttgcttgttgtcgttgttagacctcttctcatttgaattcgaactgttgggatattgaagattctagacagacattcctgcgcataggtgcattgttggtttttcttttgcccgatagtatccacgcactaaatagcttcttcgagcttaataaacccatttgctcgatctagaaattcagccatcgatcccacagttagccttttaatatctttccacagttctctgagaggttcaatgcccccagtattgcagctagtcttccttcttaagtcagtcccttgacctttgtggcctggtcataaattttctaatgtaagctctaagggttctccgagcatttgcttggcttctaccaggtcatccaaatgtgatggaagctgatgggaggagaaaaattgtgcatggaactctgatgagaaagcattcatgagctaaaccttcctgaaggcaatttgaaataccattgttgggcgacctctacgactgtggcaagaaaatttttacaccgtacatcaccccttaccccctacagatccatctgcatctcaaaatattttatgtgtgataaaggatcctcttttcctgtatacatcttctaggttggcattttaaactttggaggtaacttaagaacttcaatttcaaggaagaaaggtgatctgcgtgcccggtcgagttcaagatcagtgagttttgggccagtcaggccttgtactatatttttaagttgatctatttgtgctttgcacaagtggatgaactttttaagcctgttgactagcttgtgtcacattgggatctttttaaattggatcttgggcatggatacctggttggatagttggtagaacgttttgtctattcagaccccttctacgatttagatctattctaagatcatgtgtggtacccaacctattaagcactgaggtaccaagtggcctcggtgtctgacttttttgggcaataggttggcctgagacttcggtagtggtgaaattgttggccgtctactgtttggtccacagtttgaacctgtggccttggattggacaactgaccactgtgagtttgtacgtgttgggttttatgccctaaataaaactcttt

SEQ ID NO: 251320 - DNA, 641 bp, Cannabis indica
tttttttttcatgatcgcgtacgttgttgctatttagaaccacttataaattttaaaaaaatttcagtttagtttacagtgttgtaaattagattaaaacaatgaaaaattttgtagtagacccccctaaagagtcgttctggtagaccccttatctgtttgagcattgaactttttttcttagtctaatttcattttatgatcgcgttcgttgtagctatttaggactacttgtaaatttttacaaaattctaaatagtttataatgctggaaataaggtttaaacagttattaaccacgcgtataagaaaaatcaacaaaatacttaaattttatttcggcattgtaaactattcaaaaaaattaaaaaattaacatgtggtcctaaataactataacatacacgatcataaaaaaaatcagcaattttttttaaagtgccgaaacaaataggagatctaccgaaacaaatagaagatctaccgaaacactcttttaagagggtgtactgtagacttattacttattactcctataagaaaaaataatcgtgcatataacaaaatatataaatcttattttcaatattataaactactgaaatttttttaaaaaatttataagtaatcttaaataacta

SEQ ID NO: 251321 - DNA, 790 bp, Cannabis indica
ggtttttctacatctaaggctgagagttctttatttgtctatagttcgggtgctgatcaaatcatattactagtatatgttgatgatatactagtaacaggcccaaatgtggctgtcattgataacctcgttcgtgacttaaaccattagttttccttgaaaaatttgggtgaagttcactatatcttgggtgttgaaatctatagagatccaactggtatgtacttttcccaaacaaaatatattaccgatttgcttgttaaacttcatatggaaggggcaaaaagttcaccaaatcccacaagcaccactgccaagttgtctcttgctgaaggagaaccattctttgatatcaaattgtacaggagtacaattggagctttacaatatatgtcccttaccagaccagatgtggcgtttacttagccaatttttaaaggctcctacaacatgccactgggaagcatgtaaacggctcccaaggtatttaaaaggaacgatttcagagggttttgtgcttcgaccatgtactgaactcactctcacaacctattccgatgctgattgggctagttgtgtcgatgataggcgatctactgggggttatgttgtgtttttgggtaacaatctcatatctttgtctgctaagaagcaacccgtggtggctcgttcaagcactgaaagcgaattcagggctttagccaatacggctgctgagctacgatggatcacctctctattgactgaacttcgtgttcgtttaaatcggtgtcctattatctgggttgat

SEQ ID NO: 251322 - DNA, 1386 bp, Cannabis indica
atataatataaataaaatagctaggagaggttataagataagtaatttagtgaatcaaatattattgggtttgttataactttatcatcagtagaaaaatatggagactgcaaaaatattccttgttgtttttctttcggtggccattcttcttgttgctttgactttgttctgtaggcgacgacgccatacttggctcggattaggcggtggaaatagtggcggagctcctcatgaccctcatcatcacggaggtggcggagatcctttaggcggaggtggccatggaggtagtatggtttaattaaagcatgctgtagaagtatagatcgagaattgattatgatgatttctctctctttgataaactttcaaattttgggtttagtatatatgttaattatgcgtgtgtaagatatagaggttaagtattgtctctgtataggctggtgtgaaactacaattttttagttctttcattgtttttgtaagctcgatgatcaatgattatttttattaaattgatctgagaaagaaattaactcatgtttgctcaatttaattacagtttccaattagatacgtataacagatatatgcacttattggtatatttatatatagtactgggttatccttccgtttcaaatagatttttttttttttgttctcgcagtgctatatcgttccgtaaaaaaatacaaatggtttttaatttgtataatttaaaagcatatggggttgatgatgacaacattaacctaataacaaaatggtaacctacgatgaactaatcaatgtattttttttcttttaataatatacttaaaatactaattaattatgaaaataacctaacaaatcttaattacaataatattctatccacgtcacaaaaaaatgtcctaattctaaattaatatgtttgaattaggaatgcacacgggacggaaaatttacggggagtccttccatcccatccctacttattccttattgtggaccgagcggggaatcccaatataaaaataaagtttattttaaaaatttaaacatataaaattattaaattacataaaaattaaaatattatatattatttattattcaatatactaattattatataaaaacacaacttaataaattacaaaaatgacactatagtatactaagaaattacatatacctattataaatataaatattaataaaatataattaataaagtaaacgggtcctcgtcggggcagagagtgtcatcccgtctccgccccgtttaatattcaaggaattaaaaattgtccatgtccctgccccattttcccatttatacagagaataagggtaggtctctaactacaaggcctatccccataaaaaaaa

SEQ ID NO: 251323 - DNA, 1346 bp, Cannabis indica
acatattttgaagataatcttttctaccagtcttctacaaactttgacagaatcagtgaaaaacaaaggcatttttcaccatcactcactttttccacttgcatcattctggtatatttggatagatggtccctgggtccgttcttcctttatataactccatttgtggcattgtgaaatattccggtagttgtgcttctataattattttcacacatggttttgtgtcctcatcttttgagtcacacactgttccattttgctttcaggagatgtactccatgatcttagttagctcttcaatcttatgttccacacgttgactagctgcgtcttgagactctcttttgtggattcagtcattgatgtgatttctcaaatcgtctctatgaggcttggctttctcatttcttgccttttctttcttggcattcaatcgtgcccagagatcatttttcgagagacttccactactatcatctgatattggatgaacttcctccacattatcactccagctagtggaattctcaggataatttctatctttcttggtagaagagtttcacgcctgtgcatgagacttttccttatgcgtagttctgcctctagaatcagtccagtaacgttgccttgaagcattattcccttttttatgaggttaactagcaggattttctctctttttctgatcattgcgagcaagctttttggaggtttctcatatttttctttttcctttaccattaggaggatttcgggtgttaggatctttaggttatgttttctcaacagtgttcccttgaggatcagcttcatcaggtatatttctatcacgattctaattttctcctccaaatatcgcttcaaatatatcaaatttctccagcatcattcgtagaaactcttcttttgccgccaatttcttttttcaagttcttctagttttttggccatcttaatgacctcaaaatctagtcgggggttcttatctccctttttgaaatcattgtcttctggatccatgggatttgaatccttagattcttcttctactccttcattgatgggatcatcttaatgcctcagtgggatctttgttgaacctagttttggaatttagaccagcttcaccttggtaatgaagaccagactttgttcaggtgagtaccacaattaccgaacgtaatcttagatggtatcactgctttcttcagttctcaatgaaagcaccaaaatatttaccaagttcaaaaaatgaattattaaatatttaacccaaagaaaatataatttaaagagaaatatccaaagaagacactcatagtttttacgtggttggggca

SEQ ID NO: 251324 - DNA, 726 bp, Cannabis indica
aatattacaaaaaaaatattattgtttattattttataatactctttaatattagtgtgtaaatgtattataaaaattaaaataatatttatattttaaacttatataagtaataaaatattatacaaaaagtatcattatagagtatccaataatactttcagtataagtgaaaaaaaataaattatcaaaattataaaagataatgttgattcaaacatattatagtatttagataatactaaaaaaatattttttaataatactttagtataattcatagtatgtattatgaaaaaagacaagatttttattaacacatctttctttaatgttttataaatagttagggttttccaaaatttcttttacaacttcttctcttttgttctacgcgaaataagagcaattcaaaaaaaaattccttactcttattttcttctacccaaaataataagcccagaaaaaacaaatcaagttctaaaaccttagaacagaacccagagaactctccctaactcaactttcatgatttaacacttatatattggtgtaataagatttattaaaaatgagtttattggatatgttttgtatttgacttttttggatattttgttattttagataatttgaattctgaaataagttttatgaaataaaatttaactagtcttttgaattaattgtgttatgaagaaaaaaaaaggtattatagaaattaat

SEQ ID NO: 251325 - DNA, 751 bp, Cannabis indica
atgaaatgttctttggcagggcaaatgtgaaatgaacatccagagaatctacgatccagtccacttctgacttgttctttgagatggctaacacactggcactatcatagccatcactgtcgtctgcattagaaataatgtttgcatttccatctttcttaaatttgtaatctttcaagattggacagtcattcttcaggtaagatggtttgttgcagatgaaacatctcctttgaaacttgaattttgattttcctttccctatgttggtatggtccttgttctccttcttggatctttttcctcaaatcgataagccatcttcagcaccttcatcttgcttctcttctttttttttttcaatttctttgacattaatgcattttggacttcctccaatgttaatatatacatcatggtatttacaaagtgttcataattctttgtgggaagagaatttagcataatgatggcctgatcatcatcctcaactttaattccaatgctctccaagtcgaggatcaccttattgaaatcatcaagatggtcttcgatttcctttcctgacatcatcttaaaagagtataatttctgcttaagaaacaatctgtttgccaacgattttgtcatgtaaagactttccagtgtcatctatatccttgcagctgagtctttcttcgacacttcccttagaactttgtcaccaagacttaaaattatagcactacgtgctttctcgagaatctctgtt

SEQ ID NO: 251326 - DNA, 1781 bp, Cannabis indica
aaaattttttaaaacaaaaatttgacttttattttgtgattaaaaaattagaaaacaaaagtgttaccaaacgacacctaaatgatattacgtggacaaggccacgtcataaattccctaaatgctatttatacacatagcattgttattgggatttttacaaaaataatagattttgggtctaagtttacaattttactgttacacggaattttttataaaagtattgtctttttataaaacaaccgtaatacaacaaaatagaataattaaaaacaacaatagaacaactaaaaaacaaccgtaaaataaaagtgaaaacttaacacaactatttttttaaattatatagaacccgataacggcatgatatcgaaaaatatactaaatagcagtaatagctttagctttttttatgcacacaacaccttttatttctttcagtgtcttagaagagttcttcaattttttctttatgacatgtatgttatagatcgtaaatttattgtgtataaattataatattaaaaataaaatttaaatattttattagcgtattactatttcttttatactcataatattaataagtaactatctaaatttattattttagacattatattttatttaaaattttacttctttttccttaatattttgagacaaattaatcatatatatataaatatatatatttttttatatttatatataaaaagaagaaaagcagtcagtaaataagggtgtgctcgtatctaaccaaaaatcaataatttcatgtcatatatgcattattatatactattattttttgaacatagtaatgttagttatatagtatacatgtgataaagattcctttcatacccccttaagtggtctttaggcctctttgtcaccggcggcggaattttttgaacattaatggtcaaaacgccgtccttatacacggcgaagatggcgtcttatcaccatttttcggccaaaactaaaacttgctcataaatttcccaatttttgtttccattgatcctcacatacttaactattctcacaatctttctcatttctcgtccttcacaaagaaaatattgtccttttcgacttgatatgtttggatgtcaaataataatacgtaaacatatatattgtattattattttttcttaaacaaattaacactttggatgagacgtctaatattttattaaaaagaaacatgttaacgctacagctagatatcactcatatagaaatatttagttatttacagtcagggtcagcccaattttttgggacccttatgcaaaaatttaaaattgggctctctaaaaaaattatgtacattaagaccacaattctattactaacttttttttttttcctttttaaagtttctttcctaaatttttagatataaaatttttattatgtatgtataataggaaaataaaaaacaaaaagtaagtcttttcttaaaaaaaaaaaaaaaagaatttggggcttaaaaaagtggaggccttgtgcaatggcccaaactatccaatacttgggccgaccttgtctagtgtgtcatgttttctatgtggaagactgttaggagagttgaatctccttgacattgaaagctcgagtatgaacaaacaacaaagaacagtaaagaaaatctaaaaacagagaaaatagagaaaagagaggaaaggaagaagatgaaagatatcatgaaagagcttgattattattgagaatacagttgtacaatatatgtacagggatta

SEQ ID NO: 251327 - DNA, 917 bp, Cannabis indica
gtgaagcatgcatctgaccctctaagtcagagtcatattcatcctttcagctaacccattttgctagggatttttgggaactattttatgtctatcaatgccttctttcttgcaaaactcagtaaactggtttgagcaaaactcaagaccattatctgttctgagtttctttaacttctttccagtttgattctcaacaagcttcttccaggtgacaaaagtattgaatgcatgatccttagacttaaggagaaacacccataccttccttgaaaaatcatctataatgctgagaaaatagcttgctcccccgagtgttttaatccttgacgacctccataagttagagtgaatgtagttcaagggctccttgctgatgtgtagacctgtagagcatttagccttgcaacatttcccataaacacagtcctcacaaaactgcaacttcccattcaattttcctttcaacagtccctgtttctcaagttcttgtggacccctttaacttacatgaccaagtttaaggtgccaaagactggtttgatcaatctcttgatctattatgggaggtgcaacattccccatcacagtctttccaattaaagaatatagaccattctttaattctcctttcatcacaggtgtgaaatcctttgagatcacaagggttccaccttccaccttgatgatgcaaccaatgctgtccaacatacctattgacagcaggtttctcttcaaattaggtacatatctgacattcttaagtgtccttgatatgcaatcaaacatagtgatcatgacagatccaacgccaagcacactgaaagctttataatttcccaaaaatgacagtcccacctgagatcttcttgagatcactgaactttttagctttaggaacatgtgaatgaacaacc

SEQ ID NO: 251328 - DNA, 777 bp, Cannabis indica
aagatctatcctagtccttgaggaccaggttgtccagcttgcgattgaccctcccaaatctatcaactagtcttcattggagtggatctctgatgagattcctggcctcatccatcggttctctgcttgaaccgccttatctagtcgctggcctctttgttgcggcgatccaagtctacttggtgagatcgaaggataaactcttggtcatccatccacctcaagaatttacgtctctactgagtgaatacatcgcaatcagtagcgcgtggttctttagttagtccagcttggccaacggcttctataagtctggctaacttgatatcttctcctaatttcacatggggctcaccaatcgcaggctcgccacctcctggtcccgtctctccagtgtagtactggagatgagatccgattgtcgttccttgggattgtcgcccacgagtccttccttgaatgggaggcgccagtgaagggtcctcccttggaggcaagggcttcctattcagatccactgggatgtttgtgtcagtttggccagctgtagtggccagatttgtgacgcctgttgtggtaacaagattgaccacatatgcagtgttcataggaattccaactgtggctggaacatgaacatcatgatctatagtctgtggatcttgagggagactcgaagatgtagacagtgcaatcgcaattcttctcatgttaaccatggtgtttgatcagatatgatatccactagctgtcaatgaaagcaccaaactgttaact

SEQ ID NO: 251329 - DNA, 1212 bp, Cannabis indica
ccgcttgacacgtgttttcctctcatatgttagacgaatttcgggtataacaaaatccataaagatgttgatactatagaaaaaactgaaggacatcattagaaactcatagtgcccatatcgagtacaaaaagcagtcttgggaatatcctcttcccgaatcctcaactagtgataaccagatccaagatcaatcttaaagaagatggtctttccttgaagttgatcaaacaaatcatctatccttggcataggatacttattctttattgttaattggtttaactctcagtaatcgatgcacattcacagtgatatgtccttcttaataaataaaactgccgcaccccaaagagaagtacttggtctcgtgaaccacaaattaagcaaattttataattggacttttaatttctttaattttgctggtgccatccgatacgaggccttagaaattggctcatcccccaatgtcaaatcaatctcaaaatcaatttctctttttggtggtaatcctagtaactcttctggaaacacatcctaaaaatcgcacactacacgatcttcttccggtcccactggtataccttcatggtatctaatacactggccaagtaccccatacatccttctcataacaaatctctggccttaagttccggtatcattgggattcgagatccttgaacctttcccataaaaacaaatggggtttcaccatctggctcaaatgtcagcatctttcttctacaatttatggtggcattatatttggccaaccagtccgtccctagaattatatcaaagtcttctaagtcaagttccatcaaatccatcaacaattctcttctttttaccaacactagaagagatttaacccacctcctagagatcactatttctcctgtaggcaacaagtaccgaatgcactagacataacataacatggtctactcaaattctcaatgactatacttgaaatgtatgagtgtgtagcaccagaatcaattagaatagcaaacataacaccactaatagagatctcacctataaacaatcgtaaggacctagcctctgcatctacttgggttaacggcaaacaagcgagaaagaaccataaaactcttcttcttggcatcagtctctgtaactctgggcaacttctctttaaatggcctactctccgcactggaagcggatttagcctgacac

SEQ ID NO: 251330 - DNA, 799 bp, Cannabis indica
atttctagagttatagttgtgattatatatagatctatagttgtgattatatatgagttgaaatttgttaaatatcagttcaaatattaatagaatttgttttattattattttatgatatataaataatattttattattttattaaataaaaaaataaagttacccatgaatttcttataaactaagaatttcagttgaataggcacactttatatagaatagatattatcacaactttgcatatattattattattattattattatttggccgacaaaccaatctagcaattcctttaaatggttgaagatctcttttcattgtatatttattaagaacttgagaaatcttaggaagctcaaaccattgtcgagtaatcaaattgcatgcatataacgaaactctttttattacataagagtaacatcaaatcattcaaagatgtatacaaatttaattcgttccgtggcaagaatttaattgtattattattattttatgatatataaataatattttattattttattaaataaaaatgccattacatattctttgttattctgtatatgtttaaactgttaattatttaaaaccatctttcttagtttaacaccaaaataaagcaaaaatttactaatcttatctaatggctgacaaaagattgattcttaatacagtctacaaactatgatactctctactaatctaattactgctctatacttaattcattcctcctaattttgaaattttgtaataattcccatgactcaatatttattgatatatata

SEQ ID NO: 251331 - DNA, 491 bp, Cannabis indica
ttttattttttttttttaattataactggtttaagttaatagtgttatttgtttgtattcattatgttataaaaccggttctattttattataaatagtttgagttatttcatattatttatttttgttcattataataccattatagaactgattctattttcattataactagtttgagttattttgtacttttgtttttatttattatgttatggaaccggttctactttaattataacttgttttgagttattttgtattatttgtttttatttacaatgttgtagaaacaattctattttagtttatatctgagatatctactttacttccagttacttttccgacgatagtgacttttctggagactttttcgatgactttttcagcgacagtgactttcttgacaactttatcttttttggtgactttttcggcaatacttattattagaagttttattaaatttatttgttcttttttttttt

SEQ ID NO: 251332 - DNA, 800 bp, Cannabis indica
ctcatattcagatctttctgagtaaaaaaaaatttgaggctcttgcgatcggtttaaatctcacacttttctctgtagagatagtgtcgccatatcttcaaggaaaaaaccactacatcaagctctaaattgtgagttgggtatcgttgttcatgctcctttaattgacaggaggcataaatgattactcgatcaagttgcatcaaaacgcaccctagaccctgtctggatgcatcacagtaaaccacaaacttctttatctgatggtagtgctaataccggagttgtagtcaatcgctgtttcaactcttgaaagcttgtttcacacttgtctgtccataacaaccgttgattccttttggttagttctattaagggcgttgagatcctagaaaatccctcaatgaactgatgataataaccagctaaacccagaaaacttttgacttctgtaactatctttggccttggccgatccctgacggattcaatcttccctgaatcaaccatgatcctatctttagtgacaatgtgtctgagaaaagacacctgggacagccaaaattcacaatttttaaatttagcataaagcttgtgttctcgtaatcgttgcaaaaccattcagaggtgttgttcatgctccacttctgattgggagtacataaggatatcgtcgacaaacactataacacatatatagaggaaatccttgaatgccctattcatcagatccataaaagttgtcagagtggttagtccaaaagacataaccaaaaattcatagtgcccatacctagtgc

SEQ ID NO: 251333 - DNA, 1038 bp, Cannabis indica
gaggcggggtgaggaggggacatggggcatgggccatgtccgactgggaggcaagggagtcgaggaggggcagaaagagagatgggcatcgagaggtgggatttgtaaggagggcggtgatggcgaggtgggtcgcagtgttgagttggttcgagaggcagagacgagggaggaggaggttgatctcagtgagctcatcttggggttagaagagtgtgttgatcagtgactgggttttaaagaagaagaagatgatgatgggaagagtggtgaaaaggatcgataaaaacgacggagttgggagtgtcgtaggaaagtgagaagtgtcattgctgggtttggtaagcaagctttgtctgctacttactgccggttttagttcgtgagaagaagaacctctcctgaaaatgggccccaaaatgtgggcttctatattccaagcccgcttagagtttttggggaattttaaattttatacgtaatattaaaacttatttaaaaataaccccagcaatttaattaaggccaaataccgattgaataaagtgaaataattgtctcaccttctttctaagttgcttctagtttttttttttttttcttcatcctttctataattttaaaaatctttttcaattacattattgatcatttgaggttaaaaataatatcattgtacctattttttaaggtggtcattttaatatgtgtaaaacatgcatattttttttatttttacccaaaaatataatcagaatcaaaaacaactactcggtttcttttataatttattaataaagtagtaaccaaattttaaatgcaaataaaattcaatatatcaactaacttttgttactataagattgtttgatatctcctaaataatggtctattttattagacaattttcgtacataaaaaaactaaatgatatcttaaatatttttaaattttcattttaagtaacattatactcttttgttgttaagatatttttaagtttttttttaataatatttaaattaccttcaaaatcta

SEQ ID NO: 251334 - DNA, 2355 bp, Cannabis indica
gcctttttgggttcaagtctaccgcttgcctttcttaagcaagtccaaaccgttagccactgctctgggtagtctcattggtgagttcaaagatgttcatgaagattctcttgatgaaggatggggcctctttctacgcatccgagtcaatatcaatgttaccaaacctctccctcgtggaagaatgattagcctacccaaagttaaggatgagttttggattgactttcgatacgagcgtcttccggagttttgctttgagtgtggcctccttggacatccctttgaaaaatgcattgcatttatggaaagaatggatttaggtaatgatgatgatctcccttttggtccatggatgaaaggagccaaacttccaacaacgggttatgataaatatcgtactgatttcgctaaagggaatgcgtggccactcttaacccgccttgcacgctcatcgctcacttcgacaatcccccgactgaacaaaattaccaagccacagccccgtattctgttacaaggtgaatcctccatacctctcccaactgaccaacatttttctagcacttactcatcagcagccgtgcattctcctttaccacctactacacaaaccttccataattctccctttatccaatcccacatagcctcttcaccctttcctactgccattaacaacaacagtaataacactacctctgcctctactatcaactttcctaacatctatgttcctgatgtgggaaatgttacacggccatttatgccttatgccacatatcccccaaacacaaatatacactcttcccgtggtaatccaccctccttaaccaccacattgctcactgctactgctgctccaaccttttccatcaccaaaccagtccccaccattcccacaccagcaactacaaatccgcaccagcagaaattaaaaggaaaggagaatgacccccttgctctttcaccaaagcgacacaatgactctccccccatgaggcaatttttgaaaagatgtcgtaatcaaagctcgatgactttcgcttcagatctgtcacaaggtgaaggttcgtgccacaatgtttctatggatttaatggattcagatggctctcttgacagtaacgcggagattgctttgcaatcccgcgactcattatgaaaattttgagttggaatgcacggggtttggggaacccgagtgcgttcaggcaattgcgactgcttgtcaagcagcagtcccccaacattgttttcctcatggaaacaaagctttgtattaattccctttctcatgtaagacaatccttaaattttagtaatggcttggaggtgcctagagttggatatagtggaggtttaatgttactttggagggataatgttgatctaaacatgcagaattatggtcgtaacttttttgattgttttgtctctcttcatggcggtcatacatttcacttcacagctttttatggggaacctgccacacagaaccgagggatgtcatggttgttgttaaagcggctggcagacgtagcaccatcgctaccttggctagccattggtgactttaatgaaatcttgtcatccaatgacaaagttggtggtttaaatagaagtgatgttatgattaaagcctttcaagatgttattgatcactgtcaatttcgagtattaccttatgttggtgataaatacacatgggttaagaatcgaaagtcaattgctaccatcaaagagcggctagactggtgctttgttaacaataattggaatcaatcttttgtctcgccacaactggtacatcttgatttttatctttcggatcacagagccatcacagctgaattttcccctctgaattcgaaccttactgctgaaaaacgaaggagcagattcagatttgaaagactatggttgtcggatcctgagagtaaaaaaatcatctcctcttgctggtctaattttacttcagccgatccaattgttgatgttcttgccaagcttgattcatgtgccaaaaatctgcaatcatggcacataaacaagtacggtcgaatgaagaaacatattactgatgctcagcaacaagtctctcatctaaataacctgcaacatcacaccagtagcactcttacaaacttgcagcgatccgaggctattcttgatgaactccttgaacaagaggaaatatattggcaacaaagatctagaattgattggatgcaatcgggggacaaaaacacaaaattctttcatgctaaagcaagtgcaagacgagctaacaacaaaattacctctcttcgaaacgctgctggtgccacagtaacaaccaagcaagatattgct

SEQ ID NO: 251335 - DNA, 527 bp, Cannabis indica
aattattgtttagtcaaattttttgattttctaagcataaaaaatcaaatttcccttgtaatattatcctcttatatgggagaattgtattgagacatagtcatacctagctgtgatttgtcagaatcaaatattcctccaattttaatttttagcaattcgtgatttgatattttagtatttgtcgaaagaataaggaaaacgtgcttaattgttttagttcctaaaaattattaggatgcttatgttggtacgtaccggtatatataccaaatgatcttattccatttttttaggggaaatgatcttaatattccctttgctataaaaagaaatcaagagataatttataataatccaagtctctctctttattaattttgcaatattatgaattgtgtgaacttattaattaaaagaaaataacgcacgataatttaattaacacaacatgtatataatatagggaaatttgaaattctatgcttaaaataccatttaatttttcccctaaatgcatagttatt

SEQ ID NO: 251336 - DNA, 776 bp, Cannabis indica
ctagagtgaagagaagtgtagtgtaatattatcaaccacaaacattttttttttaattttgaaaaaaaaaaaagagagagagttcaagaaagctttagttgttttaatttttctttcactctaaattaagtgagttattataagccttaagaataataattaaataattattttgttaaacaagatgtaggagcttttaatagggttttttaattcttattatgatcaagtcctcaaacttttagtctattttctttacttggcccactttcataatcatatattgtcttattatatctttgataattagtaattactcacatatattaaatgttgtataaatagagaaatgttgctattactatatagctattatagctaataatggtaaaaaattgtagatatataatgacataatttgtcggtgtaattttcatttttctcaaaaatttgtgtgtatagatgttgaaacctgtcataatcgatgttaatattactatataaatttcatgtatatgtacgtataatatatatagatatgttctgtattaatttgttacttgtactcatgataataataagtggacctaagattattatatccacgtacgtatatatatataaatatacatatatgaagacaagttttgagtaaggatgcacactgaacgaagaattggtttatattaatcttcttaagaattttattcttcgtcctcactttattcttatatatatctcatcgaaagtaaaatggagagtctcttactagaacg

SEQ ID NO: 251337 - DNA, 737 bp, Cannabis indica
aacacatttttgttttctatttttaaaattaaaaaaattatggttatagaacacatttttgtttcttaaacataaaatcttaaaaatacaaaatttactttaatttttgttattaaaaaattaaaaaacaaaaattttactaaacgcgccttacatttaatccatattttttttcaagatttcatctatattttctatatattcttttaatttttgtatattttgaaaaggaataattacacaaagtattatttttttgtaaaatatttaaatttttacgtttaaagattttattttttatttttacggtgttctataaaaatagcacgaaaataacaagaaaactatattaaagtaacaaaaaaataacatcaaaacaacaacaaaaaataacatacaaataacgaaaaattaaaaacaaaataacaagaatacaatataaaaatacattaaaaggccctatttttataaataaaatcatataaaaaatatttaaaattctatgcaacagtatttttgtaattttttatttaatatgtgtatttatgaaataatgccttttgaaatttccccataacactattaggacaataggagagaagacaacccattacttgggccttttattaaaatttcgaaacggctcaaaaagtagaaggggttagttgaaaaatgccccttttattaatcaattaatcaaatttacctctaattttatatttatttgaaacatacct

SEQ ID NO: 251338 - DNA, 568 bp, Cannabis indica
ggtacagctgcctatttgattaatagaactcctacacccaatctcaaatttagaactccctttgaagttctaaactccatcaaaccagcttatgaacacttgaaagcttttggttgccttgcctatgcttcaacattgcttaactctatgtctaagttttctcctagagttgtcccttgtgttttcttgggatacccgattggtatgaaagcttacaagcttttagaccttaacacagatagaatatttcattctagggatgtcacttttcatgaaactattttcccttttgtttattcaagctctctgcccattgaatatcagaatttcttttctttgcctgaatcagctactgtacctgatgtcccttctcatttttcaccttctggtgcaagttctgcatcacagaactcttctcaacacaccagttctcctgtttttctttgcctcccaacagatctgttagacacacaacaaggccatcctatttgaatgattatcactgttttttgtcctaacaatctttatgttacttctcaggacaatatgccagtcactgcatatcctt

SEQ ID NO: 251339 - DNA, 689 bp, Cannabis indica
atcttgagaaggtggttcgagaagagacagcagctgcaatgtggaacaaattggaacaaactttcatgacaaaatctctgcccagcagggtttacttaaaacagaaattctatggttttagaatggatgaaggtaaatcgattgatgaaaatttaaatgaatttactaagttgttatctgatctttccagcttaaatgttactattgaggaagaggatcaagccatatatctcctcaactctctaccacaacagtatgatcaatttagggatacaattctgtatgcaaaagatagcttggtgttggaggaaatcattggggcaatctattcaaaagaaatgtcattaaagaatagtggaaagctttcaagaaccaatggggaagttcacttcacgagaggaaggaacacacaaagatccaacagtcaaaacagaaactacagcaactcagggtacaataagaaaggaagatctacttcaaaagattcaagtagagatggctctaaagagtataataagtgctatacgtgtgggaagacaggccactacaagagagactattatttcaataaatataaaaacaataacaggtttaagaaagatggtaaaagtggaaacaagcatgaagatcatgactcagcaaactttacagatggctatgactcaggagaggttctaatggtggcatcc

SEQ ID NO: 251340 - DNA, 511 bp, Cannabis indica
tgggtaaccaaacttaccatttttaccttttttctaaaaataggaaagctagacaactttccttccaagtttgaatacacaaaataggaaaccatattaaacacataccagccgaaatacacaataaataataaaatattttttttcaattaaatatgccaaaaatagaattaacagcgcgaattaactcctctttatttatgcattcgtggacatcttttaatcgacgaatttcgatcttatatgtcgacttctcaaatattgatgttggtaataattttgtaaatatatttgcaagattgtcacttgaatttgttgaacatcagtcaaatattaccacctcttgatgatcgtgtgtaaagaggaattttgataaaatggcttaaattctatctccttcaatgtacattccttttagttgtgcgatgcaagtagtattatctttatagagaactgttgatacttcattattgggcattaatacacatttccttgaatatgttgtgtcatt

SEQ ID NO: 251341 - DNA, 1118 bp, Cannabis indica
aaggtccttgtaaaataaatttcaacagcatgtcactatattttgttcttgatattaattttcaagcacgagttatcaggaataaaatattagaatgactagtcgtgccaaataatcttctggaatgaattaagaggttttctcaaacgaaaaaagtcgctcctgatgacagtttttgttgtatacaatctaaaaactgaatttttaccaatacagcgacaatggatagaacggttgatggccgtgattcacggtggcttggacgattgatgctgaaaggcctaagaatttttcttccctagcttaattacttggactaattttacaatatttgtgtaatatttaattacttctatgaaataaaattaggtattttagccaatcctaaaattaatttaaataatatttaatttaccttttaaaaaaatatctaacttaaatttaaattaaataaaataatatataaattaataaatatataattaaattaaagtaaataaactgaaaaaaaaaaatataatccttatggcttttggcgtcagttcctaggggtatatatggcgtcagttattttctaggaatcgatgccaaatatgcctctatggggtcggttcttagctaataaccgacgacataaggtaccctatagcgtcggttgttttcaatcctacagtcgcccttattaacgttgatagtgaattttgctaaaaccgacactgacaggctttaaaaactctctaaaaagtgtttttgtagtaatgtatatttataatagtaacacatcaaaataatttcatggaaaaaaaacacacatcaaaatgatagtgaagacatctaatagccatactaatagacatctaatagacatctaatagctgttgaatgaaaaaattgggaagttgaaaaaaactttgaatgatttgtcttcacggcaagagctgggcacttgggctgatgttataagagtggaaaagcaattgaatggggcattagaaaaggatgaacaatattggcgtcaaagaagtagagctttgtggttgaaatcgggggatacaaatacaaaatattttcaccataaggcttctaggaggaggaaaaaaaatgagattaaaggcttg

SEQ ID NO: 251342 - DNA, 1109 bp, Cannabis indica
aaacctttcatatttttcaattattggatggaccagtcaaactataagtcttaagttctcttgaatttgaataaaaggatctctagaatggggctacataaaattttggcaaagctgaaaagattaaagaacttcctagagaagtttcagaagatggaaattggagacattcctatgatgtacaactttgctatagagaggtacattgaagctcaatctcttcttgctacaaaccaaaaagactctacccttaaaactattgagattgactctaaggagaaatttcttactactaaacgaaggtacgcgagttacatgcaacatattacaaaaatcttgtggttgcattatggtgattcaaattctagctatttcatgctagtgtcaagaaaagaaaagagaagaaaaggattaccaccttcattttgaatggtaaaatcattgatgattatgatagtattattgctcattattttaatcacttcaagaacatcatgctcgccaagagttcttcttctaaaaagctgaatagcaattgtttggttcatggaaacaagctttctttgcaacaataaatccagcttgtcagacctttttcgaataaacaggtttaggatgctatgtttgatataaatcagatcaaaagtaccgatcccgatgggtttggtgttgtttttatcgggctttggactaagataggggataaaatcacagaggccattctatctttttgttgaaaaagagtagattccaattgatgttaacaagacttccatctcgctaattctaaaaaatagattatctttcctctgctaccgactatcatcccattgcctacttcaacacattgtacaagtgcatctcgaaaatgatgtgcactaggcttagtgaaatcttacctgagattgtccatagtaaccaagacgcttttatcaagaaaaggttgtttgcgcacaatgctcttatctttcaagatcttctcaaaggctatatgagaaagaatttatctgcttgttgtttgatggagatcaactaacgcaatgcgtatgacacagtcgattagggggtttgtcttggatttattgaaggaattgttgggttttatgccc

SEQ ID NO: 251343 - DNA, 776 bp, Cannabis indica
tcaatcgatgacacatgacctgcagagatattcggaccatatctgaatgtttccaggcgaaaacatccaagttttgtttgagaaatgtgacgagtttttctcgctgttcaaaagttagtttagaaccaattttcaaaactttattattatctattggatcaataggtacctcaatggtgtcttccgcgacttgggtggttgcagcatagtcaaggatcctaggatccaaatctggctcatctttatgcggcacttcttctattctgaggacctcctgacgaggaggtggtgcctttagcagatagatgacattgactgacttcttttctgtgagtttgaccgctgtgttgtagccttctcgcaagtcagactggactcctcgcaaagaacctactgtagtgggagtagggaacttcattgtgagatgatagatggacgtcacgatcttcatctcttttagaataggccgaccaattacaacattgtatgccgagtattggtcgattactgcgaagtcagtcatcgaattagctacaacgggagcgattcccaaagtaattgggagtttgatcatcccttttaatgtgatggcatcgccagtaaaaccgtatatactcgatgtgacaggtcgcagatccttcttatgcaaccccatttgtttgaaggcttggaagttcaagagattcacagaacttccattatcaacgagtatgcggtggacgttgtctctgttgggttttgtgccctaaataaaacaaattttaatataatcagat

SEQ ID NO: 251344 - DNA, 599 bp, Cannabis indica
ttcatcatcttgttgatgaaattgtttttttttttttcctccttcttttaatgtgatgaaattgaattttaaagtttgtatcataattttttagtataatgttggtgaaactgttttttttcctaatgcttttagtaaagtaattaatttattttaatgttgataaaattagtttttaaagttggtatcatttttttttacattatttttatttttacgaaacttgctttagtttgtgattcccttgaagatatttacccattgaatgcttattatttttgagaaaacaaataagagattaaatgtcaaaccagagcatgaatgtagaaattagggtattacgtattcatataaatttatatgttggaaactagttttttatagttggcgtcatttttagattatattttttgcattttttttttattattttattaacgaaactggttttactttctaattccttttattatatttaccccattttgtatgcttaaataaactctagttttttagaaagtaaataaaatattgaatgttaaaataaaaaaattaagtaagaagtttggctattaaatattcatatagaagttgtactt

SEQ ID NO: 251345 - DNA, 956 bp, Cannabis indica
ggttcaaaacccagaaaaccagcagcaaaacacgaaaatcagccccaaaaactcaactaaaccatcccaaatcacaaccaaacttccaaaccatcaaatagggttgttaacaattattaaagagtcaagaatacatacttcatgcatcaattctaacaataactcccataatttccgattgtaacaatatacaatattaagcaccaaactcactaagttcaagctcaaaacatgaacctcaacccattcaatcatttaatttccagctacaaattctaccaagcatagctaggtttcaagcacaagaagcatctaagaattaattccttagctcaataatgaagccaccacaaaattatagaattaaacacaacttaggaagatcaacactaaatctataagcatgcattcaagagaacatacaacaatttcatgctttagaatcaccaattcatttcaatttcagcaagaacttaagaacataaaacagtaagagcactacctcaagtattgcaagaacctccttgaattttccaaactccaaagatggcaagatcaaactttcaaccaagattaaaactagaaaacttagagtttaagagagtgagagagagggttcgggtaggaggccaaaagaaccagaaaaatctttccttttttatcaaaatttccatttagttaaaatccaattaaatggccaaaagaccaaattacccccaagggccataattcacactcacacacgtacaagggtaaaagtaacatttcatgcacaattaatacccaattaatttcagattatcaccattaaataaaaatgccaaatatttcaatccaaattgcatttcgggcccgaacccggttcggcccgaaacacccggttgtgactatactgcgtcaacctgtcagaatacacctaaaaagacaacacaggcatactatataataatatagtt

SEQ ID NO: 251346 - DNA, 554 bp, Cannabis indica
agatcaattctcaacttaatctttttcattgaatcgatctgaaggataaagatagtaaacgtaaacatgcccttgattcacttgcttaatagtaaatattacattaattacgtttttttttggataaacttgggtgctaaatgtgccatgactacttaatgtaatgtttcatttaagaggaaaaattagtctataatctagcaattaatcaatctttcatcgtttcactttcacacgatatagtagctaagactatttatttattgtgggaaagtataattaaatgttttataattcctaattattacttagtatatatatgaaaataaacataaaaatataacaataatagagcaaagaaattttttcaaaatttgatagtgaaacatccaaaatattatgtatatatataaatgaatgcttgattagatgctagcagctgaaaatcaataataaaataaatccccgtttaataaattctattttctaaaaaattctgtaatacaaattatgcatccacctaatttctatcttctccatggtgaatctacttt

SEQ ID NO: 251347 - DNA, 926 bp, Cannabis indica
aaataaatttttctagtttgtgaacttctcgttcacaataacataaattttattgtacttatacgtgtaatgtacacacctgaagacaaattaggtaatttttttaatgtgcactttttttcttaaaacaatagatgtaatacaaagatactcaaaattattttcatctattgtctcaatatgatatctattacgatgtatctttgaaacttaacagattcctttttgattcagtggataataaggcatcatctataataagttttgttcctctagacatcaatataatagctcttctggagccttcaattaaacttgcagtgcctgatattatattaacatttgccttcattcttaataaatttgaaaaaaaaattatcgcttctaagtattgtatgagtggttgcgctccctaccaaatatatataatcaccattatttgtagaatcatgtataagatgacaaatatccattacttcattaaccaacaaaacaaaatataataagttcaaaatataaatacttaaacaagaaaaattcattacataaacatcccaaataaaataaagaccttaaagtaaataaataataataaaaaaaaaataacaaataaaagtgactaactgtggacattcccatctctattattgatattcatgttactattaatgagatctttattaaaaaatctataacatccaagtacgtaatatccaagggctctttaaaaaaaactaatcatcttgataggaaaatttacttctattttctcatttccttttcacggatgcttgataaagatcaacaaggtattttgttgtacaacaagtacgtgcccaatgtccttcacatctaaaatataagttttcagaatttttacgattattattttgaggatcttttcccttgttctcagtagttgtgct

SEQ ID NO: 251348 - DNA, 1203 bp, Cannabis indica
ttatacggtggaaaaaagctttcaccaggtatgttctattatgttttgtatttgtcacatttaattatttatatatgggtaaatagccgtatagctacccaaaattttgagttgtatgaaatatacatttcatgatttttttaagcgatataagtaccaaatgttaatataaactttattagtgttttcaataagacacatgtataaactcaaattctaaatcattgggtcttaacagaaacatataatttgtattgatgaaaattactttgagtacttatgctgctaaaagaaatcattagatttatattggttacaaacataaaattttggatacttatatgacaattattcctttatataccaatatatatttatattatattaatttagaagacaacactatagtagaggtaaaatgtttttgtcacatttttgttttgggtatgtggagagataaaaaattacagaaagtttggtaatacttttattttttaatttttaattacaaaataaaagtaaaatttgtgttttttaaattttatttttaaaacacaaaaatgtgttcttataactatttttattttttaatttgaaaaatagaaaataaatgtgtgttttataacttacatttttatttttatttaagtcgggtctgaagtcgagaccgtggtgcggcactggagccaggcggagtccgtgtcctaaggttcaagttggggtcagagtccaaaatattaattaggaaaaaaaacttgtttaaaaaaatttcgtaagtgttttttttttaaaaatttttaaaattttgattctcaattaaaaaatttattagtgaaaacagttttatagaatatgtttttgaaaaatatttttacttttttaattaaaaaaataaaaaattaattaaaaaaatattatcatttttaattttctagaaaattttgaataatttatgaccttataaataaggtttaaatagtcaattgtacaaatattttaatttatttttatattgagtactactaattactgtaattatttcaattttttttttaaaaattcggtaaaatatgtggtatataaaaaaattaatattataatttctccctgcattgaacataaaaacaaatacaaaaatgatattcattttataaaatttttacaatatatatttgtaaatattgtttgtaatggtgttctttt

SEQ ID NO: 251349 - DNA, 820 bp, Cannabis indica
tataattttgttaaatatgctgacttaaaatacttttacaatatgtttggtagggtggatggagaatagagagaatggagagagagttaagagaagatggataatataaaagagggagagcagagtaatgattcctctaaaatgtttgataggagggatgaggagtgaagtgatattattactattcatttatgaaattactaagttatttttaaaataattttttaataatcttttaggaggttaatttcgtaattttaaacaaataagaatggagagtaccaactctttttatttttatttttttgaaatgaaacttcatttaaggttgatcaaagggcaagagccctataagttcagtagataaactgcaatctcactaagagataacaactgtcggccaaccacactgattctaaaagagcattaagctcaagactcacgcaggagcatagaaagggacaaacactcccaaaaaggtccactaaggacataatgtgcaccacaccaaaacaactgaaacaaaaaaaaaaaaactcaaattaaataaacaacaacaaagatataacaacttcaacaatcatcctcctaacgcacaggaggcgaaatgcaagcccgaaaacacaaattataatatatgtatattatttttataattaatataaatataattatttattttaaaaaatataaatataattatttatattgatttattatataattattagctaatataataattattcataagaaatgattaaaaatatattattataattatataagaaaattagaatattctactaatttttgtaat

SEQ ID NO: 251350 - DNA, 1369 bp, Cannabis indica
agaggcaaaagagaatatgtctatgctaatacaaacagcctcgcggttaaggcatttttaagttttctccactaatattaaaaggggacgaaaagccccccataacaaaaaaagaagaagaaaagaggaaattagagataatatatcaagatttacttggatcttgggactaacttggaggttgatcataataagtgtgagcctccttcttagaagaaaattctataactttagcagagtaaacctctcgagattcttcatcaaactcaagtgaaggagacacaaggtaggtgccactctccatggcttgtaccttagccaagtactcatcttcttcgttttcaagcaacttcaagactgcagggtctactttccatagccaatgaagagtggccacaaaagatatctccacagaataaagacgtaaagcttcttcctattcaacagccttgataaaatccctcattcattgataagaagtagcagccaacctagctaaagctttggcagatacaaaggacttcggaacaatggcttcccatgagtccaattccttccttaggcgcttctcaacatcaacgtgactcttccacaagtcttttcatgcaccacggtcagttccagagagcccaccttatctttttgcatcttcacctcttcctttagcatatgaacctctccctttgccactttgagcaacgctccaccttcttaagtcaaagctctaggccgctaatctcaagtcatttattttggatgtccatgttcctagtctccacttgagcctcaatgaactctttttcctgtgtaaaatcgttggatgttttagtaagatacttcacttgagcttcaagcctccgacatatttcctggtcagattagtcgacggggtccacatactcattgtatttattttcatacatagtgttgtacttcttgtcggcctcttcaaaggattgttggcggtactccttaggatgctttttttatatcatctatctgagaattttcctagactttgatctctaaaatctcggcttttactctgttctcggcatggactttgtttagctctacggccatggtatcaacatcctgagaagtcctttcagtgatcatagctgtaatattttaagattaaggaaatggattagtgaatcctaactagttgaatatgtataatttgagattatattattatataatttattatatgtgaattaatgtgatgaatgacatgttaagacgcgttggtgagtcaggggcatttttgtaattttgacccaagaagggtaaaatgtaaatttaatttaattacgtgcttatggactatattattatatagtatacttgttttgttcatttttag

SEQ ID NO: 251351 - DNA, 518 bp, Cannabis indica
aatttcgtttttttttaaattaatatagtttactttagttgatcaacttgtcattttatataataccacgtgcatcattatatattcaattatacatatactatatacaaatctaataaattgagcaatattagttggatgagtacaaatacaaattatttgatctataatttaatataatatataatattgccgtgtcaaatataataaataattagttagggatatattgaattaatattgttgaattgtgcaggcctgtgatacaaaatttagctgggaagacatctttaatggaagcactatcatgtgaggtgttacaagtgtcattaaatgtgactccagatttccaacaaaatttcatttcaaagatgagattgacaagcaactccattatctctcccccataaatatataataaacaattactcatatataatatattatctatacctatatctatatgaactatatatattaattttctggtttttccttactagtattggcacaagtta

SEQ ID NO: 251352 - DNA, 504 bp, Cannabis indica
agtttcttcttccttttgagcgacctttcgtggtcttcctcaaactcatcctcatgcttatcatattcttgagcatgttgttcggctctagctcctcccttcaacttagcttcgcgcttaagttcaatgagctccttctcctgctcaaaatactactgagcatgctgcttggctcctgcacctccctttcacttagcctcacacttcaattgaatgacctccttctcttgctcagctcccttagcccagccaacactggacttcttcttcctcccattcacaggctgaggtataaaatatgttggataaatcctgtactccacaaagttggcctccgaggtcaacaaggttatattctaagcatcatccgatagttgaacaatcctcagagctctgtccctaagaaccagtgtaaggggtggagagtaatatataggaatctactgaaaccgagtataagtggtgcccatgccttccacaaagtaatactcgtcaacaaaattc

SEQ ID NO: 251353 - DNA, 944 bp, Cannabis indica
aaaaaactcaaagatgccaaaggaaattagctagaagaacttcctgaagttctatggtcatatcggacaactcagaaaacggtaaccggacagacaccattcgctatggcgtatggatttgaagctatgctacttgtagaactcgagtgaccatccagcagaagattgatgtacaaccaagatactaatcacgtactcctggccgaatcattagatgaaatcaaagagagacgagccactgcaaacttgaaattgatggcccatcaacaaaaagtagctcgatatttcaacaaacaaatgaaggctcgaaaattcttcgtgggagatatggtcctaagaagggtactcctaaacaccaaagacagtatgataggtgtacttggacctaactgggaaggaccataccaagtggtcgaagttctcaaatccggagcatataaattaggtaagtataatgaaaaaatgcaactcgttctagtaccacggtattggaatggggaacatttaagaaaatactacaaataaagtaccaggtcaaatgaccacattaagtactgaatgaacatttaatcttaactgaatggcctgctgggcggactatgctcaaaggttttgacaaaagagaaaaagtactcaggtcagatgaccaccatttaaagtacaatttcttatttctacaatttgttttatttcatgttaagctaaaagatcacattagatcaattagctttgatgtaagttgctacagtaataaatacatttttcgatcaataattgaataaagatagttatttcaaaattcaaattgagtcaaaattatcaacatgtttctaatttaccatccattacgtacaaaaggtttggttgaacccaaagcaccgaacatataaaaagtatacttgttagaaacaagtgaaaaagagtcataagtctgctcggtcaat

SEQ ID NO: 251354 - DNA, 556 bp, Cannabis indica
ccactgtctataagaactgtgacttgttgttgatcgattttcccggctaattttattgtgtgagctgaagatatgcccaccagagagtttaaagatagtgtggcaagggtctcttcaacctctgctggttcttccgtcgttgggaatagtggtggcgactccacagcgggtgggggttcgtcttcatcggcaaacaacagcacctgtaacattttctgctcacacacatggccccgatgatacttcttatcacatcgaaagcatattcccttagctcgtttctcttggtatccggactcagacattcggcgcatcgtcggagccctccccgtggtgtttcttggtgcgccatggggggcagaagaagtgttgataggagcggctgatatggcgcgactttggaaagaggcagggtgctggcggtatggtgttattgggcttaattgtggcttgttaggcttaaccgattgacccgaggtgagtaaatggttcccatcttcgatcctctgagctgtgtccatgatctgagccaatcccataggttggagtatatgga

SEQ ID NO: 251355 - DNA, 701 bp, Cannabis indica
tcatgcaaacaataaatgaatttttctggtttataaacttctcgttcataatgatatgagtttctattatacttatacgtgtaatgtacaaatttaaagacaaactaggtaatttttctaatatgcctttttttaaacaatagatgtaatgcaaagatactcaaaattattttcatctattgtctcaatatgatatccattacaacgtatatctttgaaacttaacagatttctttttgatttggtagataataatgcatcatttataataattttcttcttttaggcattaatataatggctcttccagaaccttcaattaaacttgcagtgcttggtattgtattaacattagccttcatttttgataaatttaaaaaatatttatcacttctaagtattgtatgagaggttgcgttatccattaaacatataatctcatcattatttgcggcacacaatgtcgctaagtgggcttttacccaccaggtttatggatcgatcccgatcaattctgtaccggtaaatattttatgtaataaccaggaggtctagtttttaattattataatataatcctacgcatgttttcaaaaaaaagaaaaacataataagtataaaatataaatacttaaataataaaatttcattacataaaccctaaatcgtaaaccctaatttaatcagtaatcaaaccaatt

SEQ ID NO: 251356 - DNA, 614 bp, Cannabis indica
gtcaatcgaggctcaaatcaccgcccgatctccgccaccacccatttgacccaggagaaccaagaaacccaattaaaggtttgtttgtggaatctttttttaagtaattcgcaataaattagtttattttaggtttgtttgttgttttagtattgaaatttgtatttaatatctggatttggattgttttgtgtgtggagattattatccgtattttcgaatgaggacatgtgtagttttcaaagccgattacaacttaattacttcaggcccaaccaagataatggactagatccattagcgaagtcagctcttctagatgatggacaaatgactcgtccaggcaagataatcttccagcacaacatgaattcgaaagatatcagttggagcgtcgtccagagaagtaatcaacaagcatccaaacatccagttatgtatcacatcaattaaataccaaatctcacgacatcaggacttagctcccaggatctcgtccgaggatcatatcttcccaatatagaaaaatagtaattgatgatcaagcatttaatgtgtctttattatctacaaaagtaggacaaagtttcaacaactatcaacgtgatgtggca

SEQ ID NO: 251357 - DNA, 1137 bp, Cannabis indica
aagagaaactagagagagagagaagctctaaccttgtgggtagttttttgaatgtgaaaaataagcaagggaactctctttttataggtaaaggaggcctacgaaaataggagaaaaatacaaattagatgtttttgaccatagatgatgatccaatggtaaaaattagcttctaatggtgatattcatttttcggagcctggcaggacctaccatggtaacccgaagcttatttttgtaactctcttaggtgaaatttgtggtcgatagcttcataattgtgattgaagtgtgatacatgttttgatagagatttgaattagctctaaaatgtaagttgaatcgcatcaatcagatcaatattgagtgagttatagttgtttcactgaaggtagttcatgacccagctcccaagttgacatctagcacccaggttgacatcccaatgcccatgttaccatatgacaataacctgggcacgaggtaagtgtaaaagtatccaacggatgtactttaagatgcttaagtgatattttgacatcacttagtctatttctatgttctggcgaagctggacaccaattctcggagatattgctatcttgtagaaatgagagactcgaaactcttcatttccgagtgagtttcccatgttagaaatgagaaatgcaaaattgtgaatttgaatttcctaacttcatggatcttagttattgtgaaaaactagataaatggtcaaaacaaaatcaaaatcagataagcagatgccaacgcatcagaccatttatcaaccttggcattgggcactcattcccgagctttcgaaatgtcgttttgatacttctaaggttcttaaacttgaggacaagatctcctaccctatttttgaccattctaaattcattgatcgaatcatatttggtattgtgtgatttaaatcaacgcaccaggttgattgtaaacttgagctctgggccctatttctaggggctcagttctgtggttttctcctcgagtttgcttgaatcttcattatttctgatgacggaaaaaaatttggaacacttttttgagaacctaattggaaataacccaggttgacaatatctcaatcgggcgttgggcctagtgccaagt

SEQ ID NO: 251358 - DNA, 677 bp, Cannabis indica
ctaaaaactagtatagaactttccatagactgaataagtatctttcttataactttaacatgcagcctcactggtagagttagagacttcagattggtttttatgcttctgacaaaataactgcctccacccccagacgtaagcatcatctcatcaatagactttctaacatcatggaaagtttagagacttgatttggtgtagtctaagagtaataaaataccacccttatcaactaacatatagttcctcttctttatcttaagattcatttgattgtcttccaatgttccttttcttgattaatttgataccgactcatttctcccactcaacagtaggtgtttggtctaatgaatagcaaagcatacctgagacctctgactgttgattctaaggaattctttctttggcctttatctttttcggaatagttgaaactgtcccttactcaaataaaatatatgtctagaagtcgagaagcttctatatattgccattaaaaaaaatgcttcagcgacttactttacttactaaagtaagtcccttgcactagagtaagtaaattaccaggcatactacaagccacgggtttagataatcttaaacctataataatactaggattatgaatttttgttaagtccattgaaagacctattttaaaaatttacttt

SEQ ID NO: 251359 - DNA, 334 bp, Cannabis indica
agacggggaatccccgcccctaatgagtccctgcgagaaatgtgcatccctaccctaccttcttcaaccaaaagaaaaaaaaattacaggcggttgaaacaaacgcaaaaaccaaccgcaaattccattcgcttcatcttctctcttcggtccgtttcagaaagggaaattttgttagaagaaaaccgagatagaaggcccattggttcagattggatcaggcctctccaaaatcccaagcgacatatttttgttcttttaggggaattttgtaagaggaaatgttatttaatttgctatggaaaaaaaaagaagaatttaatctattttgatt

SEQ ID NO: 251360 - DNA, 527 bp, Cannabis indica
tatatatatttatatgtatacatatataaatattagttagcttaaaggtgataatgaatccacaaagcaactccattagttatattaggttatgaaggctaactatgtatagtcacaacaaagaagttattgatgctaggtacctcacctagctagggttgctatcaattaggttaggcaatgcaggcttatctttaatgcttggtttcaaagtaaatagtagttccaaattttacaacttcaattttcatgtgtgcacttttgcttcaattttcttgtttcgggagctttcgattctacctaaatgtggagaaaaatttagttcaaaatcttgtgaactaaaataaggatgaatagattagtttaccgtaaatgaatttacgttatctgatggaactaatatttagcatcattctttaaaaattttatattttaactattatatataaagcaccaattgaaagtgctctaaatatagataaataacatagaatgttttttaaacattacaattcaaattgcaaaaa

SEQ ID NO: 251361 - DNA, 778 bp, Cannabis indica
tatatattataatatatattgaaaccaaatatattattaaatatttttctattaaaaacaaaatataaattgttatatatttatgcttcaaatactccacatttatatatatatttatataaaatagtgttaattaaaaaaagagttatttgcggcataacctccttaagtggtcaggtttttacaactaaccctcaattctaaaattttggtggtaaaacctcctaaacccaagttttgttagcagttagccctttccatctatttttgggtgttaagtgccaggttggaatgtctacgtgtacacagtgtacacgtggcacaatttaattagtccatgtaataaatattaaaaaaataaaaaattaattattttaaaaataaaaaaaataaaaaattaattttctataaaattaaaaataaaaatttaatttttatatatatatatttttttctttctttcttcttcttcttctatcacgcctccttctaaccctagctgactcccccaaaatcccatcctcaaaaccctagccgactccccattcccagctccacgcacagccaacaccgatctcagccgcagctccgcctccgtcctctcctcaccaccgaaaaacagttgtatagtcaccaaccccaacatcctaaccgccttcaagcttgcattctcctccgaaacacgcacgccaggattgcggcatacgttggccccggcgctgtctccccctaaaaagcacttggacacgtcggcctcctccgggaggattccttctct

SEQ ID NO: 251362 - DNA, 706 bp, Cannabis indica
ctcttttacgaaaatatttttccatttggataagttactgacactcagactatagaccaattttttccacataatactgagaattacccatctcaaatacacaactctccccctgtcaccactgagacaacttcacctcagctacatataccagacagttcaattcctgaacattcacacactaaattcaatcagtgcaaacacaaaaatccaaataagcaaaatgcacaacaatgcactaccaaatccggtcgtgcacctaaaacacctggttatttaaaagattaccaatgtgactctgtcacaacaaatcacagcactcatcaccccttgataaactttctgtcataccataaattctccccagaatttcgtgctgcaatattatccattagcttaattcccgagccaacctcttacaaacaagcttccaaattcaaaatttggaacaatgctatggataccgagattgatgctctcgagaaaaaccatacatggattgttgtacctttaccaccagatcaacacgtgattggcaacaaatgggtttataaaaagaacttcaatccagatggcactgtcgaacgttgcaaagcacgtttagtcgccaaaggatacacacaattaccaggcatagattactttgacacatatgccccggttgccaaaacacattaaaattgctatttgcactagctgcaatcca

SEQ ID NO: 251363 - DNA, 1198 bp, Cannabis indica
aaggttttacttttattctatttttgtttcttttttttgaatcaagttgagctacattgacaaggttggttgtcatacgtacaatattatacaaaaaaagaaaattacaaaattccaattttacataaacaaaagtgggacaacaaagtaaaatttattttggtaaaactacatgtttaccactttctacaaatccaaaatagatattagattatttttccctaaaactaattttgtagtttgtgttgtctctagtactaacttaatagattgcatgcatttacagtacttatacatatttacatgggttcttattatgcagtaaatattttggttaaggtgggaatagggagtgagtagatgtcctcactactttgccatctttgaactcaatgttatgtagcttttgttggcaccatttaaggtgtttcatccatagtttgttctacagataattaattttaaaaaaaaagtcaaaatgaatagcggaattatcaagagtaaatatcattttagactttatattttgtaaaagttattaattaaatttttaattttttaaaatggtacaaaattaatcttgaacttgattttttaccaaattaaaatttgataaaaatatttacatttttttgcatctgtttgtcctacaaacaagcttcaagtttgttatattaaaaaaaaaaaaattaaattcaaagtctattttgtaccatttaaaaatagaatggagtttgaattatcatttaacaaaacaaatgatgtaattaataatttttataaaaatatataatttaaaatagtatttaccaatattaacaaattaattgtattataaataatcatggatttattaccttttggagtctcttgttgagttgggctaaaagctctaaatctcttgggtcttccacaggtggataagcccaaggagagtttttgattttccaccaaggctttttaatgtcatctgttttgacaaacaatgaaaaaagcttgtatgcaatcctctatggctttcaacacttggtttaaatttgtaccttctcctctcatttcttccttgtcatactccttcaagcctttcactaaagataatatataaaaatttgcaagacagaaattaattagatcacatatttttttagataatatataatattatagagtttaagatcaattcagtgtacacttgttc

SEQ ID NO: 251364 - DNA, 900 bp, Cannabis indica
aagaaagtagaagaaaaagtagaaagggaggagatggtgtattatacgataatcatgtacttgtcaaacagtgtttgaagaaaactcatcgcagagaagatgacgaaaggagtctggaacaagttcgaaaattatacttaaagagatcaattccaagcaagtttcatttgctagaaagattatacgtttttagaatgatttcttctatttctttatatgataatattgataggtttaatgagattattgtaggattggataatataaatcataaggttgatgaacaaatccaggccatcatgttgttgaaattgctcccaatcgaatattaagatgtcaaggctagtatcaagtatggaagagacgtgattacattggaggatgttcttgccgcactcaagtcaaaagatttcgaattacaattggagaaaaaaatcaaagaggaaaaagtgttcttggcaagagggagatcacccaagaaagtaaattcaaagaataaacaccatcactctcaatcaagatcaaagtctagagagaaggaaactcaaaagtgttacttttgtggaaggtccagacacttgcaaagatattgcaaaaagtgcagggaacagcaaggcttcaacaaatatcacaatggagataggaaggacaaccgtcattatcaccacaggaaggattcttcttcaatcatagaggatagtgatgactgctccacggatggagaattgttctcaaccccagattcttcaatgaacagggagtaggtttttgactccaaatgcacttatcacatgtgtccaagtcgagaatcattttttgattatagatcagttgatagaggtaaagttctaatgggaaatgatcattcatgcaaggccattagaatcgaaaagattacca

SEQ ID NO: 251365 - DNA, 1145 bp, Cannabis indica
cagaaaaccgaaaaaactgttcaaaccgacctaccgaacaccgttggaactgaaatcggcggaaccgaaaaccaaaaaacccctaacggtttaaaccgccaatggtcggttggttattttttttggatagtaaaccgaccaataaaaccaaaaccgactgaaatactcattggttcttttattgctcttcaattttgcctcttttttctcatatttcattactattacatcaagaacatcattatagaaaaaggacattacaatccaatttcttgtctttgataatctctcggccaggacatggatgcaaaaacgctacatctgcctgacgaaccaccgatgttgctgaaaagatttttatgaatgatattaagaaagaagaagaaaaaaatggaaatggtcaaacgaacaaatatgaaaaattgaatgaaactttcaaattagacattaaatgcatgcaaattagacattaaatgcatgcaatggcctgattatctatattgaattgaacattcaattagacaaatacccattagtgcattttgtatatacatatacaatcatcaaaccataacattttcttttcttattctttcaaaaatgcataaaaaaacactcacttcgaacatggcgttcttttagagggtattctacgtgattggtagccttgacaatggcattattttacacaaaaaaatcgatttggtcggttaaaccgtggttcacattggtcggttttaaggatgtttctggattagtcagtcggttttcagattgaaccaatccaaaccgaaaactgaaattcagatttttatttgtaaaaaaaccgaccaaacagatcgatgctcagccctacccggcaccaccaagatgtatcaagatcttaaaccttacttctagtggagcagaatgaagaagaatgtggtataattcgtatcgagatgcctaacctgtcagcagatcaaggctatacatcagagaccgatagggatgttacagcctttaaccctacctgagtggaagtgggaagatatgacgatggatttcgtggttgggttacctagaaccacgggtttgtgtgactctatttgggttgtggttgacctaatcacaaagtctacacattttctaccaattaaaacaac

SEQ ID NO: 251366 - DNA, 975 bp, Cannabis indica
aaaccaaaaattcagccattagtgattgagtgcatttccacacctaacaagttggtcctcaatcatagtgtgcaagactgtgaagaatccaaacacaaggaaggagttttgggcttagatcttggtgatactctgctacagaaaggatacaagggttagagatctgagcagaagggaacatttaattccgttacaaccaatgtgtttatttacatcgttttagaaattcatattaggatgttaaaaacatacatgttagtaaatctagatcctgataaaatatattccaaaaactggtatcagagccatagtgattgatttacattcaagtaatatggatttaaaactatgtatgtgtgatttggatgtgattcatgttgatatatgtgtttattggtgactgattgatgtttgcaaatattttagtaaataattggattttcgttctggaattatttttattggatagtatggaaaaaattaagccatttacttttttacaaaactcaatttcgatattatttgaattagttatgaatttttgaaaatcaaaaaaatcaggaggtggtgtcaccccacgtgcgtgcgtggatacgagtgatcactcgagtgtcatgcacattcagagagggcatgtgtaacgccctaatgctaaggcacactatagtgctttttcaattacagtgtttctttgctaatcaatgaattttcttgaaaaccgtgtcaagttaatacttttatattaatatataaacttcataatatacaaaagtatttacaagttccgggatcccgttttcaaaatttttaacataatatttcaaaatacataatattcaggtcgcgcagaaactaaaaaattaaattctcaaatgtcccgagagcgaacacttcaggtcacgctgattcgacatgtacaacctcatcctagctcaggttcactcctgttcagctttcgcctttcctttacctaca

SEQ ID NO: 251367 - DNA, 1265 bp, Cannabis indica
ttctattatattccgtttaaatgctgtcatgtctttgtaaattagcaactttgtcgcttaaactttgacaaactatcaaatagtgcctctcaaaataaaaatgagaaagattcaatattttttaagtaaatcttaaaaaattaatttaaataattaagaaaattaaaaaatgaaattaataaagttttaaacctaattaagcgatttaaaaattatttatttttttattaaaataatacatttagatttaaaaaaatatattaaaaattcaatttttgtaaagctaaattttacaagaacgtgtctatttttttaattccaaaaatctagatttgtttaagctaacataaaattttattattttaatttctattttttttttaaaaaaaataattttatgaaatttcaattatttttttttattttttaagatatgagtttataaatataaatcattttagattttcaataattaggggttgattttttaagatacgtgtttataaataaaataaattttaaaaatatttttagaaataaattaagttttataagtaagcttaatattttttaattaatttaatatttttatcaaattttctaataatttttattaattttttctagtaattaaatttgaacattataatttttaaattattttgaaaaaaaaatagacaaaattttgtattggtcaaaatttaatgtataaaaatacttatttttaacggtaaaagaaatagaccctaacagtagaggtataattatgtaaatatcatatttttaaaaaaaaaattcaacaagttgtacattttaaagggtgacttcaggtaataatgttgaaagttcaagatacaaaaatactaattattttaattaaaaagaataactgaaaataaaaatagaaagagagctaaaacttttgaattaagcaaattaataattttttatgtaaaattgtcaccaagttcattggttgaataagccaatgagtaatgaaattaattagcaaatttcatttaacccaaaaatgaaaaacataaatattataaatttataattaagaaacaaaagcaattgaaaacataactactaatgaatgaagcctcgaaaaatcatgatcaattattaatcattttgactttgaaggacccaaagtattctgtaggtaacagggttttttttattttctttctttcctttttctttttccctttttcccttattatactatttattatttttatctattattctatatttac

SEQ ID NO: 251368 - DNA, 554 bp, Cannabis indica
caataaatattaaaaatagagaaatgaagctttcaaaatatatatagagtctttaaaaaaaaaaaaaaaaatatatatatagagagaattgaatgggtgttctttttaattttttttttctttatattttaaagaagggaaatctattttacttaattctctccatgggtgatctatataataaattggatgcgagtagcattaaattataatataaagggacaaaataattgaaaagttaatgtgattggtggattgtatggttgtgatatttttcagcccatgacatactataaaattatacattaactttccatatctagttagagatcacccatcaattgctacatttatccaaaatggccacacctacatttaaaataataatcaataagattggctaaatcaatggtctcatctatttctttcattcatattcaattcaaattttgataagccgtataaaacttgtcacagtacacaatataaaacttatacagtattttttaaaaaaattcgtcccatagtaaaaaaagtaaaaaaatttaaaattt

SEQ ID NO: 251369 - DNA, 854 bp, Cannabis indica
agttagttggtgttggtttgtgtttatttttaggtatggaggttgttaaagctgccaaaatggggagatgtatatcatttattgatgctattttaactttgaccccttgtgcatctactatccaaacataactaccctttgccttctaggcaaattgtggctcctagacttgtggaggaagctatggtcaaggagttaatgtgctttatctagaaaagaccttcctctgtaactattttccttgatgacaccacaaaaccaacattgtataagtttggttttgagaaagaggaggataggcgatgggtgttggacaattgctcgtggtgtctgaaatgttataatatgatcctccatgaatgggaatagagttttataggtaccatgccttatcgagtgattagtttttgggttcaaatccatcagttgcccatgaatatttcttgttggctaatggtaatgaattgggcgctctagcaagttcagttgtgaaggtggattttgatgaagagaaatttgctagttggtcttaatggctaagaatgctgatagatcatgatgtggaaaagcctcaattttaagtttgttttatcaacctgtcgaatggtactaagagatgatccaatacaagtatgagaaacttgacattttttgcttttattgtggatgtttgggacatcaacagagggggtgtagtctttcttctcctgacaatgtcttgaacgttagtggggatccctttcctatctatgggccttggatggtgactatgtcaaagaatgttgattacttatctcgtaaggtgaattctacggaacgtggtttgcctcggcttaggcgactatcttcttctc

SEQ ID NO: 251370 - DNA, 1071 bp, Cannabis indica
tatgacttcacaatccaagtcataacacacatgacaacactaattagggggaattatgcacgattaactctaataataattgagggaaatttagacaagaaacaaaagaaaaatttagaaaattaataataataaaaaaacacactgatagaaaaataaccatattgtcacgtgcatataaaagtgggaataacagaaaaagggattattcagaattacaatgatattctcatcattacttctgcgaccacattgattccacctgatttctatttttttttattcgactgatttcttctttttttcttttgattcaactgattttatttcgaacactaacaactaattaaaaaaaaatgcttgtctttcaagaatgaaaaaaacgtgtgtaacaacaaatatatatatatttttttaaaagatgtttattatcaaacaaaagaattacacaagtttcggcaagtccgccattaaaccggcagacgcacaaaggggataatctcccaaccacaacttattacaatttgaaaacaaggcctctttggccagcaagtgagcagccatgttattcttcctctttatgtgcttcactgcaacacaatggccaaaagcaggggagtctcgaatgtcgtcaagcagcgcgctccagtccgttttggcttgataatcaccattcaaatagctcactgcccgaagacagtcagtttggataatgaacgggtaggccttcaccttggaagcaagatgaatgcccattcttatagccaaaacctccgccaattccaccgtgcaagagcccctgttctgcttaatttcagcagccatcacttcacccgtatggttcctgataacagtccccaagctgagtttcgcttctttacaaggaacactagcatgactgttaatgcaatatgtcccggggtgaggaggatcccacccatcatctgatgtgggagtcggcttcagctggttgtcccttatagaattgttatgaagcagaaaatccatttccaattgagcccaccctacaccataacttgttaggaagaagatgaaagttgagtctttttt

SEQ ID NO: 251371 - DNA, 761 bp, Cannabis indica
tcatcccaaattctaacaagttctgccccttatttcatctaaatggtctcttcatccaccctctgtcgccacctttgtcaggaatctggtgtgggtctcgaccagcagaagctatggtcaacaatgtgttgtgtctcttgttatattgaatttgaaacaataaaactggaatgaattaccgataaaagattctggttgagtagcggacaatgtcgctttccttaagacgtttcgcggctctacccaaagtgtgcacggcagtccaacaaccatggcgtccccaggataaaacaacctctgtatatgatatgttctacactgaactatatcgttcaattacaccttaaattttgctctgagaaaaatggtaaggaagaaagaaaattttggatcttgaaaaagatgtattcttccgttgatctgatacaacttatatagagaagtcaatccaagaataaacagtaagaaaacggtaatataatcgtggaggagttggatcatggcagtgaaaaggggatcattggatgatcgctttttacaacttcatttaatgttaaaattaattaataaataaataaatatttgtttaattaaataatttttgtaacgccctaatgttaaggcacgctacagtgttttttaggttacaatgctatctttgctaagcaaagatttttctcgaaaaacgtgctaaattaaaacttttttataatgaatattaaacttcataattcacataattatttacaaacaccgagatc

SEQ ID NO: 251372 - DNA, 510 bp, Cannabis indica
catcctctatagctttatgatctatggtttttacaccacggaaacaaacctcaatcaacttgtttgattcctgggaaaacaactgtttgttgcaatcaccaaaataatcaataccagtgatcaaataaaactcctcggcactgaaccatatacaacggccagcaaccttagcccaaaatttttttggattgggctggtatacttccatcaatagtaggctatagacaacttgagggtggaaaacaaaatcaggtatatccaaaaaatgaccaaattgggtgtcatgaaacatagacaacaaattcacatataaagtattctttatattgtcaataacagagaaattactagtacacaaacacatttcgacttgtaaaaatcagagggactgaatttgtaatcccaaacctgcaatttaacaaacatggcaaatataaacaaaaatagtaaataaacaagtattcaaactataataaaactataaaaaaaaaaaaaaaaactagaaaacaa

SEQ ID NO: 251373 - DNA, 842 bp, Cannabis indica
aatctcaatattttctaaaaacaaagatgaagctcgaagaattcttaaaaaactccctttttgtggtctaggttggcaaattgtcaacttgggcgctgggctctgttctttacgctcaggaattgttatttttcctccgaaaggacctatttcctcgtttttgatgaagccggatttaaagcaaaagtcaaatctctaatcagacacttggaaggtgcctggattaatagattgtcaacctgggtgctgggtgctcggggctcaaagctaagggccctttgtgctcaaaaaatcaacttgctccgattctgattttgatgcctcaaatatgtctgtggtatgtctagttgatgtcctaatgtaatttttgaccactttgtactaagacggtcccagaaactgaaacattaggtgcccaggttagctttcgggttgcaggttcgtgtaatttcacctcctagggcttggattaggttgctctatgtctttatggtataaaatactgaaagatagtgggttggattcaagttattgaagtctaaacttccattctagagttctcgaagttaacctgggcctagggctagggacccctcctaggtcgacctgctatggttcgagactactcaactccgagatgtcgtctttcttgccacgtgtcatattgatgttcacgtcatcagagttactcttggtgtaaacactatttttcatgattggagctcatttttttaacacacaatccctattttaacccacagtgtttaaaaaatatggttggagatgctctagtcttttaaataataattaattggctagtggaagggtgaaatttaaagaat

SEQ ID NO: 251374 - DNA, 1148 bp, Cannabis indica
catgccaatggtactctgataactattgttaaaagaaaactcaatcagaggtaaatacttgttccaagaaccttcaaaatctattacacattttctcagcatatccttaagtatctgaatagtcctctcaaattgaccatcggtctgaggatgaaaagttatactaaactttaacttggtacccattgctcgctgtaagctctcctagaacttagatgtagattttggatctcgatccaaaactattgacttcatggcaccatgaagccgaactatctccttaatgtataaatcagcatactgatccgctgtatacgttgttcatactggtaaaaagtgtgcaaacttcgtatatcaatccacaatcacccaaatagaatcatagtaccctattgttcttggtcatcccaccacaaaatacatggtggtgtcttcccatttccactcgggaatctttagaggctgaagcaaacctgccatcctttgatgttttgccttgatttgctggtaggttaagcatcttgacacatattcaacaatatcactcttcatacctggccaccaatataaagctttcacatcatgatacattttagttgtccccgggtgtaaggagtatgatgtagtatgagactcatcaaaaatatcttgtctgatatttttgttggttggtacacaaattctgttcttgtattgtaataacccatcagatgtaagtgaaaagtctttttccgatctggcctctaacttcaccttgtgcccctgtaactcaggatcattttgttgggccactctaattctttccaacatatcagactgcaaggtaatgttagcaagttttttgaccacacattcaattccccctatagacatatcttcagccaactctactgaaatcttctttcattcataaactttccctgggccttttcaacatagagcatccactaccacatttgcttttccagggtggtagagaattttgcagtcatagtctttgacaagttctaaccatcgtcgttgcctcatatttaagtctttctgcattaaaaagtatttgatgcttttatgatcggtgtagatctcacacctttttccataaagataatgatgccaaacttttagtgcgaaaacaactgctgccagtt

SEQ ID NO: 251375 - DNA, 909 bp, Cannabis indica
taccttttgtagtgtccaacttctttttgatggtatctttcaatgttttattaacaacttctacttgcccaatcgcttgaggcgtggatacagatgagaagctcttaataatcttgttcctctcacagaactcaatgaataactcaccatcgaactgagttctgttatcaaatactatcttaatgggtattccaaacttacaaattatgttcttaacgacaaagtcgagaattctcttgcaggttatggaaactaaaggttcagcctctatccactctataaaagaagtcaacagccaccactgcgtactttgctccttctcgccatctcccatattgcaaatgggtaaggtgaggtcatcattcttagtttcttagttctgttggtggtacacgaggtatatgtgaaaacctttgacactgatcacatttcttgacaaattcatgggtgtcctcatttatagttggccagtaatatccttgtcaaattatcttctttgacaagctttgccaacctgcatgatctccacaaaagccctcgtggatttctctgatgatctcgtttgcttctatgggaagaacacaccgcacgagaggcattgaatagcccttttgatacaattttccatttactattgtgtagcaaggcattgaatacaagatttttcttgcctcatttttgtcagttgaaagttgcccattgagaagatagttgattatgggtttcatccaggtgggtgagttatctatcatctaaacttcttccatttcacatatacttgctcgtttaacacttccaccagtaccaagttcaattcatccatttcattctgtgaggccagtttcgctaaggcattggcattattctattgggatttgctcgattttgaaataatcaaacttttccaag

SEQ ID NO: 251376 - DNA, 1061 bp, Cannabis indica
ttgaatttccatatgcttattattatgttatttcttttacttggtatatcaattatttcatatatatagatatatataaaaatggacagatacaatttgtatataattcataactttcatttcattttggaactaaatacaactttagatcatacatttcaagaaaacaaaagaaaaaaaaactaaattcacatcactacctgccttctccaatactctaaacactaaaactaaagtttattgaatattgattcaataaaaaaataatctataatctcacaaatatagttaatagcaataggttttgtttgttccataaagaaagccatctccattcactccaaaatgatcaggtgtgttccaacttcattatcacctgaaaaaagagcacaagaaaagcataaaaaaaataatttttattctttggagaaatataggagcaaccaaaaagaaaacagaccataacttacttgtgattcaacttcatctctgttgctcttagaatgtgattcaagattttctatattatatgaaacaaatatatcacacttcgaattctttgagctccattggatcatttaattctaaactataatgagtttgcaactttcaaacaagacagtttctttgagttttatttacttgagaacataggattttttttaattctcttttagaagacaaagaacatgaagattgtactcctattttggggctggataagctatatatcatccaagatcaccatggatttctataaaacaagaagattgtactcctattttgaaagatgattcccatagaaggggacaaacaaaaaatgagacaacgaaatttaggaagtcctttgaactcacagtaccccatatttacaagctttaaaagctcttaatctcagaatattttacgtgtcaccagagttacaatgagagcttcgacagttagatctatgccaattgctaagtgagttcctctaagatgattcagaatatgcatctctcatcgtttgagcttgtgggtttctccggaggatagctggagaattactttgtcttcaacct

SEQ ID NO: 251377 - DNA, 1331 bp, Cannabis indica
cattgacttcagatgatgtaaattcacgtagcaaagagtaattgtgatcttgagtaatggtagtacaaatagtgcaaaaaatatgggagagagcccaatgatcatcttcagaggtagtaaaaagatttttgaataatctgcaacaatacctaaaatgccattctttgatgtaacattatttccatcattgtctcaaagtgaatgaattgtattgttagagtttcgggctgaggctttggcatggaaaaattttgtatttcgatctccagactgtaaccaatcgattctcaaggctgctaccaatattgctccacattagctaatagttcatccaaaagagtctcgacatttaggacagtttgatagtgatctggagtaggaggaacaattgaatgcagagtatttactctgtcttaagccttggtaatgtctcgctttactgaccaaacctagcattatgccacttttgtaaattaacagcacaccgatccaaatagtcaactaaggcagtcagaccatcatccatattagcataacgccaacaatcaacaataacttcaccacattcagcatcattgaaccacattctttcaaaatgaaattgagatcttcgctttttttgttgttcgggatcaacatcacagtaaatattagctagaagggctctatgatcggaaccataataatctaaatgagaaatttgtggagaaaacaactcatcttgccacactttattaacaaaacaccaatcaatccgttcttaaagatcatgatgatttttcctattttttgtccaactgaagtttgctcccttgtaaggcaattcttgcaaagaacattggtcaagagtattttgaaaattttacatctagttatcttgacggaggggtcaattacttttatgattgtgagaaaatatctcattatgatctcctatgatcaaccagagatcaaggggagaaacatcagcgagttgatgaattaaagcccaagtgtgtctcttatttacagccttacgaaagccatatattgcagaaaaatgccacggtcgtccatcatcaaaagaggcaaagtaatcaaaattatttgtattcattgacaaatgagtagcatcagtattatccttctacaataacattataccacctttcataccaacacgagaaacttcaagaccattactaaaattcaaagattgcttaaaatgagatagagtacaagcattaactttagtttctataaggaataaaacatgaggagtttgctcatgaataagcaaacgaagatgatagaatacactcgagttcccaaggccacgagcattccaactt

SEQ ID NO: 251378 - DNA, 1050 bp, Cannabis indica
caactctcaagaaaagtcaactttggatcaaaacatacaaatcaagctagaaagctcatctacctcaagactacacccaatcaaatggcattaagtttactttagttttgcttaagtgatttgcatagtatattacgatttataagtttaaagtttggctcactaacttgtgcgacaagttattttcaaaaatgacataatttttctaaattatattttaagattattcatcttttatctaaagagaaagtaactagaatttttgaaattggataaatgagctaagagttatatgcattttaagtcggaaaaattatattttgccattgtgccttaaatggttacctatttggcccagaaaaggttacctgtttgtgaaacggctagttttctcccaaacactatataaactcatttgtatcacatttttttacattgggttgagcatttattgagtatacctaacatcttacaagtgtttctcaatttatctaagtattaattccaagtaaacactgcacacacttgagccaaacttgttcatttcttctctggtgtgcttacaattctatctaggatttcacattgtatttcatcttattagagagaattttctatgtatttcaaagtcacatatccattgtattgagaggtaaggttgacaccagtagaaaaacaacttgattgtaggtgaagttgacatcggtttttttaaacaacccgagaaaatttaattgcatttatttcaaaattaattatgttgctaatttaattttaattaggttaaactagtataattagcctaatacaattatttaaataaggcaaatgtgccttcacaattggggttgttcatgaaagggaggttgggtccaatgtatcgtacccactactaatggctccctaactctcacacaaggcccaaaggagagaaatttaaacttaaattaaataattggtattcattgaataagcccactacttgttagtaaatctagatcttggtaaaatattcctaacagatgtgaaaactgctttcttgaatggtga

SEQ ID NO: 251379 - DNA, 897 bp, Cannabis indica
tcataatctgactgtgaagatcgagagccttgtgccagaaatgtactaaaggcagaactcccaaaaaactttaaaatgcatgagatgactctgtacatcggtgacacagatccaagtgatcacttgtctcgattcatccgagtcatgacaatcttgagagtcagcaatggcaccaagtgcttgtgctttccactaactttggggggatcttagaagaatggctcaaaaagttaaaacctaagtatgtggattgttggaataagttgcaaactaattttagaaggtagttcattgtagccagaaagatacaccacgaagttagtaccatgactaacattaagcaactacctgtggaaaccttgaagaacttcattaagaggttcaaagaggtggcttccaaaataaagaggttgatgatggaaacacttagccttgttacaagctggtatctggatggaaactcacttctgaaatgaactacaacaagaaggggtggctagccttcaagatttttagaaaagatctcagaaatacattaatatggaagaggcccaaataacaacttttggagggtattacccgtattggaggccctgggtatgcttttggggtgtaattccccgggggagtactcttgccactcctccaatgagtggaatgcctagtgtgcagttccaggaaatgccaagatacgcacaaaatctcgctttagcaccagcccattctaatatgggttgccaaacagtggccccgctccaagagcatgtttgcagtacccccatccagcccgcttcacttgcagcagtacagctacgactcccccaagccctttttgggataaaagggtcatcaaaaggaagcacctggagtgagaacagaagcctaaagagggggtct

SEQ ID NO: 251380 - DNA, 827 bp, Cannabis indica
tttttttaaaaaaaaaaaaggggggaaagaatcaattttgaaaaatattgaggtataaatatgatataaaatttcacattcataatccttgactaactctaaccaccatttgccttatattcaaatctccattgttggttctacatagttcttattttagcgtgattcatccctagtagatgtttctttcattagcaatttaacgccgtagaatctcgaaaaataagtattattataagtcttttattcttagtaacgtccactctaatagtggctactaagagtagggcttataaagtatgaaataatggtggaagctcataagatagaatgaccttgactctcgcctaaacatgacaatgctggattcttatcttgatcgaataaaaggttgctagaatgatatccattttaaatgagttgactactctattcaattaatgatatctttgactcttgcctaaactggatattgtatcagtttattggaaaccttagaaattatataagatatgtttgttttgtattttcacatgtctttattacatgctaaatgtatgataatttctgaatatgtatgaatttatatttaatcttgttattttctattaatattgttgtagtataaatttcgaatcttcattgttggtctaacttagtttgttatttttaatgggacaaatctcaaaggattgtcatttgtaagacaaacataatagtgttagatctcgacagataagtatttgtaaatgcaacatctagttgtacatccaaagatgacaacttagactagtgtttacaatatgaaacaatgaagaaatttataa

SEQ ID NO: 251381 - DNA, 1053 bp, Cannabis indica
ggagacattaattctgctgcatcaatgtaaggttttcttaactttatatgtgtttattttatcgttctagaaagttcatatttagggtgtttaacaacatacttgtgagtagatctaagatcctagtaaaataaactccaacaagtattcctccagcgggccaagcctttctccacgtatgacaagagtgccctcaacgttggggacttggtcacgacggagaactgccggaaggccaagctgatacctgcgaatcaatcggtggatgactttaatctttccaaggtcatctgcccgaatgtaaggattccggctgcagaaagggcgctctgggtggacataattgcctcggcagaggaccgttaccagaagtacctctttaagagggaacaggagctggcctacatcaaggcccaggcggtagccgggaggactcttcgtctggaagctcctccggagcggaggccctccaggcccaagccggtggccccggttcccaacactggtgctcccgacgccagtactttaggttctggtaagtctcctttagaaattcattatgttcctcctgtccgggagtatacccaacttagacctatagggttcgatgagcacctctgtaggtttagaatgccttccgaccggtgggggagtcacgccaaagaatattatttttcccatttgggccatttcttgggtcggtcccggatgggctctggacctctggcgcctattccttggaccattcagctcatttatcttccagctggtttctcccctcggacagctttcttggggatgatgaagctagtcttgtagtccaagactttgctagggttgaattagagagtcagggtaggactagttttattgctttcttgtttggtgcacgcctttcccgtgattattctaatacttcgtttatttctttgttgccgcagccaggcttatggaaagtcttctggccactcttgccgaggcatatagccctgacgcctctctgcctccggctccatcccagtcggtgacccccgggaggtcctcatccagtgc

SEQ ID NO: 251382 - DNA, 846 bp, Cannabis indica
caagcattcaacttgttctaaaaatattaagaaatatatgatcttttgtattatgtgcttgaaatatggttaaattgtaatcattttctatgttcattctgcttgatatgtgtttcttttctagttgagccaagaagtagatgagatacagagcaaacttaaagtactcaattacttcgctgatattataccttctattattcatttacaatactatttctttaagctcatatataatcttccaaaagggaaagtgtatttatataattactatattaatttgttatttgtgagttttccaattcactatatattaatttgtttggctctcatttagctactaagcttccaattaacactacaagtacaaaacattaagagaaagtatgaaattatatttgaaatgtgatgtttatttttctctatagaattttagatttatttcagaatagaataatttatgaatttttttgttaataatattaattatgttcgtttctttaatttgtgaacatgctgtgtatggtagtttgttatttttagtgtctagcctactttgatttaaaataagtttctttttattcattttttcgagattcatgaattctttttaaagcttatttttcaattactctaatccgttaatttactttttcatgaagggcctaattaattcaaatatttgtatagttggagtattaattttctacttgtttactgatgattctgcttttcgaaaagaacttctagaattgtaagtcctcatgatccataactttgttctatgttctaaatccataataagagttttaagatatatgcttattggagttattttcttcttaa

SEQ ID NO: 251383 - DNA, 785 bp, Cannabis indica
ctcatataacacatgtagtgtattaacaaaaaaatcttaatatctaaagaaatctcgatttaaagagaagaataatctaaataacggaagcatatacttctactgttaaggtgatctttgatcttccaaaaagacaaattagagttttggtagttttctcagttgatggggacgatgataatagagtaattcttagttttttttttgaccatttttaccattgtataaattaatagattattaatttttagtatttttttttttaatttagtctctcaataaatgaaaaataagagaattcatatatatctttttatattaaaagtggttatctaacgatattttttggtttaacgatttttttaacgttattaatttttttttcaagaaaatagacggaacattaacgtgaagcgttgaccatccctttctctatattgacaccattttctctaaatgatctaaagttgcagaacctcactctcaatcccagtccaaacgagtataaatttattttttggatctgaacccatttgcgaaattccaatggcatccatctcctactctatatttctacatttcacaacagatcttttccatattttcaatcgcagggtctcactctcaatcccaatccaaaaaaggaaacccaaacccaatctcaatgacaccgaaccactagtcttcatcgtccctccttcgaacggcatggtcggtgccaaaattcatccttaccaccagcaatggccgcaacgcagcccccgccacctcctccaaccaccgct

SEQ ID NO: 251384 - DNA, 747 bp, Cannabis indica
attgatttaataagtcaattagatttcgaaaatagactatgccttatttgagaattttcaccaagtttaggcattttttagaagagaagagaaatatgactttatttgttaattagtacactttgtgggtctaattaataaatatatttaaactgtattttatttgataattatttataattattataataaaattgatatttaaataattagaagagataagtggtaaaataggaaaaaacacattgtttcatttaaatcaaataaaatgacataaatccaactctaaaacccatgaggaattcagttctagagttagactttagccaagtctctatttttagctcaatctcatctaacctagtcctaagtgaagcctatataaagaaagtaatgataagagagaattaacctaagtttccaatgtcagaaaactctccttctctctttctttattatttttgaaatacactatacaatatctctctcaaaactttgctccgaagttgtttgagtattagcccactctattcaagctgatactcggatctttgtggaagactgtattgaacacaatcgaaggaatagaagatttaggttcagatcttgatcatactctacaacagaaaggatcaaaggttagaaatctgaacggaatgagccatgttattctgctgccatcactataaggattacttaatcttgaatgtgtttatttatcgtttttaggaatttcatatttaggat

SEQ ID NO: 251385 - DNA, 1264 bp, Cannabis indica
atcttcggtacttgtctggaattatccaaccaactgcagtttagtttttgggcaccattcacaaattacttatgaataaattaagaactcatattcaatatatttttgtaagagaaaaaactaaatatttatctattcattacagtcgataatgatcaacataatttaaacatgtaagatcataattcagtcccaaaatcagatatataaaattcatacactgttgtagtgttgtcaataaacaataaactaaacatggtgcagtttcttccttgttaagatcatacgtgttcttaataaggtcttttacggtacatgagttacccaaaacaatacatgaacaaatcacattttgcaagtgatatataaacacccacacaactttttcttaaacaataagtcattaaacattcaaacaaatacaacaaagaatcatcttttttcttcttacaatctttaataagtatattaagttagcatcatccaataggtataagaatcagtattcggtatgcagtgctatgaatacaaactattcattgcatagaatcaccatatgccttctgtgagccaagctataagaataagtatggcatcaaaattaactcatttaggttgagaaatacctacgacaagctactcagaatacggcggagcctgtggacagtaatggcggaagattgcgtcgttgtggtggtggtccgcttgggtcggcggtggtcggtggctgagagcgaagacggcgggttcgctagagagaacggtggtggcggcttcaagtgatgaatgaaaggaaggagtgtgtgaactaatattagagagagtgatattattaggttgggttggacttgggcccataaaatactataggcccaacgaaagaagtgattatttcacaaatacaaaaaattacagtccataaattcaattattattaatttgttgtttattttttattatttgtatgttatttcttattgttattttgatgttatattcttgttaattttatatagtttttgtatttgtttttatagaatactataaaagtataaaaaaaaaaatctttcaagtataaaaatgtaaaaaaattaattaatgtaattatcccataggccatattaataaataatatgttattgaagaaaaattaaagggttaatgccattttgaaatatgtattttgtacaacttagtaatttgaccatttattttgttaagtgatataatgaatcctgtacttttcaaaatgatacaaatagga

SEQ ID NO: 251386 - DNA, 764 bp, Cannabis indica
gtaatgggttttatttagggcacaaaacccagcagatgactcaacactagaacagtcgttttaaggcaaaaattactgagcatcactctggtttatttcttgtaactttttgttgtattggtgacaaagagagggcccttagtatggatccctagcatttttaaaatcatcacagtactccacacgccatctgttctacagattgtctcacgagagtccacagttttttcaccattttgagtccaagcctatagactccctttcttgagtaagtcacgtgctctagagaaagatctcaactctttaatgggtgaattcatggaagtatttgatgactcttgcaatgagggttagggtccaattcttcgatttcgtgttaaactcgacataagaaagcctttacttcggggaaaaatgatcacaccaccgaaagtacgagatgtgttttgggtcgaatttcgctatgagcaacgtctagagtattgtatggagtgtggcatcattggccatcctttcaacaaatgtccaattttttagaaaaaatggacgatggcattgaacccgctctaccctatggtccgactttgaaggcatctgcattcccaacttccaactatgattgttatcgtattgactttttcaaaaggcaatgcttggcctttgttaactcgtcttgcaagaactaccattaaagctaccatcccaaatatgctccctcgaccactaccaaatccaccacatttgctcattggtgaatcttcaca

SEQ ID NO: 251387 - DNA, 552 bp, Cannabis indica
attttttttgccaaacattatgaatgtctaatattttctcctaataattttttttttttctaaggcgattaattatgcgctaaattatgttgttatactcgtgtattactattcttttctaacatcttgtgaattctctctccaatcggatagtattattattaacgaagtcattttttcttgtttatttaattttttattgtaaccgaactaatagtactgatattgctcttttttttttaaataatttccttgttctttacaatctctcaagtttgatgattgaatcttttgtccaacttagaaggattatctttgatctcaaaattctttgattttgtgccttcatttattttttttaaaaaaaataataatacctgcacacataatttacactcaaatttaatatatatatatatatatatacacttatataacaagtaatatcaactaatcatattatttttatttaaatgaattccacaaatcaaaaataacttgctatatataagtgtgttatgtttgtatgtacgtgtgtatatattatacgta

SEQ ID NO: 251388 - DNA, 1271 bp, Cannabis indica
tgtacatgtcagggcggtttggcttggagcgtatgatcctcgagacatcagggcttttgtagttagtcgctgggcgacaattattttgtatgtaatagcaaactttttgtaaagtgctttgtaaatgggatcccaaagtattttgtatgctatattataagtatttaattaaataagcaaagttttaattattcacgtttttcattaacctcgttgattagcaacgagctgcatagtacgttaaaaattacatcaatacgcctatgctagttagggtgttacaatttggtatcagagccgccaagttgtcttctgaagattgtcacgacatgtacaatcatcattagcagtttgctagttctacggttcaataagcttttattgctttagtagtttattttagtagtatgatttaagaaaagcctgttaggaagcatgttagttgcctgatattagaataggcgcatgttttaatttccaaataagcggcattaataagttctcgttgatcatgatctgaccatgctagctctttgttacgcaggctgttaagattagatggacgccaggcgaaataccaagagtcagggtaactcggttgggtcaaatgaaggtcagggcgctcagtttcccccaaatgttcggggcagaggtagaggtcccaagggcagggcacgtggccggggtgatgctaacccgccacgggctgcccaggctgcccaagtaaatcaggaagccaagaattgggaaaataggtttgcagaaacgcaagcaagaatcgaggaacatacattgtattaaaaaatttggtcgtaataattaatacaatacattgcttaagcctaacatagtgttatttattatttaatataatacgacccttatacggcgtaccaaacgagccctatatattaaaattagtatgacatgcataacatatcatgtttgtaaaagagaaaaatagtgataagaaaaataaaaaagaattgataattttacttatagatcactacataaataaaatttgaaacctaatatttttatataattcatagaaagacattacaaaagaaaaaaaatataattatacctaatcatatatgtatctttgtatttaacttttgttgttatgctatgattatatatatgaattatgtataataattgattagaaaaataatagagatatgtatttttatattttaatttttgttgtggttattgttaccacttactattatttttatgtaaattaataagataaataattg

SEQ ID NO: 251389 - DNA, 1017 bp, Cannabis indica
gtaggctattaccacactcacggagccaaacctctttaaagtatggtgttcattttactttatcgtttttgctctcttttaattatattatccaatcgcttattatttgactcattgtcgttgggtaaaagcgaggtcaacattttggtgctttcgttgagagcaacaacacaagtatttttcttaagttttgacaggcaaataggatggttgtacaaacttgtagaggccttgctgatcagggcgacccaatggtgacagatcccaacgtgtaaactcctggaaacacgagaggaccaccagggacaaacctcgagctagttaatacacaaccacatactgtgggccatggagtgactttccctctggctgggaccaggcatacaagagactggaaacaccagttcagcagccgattaatccattcccaacactgaggtcccattgaccattaatgctcaaaggccagttggagacgacactgaaatttagaacctccgagcaacccttaggctcatgcaaggtcataataacgctttgcaccatgattaggaggatctccatgtagcaataaaccttgcatttgacgaacaaagacatcaatttatagaatggagggaccgggagatggaaactctgagggctcagcaggcaggcagccatggatgatcgcacgaggcatgacatcatactaataagaagggcctaccaagtcaccaatcaacaaccagctactacatctagtattcccttgggcagttcagaagggtatgcaactaggcataccacacaaactcacaatggtcagccgtccaatccatggccacaggtccagcctgtgggccaagcggtagacagccagatcctgctgaaccgtcctttaggtggagttatacacactaaaatttctagccaacctgccggccaaatgagtcagacagcaaggccacctggtacttcagtatttgataggttgggtgccactcatgatctcaggactgacctaaattgaagaag

SEQ ID NO: 251390 - DNA, 1277 bp, Cannabis indica
tttaaagaggagtctggtctcgagtttctaggtgagagaaatctcactataacatccatgtcattacccatattatggccttttaaatctgaagccaagttaacgttgggtcttgggtaaatgagtaacccatccagggccttacgttttttaggccctttgtcatgttccatggatctaaattcatcaatatccaataagggatttaagagagacggctccctcatatatttatccacagtacccagcctagtgagtgtcttaaatcccttggcccataaatcatgtgaagagcattagattatctaggcttggctaccaaggaggtaagagtatgagttttgaaatgaattatctgtccccttcgggcccaggcccaaagagttggtagtattacataatggtggggccactttatgatttaaatgttcatttctaaccccttcagaaccagggccagtggatcttgacgcaaaagaggcaacaaaatgaccgttcttactcacggtggtttgtggcgtctacacattgccctaatggcaatcagatggacccgaagcagcctgtgtactagacacaaagcctccttccttgtcttgagtctgctgcatgcatgggtcgatgtccctctcatgttgaacaggtattggttccgtaagtagattactcataaaggcctttcaaatcaccagtgtagcagtatcctcaaaagggcaaatgtctcccacgccaggcaaagtcaccatcagaaaatggcacactttctcctcccctgtggccggcaaatcctccaccacttgttcaaccatccgcctcttctctggaagttgcctccgtgattcccttgcaccctaatcgtcaaccacctttatagagttactaattttccattgttgtttaaaagttttatccacagtaagcatcttctggatgatccaggcctgacaccatttaggaaggttaggggcaaaaggccctttggcagtctcctcgtgcttcacccaaatgccaaacataggaaagaaagcaccagactgatctttaataatcgtaggtggttttaaacagaacttctggtcatgtgagatgattccacatttgagacgcatcttggggagcttttcatatttatatagtatcaacaggtctttaatggcctctctcctcataaagaagactgaaaataggggcttatcaatgtcgattactgctcaaaaccggacagttcccatactgaaagatccacgctcaaaatcgatgtatctcgggagcttata

SEQ ID NO: 251391 - DNA, 903 bp, Cannabis indica
gatattgcctcagtaaaagtgtattacctctctcgatatttgttcttttccagagatcttggtatcattagaaagataatttgataatccttatttttttgaagaaacctttccctaattcggagttgttacttgtcaaaaattggtatctttactcggtcaggatatttcattttatgtattgtttcagaaaaagtgtcgttagtaaaaactcaatattactctcaattttgatccattttaaaagaattttatgtcattttaaagcttaagaaaagagctacattttttatgaaggaagtattgagtggatcagggtgtaactatatttaaaattattattattgggctgtatccagaaatcggcatgatccagaatttaaaaaaactattgtaataaaatatccataactcctaggttataacttcacttttgatgatctctataccataaggaaggtcttttgattatctaaaacctttgtgaacagtaagatttctaattcaaacgttttatgagtcaaattatgaggtaaacttgctgtgtagtaagaattataaatatattgagtttattagtggtctaaaggttcggtaattgttaataagacctagaaggtatcgtaagagttaattacaacggagttgaggtaagaaaaaataattatactttatacttgtactttttatataatttgagtgcttagttagacttgttgaattagttgtattgaaactgtggaatatgatagtttcggtggaatagtgtttggtagatggattgcatatggctgcttaatcatgtttcaagtacttgaacatgattggaaaccacacatgtatgatgatgttgtaagtggggcagtgtacataagggtgcactggctattggtactgcgttca

SEQ ID NO: 251392 - DNA, 811 bp, Cannabis indica
gaacccaaatatctgactcttgagtgagcttttgattttctttatgcttatttttgcatgttttcatttcgaatgcaccttcgagtttattgtagaaaaatatttaggaaacccaaggtccagaaactctgcgattcttctttgtcatgatttcatgcgattttacagtccataatgcttgctttctgaactgcgtaatgcttgtctttcatcttgcttattctaagcttcatgaaattttttccttaactagagaaaatttcaaacttcttgagttttgactttttttgaacattcttgtccttgaattcgttaagtactcctggtcggcatattagcttgtttatcgtttgatattccgaccaaacactcatcttgtgtgttgtcttttgtagatgaacccaggtgagttttgggaaagcgaacatcgaatcgaccaggacctccttcaacttttgcacgaggaccatccttgtctttgttagcccaccttttttttagggaaagacattctccctcaactcttgtacccagccatagaatgatggctcgtgccaagaaaacaacgtgtttggctcacgcatttgatcctcaactagatcggcacaccactttgcccagtgccaaacaggatccaaccgtccaggaggaggcggatcatgaaggggacgctgaggtctaggagattgaggagcaggacgatgtacgtcctagcagttcctccgaggcggaggaagaggcggaggttgaacccccaaactatggggtgtacaatgaggctggggagccagtcgatactgacggagacgtc

SEQ ID NO: 251393 - DNA, 1119 bp, Cannabis indica
aagtgcctatctaacggcaattcttggtttaacgttttattattcttattctgttaattttaacggaggctaacccttccgttaactattgtcattcaaactcaaaataaaaaccattttatgcgataacggtggattcctctttctttttcgtcaaactcaaaatcaaaacaattttatgcgatattattgagatattcttgatcctcatttattgggattcttctttcctttgatacgatttgaaatcttctaatgtatacgactgagtttcgagggaattccccaagagattcagtatataattgatctttctcttttgattgtgtatatccattatgtgcatattttgaattgatttgtttgggtgaatataattgtttgatttggagtttcatcctcgactcagtcaaaatgccgctcgagttcaagacttccagatttggattctcaccgctgaatgacccttctccaaactggagccaccgccgcttaaagaaacaattcttctcgatggctgtgactatgagcatttgcttgttgtaatggagtttgccaacgaccccaaaccctccgaagatgaaatggccaattcttttgtcaaaacccttgctttggttctgagaaggtactacgctaactctattgttatcattgagattcgaggacaaataaactccaaaaatgagttataggaagatgagttataggaagatcctaatataaactccaaaaatgaagcaggcctttcgtcagaaaataaaaatccatttatacaaatttttcaactaacacgaactctcattttatttttcgctgcagatgaaatatcttccacagctcgcaaacattccttgaaagtgcttttgggtcttctccaggaagacgataagaacgtgatgatcgccgttgctcaaggcgttgttccggttttggttaggttaatggattcgagctcggtggaaatgaaggagaagacagtggcggcaatttcgagagtttcaatggttgatagcagcaaacacattttgatcgcagaaggtttgcttctcttgaatcatttgcttagggttctcgattctagaagtgggtttgctaaggagaaagcttgtgtggctc

SEQ ID NO: 251394 - DNA, 662 bp, Cannabis indica
aaaaagatttcggacctagaaacgcagatcaggtgagttgactcgtaaaagattataacgatgcattactctgttatgttggttatgaaacttttttgttttcttcatacagagggctcgtacttgaaaaggctacaagggaagcaactctaaatcaacttcgacaagatttaggagcacacaaatcccatattcaatatctagctggcagattggaacgagtgaatttaaacatcgaatcaaaatgtgaagtctcaatgaacttcgtcatttgaaaaatccaggttctgtcatatcaaaacgttaactatagtttgtaatgattctttaacagatgagattgagattcggggtttgagggactgtataaataatgaacaagaggagaaaagggagttgaacaataagctccaacaattggaaagggaatgtgagtgttgctttgcccacgatttttataatgtttattgcttatcgttgatgatgcctgttttggctcccgaactaaatattgttagttgctaatacttgtttgataaacagaaatttcttattccataatacaattgtagtctttaattagttgttggctatgttaaacaaatatgtacttacgtttacaaaaacatatttggttcatcgttatgttataccataactta

SEQ ID NO: 251395 - DNA, 1006 bp, Cannabis indica
gagcagataggacattgtacatccgttaagggtaaggacattccaagtctttcccttgttggaaggcaattggatagaattcgccaccaaagcattttaagtctattgtggatattagacccccaaagaagtctccattttctatctccttccaccccactgtcaatattcttaaggagtttatatgctgagctaacagagaagtttccacttggttcaggaagccagatcatacttctgaattactttgggtgtgatgattctactttttattgataattttatgttaatataaaaccttcaataattacacaatgaaaattttattttataaatattttggagatgaggtgacttgccaagcttcttccatcttaaattttatttatataaacatattcaatttttttactcattttcaatttataagttagatgaatttaaaaaattgatttaggtaaaaatagttacatatatacaatgaaatttgtgatatacactatgtataataaacaagtaatgcatgtaataacaggaataaaaatatatggatgatataataataaataatgttacctccccaatcaattcactacttttaattggggaggttacattaatcaattcactacatttgttcaatatcaaaaaaagttaactctaattcgatgatcttatattaagatttaagaatacaatcatgttgtttaccaagaaaaaaatatggtaacacttatcttattgtttaactaattcactatatatgtttactgattagtgtgatataattttttagaacgttttgacaaaaacaaaacattaatacctatatttaatataggaaagaatatatttagaattaattttcaaatatatgttatgtataatctttacaatatatgtaatttgcgatagcattgtgacactatcaaatttttctcaatctactaaatttttctacatatatgctcaaaaccgctcgaagagcggtttcgtttcctagtta

SEQ ID NO: 251396 - DNA, 6428 bp, Cannabis indica
aaagagaggtaccaacaactagtagggaaacttatctacctctcccatacaagacccgacattgcctttgcggtaagtctagtcagtcaatatatgcataatccatgtcaaggacatctcaatgctgtatatagaattctgaggtacctcaagcaaacaccgggaaaaggtcttttcttcaagaagacaattgagaggaaggttgaagtcttcacagatgcagactgggctgggtcaattgatgatagaaagtctacatctgggtattgtactcttgtatggggtaatgtagtaacatggcgaagtaaaaagcaaacggtagttgcaagaagtagcgctgaagcagagtatagagccatggcccatggagtgtgtgaagcaatatggatcaaacgcctactagaggagttgaagattgagtatgaggcccctattcaactttattgtgataatcaatccaccatcagcattgctcataaccctgtacatcatgaccgaactaagcatgtagaggtggatcgtcacttcattaaagaaaaaattgatcaagagattatcagcattaaatatgtccatacagatcaacaactagctgatattctcacaaaagggttatctgaacgagtctttgatttcctagttaacaagcttggactcatcaatatctatagtccagcttgaggggagtgttgacagaaaggaaatcgaatcacattaattagtttcctaattttgtgtcgtttcctattttaagggattttttctatatattctttattctattttattctgtattaaagaaatttgatttgtaaatactctatatagtatcaactctaggttgtaaaaaacaccaaaaataataatacaaatattatttctcttcatcgtattctttataaaattattaatgtattttaaaaatatataaatataatttgatgatcattagatgataattggatcggttcaattctattatccattggaccagatgtcccatccaacaaccgatccgatccaattatgattggatatccaattctattgaatcggttagaattggatcgatcggttgtaattggatcggatgactttctacacacccctaagcagaacacttccaaaggtgcacttcaaacatatctagttgctgccaaaatcaactaatagtataatattgggtgacatccaaatctccctttttgagatcaaacaacttggtttcagtttcaaaaatttctaaggtgtttcaaaaattgagtatgtatcacgagctgcatcccaaatatctagggcaatccaacagagaagaaaattccctccaatttcaggaagctaaggcattgctattgttctcgctttgccatggatgataggagggatccgtttctttgggctccacaactccaccaataaattattcatccttacctttaccagagaagtacatgatgacagattgagaccattgaagaaagttcttactgctaagtttgtgatatgtgattgggggaagaaagctgtcaagaacttgagaatgattcaaggcatgggactgaggaggagcaaatcaattggaggaatcggtagtgatggttgaggttgagtcgactggagggtttatctttgcctatgatgatttggtagtcaaaagatagaaagaatgataaaaaattaaggtttttatcttttaagaacgagggtttttttatactaggatgtcggctctaatagagtgataccatgtggaaatttctaaatattctcattgattgataaaaaatgagttacaacctatttatttatacacaagaaaaagatattccctctaattttgttgtgaatagaattagctacaaacaagaaaaaaagactaaaactaataaaactatacaagaaaataataataaaataaaaaaggataacaataatagaaaatacgtatcattcctatttttgatatttctacatttcccaagaggtaaaaccggcaataataataagaaaatttgtgtagagaatgggagagctaagggtgttcataagatagtcgatccaatccaatctgtacgatctaatccaatccaatccgctaagtgttggattgaaaattttaaaattcgcacttgtgtgaattggatgttatttatcatgtaatcgatccaatccaagccacgcttaattatatttattttaaaaattacaaatatattactaatattttaatgtaataaaagaaaactaatacatggtaaatttatttttcaaaacttaatatataaaatgtatatattgtatacaaaagaaaacatattctaaaactataaccaatctttcttttcatataatgcttttctcttccttgttatttttttgattaattattttaatttgttattagagacatagatcaacaacttatttgattttgttgttaaagaattagaaatgaatattttatgttttatatttaaatgattttggtgatgtcaaaaaaacaaattttaattattattaaataatttaatattaaaaaataaccgatccaatttacactattgtagattggattagattcgaactattatgcgaattggattagatcgaaaatatgaaatccgcaattagtgagaattggaaacaatataagcaaagtaaggctgattgttggatcggatgaacatccctagtgagagctactatactagtcttcatgtgttttgctttgttgggggcttgtaactaaggaaaactcatttttagctttgagccagtagcgtttttgtttttgttttttccaagttctcccttcccccctttttttttgtgaaaagaaacagaagtcacacttgtgatctatttatgactaacctcctcccatatattgagagcccttcgcttataccggaggaagaatggttacaaaaactgggtatcactaaaaccatactgataccaagaagaaaaaagaactagagattaaaaagaagttacaagaaaatattcctctctagttaagacagaaaaggaatatctttaaatctgtttacatcatgaagccaaagagctacccactatacaatacaaccttgtctatatattttttgtactatcgttttcctccaccattagcaaggactctcaataaacttgggaggaggtcaatcctagattttgatctctctttttcaaaacaattaataatagcaaaatcaagcatacatgaaatcaagtcaaaatcttagaattttggtgatgctaattacacaatttaagagaaagctatgaaacaagtaaattgatttacataccacatatgtgcacattcaaaaggggggcaaggtgggttcatcgcataacctcggtgcacaataaaaagggatatctgaaatcaaaatttcttgataaataataaagatcattctgaaaacacattttacttatttgtaacattgttcagataatctggatatagaagaatgtacctggcgagccttttgccttgtcaagacactgaagttactgctcgcaggcacctgatgaaggagaaaatagagaaaatgcctacgctgcttctcgtgttccccatcttgcaaagcctcaagagactgtcatagtttaacttgtagcaagtaagcatgctaaaggaacccatctaggatatacagatgcagaggaattttaaataataaaaatgaaaaattctcaaaacatgcctgcagaaaaggctgaaaaagatcaaaaatgtccttatggcttttctcatttcttgaatgaaaacactgacccaaaagagtattgcgcatcacacttggagacaatgtagacctcagccaaagtttacaaccttaagcaagccagaacaaggaataaaaacaaaatgtgtgaaggaacagcaataaaagatagttatgttagaatcatgaaatatatattcacatacatacatatacttaccaagaatttcaaagagtagcctcaagcatgtaactgcatgagagaaatctactgaatcaccactaatatggttaagtacgatatcaagaaaaataggatagcgctctaatatgccttcttcaaaagctggaggttctaggaatccaagccttcagtaaaataaatacacaagtaaataaatagccagaaaagtggtaaacgtaactttaaagcaatcaaatgtcattatccaccagttcctacagtgatttgatgccaagccaaatggatacacgatccagctctgctcttggtcttgaagtcttcatggcagatggcaaagcttctgcctctagaaagctgataaatttcttgatcaaaggctgtaaaggttccacgtctgttgctctcctacgcacaaggagaagaacaatttagaaatgatcaatgttgtaaaagtacattctacatacaggtaatcaaaagtattatgacaatctcaatgcaacagtgaataaagaatagtagtatcaaccaaaacattcagttgactgaatcagcaacaccaagaaccactagaatatttaaacaaccccttctcctatcccaacaaaaaacaacagcaacaataataattggcctcaaaacatgccagaaaagagaccgtcaaaaagcagcaacttcaacacaaattaattgtaaatattaagcctcaaggaagacccacacaataagaatactattattaataacaatacgaaaacagtacctcaattttcccatggatccagctaaccgatgaccaaccgagcgtacccttcttttaaaaaaaaacaatgcataaacaccctgacaaaaaaagtattactctgtaaaccacagggtaaaggaacatccaataaaaaatgagcaaaaaaactaactaaataccggaaattgttgctgcccgtccaaagcaagttcatgtacattatcaatggcttcaataaattgttcaaattctgtaaataatgactgatcatctaatagaatagggaacatcaaaacctgtaaaaaaaatgacaaccagtgagctgaatagcatcaactcctactcacaggtaaaaaaaccaacggttgtgcacttatgcaacaaaatgttatgtcaaaataattttggagaatatagcaaagaatggcacagcaaaaataccaaaaaatcttgctaagagttgatatactgaaggaaaaatacattagactgtacttacaggtaaaaaatgacaaccaatgagctgaatagcatcaactcctactcacaggtaaaaaaaaaagcaattgttgtgcacttatgcaacaaaatgttatgtcaaaataattttggagaatacagcaaagaacggcacagcaaaaataccaaaagatcctgctaagagttctgtactgaaagaaaaatacattagactgtacattcaaaaaaattaaagtaaaaaccaactgaggtcaactcagatggtaagggagggctgtgtgtgagttggggggaaggggttcgatccccgcttgtatcaaaaaaataaatgaaactaaaagaccatacttccgcacaacaaattaagtcattcttaatctaagtatttataatcaaatataagtatgggtggctctttatatacaaaattgacatgtcctctagaataatgtgtgttactgaaccaaaatttcattacaataaccgtcttgggcatgcttctcaaaaaatttacagtacacagacactctatacatgagtttttcccttgttttatgaattcaaaaacccgtaattttcttttaaagtggaatacaattcaaataaggaagataaaatgaaatggtcaaagtacttcacacgtgacactaacaacatcatagctatcacaagctggaccataacatcttacactaaatttagcttcacaaaaattttaagatacaacgacgctccaaacatgacttttgctcaaggagaatacaattgattagggaaaaaaagaaaaggtacctcatacatgacgctaacaacttcatagttatcacaagctggattgtaatcttctcgcactaatttagcatttatctcccttaagtgcatagtcactctttcctcatcgagacttctcaacacatcgagaaggggactaatagagctaaattcatactccatgttatacatttcttgggcttggtgatgctgagtaatacactgaacacactgccccatttcctcagagattctcttccataggcgttttagaggagaatcatcacgctcatctttatggtagttgtagaatgtctccaaaagtggccccattaaatcccaagaaccacaccaaatgtgattttcttttggtaaagacatcaaataagaaaatgcatctacaaacctgaagaacaaaaatgtagtggcatatgctatgtattaaattcatctcccaaaagcatctcttcttcttctttttttattt

SEQ ID NO: 251397 - DNA, 662 bp, Cannabis indica
atgatacacatttaataacctttcaatcacttgagatgaggcttcattagcaaggtagaaaaggaggctatcatctgcaaataataaacgagacactgacgaagcacccctggatatcgctaaccatttgagttttctaacattttccacttgtcttaataaagatgagagtatctcagaacaaattaagaataagtaaggtgacattaggtaaccttgacaaaggcctctctaaggtacaattgagcctttaacattgattttaaaagtgagagtttaggatgtctcacatctcataataagatttactaagttgtagcaaaacccatcttaagcatgacaagtcttagtgaatgccattccactctacaaaagctttgctcatatccaacttcaataatacaaaccataaacatgctctttttttattcttcaaacagtgtagaaactcaacatgagcctagctccagacgctgaagcctccttctatgcacttgctaggcctttccctgtgaacggagagcctgttccagaacagccctagaacacttttaagcccccattgtgtctcgtacttcctcagattattgaagatcctgagcatgtttatgtggctgttgatctcccatggagtatcatttaggataaattttggagcattt

SEQ ID NO: 251398 - DNA, 1338 bp, Cannabis indica
ccaggcggtgtgggattgcacagcttacctggtatttccccttacagatcacgggactagtgactgtcacaggtttagcccccttgtgataacgggtaatgacctactccccttttagttgtattatacagaggtaatcattattcagatcgctataggtgggatctgctatagtgccctttaggattacaatgtatggatcagagtctggcagactctagtgctggatagcctagagtgctgtatgcttgggcgtgtgagagagtgagggagaaagagagagagagagttgacacttagagaatatgaggtttctagcttataggaggcttaggcaacttaggtttttagctagagattaaggcctttatatagtaggcctaaatcccaggtttacaacttaattcccttaaatataggatagttagctagatatttacataagaccaaaatacccctagattctaaatgcttctcagcctgcctgttgggcttttggggcccaattcacagcccacttgtgttattcacatgtaggtatgtcctgtgggacccactgagcattccttggctgggcattaagctgtttactggcctggctagccacagggccggccaagggtggctggccagctctcgagagcgagctagattgtcatttgattctcgtttgagtgtcgggatctttgttggttcggatgttgacttagccttctttctggtgagttgtactaccacgtggcaaagaatctatccatgtaagcataccacgtcatgaggacaaaaaattgggataacatttgttccccaagtccctgtgcggacaaggactttaccagcaagattgatgttgtcgggaccgcagttacttttgctgaataaaaagtggtgcgcatgttgaagcattttgtcttgattgtttagtcttgttgtaatagagaaataaatcttttatgtgcctttatgaggagctggtgaagtaagtgagaaaaagggggccacacgtacataagtgagttttgggggaaaaacccttttttcacttttattttaaacttttactttctctcattagaacttggctcttgaaaaagctcctccttctctctaaatggccgaacctcttggctttaatttccttggaatttttgcactatttcaacaatccaagcttcccgtctttgtcttcgtcagaatctagttgcgggtatgctttatattctttttctatcacttgatttgaatgatttttccatgaatgcatgaatattatttcttattttgaacatgctttgtgttggaaattattttaccaggatctatttactatcatgtatg

SEQ ID NO: 251399 - DNA, 490 bp, Cannabis indica
taagctcatcgtgatgtcgtttttaggtccactcatttttaaatgacatttctagcatgatcattacgtcgttcatatataatacttgtattcatttttttttttttttgctaaaataaaaatttcatactaaagaaaaactaaaacaccaagttcatagtggagagtctggagaagacaagaggctccactttttcaatcaatgctatttctcggtgatcgttttactatgtaattttgtctcacttgtttcaaatattttttttgaacacagcgaggaaggagaaatagaaaaaaaaaaattaacttatctttgattttataaatattattaggctttaaactattttttattaatttttaatagaaaacactaaatgacttggattaatttagaactgacatactaatttggcacttaaagtattaaaaataagattgagtgtagaactatttctaattagaggtcattcttacattttttatttga

SEQ ID NO: 251400 - DNA, 1158 bp, Cannabis indica
tcgatgtgcttcatctaattcatttttgccaacagtgcatacaacattacctcgccgattgataatattacttgattttacttcatcattaagcccaatactttgtacaccagacatgtattcagaacaaaactcaactgcctcttcagcaatataacattcaacaatgcacccttcaggtcgacttctattcctaacatatcccttgagaattttcatatatctctcaaatggatacatccatctgaagtagactggaccacaaaatcgtaattctctaaccaagtgaacagtgagatgaatcattatatcaaagaaggcaggtgggaagaattgctctagtttacacaatatgtaagtaatatcttgttgtagcttgtccaacgaggagatatctaccaccttagagcataacgatttgaaaaacaaacacaaccttgtgattatctctcgaacattcttaggcaaaactgatcgaatagccacaggaagcatgtgttgcattagaacatgacaatcatgagatttcaagccagtcaaagtataggttttcgtatctactagcgattgtatgtttgaacaatatccatctggcacttttatattagacagacaagtgcaaagttcctgttttttagacttagtcagtgtgtaacaagctggaggcaaatatatacgacctttgcctggctttggagccaactcatgacgcattttcattgcggccaagtcttctctagccttgattccgtctttactctttccaggaatgttcaataaagttccaatgacactgtcacatacatttttctctacgtgcataacatctaaattatgacgtacaagtaaatgttcccaatattcaagctcgaaaaatattgatttctttttgtaacaatgtttgggttcttccacaatcttagcctttccttgacctttctgcttcctagttgtcggagctttaaactttcctacccgggaaataattttggacatcttctcaagtatttgacttccatataaaggtcggggagcatgcccaaactcttgctcaccgttgaatgccttcttcaaagttcgaagcttatgactctcgagcaagaattttctatgtcccatataacatacttttcgggagtgtttcaagtactcagaaca

SEQ ID NO: 251401 - DNA, 652 bp, Cannabis indica
aagttttgctataaatgaatgaataaaaaattgataatttttttaattacagaataatttataccattataacatttaattcatttaaaagaattatatttttaatagcttttaattattataaatatctttattcgaaatgtgctttatttttattgtattatgattaatatttggctaatcacaaataaaagaaattttacataaatatattatataattttatattattcataaaaaatataaattagtattaaactgaattgagattttattcgtaactaaaaattaatttctttaatgtaaaattttagaaaaaaaaattataaaaactgcgcgaagcgcgaatctattccctagttgtataatatatttgagtttagatttagaaaaccaatcatgtaccatgtcaaattaattagggtgtaccaatctgtaattttgataaaatattgagtaccaaataattatttactaacctaaattaagggtcaaacaaaattttcttgtcaaaaaaaaaatttagagggtcgaacaaaacaaatctatattatatagcacacttgattaaatgaacaaaactctaatcacataaaaaaaaattggaggcttttacaaaaaaaatattagattttagataaaaatttacaat

SEQ ID NO: 251402 - DNA, 664 bp, Cannabis indica
gtggtctattttagaataaaatttatgacttaagagcataattgtcatgattttaatatgtggataccataaagacaatttctaatttgaagaggggccaaattggaaatagtcgaaaaggattaattactactttttcagttattaataaataggtattggtctctatttttttgcatcgcttcacatatcgtatgtttattcttgaatccctatcgtcaagaaactcaggttccaaagaaaaaaatttgatgcaaaaattggaagattataccattgttaggttatatttagcctatgtttcgggtctattaagtgagcatttttctcggttattggtgtcttttggagcggttttacgcttgattttccttgtttcaggttcccgaggtatcaaagttcaatttcagtcaatggatgaaaagacgggacaaactggtggaaaatcggaaaaatctgctcactgggtgtcagtagtcgcgactagccagaagccaggtcgcgatccttttctttggtcgcgacttgggagatttagcagaaactcagttttttgagtttttcttatagtcgcgactcgcgaccagcctttaagttggtcgcgactaggtacggaaaaaagcagttttgacctaattcatattttttctcaattggaggcaca

SEQ ID NO: 251403 - DNA, 527 bp, Cannabis indica
aatttctgtaggaaactcaaattttctaaatcttctggatgataaacttctgaaccagattgggacattgctgtgagaagaaggcaatcccaatccgtacaaagaattttatcaaaccagaaggtggtgaattgaaggttctgcaaaacttacgtattgcctaaaccctaatatttacccaaatacagttcagccctaaaacttactaaaaccaaatgagatggcaacgatataatcaaataaggcagcaattaaacccaggatacaacataacaaacatgtaagatattaagatcgaaaagccactaactgtttgaagttggggtttgggacaatgaacagctctgcgatctgtgaatccttggatgcagtgagcatctcttcgagcgtgtgaagttagaatttaagtaagatgaaactcgtagaaaaaatgtcaaggacagagatggcatggaaattctcgagcaaatttggtgctgatttttcaacaaaggagcgtgaaatttttgcaaaatttctaaaatgga

SEQ ID NO: 251404 - DNA, 620 bp, Cannabis indica
tcaatcgtggttgggaaattcgatagctaacatcaacaatgccttcttgaatggcacccttgaagaagatgtctacatgctacaacccgaaggctttgaagaaaaagggaaagaacactatgtgtgtaaactaaacaagtccttgtatggacttaaacaagctccaagagcttggtttgacaagctaaaagctactcttcacaactggaacttcaccaactccaagtgtgacacctctctgtttttctacaaatgcgacactgacattatatttgctctcatctatgtacatgacatagtggtcattggaaacaacaacagcaaaatgaaagatttattgaagaattgaacaagaaattcactctcaaggaccttggtcctcttcactacttcttgggaatagaagaattcagagatgaaactgggttgtacttaactcagaccaagtacatagaggatctattgaagagaatgaagttcacaaacttaaaaccttgtccaacttctgtcactgcaggaaaacccatgtctttaactgatggtgaaccactgtccaacccgacagcatacagaagtttgattgggggtttgcaatatttatgccacacaagaccagacat

SEQ ID NO: 251405 - DNA, 1144 bp, Cannabis indica
tggtaaaatatattccaataattccattgttgacaatcaacttaggttcatatatttaaagacaaaaaaaaaaagaagaggttcataggttattgacttttcattgcgataatataagtcagtcgaagtgtgataagtaggggatgttcatccaatccaatctgcactattttgctcataatgtatttgattaacaacaagtgcggatttcatatttcgaatgcaattcaatctgcataaaaactcatatccaatccaatccaattcgcaaaatgcggattggattacttattttagatttgttactttttaatatttacattttttttttcacataactaatgacaaataataaaataaattattattattttatgtctccaacaataaattaaaataaatgaaacaaaaataataaattgaaaggaagaagaaaaaaattgatcggaggagcttccgtgatcggaggagcttccgtgatcggaggagcttccgtgattagaggagcttccatgattagaggagcttccatgatcggaggagcttccatgatcggagagcttccatgatcggagagcttccattattggagttgctttcgtgattggaggagcttccatgatcggaggagcttccgtgatcgaataagcctccatgatcagagagcttccatgactggggagtatccagaatgggactttaccaaggaaatcaatttttgtatttttggccgtaacttttcacttgaatgttcgttttggatgttctatatactgttttaaagcttgtgacgagctctaccatatggtttataagttagagccgaactatgtatttttataagggtgttttcactttatagtttggtagaaaaaccctaagttctattcgggtattagagaagtgttctagagtaaacattattgggttttatgtcctaaataaaactccatttcaatgtaatctttatcttttaaatatcaataaagaaacagaagtatttttcatcactttgtgtgtcatttagttcatgttatcatttacttgtttatttgatttataaattcatccaaacccatgtcacatttatattcttgtttattgtgtcgtcagcacagtagaaagtaataaagattatgtgatt

SEQ ID NO: 251406 - DNA, 613 bp, Cannabis indica
aaatgcaaagtattatacttcgtgaagaacaagagttgcaccgaattacgcaaccggttcaggcagctcaagtagagcaattgattcctctagctcttgctcccgtggtagccaaccctggatcgaccctgcaaccacactgagattcagtgtttgagcggtttgttaagctgcaacctccaaaattcttgggtggtattgatattataaaggaaaaacaatggatgagtactattactcaaattttggataatatgggggtagtaggaactaggaactgagtgggtcaactatgtcgctttcatgtttcaagagcatgcccgcacctggtgggatttagtaggtcaatctcgagaccttagtacggtgacatgggaagaatttaacaacttgtatgaagaaaagttctataacatagccatctgtacaactcaaatggagggttttgtgaaactggttcaaggtgataagtcaatggctcaatatacactggtgtttgatcgcttgtctaagtttgattgcgatttggtactaacatatttcacctaagaacaaaaatatattactagattggatgcaacaactagtaaggacttgaagatgaccactaatc

SEQ ID NO: 251407 - DNA, 524 bp, Cannabis indica
ttaatcacaacttttttatttagtcacaagttttgttgtgattaaaagtaaaattttttgtgtgtattatatttggcactatgcttaataccacattagctagtagagctttataattagttagtgatatttttaatattattcgttaaattaaaatatatgagatttaatattaaaatacactaataataatttgttattttgtgtcctttagtaacacttttttaatcaaaattttgtgtctaggtccaaagtttttgattttaaatacccattagtatttctttatattattctttgattttttttcttcgaattaatattatattttatctataggtcttacttctagttattgttaatgtattattattaattgagtaatatttaatttatccccagatttagtttcttgacttcgtttcgaaaagaaaaaacaaattcctatagaccaattcacgctcacgtctcgtgtactttaagaatctaggggctcgtttggaacgccgtattaggtcgtattg

SEQ ID NO: 251408 - DNA, 674 bp, Cannabis indica
gaacctcatctacgttgggttcctaatattctagatacacatcatcctcatcaaaatcatactcacgacctccatcatctaccggctgtgatggttgcttttgtaacaaactatcacggtcgcaacttaatccatcataagattctccatctctttctaactactctgaaaggtagccttcatctcagtctgtgcagccgaaattgcaaattattggtctttgaccttcttcaatctcttcgccaaccctaggtaatcgatgtcatttattagcccaagatatgtttccaagaagggagtgaattggaaatttaaactaatttcgataaattaaaacttttaacacaaaattaagtaattgaacacttaatcaaataaatacaagtaatatggcaagcaatatcagttaagaagaagaagaaaaggaaaatgaaaagtgttaaaaacggaatgggagtttaggtagttttgcccccaataaatcgattgggttaattgcagcaaaaccctcaatactttcattttgcttgcacttaacctccaaaactcattttttggcggtaaaacccccaaaaccatgatatcgttaacaatttacactttctgtccaaatttagttgttaagtgccatattagattatccatgtggacacagtgtacacgtggcacaattt

SEQ ID NO: 251409 - DNA, 1012 bp, Cannabis indica
ctcaaagactaagaaagttgatgacggacaacagcttgcacttctactagctgggatccgtacaggaaccccattctggaacaagttacaacaagaaggagctgcgaacctccaagattttcagaagagggtcctaaagtacatcaacatagaggaggcccaaatagtggcctatggaggagactacccaaccgaagtgacaggatatgtacccggagttcaactctcaggaaccatacctcaggctactccaccgatgagcggtatacagttctctgctactccaagagacaatcaaagccaggcctttgctcccgcatcttcgcactacgagaacccctcgagggtaagaggacaagtcccgtctcactccgctcctgctgcaagtctaaccgaaccttctcaaggctcccggagcaagaggtcctcaaaaggcagcagccagacggaggataagcaccaaaaaaggaggtatactcccgaatacacctagtacacggagctgacggactcacaagaacgtgtgtatttcgccacgcggcagaatacacactaccagagaccgcctcctctatatagagatagttcccgaagggatcccagcaaaagatgcgagtaccacaacgacattggacacaacaccaatgaatgcaaaaatcttaaagatgagatcgaaaacttgatccaattgggtcacctctatgagtggatcaagaaccagctgtcccatctcaacccggttctggcaggagatctaatactccaagagacacccagaggtgcgctcggagcactggaaccagttgcaccctcaagaggacctcagtagacccctggcctgccaccaagacccaacggaagagtggctatgatctttggtgggcccccatattggagggacccactcgaaacggaattaaaaagcactagtgttgggggcgtgttaaacgacaatgaggtgtcggaagtcactcagcttccagctcaaaagacctcgactcatggatcagcc

SEQ ID NO: 251410 - DNA, 566 bp, Cannabis indica
ctattatttgccattacccgatcgagcctttcgtataccatattttttgtccttccattacaccatgtgaatttgcttccttctatttccacttctctgagtccacacttgtcaatggctttattaaagttcttcattagataccccggtttccctcctccacctagtttctcatgaatgcctcggatttcattgaaatcgcccccacaaagccacggcccattgttgttttcagcaattctttttaatagtgtccaagagttatgtctttgagaaggatccggatccccatagaagcccgtaaagcgccaattaagatcatcctccgtattgatccaagcatcaatatggtgatcattaaaagacgttagattaaccgaaaaaggagccttccaaaggagcgccagacctccgcttttccctttagcctccacacaaaaacaaccttcgaaacccaaacgaatacggatcgactccatgtactgacttttcgaacgagtttcagacaggaacacaataccaggattgaaatctttcacatgattggcaagagcagtcacagtcca

SEQ ID NO: 251411 - DNA, 510 bp, Cannabis indica
aacttagggataaaattagtttggtaattattaaaattttttttttttttgaggttttttatgatctttctttctaaccctgtcatgtaagttaaagttacaatcatacagagacttgagcccaatttttgtgttaagaatattgtaccatgttttttttacacgaatgaaaaaatcatacaatcttacatatatatgttggagagtctttaatttatcattttgaagtaataagatggaatctatttgcttactttggaggcatatataggattaatttttttcctttttaatggtgattaaatctctcaaaagcttctctttttcgttttagcctatatttggagatcattaacctccatcaagccttattctgtaccatagaaaaatttgaaaagaaattacctgacaaataaagccttcaagggtgcctagcttacccatggccatagccatttgacccatgtaatttgctacattcccagaggaaccggaggaaccaagagatcc

SEQ ID NO: 251412 - DNA, 610 bp, Cannabis indica
gtaaaggctccattctgttgattttgagatctgctggtgttagaattggtctgattgccatttttattgattcttgtgcttgccatatttgctgacaatggaggaaaaggctcttataccatgttcaatgtcttggccatgttcgaatacagtaacagggaaaacagagcaagaagaaaggcaagagaggaagaaagaaaaaagaaagaaataaagaagattaaaacaaagagcaatatcgttgattaagtgttaatcgtgcatggtttatatagtgactgaatacaaagcaagctagagagagttggaagagaactagttacaaatagaaagaaactaatcctaagaaagtcttgtgatagaataaatgttacaactatcactaatagacataacaaaaccatatacccttaacacgacccctcaaggttacaattcgagtcatttgttgcagtagtgagatcttgaattgtaagcttggattcaaataggagaaaatgttgactagagattacttttgtgagaccatctgcaagttggtcaattgctggaacatgtttgacatgaaccatttttttggagaactttttcatgcacaaaataaagatca

SEQ ID NO: 251413 - DNA, 1542 bp, Cannabis indica
agaaggacccagcgtgaaggtggccagtttctagaaatagggaatgaagaacccaacataagtgttggtggtgctcaacctatggagtatgataatgatggtgcctatgatcccacgagatatgtgccagttttcgagttgaaaaaatgccatctcaggcgccgcctggaagaggcaaaccaacaaaacgattagttggaatgggaggcaaccgcgactagggcagcacaatagaacaatgcacaaaatcaacttgatcttggagtgaggacaccacgaggtaggcctcgcggctcacgaaccaacaggcacgagacagctcaggagaatcctctgaatgctcaggaagaacaacctagagaaactgagggtccccctgagaatgaacaaccaaataaccaaccgaagccttctcaccgaaatgagaatagaaggggacccgggaccagggaacaggaaatcccccgtgagaacgagggaaatcctgggactcaacctgggacaggtgggttgccactgagacatcgctaacgtccttctcgaaccaacagggacagggcacacacaaaccccatcagggggcatgttacaacccataccgaagggagaaggacagaacatgacgaggcgagtgtcagcttgggacgcataagaacccatagtcaatcaatgcgaggaggagacaaaacgcgtcgcaatactgatcgaaaaagtacaggcacaagtagaactgaaagttactcaaggacaaggtctatgagtaggacgaggtccatgagtaggacgaggtccgttagtaactataaccaataataacggatatttataataagttgtaccagaaaaacctgaacttcgccaacagctcgatcaaaagcaagaggatcctatacaattttgaatggttgagttggaggacaaatttaggaggtttcaagtcagagaacatggaaagcagttgggatacgactcggacgaggaactcgagcctttccatccagacattataatattgaattcccttaagggttcaagaacccacatgtctcgtcatatgatgggaccacatatccagtctcgcatttaaataatttcaatactatcatgccagccagcaatgttacgaatgatctacgctgtattttattccccacttttctagttggagcaatgagcagctgaatttacccatcattcaatcacctcttggtaatagttgtccaaagatttcaagaaacagttcgaagcagcaagggataggagacctgaggcgtcctcactcactaacataaacaatagccgggcgagacgcttaaggcctacttaagttgttttagcacagctactgcgagggtgataaatctggacgatagtacccaacttactactctttaggcaaagatcacgacttatctctccactgctagaggcgagctattggatgacctagataatcgcccagtgataaacatcactgagttcaatgaaacagctcaagtgtttgttggaaaagaggaagtaaggaaagagatgaagttgtta

SEQ ID NO: 251414 - DNA, 614 bp, Cannabis indica
aagacaccacctttttccctttggagacacttttgggcagaaccacttcaggtttttgaggagtggataccttggaccttgtttgagaactcaccgtgggcataggcactattgctttcttgacatttggagcaccattcgaagaagtagacttcgacaatgtgtgattggatgaatgagattcatcatgatcaccaaatccaggagttggagtagcaatcgaagaagcaaagactggaggagaagcgagattgtaagtcgacttttgagcttgggtcttcgactttttggcagtggtcgtcggagccgacgatgatcaggaactccgatcactggagcaggtggcgcaggtggggtgatcagagaagcagaggcagagccaagagaaggcttcttggaaggttgagcattttttgctttgccatttttctttgaaaccttagaaagaaaacgcactctcaaacttgaagaaggttagacttttgagaaagaaaaaatgagagaagtgaatagtggtgatcgtgggtaaatgagaagttgaacatatatagcatttaaaattaaatacccaatagtcagaaaaaatggaaaaaggaaagtaacttccttacctt

SEQ ID NO: 251415 - DNA, 1492 bp, Cannabis indica
tttaaaaatgataaatattttagcatttatttaattgggccttgtgcaagattgggccctgtgcaattgcacagcttgcacagggtcatagccggccttgactgcaagtcaactgttagttcaacaaacaattcacattaaccaataatttaagagtcaaacaagttatgtaaataatttcgtctcacatcaaaacttgtatttattcatttagagcatttctaatattcacttttcagatttcatattaagatcataaatcatgctcaaggtgatcaatcaaacatgcattaagcacaaagataaataaatcacataatcaaagaagaaagaataatcaattcatattaactcataaggtaatctcaattaatatccatcaaatatctaaattgggagtttaactcataatctcagaattcatatccataatcaaactaaacagagacaataacatagaaagtaaagagaacgagaaggaaagtagatgggggattgtcacggatcgccaacttctcactctaatcttcttcttttctagggcttgtttttgtatatccctctaattttcgaagccctctttttatataaaactggattttttagccaaaaacacgacaagacaaaaaaaccccaaaacacgacaacggcgccacgacgcctgagccatcttgaaaaacatacgaactttctattaattctccatcgtggtggcctcgcggtgctatttctactgagacgccagtgttagggtaccgcaacgcctggcacgtaaaatggcaactccaatttcttcagtttcaattctacaccatatttctaatatttaactaatttgcacatttcaattgtgaaacttgaaactaaaaaaaataaacgtaattatgttccaaaactaacatttaagaagaaaataactactaaaaatactttgaatattagggtaaaaatagcataataaactctgcaaactatatccttactcgccctcgagtaagaataagattaaacttaaattaaaactaacacaaataattaagcctctattttttttaattcacaaactgctactgtctgcagaattttaataatttttttaaccaaaattttaactcaattactctaataattaaaccaaatgcctctattgaaaagtagtgtataaatgtaaattacaactcaagaagatttggacaacaacatataaatgtcctctttctaactctctacaaaccaatattcaaaatgtttgcatgacttatctttctctactaatatcaacaatacttatttggaatcaacagaactttcaaagttgtaatgaaatgacttaagtaaagagtagttgaaagtcatttaagcttttattataccataaacacaatatgaactaatcaagtactcatatacaaacacacaatcccataattcactaagtttccaataattaagagctttactaataatatttccaacatcactttatttattc

SEQ ID NO: 251416 - DNA, 682 bp, Cannabis indica
aatgattatttatccctcaatgatcgcaattctgccacccctcctccccctcatgctatgcaccaatttcactccttccttcattcacgtaatttaaatcctcttccttgcacgggcaacaaattcacttggcgtcatggttccattctggaacgtttagactggtgtactatttccccttcatggaaagctcttttcccccatgcttctctcacccatttgggcttttatggctctgatcacagggcccttaaactccaactggaagactcttccttcagaaaccttcatcactctcgcttccaccttgaaaactatctccttaatgatccctcattcccagccttggtccgaaactcttggtccactctttcatccccttcctccctccctcttcagcatttcctcaacaaacaatcttcttgcctctcaacaattaaggcctggcaatcttcacaaccctcccttaagcaccaaatttcccgaactcaagctgatcttgaccggttgttaaataacaatcactcagcccacctttataaccagcagatatctcatctccaatctgaacttaatcgacttctcctaaaagatgaaatatactggaaacaaagatcaagggctgcttggcttcgggctggagacaagaaacccgttttttccaccaaaaagcctctaatcg

SEQ ID NO: 251417 - DNA, 506 bp, Cannabis indica
caagatcgatgaagaagatcaagtaattctcttactcagttccctgcctaagaattatgaacactttgtggacacaattctttatggcaaagatacacttaccatgtttgaagttaaagcagcactcaactcaaaaaaaaaaaaaacaagaagaaggttgatgattaaactgagattggtggagaaggtttatttgctcgagggagatctgaaaagagagatttcaagaaatcaaagactggacataagtccaattccatgaacagaaatgcaattggaaagaaatgctactattgcaaaaaggagggccatttcagggatgactgttacttgttaaagaacaaacttaagagagacaaaagtaaggacagaggtgaagcagatgttgcatcatgtggatatgattctgcagacgttctggtagtctctagtgaggattctggtggtgaatggatccttgatttgggctgctcttttcacatgaccccaaacaaggatttgttcac

SEQ ID NO: 251418 - DNA, 931 bp, Cannabis indica
aaacaaacttagaagaaactgaggttagtgcaacattgtcagaaatatcttcatcactattagtttcatcgtcactccatgtgacattgaaacttttcttattcttttttagtgtatttgcacattcagattgaatatgttcaaaaccttcacattccctgcattgaattctcttttgattgttagttattgatggttttgaaaaagtattacctttggatgattttaaaacattcttttttcacttatatttttcatgtatttctgaaagtttttagttaaaacatccatctcatcatctgattttttttaactacattaaaagtaatacatttacctttaataatcaaatgtggacttaggtttgtctttttacttgatttgttgatttggttcaaaggtacgaaaggaccccatcaactcctccatcttcatcttgctaaaatattttacttctttcataaccaataacttagcgtcgaatttgttaggaaggcctctcacaatttttctgactatcactgattctttaagtttttcacccaagcaaaaaaaaaaaattgttagcaatatcagataatctttcataaaacttagacaaagatttattgtcaaacattctaatattatcaaacctatagtttgaagcattataaatttagattgcttaacatcagttgttccttcaaattgggtttgaagaatttgtcaagcatctttagcagattcacaagaagatataaacttaataaaacctccacctactccattaaatatagcatgtaaagctttactattgtaagtagataatttatcatcttcagtaaattatttaagttttagattttaacttagaattatctgcgaaatctaccacaacaggatgagaccatcctgaaaaaattattctctatgctttctcatcttgaga

SEQ ID NO: 251419 - DNA, 789 bp, Cannabis indica
atatatatataactgctatactgccagggatatatatacatactgtatgaaatcaagagtagtactaacatatatatatatttgaacattcaaatgaaaatgaaaggaagaatcttataatgccatgtcaagtgaaacggcttctttgatttttcaatatagagatttacggataaaagaattgcaattggatttttttttttaagttaatgatattaccgaatcggggcagccctgacccgaaacaaacataaccgaggcggggcggggcggggcaaagacccgaatagagacccgattatctcggggcgggactgccccatcgggtcggggctctgacccgatctgcaaaaaagcccctattttccattcctaaacctaaccctcgatgaaatcctataaatagaataagatgctcttattttcaaagcaaataaaaaacttagtcttgactttgtcagacaacttagaaaataaagagagagtctcttagaattcaaaacactcttcttcttcctttgaaattttcatgacatatagtgagttgaggaattacccacacaaaagtcaatactcaggcccttgtgaaagattgtgaagaatttcaacaataaaagaatatataggtttagatcttgatcatactctgtaatagaaatgatcaagggttagagatctaaacggaaggagacattatattccgctgccactaatgtaaggttttttttataactttatatgtgtatatttcattattttaggaaattcatatttaggatgtcagattat

SEQ ID NO: 251420 - DNA, 663 bp, Cannabis indica
ttaattttttttaaaaaaattctgtttataattggagtggtctgatgggcccgataggggcccgatattgggtccggtggtctgacttgttggaatatttgacttggcctgatgggtgcccgatacataattaatttttttatattatttttttctgttataattttggggtgggcctgatgtgtggtccgatgggcccgatgtgtggtccgatgcctatttgaattttttaagtttttcattttttaaaaaaattttttaatatgtatttattaattttgtgtcataattttttttttataaattttgtaacatgtatttattgtttttttttttacagtcttccaaagttccacgacttttacttttactgtctgaacattacactggtcgtgtgacttggcagggcggtagttcgtattacccccaaagtgaaagccaagtttgtggaaatgcagttattggaaatggtgaaggagaaatcccctttcaagtgtttttttgagagagagtcattagcgttttcgggtgctcttatccatcagctcttcatgcataagattaaatcagataaggatgatgaggtgcatttttatattgcaaagaagagatgtcgattcgctcgagttgagtttgccctggtgattgggcttaatatgttac

SEQ ID NO: 251421 - DNA, 547 bp, Cannabis indica
ttttttttttaaaaaaaacacactatagatatacttattattattgttattatttgtaacggttttgaatcatatattttttaaatttatcaattatcttttttttcttatataaatttttgttttgtgtgagaattaaatacaattcaatctatttataaaagtgagtagttaattcattgtttaatttgttttatatataggtcaaatctagcaccatgttatataggtgagatatggcaataacaacacttttgaatgtaatgttgactacaagtgaggtacagtaataaaaaaagtttcgaaattatatgataagttttctataaatttatcaattcttataaaaattcgaggggtcaaacctaacataatgttatacaggtcatgtatgtcttccattatagtaacgagatttggttaatacgagttggattagcctgtttgtaaacacctaatttttcatataaaattatataaaaaattaaattaaaatttgatacaatttattacttaattgccattaaataaaaattatttatttttt

SEQ ID NO: 251422 - DNA, 722 bp, Cannabis indica
ataatttagttttaggctcatcagttaatcattggcgacttgatttaaacgacaaactaaacaccaggacacacctaaaagcaaaaactaaaacacaaaaccgacccaatatatattatagaaaaataaatttccttccctaaacttaataaaaacatttttcttagccaaaagattcaaccggatgggctggcattatcaccctcctcaggtggtgactgaccaaaatatggtggtggaaaaggaggcagctgacttgtatccatcctgaggtgtgccacaaaagcttgatgcatattggtactgggcattgtccaaactcacagatgatgttgaggaaattcagataccaacacatccaactgcgaagtcatggacgaaattcagatactatataggttgaaagtttatatatcctactccgaatataaatttttatttttaaaattgctatcacagtaagaagaagaataattaaattgtgttgataaaacaacagagtgaaaagatgacgaaattaattgccctcgtcctacattcattgaattgattattaaatttgtttctttcttttctattgttaattttagtatttgcgtttcttgttttaatatttttgcaaaattataattattgttagtcccaatagaaataccaataaattattggtaattgataaatcaattctcgtgggatgatactctacttttcttttctattac

SEQ ID NO: 251423 - DNA, 1090 bp, Cannabis indica
aaaggcattaccttgtaacaatacaaacctcgatctgtaatgaaagaggtatgttcttggtctagttcatacatcagaatttggttatatcccgagtatgcgtccataaaactaagaagttcatgacctgcagtggcatcgacaagctagtcaatgctaggtagtcgaattttgtcctttggacatgctttgtttaaattagtgaaatcaactcatgtgcgccatgagccattaggcttgggcactagtacgggatttgctaaccagtttgggtagaatgactcccttatgagccacatgctaaaaggcgatttacttcctctttcagcgcttggtacctcgcggggtccattttacggtgcttctgtcgaacacctcgcactacggggtcaatgttcaaccggtgacacatgacctgcggagatattccgaccatgtccaaatgtttccaggcaaaaacatccaggttttgtttgagaaaagtaacgagcttttctcgctgtggaaaagttagtttagaaccaattttcaaaactttattattatctaagagatcaatgggtacctcaatggtgtcttccgcggcttgggtggtagtggtataatcgaggacccttggatccaagcctggctttttttcatgcggtatttcctcgattctgaacatctcttgtcgaggggatggtgcttctaacatgtatatcatgttgaccgacttcttttccgcgagctttaatgccgcgttataacattcttgcgagtctgattggactcctcgcatagatcccactctagcgggagtagggaacttcatggtaagatgatagatagatgtcacaatcttcatttcctttaggataggacggccaatcactgcattatatgatgagtaccgatcgataacggcaaagtcagccattgacttggccacgacaggtgcggttcctaaagtgattgagagtttgatcattccctttaaagcaatggtgtccccgataaaacagtagatactcgaaacgactggccgcagatccttctcttgtagtcccatttgcttaaaagcttgaaagttcaggagattcacagaact

SEQ ID NO: 251424 - DNA, 556 bp, Cannabis indica
agcattctaaataatttaaagtgttgaaattaatttttaaaacatgccctgaaagtaacattttttcgatgaaaataatcttttcacatttgcctttaacatttttttcctaaccggttaaaaaaaatactatcataactataatatgcataattatacaacaacaaaaaaaaaaaaaaaatcaaatggctatatgtagaaggatgcgtgcttgagttgtgttagagaactttgacaacccaaaattaggcccttcataagctcattcttcacaaataaccattcttttaaaataaaattactttcaaatttaacgttacttctaagtatattttaaagtcactataaaattacattacaagtcacttttttgagttaggtctaatggtacagttccccaaattaaaaagctttaagctaaaccaacatatttatttttttaaaaaaaaatgaagaaggtgcaaacaaagtagtaaaataccttgtgaatagcttacctattcaaatagttcaagcaatttctacaattctgttattaataacttgttctttgttt

SEQ ID NO: 251425 - DNA, 534 bp, Cannabis indica
tactggagtcaaattatgatattgccgaagaagactattgcagaaattgagagtatctgccgtgctttcctatggaaaggccaagcgactgctgatgggccaggagcagtggcctggaacacactatgtcaagccaaatccaatgggggattggattcagagacatctcaacatggaatacagcagcgatgatgaaatatgtttgggctatagctaccaagaaagatagtctatggctaaaatgggtaaatcatgtatatatacaagaagatgactggtggcaatatacaacacaaactctaagcagctggcactggaggaaagtagtcgaagtaaaaacaaagtgatgcaagtcatcgatccagcacagttcatggcaaagaaataccaaattgctgaagggtataagctgctacagactcctcaggaaatggtaagatggtgcaaagtagtatggtgctgatataatgtgcctaagcactcttttattatgtggattgctactcttaataggttaaaaaccagagagagatt

SEQ ID NO: 251426 - DNA, 663 bp, Cannabis indica
gcatcagtggtgcatagcaccttctcgacatgtcacgttgcgattggctagcgatactctctaaaagctattatattaaattatatgagactcgatacttagttggaccaatagcgatattaacacataggaaggtgctagacaccactagtgccctttagcatttctattaaagatattgtaaatttgtaactaatgacaattataattaacttaaaaactacctataattaattaattaatttaaaaaataaagcacagacaaaagttatgcaacataaatgttttgctcatgttttatgaagtgcacaacaaaagtctctcttctcaacaaaatttagtaatagcgatgaaactaattaattggaaaattgctgatgaaacattattgatctaaatttatcgattcgtccaagtttttatcagcagtaaactttattctaatggcacatggtattttctcgcgggatatgtaactactttaccgataatagcctaaacacattgacaaaaatggtatctaacacgtttcaatgtttacactgtataatttattttggagtaaatatcattttgaattctgtgttttgcgaaaattattgattggatcccgtattttgttaaatgataaaatgaacaaaatggatcctgtatttttcaaaa

SEQ ID NO: 251427 - DNA, 825 bp, Cannabis indica
ttattattattattattacataactactgtaagcttccatcatttttgtgtctagaaatattttgtttcacttgaaattgtgataataagttgcataattttatcatcttaaactgaaactttagcttgtaggtgtcttcaatcaattatctaaataaacacttatttttttttttaaatttctttgacttgggtatcccacccgatgaatgcgcttatattaattgattttgatgtaggtgctgataggaagttaattctgtcgcctagattgtctatgctactagactagaagttgttggtcgaagccaaccattatactcacagatcaaagaataatgtcggtcattattatcgctttttgttggattaccatactatgtacattgcttgatacatatggtatctagaaactagaaagtttaaaaatgaattacactaattcatttgatatacaactttttctttgtaattaaaattcaaaactgtttacaaattgaaattcatttgatatattacatttaattgttgatgttaaataatatagggttgatgaatgctactaaatgttggcatacttgcatgcgaataggggcgacattacacttttagggacaatcatttttgctcctaatttgcataaaataggggtgattttaatacttttaggggcgacaaaaagttgtctctaataatcacttttaggggcaattttgtaatgaccgctttagtaatttagattagtaaaggcaattagcactaatttctgatattgttataattatttatggatttaattatttatgggccccattgttagaaatg

SEQ ID NO: 251428 - DNA, 588 bp, Cannabis indica
aactcatttaaaaagaaaacaaccactttcttaaagccccaaactcagtatcctaaatattcgagtatcctaaatatttgatactttgagactttgacccattctccattctcctttctcctcttcttaaagcgccaaactcagtatacaaacactttcttctactaattaatttcctctaatctaatcacaaccagaaaccagcaacaaaaatggagtttctaagccaccccagtcagtctcgacctcaggaccataacaacaccccacttttcgcttataccatcaaaattggcactgcccacttcgctttctctgccttttgatcgatatcaaacctcaaatcgacgtttgatggtggagtgacattgatgagagcaagcctaaccagaagaataatccatctgaattaattcgaaatcgaaatgagtggcggtagagaaggtgagtccttggagtatactcccacatggatcgtcgccatctctctggcggcagagcgcagaagatcaaggaggagttgatgcttttggccttgtaataagctttaaaaagtaataagctgtaaatctgtttatagtaataagc

SEQ ID NO: 251429 - DNA, 1351 bp, Cannabis indica
gttcttgccatatttttgttggcagccatatgttccgggtcatgtttgattggtctaagcttgtgtgactatatccaccaatttaataaaacataattgtttactatttactgctgccaattctgtcacagatttcataattgcagctgcttgttgtgcagtcatggtttgttgcatcactaaagcttgctggaattgtctctgttgcatgagaacaacttgttgcatcatcataggcaaggaagaagacactaactgagaatttaaggcagtggatctcagaggtagtgattttgccatttcaacattcatggggcgacccccaacatccatattattcaataataatgcagttgttgcttcttcaggttttaagtattctatgtaggtgaaatgctttgagtcgtgatggtacagtcaacaacagtaatgctgtaatcagattcaactgattaatgcagagtagaccaagaagctttaatggtttattcagagtttcattgtttatcctttgttgttcaagtaattatttatttgagtaagtcttctattcccttccatcaagtaacgacttatacaatattcagattttaaatttatactgtgaccataatagtctaaatttatggtcacatttgattgagattgtgtcgatggtgccaaagtgaaacttatacaatactcagatttcaaattataaaaatagaccataacttttattagcaacaaaaaattatacttatgtcaccataaatttagactattatggtcacagtatggtgttattgattgactaaatgatgctacagttcatacgactgtagaaacaagtgtgtatggtgttattgattcacttaatgttgctgatagtgatgtttctttaactaagcataatgttgctgatagtgaagactgcaacgttaaccacaacttgtttatacattacagcaggtcacctagaaaatgctaatgagattaaagaaaatgtttcacaacatgatgccttagttgagagtgaaggaaaagttaaaaatgcttaccttgaattggatgacacaccttctaaaaaggcaaagcttaacatcaaaccgtcagctatttttgatatcggttgtaaggagtctgcaacatcagctgtttttgctgatgatggtaaaaatatattaaaatattgtaagaattcttttgggacagagaaaggcatttctgaaaaaaaatgaagcgtgatgatgaaattgtggttctttctattggagaattgttgaaggcacttgctagccaatctgaccagatgccgtaagttctgacttcagttttttttaactttttttttttttgtttaaaaaaagag

SEQ ID NO: 251430 - DNA, 500 bp, Cannabis indica
tgttcaaacattaatattatgatgattataattattctactttatttttgtttgaacaaactcttatattaaagaaaatagagaaagtggtactctaataacatgtattttgttccaaaaattattctcaccttatcaatgaatctcgtacatcgttttgtttaattttttttttctttctaaatcatgtgttttaagaaggacaaccaactgatttttctgggacataacaataatgttgtataactagttaattatatataggtcgtattttgcgtgcgtttatttataattttttttaaaattatttctaaatattataaattgaaaaataaaatcgtatcaaataattttaaacttatttatatgtataattttttacaaaaatattaattaaaaagtaataaatctatatagacaactgtaaaaaaaatttaaaagaaatatcatatacaattcttatatagaaaagaaaagtacacaaaaaaatatctttaaat

SEQ ID NO: 251431 - DNA, 668 bp, Cannabis indica
tgtgtataatatgtgatatggatatgcgaaggtatatatgtgttaatgtatatgcatccttgttatgattgttacactaccaacacttgttcgaaaatggtacagagtgcattagtatagtgtatattgttaaggagtacattacagtgttaccatcacaagtacgggaaagtacagggtgtgtgtggtatatcactcagtggtactcatggtgcgaaacaaaccctaccaagactcatgcaatgtggtacgtagtgtatgtggtacagtggctataccctagtagggaactcatctattaaaccttgtaaataagtgtatgggtgcctagatacaagtcgatattatgtgatatgttatatgctttttttactgaatctgtcgactcacaattctactttcatgtgtaggtaaaggaaaggcgaaagctgagtaagaatgagcttgagcttgggtgggattgtacatgtcatggcggcgcgacttggagtgttcggtctcgggacatctaggatattattttgtagtcactgtgcgacttgacatttgcattctgaatattttgtaaagtttagaaacagggtcctggcacttgtaaatgttttactaaagtctacaaagtttcataattaataaaaaaattttaatttgacaagatttttgagaaa

SEQ ID NO: 251432 - DNA, 523 bp, Cannabis indica
aatatatattggtagttattattttttaaaaaaaaaaaaactgctaattagttatattaatattaatattttttttaaaaaaaaattgtataccatacacgtatgaaattgtattgtataacagaaaaaaaaataaaacaaacgatttagtcaggtatttttctatttttcttgtttttatcatcatccctaaaatctatagtcatcatcatctccagcatcatacctcacccaccaacgccacccctcttacaggtttgatccatctctctctcatcttcttataagaagactatatggttaatacaattttcatatttcatatatctttaaccaggagcacaaattatggctgttaaagaaaagaaaaaaaaaacataaatcccaaaacaaattgaagcataatgaattggccgttcatttctcaaaaattcaacaaacataaaaccaattccatcgtacacatccaataaacaaacaaaaacaaaaaaacaacaacaaagtacatataccgacatacaat

SEQ ID NO: 251433 - DNA, 635 bp, Cannabis indica
aagatgccaaaggaaactggccacaagaacttcctgaagttttctggtcataccgtacagtggagaaaacagcaatcggacagacaccattcgcaatggcgtacggttatgaagctatgttgcccgtcgaactcgagccaccttcccacagaagaccgacgtacgatcaaggtaccaatcacatactccttgcagaatcacttaatgaaatcgaagaaagacgagcaaccgtaaacttaaagttgatggcacatcaacaaaaagtagctcggtatttcaacaaacaagtgaaagctcagaaattcttcgtgggagatatggtcctaagaagggtattcctaaacaccaaagacagtgcggcaggtgtactaggacctaactgggaatgaccatatcaagtggtcaaagttctcgactccggagcatacaaattaggtaagtatgacgaaaaaatgcaactcatcctagtacactggtattggaatggagaacatttaagaaaacaccaccaataaagtactcatgttaggtgaccactttaaagtactaattgaacacttgcttttaagtgaatggctttttgagcggactacgcccaaaggttccgataaaagaaacaaagtactcaggtcagg

SEQ ID NO: 251434 - DNA, 613 bp, Cannabis indica
actgttatgttctatatgtcatcaggcaattcccaatcatcctcattacaaattggcataattgtgtcttcatatgtattcctccaatattatattgtgtaatatggtgaacacagtgcatacatactaatactttgttgttgagctgcaacacatgcatgaggataaggaaacttcataatttggaaaaaagccgcaagtgtcagtctgttcctgcaagtccactacagcatcggtctcaactaatcctccagggtggacattcaacgtgtaagatccacatgtgtcaacgttcaaataccgagatttctcaaacaacaatgccaagtcctccttcatttttagtgttagggtttttgtccacttatcaattttttcttttcgcgtagcaaactactgtcagactttggacctcaagaatgctattgaagcagtgatcgggaagcttcttgcgtccttagttgtgttgttgaagctctcagcccagttactcatcattacattataacgtacccctggaaagtacgatcaaacctatttcttaaatccaatttcctcaagatattgtgcaactgcaacattcattgcttgaatcttctcaatttctctgtga

SEQ ID NO: 251435 - DNA, 1431 bp, Cannabis indica
tacctcatgttacttaggtaatagtatattactattaccttaactaataaacatacatcatgtatcctattatagataagtaagcatcactaaatttttaaagacaaagtaccagtgaaatattaattgaggtaatttaagtattagaacaagtgtaatctttcaagtcacaagcatctgacatcactaatatatcctactgctcttatagtagttttaggcttcaaatccacatgtcaatcttcactcactttttaatatcctagctacttatattggtttggtcaaaagacaaaaaagtgtctaatgtattaatttgtatacaacataagatatggtcgttgttaacagttctacttttcataatttcattcttattacttctaataatataatatttatgttaagatgttattaatggtttcaattaatattttgtttgtatcttttttttttccacttctaataatataatatttatgttaagatgttattaatggtttcaattaatattttgtttgtatctttcttttccagattgtgtggcccaagaagagattgttttagtaggcccatttgaagtggaaactcaaacaagtggggctgctatccaaggctaaacagaagcccaactagatggtgtatattttgaggaagaagaatatgctcctgaggctgaagacttagaaaatgagagcataacagatccaagtaaatggtggggttctgttaatgacttttgcagccaaattaaccaagaagactctaatgggggctacgaagaggaagatgaattaagaagcttgcctagtgatggtgaagatgtgcatcagtctataatgaatttgatccaaggactaagcctgaggagatcaagtacaaagagggcatgttgttccctactaatgagcatttaagaaaagctttgaaggattattttgttaccagtgatagagaattcaagtatgtatccaatgatagtttaagaattcgagataaatgcaaaggcgatgggtgtacatggattcctaatgctagaagaatgagagatgatggcaccacatttaggatcaataaaatgaaagatgagcataattgtggaattgtattcgagaatagcttagtagatgcagattggattgcaaaacattatttggagaagttcagacaaaacccaagcatgaacttaaagtctaacagacaaattgcatctgatagtaagtactctaaaatttcctcttggactttttatcgagctaaaaataaagctagacacatcattgatggctcagtcaaagaccaatatgcaattcttcacgactattgtacacaaatattgaacctcaatccaggtagcacaactttgatcaaaactaacttggtcaatgagaaaagagtttttgaaagagtgtacatatgtcttgcagcatg

SEQ ID NO: 251436 - DNA, 810 bp, Cannabis indica
acttacaaaaagcacgctcaacctatggatatttgaagaagaactcaaggttgtcaacaaattttaacatatcgggccaaacttggatagtgtcctctttcgatactaatacacccccaataaaagtgatgagtccaagcttgtacacgccatcttttacttttcacctctacagttggagtaacagtgaatccaacttcatagagctcttcctttcaaaatacgtcttggctagacagtcgttggacttggcttctatttcttactctgtaggggcagtacccataggtaagccagtaataagtccaaacttgattcgcctgaatctaatgtcatttgcccacataaaaccatacctcatcttcgttttcattgtttgtaagagtaggttgtggaccaacgccttagagaaagtcaactctttatcttcccagaagtatccaaaagggctagcgttaatcgtatctatcaactgaacctacttaaactttgccttgatatctctaaacctatatgaaccccaataggtaagacgtcgagtaaaatattagtaaattaaaagtataagttcatgagccatctgcaaagaatgaaagcaaacatattcaaaactaaataaaaagtcacaaatatgtcgtgattagtcgtcaaaataacaaatccaattttgcgacatattcacgacatgatatcgacatacgtttgattaattagtgttgaccttaagaagtgatcaatcaacattggggtcgtatggatctgatgcttgccacatgtttgcacaaaaaagaatgaaaagcaataaacaac

SEQ ID NO: 251437 - DNA, 1227 bp, Cannabis indica
tttggttctttcattgagagccataggttaagaaagttactaaacaagatggttgcaacgcgatctacaagtgttgacaaatagactccagcaactggccgaataactaggggcttgccagttgatggagttggaatcgggactaattctgtgctttaggcgctaggagcaaacattggaactgtctcctcaactctttctccaaggccaccatcagtcgctctcgggactggcacaaatgaccagatcccacctggggagcctcatgtggagatagacaaccttgaggaggtcgatccttaggtcgctcagctcagccaaactatggttgacttgcaacaatagctgcaagtctctttcgataagcaatatgaacagtttcaacactggttcgtggaaaactagaagaacattgaaagccaacgcattgagtaggaacagtggatagctaaaatgcctcaacaaattagggaagcctattgctctaatcatggaactacttcccatagaggtttttctaagtaaatgagagagactctccgtcgaccaacttgtcacgtgggaactaatgtccaaggagaaacccttagcactcgcaatgccactactacacctggtaagtaagcaggcactaagaaaacacttgacctgcagaccttccgaagtgtaggtatcttcaagcaagagcccgagaggactcaagctcaagggtagaatgtccctggtaacacagatgttgcatcaaaaattgatgcttatgttgttaaactttcaacttggggaaaagaggtcacatggaactttaagaaaagaattcagtgttgttgaaatgaattaaagctattgaaaaataaaagagattctgtgtcaattcagcgacatgtagagtttaagaaacaattgtttttaatcctagaacagaaggagattttttgtaagccaatggcaaaataattttggttaaaggaaggagataataacaataaattttttcaccgtgctgccaacaatagacagagtgtaaaccagatttcaaagttagaagaacagtggtaattgccaagatttggatactaatttggaaagaatagtcgtttattatttctcaaaccttttttagcttcgatattgaattgtgaagatgtcctcaattttattcagagtcagctgttgcattagcttaatacagagtttctacaaccaattcttgaagaagaagttaagtgt

SEQ ID NO: 251438 - DNA, 628 bp, Cannabis indica
gtccgtctgccgccaccgtcggtccccaacttccggtaagcacctcggtcgtcaccgtatgctaatttgttctttttttagtttatatgatttatccctaatttgtatgttttcttcctcatttccatttcccacttcaatgcaccatagccaagcaaccaaactctcatcttctctcttcgtagatcgagcagatacgttgtgggcagtgacaaaacaagtggctcaggaattttacgactatccttcaaatcccactttccctttttctcttgtattttcacaataacctcttcgctcttgcctgaccttaaaatcagagcaggtcttgtgattttcttaacaatctcaaatcatcttcagccattctcagttagagacatcactctctatcgtacatgagacccttatttaaggtttagcttcttgatttaattttgagtgttttaatctctattttctagattttgttaattgttatttcccaaattgttgtttatatttgtatatctatatatacaagactagatttttctatctatgtcatcgactatctctctcttgttttctacataggtgtcttgagtagagaaaagtggataaattgattgttaagggttctttccaa

SEQ ID NO: 251439 - DNA, 868 bp, Cannabis indica
gatgacggaaaacagcttgccctcctccaagctgggattcgtacggggactctttctggaacgagctactaaaggagagagcagccaatctccaagattgccaaaagagggtccaaaagtacatcaatttggaagaagcccaaataatggcttacggaggatactacccgaccggagtgtcaggatatacacccagagttgaactcccgggagccatgcctacgagcactcctcaaatgagcagcatacagttctccgctaccgcaggatataatcagagcctagccttggctcccgcatcatcacactttgggacacccatgtgcaacccctcgggataaatggtcaagctccatctcagtccgcgcctgccaccagcctaacaagatctcctcagagcttataaacacgcaggaccagttatactttgccacctggaaaaatacacattactggaagcctcctcccctgtatagtgatagttctcgaagggatcctagtaagactaggagtatcacaacgacattggccatagtaccaatgaatggaagaacctgaagatgaaattgagagcctaatctgactaggtcatttatatgaatggattaagaaccgactaccccaaattaacctggctccaataggaagccctttacctcaaggagcaccagggggtatactcggaaagctagcacccggtatacccccggaggagcactccctcaacaagtccctagattgccactgagaccaaatgggagagtgtccatgatctcggtggattccatattgcaggaaccaccacaaacgagctaaagtcttatgttggggccataaaagacgatgaagtgtgggaagtcacccaact

SEQ ID NO: 251440 - DNA, 517 bp, Cannabis indica
tccaaccaatgctgaaattgtatagcttgttgatatgtttgtggttccttaagagaggtgactgcaagaataaatgatttgtatgattcagttagtttatgataagacatgtatttatcaagagaatggggagtggtatgtttatcctgtaatatcgagtaacattcaaagtccctgaggtaggcaggggctttgtaattctgctagttcttctaggtgccacggttgatgcgttgttaggaatttctggtgtgttgatcacatcagcaggttccatttctgtatctggtgcaccagaattctcttcctgtaaaggaatattatcactaggaacgacattgttagtaggaggataatcatttataggagtattggaaacatctgcagtaggtaagatagtagtaatgaagggatcaatatgactagtgtcctcatttagttttgaaaatgggaaaatatgttcatgaaataccacgtttctagacagattaatttgtttagtgtttatatcatataa

SEQ ID NO: 251441 - DNA, 738 bp, Cannabis indica
atttccaagtcttctctatccatactgtcccccaatattcttacaattgggatatttccaatagaaacagcatgatggagagctgtctcccccaaaaatggatgtcttgctcttactatgtttctgttcactccaatcaaacgagtcacttcttcttctccaatattttcaattgcttcaaacatcctctttaaatccgatgacctaactactgcttaataacatatacaatatgagcaaacattaagttactataatatatgtactctttatataaataagatggtgatcgaaaataaacaaatgaaaaaattctaaaccaaaataataaaaatatatcatttccatatgtattgtattgatgactgtgtgtattcctagagtttagcaaaaaaattatatgtgtggactaagaaatagtaacagaaatcataatttataaattatataacatagttaatttgtacttcaatatatataactgtacattatgtaggaacaaagatagaaactaataataataatacatatgtttcttttgatcgatcagtttttatcttgattagcatccatagtatcccttacgcagacaatatttcaaatctcttgaagcttaattaaatttcaaaggcaaattgtagcagagtataaaacagtgtttaatgaaggtgcatagatcattaattgatcacatatttatagggggagaatctatataagatgtttttgaaacaaaga

SEQ ID NO: 251442 - DNA, 717 bp, Cannabis indica
accaccattcccattcccttaactctttccttaaacccatctggaagtttaggtccttttctcccttcttcatagctagaactggaaacatcaatttcatcagcatctctcaatacccagatgaacttcacaccactctgttccaaaccaaaagcaagctcttcaatctcatcttcagaaaaactcacagtcgttccaaaagagatatacaacacagaattgggttcttgttgatctagccattccaatactaaactcttctcagctcgattttcagatattattgtttggtgcaaaggcccaattgtccaaatcttctcctttcctccattaatttccttagataaaagctcaacgaaagaaccctcaatcgatttggagctgttgtaaagttgcccagatgaaaatttcaaagtcatcgccaaatgaatctgtgaacccaaaaaagctaaaacctcagaaggaaagcatgaaattgaagatggaagttctttattcggaacgatgtcgtttcttcccaaggtttcgcacataaaagcgaaagcagaaaaagcagaggcgcaattgaaagagtaagcttctgcgttttgtatcgaaacgacatcttgaacgacgtaagtcgttaaagcatcgtgaataacgacgagtcgttttgtggttggagatagcgatcggagtagttcagctactggttgacgaaggtgagttgaggcttcg

SEQ ID NO: 251443 - DNA, 557 bp, Cannabis indica
gaagcaaatctcaagcttggacaaaatgacaaagacaagttggcagacccgactctatacagaaggatagtcggaaaactacaatatctgaccattacaaggccagatatttcatactcagtaaataagctgagtcaatttcttgttgtgccaagactaagtcacatgaatgctgctgttagagtcctacaatatgtaaaagctacaccaggtcagggaatttattttcctacagattatgaggttcagttgagagcctacacggattcagactgggctgctttccctgacacgaggagatcaacaaccggtttcttcattttcataggggactctatcatttcatggagaagcaagaagcagcatacggtttcgagatcctcagcagaagctaagtacagagcaatggcgaatacgacatgtgaagtagttttgttgctgtcgatcttaaaggagctcaatgttgatcatgaaggaccagcattgctgttttgtgataataaatcagctcaacacattgcagcaaaccctgtttttcatgagagaacaaagcatat

SEQ ID NO: 251444 - DNA, 699 bp, Cannabis indica
aatttttgatgaaaagataaaatggtcctttcgaatttgaatttcttcacgcgtactgataggtgtgccacaaccttttaagattgtttcacgaccctacttcgaacgaaaattttttcgtgttctcggattcttgcaggagttgcgactcaacatactgtgttgcaaccctaaattctctagagaaaattcctactttttggagtcgttgcctcatcaatcgcggctcttaaaggcttgtgactcagtgggtggtgtcgcggcagtaattcatttttctcacaagctacaagtctcgatcttccccttacaccacgttatcaccgtcactcaagtttgcatattttctccacaatcctcttcaaatccccattacatatgcttgaacctaaaacagaacaaaacaagcataacgccactccaaaaataactcaaaacactttccaccacgctagaaaacaaggctaaaattagcctaacaactttttatattaaattttatttctaaatttttgaacatattactttttattcttataaaattaatattttttcatttatatctttatatatttttatttttgcctccattaatattttatatatccttttattcttataaaatttataatttttgatatggtaaattatttataattttttaaaattttataaataattataacgtacataattata

SEQ ID NO: 251445 - DNA, 790 bp, Cannabis indica
agtatagttgatacactccctgtcatggagtgtaccattcatatcacccataagcaataccggttttgtgtcattgagaaccacatctcccaatctttgccaataaactttcttatcctcatatctcgggggccatagatgccatgtaaggtccaagtggaccctggggggtctgaattaatttcaaccgagatagtgaatttgttcgacggaaaatttctaacttagtttccaaatttatggtcattttagatctcagccctcttaagaatgtagtgggcttgaaagaggttttgttactaaaattgtcaaattgtgaggtccaacttttttttttttttttttgtaaagaagtgaggtcaactttttactatgacgattaagtataaatccactattaatatcattacctaattagtattttaaagagaagcaaaataaaatttggtaggcaggacgcggataaacaagacttaagctgagataaatatggataaataataataataaaaaattgtgtgtgcatgtcaaagctgaccagcttatataattaagttaactttcatagctataatattcctatgatcttcctataccaaattgttgttatttactgcctggtttttttcaaaggaacgatgatatcctacgttaatataccaaatcttggaataaaagagcacaacagattcatgaggtataagagcactcacaataacaaatttaaataatacaggatatcaatcataactttcttcatgaacaacataattcagataacataaaatgt

SEQ ID NO: 251446 - DNA, 1225 bp, Cannabis indica
ggtcatcaatccttcaacttgacgttgtatttctttggtttcatcaggattagttctatatgctgggtggtttgggattgaagcacctagaataaaatcaatttgatgttctattcctcgaataggtggcacaccatgtggtacctcctcgggaaacacatcctcaaattcctgcaaaatagaaacaacaacagtaggcagcgaagaatcaagttggttagtgtttaaaagagcctccttataaacgaacaaaagcattggttgttttggacgccaagctcgcgtaatctcacttttttttgcatacaaattatttgttttctctctattttttcctcattgatagaactcttctctttcttttctctctctattgcttcaattgttttctctttttggatctcttttttctcattcttttgctcactcaagctctttttatcactcaatttctttttatcactcaaattttttaatctcacttggtcttcattgacttgttttggtgtcaaaggagctagagtgactgttcgctgacggaacatgaatgagtacttgttggtgaacccgtcatgttggactcgccgatcaaattgccaaggccttcctagaagaaggtgtccaacttgcattgggaccacatcgcacaatacctcatcctcatatttgccaattcggaaagataccaaaacttgtttggtaactctcacttcaccactatcattcaaccattgcaacttgtaaggacgtggatgtttaagcgttggaagtcccagcttctcaaccatggatgaactagcaacattagtacaactacccccatcaatgatcacactacataccttgtctttcacatgacaacgagtatgaaaaatgttctcacgttgtacctcttcttcctcttcttttgcttgcgagtttaatgctcgtctggtgactagtgcaagcatgtcaccgtattctggcccatactcttcatcttctatagaagcatcttccaatggtggcatatcagcaagctcttcttcatcttcagaatctacttcaccattttcccgaatcaccataactctcttatttggacattggctagctatgtgtcctcgcccttgacatttgaaacactttatctcactagaacgagatgaaagaggggctgcttttccttgaggggttgtagttgcggtggctggtttgggtgtagaggatgaactaggttgatcct

SEQ ID NO: 251447 - DNA, 1022 bp, Cannabis indica
aaaaagttgtcacattccattccaatgtcaaccaaatacggtaatgttatttccatgaaatgaaacctgcataccaaacgacctctaaaagttaaatgttcattttatatgtgtgttaaagccgacccaataattaaaagacctagatatatgaggacattttatctcgatttttatgtaaaaattggaataaaaagtctcacttaaaatgctaagttgcgtttggcaaatgcacaaaatagcctttccaaaactgtttcttgtccatttgccaaacaagaccctttttctaaacttttatttaaggctttagatgtaaaattgagatcaaaagtttttatcctactttaattttttttaagtgtaaaaagtaggataaaatgttcattttgttgtagttatttaggtagtacttataaattttctaaaaattttaaatagtttacaatgtcgaaaataagatgtatatattttatagaacgcaaaattatttatttattatacgtgtagtaagtaactatttaaatcttattttcattataaattattcaaaaaaatttgaaaatttataaataattttaaatagttacaacatacccccactataaaaaaaaatcatttaaaaaacttttctaaataacaaaatatataaaagatatctactataaaaaattccaatgtatatgaattgatgttgcaaagggtacttgaagtatttttaaaaagcaaataattaataacaattatatatatgggtgcactcttaatgggtattacccatgaacgagtaatattagaaaattttgagtttttatgattaatttttctatttaattagaaaaatttctcatttttacattatatgagctgagattggtccatcagctgaaaaaaaaaaactaatagaaaaaagattttttaggcaaaaaagtgataaaaaacgttgaattcgacttaaatattttacatataaatatatttttatgtagtgtaaaaaagatgtatttttgatatttttttaa

SEQ ID NO: 251448 - DNA, 630 bp, Cannabis indica
attgtggtggagagtatttagatttcaaattcaaagactatttactggaagaagggatcttgtcccaactcatagcacctggaatacctcagtagaacggtgttgtagagagaagaaaccgaatcctactagacatggtcagatcaatgatgtgctactcatcactaccactgagcttctatggatatgcacttttattggctacttatattttgaatgtagtaccctcgaagatcataagtaatactctaatataattatggaatgggataaaactcagcttgaaatatttccatatttggggttgtcctgctcatgttcttaaacctaagtctgggaagcttgctcctaagattgaagtgtgtatacttgtacgatattgagatgagactctaggtgtctttttctatagtcatcaagagaataaagtatatgtgtcaataaatgttacttttcttgaatatgactatatgaaaagtcacaagtcatgtagtcaagtgattatcgagaaaattagaaatgaaatttctgaaccaaagatttcagcaccattagttgaagaactgatagtggttacaacagttccaaaaaaggaaaccccagtacatcgtcgtagtgggagggttataa

SEQ ID NO: 251449 - DNA, 552 bp, Cannabis indica
ggggatatgagaatctcgccacctcttgattggacaatctgatcatcttgcgtgtacatataaggtgatgttggttgagtgcttgtggatcgtaaagtggtgctaagagagattgtttttggtgttactggtggttcaccatgggaaccaattacaccgttgacagatcgaaggtggatttttgatcgggaacgacaaactaagttggaagacaatcaacgggagtgggtgactatcaaaggacgagcgaagtcttggtcacgtcggatcacaaaaatacttagagaaatgaagttgacgactgtccttgctctatattcactcatttgcagaaagataaaatatatatatacatttcttgtgttacaaatatatatacactggtttaaatagtgtgcaattatgatgaagcttcaaatcagggagaatgcaatgagtggaggtcatgactccaaagagaattggggagtcaagggagttgtttcaagtataaaggaagaagacgaagtagcaaagacggctggtcgttaatttcatctgaagggaaagaga

SEQ ID NO: 251450 - DNA, 1080 bp, Cannabis indica
tcgtgttcttgcttcctcattacgccaaccattttctgcattccaatgggtgttcctaaatagctcaatttctccaacatcattaactaaagactattaaacaaacaaattgttggttaattaacttttttttttttttttttaaaaaaaaacattattattcttatgtaaatactcttactccttttgttcgatgttgaataaaagattttgatccacctcgatgattatatggtactttagctttatttttagctgccgcgaccgaacgtttctaaataaattaaaaataaatgatatcatatgatgttaatactatatcattaataaacatatagaaagtataaattatacctgccagttagcattaccaaagatattgtcacacaaccagtgccaatcttggtccgtgattctatgatttaaaggtcgattagctagtggatcctttccttctttgacaacatctttataatgagcatgaagttggtttctataatttttgtaacgatttgaacaatgtcgttcaatgacgtcatgcatgtgtctttcttccttcggatcaattttgaatttatcctacataaataaattaaaataattacaatatttattgaaagataaatgttatgtaaaagaagaaataataaaaagaattatgtagaaaagaagttatttttgaataagttaagtaaccttaatacgagtatgaataagtgccttatcctctggtgggacattcttccaccctttatatttaagaggtgcatgatttcttactataaaaccaatttctgatgctaatcgtgaagcattgactcctaccgggtgaagttctccctttctagctgttactggcaacttttgttttgtatccgcaactattttactcgtgcctttacttctattttgaccacgagtttttttcttggttggggctattaaaataaatagaaaatgtctctgagaaatatttgataaagatatattaatacaaaatttattaatttacaaattaattaataataattattataaaaaagaagcataccaataaattctaaatcctcttgttcattt

SEQ ID NO: 251451 - DNA, 792 bp, Cannabis indica
gtaccagaaacaatggtatctcccattaaagacccatctgggagacaattttgcccttaataaaagcagaaattgataattttatgcttttattgactggtcaatattgataactctctctttttcgttctctctctctcttttaattctgccaattttctttctctctcataataaagttcagatgcatcatttcctttttcctcaccgttttaacctctacaacaaccggtgtgcttcagagttttggtgtttcagtcgcccaagctcttcgtctcacacaaagccttgtcatttctatgaagctcaaccgatggaaatgtaagtcggttttcttttttcttttctttaatgaaaaacccttttatcttcttcattgttgatcgagatcaaaattttgagtattccgtttgaagattatgatgatttctcaaaattcatacatatgttggggctaattttttcttaactataatcaacttacaaagctttatttttgtggttttttattcaattgattattcttttttgttaattattattattattacatttcactattatagtattcatttattcttctcattttatcacgtgtttgatgaaattcattctcaaatccctaactttattttttcttttctcttggcctctatatgtatgtagacacatatagtactttgaaattatggcttagagtatatacaagattaagctcatttctagggatacttaaatggataaaatgcaggaaaaaaaacgaatttcacaggggaatatacattgttgcaa

SEQ ID NO: 251452 - DNA, 465 bp, Cannabis indica
atcagaagcacgtgaaggagtaccaccaccgcttcttcttttcctccagcttccaagccatggaccgcccggagtttcttacggagcgggtcaggatccctccatacgtgcggaccgcgcctacttaagtgtttctccaatgggctaagattttctctacttatgacaagatggccctcaactttggggacttggtcatgacggagaactgtcggaagccaagctgatatcctagaaccagtcagtggatgactttaacctttccaaggtcatctacccgaaggtcaggactcctgccacgaaaagggcgctccgggtggacataatcacttcagcggaggacttgtaccagaagtacctcttcaggagggaacatgagctggcctacattaaggcctaggctgcagccgggaggacccttcgtctggaagctggcacggatcggaggccctctaggcctaagcc

SEQ ID NO: 251453 - DNA, 750 bp, Cannabis indica
taacattaatatatttactttgggcttgtttgaggaggcccacagttattgtgagaatattagagtagtggactttcaaaggtgatcccctctttgatttctcaggattcttgtcggaaacgtgccatgtaggatggttctcagacactcattcgctcccagacgcctcttcgaacaaatgcccatcctggatgactcctgtgggcatccatcttcgtttctttggatgctcgttgatagagcaagtgtttaagttctgagactatatgtttgaccttactcatgaattgggaggtcactccatctgggctcagtgaatgagtctgttaggctaaatggttcaatctaaatttacacgtgtcacctatccaaaaatgcagataacatttatccaccaagccttcatggctcgagagtcacggagacatgcaggcatcatctggattcgttgcggtgcccaaggccatagacaatttgagtcttttgatattccaaagtgaaaggttgtagaaacttgtgagcctttcatattctattagtggagcacgcatgtcgaatgttgtttggtctatgtatgtcacgtggctcgcagaagcgcgtgtttccatgggttatggattgatagctcgttatatcaacaagttgtctaaggcaaatatcatagttaatgtgcatgttcatcattctgtaaatcacattaatggcaatagttgagaataagaactcgtcaacaaagtcaatggatgaaaa

SEQ ID NO: 251454 - DNA, 627 bp, Cannabis indica
ctttaaacacttcgaaacatcatattccatattcaagagaaacactatatactttgtcatgggatccttagcaatcaaattacttttgtcatctcttaagaaaaagttattttcttttaagtgaatataataacctttctctagtaattgacccaaactcaaaatattatatttaatgttgagcacaaagtaaacattcgagatgaattgacggtgttcatttttcaagcatataagaatcttacctttgccttccacaagtatttttgattcatctctaatagagacattcctttttaccatttgattgagctccgcaaacattcttgtttatccatacatatgattgctagcgccggtgttaagatactatttattttcttgatcttcatctttgtctttgcaagtaagcaataaagttccttctctccacctttgtctttgataaaattggctctttcttcgactctccttgatctacactcggagacataatgaccaaaattattgaaattgtagcacttgatgtgtgatttatcactccttgaccatgagtttcttattccgcaacctcttggttcttgtgaatttcgagtttgttcttcattattgaagtcgttattaaag

SEQ ID NO: 251455 - DNA, 1051 bp, Cannabis indica
gagaagagttacaagattaattacgtaacctttggttgatcaatttgtgtaataaaaaagatgttacacaaaattgatgagaggattcaaaagttatgaaatataatcgttacaaattatataaatactcatttatatgagagaaatgagatgatgtgtttgaagtgtgatcacataaacacaatatataaaggagtctaatgtgctcatttagatgagaaattttctatcaaaaaagtacattgttagaaaaccctaaggcttgataattctcaaagctttactatgagagttctcttagtgcttagagatagggaaaataagcttttagacaaaggtataataccttgttcaagtcatagtgattcctaatctacactcaagattgtagtaagtgtatatatattcttctcttgttatatgtattatattacatatgttgtattctttttcttctacctttcctttatataatatatatagtgtatataagtgtgttataacatctatttaatcaatctcttttactgttcttgtattatttttatgattaagttgtatatattttaatttatcttttattgtaataaaatctctgatatagtatatatataatatagatgacatatattaaagatgtgtagtatatataaagagtgtatatattatgtacatatataatatataatactatatagtaaagatataatatatataatagtatgtatgtatatataagagtgtttagagaagaaaaagagaataatataaaactagagaatagaataaagtaagaataaaagaacaaacacccaaagtggagatcgagatcaccaaaagcttgaacaaggtttttacacctttgcccaagaagattatttccccctctatgaaatacttagggctttgtggaaatacttctaggaattatcaagccttagaactttttagctttgtgtttgaaagatagaagagaagagtatgtcttaaagaatgaaccaatgtctttatggaggttatggaagttgttagaaagcatccccattgtcaa

SEQ ID NO: 251456 - DNA, 605 bp, Cannabis indica
attagctcgacaaaacaacaaattatcatcagcaaagaggagatgtgaaacagatggagaatgccttgttaaccgtaaaccttctaaattgccaacagcttcttcatattgcaaaagtcgagagagtccttcagaacaaataaggaacaagtaaggagatagtggatctccctgtctcaaccctcgggatggttgaacatggcctacaacttccccatttagtgaaaatgagaaagaactagtgcaaatgcaattcatgattagtgacacccatttagaagcaaagcccatcttcaacataactgcttcaagatatttccactctacccgatcaaacgctttgctcatatccaattttagagcagaaaatcctagtctcccttgagtcttatgtctgagacaatggataagctcaaaagcaacaagaatgttgtcagtgatgagtctgttggataagaaagctgattgtgtttcagagatgacaaatggtaatactttttgaaagcggaggacaatgactttggagataagcttgtaaataacattacacaaactaataggcctataagcactcatggatgttgggttagaaaccttaggaatca

SEQ ID NO: 251457 - DNA, 1033 bp, Cannabis indica
cctaaattatgttgagtgacatgagttcaatccttgtaatctcaattggatgggttttttaacacttaatttttttttctcatttttatttattttcagttttttttgaagagtttttatctccactttatcattcttaatagggttgttcatccaatccgtttcgcactaagtgcagatttcatatttttggattcaatgtataagaaatattattgatgtcttatcacacgtcttattttattgtatacaataattaatttttttttaaaaaaaaatctgtaagaattatcccataataacaagtttaattagcaagtagggaacataataaacggttctagtttatagtcattatttttcctggttgtcccatgtggattaaaccaagtaccacaagcttggttactcctagttatcacaagtttggttactcttagtcagggtcgaccttgagaatatatggacctaaggcgaattaaattttggggccctcagaaatatataaaaaaaaaatttaaaaagagtattataaaaattcgaacttgaaaaactgagtttttgcaaatctcaattatatatacgtacgaaaatatacaattgaatacgtttgcagaagcagaatgtaattctgttactgcagagaccaattttgtagagacaaaacagaacatgtagaatattaaaataactgcagaaaattaaatcacttgacacaagaaatttgtacgtggtatcagtgttctttcaaacactactagtccacggggccatgcccagagaatgaagtcaattagtaaattatcaaagtttacaaaagcaatcgacttaaacaaatttagactccctctagtgatttgccgcaaccctttgtaaatccatcttgctaatcagatctctgaaacacaccaagtagtgaactcccttcaactattgatgtgtgcttacttcctcacgaagtaaggcttaaacaaatcttctctcgaagatatatgctcacttcctcccaaaatgagacttggaaaagtcttct

SEQ ID NO: 251458 - DNA, 535 bp, Cannabis indica
gtaccctgacactcatttaatgtaccatgagacccatctaatgtactacggaatacattccgtgaaagtacatcagggaacaaaatcatatcccccaaaatatataacacgaacatgtaaataattttgtgatcattagtaaaatagtaatgtttaaatcatttgtcctcagtatatatttgaaaagtgaagacaaatttgcttaagcctatagcgtttaaggtcatttgatagtttatgtacagtgaaccatttaacataatcctcggaaaggagataaaggataaaaagcttttaaaaatttgtggataaactcgaccagaacatgacataaaaagactgctatactaaagtggcgtcgcattaaaaaaagttaaaatagtagatcatagtgttttactggatcataattctcacatcctggtgctagtgttacgtgagcttttttttctaatggacgttatagaaattaagagaaatgaggaaaatgttagaaaaaatgtctatctatatatatttagaagatgtgtgagtg

SEQ ID NO: 251459 - DNA, 1098 bp, Cannabis indica
tcctttttgtcgcagagtattatcaagatctgagcctggatctctttctctcctttggggtttggttaccatcgtcttcagcactatgattgagcacttgacttgctatgtgtgggcatgacactctatcactatggctcgagtatgaagaacaatgaaggaggttcaaaattctttagaagttgtctctcatctactagttgtttgagaatgaaaactaagtttggtagattgaagtgaatagttgaattggatgagatgcgagcatcatgttccttttatagtatttcaactagagcttagggttgaattatatagattaaaaaagaataaaataatggacaaaaattacacgtagtggctggccactaaagggccttttactagttacaattttgccactttatttcaactatttattcttatttcaataatagcatattttctaatttcaaacctataaatgtcaaaactatttatttaatagttataattaattagaccatacaaagtcttttaattaataaatacaccccaactcccccttaatatgtgcaagggttaaaaaaattacattttagttttaccttacatgattttgtaaaatccctcttaattttatacttatatttaaaaatcattagaagtccaaaaattgagtttgttgccaaaaaaaaaaaaaaaaaaatacaccatagaatttcttccccttttgattcatcaaaagggtggcaaaagaatttacaaaataaaaggtaaataataataaaaataaaacaaacacaccattcataaccataaaacatacatagtcaagttaaaacaacaaaccataacaacaagttcaatgagctaaaacaagataacacaaggaaagtcaaaggcactaagccttgcaaacatactaaaaagtgagaaaacataaatatgagaaaagatgctaaaaaatgatgcaagtgaactaattcggtgggggtccaaagcggtccgtatatactctccattgtgctatctcatcttgaatattagcaaacccatgtacctcctcatggtgttaatgttattgtggaggttggtaagttgagagttcatgtcgtt

SEQ ID NO: 251460 - DNA, 984 bp, Cannabis indica
ctcgaatcctagaaaaggaaattgaggaaggaaatattaaagacattaggctgagtagagatgggcctactttatctcaccttttctttgctgatgatcttattcttgtgggtgagcgacgattgctgaagccaaagatatttggagctccattgagaaattttgtaactggtcaggccaacgggttaataagcttaaaacctctattttctttagcaataatactagtgacggaataaaaagaggtatcatgcaggagttgggactcaacgtccctaccacgaatatcaattacttggggctcccgcagtttagatctaaccttaaggatgcggatttcaacttcatcctagacaaccttgtgtcgaagttacacggatgaaagttaaaattgctttctaaggcaggtcaggccacacttattaaatctgtgggtctggcgctgccagtttacaccatgcaaactactaagctctctaagaaactttcttcaaaaattgatggtatggtgagggatttttggtggggctgtgagcaagggaactgtggcctgcgtgggaccacatgtgccttcctaaagcgagaggtggtcttggatcctgaaagactgcggaattaaaccaggctttcttatagggatgggccttgattaccgaggatcagtcgctttgttacagggtgttgagaaccaagtatctaaaaagtaaaccttttttggatgctacctataataatactgattcttggttttggaaaaatgtggtcaagactaaagatatcctcagaaaaggcacttgcaaactcatctcaaatggggaagacaagaacatttggtcggacccctgggtggttcatgggacggatttctacccgaaacgcatctcttcctatcctaggagcgttgagaaggtctcagagttgttgttgagtaatggggactgggacatctccttgttaagggctatgttcgactctgccacgatt

SEQ ID NO: 251461 - DNA, 812 bp, Cannabis indica
aaaaatataatattaattattaaaattaaaacttaaaaattaaaaaataataatactcactttcaaattcactatacagtacaccattgctaatcactattcattcgaccaaaaaatcctagaagaactcaagaaactcccagcggcagcggcggcttcttctccgacgggattccctaacatccaaagcctcctctaccctcttccgtttttcgaaatctgtccgcgcgtgtccgcccgtgcccccattgttggagcccgcttgtgtctgctgctcaatgctcactaactgctgagatattgtttctccattcttgactctttattaatgttatattgattttataatttatattttatgtatacattattgattatttaattaatttttatataatgattatagtgttatactatagatctggttattgcctactggaattattaaagtagaagaagtgtagagtgtaaaatgcttgagtttgagagtgagtgaatcaatatataagaaagaggaaaccagaaaaatgtagttacttaaaattgaaattgggtctgcaaaagaaaagaaagaaccaaattcactatttaggcccatatatatgttaattataaaagaaaaaaggatccaaaaaaatgttaaaaataaaaaaaatgatatttttaccaattaaattttatttgagcctagaaatgaaacattcgggctcagcccaataaaacccgaaaccggccaagtgaaacccttcatacccaacccgaaacccgttataccagaccactcgaaagccgggttcggttgtgcatttcca

SEQ ID NO: 251462 - DNA, 517 bp, Cannabis indica
aaaaatattgtcagaatcataaaacacattcaactcttttttcttactacttgttaaattaacaagccttggtgatattaattttagaatataatgcacgtaacataaaccttggtgtaatgcacaaatatgtttagttttatgcgtgttttatagtggatataggatgcccatttcccttttctgaagtccccaacttaatatagacaagatcaattgcaatgattgttaggtaataatgtataaaactgattctggttcaatcagaaaaccgatacattaagattcaataaccaaaataataattttgcttcaaaaaataaccaaaataatatccatgagcagcatgttgttgaaatattaaagactgagacatttgtatcaagtatcaattgattctacacaacaaattgaatagaacgttcatatgtaaaaccaacatattttctctcgacgtgaaaaagaaacaacaaaacaaccctaaatgattgagataagttagttgagttagtatttt

SEQ ID NO: 251463 - DNA, 1004 bp, Cannabis indica
aatttagtaccaaaattgcaaataaatcaataccattaaaaccgaattccattaaactaaaaccaaaaaagaaactttcctataacattttattctaattaatctctaaatcaccattcaaaaactaccaatatgacagatattccaaattaaagaatatcatatcctaaaagaaatcaaacttttcacaaataggacaccaatctaattaaattgtaaaaaccaatctaattaaattgtaaaaaccattctataaatacattagggatcttttaaaattgaaaatcaaaatatttaaaccaattcataactatcgaatccattattaccaaaatcataattaccaattcccttaaaaccaattaaacttctttcttcaaatcactaataatgaaattaaaactgattttataaaattccacaaatctttccaactaaagccttaatataatttcctcataaattcattcttaccaattaattccattgaaatcccacaaattcggtaatataattaaatcatcctactagataaggtcaaaaccacaaaattaaaagaaaattaaaaaggtcaaaaatcctaattgtaatagatacttgatacaaattacatcaaaataccttaaaacagcaacaaaatcccttttcatatcagtaaagccacctaacatggcacaaagaaaccccaacaaaggcacaatttaaccacaaaaggcacagaattcccactttccgtggcactaaactcctcccacctttccgcatttccaataactcaatgtatcacctttcccagcaaattccattacaatcgtaaaactagatcaatcagaatcatttacctaattacactaacatacataaataaaataaaacgtcccctaaagtaagtctaaaagaaaaaattcaacacaaacaaattaacatattacatagaaaaatttaaactactgtcatacagaaaataaatgactggaaacttacaaactaagttcttattaaat

SEQ ID NO: 251464 - DNA, 716 bp, Cannabis indica
ggaacttttgacatgattgaattatgcaaaaacaaagttagaacatatatagcaaaacctcaccactctccgtcacgtgtttcactcaaaaaaaattgtcactcaatgtcactcgtattttcaatcaaatttgatggcttttaccctgaaataagcttacacctctacctttctccactcgtattcttctttaagttctttaaaaactaagcaaacattacaagaaaggattcaagcagcaattccaaccaacaaatcatacgaacactgatgaaaactaaaagaattgatgatttttggaacacttgtgtgggattttgggaaatttgataccaaatatggcagactctaagaattctcaaaatttggatgtgcaaccgcgacccaatgcttagttatgcatgaaccttggtatgaaggtagacgccacaaacggtggtggaaattcatttgataagtcacgttgaatgccacaagggatactcttagataagtttgaatagttctctcaagaactaaagaagaaaacctctcaaaattttattccaaaatattctaattttccaaagtctttacaaggctttatatagccaccttacaaccaataaaaaaggaaactaaacaaaagacaattttctaaataaaacaaagatagaataaaggaaacaaaatcgaaaaggaaagctgccaaattccttgaaaaacgtgatcagctc

SEQ ID NO: 251465 - DNA, 1281 bp, Cannabis indica
aagaagtaagctagtttaaaaattgtatattaaatatgtaaaaaaaattatattatatatgtatagtgtataatatatatgttcggtcggttctcagttgaatcggacggtttaccattgacactaaaattgaccgtacaaaggcagttaggcaatttttttttgtttttggttttttcagtattcgaacagtcgatgtactcaattttttcagtttcttgaattttttgcttagcctaattgaagctaactacttaattatttaattatattaaattgatatttatatttctaagtaactcttaatctggttaataataaacataaatgtttattattttctacataaatattttttttaaaaaaaaattaatttataaaatatatgcgtttgataaacaatatcaatatatgtttattattttaaaatatacattcttacaaaaataaaaaaaaaatataaccatttttatattataacagccttactataacatgtttattaaaattaaacacttttaaaataaaaatatacaataaaattacaatgtgcatgttataaataatatcaatgtatgttttttatttagaaaatattaattatttcaatttttaattaaattactaaaaaataaatactaaaatttaaatattgtgattattatataataatatatttactaaaaatttaattgtaaaaaaattatacatgtttaataaataatatctatttatgtttattatttaagaatatattgattatttttaattttaattgaaatactaaaatgtaaacacttaaaatttaaacatataaatatttatgtgaatatttgtattctattatcaatataatatatttattaaaaatgcatatattataaaaaatgcatatattttttttttcacaatttacatgtttattgtataaatagtattaatatatgtttattatttaaaatgattgattattgattatttatcaatttattaataaaataaatattcaaattttatcaataattttttttataatatacttagtataaaaaatgaaaataaattttcactaattgtatatctaaatttaattaatttatgatgcatatattttataataaaattaattaatatataaaatattataatttttctaaattagaatatacaagttatattaaattatataattattgtaacttggtagaagagatcgtaaataaagtcgttatatatgtcattgccaaaatgaagtgggtcctacttgagaggagagtgtgg

SEQ ID NO: 251466 - DNA, 1203 bp, Cannabis indica
aattaaataaacaaaaaaaaataatccttagggcttttggcgtcggttcttaggggtacatatggcgtcagttatttgctaggaaccgattccatatatatcctatagtgtcggttcctagtaaaaaaccactacaacaataatggaatattggcacgtccaactctaataaaaattggtattagagttgtattattaaactgcgatggatggctagtttgatcacatgggtaagtctagaaccttatttcttagtgggatgtatgtttgaagaaatagagtatcggggttgagcggggttatagtttttgaccattttacccctagtcttaaaaatgcttaagttatgaaagtgagggcattttagtaatttagtttatgggggtgtggtcgctgccctagattttgacacctagcatgagattacttcagccaaggttaatgtactaacctttattcttcatttgtggaaaaaaagaaaaataagaaaaaaagaccaaaatagcaagaaccctctctttcccttctctctctcttcaaaaccagcaaagaaccaagaaattgttgctaattcttggtgttttcagcaaggtattcatagaggatcaagctaaggtaaccctagaacttgattatgtgtattttaaagctttgggtttgctggagtatgtgattttgaaaattatgggctgctagggtttgatttgtatttgatttgaattgtgagctttacttatgttgattctaagctctgaatgttagttttgatgtacggtgatagaatcgaggaagcttgagctttgaaactcaagtttaggtctttaatggcataatttgattcagtgagtttttcagggattttctggttggaatatattgtgtataccctatttaggtactctggaaagtttggaggcaattggacaagttttgagcaaattggatgtttttttggggaggactggcagaaaccggtaaaccggtttaccaatacctataaaactggttaactggttttggcaggttccccgagaaacctgttttctcaattcacgtccatttcagtgccttagttgggtgtttccctttttcctaggttaatgtaatccctagagagtataacaaagccttgagttgtagactcgggtttcccagattaagatttcggacatgtgatttaccggttttaatatgtgattaggg

SEQ ID NO: 251467 - DNA, 517 bp, Cannabis indica
aatctagctagtattcttatgcacgaagataataaattccgtcgttgtggttttgacaggaatcaatttgagtagaagtttcattttaatgagtttattttctcctttgtttcttttcggtagactcttatcttccctaagcctaagtggattcccttgcgacacgtatgcattgtgtcaggctaagctaaaaaattaaatgagtaaatgatattttgtactgattttattaaaaaagattgagagtttagtcttttttttaattaaagaaaaataatattatattactgtaatattttaaaatatattggaaatttaattttaaaatgaattaatattaaattaaaaaaaatttatgattggtataagtctaatttttgtaaaaaaaaaataaagattttttccacaaagttaaatattatagttaaaaattttgtgtggtaaaatatttaattaggaacttaaatttataaatatatgtatataaaaaaatctatatacatattaatttctaaaa

SEQ ID NO: 251468 - DNA, 1728 bp, Cannabis indica
aagagttacctcgggtggtatccaagatagatcatacccccccttctttttccaaccatcgggggtggcttgcaatgcagaggacgtttcagcagagggagagtttctccgtgtagggggtctcttctcctcttttttttttttgtatttaccttgtaggcttacgtcggcactttttcatattttgggattatatcatgtaaattttgtaagtttatgccgtcggcgtttatacaacaacctatttaccatattttgtacaagccattttgtacgggccactactcccccccagctttttaaaaatagagaaagtactctgttttcataaactttagtttttgtgtaaggtggggtagtggattttctatttcgtgttctcactgctcttaattaatgacaattttactttttattctgttgtttctcgacgtgtacttgcttatccatacgttttaatttcgaaaggaatttttgtgttttttttttattatgttgtacttgctggttgtcctcttacgatttttgtgctttatatactatcgtatcaaatggtcttattcttgccttttgtgaaaaggtcttttatgttgcctttcgtgaaaggtctttgcattgcctttcgtaaaaggtctttttgttgccttccgtaaaaggtcttttttgttgccttccgtaaaaggtctttattccttttgtttttaacttggacgatactttccgaattcccctcatttttatttattttaaagagaaatttcgatgacggtttccatgtactttaaagttcccaacttttaatttatacatagaatttcttgaggtaccttgcattccagcttcttgtgatgtcggctccgtccatggtggacagcctgtatgccccatttcccgtcgggtttatcactcggtacggtccttcccagttggtggacaactttcccgctcgggtttcttcggtgttctgaaaaactttccgcaggaccagttcccctgggaggaaattccttggccttactttcttattgtattgtttcgccaccgcggagcagtaattctgcattcgggtcaaggcgtgctcccttctttcttcgacgtcgtcagcagcttgtagtcttagggaagtattgtcttcgtcacttaactcggaccgaaagtaggtacttgcgtttccgtcgggataactgcctccatcccgtatacaagtgagaacggggtctcgcccgtactagtccgtggcgtggttcggttggcccagagtacgccgggcaattcttgggcccatcttcccttagcactttcgagtcgctttttaatattgtttatgatgactttgtttgatgactccgcctgcccattgctctgcggataacggggcgtggagaatatgagtttaattttccatcgttcgcagaaacttctgaatttgttgctgatgaactgggagccattgtccgctacaatttcctggggtagtccgaacctgcatattatgtttttccagacaaacccttctacttctttgtcttttatttgagcgaatgattcagcttcaatccattttgagaaataatcggtgagggccaacatgaattttttctgagctggtgctgttggcaaggggccaactatatccatcccccatttcatgaatggccacaggctttggacagtggttagcttggtcgggggggctaggatggatagagcatgcttctggcacttttc

SEQ ID NO: 251469 - DNA, 586 bp, Cannabis indica
aaaatatatattatttttttattaatcatggaaaagatagaaaaatatagaatgagtgttcttaatttttttttgtaagagagagagagaaagtattaaaaatgagatataaaaatatacacttattatacatacaaagataaaaaaaaaattgagaaaaaaataataaaaagagagaattaggaaaaaaaaagaaaaatagagagaagaagaaaaaaaaatagtaaaactaactaataattataggaaaatttacatgactaaatgcttaaaatattacattttttatttgaaacatgtgttttattttcttttttaaattctttattattttttgtttttatttttattagtggtggaaggaggacgcgccaaatagcgcgtttgaagtttgccataattttaaaaaaagcaaatcaaagaatggaaataatatttattaaatgagtattttagaaagaaataaaaaaaatagtgtaagaaacatgtagtcatatcaaaccgtcaaaagtgtgttactaaagctaattcaataaaaaaaaaaagtgtcagaaaatataaatgttataaatattaataattatgt

SEQ ID NO: 251470 - DNA, 3773 bp, Cannabis indica
cctattcctattcccattctcattcctattcctatattttcatttctctcaaccaaacgtctctggtctattacattacagcactttgactctttaaaataataataataataataataataataataataataataataataaaggaatttaatcgtatatatgttgtttttttttttcttgtatttgacaattaataagagtttacttttactaagtaaaaaaaacacaggactattagccaataccatattggtaagttgtataaggatcgtattatattaaataataaataataaaataatatattgtattaattattacgacaaaaaaatttaatgtaatgtaaattgtattatttaatacataacaaatggttcgtattagcttgtattataatatttacaaaggatcaggagtcaactataatctccgacccggacccgaattggaacttgagacccggaccaaggaccgaaactcaaacccggacccatacccggactcgaacgcgggacccaaactcgaaccctaaaccgtgacttgagactcgagacttgaacctagactcgaacagcaactgaactcaggaccggaaccgggactcagacctggacccgagactagactcgagacccaaacccggatgcgagacccgaaattggacccaaatcggacccaatcctagaccctgactcgaactggaccgagaccctacccatagtcagtgtttgggttgagtttattgaaaatatattataactttacacaatctattaatacaagttaataccaaacatagtattttattaaataacactactacaatacaatccaatacaatacaatacgacataccaaacgagtcataaagcagttaatatcattagtgttagttagctgttttggaattagttagcttcaaatttttactcaggttagaggttgttaaagtcaagattgttataactaattgttttgtattcttgatcaatataagataacacctcagtataactaaagttttttgccagttttcaatctggtgaaacttttctaaagtcgtcctcatatctctctctctctctctagaaaaacttcttcattgtattagagctattgactaacgttcatggcaaactcttcaaatgatcctcaatctaaaattgatgttaatgacactccaacaacaatagtctctgctccaaactttggttttccaaatcatccgtggaatcccttcacgaattcgttgagctcctcctaaacaatcaagctcgatcgagctaagtacttgtcttagaaattgcaattgtccctactaggttatgatcttgataatttcttgttcaacaccaacaaacctcctcggttcttagtaaatggcgacctgaaacatatttttagctaatggaggtgcaaagatcagttgttactttcttggctgagatcctcgatgatcgaagttgttttttcttctcttgcctcgcacacttcttcatcctcgttgtggaaggctctcgaacaaagattctcaagctaatcaaaagactcatcttctgcggctcaaaggacaactctgaaacattcaaaagggaaatctttttatttctgaattttttgacaaaatttaaatctctcagtgacaatttggctattgctcgacgtgttgttagtgatcattatcttgaacttcaactgctaatggccttggacctaaatacgattcagttgtctccaatataacttccagtcgtgaatcgaagtccttggcagaaatgcaagcattgttaatggttcatgagtgtagacttgaacgccatcatagtgttggtgacctctccactaagatggcaagaaatcttacaatgggatcttcaagaaccaatcatcctgacccttacagacctccctttgctcgagggtcaacatacgaaactacttcaacacgagcagccaagccatataatcgatcttttttctcaaatggtccaagacctttatgtcaagtctgtctcaagttaagtcatactgttgcgatatgtcattatcgatttgacaaagcttttatcactcccaaggcttccacaaatccaccttgatcttacttgactgaagttcaaggagatcatgatcctcaagcatgctcatctttaacaaagcctgattttatagaagatttcatgtggtatgccaacacaggtactacaaatcacattgcttgtggtatgaaaactcttgataatgttgttctttacactagctctgaatcccttgatgtacataatggtaagaagttagttatctctcatattggtcatgctattcttccctctcttccaattctactttacaattaaattctgtctcaaaagtccctactatcacaatgaatttggttagtgtatctaagctaatttatgataataatgtgtttcttgagtttcacaagtcttgttatattgtcaaggaaaaacaatcagggagggtcctgctaaaagggaaatgtaaaaatagcctttatatgcttggagatgattctcagtccacttctttcactggtttgtaatgtcatcttgccacttattatgagtctctctcaaattcccttcaatcatttggttccttgacatcctcttgtaaccaatcctataatatttcaagtagtaaatgttcaatgacaagtgtttgtaataaaactcagattaataaaaatttactttttgaaatttcttgtgatccttaattttttctgcatctattactaatgatgttaatgtatggcattgtaaacttggtcacccttcacttaaatttaagtaaagtactgcccaaaattcctgactaagtgtcaatgaaagacttacaattttttaaagtgtatcaaaaaggaaaaaatcataaaacttccattgtccttatctctcacatgagctaatcaacccttagaattgttacacttatttatggggtccttcttacatttcctgtaaagatgtatccagatattatgttcacttcatcaatgatttcagtaggtttacatggatttttcctttaacacaaaaatcacaaaagtttgaggtgttcattaggttcaaagctcttgtagaaaaataatttggattacctattaagagtgtataggctgatggaggtggtgagtacaaaaactttgccaaatttctgcaagatcaagggattcattttcaacatccatgccctcacacacattagcaaaatggtcgtcccgaatgcaagtgtgggcacatcatagagactggtttgactttactagctcaatctggtttagacatgtcttattggtggcatgctttctaatgtgcggtgtattctataaatagacttcctacacccgtgcttaatgatttgagtccctatgaatgtatattttatcaaatacgtgattacacattctcaaaactattcattcgggtgtgtatgttattcacatttgcgacctcacaatagtcacaagttaagttttagatttgagccatgcttatttttggagtattctcctcaacacaagggatagatatgtaaaaacaaagctaggagaatctttattgctcggaatatggtctttaatgaatacatttcttagcctcgtcctcatcagatgagtattagtaccacatttatcttctagttcttttcttgcagctcatttttcacaaataacttttattttgctactaatgctactacttctcatggtgttgctgttggaatttattttaccaggatct

SEQ ID NO: 251471 - DNA, 635 bp, Cannabis indica
ctccagctatctcagtactactcggccggtggtactagtactgctacttaatatttcttgatgattttttctacgacgagtacgatttttccttattttccaattttatatgtgtatagattcatcatgactacttacaatctttgatgtttaatctaatatttcttttgtcatataaacataatgattaacttcaacgagaatattacaagattcagatttccatctttcttgagttgaccattttatttttctatattgattcaatgttgaattacgttaattacatgcatgaagtaatcaaaatattgatcaagaaatgattataataattattttttttcgtcaaaattaatcaattatcttcatggcctacctgttcttttttcaaaaaataagaaaaaattatagcagtgtaattaaaattatcattattatttatttttttccagtaaattaagtaatactgtaattaaatttattctttttttcaaaaaaaaaaaacaactgtatttaaaattatatttctttatttgacacagtatatttaaaattatatattgattacgactaattgcaaattagttcaccttcgaaaaaaaaagactttgtattaatttttacaaaatttaaaa

SEQ ID NO: 251472 - DNA, 616 bp, Cannabis indica
tgaaaaacaacatctcttgagcaaaagactctatttgtgttcaaatctagcaacttataagccttcatgcctaatggataacctataaagatgcaaggaactaccctaggtgaaaatttggaccttccttgagacaaagtgcaagcataagcaaggcaaccaaaagctctaaggtgctcataagctggtggtttggaataaattttctcaaaaggagttttaaactttaaattggggattggtgttctatttatgaagtatgtagctgtagcaatataatcatcccaatataccaaaggtatgtaagattgaaacaatagagctctagcaacatttaagagatgttgaagtttccttttaacagcggagttttgttgaggtctttggacacatgaatgatagtgaatgactcctaaagaagcaaaacgatctttaaaatccaactctttagcattatctgacctaacccctttgattttagcacaaattgagtactaacaagcctaaaaaaattgggtaggataatttgaccttcagatttggctttaataaaatgtgtcgaagtgtacctactataatcatctataatggtgatgaaatacttgaagccatctag

SEQ ID NO: 251473 - DNA, 523 bp, Cannabis indica
atttatttgatcagaaggctaattgtaaacataggcagccaatggtgtattattagtcttattgattctaggtacaagttacaaataatggttgagtattatgaagattaatatctatgatgtatgattgtgtgttgattaaaaatactaatacttcttctgttgcttagatgtttcagctaaaacctggaagatgacaatgttgatgaaatcttggacaaagtgtgatctcgtgcttcatataatcgagctaatttagtagaagattacaatgttcgtattttctttgctctaacatcagtgcagatagattcttggagcaaaataatatatataaatatatataataataattatatatatagcataagattcttacatcaacagagtgcatagacagcacaaggaaaacgaagagaaaaaaaaatgagaaaggaaaaggaaaaaacgaattaattcaaagtgtattttaaatttggtatttggtttggcatttattttagtagattaacaaagtaaaaga

SEQ ID NO: 251474 - DNA, 518 bp, Cannabis indica
agtgatgacagcgattagatgagttgggttctttgcagctgaaattcccaacactgttattagtccttgattattatgtgttataaaatttgttaaatattaatttgatgtacatatacaacccctttaatgtccttgattaacttcatttttgtctttgtccaagtttgatttccagcccttcccaaaggtttctaataatatttacatgtatactcgttcaacttttttactttcttccaatataaacagtacattataaacaataaaatatttattagaaaatgtgtatagattatgcagaaaatataagttcccaattgttaatataaaaacactcttttctggaaatgctagaaattgcaaatatttgttggaaccttttaggctttgtagcgcgttactaagatgtttttttttcttttcttttgaagtaataatttttctaacatgcatgaaagttcaagagacatgatttagtacatatcaaagtttaaggggcatgattttgtagatat

SEQ ID NO: 251475 - DNA, 1158 bp, Cannabis indica
gtgagaactcgtcaactaacttagaggtcgaaaaatacaaggttacccagaaatgtgataaagataagataaagatgagggtgaaaagatgtcggaatattcctctctctatattgaatttaatatctgagttacacttaatgattttccaacccctttcacatttgagatgggggatatttataggctctaatggcctggtgtacaaaatggtcccatgggaacaagatattactttcccgctgcatgctacaggtgctgaaggtaacctggcaccccgtacccttatctagtgtcagatggtccctaattgcaggctgtaggaggatggtctccgggttcatgcgcatggtccccaattgtaggttgcaggaggatggtctccgggtacatgcacatggtccccaactgcacgcgaggtggtcctcgggtataggatgttgaagagtggttgcagcgtacccttagttgggtcttcaggccttgcaggtcatttgtcgccactacttgtacctccttgtcctcggtcttcagaaggcgtggtggtacgatattctcttgcacgccttgtcctttcatttctttccaatatcattcttgtcgttatgcctatgttctttcccttatcctcatggcccttcccaaaacatactcattccatgcacaccacggcgcgcatgagagccccgcatgggctcgcatgcgacccccatctcttccccttcacggctcgcgtgcgagccccatgggcttccatgcgtaccctcatccttcgcaccatgtcaaccccatactcccgcttcgtgccaactcttatcgccactactcaccctaaggcatctccacacaattcaaaaaacggctcgcatgcgaggccccccatgggctcacatgcgagcccccaaccatcgacacacaacacacacacacacacacacacactcggatcccatgcgagcccccatccattgacacaaaacacacgcacatacaatgcacacacgactcgcgtgttagcccctaccccctcacaccataccaagctcaccccttctccctcacatggctcgcacacccttaactactcacccacggcttgcatgcgagcccccatggattcactctgacaccccccacacactgttggaaattatttta

SEQ ID NO: 251476 - DNA, 2785 bp, Cannabis indica
aggtggtgcaccttgttactttattcttctgtatcctgggagatagacgctgttaaaattctctagcacaatgggaaaaggcgaatatgttttaaagaaattgtgtgctacacaggcctcgaattgcattcacggttaattttcattatctatattaattgtattttttatcataagtttatatcaaaaatattatattagtccctctaaattgtgcaatattatgtacatgtaatagacaaaagtctccaaagtctttttcaggtggtcctacttgcaaagtccaaaaagaccaatattgagtgaagaaagccttattatatgaaatagtagttacttcttctaaggaatgtttcatgattttgagccaaattttgttttactgtttgttaccatgtgaatatgggagttacctacctagctaaaaagtggagtgttaacaacggagagcacgcgcgtatgccttcaccacaccaccataagtagtctcccaccctagaagaagcagttctcatctaaaataataaaaatatttgtttaaattggactaaaattatttcgtttaccaaatagtaaattgtatattttttgatttgtcaaaatacatctatggtgctctgaagatgtttttgagaatttggtggtagcaccctaaagattcatataaatcttatattgcatttttacaacaatttatgaatttgggggttgcaattgcagttgcaaaactcttttaattttgatatatatgttaaaggctcaatataccattaatcactttctttgggagatgaacattatgaggattcttcagaatttattctattaaatgattaattgcaggtgttgcactgtattctgctataactgcggaaatatgttcacagataagagcagccactatagtaaacattgtaagcactgataattaatattctttgtgtggttcatgtcaatcactaaaatactaagtagtatggccaatgaagatccaaaaagataagtaaagtaatcatttgagtagttatgattatattatacgtttcattttatatactcatatgaaactgaagagatctgaatcaattctagcagcactcaatatatatgatgaactcaagattgatattattatggttattgttggtgattgtgcttcttaaagtcagtactttatttacttaatatttatatctttggtctaatatttgttgacgactttgatgttttgaagatttgaacaacgatgatattgaatgttcttggtgcataaatgttagttacaatgttagatagaatattacattttgttagtacccacctaaatatcctaaactcgactttgttgtgctagtaatctttttttgtttttttggaagaaacgttagtgtactagctaaaagaattatgtaatgataacatgatagactgttaaatttaatttaaagaatagaatgttaaatttgagatggtgtaatatattttaaaagattaatgcttaggcatattaaggtgttaccttaataacacctcttgtgtgactgtttaggattcttgaatttctatagatgatcatgtttggtgttctgcatactctatttatattcataaattcataattaataatatttcaagatacttttttctggttttaataaaaggtaattacccctacatactattttttaacttttttttttcttcaaatttacggtttggatttctaaagtggttgcagcgctagttgtaataggggtttatatacgattttttgttgcaatttaagttgcagcgctagttgcaataggagtttttatgtagaattccgtaaaaatattaaatacaaaataaatttgacattcataattaataatatctcaagacactttttgttcttcagattttttccactgaggttttaataaatacaaaataaatttggcataagtggtatttttttttaataaataataataagtaaattttattaatcacaatcaattaaaataatagtttgcaacttaatcagaacataaaaatactaaaataaaaattagatgatatctcgtatagctttaacattcaactattattaaaggtacgtaattatgctactaataaccttttgagttgtagaaaatttgttatttttaaacactaaaaataatttgatgcagagccatcgaaaaataaaattataatagtgccatgaatcgtttatttatgaattatattgaaatattaattggttaacctttgttttccaagtataacataaataaaaattgacttttttttttcctatttgaacatttattataccaaccttggaataaaatcaatttggtgacaataattttgtcaatttaaataactagtaagtaaatagcgttttatttttattcagtgatgactagtaagtcataaaattatataaaacttcaaatttgatatttcatataaatatatattaataaaattagtaactattctacaaaacttttactttttacttttaataatgtaagaaaaataaattaagattatataaattattttaaaataattcttaactaatttgtttattttatatgaatactattaaggttagttttcaaaatactatattgtttatattaaacaataggtgagttactcgcttttttcaataaaaaaggagcttattcatttttacacttaaaaaccacataaaaatcgtatagcaactcacaaaaaaatcaatgaggaaaccactttaaaaatctaaaccgtaaattaaaaaaaa

SEQ ID NO: 251477 - DNA, 1176 bp, Cannabis indica
tttcataagcattttgggtagcgtacctaattatttagggcgttacacttttccttaccatttgccccgagcccagatagctcgctaattaggcaattcaattgcctttactgtataacttgtcacacatataatccacatctttcaaacacttaaaactcaaacagatatcaatatcaatatgcgtataccatacacatattcttagtatagataatcagtacattatttcttcccattatacactataattgtctaagcaagtaaggcaatagcaaataagataaacacttactatatcatgagtcgacatgtcttcgcagaaaatgtacatattcgaccagtcttcaggacctttaaaaccatggctgctttgataccaagttgtaacacactattccatagggatgccacgtctttgattttgtaaactagattaatactattatattcattaattattaaaaattctgagaatattaaaaacttgactaaaataaaagattggaaacagacattataacggcagtaaaaaggtgttctggggatccctgttataaaagatttacccaaaaaagaaactatagacaatagcaattcaaacacaattcaaaatacagtagatacagccagtccaaaacaactcctggcaactcagcacacaagccggtgggatcaatatgtacattgttggagaaggtagtcacctcatgacagctctaacttttccttgcccttacctgcaccacatagcacttgtgagtcacaaggactcagcaagaaaagtaataataatgattatatagtttattattcaaatgttatcatttatacacaatcaaaatcaaatcattacgcattgttcataagatgaaatttaaattactactggcatcttccatgaataagcattagtatacagatatctggtaatacaaaactattataccaataataggaatcatattcatttaaaaatataatttatatatatgataactcataaagtaaccattttcaatacattacattacctaataaggcaaattgatgctttagtttgaaaatcctgtatttgcattgcctaatcaggaaagcccgtgccaaagcctggcacccatatatcatataattgcatcacctaatcaggattgcccgtgccacaatctggcacca

SEQ ID NO: 251478 - DNA, 511 bp, Cannabis indica
ggatgtgtttcccaaggaattacaaggactactaccacaacgggagatagatttcttttttgatctggtacctagggcaaaacctgtttcaagggcaccctactttatggctcctgcataattgaaaaagttaaagatacaacttcaggggatgctggatctagcattttttcgacctagtgcgtcattctggggagctccaattttgtttgtaaagaagaaggatgggactctcctaatgtctattgactactaggagttgatcaagttaaccattaaaaacaaatacccctttatctagaaatgatgatatttttgatcaactttagagtaagatggttttctctaagattgatttgcggtctagttatcatcaactgagaattcgggaagaagacattccaaagacaaccttcagaactaggtgcggtcattatgagttcttggttatgtcatttggattaacggatgctccagcaactcttataactctcatgaatcaggtattcaa

SEQ ID NO: 251479 - DNA, 1036 bp, Cannabis indica
atcacagttaggcacccatacactaaatcataatcatatctcgcgtcccatgcgtattgagtctagaacgttcgtacaacagtactattgaccacgtgatagcgtcaattaatacttataccaaatgtacattcatcagtatctaatataactctatgtatactgataacgctattttaatttaatctaacagacaatcataaatatgtatactaaacatgtaatcacatatgcatatcagtataataatcttacctcaatcttaaattcaggtgagccgaccaacctaagtggaactgctgctcgataatttacaagcccttaagtcacaatattcgtaaaattgatgagttacacgctaatcaatttttgggaacataaaattaaaactaaaagttttcctatcaatggataatatgacaatatcctaaatatcactaaaatatgaaaatttagggtgtccaaaattgccacaactggcaaactgtatcccatccggataaccgattctatgggttctgcgtgggggaaaccagttaaccacaatgcaaaactgaaccaattcagtgcaagaaacactaaaaacaccacaaacaactcaaatcaacctcaaatcttttccaactctccaaaccacctaaacaacccataataaacgtatttcaagcaacagaaatagtttaaaacctttgaaacaaaatttaccatgaatggacaaagtttgagcttaaaagctcaaaccttgcctaagctccataacatgttgtaaattcaactttaaatcactcatctcaacatacaaatatctcaaaaaacaaattgaaacctcaacaattcgcacaacaaatctaacccaaaatttaagcatgaaaacctaacttttcatgaacaaacttagaggaagagagcaaagatcttacctcagcaccttcttgaactatagttgctaaaaaattgaagagctggaaagaattgaagacaaaatttctggttctcttgggttctaagtgaggctgagcatagaagagagagagag

SEQ ID NO: 251480 - DNA, 581 bp, Cannabis indica
agtgcatgcacagtaaaagcactcaaacaaatctttattattatttgatagagaagatatgtatttattaatgttggagttaaatttggattggagttgtaattgatttggctggaagctttatataaagcttgtaattaattggattgtatagttgagtttataattgttttgtgattaatacaatatttatagagttttaaaaaaaaagtttggattggagtttaaaaaatagaattaataacggtgaatattttgaattaataaatcatacattgtaaattaataattaagaagaaaaccaactaacttgtcccattaaaaatgctaatcctcataataaataaatacattataattattgtaatcaatacacatatatatgtaatgaggtcaatcttccgacgtgggctcattcaatattcatgcatgcatgcatgcatttttgtggttttgtggctatattgttgttattcattttgtctaaatatatatcatatatatgatccaatgaaaaaaagtaagaagaagccttatacatacaaaagaaaataatagtgagtagtacatatatatatata

SEQ ID NO: 251481 - DNA, 780 bp, Cannabis indica
ctatcgtctgtaaagaacaagtgagtaacacgtggtcccgatctagagcacctaaccccatcagttcagatctagcttttgcaaaggagaataacgaagacaaagattcttcacagaaaaggaacaaataaggagataaaggacatccctatcgtaaccctcttgtcgaaatcactcggcctttagggcacccattgattaagaaagtgtactccagggtcatcacacagtccatgataaccttaacccaaccctcagcaaagccaaactgtcgcatcatactggcaaagaaaccccattccacccggtcatatgctttactcatgtcaagcttgagtgccacaaatccccttctcccgttatttcttttaaacagtgagtgaagtagctcaaaactaaccataatgttgtcatgtatcgaccgccctgggacaaatgcactttggaaaaatgagatgagggggccaagaacacttttcatcctcaatgataaagctttggcaacaattttatacattacattacacaaagcaataggtcggtactctttaaccaatcttggtttttgtacttttggtatcaacaccacgtttgacttattaaactatcgcaccgaagcaccgtcatttaagattgcaaggcatacttggctaataccttataatcaagacagaagtaatgaagattgagccaaccatctgaggaacagctcaacatggatgtaactcattttttggtgaatcttaggaaaattttttggtgttttctctccctttcttt

SEQ ID NO: 251482 - DNA, 1540 bp, Cannabis indica
tttatgtcagcttatttcaatttctcggtagtcaatacacatttgtcaatgttctgtccttctctttacaacaaaatcggcgcaccctaaggtgaggtactcggtctagtgaattttaaatctaacattcttgtaactgaaccttcaaatcttttagctctgcaagtgccatccgatatgaagctttagatacaagctctaccccggtatcagatcaattccaaagtcaatttcccgttatggtggtatccccggtagctcctctagaaagacatccagatcctcttgaacaaccgaaacgttaaccggtcccactggtatttctttcgtagtatccaccacactggctaggaaaccaacacatccatccaataacaaatctcttgccttaagttttgagattaaaaaaattcaggatctttgaaccttgcccacgaacacaaataggtcctccctctagttcaaaagttaccatctttcttttacattcaatcgtcacgctatattttgctagccagtccattcctagtatagcatcaaaatcttttagatttaattcaattaaatcaactgacaattctctaccttcaatacgtatcgaaagagacctaacccacctcttggagataactaactctccagtaggtagtatggtaccaaaaccacttggtaaaacatcactaggctcatgtagattttcaatcactttactcgacacataagaatgcgttgcaccagaatcaattaaaatagtcaacaaggtaccatcaatagaaagctgacatggcatggtagaaggaccagcatcagcctctgcttgggtcaaagcaaacacccgagcaggaactagagtgtcatatttcttctgtttcggtcgttgtaactatgggaaatttcttttcagatggcccactaccccgcactggaagcaggctttatcttgacattcgccctgatggcgtctcttacaccttaggcactttagataggttcgccaatttttatttccaccacatcaaaaaccttggttaccttggaatatcttgttaggacccgtagctggtggatcattagaccttttcttgcaatcattagggtcaacacccttaccaaaaccaacactaggagattgtttccacgaatgtctcctcatactatttctcttttggatttggtcttctgcaccctcagcagcaagggctaactcaaccacctgagcataggttcgaacaaacccgggttgtttggcagctacaatcacatctcgggcgatatgttcttcaaatcactgaataaagttggcctgtctatcagccttaatggccacttcatcagacgcaaactttgccaatcgatcaaacttggtgtcatgctgccctaggttaactgtataaagtcttctgcctttgcagctcgaatagattctttgtagtacttttcataaaataaagtttggaaggcatcctaggtcatgttattcagatcatgaccctgtgatacaatttcccaccaaatgggggcatcctcacgcaacatgtag

SEQ ID NO: 251483 - DNA, 1411 bp, Cannabis indica
agagagaggagagagagagaggtagctgttcatgctagcgctgctctcacgcaccattccatgtcgttaagtgcataggattgggtccaccgacctgaggcccttacctagctaaaaatatatatatatttaaaattaattaatacatatttataatttttcaatattattttgaaaattacttaattaaatataattgaagggatgaaaaagaattctatgtgagaattaataaataataaaaatatattatatggttgtgtatatgtgttaatgtaactgcatgacaccaaatcaacaaaacaaagagcaaatatatatgaatttttgtgctatttcactcaaaaacaaataagaaaaaaaaaaaacaaaaaaggcacacacacagagagaatagagagaaagaaagaagctgagtactaccaccactatagcagcaccagctgatgattttcaaagctagttctctttctgtctatggagttattattattattattattattattatgccctataatattatttacacctccttctttggttgatgttgttctagctcatcatcatcatcatcatcatcaattttgcttttgaaatctcttctcatctttaggttattatcttcatcttcatcttcatcttcttcttattatattattattataatataaatttatatataatcttaggatattgaggttctgccggcttttggggtttatatagctctatagtctattaccttttttcattcaccttttatatatatttttgtgttttgagataagatttttagaaatgaaagactgaaaaaaaaacttgcatgtgggattgtgcagcaacaaacagcttgtttctagaaattctagtttttttttttttttatatataatataatttgcttttgggagctaaaagtaaagtgattcgaaagaaaaaggagagaaaatcctaagaaacccagaaagtaaagaagatatatatatatatatattatggcggctgcttcttcatcttcgataccaggttttggaatcaatagcaacagagaagaagacccaaataataatcagatgatgatgaaacaacattcttcatcaactccaactaattcatcttctctacctctacaacaacctaatccaccacctcctattccagctcagaagaaaaagagaaatcaaccaggaacaccaagcaagtattcctaaacccattttcaaattgatcgaagatctatatattaactcaattttgaaatacaaaaacccattaacttaatttcccctcttttaatttatttgtttttgtttacagatccagatgcggaagtgatagcgttatctccaaagactctaatggcaacaaacagattcatatgtgaggtatgcaacaaagggtttcaaag

SEQ ID NO: 251484 - DNA, 798 bp, Cannabis indica
aattaagtatcgagtttcatatagttaagtataatagtttttagggagtatcgttagtcaatcacaagacgatacgtcttaagggtgctagacactactggtacccaataataatgctctatatttaattgttgtatatatattgaatttgacaattaatagactaaagaaacaagatatcgaagagaaggtactcagtcaaataaaccatgcataacatataaagttgtttatgaggctgttatagtattagtatacactactgaaaattagatttttaaagacaaattttaagaatttatagggtaaattttagtaaaattcgctaacaacactactatacagatcgctaaaagatagtaagaaaaccgaaagtataacccctatagcatcggtattacaaaataactaacgacatatgtgagccttttttcgtaaaccctcttatgtagttattacaaaaaatatatgatagatatttttttaatttgaaatcaaattgatttttattgaaaattaaatttctatatttataaaatgttgttttttttttcatatatttatatgttttttatttttattaatattgttatcctaacttttgcactctgacttggcatcacataaatggtgacacgtggaattcacttggaatatctgctcgggaagagtagtccaagtaggacatatcgctcgcacgctcagagcgaagtattcagcaatccacgcagagcaaccaacacttagtgaattcagctttcgcatcatgagtcatcagcacaatccctataactcagg

SEQ ID NO: 251485 - DNA, 719 bp, Cannabis indica
aactaaaagctaggaactccgaatttcatggtaactgtcgtcgtactttctctttaaataaataaaaaagggattcagaaaaatatcaatcaagtcaaaaacgaaagggataaacactttttacgaaaggcaacaaaaaagaccttttacgaaaggcaataaaaagaccttttacgaaaggcaatacaaagaccttttacggaaggcaatacaaaagaccttttcgtcaaaggcatgactaagaccttttacaaaaagaggcaaaccatgaaaaccatgaggggatagtcagcaagtacaatctatgaaataaaactcagttcgaagtttaaacgcatgcataagtaagtatgcgccaaaaacaaccaaagattaagtaaaattaatattaaaaaggagctagaatacacaaacaggtaaaccattacccccttacacaaaaattaaagttttatgaaaagagtactcactctatttcaaaaaactgggggagtagtggcccatataaaatatgataaatggcgccggtgctaacttacaaaatttactaacataaaatgaaaagatgccgacgaaagcctataaggtaaaataaaaaaagggggccccctacacggagaaactttcccttgctgaaatgtcctctgcattgcaagccaccccagacggttagaggaagaaggagggcgtataatctcagaaaccacccgaggtaactc

SEQ ID NO: 251486 - DNA, 787 bp, Cannabis indica
tagttgaaacactataaaaggaacatgacgctctcatctcatcctcttgtcaacttgactattcaaccttcccaatctatttttaattatctaacaactagtatatgagagataccttcaatagtgatttcaaacctccttcattgttctagcaattcgaaaccttgagttatagagtgccatgccgacacatagcaagtcaagtactcaatcataatgagtaagatggtggtaaccaaacccgaaggagagaaagagatccaggtttagaacttggtaatgctctgcgacagaaaggaatcaagagctagagatctgaacggaaggagtcattatattctgctgcaatcaatgtaaggttttctaaactcttatgtgtttaatttcattattttaaagatattcaaatttaggatgttaatcaacatacttgttagtaaatcttgatcctgataaaatatttccaacagaagtgcactacaggctttcctggacacttctacacgtggacaacaagttatgggttgcgaattgggccccaaaagctcaataagatggttgaataatatctataatcaagagaaatttgatcttttgtaaatatctaacaaactaagtaagtattaagggattttaattgtaaaccaagggtttgaggactcctatataaagtccttagccttaggctaggaacctaagttgcctctaacctagaaacctgcttctatactctaagtgtttgataaactctctctcttcctcactccctctctctcacacgcctacc

SEQ ID NO: 251487 - DNA, 616 bp, Cannabis indica
ttattgtgaataaatatatattttagacgcaaacaaatattgtaataaaaatttaattaataacaatttgtatttaaatattatactttaacgataagtaatttttttattgtaactaacagtaacatttagttgtaaaaattactttgtctaaaatatatataatctatcattttaatagtaaaagtgagtaaatgtatgttttgttcacactcttttctattatgttataatatatgatctaaaatattgcgtttaattaattatatattacagagcatccgaatgtagtatccgtttttctgagcaaggaactgaaattgcacactactcattcatggaaatttcttggattagaaagaaatagcggtcgtgttccttcaaaatctatttggacgaaagcacgattcggtgaagatgtaattattgcaaacttagacagcggtaattttcttattattaatatgcgtaaaaaagattacagtaacgtaggtattgcgtttttataaattaatgagttccaatttaataaatatgattgatttaatatgtaattcttttttataagtgtaattagtataattaatcatataggtgtttggcctgaatcaacgag

SEQ ID NO: 251488 - DNA, 504 bp, Cannabis indica
ttaattattttttattaaaaatccatttagataaaaaaatatattaaaaaatcgatttttgtaaaaactaaattttacgggaagaaatttgagctattttttcttccaaaaatctaaatttgttcaaataaacataacattttcttagtttaattttatttttttctaaaatattttatatttttattgaatttttaattatttgtctttattttttataatatgaatttgtaaacacaaataagcttgatttttctctttatgaaatcttagtttgtttaaattatttattaaattttcaataattttgatttgattttttaagatttgtgtttataaataaaataaagttttaaaatattttatttcagaaataatttaagtatttttaagtaaacttaattgtttttttaattaatttaatacttttatcaaatttttaataatttttagaattaataagaatatataatttttgatttttttttttttatataaaatgga

SEQ ID NO: 251489 - DNA, 523 bp, Cannabis indica
atatatagatataaatttaggtaaatttacacaatgcacttaaaattaaactttttcttttactttttaacagttttttataggtttttcacttttttttctagaaaaaaagtttttttcatgttgttttttcgtagtggcaatgtgaagacaacagaaaaataacaatctgtatttttgaaaaaaaaaatcgatgaaaagatatattaaaaaataatagatccataaaagtaaatttttcgtcaatcttagccttttatgtatttacgaaataatctcataaatttaaaattttatgataagagcccattatggcatctccaatagtgtagcaaaagtagttttctcattggtctcgacctaacatatttagctaaatatatatatactagcaaaaagctacgtgcgaggcacgtctactaaattttatgctaatttttttatatattatttaaaagcgatacaattaaaaattaaagaaaaaatattattagttattaggtgagattattattatgtgtat

SEQ ID NO: 251490 - DNA, 603 bp, Cannabis indica
agcccatggacgttcaatagatgtcctcttgtttttcatcgactgataaagggagaagatcctaaggttttgcccttacacaagatagatttctgggttaagattcatgatctgaaatctggttttatgttagaaaaagtggtttggagtgcgggtgcctatattggtacgtatgtaaaatctgatcccacgaattttaatggtatttggcaagaatatttgcgtgttcgaactacggtagatattgaaaaaccattaaagaggaggatgaaactctgtaaagagaatggagattggatttgggctgattttaaatatgaacatcttcctaccttttgctttgtttgtggaataattgggcattcggaacaattttgtccaaaacgttttgaccaacctatagaaaaattaatcaaaccgtatggtgccgctttgcgtgcagattcgaaaaagaagaattatttagttggtgcacagtggcttcaggctgggaatgatggtggcggagcaactgcaggccgtggtggtgggcgttcgaatagtgtcggtcatggagttaatgctctcccaaaaatcatgaatgttgattgtgttgaccatgtt

SEQ ID NO: 251491 - DNA, 664 bp, Cannabis indica
tgctattacaggttaaagaaaaatgtaaccatatggttacaataaaaatgtaaccattgaatagtcaccccaacacacatatatatacactatataatacaatatatacaacacatgaaaggtagaagaagtaatacaacacatgtaatataatacatatatatagcaagagaagaatatatatatatataatacactcagtcacaaccttgagtgtagattagtggggatcactatgacttgaacaaggtattacacttttgtccaagaacttattttctcctatctctaagcactaagggaactctctaagaagtagctttgggaattatcaagccttgagattttctagaaatatacttttttgatagaaaacttggttcatctcaatatgagcaccttagacctttttatatagtgtttaggatataaccatttaaaattcaaattcataacgctctatggatgtttatggactcaaatgtaactcatgcacacactataactcttatagtattaagaattttaaattaagatgtgtacgtaacaccttttacactcttacagctcgtttggcgccatacaagagtcgtattgtattaaataataaagaaaaatttgaaaaaatatgcatcaaataccttaatattttatccctaaacta

SEQ ID NO: 251492 - DNA, 950 bp, Cannabis indica
cccctgtctaactttgggagagaggctaaaaaggccatgttggagaatgcaaggcagaagtctcccataggtgagggagatttaaggcgggccagaacccctacttgggaggtctaagcaaggccctaactgcctgtaactcctaacccaattgtagcaacaacaacaacaacaacaacaataataacaactccaacaacaacaacaccaacaataacgacaacaccaccaccaacaaaaacacaaacccaacaacattcaaccactccgcaatagcttttcactgtccttctagctaaatattcctttgctttcaattggcctttgggccccgaggcaattgaggctgaggttttcaagaaggtggaagaggctaatttctacattaagagatgcagtgattgggaggtggtcaccccccaaaagaaagcaggcatcttgcatgtcaaaaagaaggtagagatagtcaatggtagggctgaacatttagacccgcaaacccaaaaaacccaaccacctgccccaacccgctgtcaaaaaaccaaaattgaaaactcgtgtggtcgaatcgggtccaacctgaaaattccccacagaggtttcaggttcgggtattaaaagtgggtgttttttagtcgggttctaacccaataacccgaaaaacacagtgaaaaagaattaatttatttattacattaaaaaataataatattaattattaaaatttaaaacttaaaattgaaaaataataatattcactattattcacatttcacttttagtaactattcatattcactattcaatttcgacagtcactattcaaagaccatgacaaaaaaaaccctagaagaattcaagaaactcccaaaggcagcagctgctgcttcttcttctctagcagggtcccatccaagcggccggctcaatctagcgagcctcatccctaa

SEQ ID NO: 251493 - DNA, 827 bp, Cannabis indica
gcctgtgttatggattttgagggctcttggagaaaatacctacaacttatagagttctcgtacaacaacagctaccagagtacaatagggatggctccctatgagttgttatatggcaggaagtgtagatctcccattcattgggatgaaataggagaaaggaaatacctaggtccgaaatcagtacaacagactaatgacgccatagaaaagattaaggccagaatgctcgcctctctgagtaggtaaaagagttatgcaaatccaaagcccagaaatgtagagtttcaggtaggagatcatgcattcctacaggtgtccccaatgaaggggatcaaacgtttcgaaaaaagaggcaagttatttcctagatttacggaaccttttgagattctcaagaaaattggactagtagcatattgtctagctctgcctccagccctttcagcagtccacaacgtattacatgtttccatgttacaaaagtacaattcaaatcctactcatgtgctttgttatgagaatcttgagctacagtcaaacatatcatacgaagaacagtcagtttatatcctagatagaaaagataaggttcttcagaacaagaacatagctttggtcaaggtactctagagaaacaacaaggtggaggaagccacctgggagttagagtccaacatgagggcttagtatcaaaagtggttcagattagatttcggggacgaaatccttttaaggaagggataattttaaagaccgcttaactttaatttggaaattagcagataataagggcttaattacgaaacttgcatattagttatgaa

SEQ ID NO: 251494 - DNA, 683 bp, Cannabis indica
tgcagctttattccaagctaaaacatttttgaagcctatgcccccagccgatttaggttgacaaatggattcccaagccacaagaccaggcccttgatacatagcatgacctttccaaagatagttcctgcaaatggcttctatactttggatcactttcttaggcagtaagaggatctagctccagtatgagtgaatagtcagcaatacagagttaattaaagttactctgccagcaaatgacaagtttctagctatcattttatcagctagaataacacactccttccctgaaattcttttggagaaaataggtatacccaggtaggtgaaaggtagttgttggactaagaaatcagaagcatttagaatcctgttcagttctattcttgacatgttgctgctataaatggcagactttgttggattcggctgcagacctgaggttaatgaacaaagcttgaggccttgtagcatatagtatacacttctaaaatcaccattgcaaaacaggagtacaacatctgcaaaagcatgatggtttattttagttccagcacatctatgatggaatttgaaatcttgcttctctccaattttccccataattcttgagaggtactccatacctaagacaaataataaaggggacatgggatcgccttgtctaaggcctctctttg

SEQ ID NO: 251495 - DNA, 1675 bp, Cannabis indica
tcatttaagattttagatttgtgattgtacctaatcttaacaattaggttgcctacttacccaagatgggatcaaatcaaacgtagttcatactgttagattattttttatcttgtattctttggagacattgagtttattttagattgaaactcatttttagtctcacatgaataaatttaaaaattacttgaattacaattcaattttgaagagaattgtgaaataaaattcaaatttatttgagactttctgtctttacaaaagtaatttgaatcttctattatggaattaaatcccataatatttaagaatgatattttaacaagaattatgactatttttttttagtcatttttgtttttttgtcaaatattgaaaattttatttgacacatataatttcaactcttctcattgaaatgattgtgcattttgtgctttaatgacataacttgtcattctttgatatatatataatatatatatatttcacacatcagatattccaacagtatacacaaatcgaaatttttagtatgctagctctcttgaaatatatatatatatatatatatatatattattcttgtcaatatatgtatatataaatatgagagtggctatcataaacaaagtcagagtttcctccaatttgatttggaattattttgctatgcacacatatataaaccatgcatatatataaagctttgatttcaaagagtcccaaattcaattagctttttacttccctcatatacttattctctcacagattgacttttttcaacttcaccaggattggtttagtcaagtatcttgataacagtttttataccattttgtgttagtatatttgaatgaggtatgagatatacaaataattttatttctctttgattatggtgattcttaatgagaattttgacaacattatttttttattatttaagatttttaacttcattatgcattctatattaacttattttctgaaatctaagaaattaaagagaaatataaaaatcattaataaaaaatgacagcataacaatttttttttttctttgttaagatttatatctttctctttgattatgcactctcatattgacttattttctgaaatctaaggaatcaaagagaaacataaaatctataaggaattggatagcataacggcatggagacattaaattctcttatttttcgtttggctatatctcaattttgaagatattttgtggcttagaaagcctagatcaaagtggaccaaagcaaaataagaaatttattgaaaaaaaaaagatgtaaattgatgaaaagaaaataggaataatcctaatacttaccctgtaaaaatttcttgaaagatacgtagtaatacttctctgtaaattttggcagatttttcaggtgagtgacaggtagttatgcgttaatggagagaaaagtggggataaattattaattaattattttaataataaataaaagaagaaaaaaacacattcaacaggtgactttgaagtttttggactggacggtggtagattttatgttagattgctaactttgaagtgttgtttatgatgagaatgattgaatccctaatacatttgaagggattaatgatgttctcttgcattgaggtttatttatttttttttttt

SEQ ID NO: 251496 - DNA, 964 bp, Cannabis indica
ttattatcgcacaaaattgacaatagcagtttgaagaatggagatcacatctacacttacagaaacctacacacatgcaccgttcatggtcagtttatatatataaatatagggatatgattttgtcctgttattgtactttcacggattgtaatccgtgatgtacggcagccgttagatgagtgagttatttgatctaacagctgagattgatctaggggtaattagagttaaaaagtagaaacgtaccctgacactcatttaatgtaccctgagacccatctaatgtaccacggaatacattccgtgaaaatacattacgggacaaaatcatatccctataaatatatatatatatatctttctcttatatatacattagctatagctactctatcttataataaaatagaaaaataataaaatttaaatatagtatttaaatacaagttgctattaatttaattgtggctctcagaccttttagtcacaatattaaaatgataatttataattagtaataatttttttacttttcgtcacaagttttttacaatattgagattgtatgaaaaatattctggatgacatgattggagaaacttatggtataagaaatcctaaatgaccattttaactacatttaccctaagcctaacattacaagcctaaaaagaccttttgattcttggttgtgcattggtttataatagtggagaatagtaagtattgaaagcatatagaattttgagttagtggattgatgattgtaattggtatgcataaagtggttcaagtgctagttaattgcattcgatgatttcatgagctaaataaaattaaattgaagtgtgtcagtggcgtaattgaactgaaactctggatgttatacataagtgaaaattttcataatcatgttattgagtctatttgaaattactcatgttctcgaggttgacttgtt

SEQ ID NO: 251497 - DNA, 585 bp, Cannabis indica
ccaacacttccataacatacatacaaataggttaaaagagtctggtgggaaattcgctgaatgtataaaatgatatctagcatatgcaagtgctttaaatccttcaacgtagacataaaaggcgtacctgaccagacctttttcatatccttatactcaaacaaagcatgttgcacagactcgttctaaaggtgacaacgaggacaaataggagagttaagacaattcctactgtagaaattttctgcagtaggaatagatttctgagagagtctatagatgaagtgcgtaattttaggaggaatttgaagactccagatggagttccaccagcgtttaagggtagcagtatttgaagaggatggttgtgtcaagtttatggacgttttcgccacatggtaaccggtcttaactgaataatgacctgaggaggtgtgctgccaaaaataggagtccatttggataatatctggtgggggaagagatagtatgtcatcgataatgtcctgggggaagtggctgcgcaacaatgagatgttccagtctccatttggaaggagcgaatcagagacatggacaaggtga

SEQ ID NO: 251498 - DNA, 645 bp, Cannabis indica
aaaatattaaaaataaaaaaaaataatttaaaattaaaataaaataataaaaatttaatatttatattttcattaaattaaaataaatgaattattaattaaaacccaaaaactaaaactaacaaataaacgctaaaaagaaaattggaatgccatctcttcgtcatcatcttcttcttcctgctattctttttcttgctaaaaccattcatgaaacccttatcttcttcctgctcttctttttcttgttgaacaccattcatgaaacccttattcaaatacatttatcaaagtaacactatttcatcatcatcaccttcctcattattcagttgcagcaaaagaaaaaagggcaaaaagacacaaagaacaatcaaagaccctcacgttcttcactctctctccatctctttctcgacttctatcttctcggagccaaatagagacgctccaattgtctgtgacctaaacaaacttcaccacgaggtttgcaacccttgaaaacccctagatctggatctgcttcactctgtccccctcctcgcagtgtccctctctcttttctctttgcttgatgccagacaaagcatctcgatggagatctcggagaggctttgatgggacgcctggtcttggcagagatct

SEQ ID NO: 251499 - DNA, 633 bp, Cannabis indica
gatgaggggttgtttgttgtggcggtggagatgaaggaatgcgaagatattaaagtagaggatggtttggacaggtggaaggtggtcgtgacacctgtaactttttacgtcgacgtggactgcatgcgaagatttattgtttctatattttcatattttatatatttatttttcagaaacacattttatttcagaaacaatatattatgtaagtactgtagtattttcgaaaaaataaatgtaagtactgtatttttctcattattttttttttattattttatagtcttttctagaatttgcatgtttttatttgatgattgttatttttcttttcgatggattgccaatttgaatcttatcatgtccgtattagtcggtgataattatttatttatttatttttttttttaattttgaaagaaaaccatatacttgttttaatatatatgagatgaaaatttaaatttattaaatataatatttattggaagaacttaaaaaatattaaaaaattagaaatttataaaaatattcgatcataaatttttttatatttgtactgtattaagtttataaaaatattatattaatatttcaaaattataaaaatattatatttcagtaaaaaaa

SEQ ID NO: 251500 - DNA, 769 bp, Cannabis indica
aaatatatgtatatatattaatacttatactcttaaagttaacaaaaagataggtgttaaaatggtaatattaattcattaatgacttggactattttaattgggtggacagcaaaatggacaggaatcctagacagaagatccgcttccctggtagggtccttattaattgcttcattcataaaattgtgtcattaattttgtcaacaatatgcatataaacatgaattgtatacaaatattacatcatattaattgcttaagtaataaattaaagctacattattatactccattgcatttataaatttttctaaacaaatatcaacaccgtataggtgtggaagcaactttgactcctaagttaattagggtgtttatcggaccacatccaatgtttttaagtctatccaaatctgatttaattatatattagatattatattttactattcattcggatccaattaatttcagtcatccaatccacccaacatccattggattgttggattggatcggtttcatttataattggatgtatttcatatatatttattagtttatatttgggtttatcaaatatttcacacatagtattttttggatcggatacatctaatattttaggttcagtgtgtattgaattggactggatccatccaatccaagaaaataagagtaaaattttaatgtgaattaactggcacaaaaaatctatattttccccatttttttcctttttatataattttatctaaattaaaat

SEQ ID NO: 251501 - DNA, 746 bp, Cannabis indica
ccaatcttttccaccagtcttcagcagacttggtgaggattagggagaagcacaagcacttagcatctttacttactcttgccacttgcattattttgctatacttggccaggtgagtctttggatctatgcgcccaccatataactcaaattaaggaattttgaagttctccaggagtggagcttccatgatcctcctgatgcacgactttgggtcctcatctttagtgtgaatgagggccccactttgcttctggattaactttgttagagtagtgatttgctcttctagtctcttggtgtcactgtctgggagatctcgtccactaaatttgtcattaaatggtttttgaggtcattaccacgtgttctctccttctcacttttatctttttcatacttagcgctaagacgccttcagagatttattatggaccaactatcatttgaatattgttcactggtcccacaatcttagtttatagaattactagggtggtttttccttcccctaggcttcaattctttcgtaccagtcccttttggttggtgcaacaaggcctttctaaagtagaagggcatctgagcccgaaggcgtcagtggccttctgtgcctgagaaggcctattagcaggatttgtgttttttgaatgaggtatgggagaagtagggttctgagggtcacctaccttagcttttcccttgtcttgtttcagtgttagcagggtgttccttgttatttcctt

SEQ ID NO: 251502 - DNA, 536 bp, Cannabis indica
tatatatatatatcaacattgagtagaaagaaaaatttgaggagaaaaagtcaactactagaaaaagctaatagcagtactaaaaaaatataataaagaaagcaatattgtttgtttcatgaaaatataaagggcttttttcggtaatacatgaaaaatgtaacaatattataaaaatacaatagatcgaccatttcaatatatatatataaagaactcaaatgaaaaaaattacaaaattacctcttccactcactatacaatcgcacaacccatgcttctcatcttcaaaaccttcatgtgctcaaataaggaagacaataggaaaactacccagttattcgaagatccatcattaattctggcgagaagaagaccctaatcaacccaactatctacaattgacgattgacgcaaaattctacagaaaactggtttgaaacaaaaattgaaccatgaattatatttcaaattccagaaaataaattctcctaatttatttttttagattcttaaaatatagatctggagttccc

SEQ ID NO: 251503 - DNA, 468 bp, Cannabis indica
atttcagtattttttgtaagtttccctattaaaaacctccgcctaatacatcgagcattaacaatgaatgtagttaatttcagaaaggaaaaaaaaatgaatgttgttgtgtctttgcaatttgtattgcactattcatacatacaagaattttaagctatgaatattattgaaaaaccatcagtcacaaaataaatcgtttgataggctctttagaaggaatgacacaagaattgtgctttatgttcgcatcaaacaaaacatacatacattttttttaccaggaaaatatatacacgaatataagcagtttttctacaataccttaatctcgagtttagacaccagtttattttaccacacttcattcaatacttcctcctggacttccttcgatccgtcaagaatctcatgatcatcaaagcctgcatgttaaccaaagcttttgttaaaattagatctcccctg

SEQ ID NO: 251504 - DNA, 522 bp, Cannabis indica
aattcattgggcaggttgaaactttttttttcttaattggatgggttgcacttagatttttgtaacccgatgtttatattggattaaataaaatgtaacgtaaatcgatcaaaccgaccgacatacacccctagtaatgaccacttaaccttattttgagaattaacagatatttaaggcttattatcgaagtaggttttaatattatttttgcagttatggagatttatttgaattttaggtgtattaattatgtcaaagataaaattttatgatttttatattttatacccgataacagtgaaatacgacatttggcctatatagtcacttatatattgttttgaaccttagaaatagcaagaaaatatacttagacatttggaatgtcaagattattcgggattgtggttttggactatgttttccagattatttaaattacttcatattaaaggaaggggtaaattgtcattttaccttagatttttagtatttgattttaagtggcttaatattaat

SEQ ID NO: 251505 - DNA, 1415 bp, Cannabis indica
cctacaaaccgagctctatctaaagttggccttgttgaagctcgtggaggattggatgatgaggcacccttcacttacccttgaatactttggaaccatgaatcaaaaactaactttcacccgaaccgaaatttcccaagaaattttgacagcacctccccttaatttcaacactttcgggtaactactcaataaatttcctacaatatataaccacataataatctcaagcaaaaaattaataacaaaaagcactatgcacacactaatttctttaataataacaaaaacccaaaataatctcaccatctttgaagaatatatatgcgaaatcgcttacattgatgagaaacaccttagacaaccaccattgatgaagattcttgaaaacctagaggttgaagaagatgaattgtgaattttcgaatttgggtgtgaatgagtgatttgaggggtgattttgagggaaaaaaagagattgatgagagaaaggatgtttggaagtgattggaagtaacgatttgatggaaagagaaataaatttgagtttttgagatgataatgggagttttgggtgatgggaatgaattttttggatatgaaggttaggaataggtttagaaagtgttagggttgattttgggggtttggggtgtgtttagcccgagttgggcttttattggttatctgggcttccgcaccacgactactgtgcctcgaagaaaaaattgctcctctctgcccaactcttgccgtgacaataagtcaagcttgccgcgaccaagacaaattcaccgcggccataattcaagctcgtcgtggccactctaacaggccccaaatttattttcttttcacgtatttcacgattttaattaagtattttacagaaaataaaatgtctaaaacatgaaaaatgagcaaaataaacaaaacaaaacacactgcaattgtctcactttaacaaaaaattactgtaaaaacttaggatgcctcccaaaagcattgtcgttaatgtcatttagccgggcgctgatttccttttcacaaaggcaccaagagaatggcgacttggcttgatcaaattggccacccaagtagagctttaaacattgcccattaactttaaaagttctaaatttctcgcttgttacttcaacggctccatatggaaaaactttgaccacagtgaacggttcagaccatctcgagagcttcaatctcgagataaaaagtaaaacttgttaacctggttgaaactgttgggttttatgccctaaataaaactcattttaatgtaatcagatttacttattaatatagatcagaattaacatttaatgttgcatggttcacataatttatttcatgattataagtacataatgtatgaattcatctgaaactcttttcac

SEQ ID NO: 251506 - DNA, 944 bp, Cannabis indica
ttggcttcataacatgtattgaatgttagagagagtaagttgatcttctctggaagtgagatttatgaccactgaatcgtactctggtcaaaggctcccaagaatatgcataatgagttcatcataattgaagatctgacctgcacggttgagaccatttgcaagagattttattttgagaatgtagtcgtgtatcgacatggatcctttttttaagagaccggagttggaatctcaggtagagtatgcgagctctagattgagtggcaaagagagtttcaagaaatgaccatagctcatgagaaaattgacagtagagcacatggcctaatgtagcttcagaaatggagttaagcaaccatcttaaaatggcttggtcagtacaaatctaaatggtgtattgagggtttacatgtcttatttcaggattgggatcgactggaacgtcaagaaactggggcagacatggtcttgtgtaaaatagaaattcgtcagggtcatgagaacgtacaatagggataacctgtgatcgtcagtacaaatagttatctcgatccaagcgaatgatgataggagcaaggggctgatgcagcagagttggtagtgttggagcaacgactggaagtggggctgccagagctagaggaggagcatcgacgacttggttcctgggattgttgattgaggaatcgccttgggaagcaggggatgtcatcagctctgataccaaatcaaaataggaaaaatgctaaaagaaggaaaagggacagagagaatattgggatatgatttgaattaatttctcaatgattgtatcaatcattacacgtgtatattacaaaaaggtaaaaaaatctataacaataaaatatttccttttaatatgattggctccttaggatgagggaatcccatggaattagaattctagaatgatctatgga

SEQ ID NO: 251507 - DNA, 514 bp, Cannabis indica
tttttttgtctaacatattattttttatatttttgctcacatatcctgacctagatcccgaacctagacccggacctagacctaaatttagacctgaactcggacccaaactagaaccccaaccgggacacctgaccccggaccctgatcgtggacctcgaactgaaattggaatcggacccagttccaaaccaaaacaggaactagactcagaccctagcacagacctcagacctggaccccgaaccgaaatcgaaactagactcataccccaaaccggaaccaaatctggaccccgaaccagaattggacctgtaatgaccgcatatttaaacatgagaattagtagaaaatcaataatttgattattatttatgattatatgtgctttagtagaaaataagattgttgacgtcagaaatctgcccaactcgctcgtatgtataaacgagatgaagtttagaagtaattaagtaaataaagagcacacacaagaatttatagtagttcactc

SEQ ID NO: 251508 - DNA, 631 bp, Cannabis indica
ctggaggatatattgaaggggattataagaatcttaggctttcttaagaaacaagaaacttttgcaagaatttctggttattgtgaacaaactgatattcattccccacaagtgatagtcaagcagtccttaatttactctgccttcctaagactccctcaagaagtcaatgacaaggaaaaaatggtagaaattttgaccatatattaatagtagagcttcatacaacattttctcttatctgggatatcttttgtttaggcgtttgtggaagaagtgattgaacttgtggaacttaacaatgtcaagaatgccagaactctcaaaaaattgttgaatattttcaagtgagtatacacattaactttcttaaatttcttctacccaatatcatttcttacatatatatttaatctattccaggaaattccaggactgattaaaattagagacaaacaaaatccagcagcctggatgcttgaagtaagctcagaagcatctgaagttaggcttggtattgattttgctgagcactttaagtcatcatctttgtaccagtaagtagtacatagaaaaatatatatgaatcttggcacaaaatgttatgactaatcaaggagctacagatctc

SEQ ID NO: 251509 - DNA, 557 bp, Cannabis indica
tggtgtacgggggatcttagaaagtctctggcatttctcacattttttcacatggccctatgaatcttaactcatactcggcgagaagaaaccttaccttggcattttcttagacagacttttccccccagcatgattgccataaaatcctttgtgaacgttggactggagtagtgcagcttcttcgttagttacacaccttaataatggtatggagaaacctcttctaaacattacaacttgtactattatgtatcatgcaacctttctcatcatttttcgagcttcattcctatttcttagaagttctcttgggttgagataggtcgttatgggagtcgtccagtttggtgtgttgtctatcattttgatttcctttgttcaggtgatgctgggttctttcaaaaattgaattggaactaggttggctttatctgtcactgtgttgctcgcaagccatcctagttcattatctattgccttttgttttgttggaatttgcttgagggtataacccttaaattatgcaagcaggtcatggatctcactgagatagg

SEQ ID NO: 251510 - DNA, 1058 bp, Cannabis indica
atacgattatattatatatatttcgagatgtagtcgattttcgggtgtagtatttcgacggttctttatcgtgcaatagagttccgatacagtgtgttcgactgggttattttatcctaaggacaacaaggctgatagtctgcttgcacatatatgggcagtgccgcgaacgtcttaaagaaagtgacctagtccgcgactcaacccaaattctgattcggtaactttgttccttttattttttgcaacaactatttttataacaaaacctattgtaaggaattcaaaatcgtaataaaatttgttgttgagctaatttttggcatcaacatttaggtataataggtatttgtataaacattttggtaaacttatagtttaccctgcaaaaggagtgttctggtatactccttattcggtatctaagaaagttttttagtttaattgttttttaaaatcgtgtacgttttagttatttaagattatttgtatgtatttataattcataaaattttgaattaattatagtacagaaaataaggttcaaataattacttactacgagtataagaaaagtagacatgtgtacaacaacaaaattgaaatttattttcgacaccgtaagtaatttttttaaaaaaaatttataagtaatttaaataaatacaatatacatgattatgaagaaaaaaaagactaaaaagctcttttttagtatgccaaaataaataatactataaattttcttaaaattaattggagggtcataattgttattttattaaaaatatgggttccaaaagttactttagaaaatgtagggttcaaattgatagtaaaagttactttagaatggaatggaatttatattcttttgtttggtaaagactatggaattaataattgaataaaaattgtgatgattggtatagtataggatgaatttgaatttttattattttgaccaaaatgtcctttactcttttaaaaataattttagttttataaaattactattatagtacaaataaaaaaatgatatatatatttatgtatca

SEQ ID NO: 251511 - DNA, 619 bp, Cannabis indica
cattgcccactcttatggtcaccttttctattagccagtgtctttgataaatcaagtatttacattaaagaataaatattattatttgctcctgaatcaataatctatgaagattgttcatcttccactaatttagcttcaagaataaataaattgaatttacttttcttaagctcggagagatacttaagacagtttctcgtccactatttcatcacgatataatagaaacacttgcctttcacctttcttgtccttggacttaagtttgactttgttcttcttggctttaggtgcctttgcctttcagcttgggtttgccactgctgttgtcattaccatcctatttcattttcttatccaaataagaaggagagttggactttgtttcaacattgtttgactaatctttcttggaattatccttcagagacaaggttgataaattacatttttcagtaaaaatttcatgattctgtaccacacttatactactatatatagtaacaaaaataaatgaccaaattatttaaaagatcaaagttatattagtattgaaaaaaataaaagtgcaatcacaaatacattgtttgttggtaagactatgcaattctttaca

SEQ ID NO: 251512 - DNA, 793 bp, Cannabis indica
gctggtggtgaaacggacactatatgaggatggtcagtgaagtttcttattttaaagaggaagctaaactgaacttgctgcaattgtgaaaattggtatgaactgaacttgctgcagtgtggtattacttttcttcaagttaagttgtgtaagcagagctccttcctatttaaatgttttgcagtcattcagtcaggttatcactggtgcagggaagctagaaaatgaaataaggtgaagcgaatatgattacaataattaaaaaatggagtataaagttttattgataaaaaaatttatgaagtatatgtccaaatttttacaagagattattttgattttttttatttcaaattaattatgaatacacattattttgaattttatattttgaaaaagttagagcaatccattttgtctctcaagtatgttacttattccttcatattggccactgccttaatgttttctttgagccccctgatgttagtattttgaaatttaaatgttttctttatcccgcaatactctttgctttattgctaagtggtataagaactgagatcactacttatcttcatgtcaggaactgctccgttgctccgtttatggtaaaaaatttgtttcaaaatatgtttaactatggcataaatgaaatatatatttcttattttcaaaaataagatgtatttggtaatgtttatgttagtatttttcttttttcggttaataaaagagaggaagtaaagtgaaggggcttgtttggcataactttggaagagcttttgaagtc

SEQ ID NO: 251513 - DNA, 669 bp, Cannabis indica
ttgtaacagctgggcatgattaacatttatgctccagcttgaaggggagtgttagagtattagctgtatattagttgtaaaagaattagatatttagtagtttcctatttttttggtagtttcctattttagtctcctagctttgtatataaatatgtactagtctatgaaatacatacacaattcgattcactattttctacaaatagcttctccgagcttgatgaagcctacacggtcaagaaaatcatcactcattgagtctactgggccgttcttcattatgtctttccaaagttcaccgaggacttcaatgccccccagtatcgcggacaacttttcgtcttcagttacccgtgaaactttggtcacctccgtcatgaatctgctaacgtatgctcggagaggctcgcctggtctttgcttgacttcgacaagatctcccagatgcaacagaagttgacgagaggaggagaattttgcatggaattccaaagagaaggctttccaagagttgaactttccaggggccaacttgaaataccattacagggcagcttccgaaagggtagcaggaaagattctgaaacacatctcctcgtatcccctacaaatccatttgcatttcaaaatacttgaggtgggaaagaggatcttctcttcctgtgt

SEQ ID NO: 251514 - DNA, 1059 bp, Cannabis indica
ttttataataagtttttggtgaaaagtcgtcgttgccgaaaattattgtagaaccgttcataacataattaataaaaataaaaaactcaaactggttataattgaaatataactagttctgcaacataatgaataaaaacaaataacactaaataaatcaaaccaattataactaaaatagaatttgttccataatagtgttacaatgaataaaaattaatatcacgaaataactcaaactgtttataactaaaatagaactggttatataacataatgaatacaaacaagtaaaacgcaataactcaaaccaattacaattaaaaaataaagaagaaatcagttcctaaaacactgaaacataaattttttatacccgaaattcatctgtacttcagaaagtgacacgtgtcaatctcagggaatatgaatgaaaaaatataatggtaattatatcactaaatgcaaaatagaatgacttattaaatgtggaattaatagagtatattcgtaactcattgactgtatgtatagtattaagcgagacagggatatacaaactatcaattcatgtattgacgagaaactatcttgtctcggaagtcataatcccgaaggggcaataaacaacacattgtgaggcatctacctcgttgtatgtaaagaagtattgacgaggcgaatcagttattagaacacttagcgtgtagtacacgttataataattaagtttaataacttgagaacttagaggacatgattgtccagtctgcaaggcgttatggtcaaagagcagttcttaagtttgcttagtatactggagctcatgccattgctggaatgtgtataaaccaagccatctatgtacaatgcgagttacctccagcgagatacctatggaaatgagttcatattcctgtcagcgttgactgccttaaaaatagtttaagtcacagctatgtaattttttaatgttacctacacgtgtttaaatggaacgtaattaaagcccacaattttggggaatattgtcatggaatttgaatttaaatttaatta

SEQ ID NO: 251515 - DNA, 744 bp, Cannabis indica
tatttcttagttggaaattttttttttgacaaaataaaatatcgggattgagcggggttatggattttgaccattttacccctagctttagaaatacctaactgataacataaagggcaaaatagtaattttaatagaggattgggtggctgcttaggtgtgtgacacatggcctttttaatttttcagccaatcttatgttgagaaattcattctcatttttggaaaataaaggaaaagtcaaaaaaatcaaaattaagggaactctctctcttttctctttcgactggggcaaaaaccagggggaacctcaccattcaagctgatatttcctgagatttaagcaagggtgttgtgaattgtaagcaaggtaaaaccctagatcattggttttatatttttgaagctttttctttagttatgtatgtgaaatgggctgttagggttagagttgtttaggattctaattttagggttcgtttgagttaatttaagttcatagcagctggttttgaggtttgttgtaggttttgtgtaactttgagctttaatggcaacttgagttttattggtttgttctatgaaatactggctggaagttattgtgtatgcccttattaggtactctggaaggtttcattgcatttggtagagaattgagcaacaaatgaaagactttgggaaacctggtgcaaaccggctagccggtttgcagtgccacaaaaaccagctagccggttttgg

SEQ ID NO: 251516 - DNA, 791 bp, Cannabis indica
aattgaccaaattaacctcaactatgagtagaataaccatgatgaccactccgtcactccaaagacgaaaataacccgctgatatagcgactagtgaccgtagatgtaaattttagtagagagagatttggtgaggttttaacgggagcttgacacttgacaggaccgtacggacgtagacgagggatcgtagcagtccattgacaacacgtggacggttgagaggccggtgatgttatagtccacgaaatcaagttgtccctttgtcggccacttttttttttttaataattctttttagttttttttttatctgaaataattctgtttagttattaatatgggattttatgtttttaagaaaagataataaaataattatcttgttaacctcttatggcaggggctatgagatgactggtccatgttctgccacgtagcttcgaatgttgggtgagttgtctaacgtgatttttcgtcactggttggacgtgaccatacgttgagtccgaccccatttgctgcttctgcttcactgtttttgtgctgtgtctctgagtgagtgtcacttgattttttatttatgttttaatttcctgatcattatttcttattaatatattggagtaaatagacgctcgaagcccttttttgggcagctaatatgattattttaagggtcaatttggcacatttatactgtgaaaaaaaaagtatctatagatgtgctgtgagaaaaagtcatacagcgaaactgtagaaaataggtgagctgaatgtttggtaaatta

SEQ ID NO: 251517 - DNA, 729 bp, Cannabis indica
gaaggacattcgggctcagatcttgataatactctgcgacagaaaggatacaagggttagagatctgagtggaaggagacatattattccgctgcacccaatgtaaggtttctcatactttatatgtgtttatttataatcgttttagaagttcatatttagggtgttaatcaacatacttgtgagtagatctaagatcctggtaaaataatttccaacaggagcatgcatattccacctgctaaacaacatcaaaataaactttggagtgcatggagatgatttgacaacaaacttcgtaaaagcagaaaagaagtacaagctgacctcatttgagcattacatgacagaattagatataattgacaaaagaataaggtcatacttggaaaaaattggacatgatgtttggaccaggagctattgccctacaagaaggtacactatgatgacttcaaacatatcagaatcaataaatttagcgatcctagctgcaagatcattacctattacaacaatgatcgagtgctttagaagccttatgcaaaaatgagtatggaaaaatggcagtgaagcacatgaaatatttactgaagtatcataaaaaattaaagcactacttagagaaaatttggtttaggcaatgagataccaggtaataaactaaaacataaaaaagatcaataattaaaaaaacctgtttcttgataattttccaaaactagtttt

SEQ ID NO: 251518 - DNA, 1065 bp, Cannabis indica
tatggggaccatatcacactataacacatgatggtttcaaatactttctcactatagttgatgattgttctagatacacttggattcatttacttaagcacaaatctgaagctaaatctgtcatacctgcctttattaagttagttcaaactcagtacaatgctacaataaagggttttcagtctgacaatgctaaagagcttcaatttgtggatttgtttagatccttgggtattgttcattatcatgcttgtgtgcaaagaccacaacaaaattctgttgtggaaagaaaacatcaacatctcttgaatgtctctagagcacttttatttcagtcttatattcccttgatttattggggtgagtgtgttagcacgaccacttatctcattaatcgaattcctaccccaaatttaggcaacaagtctccttatgaagtcttaaaccataaagcacctacttataatcatcttaaaccttttgggtgccttgcatatgcctctaccttaagtcaaaatcggtctaaattttctcctagagccgtgtcatgcatttttctaggataccccatgggaatgaaagcatacaaattattgaatcttgagaccaacactattttttgctctagagatgttcagttccaagaatacatttttccttttgttactaatgagggactgcctgctcactatgaaaattttttccatactgtccctactattgttgacactgcaggttcatctcaggacatgttttttagtgccccagaacctgatccacctcccagtacccctgctccacaggtttgtgaacctgctgctgatttgcaccagcattcgaatattcagcctgctgtaaccgagcctaccagtgcacctgatgctgaaaccatctctccttctgtttcagctcctttttcttcctcatctagacctattagacagattaagaggcccttgacctccaagattatcattgcttcttaactaataggtcttcatatgtgaataattgtcatacttctaactctactgtccattgtttatctcaggttcttgattactc

SEQ ID NO: 251519 - DNA, 1022 bp, Cannabis indica
agaataaataaacaatataatactaagttgaattcattatctttgatccttttaaagccaacccattaaaggttacacatttatgtatatattcacaaaaccatgaccaagttaagctcttcatctgtttaccaactcaaatccacacacaaaaaaaatcatataacttaataagatgcttacccagtactttcaaacaattagaaatgatagcgaaatcaaattaaaaccataaaattttttagtataaatcaaataaggaaatgaaggaagagcagaaaagtgattacagtgagggctgtttgaaagggttctgccataataaagaatactagtacagtacagctctctggttctgtcttgtatgggtcgttccaagttacagatctctgtcaaatcgaatccaattagctcaaactctttcaccattaatcagttagccccaaatcctaattaggttttctttttttaattttattttattttatttatttattgctatttcattggtttgtacaactatagtttaagactttgcatatgcccattttaataataataaaaataataattattatttgtataagatatttttttggggatattttgttgtttgtttaagctccaaaattcatttatgatagtttataaaataatacattaaatgttggcaattattagtttctatgataaccaaccatttgcttatagattattttacctttgaattgacttaccttttaaatgttttaagtgagatttattttatgttagttgaacatctttcttttattagggaactaagttaagattagatgttttatttgtacccataaaattatagatacactttaatattaaaaaaaatatatcatatttataccttataaagttatagatacattctaatattttaagaaaattaacttaaattaatttttataaaggataaatagtggcataagtacttaaagttttgggtttgtaagcggtataaacctaataatttttttagcggcata

SEQ ID NO: 251520 - DNA, 1233 bp, Cannabis indica
tgcataacttaaaaaaaaattaatgtttgaatagtgttctgattgctggtttgatataggaatatattgaactaagtggtagacttaaatttgtgagtgttggaaaattctcacaagcctagaggaatttttgttatctctgtgcagaatctggagtaatgctgaaccgatgttgtaacacctgggagaaaacctgactagaaggaattagctattcaagccatttttaccatattatatatttttttcttacaaaaaatttttctagccgcagtagtattaattttagcaagtttaattcctgtcatttttaattctgaatcactgctcaatcaatttcatgttatttcctcttactttaatttgtaattatttggttttacaacatatttttgtttgcaatccctgtggagacgatcttacttatcactttattacttgtgtgactacgtatacttgcgtacataattttcacaacagtactctagtgcatgtggtacagtggccgtactactgttgagaatgttcttaacatttggtgagcttagcatttgtgctcagaacagcttaagcataaagctggtattgcattgcctatatatgttttatgcttatcttactgagtctgttgactcatcagtttattaccttgtgtaggtaagggtaaagctaagctggaggaacagtaaaataaagttcgataaagattgtacatatcgcaacagtgtaacctagaaggttacgatcttattactttttgagtttgttgttatggtttccttgtaggttataagggttcacatagtttagatctcttccttacttttttagtagcttagacaatatcgaagaccacatgccagttacagatgacttatatctcatcctcttttaattaagtcatcagaatgtatcttgaggcttttcaagtcattaaagatgacattgccacaataaacgagtctcccaaacaatcaaccataaaatttcggccaccaggagctataatggaattcaaacccttacccaaaccagatgtggttaatttgtatttacataattttgtgatataagatttttacataactttataaaactaatacttaataaaataaaatatttttaatttgaaaaactcacttttatatctaaaaaattacactttcttttgctacaaagattcatacactactaatattatacttattaaatattgggaaaaaaatagaaaaa

SEQ ID NO: 251521 - DNA, 546 bp, Cannabis indica
aaacgtaataattcaaagtgtattagcgagtacgggttagacttgccccttactatcctaattaactcgtaactgcttgccctatttagcagatttaacccaatccaaattaatttaacgggtttcaaacgagtggacttaatgtgagcgggtgttgcagttggcgatttctatgttcagctctaccaaaaactacactcgttatgaatgtcattttagaagtagatccaaatcttatatgcaataagattacacctaatgtccaagtatggttttcaaattaagttatgtaatataaacatctcagtattaaataatttgaaataataaatatttttgttctttaaactttttaaactattaagttgtaacgtagtctttttatcacattttactcaattttattataaaataagtaaaatggtaaatgatagttgataaataaattcaaattaaatacttttatttcttttacattaatgaataataggataaaatattttttatttttataataatttacattttttattttttgttatttaa

SEQ ID NO: 251522 - DNA, 511 bp, Cannabis indica
gctgcttgtagtgctcagttacaaggctggggaaaggaatacactggaaattttaaagaaagaatcttgcgttggaagaaggagatgaaacgttggaagtttgggtgagatgatatttccattacgaatttcaaacaagcaaaactgaacttggttgaaacttatgcccagtgggaagtattttggcgccaaagatcaaagcagttgtggctccaagatggggataataacagcaagttctttcacgcttcggcttcagctcgtcgtcgaaataattccattcagagacttcaaaatgagtcaggtttgtgggtggattggaaaatgggattacctgatgtgatgatgaactacttctcaaatcttttcacctcggctcagacgaattggcgagaagttaccgctgctgttcaatcacgagttactcatgaccaaaatgcatctttgatgcaacctgtttcttgtgaggaggttcgtaaggctttattccaaatgcaccccaacaaatctc

SEQ ID NO: 251523 - DNA, 890 bp, Cannabis indica
ttagttttgagatagaacctcatgcactttactatacactcacctattctactaccttaatcatacacttccgcattctaacatagtattagagccacttgtgatccattgggagcccaaatgccaccggttcaaaaagccgtttgtgatccgttgtgagccatgccggtccaaaaagatacttcaactgtctctcctttaacctccattgtgtgccaattttcagtgttagggtctttgacctgtttcaaaatctataaatttcctgacatgtacacccacaaatttcccaatatttgaccttttgggattctttcaaatgttacgtttgaccttgtggtctcttaaaggtcgttcgttatatatacccacactttccaggcccaaacgtgaggagagtatattagagttagtctcacattgctaatatgtaaaaaaaattatcatatataagatgaatggactactcctcccattgtcaactagttttaaaatagaatctcattcattataatctcatccatcccaaattctaacaatatacatacattatctcttgtacattatatgtggtataaataaatgtatatgataataaatactaaatatcatatccatcacaagctaacaaggacagcttcagaatatattcgattccaaaaatcatcaaaacacatttttttttttgtttatcttgaacaattaatagagtaactatatatcactacaaaaaaactgttacttttagtgacaacttttagtgacaattacaatttgttgtgactaaatatgacttttagtcacaacaaaaacttatctgtgacaaaacatagcatttagtacacaagttgtcactaatttagttttagttcataacaagtgttgtaact

SEQ ID NO: 251524 - DNA, 635 bp, Cannabis indica
ccaggattcaagagcaacagatcaaaagatccagcaaccaaccaagtgtaggctaatactgaatctaatccttctagtgaagaaagtcacaccttgttgcctcaactcagtgtgtctcaatatcagcaattgctgaatcttcttgctaatcaaccgagtaatataactgctactgatcctagctcatcttcgaaagcaacaggtattatcttgtccaatcattatgttaatcctaaaaatgaatcttggataatagatttgggagctacgagacatatttgcaacaacattaagagttttcaatatatctgtcctatccctaaagtcaggttaattctacccaataatgagtttctttttgttcaacaaagtggttctattgttattaacaaagatctcactttgactgatgttctttatgcaccaagtttcaaatacaatattatctctgtgagtagtttaaccagctgcaattcgattaatgtcaactttactactaccaattttcacatacaggacaaactccatctgaaggagattggcagaggtagcagcagcaatggcctttacaccttggatactaccaaatctgagaatgttctatctgccacagctgacctatggcattctagatt

SEQ ID NO: 251525 - DNA, 571 bp, Cannabis indica
aaagacctaaacatgagacaaaggcattgacatgagcaagtaaaggattatgactgtgaaaccctttatcatcctgtgaaggccaatgttgtagctgatgccctaactagaaagggttagaaccatatgaatactatcaaacagattttcaagcaactggcagatgaaatgattcgagctaacattgagtttgttgtgggacgattagctaatatcaccttgcaatctactctcctagaatgaattaaagaagcacaatatctagatctgtatttggtgaaatctcaagacagggtttcagtgggaaagaccaatgactttatagtggatagtaatgggttgttacggtttatgaactgtgtttgcgttccaatgaatgatgatattaagagagaaattctgaatgagtctcatacaactccttactctgttcaatcggggaaaaacaaaaatgtatcaaagatcttaaagtccatatactagtggcctggaatgaagaacgacatagcagagtacgttgccaaatgtttaacatgtcagcatgtgaaggctgaacatcagaggcctgcag

SEQ ID NO: 251526 - DNA, 1171 bp, Cannabis indica
agtgctaaatgatcccattgaatggcctgattgaactactaaagttaagcaagaagagttgcttgagacaacaactagaatcatcattttcaatctatctgatgcaattattagacaggttggcaatgaagaaacccctgctaaaatctggaaaaagttagaggaacaatttcagaagaaatccctaaccaataagatctatttgaaggagaggatctttggcttcaagatgtcacactctaagactcttgaacagaacctagatgaatacttgagactacagattgaactaaccaactgtggtgaaaatgaagcccttagtgatgaaaaccagacaattataattcttaattctctaccaaaatcctatagagaagttaagaatgcaataaaatatggaaggacagagattactttggaggaagtcaaatctgccctgaagtctaaggatcttgaaatgaaaatagagaagcacaatggttctcatggtgaattaaacttaagtaggggaagatttgtacacaagaaaccatggcacaaaaaggggaggagttcaagtagggattcccgcagagatcatcactctggaaaacctaagttccaaccaagaagtcctaaagatcccaatggatgctatcattgtggaaaacctggccatcttaggagagattgctacttttggaagaaaagtaacaagtacaaatctgatggaaatgacaacaactcacaaaaatcagacagttacaagcatagggaacatcaagaagctaattacagtgatggctatgacagtggggaagtttatgtggctactactaatctgaaggatgattggatcctagattctggttgtacatttcatatgacgaacaacagggaattactatctggttatagagatttcagaggaggaaaaagtcatactgaggaataatcaaacatgtggaattgaaggcataggacagtgcgcttcaagatgttcgatggtgtggttagatcacttagaggtgtaaggtatgtgcctaacctagctagaaatttaatttcactaagtgtgctttatgacttggagattgaaagtaaaatcaaagatggacaaataaagctatgcaaaggatctatggtgattatgaatgtaacaccctaactagcataggcgtattacgtgatt

SEQ ID NO: 251527 - DNA, 724 bp, Cannabis indica
cgtttcacgtcagttggcgtcatcaatcaacgacagccaccgcctgagattggttctgcgattagcttctgcaactcttgtcttttgtgacatggtgtgatttgttttctgcactgagaattggttcttggtttattggtttgagattgttctagttttgccattgttttctggtttaagagtctaagttttctggtttgagattgtttatggttttctggtttgagagtctaagttttctagtttgagattgagttgggtctgctggttttagtttcttgtttttcgtttgttttgggatggcttctaacagtaatcagaggatgaatgaagaggatatggctaatgttatcattgaggaagaggatgcggtcgtattatcctatgatgcgagtgtcactaatggtaataattatgatgatcgatggtgtattgttggtaggttcttgactgagagatccatagattttgaagcaatgcaacatatgatggcttctctttggaaaaaagggccattttgcaaaataatgcccaaaaagtaaaactgccaaaatgataacacacatagaggacgccactggggcatcactctctgataacgatgttgagtcagtcttttcaatcgaagaccaatcttgtgatgattaataatttcttggaatctccttttctcttgctaatgtgtttctctgacctaaaattcatctaaaattgaagctataag

SEQ ID NO: 251528 - DNA, 1264 bp, Cannabis indica
aaacttgacattcagaaggcttacgatacactggattgggattacctggaggaaattttgaatgcctttaggttttcccacaagtttataaagttgatcatgaattgtgtacaaactcctagatactccctgatatttaatgggactatgtatggctactttgaggctagcaggggattaaggcaaggagatcctatctcgcctttgctttttgtgtttggcatggaatacttatctcgatactgaaaaaagcagaggaaaaggaggagttcaaatactttgagagatgtaaagaacttaaacttaaccatctttgttttgcagatgatgtgattttattttgtcatggagatttcagaagtatctactttctattgcaagctttaaaatttttctcttgctcctctgggttggaaccaagtccttcaaaatcaactatttattgttgtggcatggaagatagggaaatttaaagagtggtggacatatcaggcttttgtaagcaagaagctccattcaaatacctaggcctccctatatgtgctaagaggatctcaagtaaggagtgtgaaatattggtgaaaaagatgactgcaaaaatcagagtttggagctcaaggaacatctcatatgctggtagagttgttataattaattcagttttactagctattcactcatattggagccaaatcatgattttgcctgagaaaatactaaggaagatagaggccatctgtagggcttatctatggaagggtcaatgcacatcacaaggggttggtttggttgcttgggaatcggtttaccaatccaagacagctggaggaatcgattttagaaaggtggaagaatggaatttggcagcaatgacaaaatacatttgggcgatagcgaataaagaagacaatttgtggattaaatgggtgcataatgtgtacttaaaagatgagaattagtggagctgtcaagctccacttcaggccagttggtactggaagaagatagtggcaaccaaggagaagctgaagctctttgctgacttccagcaactgatgacagagcaaagttttcaaatatcgaaggcctacaacttgatcaaaaatgaaggagaaagaaagcattgggcctcgattgcttggagtagattgaacatgccccgacatagttttttcttatggctagctgtccaaaatatgctaaaaacaagagaaagactatgtaaagattaatgtcatactagatgatgattgtttactatgca

SEQ ID NO: 251529 - DNA, 1601 bp, Cannabis indica
caaaatggggtgacctatcactgcgttgtacgccgaatactgatcaatgactgcaaagtcttccatcgatttggcagtgacataagctgttcctagggtgattggtagcttaatcattcctttcagtgcaatcgtatctccagtgaacccatagatacttcagactataggtcgtaaatccttctattgtaatcccatttgcttaaaagcttggaagttgagaaggttgactgaactcccattgtccagtaggattcggtggacattatctcctccaatattagcgacgattacaagtgcgtctacgtgtgggtgatgaacccacctggcatcactttccatgaaagttatgccgtcgcattctttcttgaaaagctttttaggtcgctcacttagattgttcacgttggcgagcggtttctcttttacctccttagcatatcgctcttgtgatttcttggaatctctagagacatggggtcctccaataatcaccaaaatattgcgaggagttcgtgaagcactcgcattatttgtgtcgtcattatcatccgcttggtcatgattttctccatttttcttgtatttgccaaattttcctcgtctaattaattccttgatctcgtcctgtaagaaccaacattccagggtcgtatggccgatgtctttatgatacttgcaaaacttcttcagatctcttttatcgcaatttcctctaatcgggggaggctttctgaagactccattcttctcctcagtcgcgtaaatatgattgtgagggactgctagttcagtatagttgacaaagcgtggtcctccttttctctttggagatgtttcattctttgagggagacttggcgagcttcggacttcgctgcctatgagggctacatcttctcaggcttcttcctctggaattatttcctctaggacttcgagatctagaccatggtacaggtgactcgcatttatactttcccctttttagctcggccagagaatttttgattctcttatgcagctcagccatggcgaagaattccaccaacgattctagtcttcaagcctgtaactctttcaagaaattggttcttggcaagaaacctgtaatcaacatacaaaccaacgaagatttgagggccttctcgaccttagttacttcagcattaaaacgtttaaagtaatcgtgcaacgactcatcgacttcctgcttgatgttaaccagggttgtgtaaggcggtttagacatcattgtggcttggaagtgtgtcaggaataagtccacaaaggtttcccaagttgatatagacgcctcaggcaactggctgaaccaatcgtgagcattatcctccaaggtttctataaggacgctaagtgaggtacctgggctacttccataattgtatttaacttttctaagtagtctataggattagtagtacctttatatttttagcgattcggatagtctgaatcccttggacatagagcttgtcgcacttcggcagtgaagggagaaagtcccatgtagcttgcaaaatgagctttctttgctgctcgataattttcaatgcttgcaataagatgctctgatcaaca

SEQ ID NO: 251530 - DNA, 501 bp, Cannabis indica
aacaatatattacacttttaaagtgttaactattttagaaatatatcaattaatgttattgataaaatttaggaaataaattatcttgattataaaatttgttatatttaataatattataattaaattgagtatattattttttacatagcaaatttgtagttatttctttgtagtggtatataattgtagagtataacatctataatgtcgggcctgaaagttattggccctgaagaaaaagaattatatttatcacccttttaaataagaaaattattgtgttttaaatggtataatttgaaaaagagatttttttttttcctaattacgtaaaaatgatagaaaaattacattgaaaaatagattttttttaacttttacggagttgaacgtttttttttttttttactaaaattaggacggttagttttcatatttttttacaacaatattatttttcggttaatttttctgtaatgaaaaataaatccataaaaa

SEQ ID NO: 251531 - DNA, 834 bp, Cannabis indica
tctctcacacgcccaagcctaggctgcacaacaccctaggctgttcaacacttgagtctgccaggcattgatctatacatttggtaatcccaaaaggggcactatagtagatcccacaatatagcgatctggatagtgattccctcgatatcaatataattaaaagcagagtaggtcattcccgctatcacaagggggcagaacctctataacaaatcccgttgtctattgtttcttactcttatttgtgcatacaggtggcaatcatcatatttatcgacctcgctttcggttgattactttttagggtcaacaatttggtactttcattgagagcgtggatattgcgatctgatcaaacgccatggtaaacacatgaagaactcttgttgcaccatctgcatctttgggtctccttcaagacccacagattgtaaatccagacgctcgagttcgagtcacaactgggatccccatgaatattgcagatgtggtgaggtgcaacaagtatggcgaccacagttggctagcctgacgtgagcatctcagtgaatccaagtggcaggcccacgcctccagcagtagatccaccattggcgcatcccactgaaggaaggacccaggggcgacatcctcttggaacaacaactagacctcaaatctggttttatgctgaagaaataggcctgggagtgggcgaaccgataattagcgagccttatctggacatgggacaagaccttgagttggccagactcaaggaagctgtaggcctgttggggattattttaccaggatctagatttactatcacgtatgttatttaacatccta

SEQ ID NO: 251532 - DNA, 1055 bp, Cannabis indica
acctaaaagatttaaaaagagttaggttaatttgtataatctgtcatttacattaagaaagagaattgtaattagcattaataattaggtaattaaatcaacatgattctctttcctaatttaccatcttgattaaatcttattattgctaattttattttctttttaatctttatttttttacttcaatcataaaattattgggtttccaaatagaaacataaatctaatctagtggtattcagttgaatttcctgtgggatcgacctcacctgtgtgagtttattacttgagcaacgatacgtgcacttgcgtattaaaattgacaacaaatagttaattaataacatgctcatgtattagtgaattacatgtcatacatagaaatcccacacaatttatattatcatgcatctcatagtaaaaacataatatattaggattatcctatgtgtttatgtgtttaccctttttgaaatccaaaacatgtaaactagctaagattaatttagaattaacttggtaatttaaaattaacttattaatttaaaatgattttaaattatgaattaaagggttaattcaaatttaataattatgacgaaaaatttatttataatttaagatatttattataaataaataaatcataattattaaagtggttaatatgtattaattctgagaatcaataaaacaaacatatttaacttaaatagttagtgggagaaggagtacatgtcaatgtaactatgacttctattattgatcaacaccgaaggagtatagactagcctcgagatgactttgttttcgttcccctaaggaaggtatgtgtctatactgttgctcaagattgatatcttgactaaaataagcgaaagtgatgtatattagtgtaacatcgacccttaaggcgatgcactaagttaaggcatgaaatttgaaataataggttacactcacaaagtgcaactaagcttcatagtggttagttgttaacttggtcaataagcggtactttatattttgaaatggaaatatgagatatttag

SEQ ID NO: 251533 - DNA, 1267 bp, Cannabis indica
aaaaaaaaaaaaaactcaaatttcaataactttaaccagaaaacacttgcatttactgagcaacactcatcccctcattcaagagccaaaaaagaaaaacataaattcatgattctaaatgcatttcctcattcattgcaaagttcactttaacaatagcacaaattcaaaaaagagagatattagagagacacaccttcaaagaatgaatgtgcagagctttgagctttgaggtttgagcttcgagctctgtgtagggtttcttgagagaggaagagagagagagctacggcggcgtgtaggtgagaccgcgaggtccaaaagtttgaaaagacgaaaatggtacaaaaaaaccagtcgccgcctcccttcccttcccttggtttctttcttctctcgtttaactctcacttacatattatatcatatatgtaattttcaaaaaataaaataaaataaaataaaataaatagaaacaacgtgcatcttaatcttataatattcgttcgtttacaaaaaaaaaaaaaaaaaaaaatattcgtttggggaattttgttttgtagtgcatcaagtgttgtttttggtaattttaaaaaaataaataataattgtgtgcgtcctaagaaaaaattataatggattataatgaggaaaataagatttaattttaaatttttgttgtaacaatttcaatgtatatattaaaaaatgtgttaaatttagcaatattaatatattaatgataattaataaattaaatctatttttttgaaaataatagtaattttatgattaaaaaattatatcggagtaacttattaatgttaaatggtaataatataaataaaaaatatgcattaattgtgtgtgtgttttacgtaaagctatactttgagttaaatttaatctaataatttaagtatgtgctaaatttagtataagttttagcacattatagaagaagaaaattttataaaaatatcaaaatatagcattataccatttatttagcactctattacaaatatatagtataatttataagtggtttaaaataattagaattactggattatgaaaaaagaaatatgtgtacttaaataatctttagtatagatttggaagactatgtaatagatcacttaaagggtcagattttgtattttttgacattcaaatttttttttagtttaatttattttttatgatggtgaatattgtaattattaaggattagttataaatatttaaaaagtttaaataattt

SEQ ID NO: 251534 - DNA, 6471 bp, Cannabis indica
tacaaggatcattctcaatactcaaatataccattaataataagatttattggaccacagattagcaattatttctcaaaatggatcaatattctaaaatctattctttttactaaactaaccctaaatatttgagcagagaacaataatgattgctatgtaagtacccatgagaaacttgaacctcagacatttcgggagcaaaccacagatttaaatgttgcactatcctctagggtaagaaatctacctttttcaacgcttccaaaaatatttctggaataccatcattattctttttaagaacagtgatcagatgcttaacaatctccatgatacttgccccatgcataacaaaatgagaaattatttctgaaccaagatactcctgcattaaatgaatgccaattatataacatcaagcaacagagcagtataaatttactttttaaaataacatttgctcaaatagaaaccactagtgatatatatctaacattatccccccaactccttttcacatcgtgaaaggaagtttctcatacttcaatatataatagtgtagattcaccttagaaaccgatttactagcaaccaacttcgcagcagcaatcataacacagcatctgtttgtgtcctcagcatactctttgttaacctcatcatcttctgtctcatctgtgaaaatattaagatatccaagagttcttaaagggcagaaccaaacgacttaatatagcaaagcatgttttctgagttaactcaaagtggaaaagacagaacagaaagttctgaagttttacaatccactttcagaagaaattggccaattttgaagtacaatggaggaagtaaaacatagagtaggcaaataacatactcaataagtacctgaaatattaagttgttgctcacaaagtttccaaaacttttggagaattgcctcatctggacaatatcctaacctttccagctttgttgaggaaaaattagtcattctgaacataaaccacaattctgcaagtatggtacaaaccttggggacacataatgcataattagagaaaatttgaagcattatacaaaaattattataatagatgagaaataaaagttcatgtaataatatcaagggaagatacttaccctgctggccagaaggttaccattattaacttctccctccatttgagggctgttaagaaaatactctaggttgtcaaacaaagtagtacgtttagatagtacggaagacaaagatgcctctgataccatctcaccacttatgatcgattttagacaccaggccaaatgaataaacatattaagaagcagaaaacagacaacctgaatgagaatgagcaccaaaataattagtgatttaagaataagaagttgggacgatacaatttgtaatcttaacacaaaatacagcttacatacctcatcatccaagtttctaaaattttgtagagtattcaccatatcttcatataggctctcaatgggcacagcccttgacagctgaagttcatacaaccttttcaaattcacaagaagggaatactcatcaccaccatcctgcaatgttaagaacatgtcattttcatatcattgagtgattttcagtttcttcttgtgggggtaagaaagcaaagtgcataccgtaacttcttttatagcggctttaaccttagcaacaatctcatcttcaacttccttcaatttagaacgagcaaaatcttgtagctccccttgactctctgtagcacaaaaattaatagccttcacacaagatcttaatgcttccttctcaccatgtttaaaaaaagcatctttcatgagctggaggacagttttaaaattctgagacagcaaaaccacaaaagacccagctttaaagaaaacagtctaaaaatcaatcaagagctagtaagaaaaatagaaatcaatgcccacctgttcttgccttttcagagaataaagctcaagattcatatgcaaaacaatttcaactagcgatggtactttcgccttgtcagccaagaacttgcgtaaaagcaatgggtagttcttcatcatagcaacagtaatgtcctttctgttatgttcaaatatttcctgaataaagacttacaataatgagaagttgacctgtaaaccagcacacaaagcaacaaaatttgaaaagaaagaatgtgaaatgtaaaatctaaaagtccttcctgaatcattcactttctttgttgaaaaagagaaaggggccacttgtcttaagactgaatcatacactttctgactagcaaaagtttcacatttatgataaaagctaaattaaactttctcagtcaaatttctaaaagcaaatttgacatttagagaataattatcataaaacatgaatttgtggataaaatcttttgaacagagcttcttcagtgtaagttgcgccaaataatttttttaaaagcattattaacaaccctattatgtatagcaatcaatatggactaccagttttattgtaaaaaaaaatggtgcaacaagacttcccaaaaaatatggacgaactgtttgagaattataatttaacaaaatagaaaaaaagttataactcactttctgagctttagtgtaatacagcttccgggtatcagttgcaggtactattctctctccaacagcctttttgacagatgcactaagaagtcgtactaagttagttccatcctcatcagtaagctcaactaaaggattttcatccaaaagcatagatataatacatttccagtcctgcaagcacagcacaaagtacatcctaagaaacaataacaaattccaaagtcaagaactagttgttctttttccatttttaattggatcctacagttgatccagttctaaacagatgaaatctattaattatataattacatcttctcccatcaaaggttcactacaattgtaccataaacatgcattgacaatttgggtcatcttgtttattttaactcaagtctattccaactacgactcaggttaaaattaaagttacaataaattgcttctatatattttgataataacaaaatctgtcagtcgaactcagcctgaggctgctagcggtcaagtgtgacaacatcctccctcctgggttctaacctcgtactataggttggtctaaaagctaataccttcatggccttcatgtactcccaaacatcatcaatcacataattgctttagaatttgatctgtagagaattctcttagtatctgcaacattctgcccagatggacctctgaagtgttgcttccttcacctgaaaaaaaaatgttttcaacaaaagtactgtatacatgagaggaaagataaattgagtcaatagaatatagtctaggtttcgtaccggattgggagctattaaacttttgggcaatcaagtgatcatacactaatgctccaatggcatgcctgatctctggtggctcatcaataagcaaatcgtataatggacccaaatcatcatcaggtagaagttgatgtctgcaccataccaccacccccacaaaaagaaatatacaaacttcaaaatgttttaacaaatctcaaggggaaccattaatctattacttgactaataaatttgcaaagatttactcataaattaccttaagagttgttttacaagacctattgcacatacagctacagtattgtcaatgtcatcagcaagctcaatcatccgattggaaaatctttcagtgaagagaccaagagttggcacattatcatcctcttcatacagattttgcaatgcaaggacagaagcttttctgacaccagcgttcttaaagatacagtaaaagaaaaaatgataaagtagaattgtcaagcagcaaataagcatgaatcaaaaactagtgtacagttcattagcaatttaaaactcaccttgtcatttagtgtccaaccaagatactttaagtacaaatcctgcaagaacagagaggggtatgacaaaatccatacacccaaagactctatgcaagacattcgaatatttggatccatgtctcgataacggtgcataaacaaccttcaaaagagcagcaggatttagtttaaaatcatggaagaaaaaagctaaagcactattttattttaatttttaaatatatatatatatatcgcggtctttaccaaaacatttaattcttcaaccccttaagcccaaatttggaaaatcttacccagtgaagattttgcgcatcatctcctctagcattgttatcttgtcatgagtcactgaaaaccttgtgtttagtgactcaacacgaggtccctcagctcttttctttttttcagcatctaactgcctacgagttgtttcacgttgagcactgaggacatcagcaacagttatgaaggatgtgacgagttggagtcccataatagaagcaacttgacgatagactcttggaggagtgctacattgtgtggaaatgggccaagttcaaagcgtaagctacatgaaaggtttggcttcaaatttaaactacaattgtttgagtactaaccatgacagagctattatataatccatgcacttgtcgaacaaaacctgatcaaagagaggcccatgttgactctcgagtaccaatgtgtgccagaacaattgaaggttatttttgaaattcttaaactccttcttttttgagctttggtaatcttcaacttccccctaaggtccaagagtcaagcaaaactttgggtacaaaattcaatggttttaaaatattaaattatgtgaggagatatgtaaaaaggaaaggaaatcaaatagtaataataataaaaaggcattgcaggatactcttctagcaagctcgaccagtgcaacaacaacatcatcgacatcaatctcatcaagaaattcgccttttatataatatttggcgccacaagcctgtagaattataagtatcaccaatcataaaatcagactacacaataaataagtgctaaactaataagtaattacattattttcttatacaagcaggtgacattccaactaaagaatgaattatgaaaggaaaattacatagatttttctatcaaactgtttagtaaaaacctatatttgtccctgagcaattaaaaagaaaattaattactctcgttttgcaaattattcaagtaatttatcggaacttccagattacctcaaacagcattgtcaagagttcaaccattgcagactttgaattcgtttcatattgctcaacccaaagcttgactgtttggttaatatattttccattgcctttaataacctctgccaataaataaataaaataatataactacagttgtcaaatctacacatcagatcccacaaagagtagtatctttatgtatacaaattattcatgtatgtttctgagtcaaaagtttatactacaaacataattaacctcaaagatcaaattttcctttaactctccacattcagcagtacccttttactgaataagtgaagcaggctaaaagatatctataacagcaattgccatactaacattccaattgaaactgagtcacaaatttcccaaaaatgttgtttgtattcactaaaatgcgattggaaagagtttccagaacaattaattaaatatgaaaatgaaaaaaaggaagaaaataatcaaaccattcgttaacaaatagttgctcgcactttcacagaaagtgtatttaagtgcaagtaacaagaaattactctgaactataatctaaaacaattttttttaaacccagacatataattttcaagtgaagaagtctagggttcaggggtagtagccaaaattaccaattaagttaggactagtgggttcggatgttccttcctgaagacgacttcgcttactattgggacgagtctcttcgaagtcattaggcgagccctcacgacccgcctgattactcgcatcgctaaccctttcattattttccccgccagtaccattgttcctattttctccttcgttctcagtctcttgcatttgaaccctatttcttttctgggtactcagaaatgtccaaattaggtcatattcaaatctaatttcactattataaactaaatctatacatagagagagatataggtgaactcacgaagcttttggctgatggatcaattgttggagcttgttcctccatgaccgagagattcttgagcacaattacaggtacgcaaacaaaactcccgccaaaagagaaaggaaaagcaagtgaaagtgaaaatggactcttggcaaaccaaaatatgtgtctcggagaaagcggttcgaagtcatctaatttatttacttattatttattttgtttttgcaaattttgataactttttttaattagttttttttttttaaaataaaatcatcatctttattaattgtaat

SEQ ID NO: 251535 - DNA, 781 bp, Cannabis indica
ggggaagcgaacaccaaatcgaccacgacatgcttcaactcttgcacgaggaccatcctcgtctttgctctagtctgcctccttcaaacgacagacattttgattcagttttctcgtccagccaaagaatgatggctcgtattaaacaaacaatgcgtaaagccaatgcatctgaccctcacgtgtcccagcacgccaccttgcccaacgctgaacaagatccacccgtgcaggaggagggggatcatgaaggggacgttgaggtctaggagatagaggagcagggcgatgtttgccctggtagtccttccaaggaagaggaagaggaggaggctgcaaccccaaactttgggggatataatgaggttgggagccaattgacgctgacggcaatgtcttggtcaaaggcgtgtggacttcgttactaaggaacttactgctgcggttcctcaaaggaggcagggtgcattgggtgctaggtgggtgagccctctatccaaggtcactgaggcacggttacgggatctcgatcaagatggctacctgggcgaattagactgttacattcctgcctataataatcgaaccacaaactctgagagggggatgtgtgcttggtcgggtgctcatgctaaacaaggggcactgctgcctttgcaccgaacttaggaatgtggcaaacttcttctgcctctgtccgacccaaatcactcccaagggcattaagtatctgtctaccctgttcattctctacgcctccaagaagtgggatatgccttct

SEQ ID NO: 251536 - DNA, 517 bp, Cannabis indica
ttatacttacaacccctaaaacacattcacgcaacacagacaacgactcgcatgcgagatctctaatgggctcgcatgtgaacccccaacacccaacatatgcatacacgacttgcatgcgagccccccatggactcgcatgtgagctcccatactcttcacacacacatgacaccccttccccacacacacgcgacttgcatgcgagccccatacacttgcacggtcgcaccaacacacacacacaacaccccttccccccacacacggctcgcatgtgagccccccatgggctcgcatccgagcccccatacactcgaccaacacacacacacacacacactaacacgtaaaacaacactcacacacgcccacggcttgcatgcgaggcccctacttgcaccaacacaccctcgcacacccatgcacatggcgctcatccacacatgtacaacctctccttcttacgcctgtgctttcatcgttggatcaccgcatgaccaatcattaaattgca

SEQ ID NO: 251537 - DNA, 855 bp, Cannabis indica
ggggcggttggggaggggaggggtaaggccgggtggggggcggtggtgttcacctggggcgggtgactttgttttgaatgtggatgccgctgtcactccgggtaggggctttgcgggttttggaggtgttatccgtggtgatgggggggtggtttgggcatcttgggcggttggcgccgtgggggattttcaggtggcggtggccgaactcctcgctctccgtgtgggtcttttatgggcttctagactgggtttttctgtggtgcgtgtggagtcagattcttctgtggtgtgctcttgggttaattctccagataatattcttatgtttaaaccaattgttgaggagattatttctctgttagctgctgttggtggtggttcttgttgtgccatttcgcgtgatgcgaatggtgtggcccacgcactagctaagtctgttactagttctgtaggggttaatgtgtggactgatgcttgtcctagatttttaagtgctcctgtaacagctgatttgatttgaattgaataacatactttctttacaaaaaaaaaaaaaaaaacaaaaaagaaaaaataaaaaactactccaggggaaaacattagttatgagttgccgagaaataatcaaaataattgattacgtgtcatttgtcatctctactactctcattatattatatcattttcaacaaaataacgtgccaccaaacacacgagacttggatattgtaatctttagggtgtctatgtcttttatcaaatacaagtttaatactttatattttaataatgcttatttaatattttgtatttttacaatcatacctatttagtaccctaaattcaattttt

SEQ ID NO: 251538 - DNA, 754 bp, Cannabis indica
attggttgatgtaaactttagatgagttttatgttgatctattaactatttgtgatgtacttgtatttgatcgttattcaacattcagctatttcagtgaagttgtattatacttttttaaaaaaaaaatgaaagaaagaaaacctatacatgacttgaattgttgactaaaatgtaccaaagttctttcttcatatcccaaggggcctaggtataaagtgtgggtagggccaagtttagaagaaaagcagcatagtaaggtctgaaagagaaaaaaaataaatggtttaaagcattttccaatttattttataaaaaaaggtctaaaagagaaaaaaaaaatagtctaaacctttttctgtttttggttaatttattttattggtcaaattgattccctcaatccaactttctcttttcttttcttccaagcattaagcataacttttaagatcactttttctagtttcttttcttttataaaacttccccaaatatgctaaaggagattcctttaagtattttattagagacaaaatcattgtgtgaggttttatttatttatttctttaattattgtcactaattaaataaatacatcgcaatcatgattaaaattgatgatattttccttgtaaaaaaattgatgatattttacaattgacaattctcaattcctaatcttagagcactcacaacaagtgagttataataactaaaaactaaaaaaaaaaaaataactaagagcttaaaa

SEQ ID NO: 251539 - DNA, 622 bp, Cannabis indica
taaaataatttccaacagtttgcagctaaacatttcattccccaccgattcccaagcatttttgcaaaaacaacacacagtagaggtaagagatttcttttaaaaagtgatacaacaataaggaggccattttgaatagctctccaaccaaatattttcactttcgaaggaagattcagccccagtaagatttccaccattgttcttgtgtttgtgaagatgaagattttgaaacttcagcacttgaacaggccagatggtaagctgattttactgtgaattctcctacagtgtagtgccaaaaccattcatctttagatgaatgaaaagagagaggaattgacagcatattatccacataaagaggaaagaaatcattctgcagttttgataaatcccattctctttctaaagagatataatttgaaaccatattagctgaattccctgagtagtataaaggcacaaagactgattgacctggcaccgacaggtttgaaagacatcttatggtagagctatcaccaaccttcaacctcaaacctttctttaagagctctttaccccaacatataccctgccaagtaagggaagactgttggaatttattttaccaggatct

SEQ ID NO: 251540 - DNA, 668 bp, Cannabis indica
ttttccatggttgtttgaagcttttcttcacttttaacattttttgatacccacattagattgtaatctttttggaagttaaatctgcatgatagttaaggatgtataatgtgtgattttctgacaaaaaagatctaattttgaccttcgttgtgattctttactctttgagtcatgaagaacacgaagaatgaattttgttcttaaaaaacaatttgatctgtaatacaccatggccgaccatacgtgccttgttcaagacctgtgcgaccatggggtattctcatgggagctggctagccatagaggtgtacccaaaagtatggccgacattagggtccctggccgaccctaggttgggtcatggaaccctagctggccctatctatgcttgggaatcctggctggccaaggcctagttccaagcaggtgaccaagtttttgttctcttttgaccttaacagaggttttgtcaaggccttgtaggcatatacaattgtaatctcatatgtggttcccttggaaactctatataagacttaatggtgagtctattatagtcgagtgtacaacttaaaatttgccatttgtttaatttgatgtacttgagacggtacttcgctgatacctagccttgcacgatataatttatatagcaagtacccttt

SEQ ID NO: 251541 - DNA, 636 bp, Cannabis indica
ttcacaagaacgcttgtcagcagtgcaaaaaagaaaactgccatcagctaacaacaagttagtaatagaaggcgcctgcctagaaattgcaatacccctcagaagctccttattttgaaaattttgaaggatagcagagagactttcagagcaaaggataaaaagataaggtgaaatgggatcaccctgtcgaaggccacgagtgggcttaagggacccatgaacttgaccatttatagagaaagaaatggaagcagtggtcaagcacctgaaaacgagggaaacaaaatgaacaggaaaattaaaatggaacacaaggtgtctcaaaaaatcccattcaacacggtcaaaagccttagccatgtctaactttaaagcagcccatccccgcttacccacagtctgatttttaacaacatgcacaagctcatatgcaataagaatattatcttggataatacgaccagacacaaatgcacgttgacaaggtgaaatgattttatccaagacttttttaatacgattagccagaatcttcgagatgactttataaatagtggtgcaaagactattgggtctaaaatctttaagagtatttacatgttgttttttagggatgagaacaatgagggtaga

SEQ ID NO: 251542 - DNA, 829 bp, Cannabis indica
tgaagctcattttttttgaattaattgttttagtttatgaacaatttagtttcaataaattagtttgagattttatttcctatttcatattattgcagacaattcattatgacatttttgaaattataaataaaattttctctttaagaggttttcattatgagttgcctttatgaattggactttataccaattatcttttatgtttatcatgtttgtatgtgtttttattttatcattgatacaaaatctatggtatattgttctctgcaaagagataataccacataaacacttagaatttaaattcaatatttatgaataattgttaactcttaagaaattattaagattttgtctaatataaagatcttttgacctaatagggatggaagatgttaagtaatatgtgcagttcaacaatcttttatatctattgaactctagattatatttataactccagaggatctctacaacacttaggggtggaagaagttattgacatatgtagttcaaatacttttaattttgaactctagactatactcaatataccacggtatttttatgccacacatattttgattagatatgaatgtaatataattaccaaaccaaaactttttcttgatccagtaattgttcaaattaacttgttaatatagttgttgaccgagattttcggcaactattagaatataattatattaaagagctgtaagaaagtgagatgaagatttttacgtggttggggcgttaatgagccttagtccacgagtctttgttattaatggatgtatttaatacagattccacacttgagaga

SEQ ID NO: 251543 - DNA, 592 bp, Cannabis indica
aaaaatgttgccacatatcattgagtttgagtgtaccattttggtgcttattttgtttgtatacatatcattacacttattaaaatagtactaaaactaaagtaaaatggtaggtttattatatatttaaaagtgaaaaaatgatatttttcaaaaatatatgtaaattaaattattatctttttagaagaagaaaaaagaatgatcttttgcattcttacattctactattagtgcaaattaatattgtaatatgaattttaatactgatttgcaccaataataaaatgtctcatcatatataatgttagcatgttaaaatgataaacaacaatgggagaagaattttgaacaactgttttagtccaattgaatatgttgtttagtttactctaattatgaatttctttaaatttagaggaatttttatttttattgtttttacagtataagtttacaaaaatataattcttttctaaaaaaaaacgttaatttatgtgaaaattttagaaaaaaatttagaaaaaatatggaaaaaataacataagatacatggttactctgttatggtaactgattacccctctagtta

SEQ ID NO: 251544 - DNA, 942 bp, Cannabis indica
aattactcataatgtcttagattaaagttttattaaaaaatatatcaatattaaaagtttggaatactaaagtagaaatagttgtatggattagaaattttggctacaatggatagaaaagataaactaatgaatagagttagttttttttttttctaaactttatcaaaattgagtatattaaggaagaaaagataaattctacctattaattgttatttatattttacttattttaccataaaattaaataaaatacaataaaagaattatgatattataaaatggtagtattaacaagttgtagtgtctccctttcaaagactctctccaatagtgctactagtactacagatagtcttgagcgctggactaaaccgacatacccaatgatcaaagttaatgtagatgcggcaacctttgctaatcagaaaagctttgggtggggttttgttgcaagagaccatgatggcagcttcttactggcctttcaatcaagcaagcttggttctgtgcgtgctgaaatcgttgaggcggtagcaataaaagaagcgctcagttggataaaagcaaacaactggcagaacgttcaagtggaatcagattgtcttaacgtcgtccatgccatcaacagcaaagtccatatgttttcttcatatggtagcattatcaacgactccaaacaactcctctatgttctttttaatgtttcaatctcttttgtaaaacgatccgcgaataatgtgacccattttcttacgagggactcttattctaaagctgattgtactgttagcaggacttctatacctactactttatcgtccttattattgaaggaccttgattaataaagatcttcttttcaaaaaaaaaaaaaacaagttggaagtgtaaaaatattaggacgaaaatattaattatttcattaacttgttggaa

SEQ ID NO: 251545 - DNA, 1028 bp, Cannabis indica
tgcgtgagatactacttgattgcgtacacttgcgtaataaacataaaattcgtaacaatcatatcagttaaacccagtgtatgataaatctaggaatatatatttattcacataatcttgattactttctactgtgctgacgacacaataaacaagaacataaatgtgataagggtttggatgaatttataaatcaaataaacatataaatgataacatgaaccaaatgacacattaaataagtggtgaaactacttctgtctctttattgatatttaaatgatagatgattacagtgaaatagagttttatttaagacattaagcccaacagaatccagcagtgccgcagtcgacaagctgtggcgctcaaacatggcatcagtacgcaactctacatatctaatcatggatcttacaaactcacgaagctcttcgtcagtcatataatggagctctcaatgaaagcactaattgttagataatagtcctcttcgagacatgacaaatctccaaaatgcactcttcgagacagtgccaatctcccaattgaaccaaagttctattttctcaatcaatccccaacaatagttacacaattacatatttatagacattcacactatttctaaattactaataagcccctatagcattttcatagtctaacacacgtagggcctcattttcttggagcgcatcatgcacaatcatggatctgattggtgggcgctcccttgatggacatgaggagctttctcagtcttggacttgcccctcatcttctgggataggtggcatgggacacttttcttggcgcctagaagttccctctccatgtggttgtgtagggacaaaggtccctataccaaggggttgattaacttcccccttgcgacttcaacatcttctttaaaaaatttcctcctggtactcatcaggattgttgtgaaaaaagtaaattaatgaattttccaaagggaaaataataaaatctccactgcggcactctcaatgaaaacaccaaat

SEQ ID NO: 251546 - DNA, 531 bp, Cannabis indica
ttgtttatcatttaaattctattagtttgatatatatgtctatcttgtgatcaatatttcttcaaattgtttgtcttaaaaagtttatcctctcttatttgtgcgttgattattacatttgcaacttcaaagagtgtcaccctttcaatacaaatactttcaatacccgtgacaaaattagaattgagacctttacagttttaagatttttcgatctatttgtgttatgacttaaaaaaatagataaagtttagtgcatacacacaactctagagttacaacagatataacattgataggaatttttaaccctctattaatattttgacttggatgattttatttggtttgacattcaacttgattaattttttttctttacttgaattgctagggactaacaataagctagttcatggttgtgattaatggtgaaaaatgcacacaaattaatcttaaaatttaaaataaaataaattaaaatcaatatttttatgaaatttatgagatatatttttatttttaaaatat

SEQ ID NO: 251547 - DNA, 560 bp, Cannabis indica
aaattatctgtgatttctatagtggggatgggcgggattggaaagactactcttgctcaacttgttttcaaggacgaaagagtcaacaaaatgtttgatgtgaaagtatggattactgtgggagatgacaaagttgactgcatgaaagtgatgagactaattgttgagaaggtcacttctgaaagatgtgaaattgaggagccgtatgatcttcaagaagaagtaaagaaggctttgagtgtgaagaagtttctttttgttgttgatgatgtttgggatgagaatcgtgccaagtgggatgtcttgaacaattgtttcaaatcgggaaaacatggaagtaagattgttgtgacaacacggagcacagttgttgcatcgattatgaaaacagggtcaacttatcaactaggaagaatgaatgaggctgctggttggcgattatttgcaaaacatgcttcacttgttgtagactcaaatgattactttgatctcaaagaagttggagaaaaaatagtcgataagtgtaagggtcttcctttagcaataaagtcaattggtga

SEQ ID NO: 251548 - DNA, 2100 bp, Cannabis indica
atgataccaaacatgcactaaatccttaaaaaattcatataaattataaacaataaaattgatgagttttttttttttttgtcagaattgaagagtccttagtttggatcattatagttgatgttatgtgagcatatttgtccaaaaaaagaaaaaaaaaactgagagagaacaaacattattatattttggatgcttctaaacgttttttaaaaagatgtatcaacatgcctttatttattttgacatctacaataatttttagtctaattttttttatagtcgtatatgttataataaatatttaaaattttgtgtaaaatttttaaaaatttggaatataaaagtaatattcaaacatatttcaaataaaaaagttttgtgtgcaattttcagcctgtgtaattttttagaaatttctcaaaactttattaaatattttaaattactataacataaataatcatgaaaaaatagattaaaaatattctcacgaggcagaaaatgtaattaaaaagttttttttatttttatattttaaagtagaattttttacaagtaagaatctaaagaaggttaccacgatttagtattaattaaatctaactgtcttcaagctatcaaattaatccacagaaagaagaagcgttgtcgagatgttaatattatacttgatcatgttcaccacttattgttgtttgataatgtggctggtatttcatttgtgtttaggggaatgtaatgtggttgcccttagccaattatatcttggtcaacaaactcgtgttatggattggggttaatcccttttgtgttaacttggctttagagtgagatttgcctaatcctatgtaaagacactggtttttaaatcaaccaaaactataataaatgaaaaaagaaataaaaaaaaatacatgagataattctctttctataaattaatgttactattttttgaatattaataaatatggaaattaccttatatattattttttaatttacagtttgtgttgctgtaccgattttggttacgaatatgaatttttgtgtcaaattcgataaaagattaaaaaaaaatactatttcaaagtataaaaataaaaaaaaaataaaaaaccatactaaataatatatattagcatttaaaagaaaaaagaaaatgacttttagataatttggttttatactaagataaatttatagaaatattacttctttttatgagaaaaacctaaaaattgtaatttacaatattatataagattgatataattgtagagagtgatttgagggtagttatcaatgctcttaacaggattaagtcaaggtgggagcatgaaaactatgtctccgtttgtattaatctctcttttactagttgtaatttttctaatattagtagaatctgtaattttactgcccataatgtggctaagtggccgttttcccactagaggtttggagatattccaattaattatctcgattcctgaatacctattttgtaaagaggtctaactatctctttttatctaatataaaaacgcttttcgatcttcaaaatatatatataaatatatatatatatatctatatatataatataaatgtgatatttaaacaagccatgaacaaaattagcaatctcattattcatttagatttttttttcgttacatggaaaaaagattggaataataatatatatgtttaacatggataattgcatgtgcagtaaaaaacaccaggaagggcacctgatggtgccacacatgcagattgggtaactggatacttggcaatgcatctttgttggcatccttggtcaaatcctccttgcttacatgagtaatctgatatcactgctctacatgtctctcccattaccactattttgctatcacctgcacacaataataaaaatttacaattacttataacaacaattatatatataataaaactaagaattataacatatatatctatatgactttaatcaccatgtatatagagaaggagataagattattacttagagcaacaagaacaaggatagcaactaagagaacattgcatacaccagatgacttg

SEQ ID NO: 251549 - DNA, 333 bp, Cannabis indica
tgatgtatgttatcatataaaagattgtgtttggaaattcaccgtgtgatatgaagttatatttaattgaaggtaattaataggttttctggtgtttggaaagtaagtaagtacataattgaaactaataggtataattatttttgcctcagttttgcatgggatactctcacaaaattgtacgaggctaaatcactacacatgcaacaaaatcttcttaaagaagatgatagagtcaagttcggtgacagatcacatcaacacccttaacacacctcatataaatatatagatttgttgatgattgatactataaatatataataataataa

SEQ ID NO: 251550 - DNA, 648 bp, Cannabis indica
ggctaaaaatagcctaacaaaattcccccaaactagatccttactcgccctcgagtaagactaagactactactaactatgctataaaataatcataatgctactgcctcaagttccatttccttccattgatcaaactagaatttcaattccacactttaacaattaattcggatgctcaccttatcacacaatgcacaaacacaaattgactttacaattgaaacaatgttataatggttttactctttccaatcattccagaaaccgatagccaatatgcttgcatgcttacctctctcgactaatgttgacaacatccttttcggaatcaataggtcttgcagggtaaaatttttggacttaagtatttggtaactgcaaagtgttcttggcgaaggatatcataagcacctttataacccccaagcttcccatatgttgaaatttctcgaagtgttcccacaactaaccacgattgagaaaattttttcttatgttttttttcattcacctgacatcactgaaatcttctatatttttcttcatttcattcacatttattatttttttcattcaagtgatgctgagtttacaatttttctttcacctttctcaagcacgtaagatttctttcttctatccttt

SEQ ID NO: 251551 - DNA, 728 bp, Cannabis indica
taaattacgctttattattcatttactcatattttcctaatcaactcgtaattagtttaagtaggattataatcctactctaatacccacttaatcacatatttaataaaatatgtctgattaaaatatcaatacatttttcgggatattacaagtatgtatcaggtggtgtacaaattaaaggctttaaaacctgtccttagagagatcaaccagaaaggtttttcggatgtgcaagctacatggatacaagcaaagcaactgctagatgaaacacaaagcaagctgcactctgatccattaaatgaaggcttacaggttcaagagttgaatgccaggaattcttttaacttagctcagcaagactaccactctttcctacaacagaaagccaagattagttggttgagggatggagacagcaactcagctctcttccatgcgagtataaaacaaagatacaggcagaatcaagttttttcaattgaaaatgaagctggggtaagggtttttgagccagaacaagttactgaggctttcattaattactacaagtcattgttgggttccaaaatggttagtaggaagaaagtgtcaaaccagattttgtgtagaggaccaaaagttactactgtgcaggctgagatgcttactaggccatttactatggaagatgtcaagaaagcagtatttgagatagaggggaataaagcaccagggccagatgg

SEQ ID NO: 251552 - DNA, 573 bp, Cannabis indica
agcttgctcgttaagatggcagcgatcaaagacatgtctaaacttgtccatttgagcctcattacgcaaagctccaccagatttatattgattggaaaggatttcattaaagtctccaattactaaccaaggcaataaaggtgcaacatcttttaatctctctaataaagtccaagtatggagacgattatgagcagccggggcaccataaaaatcagtaaagtgccaagtaggaccatatccacaagccatgtaacaatcaaaaatattcatattataatttaagagggttagatctacatcatctttccaaagtaacattagacctccactaagaccaacacgaaggactttaagtccattattaaaacataaagaactacgaaagtgagaaatagaattaggacctaattttgtttccataacaaacaacacacttggggattgctctttgacaagcaatttgagatgtcggaaagcactcgggttccccaaaccacgagagttccaacttatgattttcatggctggtcgtggagctgaaactcagacttcgcgtcgttgtcatttgca

SEQ ID NO: 251553 - DNA, 699 bp, Cannabis indica
ataggtagtgatggtgtaacaattatcattagatctaaaccattacaaaatagtttcatcacgattatcaagaacataacaatgataccattaaaattaacagtgtaaccttgatcacaaatttgactaatgctaaggagattagctcttagtccttcaacaaacattacgttcttaagcctgggtagaccttcaaaattaagagttcccatccctacgacttttctagctagaccattaccaaaagtaatttctccacattgcattagtctaatgttttcaaggtagtctttttcacctgtcatatccttggaacaaccactgtcaaaataacacatttgaaaagcaataaaattaaaacaagaagaaacaaccaaacattatttttgacaatttatttttatttttcaaaaacatatttatttctaaaatatttagaattaaacatgttttgtattttagtacatctagatcgaacgtgaccttttattctacaaaaatggcctataggaatgaatcgattcctatttcctttgggattgtcaaacttaccaaactgcttcttttttgtagcagtagtacattttactgtagaatcagaaatcctgcaaaataatgtcagaacatccaaaaactaaaattttatatttgagaaatttagtattttatttagattgagccttaacacaacccaaacca

SEQ ID NO: 251554 - DNA, 528 bp, Cannabis indica
aaacactctgttctgttctaataaggagagacaagaatcaaacctggccgtcgtcgtggctatgggaaaatcaccattaatggcgtcgagggtgagctcgtgtgggggagggaaatcggagtttcgggtatcttggtttggggattccgattttgtggtctgactttagtgggctggagctcttggtccgtcgacggtgccggcggtgcgcaagcagagaggaagagagaaatataaggattttcaaagaagaagaagaatctagtatacaaatgagcaagagttgcccaaaaaccaaactgaccagagtagctctcccaagagcgcttttgtttccttgaccaacaccaaccatttcacaatccatggctatggcatctgttacactgtcaaaaaatttataagatcagattctcaaaagcatgacattttctttttgtcctttcgaaagaagtgatagtccaagctaaaaacaagattactagaaaagagagtgactgaaataacctaaaatcatcattaacagga

SEQ ID NO: 251555 - DNA, 714 bp, Cannabis indica
taactgttttttaataaaggacaaaaattactaatgggtgattctataatgcacccccctaagaggggatgtattgatgcaccctttatttgtttcagcatcccgaaaaaaaatttagtctaattttttttttcatattcatgtacgttataactatttaagatatcctataaaattttgagaaattcagaataatttacaatataaaaaataatattcaaacaatccattttatacgcgtataaaataaaatagtagtcacgcgtgaaacacattatttgaatgtagttttcggcgtgttaaacattttcgaatttcttaaaactttgctggatgtcttaaataactataatttacatgaccatgagaaaaaatttgactaaaaaattatttcgaattctaaaatgaatagagatatatcgatgcatccctttttaagggggtgtattatagaattttctaatactaattattattctatattaaattgagaatctcaattacttttgcgtaattctacaatgcactcccttaaaaggggtgtactgatgcacccttatcgatttcagtatctaaaatttttttaatttaatttttttttcattatttatttatgttatagttatttaagatatcctacacaattttgaaaaattcagaataatttacaatatagaaagtagtgttcaaacaatctatttcacacacgtataa

SEQ ID NO: 251556 - DNA, 647 bp, Cannabis indica
caaaatattttaaagggcagagagaggattcgcttcaggtcggcctattgctttggaaggcgaataacatgagaatggacacgcgtcacatgactaagcgaagaaagaagtcaagaagtccacgtacaacctggagtttccatgcaaacttgggtggtaaatattatcccaaaatcaccctaatgatacggcatagaataatgtgacacgtggcaagtatagaaggggttgtacagatggaatataatcggagagcctgcctgaataggtgttgggcaaaatatttgtggaatagggcccttcagcatcagacatcaatgggcgaagcatgctagctatcctgccgagcaaccaagaagatacctcacggacgaagtgtccaaccagtgaactaacagaggataatgtctagattcatcctaataacttaatcccttgcaaataggtcaatcaagacgcctataagtgtgggattgcgagaatcaggggaaattgaggattttgtgggattgactctatcaaatattaaatactttatcctgtaatttaatgtaaaattgctacatcctatacctataaatagtgaatcatattcactatttagcggactgaattttgcattctcaagagagctattacattgtcaa

SEQ ID NO: 251557 - DNA, 569 bp, Cannabis indica
attaaactaatgtttcatataaacaattaatttataattgaaaaaaaaaaaacaatcataatgagtaacaaatgctccaattatgctatagggtagttattttaactaatctgaacttagaaaataaaaggtgcacataacttttattaaaaaagtgtagaggattatttgaaactttattatattgtttcattaattgagtgttcagccgatagttcacgcctaggacattggcacaggggctcatccaagtgacttgatatttggactttggctttgataagtaataatgttattttattattttattattatatttttattattaatttgtaaaataagtaatttgcggtataaatatttaaatttagctctcaattataaataaatacttcaatttaatttttgacggtaataatacttaggtacctgaccgttaagtgttatgttaatagtcacgtgacagtccttgattagtcaaagttattataccaataataaattatatgtgaataatgacttaacaattaatggtcaggttttaacagaagttcataaatataacttaa

SEQ ID NO: 251558 - DNA, 1138 bp, Cannabis indica
ttaatggatttcgatcatggaaaaaagtgagaggaaaaaattgtgcatttttagcacatattggagacgatataaattcacctcatagaaatgctgagaaagcagttgcagatctcatgaaccaaccaacacatattggaagaaggtttgcgaacttcacatcacaagaaatcgctgacaatagacttcgtttgaaaacatcaattgaggggattaggtggctagcatttcaagcatgcccttttagaggtcacaatgaatctaaaacttcaattaatcggggaaactttttagagttattaagtttcataacttcctataatgataaggtagcagaagttttggataaagctccacgaaatgcaacatatacatcaccaacaacgcaaaaacaagttttgcatgtcttgggaaataaagtgagaaacgcgattcgtgaagaaattggtgatgcaaaattttcagtaatagttgatgaagcacgagatgaatctaagaaagagcaaatgtcaattgttttgagatttgttgataaagatgggtatgtgcaagaacgttttttcgggcttattcatgtcaaagacactgctgctttaacattaaaagaaggtattttctctatactctctaattatagtcttgatgttcaatctattcgtgggcaaggttatgatggcgcaagtaacatgcgtggacaatggaatggtttgcaagctttaatttcaagtgaatgtccttatgcttactatgttcattattttgcacatcgttttcaattggcgttagttgctgcatctagagaagttattcccgtcgatcaacccatcacaaaagaactctaaggttaagcgatcttgacctgggtcaagttcaagatgggtgacctcttgggaagtttttttagaaagcgtgcaagtgaggacaaagcacactggaaacacttgtgttggtttgtagggtaagtcatcaatccaggaagcagccagattggtgtacttgtgtataagagacattcattccgtgggtgtaaggacccaatggaggcttgaagcggggacgttacaaatggtatcagagccttgacccagccggaagtgtggtcgacgaggacgtcggaccccgtaagggggtgattgtg

SEQ ID NO: 251559 - DNA, 1746 bp, Cannabis indica
aaatctgggaaatagtgaagagtgatgttatgaaccaagtttttcaattctttgcgaatggcagtattcctgatggactgaatgacacgaatattgtattgattccaaaaaagaaacagcctacttcgatgggtgaccttcggcccatatccttgtgcaacgtcttgtataagatagtgtctaaggtgcttgcgaattgtttaagagaagtgttgcctcagatcatatcctcaaatcaatctgcgttcatcctgggacaccttattactgataatattatgatagcgttagaggttatgcactatcttaaaagaaagcgtaaaggtaaagaaggctatatggcgctcaaactggatcttagtaaagcttatgatcgggtggagtggggctttcttcaagatatgatgagtaaaatgggattcgacttgcggttcattgatattattattgctacggttagctctgtgaggtataaaataattcatggcggacatgagctgggaccgattgttcctgggaggggtattaaacaaggtgatcctctatcaccttacttatttcttatttgtgctaagggcttctcatctttgatacggaagttcgagcgggatggtaggcttagaggttgcaaggttgctaatggtacttcggttatatctcatatgttttttgcagatgatagttatgtttattgtcatgcaaatgatagagaggcttcgaatatattacatctgcttcaactatttgagatctcttctggtcaacaagttaatttcagtaagtcctgttttcttcagtactaatgtgcctaatgctactcgagactgattgtgtgggattcttagaatgagacttgttgatgaaagtagtccttatcttggcctcccttgtgtcatgggaagaaaaaaggatgccattttggggtttttgaaagataaaatgcagaagcgcaagcgcattcaaagttgggaggatcgtttcttgtctaccgctgggcgtgaagttctaataaaaactgtagcgcaagctttgcccagttttgctatgtctatgttcttattgcctctgagaacttgttcacatttggaaagccttatgtctaagtattggtggagctcgagtagtaggaagggtgtgagctggtttagttggaggaaactatgcaaacataagaactctggtgggatgggttttcggagtttgcgtgattataacctatctttgttgggtaagcaaggttggcggttgcttctgtaccaggattctcttgtgggtcggatatataaggctcgatattttcctaactgttcattcttggaggccgggttgggtggcaatccgagctttatatggcgcagtgtctttgagtcacaagcgctgctcagggacggtacccgtaggagaataggacctggttcatctactgcggtgcttaacacaccttggcttttgtctgaggccaacccgtgtgtggtatctactcatccggcactggcgaattgtaaagtgtctcaactcatgaagccagatagtagacaatgggacttggaacttattgaggacttgtttggtccccgtgatgttgagctcatcaaacaggtgcctttgagtgttaatcttgcgagtgatttagttttggaataaggatccaactggttttttcactgtcaaaagttcctataatcacttacagtcagtcaatggtagttggaactcctccattgaggatgatgtttggaagatgtt

SEQ ID NO: 251560 - DNA, 533 bp, Cannabis indica
tttcagcccatgtcttccctctctgtgactacttcgaagggagtctcttgaaggtgtaatcaaccacttctcggcttccatgagaaaaagtgatggggttgttcgtggaaacccaattgtatgactgaccccaaatgattcctctgtgatatggaccgtgtgggggaaagcataggctcttgggacatagcaggcttttggttcacggagggaagctggggctgcatcctttcacatacagttttccctacacagaggtcttttttgataagcaagagtcatgctaaattttgtactggcaaacttttagctttcactaggaaaggctaaaagtgcaaaaaattcagacactggcttcacttgcaagagctggagggtgaaacattttagggcgtgcgagagtcatgttgaatttttatgaagcaagcttcggcttccgtgaagcaaagctaaagttgcataataattcgagcttagacttcacttgaaaagttcaataggagaaaactacacagggagtaaggcagacttca

SEQ ID NO: 251561 - DNA, 1096 bp, Cannabis indica
aaaaaaaagattaaaaaaaaacttaatttttcgtagtttagaatatgtgggccgcaacactaccttgtagtgccgcgacgcttgaagcacttttggtagcgagcttcctggtgcgaggactgataatattttggtcataactctttcaatattactcggaattgggcgattcaagatattttagaaagcttaaagagaggtctagagcttttattaacaacatttttcctcaaagtgaatgcatcaaagtcgaaaatttgcttgaacttcagacttaattttcaatcacaaacgaagcgtgttgagcatcaaaacttagaatttttcaccacttatatcttagaactccaaattccatgataattcatcatattcatctcatttaacatgtcttttctcatttttaattcacatttttaaattgaatgtgatgtagataaccatcacacaccacagggcaatgtagatatttttctaagttctttttgtatatgcatatgcatatactttgtttataattgtatacatgcatcaaagtctcaaagatgaagcattacaagagcattaacagcttcgtcatttatattgggttgaaaaataagaaattgttgaagcctaaggtctcttaactttggcattttaatctgtcatgtggttgattctgttggactattcttgatctattaattgtttatatttgtactttacatatatggggtccaacacaacacttacatcagatatgagagagttattgatattctatgaagtaagctataagagtttcaaattaagtaaatatttaggcttttgtgtatgacttcgattattgtacattttcattcgtcattttttatatttttaattttactggtgcaaaaataaattttgtcaattatataagatgtttataagagtatggaaaagtataaaagctaaaaatgccaaaaataaaacaaaacgagtagggatgtaatatttattagagaggtcccacccaaatattgtattattataatttaatagaatacattgcccttatacagggctccaaacgagtccaaaaagaactcttttcttttgaaagtttgggaat

SEQ ID NO: 251562 - DNA, 651 bp, Cannabis indica
gatcaatgttgatttggacaattgtaccaatagtactcgcatgtatatacttagttttttcaaaattatctaagtatagagggatatatatgtatattgatatattttctttagcttaaattgtactactgattatcaattgaatccttaaatttttaaatttttcattattttgcgcacttgtatacttagaaattttgaaaattccacttagaatatgaacattgaaatgttcatacattgccacaccaagctgtgaaagatggtcgcataaataaaactgcgacaaagcgaatatacatttaaaagcaccaaattgcaattattaatgcataaaaatgcacaataagtatgaaaatacttaaaagttttgaaacaaaaggatatcctcaaaggatatattgttcatataaaccaacatcaaaagagaaacataattgtcttaaaaactaagtacaaaaggcgagtacctgtgtacttctcaaaaagagtttaaataaaaaaggaaataaattaagtactaggggcattgagatctttcgcgatcttatcggtaccatccgcaacttcggaaatatttgtgacctcagcctcctttggctaaaggtttccgcctagcccttgggtcacaactgttggaattattttacc

SEQ ID NO: 251563 - DNA, 612 bp, Cannabis indica
taaaataatttccaacatcaaggccatactaatactctgcatcataatcaggaatagctctgtgttgccgtgaacttttcatttgaagaacataggcgtctattcactgaatggagggataaagaagtggaaacattgagggctcaacgagcagccattgacgactgaacaagatacgccaccgtactgatacaaagagcctaccaagctaccaatcagcaacgtataactagcaccccgccaggcgagtcaaacgaagatccagctgggaacgcatctcaaactctaaacggtcagccgcccaatcctcggccacaggtttcatctgtgggccaagcggtaggtggccagaccttatctagtaactcgtcaggaggggttatacctaataactccacccagaccaatggtttcggccaagtgcttggccaaaccaaccagtcactgagacaacttaatgcatctgtatttaatagactcggaacagctcatgatctcagagaagatctaaatagaaggaaagggttagacgaacagtatgtctcaccagccacccagcccgggactcgtgctcaaaatccaactcaaagagatcttgatgtgaccctggtt

SEQ ID NO: 251564 - DNA, 926 bp, Cannabis indica
agttagaatggatttggttaatccacacctaactaatttctgtaactaacctaactaacaaatacagaagcaaaaacagaagccctagatctatatatacctgcatccaagcccagatctacacggttgagtgatttcttcaagatccagggtttgaacacttgaagaagtagagatcgatgctcgtacatgcacaagaacaagaagaaagttagtacagttagagagagagggataaaacacactatatgtaataactaaagagattaccagtcaaaaaccatacctgtgacttggaatctccatctttgtatatctgaaccatctttgatagtggaatcgagctctcaaattcgaggagcagctcaaacggagacgtagccaatttgttggtgaacttcgggaaaatctggtgtagtctaaactctactctttgtgattttgtgtgtgtggttgtgtatagatcagatcattctagatttgatctttggtttgtgtttgatttggtttttctgggttgattaaggtctagcttcgattttctcagagagaaactctctgctagggtttcgagcaagacaaagggtgagggattgaatgagaggttctcgaatccttctttggttttgttcaaagacaaaacggagttgttttgactctgctgatcttgaaaagtcagggatagggaaaggtctaaattgaccttggtaaaattgattagtttatttgttggtgtagggcaaaattgtaaaaggcaattaaaaaattcctacaacactcatcaataattggttgtgagatggaaccccataattctcaacactacaaaaaaaaaaaaaaaaaaaaaaaaaaaacgtttttttcttagaacaaaaatcatatctttcattatattaatattcaaaatgtgcacctttgttctatct

SEQ ID NO: 251565 - DNA, 1050 bp, Cannabis indica
gacatgtattccatgccaagaacaaataagagaggagacatcgggtctccctgtctcaaatcccttttggattcaaagaatccatacagttcaccattaattagtaaggagaattttagagttttgacacataccatgataagctcaataatcttttgaggaaagtgaaaggcagcaagtatttcttcaaggaagttccaatccactgtgtcatacgctttcctcaagttaattttgatcatgcaactaggtttacagaggagcacaagcaaatattgaatcaaccatttactagacttgatgtaaagaccgcttatattaacactttggattaataaataactagggtttattcatgagattaaatattatttataatattgcatattggtgaaaatttatttaattgcaatatatgttaaatatgatatatgtgaatttctcattttctgtgattgtgttcggaagctgtggaaagcgacgttgggcattcagagagtcgcattttatatgttttagaatattattactggggtagcattgttaagtattggaggagttggaatttttggggtttgaaaatgacttatttacccttgatggacatggtagcttttattttaatcaaggggtcatataggtcttttactagagggcttttgtctttatggacattattatgagggttaatatattaacctaagtgtttaatattatagagatttattttaaagttgaaggaaaaacctagaatcctctaagtccctctctttctctttcgaacaccaaggggaccagctgggaattggctgtggttagctcgaattttgtgtgatcttagctaattagaggactccaattcaaggtatataactctagcctcttctccatgattttccttagctcaaagtaagttttatgcatgaactttggtgtttaggttgctgtaggttttggggtggtttgatttcgtgtcttggggttaggttgggtgtatgttgtttgatttacgctgacttggtaagctttgatgaggtttggctaaggttt

SEQ ID NO: 251566 - DNA, 616 bp, Cannabis indica
ggggaacccaagcactagtcggctgagatgtgttctcagtgcagatgaagcttgtaaatcattgtgtgctttactactttattttcaattcgagtcttgaatgcaagtgttgaaatcaatcaatgcaaagataaacaactcggtaatttgagtcttgaaaattgacaagtagtactttcaattggtatcagagcttgaaattttctaaaaatttatgttagatcctagacttgtcagattcttgattcttgaaatctcttgatacttgtttgaggattgattctgtcaccactaaccacctttgagttctttctcgaagaactacaaaacaagagtgtgtttgttctttgttcctttgtgtagaatggaaatgtttagagaaggagggtcaacctcgagacctccgatgttggaaggtgctaactatccatactggaagatgaagatgcgtgatttcttgagagctcttgatgaaggagtatggatgtccatagaagaagggtggtcgaaacaacgttaatggagaatgaaatagttatccccaaacccatgagccgatggaccacagacgaaatggaaagggctaactgaactcaaaggccctacatgctctgtt

SEQ ID NO: 251567 - DNA, 776 bp, Cannabis indica
attatttattattttagattatattaattaaatgtataactaagcccaccttaaaattcaatactaggtccgccactgttgtgacatgtttgggtcgtttctcataaaaaaaaaaaaagataatttgtggattaaatgggtgtgcaatgtatattaaacttaccaatattttgatttgtgtgctaatttattgcaattggtaaagtttaatatcactcaagtctgtggtgtgttggctcctccgtaggccaactgccattgggtttgttttgtttggaataggcttgcggtttcaaggcacatgtttattttttggctagtaagccagagatacttgctcagtttggattttgctttgagaagatgtgtttgatctgtggtgagcatacttagtaaaagatgttttgatgggatgaaaaaaaaaggttcctctattttaaatcaagtgtgaactattacttctactattaatagaaataaaggtgatgtatatgagaggataatgaatgttatattcgaaggaattaatcaaaaaaataataaggactggtttgagaatatctcttatgagtgattcttgtatagccttgattattttgaagtttggatgattagtaaagaagattcaacttattcataaatactctttttttttgtacgttcatcactataaaaaatagaataattagtaaattttacccataaattttcgacaatattaattttacctcctaaattatacggcttgttaagaatcccctgaacttttacattta

SEQ ID NO: 251568 - DNA, 983 bp, Cannabis indica
cctgatttggaagcattccaaaatagtatgtccgggccttcttgtaacggtttgatcttcaagatctcattagcaatctcatcttcgaagcaatctctgatgaggttttcattccacgatcgggttcctttggagaacaaatctctgactttccatagagcctggttacgaacaaattgaaagtgttccttgatatctgcaggattacgcctcggaatccaaggcctatcccataattcgcactctccttcagcaattaaaactcccgcactctccacacatagtttcctagcatgtagcagacttttccacactcttgagttcgtatcatgttgttccacttgccaagcgttaactttgaacaatagtttatagtttatgtttagataatcttaagaacatattacagtttatttataaattatattatttagatatacataataataatctcacctaataaataataacatttttctcttttattatataacttttatataaattagaaaatacctaacataaaatttaatatacgtgcctcgcacatagctttttactagtatataaaaaagtgactatctaactatttttattaatttaacagatatattttaaaaataaaaaaatattccattaaatttaacgaatatttttagtactgtttgttttataaatatataaatagtaggggtgttcgcggtgcggatggtgcagtttttgactattttttcaaaccaacccgcacatgcggtttttcaaatttcccaaaccgcacccgcaccgtaaaattaaaaacccgcaaaaactgcaccgcaaaaaatagtgtggtgcgttgcggtttttgtggtttatgcggtttagactatcactaaataattaaactgacacaaatacagcaaactttgagcaaaacttgtcaaaataccataagacttgaaaataaatatgaaaaaaaaaaattaagtgtcaacaatacaata

SEQ ID NO: 251569 - DNA, 574 bp, Cannabis indica
tccaataaaagtactaccaactagatagtgattacaaatttgtaaataaaatctaatatttacataatcatcaattatgattttcaatggccttcttctcctttggtccctggtatttctttgtcctgtttattgccaaaattcaaaacaaaaaaaatttcaagttatttaaaataaataagcataaaacaagaatattattataattataaattgacaacaatcaaagaaattttttattagtaccaaaataaaaaataacaacaacatagtctaaggaccaaaaaacttaaaagactacaagttacataaatcacacatacacacacaaatacaaataatacattaatcaaaccaaagagtataatacatttcttctaatttctcaatcaagcaaaaaaatatatatttatcaaatatcataaatattacattaactaaaagaatatgacagatttttttttttgagataaaatgctctatgacaaagaactcaaaacactacactattatgatttgatagaaaaaaaaatatggaaaagaataattatcgtgtaataacttaataagatca

SEQ ID NO: 251570 - DNA, 2632 bp, Cannabis indica
ctctggagaaacagtagggtggaggaagtcacctgggagttggagtccgacataggggctcaatatccatagttgttcaagttagattttggggatgaaatccttttaacgggggataattgtaaagaccgcttaattttaatatgataaattagcaaataattagggcttaattatgaaattggatttctatttatgatttatgaatttatggagatgtatttgaattctaggtgtgttatttacgttatacatgaaatttcatgttttcatgttttatgtcggcaatattggaacacgatgtttggccaatagaatcacattttcttatgatttagtattttagtaatagcagagcaacctagatagacattgggaatgtcgaaattatttgagattgtggaattgaccaaactacccttaggcagcatagaggcttttagtataagtagggacaaaatagtctttttgccatgtgttgttatttgtcctttagtgatatactattagatctattaagcagaaggttatttgaggtgtttattagataaatattagattttatttgaagtattcaaagttagaaattaggaagaaaaatcacatttcttcttcttctccttttctctctcgagcacttgggaaccaacagcttttggaggatttctttagttgaatttagggttttctagctagtctttagtgattcaaatcaaggtaaaattctctagcctctctcttagtaatttcttaagttttagtgaatcaattatgcatgattttagagttagggttttgtgttgtttaatggtgtttgattttgtgttctggtattatgttgaggttatttaagctctattgtgttggatttgttagttgttgtggtgattgagtaaggtttgagtttatgaactcaagttttgctctcaaatggtggtttttgctacattggttgttggttgattttattgcatagattctattcattatggtgtaactaggtactctggaaggtttggtagcatttagaatcgtattgaatggtttaaaaggatttttgtgtttcatgcactgaattgatcggccggtttagtgggacctgtaggaattggaattctagtttttcctatttttgcgatatttatggtattgtcatgttatccattgatagggaaacttttagtttcaattttaagtccctaaaaagtgatttagcgtgtcactcaccagttttacgaatattgtgatttaagggcctataaatcgtcaagtagctgttccactcaggttgaccggtacacgtgaatttgaaaacgaggtaagattagtataatggtttcatatatgtatacatgtttagcgtacatgttagttgccgtcaaaatagcatatcagggtatcaatgaggtatacatagagttgcaccgaggtaccaataaatatatgttaggaaaatcagtggccatcagattagcatatcaaggtatcagtgaagtgtacatagagttgcacagagatgccaatatatatatatgctaggcctccagatagtatgaattaactgttaccacatcagtaggactagagtactgagtatagactggattcgtagttagtcatactctgtcgagaacgttcctgacctagttatcaaattgtaattaggtgtatgggcgcctagttacggtctaaatatatatatatgtatttatatttatgattatactttttttaccgagtttgtcgactcacagttattacatgtatgtgcaggtaaaagctagaactgaaccattgtgagtctaaagctaaggatgaagaatgtacatatcaagacggttagacctggagcattcagggtcttcgggacgatgttggctcactttgctaatcgctagatgaccacttttgaagtttaaatattttgtaacttttaaaatgggatcctagtttatgtaaattattatgtttaattattaaagtaaaattatttaataaagttttaattactcacgattttaaataaactcgttgattagcaacgagctacatagtaaatataaaattatgataacacgcctaaactagtagggtgttacaaaaatactaaaataactaaaaacaaataaaattataataaaaaaaattaacactaaaaataaaaagtttatgaaaaaataactaacactaaaaattatatccagcaaccagtaacattaaagattatatctagtaactagtaacactaaaataactaactttaaagattatatctagtaactagtaacactaaaataactaactttaaagattatgtctagtaactaataatactaagtatatttttgttattttttctttatgtcatcattatttccatcatcattgagaattatttggtttgttcttctttttttgttgataatatcacaataatcttgatcaaagtcttccaaatgattttcttgatcttttttgttttctttctttctttaattcatgttctggtttttatttctcattcgggtaaaaaaaattgacacagtaaaattttcaagcccttatttcaaattgtactcattttacttcagcttgtaaataaaattgttcccacaaaacctttgaatctcta

SEQ ID NO: 251571 - DNA, 487 bp, Cannabis indica
gttttaatttttttacacttaaccccttatatttttttgtagcaaaattcctttatgttttaaatttacttttctttgtaaatttgatgcgtcggttaaatatcaccattaaatatcagttggatgaacaccgtttacacatgtgtatacgtgaaagtaaaatcgaagtcaatacaataattattcagttggcattttaacagtgatattcagcttacaccttaaatttacaaagaaaagtaaacataaaaagattttgctacaatttagagattgatttttaattttcttttttatcttacacacatttaagttatgtttccttaagtattgtaacatcaatttttagtttatttttggattaacttaagaacatatttaaattatcaagctttcttaaatactaatatattgtatccgatatttacttttaattgtcaaaattataaattatattatttagatacacataataataatctcacct

SEQ ID NO: 251572 - DNA, 890 bp, Cannabis indica
cctttactccttccaaaatgattcaagagatgaagaatcaagcaaagaaaatcaaccctagtgcagctccttagggttcgggtagaagaaagaaaaggaagagagaggttttgtaattttttttgtaattttccttttattcatctaataactatgcatatatatgttcttattaaataaaccttatattcagcatttatccaataatacaagaataataacaaacactttaatgaccattttgcccttttcacaattttaaacttaaaataaattcctagggtaattcagtaattttaactaatccataaaactgacattctaaaattataaattagtctagaatacttccaaaataatccatcccatattgtcgtgacattactaaccacaccatcaaatttccacagtcgccaggcccgaaaatattttatttcaaaaatggtattgacgatacccacatatcccaaaataatctccgttattaataaattacgctttatttaatcatttaataaattcacactaattactctaagtaagatcataatcttactccattaccaaaataattacatatttaataaaatatgttcaattaaatactatattattttccgagatattacaactatcccctccttatagaaatttcgtcctcgaaatttattcacacaactcgggacacagctcccgcaactgcgactttaactcccaaatcttatttcaatcttgttgttctttcacagcactataattagcgatatagtcattattccgcaatactttctcttttctattcaaaaatctgaaccgattctttctcatatgacaagtgtgtttgaaatttaatattcttgtaactccgtatatggatcgcttctatctca

SEQ ID NO: 251573 - DNA, 1109 bp, Cannabis indica
acactttgaaatgtttgaatgcagcaagagcatcagattttgtgttttaagtggatagagccaagtgtgcctactatagtcatctatgaaagtggatagtaaaacctgaagttagtgtgtgaagcaataggggcaggtccccataggtcagtgtgtatcaattcgaggacagtggaggctctagaattagaactttttaaagggtaaagcatgtgactttccaaattgacaagcatcacaaaataaaacactttcattcatagcaggttttacattactagacttcataacttgactcaagacaactttagacggatgaccaagccttctatgccatagatcggacatagaaggagatacactactgttatttgactcgatattagtggctgctgtaaaggaaaacggttgactaagactaacatggttggtattgtgattggtctttgtagtagtcagctggtataggccgtctttaagcaccccttgtagaaccaccctctttgtcacctggtccttcacacaacaaaaagtaggaaagaattcaatcgacacattgttatctctagtaagtttcgatacactgataaggttcttagagatagatggaacaagaagcatatccttaagaaataaagatctagatgcattagctttgagtaaaccagtaccaacatgagaaatgtttagttgattaccatcaccaatggttatcttttccttaccaccatagggagttttggagctcatttgtccctcatcggatgtaaggtggttgctcgcaccactatcggcgtaccaagtttcatcattcaaagtctgaggagtggcaataagagcattgaattgtttgtccagatttggttcggctggtgcagatggttgctgtcccataaaattctcatcatatcgattatagcaaatcgcagctgaatggccgtattttccacacacctggcacgttggttttggtccccctccaaaccggcctgacctgcctcgacctctttgactacctcttcctcttgctcctggatttggtgagtttcctctgccattttgctggtgtgagttattgtaccgagaaccattgttatgagcaggtttct

SEQ ID NO: 251574 - DNA, 609 bp, Cannabis indica
attacattgaaatagagttttatctagggcataaaacccaacatatagctcattatcaaaacctttcctttgttgctagctgttactagagaaagtgaaactgaataaatctctctaattgggttgaaaaaataacattaagaaaaattaagaaaataatgtatggcttgaaaaaaattaaacttatctttgaagcttcttgagaaaaccaaagtaaccatttatcgaagttaaactatttagtctaacttttagatctctcttctaaagcaggaaaatttaagcaataaaactgcctttgatggctctataacctactaactcccaatcaataaatctactcctgtcaaaatgtaataagtacattctattaattgagaagaactcaataaataaataaataaactatattacaaaaaaactcaaattaaacttttaaaggaagacttatctgataaattctatgtgattccttcataagagccttgagagtaggatatgtcaaaatgacataatattttcactaaagatatcaaaggcaacaaatagtattttatatggagcgaataaagtgtcactgatacttcacatcatgttgggttttatgcc

SEQ ID NO: 251575 - DNA, 708 bp, Cannabis indica
tttttttaaaaaaaaatttacttctctgctctaataatttattttttaaaattgaacttcaaaagaaaaacaaaataaatattcattaaaatgataaaataaataaactaatttcctacaatagagtttattgtattacagtgaaactgaaagtcactacttcataattggttaaaaaatttccttatacaatagggtaaaaacaagccgcccacagccgcaccatagataatccagatatataaggcaagattgtagtattaaatatataaataaaatacaaacactccaccataattttagtacagtttttgttctttagtttgtgattggtctaatttattatcctatgctatgtgaaaaaagctaaaggacctattataaaataatcctataatcatatataaaagtatataaaaagatatagatacaccatttttgataatatatatatagttttattatatatgaatttaagtctcacaattatatataataatataacaagtatattattatttttccatacttaatataacttgttttaatttaaaaatacatttagtaaattatttaattaatattaataaaattaattaagtatattattcttaaaatcaatatgagggttttttttttctttaagaaactacatagccatattattattaattttgataatattaaattaaactccgtcaaatttta

SEQ ID NO: 251576 - DNA, 575 bp, Cannabis indica
cataaaacccaacagaaaattaccatgaaacactcaaactgaaggaaacaactcaaacctagcatatatttgaaaatatccatagacattgatatccatgtccatggaaatttctgaaatttctaaattcatggatattatttatttattatatatataaaattagaatatgaattaaagtgatgcatgtagagaattcatatcatataactaataattttaaactttgtaaagttattttggtattaatattttttaatgtgtcaaatattatcatattcattttatatgatggtgtaatcaggagaatttatatatcataatatctaaagtatttagtttggtgtaatggaaaggtaataggaatagtaatggtaatttaattaaataagaatggtaataggaattgattacaatatttggtttgtagttggaataaaaattgtaatcaaaattattgtgtttggttttttatgagtatgaaatagaataaatttttgattcaccgaaataactctttcttttatttatatttataaaatatataagaaaaagggtaatatagacatttgact

SEQ ID NO: 251577 - DNA, 533 bp, Cannabis indica
ccttgatttaggaaaaactaatcatgcgagtcctaataattacacacaagcacgtatttggggtgaaaagtattttggtaaaaattttaacaggttagttaaggtgaaaactaaagttgatcccaataatttttttagaaacgaacaaagtatcccacctcttccaccgcatcatcattaattatctttaaatagatatatttcccttatcaattagttaatcattataccatacatacatttattgtatatagtttatctactcatattatgtatgctcccaagtatgaaaatctacattagaactgtgtagacaatcataagatatatttaataaaataaattgtctttcttatttcaatagcaaataaaataatattattttagcttatatgtttatggaacaattttattttacatgtttatggattagaacattataatatatttattattaaaatttttggtacatgttattaaaaagatagttgaagttttatagtaaaagaatattgtgtattgacttttttttt

SEQ ID NO: 251578 - DNA, 749 bp, Cannabis indica
gtgtaagtaagctttatcgctgactatcacatcagtgtaaatctagtgcactaatgaatcatgggacattatcttttgaagcatataatcacaattaccttccactgtgttgacatcactgtaattgtaaataactatatgttctggacttaacagaaattgtatacattaaaccataaacatgaaaactacatgtaaacataaatgacttttaatcttctattgataacaaatcaggttatattgaaatagattttatttagggcataaaatctcaacatatcaatagttattttttttttaagatagtaacgattacaagtgagatacagtgatgataactttaaatatagtgacaggtgagatacatagatgacaacaattttaaatttgatgagtttcctatagatttatcaattgttatattttttttcccctaattctattttatatataaatttaattacacaaaaataaaatttatccaattactaaaattctataatctaatttaatttatggaaaatatatatatttaaaaactgactttatagacatatatgtatattaagttgattaataattattatttattgaagttcaaaataattaaaaaaatgaagaactctaaaatattaatttaatttttcttttattattaagaattaaaggaggtaagttccgagccaaactctttataacatgcatgtggaagctaaggaagagaaacatagtagagctgtctggaa

SEQ ID NO: 251579 - DNA, 1225 bp, Cannabis indica
aatcccacgattagtgtatttttgaatttacaatgcaatctttcttgttatatcaattgtaactagaagggaaatacttaatctccaagcttataaccctataaatagtgattcatattcactgggaaagaggtcgagagattttatctaagaattcatattcaaagatactgttgcaagatctctaagaaaaggaacaatttttcttgttcttaagtcaatacaaataacgaggattaggttattatcgaactactcggggctgaacctctataaaattcttgtgtcttaatttgctttactatatttcatacatattaaactacttgtcgcttacaaaattagactcaccgtcgttggttaaaagagaggtcaacattttggtgctttcattgagagttgaacttaaggattgctctttatttcaaatataatcacaaatacgatggtggtacagactcgtagggcgcgtggttgatcgagcgaatccacaagtggtggctcctgcactgcagaacccaggaaacacaaggattttgccagccgtaaatcccggacagccatcaactgcgggtcacggtgtgatgacccctgtggatgaaatagtgcctggtgtgcaagagactgggaataccagtgcagcagccgacgagtgcattcataacacgccattatgcccgctaccattattcaaacaaccattgaagatgacactgaaatccataaactctgtgccgctcttggaatcgtgtagggtcataccaacaccctacatcatgatcaggaggaactccgtgctgtggtaaatctcgtgtttgaacagcagaggcgcatgtttgccgaatggagggacaaagagttggaaacgttaagggctcagcgagcagtcattgacgatcgcagtcggcatgccactatgctgatacgaaatgcctatcaaactgttgggcaagagcctgcgaatgtcattcccttgggtgaaacagacaaagatccacagatgaataccaatcagactataaatggtcagccgtcaaatccacggtcacaggttccgcctgtgggccaagtggtaggcgagtagaccttgtctagtaattcatcaagagaagtcatacccaacaactccagctaggataatggtgtcagtcagcacattagccaaaccaaccagtcactgagacaaccatgcgtttctgtatttgatagactgggaacgactcat

SEQ ID NO: 251580 - DNA, 411 bp, Cannabis indica
tattaaactatatgagacatgatacttagttgaaccgatagcaatattgacatatatgagggtgcactattgatgtcttttagcatttctcttcaataagtataatacacctctaaaagagtgttttggtagattttctatctgttttactatttaggagaattttttaatccaattttattattatgatcctgtatgttataattatttaagtttacctgttaattttcaaaaaaattctaaatagtttacaatgctgaaaataaaatttatatattcagttttacatgcgactattttttctcagggcttcttttatgtatatactaaaatagctaaaatattacacaaatatattgagcaggccctataaatatttatacagcctaacaacaaaaaattaaaaaaata

SEQ ID NO: 251581 - DNA, 737 bp, Cannabis indica
aagctccatctatacattactctgtctaaaattagtacctagcttttcttcttagcttgtttgcttcattcttaccttctggcatacaataggtgtcatccatggtggagtgtcatctaacatgtcgacttcttttgggatggtaatactgggttctcctagaaattttatgggcaccaaatttgccttgtcagtaatggtgctactcgccagacgggcaagtgcatatgctatagtattctgctctctggagatctacctgattgtgtagcctttaagctgactaagcgagtctataattttgctcaagtaggccaccattttttcacctcgagttatgtattcacctaggacttgattcccaactagttaagaatcgatgaatatgtccaggtggtcagctcgtacttcatgcgccagcttgaggccgactattaaggcttcatattcagcctcattgtttaaggctttgaagctgaatttgattgctccgtgcagcaactgcccccaggtgttataagggcaatacccacaccaaaaaattggttagtgtagcttttgtcaacatggagtttccatgttagttccttaagtttttattactgctcttactcttgcttcttctttggctcttgcttttttctctagtcttgagagatctcaagagataagttggtgcactcaaccacgaagtttgcaagggcttgaccctgtatggctattcttggttgatatgt

SEQ ID NO: 251582 - DNA, 640 bp, Cannabis indica
atacttttctactgttatttcttagatgtgtgtgttgcattggctactagttgattaatctacaacaagattctatcctttggtattacaacaaaagttcttgatgattgcatgtgactacgagaatggaatcaagagtggatggatctgattcagtattatctacggtgaggtcgatggagatagtacaggatagattggaaactgctcgaaatagagttggtgataaactcaccaattgccacagaagaatcatggatgatggggagcatcgatctaagttttgaaccttgaaaattaaattactagtgtatgatgctggagatgaatgggcttacaagtttgtagcaattgacaccgacaaaaaaattagaagttgctttgagttggttctgtcgggaaaattagagacaccccattcaatcgtggaatgaactaaaatacttgttgcatcgtcaattttgtcccacacatgaaggttcagtgtacaatcagagttttgttcttcatcgagtgaatatcatgtaagggtatcaccaaaagtgtgagattgaagatgatgaagcttctgaacttttggagctgtcgaagggtaacatgaagttattttgctcatcatcattcgagctagagcacttaa

SEQ ID NO: 251583 - DNA, 710 bp, Cannabis indica
agaagaaaataaattatatttaaatctctactttttgaaattatattttatttatatgaaagtttggaatatacattttatattttcaattttaaaaaatatttatatcatacgtattaattaaattttaaaatttcgtactaatttttattttaaaatagtaattatacacataattgtttaaatatataaataggcgtggactggattcgatcgattacttttacatgtgaattaatatccaatccgtacgagtacaaattttaaatttttaaatctaattcaatccacataagcgtagatattcacattttgcgaattagattgttgttattcatgtttctggatagctaggaaatgagttgtcccaaggcccaacgtgaaggcgaggcccactcagaaggcccccaaatgagtcttacaaatagattgctccactcaagggtcaaatccgtagatatgaaactggagcttcagaggtatccacggccagtggacccgaggacctaaagctagaagagctaataacctcttaaagagacaaacaatgttaaatctggaaaaatatctgcagaagacttccgcataaggaatgtgaaggggcatccagtgacgatatgggttgcaatagtcgacccacgtggcatatatctgacagaatcccaagaaaataaggggcttgtcccctgtgccaaaccacaaggaggctt

SEQ ID NO: 251584 - DNA, 543 bp, Cannabis indica
aactaaaccagaaagagcagttgtcctgccaatctccatttacttttgagactaggtttagacaatcggagaaaactacttgtggggaaaactgagagtcaatgcaccacttgagactttgcaaaagagcttggccttctgagaaaataggagagacaacaccaggcagccgacggtattgagaagccaacacagtctgatatccacgcttaaagacaaaaccagcaccagttaggccattatgatggtcaatggctgcatctacaaaaggagcaggtgtatcaggtgacagggatggagggagatgctgatgagagatatgagggatgcttgtagcttctgagtgctgagtgtcatgttgttgggagtgttgagcagcactgtattcctgtaaataattgaccacaatttcttccacattgttagtagtataatgttttttgaaaagaatagagtttcgagcattccaaatctgccaaatgaaagtaatgaaaactgggaaatcctgtttagacataacatgtaaagcctgtaaaagaaaat

SEQ ID NO: 251585 - DNA, 1080 bp, Cannabis indica
cttatatacaattttttcaactcgcagctgttttaaaataatatttattaaacactcagtaactttttctcatagcacaattacatctgctttttctcacagcacagctacagctgctttttctcacagcatagctgcgccaaactgatccatgtcttatatcacctcagcctcttttaaatttaacataaatgaccaaactcttggttttgttgactactaagagcactaatttaaattatataaaattagatagtttttaacaaaagcgcttataaattagaatgaaatctattttaaaattttttgggttttgaaataatttttatataggaagaagatctttcaaagttaattaatttttgatattaatattttctttttttttataagagatccatccatccaataagagatccatccatccatggttttttttggttttttttttttttttttgtaatagaagagatcccacaactcctttgataaagtcaactttaatttgcaaaaaaataattaaaagcaaataatattaaaaaagtaatagcatgttcacaacacattttaatctcatacatttttattgttcaaccaattaaaactaaaataaaatacacttataacttataagtgagagcaaaatggtactcgatctactatatttatatatataaacatatatattttcaatgatttgacttttttaggggttcaatccatcatgtgactcctacactgaatactagtctagtacaaagtacaaacaactaattaatcaaacaatgacaacttggttgaccatctgtaaataataaataccctatttaactaattaaacaacttaattacagtcactcaaaactcaaaactttcttcaccaaacttcgcttcatcataatcacttgaggttagcttaaataaccataagagagtgcgtatgtgttgaaagacatatgttcgagtcccaagttatacattgtaaaaaaaaaacttcactttatcattttcatcaaactatgtctctagcacaagatgaaatgattttgtacaaaatagtacgactttctagttttgtat

SEQ ID NO: 251586 - DNA, 682 bp, Cannabis indica
gggggaggccagtctaagacaaaggtctctttctcttttgatttggagatatatataatgaaggcaaccaatcccctatagaagcatgaatgcatcccaagaataactgttagttattcaaggacttggatcagcactacacagcagacattaactctgaaattacaactcactctaaaactcttttacaaagaagaatctctaaaaactgtacctatatttttgtggataacttgaaatgtagagagtttagagatatttatagatgaggagaggagaggacccttgctgagttggagatgcagccaactgtattaaccaactcttttgctgagttggtgctgacatgtacatggattattaagtgagtttaatctcaacaattccacctcattaaactgatcactgatccaaaacaataactgtcatcaagggcggagctacatgctaagtaacaggggcttggcccccctcaattctcaaaaatttacaatattaataatatgatgagctatacaatttgtggtgaaatttcacacttatcatagtagaaaggggatgacttacaatattaataatatatgatgagctatacaatttgtggtgaaatttcacacttaatcatagtagaaaggggatgacgtagtgagtggggttagtttattcaaagatcatgtatata

SEQ ID NO: 251587 - DNA, 738 bp, Cannabis indica
tagggcataaaatccaacatatagaacctggctgagagattaaccaacttcttgctctatcctttaaggagaaaggaaagagtcgtagtcttatggcgccatcagtaacaccattcatcttcacagtagcacatacctccagaaatatggctagatggatattgggatcttcagtagccaagccaccaaattgattctattgcaccatattgattaaagcatgctttttattagcagcaatgattggattagcaataccagtcagattttcattcaccacatggaagcactaatcacgaacaacccatgattgtgcataaactgcagtaggttctggttggttgttattaaggccattgttgttattggttgccatggttaaatttaattttttcttcactttgaatcgctttagagttgtttcaatctcaagattctttcgcataaactgaaccacaaagcaacaaacaaaataaaatctaatttaagcaaaaacttttagtaacaatattagcaataatttaagaattttcaatccccgacaacgacgccaaaaacttgataataattttttactacaagcgtacaacattattatagcaaagttttaatactaaaacggttgtctaacccacaaggattgattattaaattttactaattattatactttttaattttatactttaattagataacacaaagtaaattataattaagaatcaaataataaaataa

SEQ ID NO: 251588 - DNA, 684 bp, Cannabis indica
gtacatgtcggcggttagacctgaagcgtatgatctttgggatatcgaggcttttgctgcatagtcgctgggcgacaaacttttgtttatgtgcataacaaacttttaaaaaagtattttgtaaacggaatcccgaaattttatatatgtaatactttaagtttctaattaaataagcaaatttttaattaatcacgtttttcattaacctcgttgattagcaacgagctgcacagtacgtttaaaatcacgctaacacgcctatgctagttagggtgttacattgccattttacgatcagcaaatggctttgtccgcacactaacaacctctgttactagtttaggggattgtgtttggacgaatgcttgtcaatgattttttaagttcttctgtagcaacagttttatcttaatgaattatgtttttctttcaattttttttatatggatcaattaaggcttcatttctaacattgtttatgtatgagtaattgatggtgtttatattacatttagtatctactaagctttaattctatgatagagttttggtgattgctactacaaaaatacactactattagtgataatattttagtcacaacataaatttttgcaactaaatgtgacttttagttacaacaaaaagttacttgtaactaaaatatagtatttacataca

SEQ ID NO: 251589 - DNA, 838 bp, Cannabis indica
attcaactaatgttatctttgactctcacctactgggatactatattttattttgttagaaaccttagaaattaattgaatatgttttattttggtatttttgtagacatattttttttttacttgttataatctaaacttgtgtatgaattaatatgaacaacccacaccccaatcttcatttataatatgcctttgcaaatgaactccaaagtgcgaagatgactcctggtcagagtatcacttaacacttactcatgatgaacttgaaattctagaaagtaactatgctgggaattgtcttatcaaaagagcaatgggttcagttcattctcaacagcctttcacttgagtataacaaatttattgtatcttatatgatcaacaactttaacttgtccgacattgataagctagaagctgaaatgcatgcttatgaacagacattgtcacttgcaaggagggctcgctccaaagttgcagaaaagggcaagagaaaagttgaagatatttaggatgatacctctgagaatgctgcttcttcgagtttaattttgagagctaaaattgaaattgaactagcaataaagacaattaaagaacaactgagcagacatattcttctatgttctcactgtggagagaagggacattttaaagcaagatgtcccaaacttctaaaccataagcacaaaggtaacaattttatttttgaatcatgtattttagagaatgataaatccatttggattgttgattctagatctattaacaatttttactcttcattccagctgcttgaaagttgggattagttaaatctaagggagttgaagct

SEQ ID NO: 251590 - DNA, 746 bp, Cannabis indica
atttatgcatatcagtagatggactttcacaatgtctggtgtatagacgtttattttaagtgaatcactgttggtacaagaagtaagaattcctttcccctttgaattcgaaccatattcaacagatggtgggtgtattatgtctttgtttcggctagtggcagtggacatagtgaatgaggcattgttaagaactggtggagtaaataatggagaagtaacactatgaaccaagtgagaattagcaatagcactaattgtatgatctgcaacatttgcaatgttttgagtttgattaccctgaagtgggactgctgcagaagtggaggattcacccactaataaaggatatggttgaggttaggaaatcgattgaagtttggggagggaatgaatgattgatgtacgggctaatcttgtgagtagtggccacgcattgcctttaggaaaattagtacgataccggtcataggaagacgtaggcagtcttgatcctttcaattttgggccgtaagcaaggtctggttctattccatgatctactttttctaaaaaaacatggcacttttgataaatatgtccaataactccacactccatacagtaatcaggcaaccgctcataatgaaattccacccagaactcatcctttattctaagaagagtaatcatcgtaccacgcagaagaggttttgttatgtccaatttaactctgaatttcataaaaggaccccagccttcgttta

SEQ ID NO: 251591 - DNA, 1070 bp, Cannabis indica
aaaaatatctaggcttaatatgacatatttatgaatgaataattgagatttcaaaaaattgaaaataagtctcatacttttcatagttaagcaaaaaaaggaaaaaaaaaaaaaaaaagtacatatttgtcaaaagtataaaaaacaacatattttaaaataataaagaaacaaaagagtttgaggtgatgaaggtaaaatcacaatataattttttctaaaaaaaaaaagtataccaaacactatcctacacaacaacatatgttaataccatacaaccatcctattcaaccatatttctatgttagtataattttttttttaatttaatttgcttgattaacatataaatatattaaaatagttaattttttataaggattattattatgtgactattgtatcttctaatattgttttactcgaatgcaagagaaaataatcttaagctaaattttttggtgacgaagagcaatgactttggaactatttaatggtattttgatttattaacaaattatttaaactatacaatagtattgttcggttagattgcaggtgttagtgaacaacttcaagaacattaagcggctcaaccattgggaggttgagattatttctcgaaagtgtaacttcatggccccgacaaaatgggaaaacattctaactgtgaaggtaaaggctcttccaagctcccttcttgtggaggttctttacaaaaattacaagattctatttcaaaactcaatgagtggagtagctcataattctttatatgactcaatattaattagttctaaacggttgttctaaattttaaatccactcatatgtattagtttgagagttttattctttatctttttgtaatatttgttgttttctcggagctttgtttgtcttctttttttttttttttttatttttacttattttgtttaggttggtttgctttctattatgtttgacatttcaattaaataaatataacctctgttcaaatgatttttttttcttctaatctgtgttctctcaattttttttaaattttattaattttgttctatttt

SEQ ID NO: 251592 - DNA, 511 bp, Cannabis indica
catgtaactttagatgtttgaattgtttttttttttttccacattggtcaatatcaattttcacttgagatgagttatgctgtttaaaccatgtagatatttacaatgggtggggtgggaatgttccaattccaaaggattacagtaaaagaatcttggagctgtgaagtatattgtgattctagatgtaacataaatatctctaaatgtttttttcttttcagaatttattttttacaaataattatatatttaatttgatgactccttttctagtggatattatcaaatatgtagatattatacatataatatgttctccagtaatcatgtcttcaaatcacaaacaataatactttttcttactcctggtttaattttactgtattgtatcatcaatgatgaggcagtacaaagattatggaaggataataattgttgctgtatcagaaccaacttcacagcttttggagagttttcatcagatggatgcacacagtagtgggaatgt

SEQ ID NO: 251593 - DNA, 652 bp, Cannabis indica
aggtacttatgtcactatttaccctataaataatggtatctttttcacatttgaaattgaacgaaatttcttatgtaggtgcataagatattttgcacaataacttttgtgcataaagaattaaaaggttagatggtctaaaatttttaaaactcatacatttgaaaaaaaaaataattatcgtgggatcgataaattgtagtgattgaagctttaactaatctcgctaaaacatgatatatttgtcattttttaatttggctggacactaatatcatgtctaatataaaaaggacacgaaagagtactttttatgtctaggctgcttgaatgactaaaatgattttttgctctagtgtttcaaagcaagagagaaacacttgttacatatggacaaactttgattgaatacaactaagcatttatcttattttagagcaagaggctatgctagctatatatctatgaaattatttatttatatatatatatcaccttttctagagttttttttttcggttctacttttttaagatcctcttgtacaagcagctgtctttgctgactgaattgttggaaagaaaagaagaaaacaaatgcctaacaatttaagagacatgttagttttttggtaagaaattaatctcaacca

SEQ ID NO: 251594 - DNA, 532 bp, Cannabis indica
aaagtctgtgaagtgaaaatagaagaattgtgaactttggtttggtgaaagttaaatggatacgattattgactcgcttaaacagagtcaatgcattaatccctgcacatggagtaacttccatgcttataataatcgaaggaaattaacttttcgtcttgcttgtttgtttgtgaggaaagtcaaacgaattttcttgactgcctgaactcaatttttacttggtttatagctgaatttttacttgatcattctagcaaagtggagattatttggttttctaaattgactaaaacctcattattaaattaaaataatttttaggaaacaactaataatttatatatataaataaatgtaaaacaacttgctatacataataatattatgatataaactaataatcgattgtgataatcatatggatgcccttaacctcaacattcttggcccatcggagaaggatgcagtgcggggtcggttgtcggttggcagcttacagatgcattcagtaaaaattagagccagttat

SEQ ID NO: 251595 - DNA, 584 bp, Cannabis indica
gtctatgaaacttggtgaattacaagtgaccaagggaccgtaagtctgtgtacttacttggggggcacccacaccgtacaaggcatcgaacttgcatagagaacttatgcagagaaatttaaaccttagtataagcaaaaaaattaaaagctaagtcagtggaggcatactttgtttgacataaaaaagtaaatctggatacttacatgtctgcgcataagaagatagtcaggattaaagatctcttggtcggtcatatgtccaagtaaaaggctttaaggctgaacaaaagtagtgttcaaaaatagagtgcctataggccaaaagcaagaacatgaaagccttaaggcaaaaaataagttatgttcaaaagtaaatagccaacattccatacacaaacatgaaactgaaactactatgaaataaaatcataaatgtaagatgcaaataaaatgtgtctactcatgtacaggtgcaacgggagtagagccgtgagctgtagcatttggatcgccaaggagctggttagtcggccatgtgatcaacaacctggttggccacttcctccatacactggccaacca

SEQ ID NO: 251596 - DNA, 1544 bp, Cannabis indica
agataaaaataataataataaaaaaacttgttataagaaatagtattaaatccttgttatcgttaaaattctatagcgagaagtatttattcacaaaaattataattttgtattactaaatgtgttattagtgacaactaaagttaaattagtaacaatttatctaaacaatatacaagccattttttattctgattaaaggtaatatttaattagttaattaaaaaaatcaaaaacattattatgttactatgactaaaaaagtggtcgtataatcttaaatcccaacttctatctataaactcattatcatttttttctataagaaaataaaaatggtactgttaccaaaagttaccatttaccagtaaccacagcagttagaaagataatgaattatttaaacttttttagatttaagataaaatgatacatggttagatctatagcttggtacacgtgatgaacagagataagaaaaaaagaatcatatcactttggttaaaagaaaaggagatttatacagcctaatacacttataaagttagtaccacaaacaatgctattatgctacagaaacttagctattaagtatccaacgatgatgaagaggtagtgctattattattggtgattttaattggaacatcttcatgcaaagtgatgaagacctctttttttttttcttttttctaatttttcttcataacaaaatatattatctttcatggaaaaagagaaaggaccctccttttgattatcaagacaggtatagtgggataaagcaactagagcagctagtattgtctataaagtcatcaccaatcaaagaaaaatatatattacaatcagagagaatgataagcaaaaatcaatcatagaaatattgtcccatttttagagttttctattcagtcacggattgaaatcagtttagtttaggctgtaaagtgtgcagttatattaaattctaattaacacaactagctagctactacgaagtttaatactaaagaatttcaattagttgacaaacccctcaagtcaatttagttctagtaaaaagtaatatttaaattatatataagatttaaatgcgtgttttttttaacaaagatttaaatgcatgttaattgatttatttttatctaatataatatttaaattaaatgtaatttatataaaaaaatcatatgtatttaatataaaattgataaagttaaattatagagatttttaatataattcttctttttatttttaacaagatttttttgataatatatatttttttggggcaatttttaggaattaaaggatattatcatatttcaaataggcagttttttgtagagtaaaagggaaggattttaatttagattataatatgcaagccgaattaaaatatgttttttaaagttaaagattaaaatgataattatcttttttcttataatgtgaagtgtatacgagtaaaaagccaaaaataattaggaaataccgaaaaaggaaattttattcacaccccaaaattttctaaaggc

SEQ ID NO: 251597 - DNA, 522 bp, Cannabis indica
gaggctcaacactccaaaacacagtgttatagcttggttggccacacttaatagactaaaaactcaggacagattgctgaaatttggtattcaaattcctgctgtgtgttatttgtgtgaattgcaggtggaaacatgccagcatttattctttgaatgcccggttgcacaccattgtttgatagaagttaaaagatggctggggtggcatgcccaaaccaacaattttcagcaacttctgaggtggataggaagatctagattgtctaaattcaagaggggagttttggctgctgttttaatcgggctggtgtatagcatttggagatgccgaaatgctgtagtatggaaagaacaagctgtcaacctggttcgaattgttgaagaagtgcagtggacctcaaaggttcggattgagagaatcatgcccaaaaaaattaagaacattgacaaagaatggctttttgctttatagagattaattacatgtgattaggggaagattataccattgtatataga

SEQ ID NO: 251598 - DNA, 913 bp, Cannabis indica
tacactaataattatttggtctcaaaaattataccattataatctactctttaaaataattatcttgatacatgaaaatcatatatttttttactatctaaaattaaaggtagtattttagtttctttcagatttttttttaaaagtttcttttatatttagtttactaacaagtaaaaatattcaaattatgaattatactaaataaaatatttcatgtttatgtttacttgttaaataaaataaaatagtattattgcgacttactttttaatgtaatcattatgtttgattatagtttgctctgtattgtaaaaaataaattagtgttccaacaaatagaaattagtaagtttattgacatatataatggtagactatataaaatgaaattaattgttgttttaatatacgaaaagaaaaatgaaaaatttatttcaatataccaaaataaactaataaatttgttagcatatacgatgataggctatacgaaaaatgtaaacaaaaaataaatttgtttaaatatgccaaaataaactaataagtttatttgacatatatgagtatagacatacctgattatagaatttttagtctgatcatcgtctttttatttaaaattgatgatttttttttttttcagaagtaaccaattggtatcttatcgaaatcataactaattggtccacaaaaaaaatatcgtatttgcaatgatttaaaagttatttgtaaatttattctttatttaactaatcaaaatgcatacattaatttacatttaaaaaatatggtgacttaaacatttatgatagatatatattttttttaaaatacagtttactaaaatggtagcttactggataacaatttattatttttaaaaataaacttgaaagttactcaaatgtat

SEQ ID NO: 251599 - DNA, 1190 bp, Cannabis indica
gtggagagattggtggactcagacacttccaaccttttggtcgtaattttggttgtttgtacaacaccaattatagcatgatactagatggaagttacgtgcctagccacgtaaatgttagttttatttaagatttagtatttttagttgttttttttttagatttctgtaactaaagatatgattatataaatgattattttattaaagtaattattatgtcattgtatttggttaggaaaacatagttgtgtatatagaattatgatatgtacattagtattaataataaaaagtacgttaatcgtaatatttacataatcataatgtagttatctttaatgtgaataaataatttatgataagtcattacaatatatgattttaacaattattatttatttttagaaaatttaaagaagcaatgtatgtgttttgtaaaatttaaatttgacattatgtagcgaaaattaaagaaaaagtagcatcttaaaatagaggaaaaaaattattaaataaaatcatattatagaataatatttgagaaattaaatagagtatagtgaaacttcttcctattcttttatcgtcttagctgtttgaatggtaaattgattgtactttggactcattattcgttttggatctacatataactggattttaagatattgatggtattgtttacaagtttacggaaaataaaagcattatcaacagcaaatgctagacgcctgtaattaaccgcagagacggtggaaggtgaagaggtcgagtcagaggtaacagttgaacgctaagtctcaactcttagattcttgttaaggcagacagaaatttgcatgttatgcacccaatagtatcaacatgcattaaagtgaaattttttggccgataatttctccttaattttttggacaaacaacgagtgtttctacatataaactgcttctgcatataagtattttaggttagtttgattagtgtttttatttttttgatacttgattgtctatattaataaaatatacttgttgtttatgataacaacaacaacacatctatctattatactagtatattgttacgtgcgatgcacgtatgctatgttttatattaagtattatattatgagttcggaaggaaataaatgaatcaaaaataaataatatttaatttagagagatttg

SEQ ID NO: 251600 - DNA, 829 bp, Cannabis indica
tttatggctttacagagagtaagaccgaaaaagagcagagatagcaaattattcatatggtaagaaattcatcttcctctcctttgttatgagagaattgatttgcaactgtacttgctaattccatttcttcatgttaatgtactcatcatattgaccattattttctttttccattagtaatatttagctttagctcttgattgaaaaggaaaacaactgatcatattctacaatggattggttggtttgcagatcttgaaccttaggatcccaatacagaattgacacttgtatagtacttgtatatagaaatatgggaaactttttaggtaggggcatcactaggagtattttccaatttcatatttagtagatggagaagttatagacattttgcttctttttcgaaaattttaaataatttataatgctgaaaataagattcaaacagttacgaatattttttttattacatatacaactaaattcttcggaattttataactgtacaatattatatatatgtaaaaaaaattgagatataatttctctaattacctaacatagaaaatgttcttataataagagcaaacatgatgcttttacttaagttctctcaaattgtattgttttaaatttgggagccttttgtatagaaaaaaaataatagaagggtgaaagtatgtccagttgacactaaatcgccacctttttccattttcagcaattttcgatgcagaaagatttatagcaaaagacgagaaaggttaaagagaaaggtgtacttactacttacactgtattcgaactttcatgtcgttttttt

SEQ ID NO: 251601 - DNA, 650 bp, Cannabis indica
attttttattagtaatcaagcgccatccttgtttccccaaaaacgccatattatagtccctcagattgtaaaaaccaatacccccagcatccttgtgacgacttagttttggccaactcatccaactaacaccttttgtatgtgaattagattgtgatttccaccagaatttagccatcaacccctcgagagaagaacatatttccttcgtaagaaggaacacactcatagcatagcttggaaaagattgagtaatagattttagtaataactattttcctgctttagaaagaaacctggttcccaactgagaattttctttttcatcttttcctttagaaatcccaaactagcattcttacttcgacccatagtacacggtaaacccaagtaagagctatgctcagaagcagctggcatccctagtaagttgcaaatgtgaacacgatcaccagctttagtattattactaaagaacataaaagattttgcaaaattcaccttttgcccatatgcatgctcatggatagctaaaagattaaggacattagcagattctatatcattggctttataataaatataactatcatcagcaaataacatgtgagaaatagtaggagctgttggaatttattttaccaggatct

SEQ ID NO: 251602 - DNA, 601 bp, Cannabis indica
tatactaatttctttatatattataccatatatatgccatttctaatagcaaactttgtagtactaaaccacaaataaaagctcccttacaaatgctctctaggggctgacttcatggaagtataatagagaattactctttttcattcgattctaaaccagtttcgtctgcaacatcaacattttcttataatagtctctagtgctagatggatcctaccggtgtgtgtaacctctttgaggactctgtgcaaatctcacatgatgacattacttttgctctcaacccgggagaggttgatgaaccccaggaggctaaccaagtgctactgggtaagattattagccgccaccgattcggaaaagcagcaatccaaggatctttaaaattgtcctagaatgctatcaagggctggaagtggaaggaacttgaggatggaatcatccagttcacgttcgctcgaagagaggacgcactgaatgtattggcacgaaggtcgtggtttgtctgcggggcgttgatagttatcatgccatggcctacctggctttcactgttaggttataattaacctatatttcgggtctttaaagttagcat

SEQ ID NO: 251603 - DNA, 534 bp, Cannabis indica
tctttcagtagtataatcttggacatgttttttcaaatcacctttcattattcaaagccaatttaagaaaaggttttagaaaaccatataattctaataaaaaaagcttcattatttgattttttttttcctgtttaaagatgttcaatgtggcataaaaaaaaactgtatacctatttagaaagtatggcttatttttatttatttattttttttaaaaaagatagttgatatagttccaaagtacatttgggctaaacattttataccgagacatgcatggtctgatcctctttatgtttacaaaaaactccatgtaaaaattacactacatcctgtatacgtatatttatttatatggaaccgatttggtcacgctcggtgtaacgtgcgtgttaagatggcatgttacaagctaggtgatgtccacaagttagtcaagtggtggcgcatgttggtgtgcatgctgatgcttagtttgtataacaatgatatttttggaaatatcttcaatattgtccggattgggacggg

SEQ ID NO: 251604 - DNA, 1435 bp, Cannabis indica
agaaacctaaaatttttatataatatatttttttttgcattaaaataatagtacttttgaaaaaatttgtaataatattcacattttacattaaataaaacacacactaaacaaattttttgagctcatattgtctggggaaggtcaagtattgtgatgattctaagactgtgtaagtatgagattatagtactacttataaaggtgcatcttattttttagtaactcatcacgaaagaattttatagttaagcgtgcttgacctgaggtaatttcaggatgggtgacctctgagaatatttatgtgcgagtggaaacactatcgtgttggtttgtaaggtcaatcatcattccgtggatgtaaggatccaataaaaatttaaaacgggaatgttagagacttgaacccataatcttggtaggataaaagaatgtaaatttagtagtgattatattgcaaatacaaaaaaaaaaaaaaattatgataagtaaatccctacaaaataaaaatcatgagttcaccactatgatatgatatggtactatagcaaataggtatgtggacaatggatatattggttaatgatgaaattgaccctacgaaacaacaataagtgtcctacgaaccttcccatccaacttcatattttgccattcatattagacaatatacatatataatataatataggtatttttttttagaaaatttcgaataatttacaatactaaaaataagatttaaacaattacttatcaatagtcatcttgaaatttagtggatcagtaaatacttttgggtccttatttaaaaaaaaaatatagtattttaaaaatttgtaaaaaaatgtataattttaaaaggaaaaaaaattggactcttgggctaggtgggccctaggcataggcttagcttgcctatatgcctagtcgggcttgtttatataataaaatatgtaaatcttgttttctataaatttcaattatttagagttttttaaaaatttatatatatacgtaatcctaaataattataatatatacaattatgataaaaaaaaatagactaaaaaattcttttaggtgccaaaataaatagaaatctaccaaaatatctatttaagtaattaatgcattgtttaacaagttttttagtatgtggaaatagatagaagtataccgaaatatatatactataatatattatagtatatagggacacgattttgtctgtactttcacagaatatattccatgatgaacggcagccatttgatctgagggttgggttgatttaggagtaattagggttaaaaaatggtaacgtatcctgagacccatctaatgtaccacggaatacattccgtaaaagtacatcacgggccaaaatcgtgtccctatcgtatatatatttagtgagacagcatgtggtccc

SEQ ID NO: 251605 - DNA, 526 bp, Cannabis indica
ttggtcaatctcattatatagttatgtcgtctgagtttcatactttgcaaaaacagtgattaaaactggtatactacaatagttttttaaacattaaatgacaccgatactcgtaatggtgcagacgatgcaaaatacggtaactataatggatatccagggaatgggggcaacggtggcggccataatggcggttatcaccaaggcggcggcggcggcggcggtggtagtggcgggggctatcacaatggtggtggtggtggtggaggtagctggggcagtcatcattgctaccatagttgctgccagtggagctacggacacaaacagtgtctaaagtgttgttcttatgctggggaaactgtaataacagaagccaaacctcacaactaatagtacaacatattcacatctatgcgtcggaagctttggcttttgtacctatgtaaaagttgttatgaaagaataaataaaaatcctgaataaagtcatatacatgtttattatcccgactactttggtatat

SEQ ID NO: 251606 - DNA, 1001 bp, Cannabis indica
aaaataataaaaaataaaactctattaccacacaatataattaaaaaggtaatgtgaaagaatgatggtaaatcaattcatattgaataaaaaaacttgaaatacttatttgttaaaagtgaaaaagtcgttgaaaaagaaatcatgagcctaaaatggatcacttctcttgcgcattgatcataccacaaaactaccctaaataagtagagacaaaccataataaatgacacaaaagccataaaaagtacaaacgtcgtaaaaggtatcaaaaccataaaaaaaaatagtacaaaaacctgtgttatctcatatgaactttaaacatatattaatacttagtaaaaaagaaacaaatcaaaaaatcatatataaatatatataaataaataaatacttagctgtctcggtggccattgaactaggctataagtatgttttggttgagagtgattcgaaagtagttatcaatgctcttaatgggacggaatctcattgggcacttgagaactatatctctttttgttctgaatcttctccctcttttaattgttgtaatttcgtttttgctaatagaacttgtaattttgcgacccataatgtggctaattgggcttttattaacaagttgtatggctctattccggtctcttcagttccggaggaccttttatgtaatgaccgagagatctaactctaattatttattggaatgaatacgcttatttttttttaaaaaaaaaaataaattcaaataaaaaatattaaaaaaatacttttccatacatattgttgttaaatatactttatagcaaaaaattaagtgctaatgagaaagaattgaggaatgagaaagtaaaatatttataaacatatgaatttgaagattttaattttatatattaaatttaaattgaaaaaacacatggttatgagtattgaaaaccaaatgtgattctaaaagcattttttttttgatgaaactgttggaattattttac

SEQ ID NO: 251607 - DNA, 1129 bp, Cannabis indica
aacaaccttaaaacaaccttcaaaacacatgttgttaagtacaacctgccattctttggagcagtgaaagcatacatagaaagacaatttgagtaccacatgacacaactagatggcttggacaagcgcataacacattatttaaaaaatttggttatgggaaatggtcaaggattcacagcgaaaacaagaggtattctaccataacctcaaatatagcagaatcactaaacttagaaaatttagtagcaagggagcttctaattataatactactagaatgctttacagcattagtgcaacaatagatacataacaatagaacaaaagcacaaaacacatttactatattggcaccacctaaagaacagatgctactgaaaatcaacacatactcattgaacttggaggtgagatctagattctatactttaaattgttaaacataatcattttgggcctattataggttttctagtatttttgtatggttgtcccaatgtcgttctctatgtttaataaatattgatttcaaattacacatgttaaatcaatcacttattattttttttgaggtaaccgaatgaaaaaaatcatatatagtagacctcaaagagagaacttgcatgtgcaacacgttctaaatcaatgaaataccttgtggacatgttgtggctgtgttgaaggagatgagcatggaccaatacaagtactactcagattactacataaagaaaaattgactagcaacttatgaaggaacatagtacccaataggacaccaaagtgagtgggatgtactacaaaattgtgaaagacgtaatagtcttgcctcccatttaaatgttgaaatctagaagaccaaaaaagaaagagaatggaagctgactggaaaaggaaacaacataacaagtgcaataaatgtgggaagctgtggctcaacaagagaatatgcagtgcaatgcatcaaaaaaaaagaaaaacaagaacacctaaagaacagcagtggaacgacaacgaaaaaactagaacataaataatgagcataagataactaaagaaaaaagatttagcatataggtttctattatttttctattaatattaaaaaagtgaatgcaatgatcta

SEQ ID NO: 251608 - DNA, 750 bp, Cannabis indica
gttgtgaatttgattgatctgacatcatgaatcattgcacttgtggaaaacttgacgaacggtcgaaatgacatcagatttggataagaagaacccagtgactcagaccaaatgttgacctgggcgctggggcctttaaaccgaacccctgggattctatttttgatactttcaaggcttccaaggcttctgaacttgaggacgaggtccccccatttgtgatcatgctagattcaatggtcgcatcgaatttggaattcgagcaattaaaggcagcatcccaagttgattgtcaacttgggcactaggcccagcactaggtcaaccagggccctgggccgtgtttccttgttatttttgatgagggtcaaaatgcccaaagcacttttgttgatctgaattagaaacagccaaggttgacaaaatgtcaacctgggcgcagggcccagtcccaagtgttaacctgggcgttgggtccctcttttgctccttcggaagttccgtttggtccccataaatagttgattctcaatattttctgaagatggagatgattctcgaaagaattttaggaatactacaatttttgtggcccaagttaacaaattgtcaaccagggtgcaaggccaaccccaagtgtcaacctgggctctgggccctattatttgtgcccataacttgttgattttcctgtggaaggaccaattttccagtttttgatgaagacagattcaatgcaaaagtcggatc

SEQ ID NO: 251609 - DNA, 681 bp, Cannabis indica
tacaaagtgcattgatacaatatatgatgttaaaatagtatgacacagtgttaccaacactaatacgggatgagtataaagtacatatggtacaacactcaatggtactcgaggtgtggtgcagtcctaccaacaatagtacgggactagtatttagtgcatgtggtacaagggtcgtacttctgtaagaacgttcttgattcatctaaagccttataaataggtgtatgtgcgcttagatacaagtcggtaatatgttatatgttttgtacttttcttattgagtctgtcgactcacagatgttgtttacatgtgtaggtaaatgaaaggcgaaggctgagcaatagtgagtctagagcttgaggatgattgtaaatatcaagatggttaggcctggagtgttcagtctcaagatgacttgggcctttaatttgtagtcgcggagcgacacttttataaaatgtatcttgaatattattgtaaacttttacgataggatcccgactttttatgtacggttgtatatttataaaagtttaaagtttaattaaaagtttaaatttgacacgattttaagaaaatcattgtagcggtcgtcaacaagtagggcggtacaataatgtttttctctagtagaactagaggctcacaacaacatcaagattaacaatcttggatca

SEQ ID NO: 251610 - DNA, 707 bp, Cannabis indica
tctgagagaacccaatagaagaagcatagttggaaaattatttgaaccaagctctaggagcttgcttgagcccatataacaattttcacagaagacacacatgattaggatgatctggatccttaaaacccaagggctgatgcatgtacactgtttcttttagttcaccatgtaagaatgcatttttaacatccaactaatgaatgggccaagccttagagagagcaagactaagcaccgttcgaaggtttaactaccgggctaaaagtttctccacaatccatgccaaattgttatcctgcaccatcacatacaagtcgggctttatgccgctcaaaagaaacgtcaaatttttctttatgtctgaaaatccacatagatcgaataacattagcatcaggtggatggggcactaaatcccacgtattattcttaataagagcaatatgttcatcatccatagccattttccacttcgggtctcggagtgtagacacggggttacgagggagagaagactttgtgacattagcatttaatccatggtgctattttgtatttggtctataaataccatgttggctcctcgtaacgggtttgtttgctgaactcgaggtaggttggaaaatgggaggaagaggaagatgttgtgtatggtctaaatgtgggttgagatctggttgacccaaagttgaggatgatgattc

SEQ ID NO: 251611 - DNA, 635 bp, Cannabis indica
aaataatttgcagcataacaatctaaatttaatgatttttaattataaataaatattacttaagtttaatttttccaataacatttaacgacaatgtagtacttacagttattaccaacaaaaattaaacttatatatttatttataattaaaaaataattattctaccaatatttatttataaacgtagagtcatgatcagtattctaatttctaaccattacgactcatttaatcgattatttatagtcattaaaaattttgatattgtgaagcataataattaattagatcatatttgagaatattcctcagaaaagatataaaaatattggatagaaaaagaaatgaaattaattaattgagcgttgctccaaaaccaaaaacagggaaaagaagaaaaaaaaaaggctgaattaatggaagtcagaatttactataagccttaatagtggagaggagactaataccatacagttgatgagtagttgacactcaggaccaattgcatgtgctattgaatttacgccccattaatgaatttttaatattgattatatttccacagtttctttctgacgcacgtacgtaaaaacaaacacattaacatgtacagtacgtagttgacgtgtaaa

SEQ ID NO: 251612 - DNA, 885 bp, Cannabis indica
ataatagttctcgtggaatcgacttgtattttactgttatactgaaataattggtaatataaaaataaaaattagtaaatttattgtggtaaacaaatatgtaagcacaaatagattactcgaaagcataatacattaagaagcccaataatttgataattatagcattgataaatattatttatcaattaaaatgattgtaatattcaaattataataattataattatttttatataattgtacatgtgcaactattattgaaaaagatataaaagttgttaaaactataaagtacacatatattttagtatttagctcattgtaataaaaatacaaaaatatagaacataaatttgagcccgtataaaaaaataagttgatctatttgagaaaaaaggttctccgaataaaatatgatacaaaattactggacttacgggccgtgtcgagcataccttataaaattgttgtaccatatacgacacaactcatatttttctatgggtgtacgtcacaacttttatattaaaaagcccaaaaaaatataagtgaggctagcacaacaaatacctatttacagatatgggaggaccaagtcacaaatgggtattagagagaatattgtttgcaccatgttgacgaaccaataaagatatacctatatatcaaacttaaaagttttgtaaattaatttttccctatagaaatataaaaaagttctgatcttataattaaaaaggcccgaaataaataataaaaaattaatgtatgattaatttataaaaaagagtgctgaagatcagaactcagaaggtgcatctctcgtagaaagagtattcatacataagtgatctcatatatatattaaacatgtaatcaaat

SEQ ID NO: 251613 - DNA, 699 bp, Cannabis indica
ttaggagatcttgagattattttattttgtttaatttattttgtgtgagatgtagttttttgcaaaaggaagttgtatctctcaactaccactattgaatgatactaattatccatactggaaggttaggattgttggaaagcatatttaatcaagatcttattttactattcaagtatgttgattatttctaatctaacatcctaaacatggaaccttacaaacaattataattaaacacttaaaagtttaagaaaactttataaaattacagcagaattatatgtctccttccgttcaattctattacccttgttcctttctgttgcagagtatcaccaagaactgaacttggatttctcctccttaaaatgtgttcatcataatcttccacgaaaatctgagtattactttgaatagtgtgggttgtgttgggttgtgtgccctaagtaaaattctatttcggtgttatcttgaatttttatttatcaataaaggaacaaaattattttattactcattaaaataaaatgcctggtccacaagtttgcttcatggtcatttgcttgatttataaattcttttaaatctttatcacattattattcatgattattgttttgtctacacagtataaagtaatcaagattatgtgatcaaatattaatcccacgatttatcaattcacatgaattctac

SEQ ID NO: 251614 - DNA, 752 bp, Cannabis indica
ttgattaaagattctataattttaatatgacgttgactgtttcattcatgattaagtgattttaattctccgtacaatacaattcacagtctcatgtctgaataataaattttccaatatttatttataaattattcaatattaaatattaataatttaacattcaagcatatatgaaaatattcaacttatatttataaacagaaatatctttataagttttagggcataccactaacaaacacttatgctctcaagatcaagaatcaatttgttaaactcatccatctattcatcaacagatttgtcctccatcattttaaatgagcacagaccctgtttcaagtacaatctattcactaaggattttgtcatgtataatctttcaagcttcaaccagatacccgatgaagtggtttcttttgaaatctttcttagaaccttatcaccaaggttcaaactatgagcctttccttcttctcctttttcaggcatgttctttggaagacatttctcccctagcaaagcttcatatataatcctttatgagccagtaggccttcatgttcattctctaaagcccaaagtcatttgatccattgaacttttaaatattgtaacttgcagctaccatggttcaagacctatgctttgatccaattgttgtgattcaatcatacagttgcactaaaagtccacacacacacaaaacacaaatttccaaagacacaaactatatcattttttctcta

SEQ ID NO: 251615 - DNA, 781 bp, Cannabis indica
aaattcaagaaaagaagagacaataaaaaaataaatgaacaccagatatgtttacgtggttttgtagtcaaaatctacatactccacgagtccataatatttctgagttttggttgtgtttacaatttggcaaagttttctgtaaattaaaattgcctccttttttccctttgagttaaccccactttataggaataggatggtggttactcaatcttatcttagtgaaaagttacaattgatgggttgttattgcccacgttttacatataactgaatatttagataagtataaataacttctttatatttaaaatataaaaaagtagcctttgaagtggtattttacttggtcagataatgttatttgagagcaggtgcactgctgatgtttaatatgaggcaatacattgctgcttgtgtattacgaggtgatttatcactgttgtgtattacgaggtgatttatcactactgtgtattacgaggtgactcatcgatgatgtgtattacgaggtgattcatcactgctgtatactacgaggtgattcatcactgttgtatactacgaggtgattcatcattactgtgtattacgaggtgattcatcactttgtattacaagtagctcaagatctttattgcaagatgtttaatgtttatcgaaataacatcccgacaatactaaaatacctaacttcatgaactttgtgatccttatttagatgagatcatctcatgggttgagtccttagtttattttgacctgtcccacaatgtat

SEQ ID NO: 251616 - DNA, 653 bp, Cannabis indica
tggtgtgagctctccaccaccccctggcaccttggtgctaagtgagctactactagttaatgggactagtagggcaggcatatgagcaccacgaggggactcatatgtctccatgagttggagtactcatagacattattgggccgaccggtagtgcatctaagaagctgccaaaggttaacgggtacgtttccattggcttgccagtatgccgcttggaccaagcgtgtcctaaacctccaagagacgttgtggttcgtcttggccactagtgtcaacacgagatgacacgggtagtcatccgtgggctagttttcataccagcatgggacggatgcaccatgatggaaagagacagaggtctaatgtatggaacaagtttggtggcttgtcttgagggcctgccaacatgcgtggaggcatggcgccttaaggattggtgcatggacgtatgggagtccttgggtgatgagggagactgttcggacagtatcaaatggggcatgatagaagcgttggcacatcgacttggtgtttggcatcttgccacacatgctaccttggtcacgagtgactaggtgagcctcggtgttgggacttgctgttgggttttatgccctaaataaaactctgtttcaatgtaatccagatta

SEQ ID NO: 251617 - DNA, 751 bp, Cannabis indica
cttaaaagttttgacttctccaccagcacctcttttcttcttgtagacccaattacatctgattggatgataatcatcaagtgcatctacatattcctagagtttatttcttttcatggaatccatttttgaatccatgccggatgaccactatttccgtttcatacttgctattgcatgtttatagcttaatggatcatcatcaataccgtcactaatgaccatattgatttcaccatccaagccataacgagctagttttgtagaaaccctcccactacgacgaggagtcgtgaccttctaaacaggaacttctggtagatttctcgattgtatcaatttgcattagttcaaccgaggggattaatttagatggaacgacatttaaaatatcatttgccatctaaatagcatattgctagaaagacgttgacaaagttgaatagcttagcatagtcctaaccatttccaaaagtgtgtgatttcttctctccgcaactccattttgttgtggagtgtcaggggcagtatattgtgagtcaattctaagttcaattaaatgatctttgaactgcatatccatatactctctacccctatcacctctaagatttttcatgttttacccaactaattttgagccaaagcatgaaattactgaaacttcacaaaaatttcagatttcttttgcattaggtaaagaaaactatatctagagtaatcgtcaatgaaagtgacacagtactcataa

SEQ ID NO: 251618 - DNA, 1035 bp, Cannabis indica
atatatataaatatatttaattttttatattatacaaaaaaatggaaaattattcatgcacaaacaaataaattagattatttatagagaccagagaggatagatatggctagtgtcggtggccttgagtaaacttgaaagaagaatgtgtacatactacatgcgaagtttggtttaagcatgcttaatacattacttaattagaaatacaattaagatactctcttaaaattagtctctctcctaatgtataaaatgaatttaagtgtcacaactcatataactatatttatattagggtaaattgcggtaaaacctcaaaattttttatttggctttcacttagccccaaaaccttaaactttatgtggtataacccccaaaaccgttagtactgttagcaaaaatatacctccgtccccctgaccccgttattctcctacatggctcaatccatccaatgccaggtagactcatgcttcctatatcattaattagttaatgacgtggaaaataaaataaaggtacatgtagttttttttttttttttttttattttttttttttagaactaatggctaattaaaagggaaaaataaagaaaaaagcacacattaaaattaaaagacgcattaaattctctaaatcacacattaaatttaaatacaaacggtattagaacgatacaaaatgaaaaccaaactataattgtaaatctaaacataaaaagagatagagaagtgcttgagaaatcgaaggaaacccagaaaaagtatacaaatttttaccatttttcgtgagaaattgaagtaagccgagaaaaacaaaaccgttaaagtgatagagaaagcacaaagggggaaacgcgaaacccagccaacctaagaatagattcatcatcctcatgtgaatacaaagaaaacccaaaaaattcgtggaaggagaaggtttttgaaatggcgcatcgtcatcgaggtgaaaaagaccgactacagtaagtcccaaatcaatattttagggtttttttttttttta

SEQ ID NO: 251619 - DNA, 765 bp, Cannabis indica
tacaatatctataattggtaagaacatatattgcatatttagaatacatagattgagggattcggacagcttgccacatccctttgataagatccttggattgtagggattgtacgtgtgcttgagctttacaatataagtcttgaaactgctaagtcttaatgcattgctcggatcatttacccttgccctgctcggtcaggcagactctgtccgtgcagatgtatattgagcattgttcggaatgtttccttagccagatttaggaaatagcagccacgtgtcaccagtgtgcgttgccacgtcatagtgcgaaaaatgggataacatttgcccctcaagtctgcacgggacttctgaagtcgcgcttagactttactcagcttaagcttgtatcagaacgggtggcacatgttcgatgcgcctgttggtgatccgatgtgattctgaccaagagtcccttcaattttcggctaattaatgctctgattaaattgtacctcgaggcgcgccaactattcgcatgcttttgacgattacccttctccaagtactttggttgcttttgatttcccaatatttacttttggggggaaattgaggtgtttgaaatacgaaatgattgcaccttttcactaatttacttataaatagggcaaaaagtcctaataaacaacttttagcctttttcttgtttagtgagttcagagcaagtacacctttctctctcaaatccatcgtggaatttacagaaagagccgacca

SEQ ID NO: 251620 - DNA, 781 bp, Cannabis indica
aatcttcatcggaataatattctggcctggactccaaggcaatattagatccttctcgaaacaatagatatgatacttcacattgccacatgacaaaattactggtaccgtcaaatttctgcacctcaaactttgtatttgataacatggttctcgtcatagaaccttttgactcgccacaagtttttatgtcaacttgtgcatctttttcaagttctctgttgttaaccataagtgtgaacagatgacaaaacctttgcgcttatgacttaaaacaatgttttccgaaatttcaataccttattttgaaaaatggatgttgcggtagaattccaaacagtctaattagttaggaataggttcgactcggttgaaaacgagtgaaaaatgggctaactcagtccaaaaaacactatttgactgagttaacttagttactggcagcaacactctagcggcttagtggtgcgttagacctccgattgaggcaattcttacagcgttagattcatctcgtctagatcttcaattcggtatataatattgctatattttggctcttgttatcccatttttgacactatgacgtggcagcatgtacgagtaatacatgtctgtcattccttgcacttgggcagagaggtataccgaacagacttcaagcaatatatctacacgcataaagtctgcctagccgaacagggcaaaaggaaaattatctgagcaaagaaaaaagttagttcaccgagccgtgtcaagacttgactactttagaatggta

SEQ ID NO: 251621 - DNA, 556 bp, Cannabis indica
ttattggattttcagcttgttgcaagatgattttaggtttataaatggttttagctcaacgagagaagctactccattttgtaagattcatcaaatacgttttttctttaatttcgcctaaatgcagaaaagcaaattttggatatgaatcgatcatgataatgggtgaggatgggaacaattttttgtgcgggtatcatcattcgtttatttattttagatattattcagtgtaattataagtttaatgttaaatgtaattcagtacaaaagcttaccatctctgcatctgtagagtgtagacgcaaggaagaaaagaaaatgtacaataagaacgtggtaaaattttatgcccaagatcagaaatagttagtcaaatgttcagaaataatcaaccaataacattgatgatcgcatccaaacaattgaaataaagccatcaaaacatgacagataaaagtgagaataatgcaaaaaggtttattccggttcaagctcaatacaatttttcaaagtcctaattctctttctctctctttgaacttgcaaaacttcc

SEQ ID NO: 251622 - DNA, 706 bp, Cannabis indica
tttaatgacttagaccaatcaggaatgaccacgtagcaatctacttaatacttaacattcatgtacctatagaagtttcagaattataacttagatattattactgctaaaaattaattaaacttatgtatttatctgtaattgagagttaaacttagatatttatagcgcaaattactcttaatataaatacgatagtaagcatatgacttttcttttctcatttttaaattgaatagttattctactaaactagtaaaaaaaatattttgatactttcataggcaactaaacataaaaatagaataaaaaaaaagatattggcggctaaaccacctgaactttacggtttgtaacaattaactacaaaaatcgaaattttggcggcataactacctaaaccctggttccgttttgctatgtacacctccgtccaaaaatcacagttaagtgtcacggtggactgtccacgtgtaaattaaaaatttaaaatttattttttatttttttcttctcttcttttccctttcctttttcttttcttcttcttcttcttcacttaaaaaccatagcaaaccctagccaaccctaacgtcggcgcatcccaaaccccttgtgcagtgtcggagccaccaacggacctcctcctctccccaatctctcgaccaaaaatcccaagacctaaaaccccgaaacccaaaacccc

SEQ ID NO: 251623 - DNA, 809 bp, Cannabis indica
atacactccgaccccaacaccaactatgggtccaggtttaggtcttggtccgagtctgagtctaggtctgagtccaggtccggtttaggtctgggttcgggtccgcatcctgagtccgggtcccaggtctaggttcgggtttgagtctgggtctcaggtcttgggttttggttcaggttcgggtccagattggagattggtgttgaccctgaatcctttgcacatattataatacaagctaatacagacaatttgatatgtattaaataatacaacatacattgtattaaaaattttactcgtaataattaatacattgttttatcccaacataatattatttattatttaatataatacgacccttatacgacatactaaccaaccctaaaaaaagctgtttagtaaaaaatatatatttatatttaaatcgttgcaagaaaagaaaactaacaaacattgttgtatattagcatccgacaaaatgacaaatacaaatgtatatctcaatattaaaaaaaaaatagaatatatttcaaagactaattagtaagccacatccattaaggaggaagagtaatattttccttttattatacatcttaatttggtttgactatgccgtttatttactagaaacaaaaaaaaaaaaaacgttaagcaagcatatatcatgggatgaaatgaggaaagtaaaaattgtattatatttagtataaaatgattttgtgatatatttgtgtactgttctaatgaaaattataagatttgatgtaaaatttaatatttaattaataattttattaaaa

SEQ ID NO: 251624 - DNA, 941 bp, Cannabis indica
tatatttgcttaagaagagttgtagaagagaagcatataggagaactattattgtggagaacccaagttttataatttctttaagttttaatttaaggtgtgaatgacttttctatttgtcaaaatttgtatatagagagacagagtgagagaaaggttcgagttgtggtgtttttttgattatatagtttgtttcttagttgttcttcttatatatgtgtggctatgagttactattttctatgccaaaaatatcatgtcctctaaatatgattttagaatgaagcaaattatataagttactaaatagttaatttttcattcaaaatctgaacagttatggatccatacatgcgatatagattggcaacacaagattgtagtgagtcatttacagatatattaacgaatgacaatagtgagaagaaaactcgaggtcctacacaaatgcgtgaaatctggggaaaccgtgatggtgggaagataaaaatcacatgtaatgatttaggacagccccatgacaaaaatgcagacatactttcaagctttattgggacattagtaagagatggaaaaaatgctccaattaattatgaaaattggcataaggtacctgttaaatacaaatatggaatgtggaaaatcttacaggtattaatcattatttaatttagaagtttaaattacacatttatgtatttttaatatgtatcatgttttatcattatttaaatttgttaataatcattgttttattgctgtaggaaaaatttgagattcctcttgatgctaagatttggactttcagaatgtttggtaagaaacttagagagtggaaatgttttcttaaaaacacttattatttggagcacttatcatttgaggagcaaaaaaagtataaagacaaaagagtgtatgatgatcaatgggaagaattgatc

SEQ ID NO: 251625 - DNA, 939 bp, Cannabis indica
ttgacaagatcattctctgcaaagagaacatgtgccacataatcacttggatagtacattcatgtgtcattttgacataggaatatacaaactaggggtggttatgagtaactcatcaaattcttagacaattactattgatattaacttatgtcataattctagcaagacagttaagaaagtgattaagatcttgcaaattgataggggtggagaaacatttcatatacagttcaaagatcatttacatgaactttgaattgtaatcgaagttacctcctcagaattttgaagttgcctactaatgaaatgattaagtctatgattagttactagcagctaccaaagtccttttagggacatgtcttagagactttttaaactatcgtcccatctaagactaggtcccaagacaaacttagattgatataatggtaaagtacttagtgtacaccattgttaaatctagggattccttaattatgtccttaagaaatagctagaactgttgactaaggtttgcatgtttggtggctattctaaagtgactaggggtggactacactatggttatcaatactagtaagtgtttttttattcacaaatactaattttatagaagtgactatatagttgtaatctcaaaaccaaagtaggaaagaagtggagatactattcaatctcactccaaatgtattctatcatcttctgcacctgtaaaggtgatcccactccctctgttatgtgtaacgccctaaataattaggcacgctacccaaaatacttatgaagtcctaatcccctaaccgggattactaattaaaatagcgcagaatttaaacttttatattaaacagactgaaaataaacttgtaatatatttaaacttttcaaaatagttgggatcccaaaaatatttacaaacttattacaagttct

SEQ ID NO: 251626 - DNA, 714 bp, Cannabis indica
atcctggtaaaataaatttcaaacacttacgtggtggtagactgcccgaccgcatacaatgcaatccttggccgaccggccttggtagatttcgccgcagtcacatccatccagcacttgtgcttaaagttcccaacctaggaagcttggatagggacggtgagaggaaatcagggggaggcgaggcaatgttacaacgttgcgacccacctgcccgtactgatggtccgggaaaccattgagccagaaatggctgaagaagacgagttggatccccgtgtggggtccgaaaaaattgtagaaccaatggaggacgtcgaggagatatcagtgtgtgacctcgactccaccaaggtactccggctaggaaaaagcctagacccggaggaaaaagaaaaaataataaagacactgaaaggcgccattgacatttttgcgtggtgccaagaggacatgactggcataagtcccaacatcatcgcccatgtcctcaacgtcagcccggacatgcctccggtccagcaaaagcaacgacccctcgatgtagtgaaggccaaggccttagagaaagaggcggataagcttttaacaaacggcatgatccgcaacttctcttacccggaatggctagccaacccactcctggtgccgaagcctcggaacctggcgagtttgtatagacttcactgatctaaacaaagcttgtccaaagga

SEQ ID NO: 251627 - DNA, 641 bp, Cannabis indica
atttttttaagagacagaggtcacttatcttagactaacttcttacaaaactttattcgagagcctcacttatggcagagaaaaaccgtggttacaaattatgttttatcgtccgtccataaaacatacataaatcttgaaccaatgacaaacatgagtacaaaaggagctagaggttgtaaagagtgagtttcgagaggattttctcctcgtactttttgatttgtgaacatgatttggtgaccgaaccgtgtatgttgctgtgtttgattttctttaaacatacatattgtattttctgtttttcatttgtttttagagagaaacaaaagccaagacgacgacttggagcttccatttttcgatctacatacaattagtgttgccactgataatttttcagaggctaataagcttggagagggtggttttggacctgtatacaaagtaagttcacattaacatgtttagaacactttctttacccaatttggatatcgaaatatttatcttcgtcgtgacatattagggtatgctagacggaggtaaagaaatcgctgtgaagagactatcaatgtgttctggacaaggagctgatgaattcaaaaacgaaattaaactaattgctaagcttcaacatc

SEQ ID NO: 251628 - DNA, 886 bp, Cannabis indica
gtttatgtttttaattcaaaatataaaaaagtgaatgttgattactctatagtaaaataaacatagattttaatattggacgagagtacctgtatagtctatgtaacatttagaattttcatgtttaatacaaattgtatgtttaattcaccacagaattataagactttaccatacactttagattctatatatcctaataataataactaatataaattgcaatagttaatccgatatcacatagaagttggaataggaactaaacttgtattagaccataagaacttgatgcaattgaaactaattgtcctagtttagtcatttgtttttattgcctttcaaatttaagttaaattttttttttttttaaaaaaaaaaaaaaaacttttggaaaattattgtcaccaaaaagaattagaattgaattgtttggtacttatttacagtcctgaatgatactttacttctattattatttgtagacgacacatgtacttgcgtattaaaatttccacaacagttgtccaaacaagttgaagatgttgaagtcatctatagacaagtcacaacaaaattatcatccttaagacgagccaaatagagctgcaagggaagctgagtgaggcaaatggcaaaataaagaaggcagggaaaaggtgacaactcttaacaaagacattgaaaccaagcaggagcggatttgggtccgcaatgcggagcttctcatggtcactaatgattgaaacgacttgttgaagataaaaaaggacctgaagcagaagctggaagctatcaatgtgaagaggatcactcaattatatgaggccaaggataaaagggttgcctagttgcaggacgtccttatgatcacgatctacacact

SEQ ID NO: 251629 - DNA, 1076 bp, Cannabis indica
ctctaacaatttatgaacaattttaattttttaatacactaaccttgaaatgcaaagtttggcagcaaaagaaacttagtgaaagtgagcgtgagcgtcgagccttcgagcaaaccggactaattcactgtcatgtcacacatattatacattatacatattaaaaaaaattaaaattaataaaaaaaacaataaattaaaataaaaggacattttttaggcatttttttaccctctaattttataatttatatcattcacttaaaaagtgagttaattacaataaattataactcacatacaaaaatgagtgtgaaatttaggtacagaacaaaattattcatctacaatattatatataaatttcagatgtactcaaatattaaaatgtttaaaaagaaaacagaatttgtattagagataaactaaagatttaggtgtgggacaaaaatataattaactactgttagtaatagtaggtagatccccatgtaagaaagaaaattaaagaaaatgcaattgttaatacaaataaaattgatgaaacaaaaaagaagctaattcaaacagttaccttaatatatattattaggagtaagttaaagaatattttggaaaaataaggatatagctcaagtaatatataactgaatatatattaatatataagctgagagagattaggagttagttaccaaacggcaaacggtgccgtggtgactggtggtgcggtggggctgtgccaggcgacgacggagtggtgcggccgtgggcgactcgaacggacggagtcgtggaggagccgaggaggaggagtcgccgatcttggagccaagaggaggaggagccaaggtctttgtcgtcgatccctcccctgcatcttcgactcgtcgtcggcgggtggcgtgggtggtgaggatcgtggctggctggagatgaggtggtcgttctggtgtgggatggaattggaggctgttgtgaagttttttagggtatgttatgtctgaatgtaattgtaaatgagtaaataatatttactttttagggttttttatttatttaattattaatttaat

SEQ ID NO: 251630 - DNA, 680 bp, Cannabis indica
gtgaaatgatgattttcttcgagtttggcttaaaagagataaatggaagagctcttatttcagtgattatattagttactgaaatatcatttatagaaagctaagttttttaaggataaaatacattgaggggtgaaacgataaatttgtctctactcaatgtaaatcatctatagaggatatttgattattgggattataacgatggttaaatttatagcgtatctatatcgtggtacctattaattcctttgataatactaaagtattgaaaatcagttccaaactaaattttcagcagctagaaaagcttgtcacttttctcaaatagaacctggatgtttttgcgtggaaatattcagacatggtcgaaatattgtcagaggtcatgtgtcactggttgaacattgaccctgaagtgcgaggagtacgacaaaagcaccgcaaaatggaccccgcgaggtaccaagagcttaaggaagaggtggaccatctgttagcatgcgacttcataagggagtcattttacccgaactggttagccaactctgttcttgtaccaaaacccaacggctcatggcgagttagtatcggtcaaaggaagaggaacaacccgtatcaagtttcaaaagagatttttacttttaaaaatgttttatttattccaaactttagtagaa

SEQ ID NO: 251631 - DNA, 910 bp, Cannabis indica
ttattatattaatttttttttagttcccatcaatgggtattatccattaagaagtgttccatatatatttatagaaatgttagcttcgtcaatttatgttaggtttgagatggtttttgatgtttgaatgtttaattttggtttgtttgaggcttagtcgtaattctagtattatgttcatgatttataattttttatttacacttctcactttttttagtagaaagtttgtggctcacaccttgcctcaccaaaacaaagcatcttggtactagctatgtcaaacattgtttttgcttattaaaataatgtttttatctacggttactattaaaaacaaacattgttgctttgttattgtgactccgtattcctaaacctccattacagtttggtatgtgttgatggaggtttatcaacaagtgattgagttggattagttgagtaaataatgcaatacaagcatttacataaatctttgtattgtggttggtccaagtgacctagtccacgattttcctatttattgagagagaattctgtagtaacaatatatcattaggaattccccctttacatatagtggtcaagcccctattcataggtaaaagaaagttaaatagttagataatagaagcgagatgtggtctagtgtataggtcaagcccttattgcattggcccttgcgtgtaactaagaagtggtataatatttagcccctaatttgttgaaagctttcttcatcaaagattttgtccatgcaaatcaatgcatacaagtgttttatctgcatcttataataataataatatttaggatatgtgctttagcacttaaagcttgcgatcactatgtatagagttttttagctttttggaacactttgagtacgaagttcacactttgggaa

SEQ ID NO: 251632 - DNA, 693 bp, Cannabis indica
atttcgatcacatctctaattttatgggataaatttgcaccgacaagaaataaaaggaaaccttcctagtttctcttttaattttatctgttttaggaaaataaaaaagtttcgcgttttatttctctattgttatggaaacctaattaatgtaattctttttttacaaattggagaaccatttcactatttagggattcaaaatcaattttttaagagagctcttacgcagtaaaattgtaagctttcaagagtaatcaagaaactcaattgcttctcttctcatcagtaaatacaagaaaaagaggagtaggctatcacaattatcacgagctcaaatcactataaatttttgtgttcttattgcttaagttcatataattcttactcgatatcatttattctaatcgctttaattaacttagtgtcgttgactaaaagtaggtcaacattttggtactttctttgagagttaaagagcacgatcgttgctttgattttcttcaaaacacacgaagattgttgtgactacaaggagaggaaatcccacagaaataaaaacttttgcaatggctatggatccttatgtgaaaactgtagagaatcggagagatctagtgcagatggacccaaatcgaaccattcctcagcctctaaggggtcactggtcagtaggacagggagtaacaaccc

SEQ ID NO: 251633 - DNA, 667 bp, Cannabis indica
aaaaccataccaactagtagcaccataatctgtccgaaagccacaacacttccaatactacactaaatttcccatttaactcaaataatgacaaccaggcagttcattgttcaaaaccccaacaaaacttcattatcccaccaaaattgatcacctattcaagttgaaaattctcacaccaaacaatcagcacctattgatcatggcacccttttgaatgcataaaaatcacatacaaagaatttccaacattactccaatcagtcgaaccctcccaacaaattccaaactatcagatttaaccaaattgcaacatccacacatacacactatatacggcagccaagaattcctccaaaaaaaaattaaaattcaaaagctcactcttgacttcttgctgtcgaacatggatggacatgaggtggatgcttggttcgtggtacagattgagtcgaaaggaaattgagttgctgttgtgctgagtcgactgggcagtggtgatattagggtcgaagaggtgatagtggtggttcggatgctgttggattgttgaacttggtggtgcgggttaggtcgtgggtttgcaggggtgaagtgatgcaagtcgatggttcgactgagttgagtgactggatattggtcacggctgggagatgcagttgctggt

SEQ ID NO: 251634 - DNA, 1497 bp, Cannabis indica
ataactatctagaaaatatcttaatttaattaagtatctattcaagatttggaaaatatctaatttaatatcaaaattaagtggtaactacgtaatttaagaatattcaattttaagtttaaattcaacttaaaaaatatcttaagaatcttcaataaccaattcctagaattcatcaacttaatattaaattcaaaagatattcaaatttaagttaataaggaaaattagttagaaataactaatttataacttaaataggaatatttaacgaaataattaaagtaagtttcagaaagaatctagttagttaaaattctttatttaattaaatacaagaaaaatacaaatagtttatctagaaataatattggactctggaccaagaccgagacatgagaccctaaaccgaacctagaccagaacccagacccttatcatgactcgagactcgtgccctgagccgcaagacccggacaaggacctagacctagactgggaactaaactcggacccgaacccaaactgggaccagaacccggacttggaaccaaacctagacgtagacccgaactcagactcagatcaggattcgggacccgaacttgaaatttgacccggacaggtacctagaattcaaacctagatgggggacctggatgcaggacccgggccccagaacccagaatctgatcggaacccaggactcagactcggacttggacttggacctagacccaaaacctgaacccagaccttgacccagaccccgcccaggagtcaaatcaagaccgtaacctagagtcagacccagattgggtccaaacccacacctagacccgaaccctgaatcagacccgaactcgggaccataactcggacccaaaccctaaaaaggacccaaacccaaacccagaccaagacacgaatccaaaccgagataagaacccgagactcggactcaaaaccaaacccagacccaaataaggatcaaaacttgggactcggacccgaaccaagacccagacctgaacctagaccccgacacgagatccgaacccaaacctagacaaaaactcgaacccagactgggatcaggactcgaacccaaactgggacctcgacttgaacctcgaccaaaatccagatcttaactcgaacccagaagcagaccgtgattagcactagcacccagacccaaacccaaacctagacaaaaactcagaccgagacccaaactcgaacacaaactgggacccaaacccagaccagaactaggacctagatcgggacccaaacccaaacaaaaatttggacctgaactcagaattgggatagggaactggagaacagaactaggacccaacacccgaccctaaaccctgacacgaacctaggatcgagctcgagatacggcacctgaactagaaccagaccgggactagataccaaaatttggatttggaccctttgttggaatttattttaccaggatct

SEQ ID NO: 251635 - DNA, 577 bp, Cannabis indica
ttttgcagctcattgacccacatgcttgtgagtatgcaaccagaataaggacaacttcaacattattcatctcattcttgacgcgttgaagtaagcatctcccatatacttcactcaacatttaaggaagagtgctagatgtactatgattatacacttagacattattccacggagatgtttaaaaaaaatattgattgaatgatgagaacaacaaagcacattcaacacaatcgtttatagataacgacaaagagtaattatgcggctatttataattctctcatgtgcctaaatatgaaacgtggagaatattcacatttcataaacaattacaaatgattagaccccaagggaataattgtcatcctaaactcctataaataaggcatagaacctagtgcacaagggacgaccaagttttggaaaaatagagaatattgtatttattgttcatttttgcaaacagttaattgtattctgtatacaatatctaattttaaataagatagactcgtaaactatgaaaatttaattttaaatcacgtaaaaatattcttatcatttattgttattc

SEQ ID NO: 251636 - DNA, 605 bp, Cannabis indica
tattgtagattttcacaataagttttaaatcttacttttttattatattgaataagtttgaaagaatttctttctatcattttatatcattattttcttatcatttatttataaggcaattgagttttattactttttttttgaaaaatatttaattttaattgggatttgatttatttagtttgattaatctcttaaatcttatatatgtttgtaggttatattggctagtataattctaccttggaagacttatctattacaataaaaaagcttcaaagataagttttttcttgttataataataattgcattttatccttaatttaaaaatcaaaaacattatctttgtatagtgtgttaatccacatttatacatctatttattttgtaagtagttttggtcaaggtgtttgtttagatcggatgcctcttgaaggtggtctcaaggtattttgtctaattttttgagataacttggtcttatataagtcgttttgtttgtagtgactcatattctgactttgtatatctttggctagacaattagtttgttgactggaattttttttgcgtcaacgattatcatagtgatttaaatcact

SEQ ID NO: 251637 - DNA, 1675 bp, Cannabis indica
tttccccagccagcttctatcctctttttttttttgggtcttctagagctcaccactttaatggaaggtaagtctattactgtccacatgattctttcattctagttacgtcatataaatatttagcagttggtttaacatatgtcatttgaaaccaacatttgttaaacatacgaaacaatagtggaacaacccaaaaacaacattaaaaaaccatgacagccctaatattaatgattttaatgtttctgccaccggatttaatggttgttttttgtttatgttattgtggtggttttgtctgtctgatgttatattcggcgtttacagtgtaaaagaaaaaaaaagtcccaaggcactataaaagttatttttgccgtgtggcagtattttgtaaaaattgggtcaaaatttaatatttttgtaagttttcctttgaaatatttaagatattatttccaaaaaaaaaaatatatattgaaacagaaaaaaatatatgtgaccttttagaggctcaccctgctaggctgctactgcttaatatcaaccaacactacaaaaaattaaacttttagtcacaataaaatttgtgactaaaaaaaaaagttgtggctaattataaattatcattattatgttgtgacttaaaggtctgtggcaaaaagtattagtcacaaaaattaccatttgttatgactaaatgtatttttagtcacaatatttgttgtgactaaaactaaattagtgacaatatgtaactaaatactatgttttagtcacaagtaactttttgttgtgactaaaaatcacaattttagtcaacaaaaaaaaaaatttgttgtgactaaaaggttgtcactaaaaatagcagttttttgtactgcaaatcgctgagctgaatcaatctctgcatttaaagtgagaattggtcatagaaggcctttgcaagcgccctaagtaattaattaagatactacgtctgctatactctgtgtgagcgtggctaaaaagattcggcatctagcttcatttagaatgccttgcagattagtatgcacctcaaaaatcttagaacattttatcaaaccgtgtacctgcttgaatatatatgctcaaaaatactgatgatctcaacaattttagcacaatattagtgcttttgatgatcaaatactgatcgaagtacaggtctgtaaaatatctccttactttattaggttctctttataagtggtcttgtttcacttttcactttttgtcatttttttatgtagtcataacttggtatttaaaatttttactttgtggtaacttatttatcataaaaaatatatttatttctggactataatatttatttaatttttttaaaatgcaatattttgatcagtgggctataggtcagattaatattaatgggtcctccctagtcacaacaaattcaaatacaatcactacgtacatattaagcttattctcaattcaatctcatgcatatatatatgtaaataagaaaaaagtacacgtacttgctagtaataaaaatcacaattaagaacataattaattaacgtaataaaattcaaaagttaatatatattatatattattattattagaaagaaagaacacaagaacaaattaattacaaatgaggaatatatattctctgatc

SEQ ID NO: 251638 - DNA, 500 bp, Cannabis indica
aaagctttatactggtggccgggtatgaagagggatgttgttcaatatgtgtcaagatgcttaacctatcagcaaattaaagtagaacattagaggtcggcaggtttacttcagcctttaaagattcctgagtggaaatgggtagatatcaccatggattttgtggtgggattgcccagaacaatagggtattatgactctgattgagtgatagtggatcaatatacgaactctgcacactttttaccagtgagaacaacgtatacggtggatcaatatgctgatttgtatatgaaggagatagttcggcttcatggtgccccaaagtcgatagtttcaaaccgagatccaaagtatacacccaaattctgggaaagcttacactaagcaatgggtactaaattaaaatttagtacagcttttcatcctgaaaccgatggtcaatctgaaaggatgattcatatacttgaggatatgctgagggcatgtgtaatggattt

SEQ ID NO: 251639 - DNA, 325 bp, Cannabis indica
cactcaggttgaccacacacttgaattggggattgaagtaagattagtataattgtatgcatatgtgattacatgtttagcatgcatgattatgattggctgttagattacattgaaataacagtatcactgtacgtagagttatattggatacagaagaatgtatgtttggcataagtactgattgacgcaatcacgtcggtaccactagagtacagagtataggctgatagtatggtcaatagtactatcgtacgaacgttctagactcagagtataggctgatagtatggtcaatagtactatcgtacgaacgttctagact

SEQ ID NO: 251640 - DNA, 795 bp, Cannabis indica
cattgatacatgggtcttgggagggggaaagaacgggcgagttctcagtcaaaagtgcttatagcatgctccaacaacaaaagcgtgccgaagagatggctgcaaactcagacatctggcgacaactatggcaattgaaggttcccccaaaagtcaaaaactttttgtggagagccgttacaggtacattaccaacttgtgtccaactagtgattaagcatgtcgatatttcagtcacttgccctgtttgtaatctacaacttgaaaccatcttggtcaccttgttgcagcacgggccggttgctatggtggaagatatgcagttgaagtcattgaagccatggggattaaagaagctctcagttgggtaaagaccaacaactggcaacatgttcaaattgagacggacagtcttgtttctgtataagctattcgaagcaaccaagcaatgaagtccacttttggcattttaatcaaagactgccaacttttattatctaccctcttaaatgttaatttatttttcattagacgatcagcaacccgagtagcgtattatgttgctagacattctcggtatcaatctgatcgtagcattttttatatttctatttctggtgaactcttacatcttttgtattcaaaatgctagtttattcaatgaagttatatttcatctaaaaaaacataatgagtataattaatttccaagcatacaggtagcaaatcggctctacaactaataatgtacataatcactacagatatatacattcccaaaaaaaaaaaaaaaat

SEQ ID NO: 251641 - DNA, 910 bp, Cannabis indica
ttttttttttttgtaaataatatttacatgtattcttacttatcctttatttaaatatattttatctttttgactcataaccaccagtctctcccttcctttcctaaagggttggtggtggtgtttggataatatatatataaaaacaatttatatatatattcatgcatgcacttagatatataataataaatctttttttggactgattatatatggcgccctatagtttaacttttttttttttatatatgggtgggtggttggcacttttttctcttaatctttctttataataactagtgtcgtacataataattataattctttcttacaaagaaaaagaaagttaggatgatataacacttattagttttgtagctatcactagtactatataagagaaatgataaaacctccacccactatctaaaatctaaaggtatcatattatttgactcgaacggtgttataactaataaggcttagaatatctctaatagaaatgtaaataagtgctgtaaagttaaatataatttatttaacaaaaagtacacttgaatagtatgtcaaaaagttatgtaaatttgctacataataaattttgtgccaaatttaacacaatatttgttatgatataaaatttacatcacaataagtgcactatttttttattttacatttatagcatttatattattttattagtataattaactatagcattaaattatgaagaatttatataattattttattgtcttatatattaaaataataatataattgatgataaagtgttattagttttattttttaaattaaaaatattaattagatattaaattttacatcaaaattttacaattgtgcattcgagcacaatgctaaaatttgacataaatctacc

SEQ ID NO: 251642 - DNA, 676 bp, Cannabis indica
ttattgtgggacaaattttttttcaaaaatactgtgtaaattttatactgtatactatgttaaatttttacatttattttttaattgttctactgttgtttttaattgttctattatattattttacgattattttaagttactttatgtaaagacagtattttttcaaaataatttatgtgacagtaaaattataaacttttatctaaaatctagtatttttgtaaaatcccgctaacccattcaaactgagtttcaaccttagttcagttcagtgggataattgtggctagactaattttgtaactttatttgttgccctcagtattttaaaataaaaataaaaaataatgccaaaacttcccctatatttttattactttagtagatattgttgatgaaaaaaattaatgtcaattttttttccattagttaaatgcaaccaaattcatcacttacatactttataaccaattttaaattttttacattggtaagtattttcaaaagaatatagggtagttaatcaatgctaaataatactacaagttttaaaatgcatttgtttcaaaataaataaataaatatatatatatagtaaaagaaaacaaaaacataatatataaaaatttgttaacgtaatataacttgtttagtttcttatactaagaccaat

SEQ ID NO: 251643 - DNA, 744 bp, Cannabis indica
ttttttatgcaacaatgtatctaatgggaccaaccattactcgaaaatactacttgcctaaagaggtataaagggaccaataaatccctgcaactatcgaagattagggcacacaattaaaaaataagagcacatataaaccagctccccaccaggcttcaatggagtaccacagctaggatttcagagtgaatctggtggtttcaaaagcccaccacttggtaacacactctttcaacctttcactttaaaactagatcgtaacaattataatttgcagaaaataataatttccacgattaaaagaggccacgtgtaaatggctttatatcaatgggttgagacaagctcttatagagtttgttcctgcatgtgtagctatagatgagggtttgccagtagcattttggattcgagtgaattctaaatttaagcaatggatagattgtgacgaatggcacaccaattgactatataaattgatgacaaaagtcatagctactaaagtaatggggtgtacttcaactagatccttgtggatatgtcattaaaaaattgtatggagctcacttgagtactaagatgtatgacctggggactatgctacagaccacacgaaaatgatcaatcttaatggttaaataccttacatagaaaagatactgctcagatcaattggcacttcaggagatccatatcctgaatcacatttagtggcaaaaatgtcctcaatggactttatgt

SEQ ID NO: 251644 - DNA, 542 bp, Cannabis indica
aaccttatcctgccgaggcattagctacaccctcgaacttacactcggaggagcctgaacaaactaagtggacgccatcaaaggagaaattctgtattggctctgggatgaagcattgaattcaggaaggggtgccactcgtggaaggaaattgaagggcaaagctgctaaccgcactattaaacgcacttcgggagtgaaaaccagaagtggtagaagacgaggacctggtactggggacaatagtggaagtgacaatctcaatgaatcactcaacaactgtattgacgttagtattgaatatgctagtgttcaaaattttggaagtgacgaggaggcggctcgaagcatgcccccattgtcctcatgaggtgcttaggttggaactgtcgtggattacgtcgatccacgacggagaggacccttcagggtttaatccgtgattctaatgcggactttatctttcttttagaaactaaagttgttgtggagaccatggttaatgtgatgaatcgactggggtttgtgaatcattggtgtat

SEQ ID NO: 251645 - DNA, 955 bp, Cannabis indica
ctttggaattgaaaatatctcctttactttgctattttgttttcagatttagtcacattcttagaaaagtagtatttgttgaaacaaatactttcttatcttaataaccataggatggtccaaccctaatcacttagaatagctattaaacatgcaaaccttagttaacagttctagcttttcttaagttcatgatcagaacatccctgaatctagtaatggtgtacactaagtacataatcattatatcattttgaagttttcctatcactagggtattctcctagaaggacttaggcatctactagtaactaatcatagaccttttactttcatcaatatgcaattcaaatttctggggaggtaagtttgaatacaattcaaagttcaacttaatgatctttgaactacataactaaaaatgtctccacccctattagttcgcaagatctttaactacttaccttaatgtttttcaacattgctagaaattcatgaaatttctcaaacatttcaaatttctttgcataaggtaaaatctagagtgattgtttaagaattaaacgataactcatatccacccctgaatgtagatccatatgttcaaatatagatgatcctactttcaagtggacattggcatattttctctttgtagagactcatcttgtcaaaaccactatgaacaagatgcaaatgccatagatatatattatgtggttgtggtcttttgatgaatcttgatgattctaagatctagttacaacaaagagttcttagaatagtccaagtagattttggtcacagaatacaaaactcataatccatacatttatatacagttctgatccattgtagaaaatggatattaacaacttgtgaatgttatactgtattgcaaatgtattctggaaactaaaatttaaaatttctatttggaatctaaaatttaaag

SEQ ID NO: 251646 - DNA, 1031 bp, Cannabis indica
taagtttcacaaacacaatcacaaacaaactcaatctttaacattttctcacaaagaaaattaaaaattaaaacataccttggacattgtgggttcggttcgtggatggtgctttgggtctccgtcggcgtcttggtcggagtggtgctgctgtgggtctccgtcggactcgtctcggtgggaggtgggggttgccgttcggttcgggcgaagtgggcaaagaaatttggttgagaaggagagagaaagggttagaaattatgaggaaggtattttaggggtttttgtaaaagtgtcatatttttaaaattaccttaattattggttctcctaaccaattatttcttataaaatgcataaaaattcaaattttcctattatacattgtagttataatagatatttcatatgtcttcagaaaaaaaaaaaaattatttacaacattaaaaataaaattcaaaacaattagttatacattattaaaagaatataaataaatacaattgactatttaaatcttatatttccgtgttgtaaattattaaaaatttactgaaaacaaacaaaatgcatatataattaatataattataatacatgttgtcattaaaaaaaaaatcaaaggtcttgatctacttaatttttttcatatatatctattctatataaaatgtgcctatataactgaaattcttggtttatgagaaattcatgggtgactttttatttttatttaataaaataataaaatattatttatatataataaaataataataaaacaaatcctattaatatttgaactgatatttagcatatttcaactctatatataatcacaactataactctagaaattaaaaatatatatataaaataaattgaaccttaaaccgcatatacaattagtttgttgagagagatcaggaaaagaacgaattatatatgaattttttttaccaaatcgtttaggtttcctctagctatttatcttcatttatattttttttttcaatcgcagtccactccca

SEQ ID NO: 251647 - DNA, 823 bp, Cannabis indica
aatagtatatgtattgcatatgataatatatatatatataatatatattttacaacttcaagcttctttattaaaaggaaattattatgtggatattattattgttgaatgtattatatgacgtagtttttatatacattctgattatccaatcatcttatatgtataaatatatatatatatatatatgagattatgtatatatatatatatgagactaattaaaatagaggcttgaggaatgctacagagctccaatcaagctcatcatactgaaatgtaaaattatttaaaagaccatgtattcaaacatttaaattattatcattaaaattgtggtttttccatgcaattcaagaataattatgtataagaatttaatatttcaaatatttttaattttttttaattaatcacaataatttaaaaaataatattacttttttaatttcacatttaaaagaaacaaaaataaaaatctattgtaattatatttatattcatattttatctctcattcttaaaaggtatagaattctaatattatgcaaactatacatgaaactattattattattattattattacactttgatttagaaatttttacattaaaaatacaaaatattaattttattaccaaaaaaccatacacggttatccaaacatttatacccttttcttttaattttttacatttgtaccacatgcacacacaataaatgctttcttgattgacacgtgagattgatgtaccacatcaatctttctatatatcatttctctctttttttttttctcttcttttttctttttattttt

SEQ ID NO: 251648 - DNA, 1159 bp, Cannabis indica
gataacaaacgaccctcccaactctgtattcgcttgagcatcttatccttgagaaaacccaatattgcatctttatttctccccatagtacaagggaggcccaagtaagtactttgttcatctgccatgggcattctcatcatcgagcacattctttcatggataacaagaggagtattagagttgaagaagattgaagacttggtaaaattcacctgctgcccagtatccgtttaaacaattgaaggagacgcagaacattagaagcttccctctcattagcacgacaatagacatagctatcatcagcaaatagcatgtgtgatattacaagtgctccattcgcaaccttacatcccttcaagagaccatcaacttcaaacttcttgatgagagaagtaaaaccctcagcacagatgagaaaaagataaggagataaaggatccccttgacgaataccccttcctggcacaaaagaatctgacacatgaccaccatgaacaattttgtacttcactgagttaaccgtagccaaaacaaggtccacaaacgagtggcgaaggccattttttccatcattgctctaagaaaaccccattcaactctgtcataagctttgcttagatccagtttcaaagccatatatccctccttacccttatgtttcctcttcagataatgcatgacttcaaaagctatcataatgttatccgagattaaacgtccatggataaatgcagattgagttggagaaattacatttggcaaaactactttaaggcgattcgcaatcaccttagaaataattttgtaaaggacattacacaaagatataggctgcagatcactcatggaaacaggctattttttcttcggtataaggataatatttgtatcattaagagcatcagttaaaatagcagtatcaaagacagctctaacctgcataaccacatcgttcttcacaacattccaatatttctgaaagaatccaagcgtcatcccatcaggacccggtgattattccgggtgcatatgaaatagagcacgcctcacttcctcctcggtgaccagatcaaggagttactgattatgagtcaaagtaaccgtactgggaatacatcaagtgaccggggaaaactgtgaagctgatgacgtg

SEQ ID NO: 251649 - DNA, 553 bp, Cannabis indica
acccttaattgaaagtaactaactgaaaacaagttgataatagttatgccagctcagctggtttatgatccttaacaggtcccctcaaacttagtgtcgtggaacacacaacaccaagtttgtctcgtagaaaagaaaattgagagttggagattggtttcgttagagaatcagcaagttggtgattggcaggaacatgttgcacaaaaatttccttttgaatcactttgtctcgaacaaaatagagatcaatctctatgtgttttgttcgagcgtgaagaacagggttggcagccaacatgatggtgctgagattatcacacaagatgagaggaggagatttgagtggaatatgcatctcactgagtaaggatttaagccaggttatctcagacacaacagaaacaagactttgaaactcagattctgttgaggatcgaaagatggtggtctgtttcttggactaccagccaatgagattattaccccagaaaatgtagtagccggttgtaaaacgtctgtcatcagggttagcagcccaatctgcatcaca

SEQ ID NO: 251650 - DNA, 2020 bp, Cannabis indica
  modified_base (2012)..(2012): a, c, t, g, unknown or other
tcgtgaagaaagactttcagcacgaaggagtttcagcactaaagattcagagaaagagatccaggttcagatattgataatgctctgctacagaaaggaatatatctgaacggaaggagtcattatgttccgttgcacccaatgtaagatttcttaaactttatacgtgtttatttcatcgttttagatagttcatatttagggtgttaatcaacatacttgtgagtagatctaagatcctggtaaaatagttccaacaaaaacaaatttttttgggtgtataggtttaggtatcaaaaatggaagatttaaaaaaaatgaggtaaaatggtgtaaaaatggtggagatacgagagtttagggtggtggttggcgagggtttgtggtggtttctgggctggtgtggctgttgtgtgtatcatggtgaacaagaagacgaagtaaggctgatatgctgaaagggtttgatatatacccttatggcgttggttatttgaaattaactgacgccataatgtaaaaaaattacacgtgtcaggattttgtttggcgtgagttatttgaaaataacttctcactctttacaactttgattctaaagctgcctttaaatatactccataaatgatatacttacggtttttatcaaaaaattgtctttaaatattaattttgtactagataagtacttttacacacttaaacttccatttttataaaaagagttgaaaaagagtcactaaaggcccatatagtagtgttgactaatatgttatctttttcacaattatgttccagtatggtcttttatcatacattctgttagtgaaatcagattttgtctttataagcttcgcatagaagaagaaatctaacaagttatcactcattaaaaattccaaggactagggaagaatttttttgcataagcccactaattgagtaattaattaaacagactcttcagctgaattttacagatttcactgcttttctcattttaaagttcttcaaatttacatttagaaaagactagttattataatagaccaaaaaagcttaatatcatcaatttgaaactaagcaatatttaattggaaccatgctccaaggtcgtgatcacattatttttacaaatggccaacttagtttgaatatatatcttttttgctataatgcataaaaataaaataatagaaaatcataatgatttaagattggataataaaatttacgcttgcttagcattgaaagatctattttagatcaaatttccattataaaaaattactactgattctgttcatcctgcgcagtgaacttgtaaatactcaggtatctttacaattgcgaatatccgctgagtaagtaagaaaaatctacaaatgtatatctatatgactctgttcatttataggcacatcagaccaattgcaacatgtgattctttttatgccttccctagctttgatggagcggtcttgtgtgctccaaagaagactgatttgtgatttgtgcagatggagtggattgaccaaaataagcttctcttgactaactaaacctttccatcaaaagaaggaaggtttgtatcagctttgacagccttggaagatgatgtagtaaccgaattggtgcctttggaaggagatgaggaaggagaaggaagcttcttgggcatcatctgtttaaagtattccttaggcaatcttgaggcttctgagagatcaatgaaagcaattagaagaataaagaacaagcagtacttttgcctccaagagcctaacatgtttgatatcaaagcttgggaggaattactactacgtttcttaattcgatatgcttctttaaacttgggaaggaacggcagctttagagagtctgtgacaacaggcatgttgagtaatgtatggagactgccaactagtctgtttgaggaaagatatgtcaaatggcagacaatctttattgaatattctaactgtttaatgaagcagctcatgttgctactnttaaagct

SEQ ID NO: 251651 - DNA, 920 bp, Cannabis indica
gctcagcgatttacaagctcctagagcttggattacacttagaatggctgaaaaaaaattagaatttgcaaagaaaaatacacagctagcagctcccaagcaaggccgagagagagagagagctttgagagaatgaagttcttaattttttccacttttctaatttgagtaaaatgaaataaagagaggattttcccaattaattcagccaaaaagcatcaaataaatcacataattactaattaataagctcaccaaaggacaaaacataattgagacaaaatgaccattttgcccctccacacgagaatagcacaaaagaggtactaagggtattttgggaaattctaaattactgacattcccaatgtctataaaaaaccgtcccactatactgaaatactaaattgtgattctactgagccatacaccgcgttccatgttgtcgggcaccgaaaatgcaaaattatgagatttcactatatgacataaaatgcattcagaattcgaatataacaacataaataattatttaaatatctataaataattttcataattaaaccttaattaactgctaatttctaaattaaactaagcggtctttacacattttgtaccccatatttctagcaacaagggacgtgcaagactacatctcccactaagctcaactcttccaaccactttctccactaaatgaggcactaaaattctaatttttggagtaaatcttcactataaatagaccagtttggggagtgaaaaagcatcagattttattagtagtactattataccaaaattgtatcttttctttccttcttctttattttgttttattaattttggtgtaaagacaatgccttttctaggctaattctttggcaagattcaagtgtaagttcatgcaattttta

SEQ ID NO: 251652 - DNA, 752 bp, Cannabis indica
cccgatgttatgaaagccaagcaatagctaacggttattatcaggaatttttaattcaatgggccttaccggcaatgacagagtggcgtgtgccacaatccagtttcaaaaagacgccctagtatggtgggacatggtatccctaactcatgatgttactacaatgacctcgggaaaaagtgccaactaattttagcaagaaagagaaatacttggacgggttgaactcgaagataagacatgatttaatgattactattaacgtcagcaccacctatgctgatatggtgaatatggcactgtgagtcgagtgcgctgtggagtgcaccttagagtctcgagggactccggttgttggcgaggctcctactcctcctacatcaggctttagtaggggaggtagtggctcggccactgatcagaaaagaaaggcacctactgcattaagcggctcaggtcagaataagaggttccgggggaaatcagggtcgaggtaatcatcagggtagctctaaaactcgatacacttacccagagtgccccagttgtaaaaagaactatctagggaagtgcaaagggcaaggatgctttcagtgttgtatgtcagggcattacaagtgggattgtccccaacttaggaccgaaacaccaaagactgcagcgaaacccactccaacgagggtgttcgcgattcctcaagctgatgcagaagccagtgcctttgtggtaataggtcagctctcggtcaacaa

SEQ ID NO: 251653 - DNA, 720 bp, Cannabis indica
aaccgcagagcatgctttgccaagccatgggccgctaaattctcagagcgagccacatgggacaaaactgcccccggaaatttagacaataaagctataacatcttcaaacaatgctcctagctcgttgaaatacttcttccctttgttaatggccgtcaccaaagctaacgaatctgaataaactgcatgaatttgaagaccacacacatgagcccaattaagaccaaccaacagggctaacgtttcagcctgtaacactgaaattccacctgaaacaacatcagaccacaaaattgtaattagaacattaccaatctgattaaaacacttaaaatccaaaaaatttaactacgtccccctatgatttactttaactagccaaagggagaccctttggctagtagtaacttaactcatgtattttacttcgtaatcaccttagagttactattccttcctagacctaaataatttttatatgatatctagaaattacaaaatctttataattctcccatacctggactatcaacatttcttttggaattatcacactaataaaattcgcaacaaataatattttaaaatacccactatgactaacctttgagtggttacttaacgcagcgtgaactctattatcttctgacaatacaaccgcacctaatccaactatactcgtggtgctcaatacagctgcatccaccataagtttaga

SEQ ID NO: 251654 - DNA, 802 bp, Cannabis indica
tatatataagctaaataatagttcaaacatttatctatatgtattctactgtaaaaagtatagcaaattaaaaaaaattgagctactataataatttttttttctatcattgaccttttttttttcttaaaaaaaatacatctatgacatagtatattaatttcttttgaacaacagtatattaatttattgaacctcattttatcctatattaaataaagaaaataattaaaaaatatatttgaaaaatactgtattagaagtggagtgaattttcacttgtataagaaaaataaaaaacaacttacaaatagagcgttgaatctgaacaaaaaactaacactgtataataaaagaactaataaaataaaaaaaataatacaaaaagattaataataatagattgaagtcattgttttttttttaaattgtattaacttttgtatacattaaacttattatagtttttactttaagaaaaataaaaaattacaattaatttatgtataattgaaatatatgtattgtacttttataattttttttaatgtggttattttttcttcaaatatatatatttttgcttgtaattaagcaaaaataaacatttcaaaaaaaaaaaaagtaaaaataaaaaattaaataaagtaattagattatacatagataactagtcattatataataatttagttagaatgacataattgtaataatattagaatatcataactaaatattaagcaaaaacaaactttacttaaaatttagtacatttgtcattacatcatagagagaatgc

SEQ ID NO: 251655 - DNA, 1174 bp, Cannabis indica
gttatagttatttaagatatttaggaaagtcttaaaaaattcaaaataatttataatatataatttaatgttcaatccgtctattttactcgtgtataaataaaaaagttacacatgcaacatgctctttaaactctattttcgtcgtgttaattttttttgaatttctcaaaatttttgtagaatgtcttaaataactataacgtattatacgatcataaaaaaattggactaatttattctggaaactgaaataaataagtgtatcggtacaccaatttaagggatgcattgtaaaaattttccaaaaaaaaaatataatctattaactatcattaaaaaaatctttctaaaataattagagagtaattggtcctcaacttttatatacactagtactagagacttttagtttagtgaaataaataaaatcattgacattaaatagtgatatacatcaataaatttgacacacgaggtataagtacaactccctacttttttttttcttttctattgtgattggtcaatttaaaaatattataattaaaaaataaaaaatggagttcaccaacgtatctaaaaggtagatagggttgaatttgccctatgcagaaatctgcaaaaataataaataaataaaataaattaacacaaaactaatatcatactaaaacaacacttaaagttaagatttggatctcaacatagtccaacttgaaagttcacaactaaagcgtttcacaactaatatctagtgttaatggttgttgtttgttggttttgataaagaagagagcttttgataaatataccttttatttgagaatcaacataaaatacaaataaatttttagattatttttctagcaaaaaaatattttggggccttatgaattaatgataaaaaaagagaaatttataaaaatactggaattttggttaacttttataaaatactgtcacacggaatttttttctaaaaatattgtgtttttataaaacaccagtaaaacacaaagcagtatgactcaaaacaacagtagaacactagtaaaacaccagtgaaaacttaacacagtatactgcagtatgaaacttattaaaaaacaacagtaaaaaacgtaaaaaaataaaccgtctggcagtatttttgtaaaaaaactaacaaaaa

SEQ ID NO: 251656 - DNA, 578 bp, Cannabis indica
cttagttttttaactaaatcatagttggaagacatcattgacaagctctccataccaggttttttatttttgggggaagtttcaaagcctaaaatttcttccaaaaggcttcaagatattggttttaagttagctataataagagaaaaattgacataaatgtttgcgttattattttgtatcattttagagaatacataatctaatttatcaaaatagaaggtctgattggtatgttttgtaaaatataaagtccaatgatttttacctttttttttattattattattagaatatctttaatggagtgttaacaaagtaatgtattgttatattttagcacacttaaagaaaaatattacttcaatgatattttaaaaagtgtgtcaaatttagcacaatatataacattgtgccaaatttagcttatgataaattttatatttttttatactataatgtcattaactattatgatttattggcttttacataattttatttttttatttgatatattatcatcatttaagcaattaaaaaaaaaataatgatgtttgtatattttcaatacaata

SEQ ID NO: 251657 - DNA, 455 bp, Cannabis indica
cttctatctttcagatgagtgacttatgggatagccagatgctcaattctggagctagggcttttgttgacgagcaagagaggagcgacatcttcatacccacctcgatatctgaggaggaggcccctgttgccaggatccgtagggctcgctatctactaatgagataaataggatggttcaagagcatgctgaactagtgatggttgaaatacgcgatagcgagtccacgatgtcagcccaggattatctcgttcattcaagacatgcccctgacatcgaggttgaagaaatgggagaagacttcgaggtacctgatcgtgattctaaggaagtgggggaggttgatggaagtgagacaaattcagttgagaatacccaactgaacgaaccattttcttgcgaggatctagtctcgcgagttacgaaattagacctgcacaagcttgcacggc

SEQ ID NO: 251658 - DNA, 571 bp, Cannabis indica
aaaattaactcaaattccagtatttttgtaagtttccctataatatatcatatactccaaccgattaagttataaatatttattgtttacaatacatttaattttacttaaatgcataattaaaactttttattttttattttaggcttacgaaaaaatgtaaatcttaagtacaggcctaacccacctatacctaaggtcgcccccgtgggatcccaacaatataacttaaaaaatgtaatttaacaagatacttctatagaaaaaaaaaattatatgcaaaaccaacaaatgtacaataaaccgataaataagagtgtaaatgggttgagtcggatctaattcggctatgatccgacctgatccaaatcgtgtaaggatctgccccgcaagataagatactcgaatcagattagatccgactcaacttattcggatcggatctgatccgaccacctgactctttttttttttttttaattatgaatattaaattataattttatatccattttaatttagataatttacatttataagcgccttttttattttattattaataataact

SEQ ID NO: 251659 - DNA, 547 bp, Cannabis indica
tttttaatcattctaccaattttgcacctatcattttacgatagtcctcattcttctctaactaaaattgtgcttcaacttttgtacaaactcacatatccatctccaaataacacaatttattatgtttgaaattgtgtcttgtttatgtgaaggtgtgagggtaatttgggtacaatactcataaaaggaggtatatttgaattaaattttatttgaatgtaaatttagttaatgtatataaaaagggtatttttcaacttctccccttgaaaaacacaaagaaaaccttaccaaagcctcctcatttttcttctctctctcaaatgaaaaataaaaccaacgtctttacctctatctctctcctccctcacttctctctctctttctctctctcattccaccacactgaccttggcaccactccagactcatcactaagcgaaggctacgacagaccatttcattgctccttcctctctcccgcaccattgcaccaggcatcgccgccagctgcaccatcttctaccaccacaactagaagaag

SEQ ID NO: 251660 - DNA, 598 bp, Cannabis indica
gcaacaaagctttactataattcagaaatgaaagagttaaatttgtcttaagaattattattacgagtgtatgtaatattaagattaattaggattttttttttctaaaactttgacatgtactaaatcatgccccaatttttttagccgttaaaagtttctcatgaactattgaaattgttaaatttaaagacttttgtctaattttagtaaaaaaattctaaaattgatgaaagttcagggcatgatttagtacatgtgaaagttcggaaaaaaaaatcttcattagtctaatattaatttaagttaattaatcatttataagggattaccaatcaattaattagctatagtgacccaatatattgtttctaacatggagttggtaacatgtttcccctaaaagttttaaaacgaaataaaataaaatttatatattattttaattggggatttttcttttttcttttttaacaacaagttggaggtttgattcaaaatgatttatgtttttaagttaaaatttaaattttcgttcgtaaaaaatcagcagaatgccaattaacaaggggtcggtcacttcagtctatggtttggc

SEQ ID NO: 251661 - DNA, 572 bp, Cannabis indica
aacattaaatgttatttctgatctttattaatgagtaaatctgattatactgaaatgagttttatttagggcataaaacccaacagaaagtagatgaaaagaagtaatgaaaaaagaaactctgctgtaattaattcccaggaaaatggagagcctggtctctccttacaagccttccttagaaaaatcctctttgccttctcactacaaaattctattatttatatataatcccaacgagactcccatgagccttagctacacccaaacaaaactcccaaacagaattacacaaccacattattccctgtggtagaccccatgctagacttcctactcctacgagcatacacatacgtcacgggaggtctatcataatatttcattcaaaccacagatatagttcttcgataaatgaagtaaaagaacaaaaaaaaaatagtagttcattattaataaaacttatatgggaaaaacctcaaagttgatacataaaacctctattgccatatcatcataatacaacttgtctattactaataataagaaaagattttagcacatatcatcat

SEQ ID NO: 251662 - DNA, 858 bp, Cannabis indica
tttttctttcttgctattctagctgttctttttctacaatacccaactaaataaagaaattcaaagtagacagcttggtaaatacacaccaaaaatatcttgctgatgtagattatcactaaaaatataaactccacacataacatcacgaattctagataaaactggacctaatgtgtcactataaaaaatactagtttttacaatcttatataattttacttatttgttggagatctctgagttttactttccaaattattagaggcaaaaaaaaatttagtacatcccaaactttatttttctcctctctatttttctttcttaccaaataactcaattttatctcctttcttatttttctcacttttcttcccttccaaatatagagttagttagtgttggacaactttaaatgctgtttctcaaaatttgtttctagaagataatattttaatcagacatggcttggcacacacggattataaagtatttttttgtgacttttatttcctttttctttttattaaataaactttcattccatgcacatagaagctaccttgtctgcttctagacataatttgactgaacaccaagcctagaactataaagtcaaataaaaattatctcacatacgtttttcgtaaccactttcttccagaacacatttaatttttccaacagaacaacctgtccatcttgtttctaaaaaaattgtctcattataatctcacaatcacaatcatagatataaatgtatatatatcttgaactgtctatctcattctccaacatatactactcatctaatatatattttggtcgtatatttaagttataatttacaaacggata

SEQ ID NO: 251663 - DNA, 568 bp, Cannabis indica
aaaaaattaaaagatacataaacatcaacataaaatttttaaaaacaagacaattgagatgtgtgtacccattaatgattgatgaaactagtaatgaatattgttttagcacttttaatttgcaaactatgttagagaacccattgcagccgagactttcttatgcgaccatgaacttgatttctatatagaccgaatactacccatggtgcaaataaaaagttaaaactttatctccgtaaaaaggtagagatgtgaaaagaaactttatcaatgctactgagtaaagtatccaatatattacatttgaataatatattcaattgtatcaatatatacatatctatatatatatatcacatggaagaaatactataaattaattacatacaattaaaatttgtatatatacaaatagatcaaataatcaaaaacattagaagaatatatatcatcatcataatcatcattacaagatttgagacaagataaaaaagaattgagaaatttgcggctaaacccccttatgtttatatttgtaaacacttaacccccttatgttattttt

SEQ ID NO: 251664 - DNA, 749 bp, Cannabis indica
aaatcgtacaaaaagaaaaagttgatttttggtacactttgaaataaaccaaaacaatagtaaagaattgttaaaatgagtgcatagccaattttttttgacatctctattctctagtgcaatcattattagtattttttttttttttgaaatggaataggatttttatttaaccagaacgttcatccattacaatagatagtagatctaaaggagcattcagctcactaaagatacaacctgacgaaaaacaagactttctcgcaacgcagtgcgcggccttgttagcagatcgcttaacaaaagaaattaatacattatttaaagaagagatcatcagacgacaatcttgaactatcataccaaattgggagggcatttgaacctcaccattaatagcttgcaccacaactaaagaatcactctcaatttcaacatccgaaagatcatgattcttaatccagcttaacgcttccttgactccaataacttcagcaatttccggagtcactacaccaatttttctagttgacacagcttcaactaggtaaccggcctgatcccttatgattattcccacaccaaaacaattttcagcttcaaagatggctccatcaacattgatcttgtatttgtacacaatcggtttcctccaatgctccagatctttactataattcacattaagtaaagcctctgatttttgtttttgagcatttctccaactaacaagattagttctagctaat

SEQ ID NO: 251665 - DNA, 441 bp, Cannabis indica
cctccattttttttaaatatatatttttagttttttatacattttttaccaatctttttctcatgttattttttttttcaatttgtttgctattttcatttataacttttcttcttattattagtaaataaaagtgtagatatttatgcgagcttattaggtgatattatttagtttggtggaatgtaatgatttagtaatggtagtaatccaatggaataagaatggtaatgagaatttattaagatatttagtttcttgttaaaataaatattagaataagtgatgaatttacaaaattatcctcagttcctcactttaatttgttcttacataaaaagggtattagacccttttttaatttaattttatttaatattggattaatatcattttagacactgtgttttgtaaaaattactgattggagaccctttgtta

SEQ ID NO: 251666 - DNA, 1766 bp, Cannabis indica
ttaactattggtttgacaagaaactgtagtaacaattgtcatattgatgtcttgtgccaaatagaaaatctagtgatgcattaaaaacaaatgatcaaactaactgccaaaaaagatggaagtaacataaaatgactaaagtattacccttttaaaaattcctaaggacaaaagataactgggaaagacataacaggagttgagactatatagaaatgtgcagaccctttgtgataaaaaagttgaagaaataaagaggagatgtatacgtttttatggagagagtgcattttcctgaggtatgttataatttttcatccccaacacagtgcaacaattctacgtggaaaagaacataattactttattattacaaaaagaagcaaataaaatcaatatttttctagttttgggtttaagctcacgaccaagcacaaggctagaatattctagtttcttgaaatcagttcataaactgacttatacaaaaataaataaggaccttaagttcctaatgtgatcaaagtgtccgagtcttggtgtaatcacttttgtaattatagtagtaatagcttttgtgctatgttgttctaccttatctgacataattaaaaacataaacaaagtgaaatgaggagttgaaattcaccccggtttgcaaaatcgatcttgacgtagtgtatatgagttcccattttccgtccaataaatcagatttaagtggctcttttgttggattagctgcttcaagtttgcgggcaatctatttagagataaatgcaagaatcaaaacacaaaaatgtgtacacacattagtaataaataatgtaagataaattacagctcaaacttttccacaaaagaatctatcctaagttagagattcaaataaaataaaagatgttatacaataatagtatatggggcatcaaagaggcctataggaccccagaaccatatgcagccttttataattttgtataggtcaatcctaattatttaatatcataaaaaaaatcacacaagagatttaatgattatcatccatacaaaacaattatcctccaaaaatataatgtatgcttttgcttactaacacttatgttggcaatctaaatatccttaaagcccccaatcagatacaaaattcaaacatgaacaatatttccattcctcaacacacagtcacacacacacaccatacaattactccacacattttaagtaatgcaattcatttcaaaggtcaaaaatcaataaaacccaaaagttaagtataagagaaaggaaaaaaaaaaagaaacctgatcaattctctcctgatcttctggggtggcctctgcgccacgatcaagaggggcaatggcctcgagaagctcttccttgagctctgtagcgtctttgccttttttgggcaagagtgaagaaaagaatgagacattggttctccacttctggggatcagaagtagtagttaacggcgtgtggatggcggtgaggggttgggaggttgggaagtagtgatttaatggcgctaatgtcggagaagaagtgaggagtagtctcggagctaaagaagatgaggaagaatggagggtgggaagggatagtggagagtatgaagataagaaagccatgattataaataattatgggttttacagtatgtattatgtaatgtatgaaagttgtgattatttaagtgacaaagagttggttgggatagcagttgtgggatattatttcgtgaatcaaatctcttatca

SEQ ID NO: 251667 - DNA, 789 bp, Cannabis indica
gatgaggcggaatggtgggtgtggatctcggtcggagtggtcagttggagtgggtttgtgtggagggttgtgcgatgtgggttcgagtgaagggaaagagtcagagagagtttgagggaaggagagagaaagggtttgagtttttgagaggggtatttttagagttttaaaaaagtggtcatatgttttcaatgttgaaaaatattagtttaggcataaaatattaagtattttttgcatattttttcaaatttctccattcatatttcactaaattatattccacatattttattttaaaataaaaatacataaattacacaagttatatacaagatgccacttttaaataatgcaatattattagtgttttataataatattttcttaaaaaaataataattactaattagagctcaagaatgtaaatggagcgagtcgccccgactcactctctccgttcaattagactcattaagttttatgaaccggagaggccgggtccatcccaattacactaagttgggtctgacccaacccgatctgattttttttaagctaatattttttataaaaaatagtccaattgtaatcattttcatgaaactacaatccaagtatatgtattttgaaaagaaaaaagatatcattttctagtcaaaagtactccattatcgacaaagaaattgtttatgtatataactatataaacattattgttattaataatattattatgaagaagaactgagtggaaaagttgtagaagaggatagacctaattttttt

SEQ ID NO: 251668 - DNA, 6330 bp, Cannabis indica
actcatcgaaatgctaaatcaatccacgagctttaacattaaaattgcaagatgccttcaaaagtttagacgacaaaattttaatgtcaagaaatataacattaaaaaagaatattttcctttcatgatttctaaaacaaaaaaactaaaaaatataaaaattaattgtcaagttttggcataagaaagttatttaatttctctcctaaattttctcacatttcaacaaaaaatagataacgtgcaacaaatttgtaattgcaaaacttcaatgatgtgaaaaataaaagaatgtgtatagatttttctgttattggattaggagtaatgtaaagaaaagttttgtaataaatattattggattgtatagttggtggtactggcattgtacacaaaaaatttcagtttccctaaagaatatcaaatttgttgttaggtgtgggctttgtaatatttcagtttcctgtagcaaatggaattagaatggcctaacaaaattggcccctttacaagaatagggtaggcataaaattcacacaataactatatgcatatataataacaatttcttttttttgtgtgtgtgaagaaatgatagagagagaatgaataaggataaaattttgaaaatggactaaagaaaaatatgcttggaagtgggaacacgtccccacggaaaatgtacacaacaatcctcaaaataggatacgtgattctcttatatattttccttgatgaaacactggttccaaattcaactaccaaaacagcgcatttagcaaattattcattagatgagaatgttcatctcaaaagataaccttctaattcctaggtgcaaacaaaaaatataatatggaacattcataccctaaaaattcgatgatcagcatacacaattaagagtgcaatatgggaatgtaagcaccaaaaagagagaaaaagaactaagactccccccaatatattcttctcactgttatttttggcttgtcatttagctacaccctcttctacggcaaaaagaaattctaggaaaggcggtcattctgtgatttggcaagcaaactgcatcttttctcgtgagacaaaattggacagatggtgatctcattaaattatgaactagcagccaccttcttcctaactaccctctttctttttgctctgggggctgatgagtcaccatcagcagcagagtcggtatttgattgtttgatgcccagaagaccaagaccagaaaccatggcattcttcgaaatgaaccatttggaagatggctgttgatcaacattctcagaaggcctattgtatgctttcaaaagactatctgaattagccaagggatcagcctctacgccaagccatgctagtctcgatgactctcccaattgcacattcataatcctgcttgcatgttaattgaaaattagtactatacaagttcaacagaagaaaagggaatatgttataaatggatatcagctttgattagtgcaaaagtcaatactacagttttagagcagtaaaacattagaacaaaaatggatcaatttacagtatcacataacaaataaacgtcttttaaatatatgaaccggctctcgaacatcctggggtcttatactgattttctatcgaataaaacagtagcagagtttcttctatctttctctctgttttatcaatttgtgtctctgtgtttgtgtttctatcataaagcactactaacaaatatttcaaacttaggaacctatctgtacatttttaaaaggaaaataattgtcaagtcttttaaagctaagttcaaatggcagtctaatcctaatttaccaaagaaaaaagacagttcaggaatcacaagatataaaagctaattagcaaatgagaacttaaaagagtgttgtggtagagaattacctcaatgctgtgctgaaaaccagtcccactccaataacatcaaaataactgaccactgctttatcaaaaccagataaaagctgatatctgaggttggcataaagtccaaggaaagcaccataaccaagagcattagttcttgcactagggatcgtcacagacaacctgcaaaacatgttacaaattgccaacatctaaattaggtatcattgcagataatcaagtaaattccgaaatgatgacaatttagaacaacttgacccaactatggtatgaaagatctactcccattatatccaataccattttcatttttgctaagaaagcatactagcaacccagttgatggcgatccttttaaacaattacctcagaaaatccgtttatagtctctctaaactattacatattagattaaatttaactagttatatatatatgctttaattttaaaggccctgccataccttccctcctttttgctagccaagtagtttgataaagagccttggactgctccagcagttaatccaaccatacacaactcagccgccttaaagaaaaaagagtgaaatcgcttttgtagatcgaattccctcatcggatagctcttttcaaatacattgttggggagcttctgcagtgtattttgcaaatcaaaccggaatgtgtttccatatgagcggcatggagcaagtgaccaaacagcaatagcattgcaagctgttactgtcagcacgtttacaagtgccagatcccattcttgctttatcctatatcacgttcaagaaatcatctttagtttcaatatcataaacaagcacaaataccagaaataaattaataaagtccttgtacaatattcgtacctttccttgcgattcttcacctcccaccaaactgagcaaccaattgtagcagcctgctctaaaagaagtttatacaaaaatgcaggatctgcaatcatcctgcataacatacaatattagatcataccaagaatgaaaaaaataaacttagaaaacatttagaattaatagtaatcccatataaaattcagaattaataggacagtaatcaaaattaaatcagtggatttcttgattttatttcgtttcaaaaaacacaaaccaatagttcaaacagaaaagaaatcctttattcttggtaattaaaaattatattgtgtaccacataggcatatttgattaatttgagatcaggatttgactcacaacctctcaaataaatgttctaactacataaagatttcttactaaatcttcactacaacaagtcaataactcatctaaagctacagcgatttggacatctgtaatttctactcctattataggaagttctgtggttcagaagatgaaaataaaataaaaagtaatgaaggatatgatcagttggaagaaaccaaaatggaaaatagtaaaacatacggatagcttggcttttttcatttatgtttttcaaaaatgaaatgaatgatagaaattcccaaataatatatcaataacatcttcccacttcatccactttgaaaagcataaaacaaattaccaatgttctataatcttctagtatggcaatgaaataaaaaagatatccttaatggattctgtgataaaattcagtagtgcttattaaaatcacctgccaatgaacccccttgacaatccttgaggaagtgaacgggaaatcatcctggtagtggttggcctggcattgattgctaagaatttaaccatttgtgctgaactgaccaaaccctgcatgcatcatttcaattagcatctgcatatctagcattggccgtcagctaaagtaacaacacaaatactataccatttcataagcttgtcgaaacccagcaggtaaatccatcattgtcttctgccactcatttaacacagcatcaacaaactttcgatcgaagagctgaaaacaagcacaaatttattaatacattaaaagatataaaaataacaacagaaaaatgagagaatggcgtatacaaagaaatgtgaaatattttgaaatgcgtatttttcacaaccaaacctcttcaagaaacattcttctcctaaacaagccatcatctccctcatcaccttcatcaaagtcatcaaaataatcatcatcatcaccaccatcatcatcccctccatcaccacctccatgattgattttttttccaatgtctccaccacctcctccaatggcagtctgcagttcaaaatcatttaattagtgtgaatcgaatagacaatatatcaatctcacttaaatatgtcatttaaattgttgacaggcagaagtcggaaccagtgagagtatacatctctgattttgttcttatttatatttattaagcgatcactactcaagaagccaagataaaaagaatcagtatacttttacatacccaagtacacagtttcacttttcactttttatgttttttttttctccacagtactacatttccatttgttcttatatataagtgttaaatcccatagttgttcttataaagtgaaaaattaacatgttcatttactaatgtagttaagttctaatacaaggaaactatcatgaacaacattcaagaggaaatacctctttacaaaactacagtaaactattcccgtgaatataaaactagaccattattataccctaaaattattaaatattttttgttcatttaaaattttcatcgcctctcttcattgagaacttattttattacgtttccaaaattctctttcaattactacttgaccaaccagtttctcacaaatgattgtccgccattttagactttacatttggaaacatggtgccagttaccctatacctattgttttaggtagtgttccaattctaattagacataatcaattaccgaaggcctttgattatgttcttgtactattgagtcttccgttatcaaggggtaatactcaattttaacgaattatacgcacacagtgacacacgaattatgttccaaattatgctcaaagacaagtttcttcgttaaaaacaaagtcatgaaaagtttcattctccactttcttcgaaattattaacaataccctaaaattaaaatcccaaaaaaactccgcaaaagtgactgacctccgggctagtcctagactgcttctgtgtcaaatcgagcttcgatttctcaagggtaaccgcacccaacgaaccgaacttgtccttcattaccggacccatagacgaagcctgttcagccacaaagcaccgttctaagagagccacggaatcttccacggtcgaagaagaaccggaggccttcaccgtcagacatctccgatgctttccagttgtgggaagtagcaactgctgagcgtgacagagaagcttgtggaccggtagagacgacgaaagaggtttaggttttgctgtaacctgtgtgttgattggcataatttgagctgtatgaaacacagcgtgagccattatagttttctttcgttcttactttctttttgttttatttactgtttggatagagagaaaattggtttaaaatcttctcatatgtaagcgggtggctgccagtttctctctccacatatgattttctagagagagagaaagcagagagaaaagaattgagtttggggattggggtttcttatataccgaagaattggagaagaaaaggggaaggaggaagatagccaacttgcttgggatacaactactacacgagacgtctaacccaatccgaaatgttgctcgactcgtgagttgactcagcgatttatgggctagtgggctcgcctagtggtgtaactgttggcccagcccatatttattattggtgtttttttaatgagaaacatacaaaaatactgaaatttgaattaattgttacaaaaatactttcacataaattttttttcaaaaatattgtgttatataaaacaacaggaacacaaaacaaaacaactaaaaacagtagtgaaacaactaaaaagcaaccatagaacaacagtgaaaatttaacacagtgcacaatataaaacttacacaatatttttgaaaaaaattccgccctataatataaaagtataaaagttgaaaatttcagtatgtagtgtaattattctttttttaaatgagaaaattacactcactatgagattttaaaagttatttacttaaatatgacacttttaagtttagccaatttatatggtgtatttttttttaggtatttttaaagtatttgatattccatatatacgaaaattaggttttcaaagccatatttaatatttttatttgtttttaggcagttttatttgtcattggtgccgaaaaagttaccagacttagatgccggcgccgaaaaagtaa

SEQ ID NO: 251669 - DNA, 1701 bp, Cannabis indica
tcaattgtactatcatgtttccaaaatgtacgtatctcccagaccaaaaggtaggcttaactaacaaatcaaagaacacaaataacactcctgagatcgaacctaagcatgtcaggattaagatcttttgatctaagatcaaccagtgatattgactcaaaaagatacaacggtaagattataatatctttaccaagatcaatatcggttccagtccaatgtatactccatacatccgaaactagcatactttgccaatgtcctagaaagaacataagacttatccaaggtgtaagtatactttatcgatgattatcacatcagtgtaaatccagtgcactgatgaatgaaggacattatcttttgaagcatataatcacaattacattccactgtgttgacatcactgtaattgtgaataactatatgttctggacttaacagattttgtacacattaaaccataaacatgaaaactacatgtaaacataaatgatttctaatcttctattgataacaaatcagattacattgaaatgggttttatttagggcataaaatcccaacaaactcccacttgcactaacataaaacaagtagtgcatttcaatcaatcaattgtcttgatatccagatcaagtgtagtgtatttgactaaacccaaattactggaactgtaagtctgtggtaagctactgctttctccaccattacttcctttgtgttcataaaatattatgcaacatcatttactatatgcattactcatctagggatactgaattctttactgcttatgaagtgcatctgaatatacagattacttgtctctaattctatccaaaatggaatagagataacatagtaagaactttctccagttgaataacttttcagtgcttttcaaaagcaacaaagttatgtatcttcattgatggagcttaaattattataaaaggatttttacatccttctagaataattcctccacccgcagagtaaccaccatctcgaataggttatgagttggtgtagatataaggattctaatatgcaccattatcatctaacatataggtcactttcagagattcttcttgactttctcataatgttccttgtttgattacatcttagatggctcccactcaacagtaggaatctagttaaagtcgtacataggagtacatttaacctcttactaggtactcagggacatcttgttgtgacatattatcttagtttgaaactataagtttcttctagactaagtcatcaacataacaatctagtattaactttaatgtaaaatacttgcttcatattaagtaatcattatagatatcataaaatatttcatgaggattaggtgtttttcccaagtcattcgaatagactttgcaaaattctcctatcttatccttaaaattttgataagttatttctattcatgtgaatggttagatttactttttagttaaattctaaaattcctatcatgatcataacatggttagccgtcacaagtgttatccaaataaagataggcttagaattttaaaattctcccactcagataaggtacggtggtactatgtccaagaactttattggtatcaatttctattactacgaaaacatattaattagaacaaaatacatgatcaagaataagctttaataaatttgctaatttgttca

SEQ ID NO: 251670 - DNA, 507 bp, Cannabis indica
aaataatttccaacacttttatctgattgaaaaaagaatttcgcgttgcttcgttttagtcgagagtcaaggtcattcttatttcataagcttctaccattgtttcaccttgtaagtcctattcttagcagccacgattcggaaggtcgttactaagaataaaacacttacaataatacttatcttctgagattctacggcgttaaattgctaatgaacgtccatctattagggatgaatctcactaaaacaagaactatgtaagaccaataatggagatcaaatatctttttgattaaagctctttatttaaaatgtatttttatcgaatcacttattttaatctatatattttaataagggatattggcggctaaaccacctgaatgttacgttctgtaacactcaaccacaaaaaccaaaattttggcggccaaacctactgaactcccattctgttttactatgtacccgtccgtccaaaaatcatagttaagtgccacggtg

SEQ ID NO: 251671 - DNA, 865 bp, Cannabis indica
ctattacaggttaaaaaaaaatgtacccatatggttacaataaacatgtaaccattaaataattaccaatatatatatatatataatgctggaaatataataagatactcctaaccacatactaaaaaagtatcacctcttatatatggtacactttcataagactcaatgatccttttttcattggcattttcttctcataattttctcatgttatttccatatatacatctcaaactataaaaatgatgtatatttaattagagagattatgtctcaaaaaaaaattagctagagagattaagtgatgtaatttatgtcatacagcaatgctcacctaatagataaatattgatcatcaaccaattaatttacagttggattgaagtacctcatctctcctataaatatatatttaattaatatatattgttaatttatataaataaattgtcatatataagataaatgagttactcttcttattatcaattgattttttatcaattaattttgagataaaactccatgtaatatcttatcccaaatactaaggtatctcgaaatatatgctcatttttattagaataattaacaattttactccctaaacttttgacaatactgattcggatctctaaaatacacagtttgttaagaatcactcttaaacttttacatttacaaaaatctagttattttgttaggttccgtcttattattctgtttaaatgttgacatatctttgttaattagcaactttgctctctaaactttggcaactatcaaatgtaccccctcaaataaaaaatgagaaggatttaatatttttttagtaaattttaaaaaaattaatttaaatctt

SEQ ID NO: 251672 - DNA, 639 bp, Cannabis indica
tataagaaatactgatatatatatacacatagtttttcaaagcaaatttgaaaaataaagtgaaagaggtcatataaaattaatacctcatttgaaaatatatttatttatatatatacatgtctaatatcgtagcacaaaatgatgagagtgatgattttaaaagaaatcttaacacaataatacacaatattatataagaatttattttgtattgtaatatatagcatgacatgacaatatagttgcactcaatgttgctgccctgaatcttgatcaatgttggtgaataagcatatattgccatctcattttgttataatctatgagttttttttcttcttgtggagttttatcctgcttctttataaaataataattacgttcttttcattctttcttgactgttttgtgagtcaaagccttatcatgtgtgtatttatattatagaatggtctagataacttgctttaagaacgttagtagcctgatcacttagaatcaaaatttaaaacaaaaaattccatttatatgaagacaatcaacatacctacaacataaaaaataattttaaagttccaagaagcactaataatgtaatgaccgctctagtattgtggattagtaaaggcaattagc

SEQ ID NO: 251673 - DNA, 523 bp, Cannabis indica
tcttgctactgtttcaaaaaatgacactttaacgagctcggccgagcaggcttgccagtcattatgagtactctaagttgaaattgttgtgggcttgggaacccaagggctattcaattccttaaagatatgaattatcaaagaagcccatgtttatttttctttgtgagacgttatatttgaaagctcggctggagcttctagcatcacagcttggatatgagggtcttttttcggttgatgctcaggggaggggtggcttagtaatgttttggaaggataaggaggatgctgagatggtcgggtattcgcaaaatcatataaatatggtggtaaggcatgatagctctcatatctggcgccttgcggggttatatggagaacctaatcgatcattgcagggcaatacttggaatcttatgagggtgttgaaggaagaaaatgatctcctgtggtgtgttattgggtacttcaataatattcttagccaagatgattagaaaggtggtaatccttatcctaa

SEQ ID NO: 251674 - DNA, 1595 bp, Cannabis indica
tttttatcatccaaaacagcggcaggaacagtaagtttgtgttttttttcaacccaaatgagtttaaatcatatatttgttaagaatgtatgtggtatattttatagttaatcttactttcttatttcaatagcctgagtggatggcacctgaagttctccgcgctgacccatcgaatgagaaatctgatgtttatagctttggtgtaatcctgtgggaactaatgaccctgcagcagccatggagcaacttaaaacaacttgaggttgtctatctacttttaatctgcttgaaattattgtgacaacataatccgttgaagtaataacgaacacagcccttcgtaataactacaaaatacaaatggatccaaagaataaataatataaatatgaatgaagttcaaataaattaaattcattgtgttttcagtacacattgaaagaaaaacattcaacacttaatatttgttgtattgacattttgttaatttattaggtcagagaatatgatagtttacgcaggtattgtaaaaaatatccttgctgtgaattctgatcaaactatttcccatacttttcagaatatggaaatttaattaatagcattccttcatattctaataattttaaagtaagtgcataaccattattagtaacttgtgtgatgatttcatgatctttaggacgtagattcttttgactggttttttactatatatggaaaacagatgctagacaggcactaaattatttcttttgatgaatcatgagccacatgcacaaagttatatatcttggcttctctttcttcgtgcttgcgttatacataaccttatgaatcattctcgtattattgaagccttgaaggtttttctgtttagtgtttcaaagaaaagaaaggtgtggtgtttatttgtatttgtggtgactggtgaaatgtttgcatggcgctaccactagcaagtgcgacaatacaattatttttccacgttcttacgctcccttttgcttttagagagtctctttttttcttcactatcaagtcaatcctggatttgagtacattcaaattttatcttcattgcatgtatgctgtttctgtttctgctttgaaagggaattgcagagcatacattttagtcttgttgctatttgtcaactctatagctcaagaaatattaggcatatttgtttttcaggttgttggagaggttggattcaagaataaaagacttgagattccaagaaatgtacatccacaagtagctgcctcaattgagatttgctgggccaagtaagatgattgaagcaattctttcactgtctagacgtaaaaattgcctatctttttctctattgattatactgatgttggtttaatgcagcgagttgtgtcaacggccttcattctcgtatatcatggaagctttacagcatctgataatcattttttcacggtgatcagatgacataaaagtttcacgaattacctattgtactttaccagtaagagttaggtttttttcttctttactaatatagtttgctgttgatgtattaattgatactaaaatgacaccaaacttgtgaagg

SEQ ID NO: 251675 - DNA, 2027 bp, Cannabis indica
ttttttgttatttgtatgtttttttattgtttggatgttatttttgttacttttatgtaattttcttcttgttttcgtgttgtttttatagaacactgtaaaagtgtaaaagaaaaatctttgaacgtaaaaatgtagaatttttacaaacaatagtgctttatgtagttgtccatgattttttataacgatctaagaccctcactcaaaagaggcaggggaaattgtacattttaagagtaccttggtagtgtatgagatttgtagcttcctaatgcagaagcatatacaagtttaatgagatggacatttgttaacaaatgtactgtttacacagtaaataggattggaagagagggtggggagggtagttaatggcttgtgctacatttttctttctttcattagaattgagtagccatcttaacttggccgtgtaactaacatttccatgtctttaccctatgccatattttcttaattgtgcatgtgttttctttggtttttttccactgagatgcaaagttaaaatgatttttaactaattgattttgaacttggaatagctgttcaacttctcttgaagcttgattgctggtgtagcattgtgaggacattgatatcatttgtacctttacttctctccacaacttatcaatggatgtaatcccttcaggatgattagtttatcgatctgggcatggtttcttactcacaaattttcataagcttatcgacaggaatatagatctcccatttcattatccaaacaatagggaactttgtcccttagccaaatggtgttgatgtcttaaatttcttgaaactctttcttagaattatgtctctctttcaatgacaaatttgttgtgaccatgtggcaggttgccatgtttgtagttttggcaatggtgttgcggcgaaaacctgatatattaatcagcttagtaccgaccttgaaggacagtcctaaatatcaaggacaagaaaagcttccactcaattcatggttagttactcaggtaaatcgagactatttaacattcaaatgttcttacgcccatggatttatattttgctcattggttgtaaacaataaattggatctttgcctctaggctgcttctggagatttggctgttgggttatacgtgtgggctcattttctcttgcccctgttgagtagcaagtcaacctctaatccacagtctagagatctgattttgcaggtagctgaaaggtaagttctattttttctttttttccattgaaattttttcttgtaactaggtatatctcgtttgcttcaatctcactgtctcttcttttcctttgttttgttgataaacagaattctatcctctcccaaagctcgtaccattcttgtaaatggtgctgttagaaagggtgagcgtatagtgcctccatctgcagtagatagtttgataagagccacttttactgtcccttctgcccgacttaaggtgtgtaatgtataatttgggagcatccccaaaatttatcattattatcatacagaaattttactggaaactgatttttctgagacatttttatttattaggcaactgagagatttgaagctatttatcctctcttaaaagaggttgcccttgctggttccccgggaagcaaagcaatgaaacaagttgcccaacagatatttaaatttgcagtcaaagcagtcaaagaaggtagctcaaactttatgaagagtgttcgtcctttcctattctttcccaccaccgatctcttttcaaaattacaacaaaggattctatttttctattataatggattagcgtttttacagacgttcctgatctgtcaaaagaagcaagtgacatttttatttggtgtttgacacagagctctgaatgttacaaacaatgggtaagttttgtattttttttgtttcgatccttctctgcttaccaaactcaaaacattaaaataataaaaaaaaagctaattagcaattttttttcccaaactttgacatgtac

SEQ ID NO: 251676 - DNA, 504 bp, Cannabis indica
gagtcaatctctttatctaaagtgagaagatacaaagacaaagacaacagagtagtagaagcagtatcaaaagaatataccggaatggaaagctctttacaaacctcgaaagcatggctggaaaagaggtcaatgatgagagcatcgggttttccgatgtcgagaagtacagacttgagacatcggaagctttcttgtacgatgattgaaagtcgggtcatgatttgggagtcgggtggaatgagttttgacacgtcaacttcagggaggttgatgacgtggaagttcggtgggaattcagtggagttgaggagcttagtttgtgcagcggaggcttgggttgttatattgagaaagctgacgtggcagccgtgatcagcagctaagcgcttagccagctcgagtaaaggaatgatgtgtcccataccggggcttgaaacgactgccacgcggggtttagcagtagtttcagagcagtgaagaggagttgccatgatgaccata

SEQ ID NO: 251677 - DNA, 500 bp, Cannabis indica
gagtgaaccagtgcagtatatagtacatggttatcgaattgaagtgtcaataccatgtgaaaattgttttaaaatttatcttgaaaataagaacattttcaatttttatattacgggttattttaactaaatttaatgcgaaatcaattttcttattcacgtctttgtaatataattgtaactagtgtggaaaaatattcaaaaataagtcaatatcttatttcacagacctaacttgggttgggtctttaactacaccatacactcagagttggccctacgcgcctagaattcactcattttaagagcctaaatatattttaaaaaatatatatatttactaatttttaaaaatatcatttatttttatagtgaggacttaggaagcgtttggttgggaggaatgataatataggaataggaataggaatggaatggaataaaatttaaaatgcataaaaaaatcattaatttttttttcttgttatattggaatggtc

SEQ ID NO: 251678 - DNA, 1363 bp, Cannabis indica
ttttgatatatgattcatgaagtagttaacctcattttaggatagaaattaatttttttaatagaagaaactcattcacaaattaaatgatatttaccattgttatttaaattttatctatatatttcattaggcatttggtatgaggtgtttaatataatttgattataagaaatattatgaaagagaatacaattgtagagaaaagtgtaaacagttaataagtaattatattctcattaattgaattatattatttaattgagcacatgaatcttatatattatttttacaattaaaaaaaatatttttttattatatctgtaagagcagaatcaagagagagaaacagagaatattgaaagagaagctctatcctaagaatggagcacagatacgtattatataatttgagaacttgaattgtattacaatgccacacataatcgacttgacagaaagataaaaaacagaataaaactaactaattgaattcctaactaactctaacaccccccctccctcaagttacactaggttcccttagtgttaacttgtctctaaaagtgtcgaactgatgttgaggaagaggcttagttaggatgtcagctatttgatgagtggcagaaatgtgtcttatggaaagttcttgggcaaggactctgtcacgaatgaagtggagatctacttcaatatgtttcgttctttgatgaaaaacaggattggatgcaagagaagtggcacctaggttgtcacaccaaagaacatgacaattgagaacttgcattccaatctcagtgaacagagattgaatccaaattagttcagtggtggcaagagcaatgacacggtactcagatttcgtgcttgagcgagctactacagtttgctttctagaactccacatgatcaaattgtggcccaggtatatacaataaccagaagtcgatcatctgtcatcaattgagcttgcccaatcagcatcagtgtaggaaacaagagtgagaggagatgctgctttaaagtgtagaccatagtcgattgtgccagccaggtatctaaggagctgtttacaggcagaccagtgctcatccgtaggagcttttaaaaattgagacagcttattaacaacaaaggagatgtcagacctgatcaaggttaggtattggagagcttcaatcacactacaatagagtgtgggattgtccataggggtacccattgtggcagcaagtttgctgtttgggcacataggtgttagtgtgggagcagcaacaaccatgtttgtacgagtcagtaggtctgtgatatactttgcctgagtataagatgcagatcaatggaggttcttgtaacttcaaat

SEQ ID NO: 251679 - DNA, 814 bp, Cannabis indica
tgcaatggtggtacaaacttgtagagccgtaatcgattcagcaaatccactggcagtggatcccgcactgcagaatccaagatatgcaggggttccaccagccacaaatcttgaacaaccgccaaccgtaggttagggtggaagcgcgcctagtgtgcaagagactggaaataccagttcagcagccaattagggtattcccaatattggagttccgccagcaacaaatatttgaacaactgttggagatgacactgggatcccgaaccttcgtgctgctcttggactcatgcaaggtcatactaataccctgcatcatgactaggaggaactccgtgctgcggtgaatcttgcatttgaagagcaaaggcgtctatttgctgaatggagggataaagagattgaaacgttgagggctcaacaagcagccattaacgatcgaacaagacaggccaccgtgctgatacaaagagcctattaggctaccaaccagcaacatgcaaccatcatcccgctgggcgagtcagacgaagatccagccgtgaacgcttctcaaaccctgaacggtcagctacccattcccctgtcataggtttcgcctgtgggccaagcagtaggcaaacagaccttgtctagtaattcgtcaggggaggtcatacctaataactccgcccaagttaacggttctggccaactaatcaatcaaaccaaccagtcactgagacaacctggtatacctatattttatagattgggaatgcctcatgatctcatatatgatctgaacagaaggaaagggctagacgagcagtat

SEQ ID NO: 251680 - DNA, 941 bp, Cannabis indica
ccccctgctgccttaggcctacaaacatagtcccaagccactaaaccaggccctgccccctcttgtgtacccttccaaagaaaggatcggcaagtagcttctatatccttcaaaagcttttttggaagaataaagatttgagcccagtatgtgtgtatagctagaagaactgagttaatcagtgtcactcttcccatgtaagataagttcctagtactccacatccttattctacttgtcattttctccaggagacattgacactctgatctagagatcttcttgaagcttataggaataccaagataagtaaatggaagagtacgccttttaaaattagatgcatcaatgattcgagtaacctccaattcttgcattcctgcacaatatattgctgtcttctgctcattcggttgcaagccagaggaagctgagaacaatttcagaccttgaagcagtagcaaaactgatatataatctccatgacagaaaactaataagtcatcagcaaaacacatatggttcaatttgagagatgcacacctatcatgaaatttgaaccctgtccgagtcccaaccttggtgaatatcctagacaaatattccattcctaacacaaaaaggaggggagacatcgggtctccttgtctcagccctctctttgcattaaagaatccacacatagagccattcagcaatagggagaacttagaagtggatatgcattccataatgagcttggtgaacttactaggaaatcctagagcatccatcatctcatgcaagaaactccattctatagtatcatatgccttcctcaaatcaattttgatcatacaactaggtttgcaattattcctcccataaaatctcaccaagtcttgacataccagcacattgtgagcaataaatctgccatgcacaaaccctccttggttctc

SEQ ID NO: 251681 - DNA, 980 bp, Cannabis indica
ttatagtgaatgtaatttttttttttattataaatgtgagtaatataatttagtaacaatattaaaatgtcactaaaatcattttaaatttaaacaataaacatagaaaatatttttagtaacattttcaaatatcactaaaatgtactatttagtgacatttttatttacttcacatgggggtattccacatttttttttacaaatattacaaaagctataaatgtgaataaaaatgtataatagtgacatgggtgttgctggatatcatttttggtgtagtgtgtaatttaactgccaataaaattttacccaataatattgattttaagcaaaataaataaagaacaacacaagatcgaattgataattctattattattttatgaataataattactaaagagataataattaatttatcaccatcaagaacaatattttagagctatataaatataactaacaatcacgtcaaaaaaaatatatataaaatgtagatataaaatgccaaatcttgatttaacgaatttttttggttttttacgttaacttcaacagaatattttattaatttaacagaatattttttattaattttataatattattatatatatttaaaaataaaaattatagtcgatatttatataaggaaattttaatttaaattcaaaatattcaaaatattataaacattttaattatattttaaaatttattagtttaacttggaattaaataaaaaaaattatataaagaaatttaaatttaaaatattataaatatttttaactatatttttaactttattattatttattttatattttaaactagaaaacaaagctgcgcttcgcgcggttttgaaataattgagaaaactataaatatttacatacaaaaatatatttatttattaatttaatatttaaaaattttgtaacatgagtgaaaaaatttaaatttaataatttttc

SEQ ID NO: 251682 - DNA, 555 bp, Cannabis indica
tgggagtttctgcccgtcgatcacaagctgaaactcaggccgacactgttacaaagatcatggatattgattccacgatttcaggacataatgaacatgatatcccagctggagattgtaatcgcaatattaataatattaaagagggagaatcgggaaaggtgggggacattattgatagttataaagggaaagatttagtcaaccttagtgagaaggatatgactattatgttggaaaataaaaagagaagaatggatatggtaagtttgaatggtcacgtggctgttggcaatatggacaaacaaatgctgggaaaagaagctgatgatgtgtctgagccaaaaaacttgttaaaggtgggtcttggttcccaagcccaccaagcattatgagtctattgtcttggaattgccatgggcttgggaacccgtgggcctctcaattcattaaggaccttgtggtccaaaagagacccaattttattttcttgtgtgaaactttatcaaaaaaggatattgtggaaaaacttagagtagctcttggctttgatgg

SEQ ID NO: 251683 - DNA, 826 bp, Cannabis indica
ttgtgagaactgatgttaaaatgtaccaataacgatatattaccatttgtggtgcttgacaccttaatgtgtcatttacattttcgttattaatatatatatatatatctttattaatttcgattagaattttaattttttttattactacatatatatttgcaagaacatctctaatggaatatgtaaaaattgtactatatttgtcaaaaaaatgacttgtgatatatttgcattaatttttagcattatgcactaatgcataatttttttttcttctttttttgttatgaatgattgttaatttttatttttacaatttttttacaacaatttctctagattttttatgtatatttttgtacaatattctttttctggtcaattatttttattattattaatagaacattagcatttgatacctaagatgcccaacactatacatatatatgagacttaataattaattagcatttccaaataaccgacgccataagtggcgtcaaaatcccttccaaaacttcccaatcctatgtcgtcggttatataatattatgctgaaaaaagggcctctaaaggcttggtttgtagtagtgccacctcctttagtatttttcttatcatctctaatggataatgtataatttgagctaaaaaaattgaaccaatattatatttaacccaaattttataatagtgctctaatgcattagagtaaaattattcatttttcaatagaaatgtataaaaaaaaaatatcaacagaaaaattacatttttattaaaagtatataaaaattctatcaaatatataaataaaaat

SEQ ID NO: 251684 - DNA, 3309 bp, Cannabis indica
caccaaagagatcaaggaaatgggatgatttgttcttttttataatacattattaccaaagagacaaggaaatgggatatgatttgttctttttggggctgtgctttgtttcattgtcctaaaactatagaagataaataattgttaggaatctcaacatgtaattctgctgttgttattttaaagcaaggtttttgtactatgagtagaatcactcaattaccatgttggccattattgattaggaatggtgacccatatgctgagtaatatggaagatagattcattcagggaaattatttcagagaccagatctcatatgcacaacaagcataatgcagagacatcaaacacttcagataacatggaaataatcatacctctctgttttttctctccttacactttttattaaatattatttgtccttttttttaagctgatacacatacaaaacactccattttttgttaaactaaaagattcttgtctcctttcactagattctttcgatatcattttcaaatcacgtgaactaaaatcaatcacactagattgtagcaagtgaaaaaaatgaaatcttttgacagaagaactaaaaaagtttggtactttaagtcaattataagagaacaagattaatacccaagattttatgaacaaaaccagaatattattctcactcatctatgcttcaacattatataaaaagcaagtttaagatcagatttgaagtacaactgatacaataaaactagctctgatacccaaaaacaagcaaagcaactcttcactaagtaaagtatataaacctcaaagagacaaccatggtttaaacttaaaactgttcaatcctatcctcattgaggttcagaccaaccatggcatcagccaaaccagtgctcgtttccacaagcacatggggatcattgtaatgcctaacagcctgaattatgcccctcacacgcttgtacggatcagaagaattgaaaatctccgaaacccacaaaaacaccgtcgcatcccaattgcatcatcagtgccgcatcggccggtgtcacaatccctccggcggcaaattgaactacgggaagacgacccatttgcttggtctgagcaaccagatcataaggcgcagctatcttcttcgaaaaggcaaacacttcatcttcatccatgttgtttaaaaccctaatctcccttattattgatctcaagctccgtacagtctcggaaacgttacctgaacctgttaattccccttgagtccttaccatatcggctccttccctaatcctgctcaaagcctccccaagatttcgacacccacaaagaaatggggttcgaaaattatgcttgttgatgaaattatcctcgtcggccaaagccaaagcttcgctctcatcgatgtaatcaacaccgatggcttctaatatctgagcttcaacgaaatgcccaactctagatctcgccattacagggatcgaaacagctcgcttaatctccttaagaagagatgggtcagccattcgagaaatccctcggtggattaccggttccgatacaataacagaacaagcaccggcatcttcggcgagcttagcttggtcgatgttggtaacttcgagaatagctccaccgcgaagcatttgagctaatccgaccttaatggaaaatgggttgttcttcttggtatcggtaatggcgttggtattgtagaccgttacggcgccgtcttcagccatgattatttgcagagaagaattatttggaattgggtgaaatgaaaaacagagtggattgaattgtaaggatatttttgtttaggggtaaatatataaaagggaaaaaataggaggaagaagaagaagaaagggagtgactttggtataattgagtcgagtcgagtgagttcgagaagtttcgtaattgggttaggttatattagtcggtggcattggcaatggtatatagcttgtttaagctttagaatcttccattccattcttacataaaggcataatttcacactcttttacacctattctatttctatgggtttaggaaaatatagaaaagtaataagaaaaacattgggagggccaaactttttttgttttaattttgcacatttaatctttttattttttcttggcaaaacttcattaagtttatattttttctttataaatttgacaaaccaattaaatattaccgttaattatcaattggatgaccattgtatacatctgtgtatatgtaacagtaaaacttcagagtcgataaagtattaatttagttagaattaaatcgtagatatatataatagatgaaactagtcttccaattaataacaattatcaaagttatgtgattttatttctaaaaaaaaaaatattatgtaaagtaaaaatacaagttattaatttaaatagttactttatttctattaaaaaaaaataacatactaatgtttctattgatctcgtgaatagcatttgtagcttgagaatggtgactcgagatatttataagatagttttggctactgtttttggaagttagaagggaattttcaactagaaataatagaagctcttgctctaggtcatggagtcactcaatgcaatcgttttagatttcacaacatttagtttgaatctaattggaaaggcttggttgataagctaaattattcttttaatttagattcatctttgggattagtcatctctgatatcaaatcatcttgtaatcttttttatattgtaagattttttttttcctcctgttaatattaatcttgttaagtttactttatcaacaactgtaaataaagtctagtgtaatgtgaatattttcattgtattaaaatactttattttagctgatatcatttattaatgatatctcctaatttttacacttgtttattcttagcacttttgtagtgttttttgaaattatttttcaaaaaaaaataataataaaataaataaaaataacatacaaatgtacttttttttttcaatgcgaggacaataattctatctaataacttatctgattaatgcaccctaagaagatggaagctaaagactactgtcccaaactgcaatggaccaaaaaaattaaaacactttagaactaactaattccaaactgtattttgacataatatttatgagactactttaacatttagcttagttgaaacttaatcatcaataactcgagtaatctatgaaagaagagtaattggtcattttaattttacagtaagtcactttaatactgtagaaatattg

SEQ ID NO: 251685 - DNA, 635 bp, Cannabis indica
ccgtttgacttcatctttgagcgcccaggcatgctccttgttcaacaaccacctcttttgttgaacaggctagatgttgggatcaatgttgagtgcatgggtcattatggaggggtcgattctgaccatatttccatgtgaccatgcgaacaggtccaagtcttcccttaaaaattctgtcaagattgacttgatttctagagccaaacctttaccgatctttagtgttcttgttgggtgagtgggatcaacttccacttcttccaactcttctacaagtccgaagcttgctacatgatacccaaagcaaggatctatgtttgtgtccccgccttgggctagacttcattgccccttgtagggctcatcttcttgacttctggcaggcatcttctccttttcggccttggataaggccaagttgtaatagtgatgggtagagtgttggtttcccgtcacgcatgccactccatgccttgttaggaatttaaggcataattgtagatagacgtcaccgccttcaggtcattgagggccggtcggccaatcatggtgttgaaagctgagggaacgtcaatcacgatgaattgcatcatcaatgtcttgtggttggattttctccaattgtgaggggt

SEQ ID NO: 251686 - DNA, 607 bp, Cannabis indica
ccccacccgttggaccattcgacagaagtcaaaggcatatttggctgagttgccctgtttagcgtagtggaaacactccgaatccgtgagagtttcgttcatgtctccaatgaggaggactggtctagaggaattattgacaatatcgccaacttgaatccaaaaggcttctttgtcctctctatgtggcggtccatagatcccaagcagagtccatttaaggcctttaggttccaattcaattgtagcagagataacatacctagaggagtattcaatcacacatttcacttccttttcctagcacaaacccaggccccctgatctccctacaggtgcgacatagaagtggttttcatacttgagttttgtgcaaacacttttgaacttatcagttgtaaggcgagcttcggatagcagtagcattcgggtttatgttggcgggtgagggccgccaattgacgaactgtcgtggtgttcctgagaccacgacaattccaagcaaagaccttcatggcgatcgcggagacttttctgggcaagtctccatagccccaaattgaaaatccagtttagcttttcccttgttgaccagttttttaagagg

SEQ ID NO: 251687 - DNA, 622 bp, Cannabis indica
actaccacttctctctctctctctctctctatatatatatatatatatatattattcgttgaacaggccccttcaacatcccaacccacggcgaaccaccccgtagacccccaccgactgacgacgcacccctattaacccacgacgcatccccaaccaaatcggacataatgtcaaaggtgagtttgtgtttcgtttttcagtttttagaatctcagatatgtgatttgggcaaggttcgatggggtcaaatgaaactatgagtttgcgaggtaggagacgtaggtctgatggggggggggggtctaatgggtccgatatggggtctgatgggtccgatgtgaggtctgatgagggggtccgattgtgtaaatgggggtaatgtaaatagggtgtattttagggatatcataaaagttgtcatatcctacaaatattagttattatgagtttaggagaaattttttaaccaaatgtaagcataaaaaaaacctagagttcaatttttaataattttatttttttaatataaccaactttgagacaatttctaacacgaacagatacagaaaatataactaattttgtcatgacatctctagatcatattattattaagttt

SEQ ID NO: 251688 - DNA, 842 bp, Cannabis indica
tttttaaaaaacaaaaaatataaaaaaaaatattctttgaatgtaaaaatataaatattttacaaaaaaatggtgcattatgtaattattccaataataaagctagaaaactttcattctaaaattaaattgattaatataaaagttaagtacacaaaatatgaaaaccaatttgaataccccaactgaaattaagatgaggttcttgctactcaacggtagcgatatgcaggccgatttatctcctttacaacaaataacactcgaggtcgatgctttaatggaaggagatcgagcaggattatgcgttgtccaaaaagagcaggggagtttaagtattctggatttcatgacagtgagtggcattcttgaggttgagttctttgtaatcagaagagccttataggtggccaaggacaatggttggacacgtgttttgattgggttggactctaagatagttgttaaagcatagtgctggttcgaactctccctttggggtagggtaggagaggcttattcaggtttctatttcttctattgtattactaaacagtttttaatgttattaattttattaggtgtgaaaatttccctgcaatcactttggctaaatgaaaaagatccatgatgtccaggcttaaggatgtttaacgggggtacctactggctaccacgttttgctttagttttttaactctctagttattgtcatgaaaagattaagataatcccaaccttttatgttatatatctaggcttattagttattttcatatatgaacttatgtgtgtatcgaagtttatgagtatatctattttttggcatatgaaaaaaatgt

SEQ ID NO: 251689 - DNA, 1194 bp, Cannabis indica
cttctccagctgcgactgatagggcctcgatggcctgactcggaggggcagtagcgagggtcgcctcgagatgaggggcaatggtgttgggaacaactgtaggaggaacttgctcttggatgtcgttatccgaaacctcgagatcaataggctcagccagtaatttcttcttatgagcagtggttttcctttgcttcttgggaggaaccacttcgacagcagtagggactccagggttggatgtccttttcttccccttacggtcctggacgtcttcataacccatgtctgcaaaacaaatcgaggtgttaaaatcattataaaagctaattaaaaaggggaggagtataattttccacctaagggatttaccaaaatcactagaatgcgacctatcactagatgaaggagtagaaggaccataatattcgctaaaatccctacgacatgtaattttgaatatatcagaaggctcgattggttctaaatcccagctcgcatctatgtgaccagccttatcttccatagtaccatattgctcggctataccataaaatgactcgtgacagttcatctggacgtggaatctaggataccaactgttaaacttatgagcaatgcagaccacgagaatggaattccaagtataaaaattaagacgggagtcttggaaggtaactaatgtattacgctcagccctaagtacattaggtgaccagccacattgattacctcaggatgctccttcaccggattcccaaggggcagtgctttgaaggtattgtgcttgggccaagcgatcccaggcttggtcctcggatggaacaattatttgttgccaagaagaatacttaggaaccttgtaatcgcaagtgtattctttatcagtgagaaggccccccgatcgtaagttaacttcgctcaaaaggaatttgcacgatcggagaccgtaagggaaagtcatcgggtgcctgtgcctactaaccatctcgggggtaggagtaggtctcgccagaagagctgtcagaacaaacaaaatattagtcaagtacttgaaaaaggaagactgatgtaaataagtaagaagagaacaatcacttacaaagtttgcgaaacgtggttgtgccaatgggggagagaccagacgtccagaagaagttgtccttgaaaagacaccttatttggcaggtctac

SEQ ID NO: 251690 - DNA, 688 bp, Cannabis indica
atgatttggatgaaacttgagatgtggtgtcacatgcaattcatttggagtgaattttaactgttttttcagttaagattagagaacacacatacacattggagaaatgatattctctggctatttcatttcaaatcataactaatgtttgggaacactaagtttgtgccagacaagaatatgacactctatcacaagcaagaagaaaaaattagaaatgttttactttaaatcgctcttgtctctcagcctccatcaaggaatgatgatccaaggaattcctcaccttaagcagctttctaaaataccagctaaagtcacttttgagagtaagacaccaaaattcctgatccttcaagtagacatcattaatccatctcacccaagacaatcttgtttcgttgagagagcccaaatgtacttagcaatgagagccatattcaacttccttccttctctaaatccaagaccaccatactttttggataaacaaacatgctcccaagaagtaagatgaactttactacgatttccttgaacaccccaaaggtaatttctacaaagtttgttaatctccgcagtcaccttatgaggaaggataaatatgcccatctagtagtttcttattcccaacaaagccaaatgaatgagttgagttctaccaacaaacgaaagatttctactagtc

SEQ ID NO: 251691 - DNA, 527 bp, Cannabis indica
cagaaaacaccacaagcaaacaaagcaagaacaacaacaataaccctcatttcatgcaaaaatcttaactttaaacttaagaaacaacaaaagaggaactagaaaactttcccaagcttgaaacctcaacaaagatgctatctaaacccaaaattgttgaagaaaacccaaggcccttgctggtttctagggctcacgagagggaaaagagagaaggagaataaatgttattttctaactatattttttaaaaaataaagaaatggtttttggttttattaaattactttcagccaaatataactaaaaatctaaatgcatctatttacttgactcacataaagacaaaacacaaaatgggcaaaaagaccaaaatgcccttgcccacacaaaactaacttaaagtcacttaagggtatttcgggaatttctgaaattccgacaattcccgagattcccaatgtctaactatactgccccgctttagtaaatactaagatgtgattctactaagccatacaccgcgt

SEQ ID NO: 251692 - DNA, 782 bp, Cannabis indica
aagcttataattgtgctatggaaatttgtaccgagaaaggaacaataatagagtataagcttactcctaatggtaagtattttcatcacatggttaaatatgattcatcagttaatacatcaatgtgtagctgcaagaattttgagtttgcagaaatactatgctcatatattcttaaagtattttcttttcgtaatgttgtaagaatatcttatcaatacattttaaagagatgaacaaaacatgcaaatatgggagttacatgtagtacatctcaaattatagatggagataattctaagacatgtttagcaatgtgttaccaagatttgtctagatcttgcaatcatattgtaacaagagcataagaaagtaaaaaagcctataaaacttactaaggaggtctttaaaaggctcttggatgatgtcgatgcatatttgaaagaagaaagagttgaaagtaaagaggaaaattatattgcgagtgaaattgatataacaataaaaagtgtaaacacaaataataagaacattagtggtggttcttcacattcaaataatgctcttgagaagatgggtaaaaaccaaaagttaccaaaagaaaaaaaacttaggcaccaaaaaagggactaacacttattttattttgtgaaaattacatgaaatatgagatttattaaaaaaaaaaaaaaaaagttacaaaaatatgacatttataggtttgtcactcttctatggcattttttcacatttaagattttttatggtatttgatattccat

SEQ ID NO: 251693 - DNA, 803 bp, Cannabis indica
ttcagttttttgcggtgcggtttttgcggttttttagtatcgcggtgcgggtgcggtttggaaaattagaaaaaccgcatgtgcgggttggtttgaaaaaatggttaaaaaccgcaccacccgcaccgcgaacacctctagtgagcagtaagaggaaactgtctcaatctgagcaatatggctatgagaaaaaagccataattgaagagttttccatgctttaaaaacactaaataatgaaggggaaatatgtatggaaataattaaggtgaaaacgcagacaacaactctttgttgtttcttgtgtctatgatcaagtttagtattcacaccccaaactttccctttttatagatattcaaatcttataattacaccattttcatttttaacggcaaactttcttttttatagtttaaaaaagtataggtcttttttttaaaaaaaaatattattttatggaaatatcttttaaaaaaacgttaaaaatatagaaaaataggagctacatttccactccaaatacgcgactatgagtacaccctaatttttttcttagaaaaaataattaaaaataattaatcaattaacaaaattatttaattaaattatacatatgacattcaaaatgccacataatcaatttgtataacttaaaataagaggagaaaacaagaatagttcaaaagaaaaaaaaaatacagacggcgtaatttgaaaataaaaattagttcagagaaatatatccaatttattatttataattttaattaaaactgactaggataatttgataatttatc

SEQ ID NO: 251694 - DNA, 1473 bp, Cannabis indica
tgaaggtaatatctaaattcagctcatcaatttttcggttctctttctgtttagattccagactctacaggaggcctgcagttttaaatattagttttcacgaattttaaggttgattcaagaagacgaccagtcacaggactccggttatacttagaaggtaagaaaagtgaccatctagcaatccacctccagcatctctgtacacttcccgataacctccatatctcagacgatcatggttacgagtccaccaatgaacctgtggagcggggatactatgaacctgttaagtggagcattttctcacatgtttgcactgccccgatacaatgtaatggcgcctgtattgacgagtctgcttcaattgttacaaaagcttggtttgcagttaaagttgttggaatgaagaaagtcttgttcctgaggcttggattttcaacagtggcatcggccaaaattcgtcgatcagaatgggaagggtcttcaaactcatccagaagatcaggatttctctcacagctgattagcacaagattcagttctgcacttaatacacccgagaagccggtgagagtggacttaagtttagctgtgtatcctgatggtcctcctaaacctgctaaggcacccaaaatggcaaactttgtagatactaaggaaatggtgagaggtccaaatgacccacctggatattgggttatcactggagcaaagctgtgtgttgagggtggtaggatttcaatcaaagtaaagtactcattattgaccatactatcagatgactcaatgttgtttatgtaaaacaaaaccaaattctattgttcctgtaaattttatggtgtacatttacattatttaaattcatttacagatatataaattggctcaagaagacttgtaactttgaaatctagttttttttttttaattctttctcatataatctgatatgaagatttgctctttaacctcagccactacaaacaaatagggacaataatttaggtcatgatacgataatacgacatgaatttaatacgaattattacaggtttagtgtactccaatatcgaatggtgttgtgaaagtataagcaaaacaaattcacaaacacaatgtgatcttacaaagatttcgattcagaaatctctaaaaactagatgatgaaaaatagcacaatagatcaaacagatctactttattgatcaatctcaaatctcaatatcacaacaacctctctttgaaaaagaatgaaaattgatgtataactaagcctaaattagaggaaacaaaacatgtcatcatgtcatactttttttgatttcacttatatatttcatgtcaaatgtgttagatgtatcaatctgtttttgacttacatttaatttctcaatactaatacaacccgtaggatttgtgttgactcattttgatttgttttactataactgaaattaaagttatagagtg

SEQ ID NO: 251695 - DNA, 1580 bp, Cannabis indica
aagaaactcaacaaaacatgtgggatttggatactggttgtagcaaccacatgtgtggagataagaaagctttttctgagatggacgaatcatttcgcaccaccgtcaagtttggtgacaactccacaatttccgtcatgggaaaaggacgggtaactatccaaactaaaggaaattctacccatactatttctaatgttctttatgttccagatttgaaaaccaatctacttagtgtgggtcaactacaagaaaagggatacagaatttctatcaaagatggagtatgtcgaatcgaagatgcaaatttgggcttaattgctcaagtgaacatgacggcgaatcgaatgttcccactttatctccacaatactactcattcgtgcctatcagcgaaacttaaagatgcatcatggctatgacattttcgctatggtcacctgaattttggtggattgaagactttgcaacagaagaatatggtgcctggtcttccttcgatcatagctcccgccgaagtgtgtgaagaatgtgttgttagcaaacaacatcgtaatccatttctgcaaggacagtcatggagagcaaacacaccattggagttgattcattcagacttgtgcgggccaataaatccatcttccaatggaggtaaaagatatataattaccttcatcgatgattttagtcggaagacatgggtttactttttgcaggaaaaatctgaagcttttggagcctttaaaagttttaaagtgctcgttgagaaagaaattggcagccccatcaaagttattcgcactgaccgtggtggagaatacaactcacatgaattttcaaatttttgtgagacccatggaatcaagaggcaactcacagcagcatacacaccccaacaaaatggagtatgcgagaggaaaaatcgcacaattattaatatggtgcgaagccttctgttgaggagtgggcttccaaaagttttttggccagatgaagtgaattggagtattcatattttgaacagaagtcccacttttgctgttcaaaatatgacaccagaagaagccggagtggacgaagaccagcggtagatcatttcagaatttttgggtgtgttgcttatgctcacattccagatgagaagagaaagaagttagatgacaaaggagaaaaatgtatttttcttggtgttagttatcaatcaaaagcctataagttgtacaatcctaacaccaagaaaatcattattagccgcgatgcaatctttgatgaagaaagaacctgggcatgaaacgagaatattgttcagcaacaaattccagcaaattttgatggcgatgaagagaaaagacagcagcaacaacaacctgtagagatagtccaacaacctacaacaacaatcactcaaagtccacatgctgatgaagcacccactgaacaaaggcttcaacgagagaggaaaaggcctgcatggatgatggattattaggtatctgattctgacgattctgaagaggatccactcacacatttttgtttattttcagattgtgatcctgtagcttatgaagaagctgcta

SEQ ID NO: 251696 - DNA, 604 bp, Cannabis indica
aaattcagacaaagtttcagtttttaacattctcaattcatcaaaaatagtttgcaacatggtaaaacgtggtctttttacatcagtggtaccctcaaactgagtttgaaggatttcccactcgtcatttgtagattcacaagatggtattaatttaataaagccttcatcaacaccattaaaaatagcatgtaaagcgttattattgtaaccagataatttttcatcttcagtagtccaattaagttcaggttttaccttagtattactttcatcgtcattttcagtaggtcgtgaccaacctgtaagtatagctctccaagccttctcatcttgtgacttaatgaatgctctcattctgaccttccaatatggataattcgaatcattcaacagaggtggttgagtaatgaagcttccttctgtaaacaacgacatctcacataaaacatattatgcgaaataaaataatctcaagatctctctaagagtttagtaactcgctctgatcataccaatcaaaattctttatttaatagcaaaataataaaactggcactgaaacagcttttctatagctacaacagacagctctgtaactcta

SEQ ID NO: 251697 - DNA, 515 bp, Cannabis indica
gaataaaattaagtagaattaatagtagagaattgttgggttttggctagggtaggcagattctgaaccaatttaatgacattgaaccaattcaatctaataatctatcgaatcaatccaattacaaaaaattgaatatacagttacaattaaattgaattagatgtaaaaatttaattaaattctaattatattagattgattattaaatgatatttttaaatctaattaaaaattgatccaaattcaattacatatgatacatattatatttatttatatattataaaataacacctaaattttattttatttattaatatttattggagcctattgcacttgataaaagaaattctttaaaaaaaaatctaagaactcacctatagttcaattttatgtgtttctaatttcttttttttcttttttttttttctttatgtttttggttaatattataatcaagtgttgaattaaaatctaattaaaaactgaatcgaatctaattagattgg

SEQ ID NO: 251698 - DNA, 518 bp, Cannabis indica
ttcagacgaaactgtttgagacaggatcaaatgaatctggtgttaatggtttggtcaatctagattaactatgattctcttattcggtcatggtttaagaattttcgctagcggtttaaactaaatcaaaccgtataattctttatacatactttatatgttttttttatgatgaaatatggatatttaggacaatcttagatggaatattgatattgttttaacattatttttgagaatatttttattgttatttatgtgttataaaactttcaaaagtaaagaaaatttagttaaaaaaagaaacaattatataaaaaaaaaattagaaaaatcacaaaattcaaaacatggtttcggaacaagtttgctttggtttggttttgaattttttcaaaaaccgtaataaattatttggtttgaaagaaatgaaaatttggaccaaaccaatccgtaaacaacccaatttgctgtctgaaatttcaggccagtgtacagctggatgcggcgccattctt

SEQ ID NO: 251699 - DNA, 769 bp, Cannabis indica
tgagaagaaattattgagttgagaaatactgaatgtaacagaggccttcttttctaccattttccctgctgtactcagtacattcaataatctatgtagtgggagtattccactatgttatggaaccctaatataccattagtacctgatacaaaagatatttaacaaaagtacaacactaatcaacccgcaagcctataatcatctacaagtgagcagcacgcaagcctataatcatctacaagtgagcagcacgcaagcctataatcaactaaaattgagtaacatattcaaaaatatcaaacattcagtaatatactcaaagaatcctataatcaactaaagttcagtaacacacaaaggaggaaacaaaaagttaaaaaacaataatcgagtatcaactaaaattcagttcattaacacacacacacacacacacaaagaaccttataatccactaaaattcagtaacagtgtaacacacacaatgaatgaatcctataatccactacaaagtacaaaattagaaataacaattccaagataaatttataacaaacatgcaaagtgaaatgttcaaatgtatccaattgatccaacctgtgcaaaataatagtttgtaattgtatgtatatactatgcatatttcaatatatgaaatcaaattcataagaaattaaaaacagtaaggaaatcaaattctgtagaaaacaaatctataagaaatctaattacataaactagagattatatatagtatatgcatttg

SEQ ID NO: 251700 - DNA, 817 bp, Cannabis indica
tgctattgtttccagaaaaatttaaggccctacaaagaggctcattagcatcctggcccacattaaatgctctgtccgtcccttcctcttggtcagtacaaaatttcaaattcaaagggccggccccaccacaagccttttcttgaaccttgcacggcccagcactaacacccaaacacttggccttttccttgaatgtattagtcggcccagaggaagaaaaggcaggcccaatatcctctctaataagcccatcaacttgggctggttcattagtcaacatcaaaggctggtcaaagtgatttaaattataagatggaaaattcagggtaaccttttgcccttcatcttctccaacgttacactttttacccatagaggaaaccccaggctgtcgtgagattgcaggtttcttgggcatccacgctttctgaatagccagccgacccgtcacaggcatcggacctgtcgctttcaccatttgcttcgaacctcgccccaccatggtcggccgatacaagctccttctaccaccagccatggccgacggcaaaggcaacctccagttcgcaccacgaccaacccgtgaggaagaagcctgggacggggaaaacgagtttgcaccagcgaacacatcaagatatgatgaagccacagatagccaagggccaaacaagggatacgggataccaacatcattagccacggtaacaggggacgagagagggcagcctcttctttgatggcccagaataccacaattatagcaaaaaattccaagcctttcatatttgaattgtatccaactgtgtccacc

SEQ ID NO: 251701 - DNA, 514 bp, Cannabis indica
atctatagtggagtcttttttaacagctcttacataaataatgtagtccttgtttaaagattcataaataatatcaagcagtttcttatcatggccctgcatacaaagtatagtattattaatattattattataaacaaaaatttcacatataaattttttttcaagttttgtttattatatatgtaccaaagagtccatgtccatcaactgctttcctgtgcatccaaataatttctcagcagattctccaattatggatgcattgatacaacctgatgaatcttctaagttaacaaaagctcggactctaaaaaaatgataaggattagttaataaagctaaaatatatacatgaagctttatataatgcaacttattttgtaataaagtgaataataaagtaatatatattaaatataaaatttaaataaactattatatatactaaataaaagttaaaagcacaccttggaactgcaattgcttttttattcttgcaatggatgcattc

SEQ ID NO: 251702 - DNA, 3112 bp, Cannabis indica
aaaataataaaataatatgtgtgtcagaaactaattatttaaaatgaaacaaaaatgattgttcaaatatcatacaataataaaacttattaaaaaaacttacaaaaactaaaataatagtaatataattttgttaaggtaacaagttaagaaaataatttcttccatataattaaaactattttctcaatgaaaaatttagctatatacaattaccaaaactcataaatttcacatgtttcttataagctcaaaaacttgaccatcaacccattacaaaaattaataccaacacaatactaatattaaaaccacttacaaacttctcagaaactttaatactagaccatcaacccactactaaaacattcattatccactaaagcataatattagccacaaaagaagtaaaaaataaaatgagaatatattcgctagagttgttatcttgatgaaaaaaaccagttacgaacactaaaattataaataaattttacatacttatattgtagatactctatgaaatcttgaacaaatcaaatacaatacaaaaataaaactagttacaaacttctcaaaagttccgagacttaaccatcaacccactacactacccaaaacaatcattatatatccacttaaaataaaatattagctggacaaaagagtagaaaatagaatgagaatatttgccgaagttattattatcgttgaaaaaacttctaaaaaagtcgtcagagttgtcttcattaccgaaaagtcatcggagttagacattagaattgtcattggtgttagacattgaaatttggcacgctaaaaccagttacaataatcaattagttaaaacaataactaagaaaccaattattttaatcagtcgaattaaaaactagaatgttagagtcaattacataaaacaacaaaaataataactaaacaggcaaattagttaccaatacaacctaaaacaatcaaaagataaattgaaactgtgaaaccagttttgaccctataaaaaatcataataatacataaatgataaataatgaagttaactgaaaccagttttatctgtaaaaaaaaaagaaaaaaaaaaaatacacgaacaaatacaaaaaataaaaaaaactgatcatcaatataataaaagaaatacacaatacacatcaataatctaaaaaataaaataataagtgtcaaagctagtttaaaacctagaaacaaaataataaaaagaaaattaaaataaaagaatatacaataacataataaaatagagcaacccattacagaaccgcaaaaacatgtaaaaccacaacgtttcgaactttgaaaccagttttgactctatgaaaaatcataacaaaacctgtaaaaccataaaaaaaacttgtgaacttatacaaaatcttaacaaaaattgtaaaactagtttccctcttataaaagttaaataaaatatatatgacaaacttaaaaaacaaaaatataaattataaacaaaaaaaatactaagacataccatataaaaattcttaagaaatgatttattaaattaaactactgaaatgagtaaccagttatatcaaacaactaattaaaaatataacaacaaaaaccaataatgtaaagcaagtaaattaaaaccccattacaaaactctcaaaatctgtgaatcctgtgaaactattttcaaactgataaaccctatgaaactagtttcgatcctataaaaatcataacaaaacataaataataacagaaaccaattttattagtcggccaaatgaaaaaagaaaaaaaaaaccacacaaaaatatactcacaaatataattaaaacaatacacaatgcacaataaaaaatctaaaaataaaatataagtgtaaaaaatcaatttcaaactttgtgaaaccagttttgaccgtatgaaaaattataacaaaacttgtgaactcatacaaattataacaaacttttaaactatttttgaccatataaaaaaatataagacaaacctaaaagaaaaataaataaataatctctcaattaatattatatatatatacaaaaattaactaccaataattagcatcttaatttggcttccccattaaatatatataatttccaaattaccttacgagataaccataaagtgatttttactctacataattatctaaagagatgatcgaaaatgaggctataatttaaaaataacgtctttaattttgtattgaatgaattaagttttttcatagacaaaagttctaaaatgtatttttatcattattcaaccccatacactggctccaattgtttcccaaagctgttctttgctcatctcacacgagcaattcggaccataggccattatgtcttgatactggggggactcccccgaaatttaagagatgcttcagatttgaagagggatggatgagagatgagaggagtaaactgattgtggccaacgcgtggaagacggttgagcatccttgggcccctgctagtgttttcaagaaaattggagctactcgtgtggctcttctacagtggaatagatctcaatatggtaaattggattggacaatcaaagatctggaacagaagcttgagagaatccagaatttaccagctgaaatccaggactggaaggaggaatgtgatattcggcggatgttgaacgaatctttgactaggaaggcgatttattgcaagcaaagagcgagaatcgattggattaagaatggtgataaatgttctaagttcttcttcctttctgctgctattagaggaagacgaaatgccattgaaagcattctgaatagtaacaatgtgtggattaacgatcgggagtcaattggacgcgagttcgttgagtttttcaagggtatctgctacgaaaattatgatcactacacaagtatacacagacaagtagtagctcacgcaagtgaggtcaaaccacggggaattggactaagtactactaaattatacttatgattctatctggtaaaataatactttttgtgaataaaataaaacaatttagaaaattaaaagaataaatgaagattaatcaagatgagagattagagagg

SEQ ID NO: 251703 - DNA, 514 bp, Cannabis indica
gtattgaagctgatgattatcagcttactagagatagaggaaaaagagtgcacaaggcacctgtcagatttggttttgctgacttcacagcatttgctcttgctgttgcagagcagttagacaactcttaaccaaagacattttaggaggcaattacttgcaaagacagcaagaaatggaacaaggccattgatgaagaaatgctattactcaagaagaatagaacatggattgtggttaacaaacctgagggtcaaaatcttgtagcgtgcaaatggttatttagacacaaagaagatgaaactagcactggtgaagtcatgtataaagccagacttgttgccaaaggataaacacaaaaggaaagcactaattttactgaaatatttgcacctgttgttaaacaaacatccatgagggtcatgatagcaaaggcagcaaagtatgatcttgaaagatgctaaatattagcttcattagatgagataaaatttttattttatttgagctaaaa

SEQ ID NO: 251704 - DNA, 607 bp, Cannabis indica
acttgtggatatcccaaccaccattgatagataaaaaatcagcaactttgcttagatcagtagcaaaatgttcatttgatttcgaaaaaaaatctttaatatgagggatccaaggttccacaaatactagtacccctaccatccgctaccaatttagaaacacttttcttaaaactcttaaaatgactttttaaaaaataaatgaaaatgagttataataccttaaaaactttagctcattaaatagtacatctgctaaaatttaaaaaattgagtagttgatatatgatgctcatgtttattgaaagttatttggtgttttaaatgacaaacaatcgaaatcttcaatatcaaatgtttcttttttcattataaaaaaatgtttcttttttcatttatttacacatttattgcacaaaattccaaaataaattcagggttttcttttttcacacacaatgaataaaaaggaaaaagattgtcgtttcagcataaaccgacatgtcgtttactcgtctgatcgtcaaacgacaacgagccgaactgagatatttttgtctgaataaaaaaagggaaagaaagagttcaatttcaaaaaaaaaaaaaa

SEQ ID NO: 251705 - DNA, 481 bp, Cannabis indica
aaaaaaaaaaagaaaaatgtaattggcaccacattaagagtgtcggccccaagtagagtatgttatgggcaccacactatgttgtgtcccacttagacgtgcctatatcctataattgttgtagtgtaaattttatcgttgattatcatgtcagtgtaaatcgagtgcaaagataaatcatgggactaaagctttgaagcatataatcataattactttctactatgatgacatcactgtaattgtgaataactatatgttctagatttaacaaaaattatatataaaaccataaacatcaaaataacatgtaaacttaaatgacttctaatcttctattgatgacaaacaagattatattaaaatgaattttatttagggcataaaatccaagcattgcaatcactgatcaagagcctagttggatggacccaattgttaattacttgactaagggagagcttgttgggttttatgccct

SEQ ID NO: 251706 - DNA, 913 bp, Cannabis indica
  modified_base (882)..(882): a, c, t, g, unknown or other
caattattaacgaccaaaaaaggggctctgccggtaaaatattaatatcgacggattaatagcggtagagtttgtcgatatagagtactttcatttatatgatgacatatcaataccgatggacccactatagtgttctgccgatattaatattttttaaataaaaaagtatttttcagtttctaatatttatataataaaaataattataattatttataaattaatataactatttttaaataaatattatttacctatttatctacttaaatttgagaaaacattaataataattatctataatattaatttatccataacaatacacactaatattgtcttaaataaaaatataaaattatctaaacaaaaattaaaaaaaaataagattttcttaattaaaaaatctaattatatcattgttctaatcactaaattccataaagtcatttgcattagagccaagtcttcaaccgtcacgattattacgagattgaggcactggtagggtagggtaatacggttttgcaaattgttgcgtaggtaggatctcgataaattgtcgagtctgcggacgaatcaaagtagtctgctgttgttgctgactctaaggactaaaaaactaaccatacacaggcttctatggagatcctcctatttgaccatacatagattgttgttgtaataatgatccaaattgaccatacacaggttgttattgttgtgatgactcaaattgaccataccgtaagttgttgttgttattgcgatgagcctccaaaaaaggccaaccataagttgttgagtttgagatcctcttgtgtcgtctggaaaaatatattggaggagactgtgaggggatgcccaaacatgaaaatntaatttgaggcgactgtgatgagccagtagc

SEQ ID NO: 251707 - DNA, 590 bp, Cannabis indica
ataaaaaataataaaatatttaactaaatttttattttacctaataataatttattattatgactaaactaattaagtttcacagtacaaatttaaataaataaactatttacgtaaatcaaaattttttctattgattaaaaaaattaatttttctctaaatattttctacacgttaaattttttacaactaacaacaactaattttataacactatacatatatatttggatttaaacatatatacaaataaataaatatataaaaataaatatataaatgtgtatatttagattataaataaataaatataccttcacggcggttggtggtggtggtgctccgacggcatccagtcggtggtgttggtggtgagagcgagggtggacgtaccggtggtgcgagcgagagagaactagggaggaccagccttcgtgcgagcgagagggagagggaaaatggtggtggtcgcgcgccggcctcattgacgcggtgccgtcgtggtgccctcgtcgacggagagagagagggttgcgagagttactagatagagggcgagagagagagagaggaaggaggagcgtaggtc

SEQ ID NO: 251708 - DNA, 964 bp, Cannabis indica
ctaggggtacaccccttaccccctagggttagtctaggggcacactccttaccccttaaggagttagtctaggcgtacaccccttacctctaaggggttagtttaagcttacattccttaccccctaagggattagtctaggggtacactctttaccccctaaagagttagtctaggggtacaccccaaaatcctaaggggttagtatacccctacaccctacaccctcaactggaaagggtcttagaggtacctctcaagatggcgaatatcatcctttgcagagtgggtctcgagggtgtcaccccaaaatagtggctactaccttctgagaaagttaaacaaccataccaactatggggggaccctcatcgtcattaactaacccctacaccttcaactggaaagggtcttgaggaagttaaaccatgggtctcatcccaaagtagtggctactacctccaaaggaagttaaacagtcatactaaactctgggggcaccctcatcatcattaactaattcaaatattaaaatctcccaaaaagttcaacggtggttacaaacccacgaaaatagtgggatattatcacaagaatcagacttcaaccacttctgaaaaccaaaaatacggctgagatatctctgcaatggccgcgtctcctgaaacgagaagcaccaacccttcccttatataaggggtcacccatgacctgggaaggagatctaaaagtttgagtacttaaagaaaaaagaactctaccattgttatcttttacatgcaagagtctgtccttgatcctgcaactctgattaataaaatacaaggggaatagtctattatcgacattttcgggtcaaaactctttaaattctggtatcattatttacattttattatttcgttttttaatttttatatttttcattttattatgtattatgtgtttgttgtactaaaaatcc

SEQ ID NO: 251709 - DNA, 1158 bp, Cannabis indica
gtcctaactcagtaatctgattaacatcatcaaatcaccacatatataaataaaaacatatatattgataaccttaatataaagtagttagttaagcatgaagtagtgtttacagtcatgaaggcaatatcttcatcatttgaaggccttcgtaatagggcagaggaagaagggtatttgaatctattggattttggtggttggtgttgactagttccccattgtggattgaagaccaaaacagaagggtactgcaaacccccattaatggaagccacaagttttctattggctcttattatagggatgttaaactcttctgtacccttcacaatctccaacatctacaacaagtaactaattaatcggacccctataattatttaactgaaaatcatatatttatacataataataatattagtgtttatgattaatgacctgagtgttgttgaaaaagctggcatcacttaacttaaatgcacaggtgagagatgaacattgaccaattttagctggacattcagtactattattgtcaattaaattgtcctgtgtcacaaacaagtacacatcatctttatttaatcagatttgcataagattatggagattaaaacaaacaaaaatgtatattagtaccttttgatgggcaaaaacagagttgcgatttccactactaaaaagtagtagtcccaataaaattagaactgacatatttagtgataaaagttgctgtagatctttggttttgtgtcttgaataaaaggaatttcaataaatattttgtagttgagagaacattgaactgtgatgagttgaactgaactacttagatcaatgtccaaattttactttatattgatcttaagtatcaagtttgacgatgggggttctctctcattagtcaattttgggtcctcactattaatattataattttttttttactattttaatcttaaatttatcaaattgtgccgaatgaacaccggaccaaattggtgatagattaatccactttttctttttgagttgactttgtactatgaagattttagaaagaaaacgtatttagtcatttcattcgttgttttccatatgattcgtcgagtttgggctcttctctaacttggtgcatagcctgtcaagtttaac

SEQ ID NO: 251710 - DNA, 711 bp, Cannabis indica
gaactcaaccagtttgacatttcgtacaagtcacgggtgtcaatcaaaagccaagcccttattgattttatagtagaatgttccagcatgaatgacctcctagaggagccagtcccaaaactgtccacctagaaggtctatgttgatagagcgtcaaacaagaaaagaaccagagcaaggatcattttgatctctctgtaagggcatcaactacaaattgtcatgtagttcagtttttgcgcctcgaacaatgaagctaacagaggctatgctgactggcttaaagctggctaaaagagttggaccccaacacattgaagtgcacagtgattcccaactagcggtaaaccaaatctctatcgagtatcaaacaaaaggtggaaaaattcccgcttatgtcatgatggcttgggatctgctacacgtattcaaatgctataagatccgccaggtcccaagggaccgaaattcatttgcggatatgcttgccaaacttgcaataaatcttgagatcattcaacacagagtagtgccagtttgtcacctagagaaatcgagcattgaggtccagggggtaaattctattgttgacaattatcattcttggatggaacctatttacaactttctgagtttgggagatcttccaacagataaagctgcctataggaaggtccaatatcatgctccgtgatacgtgatcatggatgg

SEQ ID NO: 251711 - DNA, 1331 bp, Cannabis indica
cacctattataaattattttactacacctttcttttttaggtatgagatgagattcaacataaaaactggtctagctacccaaaaacaactttcagcatcagctgtagatttttctagggtgaatgagagctacattggcaggtaatttacatgatggaaggaaattgtcttactttttcatttgttttgtatatttgctttcaagtttttgctaagatcctctgttcttccatttaacatatctttctttatgcgaataaatgaaggaaacaacgctatgtatatggaaccagactggacagcattgcaaaagttacaagaattgtcaagtttgatctccatgctgaaccagaaagtggtaaaaaatgtctagaggttggtggaaatattcaaggactctatgacttatatttgtcccaatggttcttggagttgagtctgaggaagatgatggctacttaatattctttgttcatgatgagaataccaagaaataatttagttcagatattaattttgttcatgctaacatataatttaaagttgtgctcattttgaatgcttcatactaaggtgtgatgaatttgattcatgttatatatagttggtcatatatttatttctgtgtatatatataatattttttacaatgtgataactattaagttgctaaattcattgaaataggttgcaaatatattacttgcaagcgttagccgaggtagaggtacaagggcaacccaggcagcaacaaaaatcgcactagctcttgcaagatctctttaatcttgctttagagcaaaattgcaatcatagctcccaatgtaagaaactttttcaaatatttttaatcgaagctcaacttggaaagtgtttatgtggggcttattcgaaagagattgattgccttgcagaataaatattacagcgtgataccatgttagcagagagcatatatagaatgcgtgataccatgttagggagctcaattgtaaagattttacttttagttctcaattatatagattcaaattttgtaatttttaaatcgtgactggattttttttatttctcaattgtacacattgtatttatttatatgtaatgtatatattggtgcagacagtattcttacattgtactcgacgatggaaccgagttgctagatgctgtgatgttcggagatgttgcagaaaacatattcttatgtactgaagttcaattaaagtcaatattcggacgaggtaaatatataaaatttatactttttcataaatagaagtatattaaatcttattactaattatttttacagaaacataggttgttt

SEQ ID NO: 251712 - DNA, 540 bp, Cannabis indica
atcttaattgggtcaatactcctgctattgctgccaaagcaagggtctacaaaggttttgacatggcagattaaaaaaccattattaggcatggttttcttaaatttcaagtcgagctggctacttatcatcaacttacttcgggtttttacttggatatgaagaaaggacagaaggaatgtatctagtttaggtattataaactccctaaggtgtgttttaattgtgggtacctcggtcacgacaaaaaaagtgttagagatcaacaacttatgcttttccacccgaaggcaaagctattccatcatatgggccgtggattagagcatagacgtcatgctttagttgtttcaatccttgaaatcaattggactggtttagagaggcggagcaccgcttttctccgacaaaaaagccacctgaaggattgtcaagggtgagtaatggtaaaggcatttgtcctatggacaacaactgatcaaaaactactaatatccccattcctattgggaaacttgcaaggaaagtagtaagagtgga

SEQ ID NO: 251713 - DNA, 580 bp, Cannabis indica
ttaccaaacacttagctcaacttgtttccacagttttgctacaacttctttttttcacagcacagctacagctgctttttcccacagcacaactgtgtcaaactggcacgtagttttctgaggatggtagtttatggtttctggtaagtatagtttgggaggcagtttacttttataaagtatttgtgttaggctcatggagtgagttgaccggagggagaattttctctccaatgtatggtcattgtttaacgcgtttgtagtttgcttctttctttattttaatttctttcatttattaggattgaccttttactttcactcttttttttttgtaatttcttttttgaacttatcctttccttgttggttgttgtaggtaacttttcagtcatattagcaaaattcactaacttcgggtaacgttataatatattttcaataaactcaacactaacttcgggtccaagtcctgagtccggttcggtcacggtctagttcctattccatctgagtccggtctgggtcccggtgagagattggggttgaccccaaatcttttataaatattataatacaa

SEQ ID NO: 251714 - DNA, 619 bp, Cannabis indica
ctaatcaactatcgggatgactctgtatgaactattatatggaagattacgcaggtcacctattcaatgggatgaattacgtacgcgagaagaagttcttaggtcacgaagttgttcagaaaatgagtgaggcaattgaccaaattagagctcgggtgcttggtgctcaaaatagatagaagagttatgtagatccaaaacggtgaaatgtctacttttaggttccagatatagtattcctccatattttacctatgaaaggagtaaaatgctttggaaagagagggaaactaagccagtggttcattgggccttttgaaatcctgaagaggatagggcaagtagcatacaggttagctataccccaacgctagcaactgtacataatttgtttcatgttttgatgctacggaaagtatgtgtcagactaatctcacattttgagttacgaagcctcggaaatgcagtaaaatctctcatatgaagaacaaccagttgagatacttgatagaagagataaggtcttaaggaacaagacattggtactagtgtaagtgttatggaagaacaacaaggtcgaagaggtgacctaggagtgggaatcggatatgaggtacaa

SEQ ID NO: 251715 - DNA, 816 bp, Cannabis indica
agaaagaaggagaagagttaatcttctgataccatgttagagagtgaacaaaagtgagaaattgtattattgaacgtaatgtaaaataaggacaaggtacttatacatctatctcataaagagttagttacaaaccaggagaagataaccaacataacaacctgaactaactgcctaataactaacatagctgactgtaaaactaactaataccctctaataacccaaatggtcattccaaattataagtttgaaagctattcaacaaaagtggaatttgctagtgccaaaacacaacaaatggtgacagtggcatgtcacattgcaactaattttctggcgccccagctgcattggaattctctgtcccagctgcatctgttgggtttgaggtccctgccccagttgcattagaagtcccgagcccagctacttcctccctagctttttgttttttcttttcttttctttctcttgattgtttcttgagtagggttttggacaggcgggcgacctcatatgacatattatcttacttgacacaatgactgtttatgaagctagaattctaaaacccaattacatactggtggtgcttgttcatttttacatgttcttctactatgtctaacttgcccacatttaccacaatgattgagttgttcttttttactatgcttagttgcatcagcaggggtggctcattagcatctctccttcttttctttttctgtcttccaggcagatttttttagggcaacattagaatattttatttatggaaattgttttctaattaaggaaatgattttctat

SEQ ID NO: 251716 - DNA, 1482 bp, Cannabis indica
gttttcacttaacttgcaattgagtttccaatgctactggagtctgatacaaacttttgcattttaaaattattttttatatatgaatactaatgtatataaaaatatttaaaatatgaagtaattctctcaaattaaaaaatgatatatgaagtattttctttatttttttatatattttattttattaaatatattatcaatttgtgtataaatttactctatcatcattaggggcggagccttccgccgctaatgatagcaaaatccgccggtaaaggttaatagcggcggagcccgccgctattaatccgccggtaatacccggtcgttaataatatgtattagcagcggactgacacacccgccgctaattataatgtcagattcgtaaactgacattattattagcggcgggccagtccgcctctaatgtttttttttttattttttttaatataaattattaatcaatatattttaaataaaaaatagtattgcttaaaaaaatatattaaataataaactttaagccaaataattaacataaacgtaaattaaaattaagtttaatattgaatgataatagtcattacacaaattagttaatacaatattctctaagtaaataattacaatgtcttaatataacaaaaatacaaaagttaatcactagtctcgtttataatcactccaaaaaaaaaatttaaggttaattgtgattgttgtggccgacagagaagatcgaggtccccaaactaatctcaaaactctgggtgtattggggtagataaaaatgttactcctgttaacaagccaataaactcaccattattattaaatacttaaatgaaataagactatataataaatgattatatttaaacctaatagaatagtcataaaataattttaaatttatcaaatatatcatagcatataacattagtattatgacatacatcatatcaagttacattttattttaacaaaaacaatgtacaaacacatcacattttaaatttttaataatttcattactaataaattacatttataaataattatttttcaaatttcaaaaattatatacctaaatcagatttattagactaagaaaagaaaatcttatattgttaaaaacatacatttcacaaatataaatttgtgaatactactgatccaataagctgcaaaatattccaaaaaaaaaaaaaaaaaaaagaattctcccaaatctgaaaaaaatacaaaattataataaaataataaatacataaagcattgaaattattattatatacctaaataagatttattagactgaaaaaagaaaatcttatattgttaaaaatatacctttcacaaatataaatttgtgaatactattgattcaataagctgcataatatttcaaaaaaagaatttcttccaaatctgaaaaaatcaaaaattataatcaaataataaatacataaagca

SEQ ID NO: 251717 - DNA, 1054 bp, Cannabis indica
atattataaattatattacttaatataaatactatatatatacataaaaattataaaatgtaagcaacacttcgcgcatattagttccctaatattaaaataatcaaatagttttgcaatgaatatgttgatcgtttattatacttacaagtggaagccatttccccaagcgtacatgtaaatggaatccttatttgattgaccgaacattataatattataagtcatcctccaacctaattattatgtagtaaaaaaaatagaaactaaatatggtaatataatataaatacattatttattaaatatagatgcttctatccttttcaaagaaaaaatattataaaatataacaccatagattatagatgtgtgatcctctgaagactgaacgtagttataaaaggacaaacctgcaaagttttgtttcaaacaatattaaagattccaataataaccatctctccctctaactacctcttcaaaataccaatatatattgtgttattatttttatatataaaaatatatagtaataataatgtggaaaattaaatttggaagtggaggtgatgaagatcctgatttgtacagtacaaacaattttctgggaagacaaagatttgagtttgatgagaaagcagggactcctgaagagagagatcaagtcgaagaggctcgccacaatttctacaaaaatcgttacaaagtcactccctccagtgatctcatctcccgatttcaggtatatatttatatacataatcaacatatatatatatatttctatgctttcatgattgcagatcaatggtattaaaaattattattattgttaaaaaaaaaattatattttacactataatcaattatgtttttaaataattgtgctggaataccagaccaaaaagaaagtaaagagctttttatcaattttatttgtccaataagagacagatgccgtatttatatgaataggacagaaaatgggacacgacaaaagatttggatagcctcagagtctctgttaaaaacctcagatctttctcatatt

SEQ ID NO: 251718 - DNA, 1532 bp, Cannabis indica
tttaaaaaggttcagtcctagatatcggtaataacttgctctccttgtgttttattgatcaaagttgcaaaataaaaaacaggctcttcaatgcaagaaaaataacaatggcagagtcttttcgctctaagtactcaaattttcagatccctttcttaggtcatggttgacccttttatgtaggagaaaagatcggtgcttctcacttcaagagatgcgatcaatgcggtgttatctcaatcgcctccttaaatttttggaagtggttgaaatctggtttttatgtttatatcccctctattgtggcgttgtaactgtctttgaacttcttgcgggatttgaatatttgaattaactactaacgatgaaggtctcccgaggatgtgacatgatcgttaaccaccttcggagatagaagctaatacttgggggtaacacccccgagacccaacatgaggagggtgtcaattgctatctcggggtgacccccgagacccccatttgatgttgtgggtagtcatggtgtcattgaatgtactcatctacttttgagattgtcattacgtccatggtgggggtagtgtcatctaccccctagactgatttgacccataggtgtgtggtgatcgtttatcccacctataaattagtctaccctttttccttcttggaggcaaccactttgctcaagctaggcgtaaagcctaaaggtgactgtcagactttcattccaacgatcatgaccaaccatcatgactaacggtcaccccaacggttataattttacatattctccattaatcaaatcctaatatttctgtgtcacgtgtcattactcttgccacgtaaccgttgtcaaagtttagataaacacttatatatgagaaatgtaaaaagtattagtagtgtttagcactaggtactagctactacaagtatcacaaaatattatattattattgatattattaaatattaatttttatatatatatatattaataatttaataatatcactaatcatttgaaagaccttatttaatcaaagaattgttaaaagacataattggtgcctgataccttcctcgattaatttaagaaaataattttttaagaatattactaactaatcgtggagcgctacctatataaagtgttggacactactagtatcccgtaataatgctcatttgattatggtagtagtaagcacactaatacttaatattaatgcacatataaatctgcttctttctaatcacaagtttaattcgtgattcatggttcatggtctcttaaatgattgttaaactagaaagtaaaatacacgagaaccaaacaagtaaaatatacttaataaattcagataccaaaagttaatatgagggtaaaattttacaaaatttagcctacaatgaaagctaaaataacaaatagtagtaatagtactttattttttcccctaaaaataaaaaacaagaaaaagtaattttattgatttggagtgattaagtagtagtagtaatagtag

SEQ ID NO: 251719 - DNA, 1211 bp, Cannabis indica
tgggtaggtacttgagtgatcccggacttagccattggaaagtggataagacagtcatgcggtatcttaagggtaccaaggatcatatattgacctcacaaccaagcatggacaccaaaggccaagctctcaccagcttcatggctaatcatagaagcatatctccccaaatatcttatagttcagaagaaaagcaggtaccagagaagaagcgagagcaagatttcaagaggtgcattgaccacctacccgatgcaagcatgaccccaaggcacttgggggcaactgaggcatgcggtaacaaggtcagttacaaagcttctaacaacgaggttgaacatgaagcttcgaatgctagccgcaggctagcacacgaagcgcgggctaatgacctagacatacaccacgactctcagatagtcataggttgtgtcctaggtgaatatacaactcaataaaagaagatgatggcctaccaaagctactacaatagctcaaaggctatactagaaggcaagcccccaaagacggcacaacactcgacacactcattcaactagctagttgcgccttgacaaccaaggaaaacttggtacctactcagtttttcaaagaactaagtcctatttaaaaaagaacagacatgttagacaaccaacatggatacacctacaacaacataaggacggctataaggtgtccaatcttgcacaacataacacatagaagtggtatcccaacaccaccaaggagcatttccaagaaagaaattgtatagctactaacaaaagtgcataaaaggctctacagcaactaccgcgggagggcaaagcaatcaaatacaaatgcaatccaaccacagcattgaccgggcctttagaaggctggccaagcatgtcctcaacaagatggccgaccatagaatccacaatctagtcggccaccaccttcacatgctagccggccatggcctcatccaactgcccaggcaaggctctcttaatgtggctagccacctggtttttcccttgccagtctgatccaccagcagtcttctctcaaacttctggtctacggtgaccaagaagtacacaacatcttgctagcaagatcccttaacaaaagggaaagaagaagagactaagccaactcaaagctgcatggttgcgcacaaggtgttacaaggctcatcaacaaatatatcgaggaaa

SEQ ID NO: 251720 - DNA, 1007 bp, Cannabis indica
agacaaacttcttgtaagactcaattaattaattttaattaattaattataattctaaaattagactatgtctagtttacgaattttcaataagcaatgacttaaatgtgaagaaaagagattctagggtttatttatttattaagagactttattaagtctaattaataagtatattaaatgaaaatattatttaataattaattttagttattaattaagagactttattaagtctaattggcatttctaagaaaatacgatggaaaaatgagaaaatggcaaaatttcaatgtggggcccaatccaactcatggtcgaccactatgtatgggatttgccactttatttttctaatattttaatgctaattaaatctaacctaaccctaagtggtttcctataaataggtagtgatggcttaagagaaaagatgatgatacatctcattccttcaataaaattttgagcctcctttcctatagcatagacgaaaccctatccttctctttctctgttcatattttcataccttgagtgatagagtgagtgcccacacacatcaagtttgttctcaatcatagtatgtaagactctgaagaatccaatcaacaaaaaggagaatcgggctcagatcttggtgatactctgctacagaaaggataatgtgtttatttcacattgttttagaaattcatattaggatgttaaataaaatacatggtagtaaatctagatcctgctaaaatattccaacaacaggcatgagagccatggtaatgatttactttcatgaaatatgaattataactatgtttgtgttgatttggatggtttcatgatgatttatgtgattatttcatgaatgtatgtgatttacgaaatttttccatgaaaatattttatttggattccttgtgaaaaattaagcaactttcatttttacgaaactcaattccgataaaaaatgagagagttatggtgttttaagttaaagtttggtgcta

SEQ ID NO: 251721 - DNA, 689 bp, Cannabis indica
catgtttagctccccaaatgctatgccagacgaaacttggattattaccaagttcggctgaaagaaaatcagagtgtgggaagtattttgctttgtaaattctggcagcaagagaagttggattacacaggagacgccatccttgttttgcgagcatagcaaggttaaaatcatgtaagtgccggaaccccatacctctttcatctttaggcttagcaagacgatcccatgacatccaaataataccccgtccattgctagttttggttttccaccaaaagctcgccataagtttttctatttccttacaagtgccaatcggaatcaagaagacgctcatagcgtaagtgggcagtgattgtataacagtttttagaaggatttccttccctgcccgtgataaaaatctcccatcccagctattcacccgagaaagaactttgttttttatgaagccaagaatagcatttttgttgcgaccaataatattaggaagaccaaggtaaaggcttccttcagtagcttcattcatatggagagtagagcaaatgcgaagcctagttgtgccatccgtattggggctgaaaaatattgatgactttgatgggttgacctgttggccagaagcactttcaaacaactgaaggagattattgatgctaacaactgcattctcactggcttgacag

SEQ ID NO: 251722 - DNA, 718 bp, Cannabis indica
ataaaagtcaataatatataaaagaactctaaacataaaataaaatatcatttattctcattataattacattttttaacaaatgttattaaaatatcattattgtgacatttttttaaaaaatgccaccaatcaaaatgtcactaaaccttatttttggtgtagtgcgtggagtctcgacttcaaaagtttttattattatttttttttgataagttcaaaagtttttattaggtgtcactttttcgttttttcaaagcaacatgtcatcttcttcttaatttaatgtatgaatatatagggaagatttcaactgttatgtcatcctttctaaaaattaaaagatgttcagaagctcttggtagaaaaaagaagctactgtcattgctccacatagtacatgaaaaatatttttttaatccttctctttctttatttttgatgatacaaatacaagccacacatgcatatatagataaagaaatgcaatatgagaaacaatagtcgaactttgtttgcaatgaagtagggcaaaccaaaaaaaaaaaaatagacaactaattaatagatagataaaaaagaccaacagtcttaataccaatcattaagaaaaataaaattagcatggatattttacttatatataaaattatatattttagttttgacctcaatttaacataaagagaagagaaaaagataaatctatatttgaagc

SEQ ID NO: 251723 - DNA, 834 bp, Cannabis indica
gtgattaacaatattcatcttaatctatttacaatcttgtaagatttagttaaataaaaaatgtacaacaataattatatactaaaatagtaaaaaaatcacacaaatatattattaagagtaattataattttcgtttaaaatacacttaaattatttaatcctctgaccaaagtttgggtttcgggtccagatcctcatcaatgccattttctatgcactttcttatagtcgatcttaacttccaatatggataaatggagagataatagtgtaagactctgcacactttattggaaagtataactagaagatagcaaacgttttctagtagatcacaaactttatgtagaagatcccaaaataattctactacccttttgctccttgttactgtgtagaatatataagaccaaagaaagacaatccaataagaccagtggcaatagcaagagcaagggaaggtgacaatactgcataagtacctgtaacaaatgctatcaccattaatcccatagctaccattgctaaaaccatagacacaatatagtacgacgctaagcgtttactatattcgttagaagaaattatagtgagaaagaggttcataaagacagaggtagtagagagcaccatggctattgtgtctgttatcatgaaagcttgaaaggctttgttattccttagaacagcagtgccaataacttgttgttgttgttgatttccaacctcattactaaaataaccaccgggtcaaagtgaaaccagctgtaaatgttactgttgcaatcaatgtagccgcaactagagctgactctttgtattttgtagtga

SEQ ID NO: 251724 - DNA, 705 bp, Cannabis indica
cctgcatttctggagcagggatttcaggagcaccctgttgtcgcaggcgtcagatctcttcatcttgttcattaattctggcatgcatttccacaaacctattttcccaatcttgggcagcctgtggcgggttaacatcaccctggtcgtgtgccctacatttaggacctctacctcagccacaaacatttgggggaatctgaactccctgactatcaccaaacccgaccgagttacccatgctcttggtgtttcgcctagtgtccatactattagaacatcctacataaccaagagctagtctggtcagatcgtgatccagtaaagcttactaattgtcgcttatttaaaaattaaaaacatacacctattcagctatcaagctactaatatgcttcctaacaggcttttcttaaatcatacaattaaaataaactactaaagcaataaaagctgattaaattgtggaatgagctgttcgttgatgatgactgtacatatcatcttcggaagacaacctggcggctctaataccaaattgtaacaccctaactattataggcatgttaacataatttttaacttattgtgcagctcgttgctaataaacgaggtagctgaaagtcgtgattaattaaaattttgcttatttaatgaaaaacataaaataacatatacaaaaaaattcaggatcccgttttcaaa

SEQ ID NO: 251725 - DNA, 701 bp, Cannabis indica
tcatataaactcttctgcttttgttgctcggatagactcattgtagtatttctcataaaatagtcctcgaaaagcatcccaggtcatgttattcaggtcatgaccctaagacatgatgtcccaccagatacgatcatcttctcacagcatataaatagcacatttgacccgatcattgtcctcgacccgcataaaaataaaaatggatgttatcatactcatccactgctccgctttgagtggatcaacaccaccctcgaacactaccatggctccaggcgattccctgcatccagtggcactaccagaggtgccaaaggatcaagattaaggtttggaaaaggctgagctcgctgctccttagctctcaaattttgttcaccctactaacggatagtctcttacattgcaacatataactcttcccagtttagtggtggtggagggttgctctcattgccaaccctgagcccgtcgcggttacctctaccaatccacctcaggtgcataatctattcacctacggtcatattccaagtaatgacaatactgataagtatttcctaacatctcaaacattcctaacaaccagcatattaagacaaacgtacatacaggtaatcaactaataatctaataattaaaacttattgagccatgagtcgaacgaatcttcgcagccaatgtacatatcaaaccag

SEQ ID NO: 251726 - DNA, 1151 bp, Cannabis indica
taaatcacatcgattccaaaacatataagtgacccgctaaatcacaaccgggacaaaggtttaaaaccaaaatttaacctactgtaacttaatacaaaaatatcccaaaattagcagggaataaactgcctgaaaacctaaaactaacacgaaatgacaagctgaaaaaactggttttcaccccctgctgtaaaatccgggtaaccggttttagaggcactgaaaaccaacaaaacacaaaatcctaaccaaatcgtttccaaactcaaccaaatatttcagacctgcatattataccccaataaaccatttccaagcaataaatcaactacccaagctcaaaatccaaaatcaccattaaagctctaagtttgagttctaaaactcaaaacttgattaaatttactcacaacccttaactcattctcaaatcaagataatctaacataaattaaccttaggaaataatttcaaacaaccacagcaagaacagcagcaaaatcatcaattcatgcaaaaattccatttcttaaaattcaagaaaactagagaagggattactagaagcttaccttggcttgaataacactaagagctgctagaaatcgcagaattgaagtagaaaaatcaagaaccctagctggttcttggtgagttcgaagagagagagagagttgagagaaaatgcttctttttccaattttcttattttgtgaaaaaaaaatgcataaaaatcaatttccttaaagataatatcagcatgcttaaataatcagaattatcaacttaaataactcacaaaatgacaaaaggctaatagggcaaatgactattttgcccctcccacactaaaagtcataatgggcacttaggggtatttagggaaattctaaaatctcacatattcccgacattcccaatgtctaacaatattgtcccgctatactaaaaatactaagatgtgattcaagaagcgatacaccgcgttccaatgttgctgggcaccaaaatatgcaaaattatgaaatttctatatgtgacatacaagtgcattctgaattcaaataaatcatcataaataattaattcaataataataaatgattttcataataaagccctaattaactgctaatttctaaattaaagct

SEQ ID NO: 251727 - DNA, 607 bp, Cannabis indica
ccccctttctttggtactacttgcaccaggttgacccacttgctatctgaaattgggtaagccactccaacatctaaccacttgaccaccttctttctgacaacctctttcattggtggattaagtcttcgttgtgcatcaatagttggtttagcggcctcttccattaaaattggatgcataaatgttgagggactgattcccttaaagtcacccaatgtccatgcaatggccttattgtgtgcccaaagtactctaagcaacctgtcagtctccacatcagaaagtgtagctgacactatcactggaagcttcttgttttctcctaagaattcataccgtaaatgattgggaagtacctttagttctaactctggttgtttcactatagatggcacaagctcctttgggacaacccccaactcttcatagtacttcctattcaatggcccataagagtcgagccatttggcatactccattgcctccattccttcttgctcaattaactcatcttcggttaagctcaattctcagggatcttctatcaactttttcttccccacaatagtatcaataagatacacaaagaaacagttatcacttg

SEQ ID NO: 251728 - DNA, 585 bp, Cannabis indica
taatgctacaaagtaaccaaactaaacttttagcactataaccaacaacaaacaaataatactaaactagtttcattacattaacatcaactaaaaaacaacacattaattaataaaaaaaagcactgaaactagttccatcaaacaccgttaacataattgaccaaaaggaatgaattaaaaccagtttctataaaaacataacacttgctctaatttttcatgctcatttcatataacacttactctaatttgtcatgctcatttcataataggcactttaacctttgtggcaagatcaatgttatttccaatgtaagcatgtttagtaggagaaccagtttccatctgctaaacaataaaatcaaaagaaaaataaaacataaacataaattttggaggttgtagaacgatatttcccataacggattagttttggagctggatttagtgcgtaggccagtggaagagagttacaaggagtttaaggcattgctggagaatagtggtagtcctggttctagttccaggtgagtaattgaggttcggtgggggcttcctcgactagggagaattagaggattt

SEQ ID NO: 251729 - DNA, 784 bp, Cannabis indica
actaatccaactccaaattgtcgattttcattgaacatagccgtgtcaacatttatcttaacactattaacataaggaggcacccaacacagagcagcatcctcggctaaagaacccgaaaatgtagtctcaatgactgaatcttgtgcgtttttccattggttaaggaaggtttttgctgacgaaacaatgctatccgctccaactcttttattttgccacaccttgtcatttctcgcattccaaatcgaccaacacaaagccaccagcatctcttttttttctttttccagcagccgaaaactgttaatgcaccaaaccagaaatgtatcatcctgctgcactacagtgcctattcctactctgtcccagcacctctttgcagcagaacaggtaacaagtgcatgcaaagtggactcatcttcaccagagcagatgggacagcgagcttccactggtacatgcttaaaacaaagctgtagcattgttggtagacagccacttcccgctctccacaccaggtttttcatttttgggggaagtttgagactccaaaattgtttccaaaacttgttctcggctgtctctaacagatccatctcgcctttgagctcctgcagtaatcgatatgcactctttacagtatacacacccgagagttctctcgaccacaccaaacaatctctggtaatagaggtgttgaccgagattttcggcaactattaaaatatgattataataaagagctgtaagaaagtgagatgaagatttttacgtggttggg

SEQ ID NO: 251730 - DNA, 511 bp, Cannabis indica
caatggaaatctctcagcattgattgagctgagatttgcaatatcattattttcctaaaattcaactattattatttattattattattattattattatgatcgttattctattttataataataagtataacttgttcattcttcacaaactcatctgctagctatattttatttatttataataacacaaaagggtgtataaaatgtatgattttttttcttctttaaaagtggagtaactaaagtaatgaattgataataaatatattaattggcgttaaaatcttttacttttacctttttttttgagataaaacaattttgtcaaagtcaattatatttattagtttcaattttcttgactacaaaatatctttattactaaattataatgtgtgtgtgttttaaacataaattattatgttcgttggtctctcattattaagcattattgttatggttgagattaatacttttttttccaggaaaacattaaaaaattaaccta

SEQ ID NO: 251731 - DNA, 623 bp, Cannabis indica
ataataatatataattagataatctattttgtactaaaaaaatcttatttcaaaatttttatatatcaaaattattatttttatgttaatttgtattaatgaaactttcttttctttttattatattaaagttttatttattatttaattcgccgcacgaagggcggctaagttatttagtttaatataatactatacaatacaataggcctacagtataatacggcgtaacaaacgaaccctaaaatgtcatataaatactattaagtatgagcctcataaaatttttatgtatggattactattattaagtagtagtagtgttcactactttttattttatttttatggataacgtctttatgattgatttgtgatatattttaaaagaaaattatatttactatgggattttaaaaattgtttacttaaatataatacttgtaagtttgatcaatttatatgatattttttttatttttaggtatttttattgtatttgatatgctatatatatatatgtaaattagattttcaaagcccatataaaatattgttatttgtttaggcagttttatttgtcactgatgtcgaaaaagtcattggagtttgctgtcggtgcc

SEQ ID NO: 251732 - DNA, 464 bp, Cannabis indica
aatatcacctgttgatcctagaaaaataggcctttttgcacccattgtaacatactcggtcataccattgaaaggtgttacaaaatacatggatatccaccaagttataacaagaataaaaaaaaggaagaagctgctaatcaggtgcaaaccagcaaggaaaacaacaccaatactgaggacaacaacacctttcttccccaattaagtgctgcccaatatcagtaacttctcaacctattagccaaccaacaatcgagtgtaacacctgctgattcgagttcatctacaggtaactcaggtatggttctaacttacaacaccatctcagcttgtaaacaatcttggatacttgattcgggtgctacaagacacatttgcaatatgctagattatttcaatacatatgccctgtaagttctactaatcttatattgcctacaatgatgtcctattgttaatca

SEQ ID NO: 251733 - DNA, 574 bp, Cannabis indica
gtatgtgttagatccaactcatgtcttaagttatgaagttttagagctccaagcacatttgttctatgaggaacaaccagttcaaatccttgataggaaggataaggccctctaaagtaagaccatagttttggtcaaagtactctagagaaaaacaagatggaggaggccacctaagagttatagtcgatcatgagggctcgatatatagaattgttcaagttagatttcgaggatgaaattcttttaacgaaaggataattgtaatgactacataattagacataaattagcaacttattagtaattaaattactatttataattatatgtgcattaacatgaaaataagccctagaaaaagcattagtgatataatttcttaattatggagactttattgaattctaagtgcttcatacgtgttatttatgaattatgtatatttttatattttatgcatgatgacagttaaaatttggcggtttggccattaatgtcaccttgatacgatttagtatcttagattaagcgagacaagttttatggacagttagaatatcaaggttatgcg

SEQ ID NO: 251734 - DNA, 1034 bp, Cannabis indica
aacttaaattatttttaaatttacacttattactttttatatatatttgttctacgttaatttttagtaattttttaaattttattttcaaatattttttaaaataataactttattttatttttactctaatatttttctatattattttctaatttcttcgtattaatattcaaaatatattctgttttattttttataacgtgggaaagaaaaaaagaagtatgaattaaatatatatatatatgtattttatgccaaatgtatttatatattttagggtgtaaatattatttcatttaaaaatatttattgttctataaatgaacaaattatttaactagtagagtagtttaattaaaatggcacaaatgtaataaagttataataatatgactaaatattagctataaataaacattgcttaaaaaatgacacttgtcattagaatatagagagagtgcaaaagagagtgtaaaatagggaagaagagctttacaattcacataagttagaccatctacaattaaaatttttgttgaaagtacataaaaatttcattaaatataaaaagctatgtgtattaacgagagataaaaaaaataaaaataaaaaattagtatttattataatataaaatttaacttaattatatttttaatatgtactaaacttaataaaatatttagcttatactaaatttgacaccgtttttaaattttaatatgtacagactgcattactattagtagagtccaattttatgaactgagcaaaaaaaatatacatcatattcttacgttaaagaaaaagaaaataaaatgggatagggtgagctatttgtcttacgattttacaagaaaaacctcatgcgttactttgaaacagcaaacaatgaaagggtaaaagggtaagtctacaagatagataaaaatggattgggtttgatggacacgtaagcccgttcgaagaacatggtcaccgcaaacaatgaaaaagtagctgccctccttaattcaattactttaataatt

SEQ ID NO: 251735 - DNA, 807 bp, Cannabis indica
  modified_base (678)..(678): a, c, t, g, unknown or other
gaaaaaggtagatagacatgccggacaaaccctaaaagtagggttggccaggctagacaaccttcagtaaggctcaccaaccaactcatgtagacaacctcaaaaaggcaggccggaggtctatccaagaaaggaggtttgtttgaccaaggaaggttagccgaccaaagaggtctatctgaccaaggaaggctggccgcccaaggaggtttgtccgaccaaggaggtttggccgactaaggaaggctgtccggctaaggagagctgtccagacaagaggccaacagaacagatccatatgtacaaacatagttagataagctcagagacatgatcaaaggcccgtcctgctgaaagttgtccgacctagagctggatagatcaaggtgatcaccgtttacaacatacattaatgcacttccccttcctaagattaaaatgacaacttggaagatgtacacgaggaaaaagatcccctagcgcacataaaatacttaaagatccaaacagatcttcaaaatataattagagatatgcgatgtcggatctttctggcaaccctatctgacatagcccaatagtggtatttcaagctggccccaggaaggttcaactcttgggaggaattttctcgagaattctatactcagttctcttcctcgtggaaaaatcctaacncaactggaggatctgttgaaataagcaaagacatggtgagcctttgaaagactaacattcaaaaggttcatggccaaggccaccaagatcaaaggcttgtcagaagaatgtcgatatatgaccatactt

SEQ ID NO: 251736 - DNA, 1812 bp, Cannabis indica
tgaaaaaagagattctagggtttttttaattaattaagagactttattaagtctaattaataaatatgttaaatgacaattttatttgataattaattttaattattaaataaatagttttcacatttaagtggttgaattggaaaatatgtcatttttgagaaaataagataaatagttgaaaaatggaaaaattgcaaagtgatggggcccacatccatggctggccacttatgctctattttaccatttatttataaattttttaatgccaaataattcagacctaaacctagttggattcctataaatagatagtgatggactcaaaattggaagcttaataattcaagcctttcagtcaaattttgagccttttgttgtcactctatttcgaatccttcatctctctttctcgcttctattttcgaaccctatagtgatagagtacatgcccacacataacaagttggtactcaatcatagtgtgtaagattgtgaagattccaattcaagttaaggagaatcgggctcagatcttggtgatactctactacagaaaggatacaagggttagagatctgagcggaatgagtcattgaattctgcttcaaccaatgtaaggtttcttaaactttatatgcgtttaaattacattgttttagaaactcatatttaggatgttaaacaacatacatggtagttaatctagatcttggtaaaaccataatccaacaaacccctcagctcaggatttggttggttgttagcccgaatttcagcttcatcatcaccatgaccgtcaggtagtttggattgtagtcactattgacctcggggttttctcttctccccctggacctactatttctttggcaatgatcgccatcttgtggttggccgcgttgatcgcggggttgccactccctatgttggggagtcgttccattgtttctgccacagtcaccattgttgtttctagagtttccttcaccactccgccttagacggacattgtgggagtcatcacgtcccatatgatgactgggtagaacttgctcattggccgggagcagtcgattattattgcggggaaccctgttggaggggtgactgctagtcctctcttagttccttgggcactcttcaggtccatggaccaccctttccctctgattccttggggtagggacttcctaaggataggtttgaggtatttgttgattgtgggtatcagtacccatcgcttgagtgttttgtttgaagtagctttgtattaagtcggcaacctcttgggtgcgacgatcttggtcgtcttggctcctcctcatctcacgagcataatcttcaagccaagattggaattctctcctttttttagtgagactttcagtcaaggccgctcgagcttgattttgttcttggtgcacagtttggaactggccttgcatctgacctatcgcgtctcgcagctaatccatctcggggtcgattccctcgatgtccacatgggattcattccgcgacgtaaagacaccagggccacggccagtctgagcgtggcccacaccgtcagtaggtgggacaaaatttctagtattacctctttcagtggtgccatcactagcgccgcctcctgcggcagtggcgtttgtggtacgcccagtagttgtctatccagtggctgcagtttgaccagttgctccatggccagcagtttgagcgctggtggccatgccgccgttgttgggaatattttaccaggatctagatttactaacaagtatgttgaattaacatcctaaatatgaa

SEQ ID NO: 251737 - DNA, 526 bp, Cannabis indica
cctaaaaaaaaaacactgggaaaaatgatattaatactaaactatccaacttgaagaagaataaataaatcatatactaaattcttttgatctaaactaatctctcaacatcattcttattcttcttaacaaaaaaaaagaggttttcttaagagttcttctttctttttaagatgacgtggcaagggacaagaatattagagaattgaataatatatgagtattgttataagtcaccaataatacacaaaactactttgaggtggtatttgcaattcgttaacaatattttttaaaagttattatgttaaggaacaccttatatcatactattatttgtataatttaatatcaaatcttacatattttaatttaataaataatataaaaaaaatactaaccacttaaaaatacggtgttaggcaagcttgaatggttttaatatttcttatagagaaatgttaaaaggcaactatacttttgtaatgcgcatggagcggggaattggttgggagtgctgtgctcc

SEQ ID NO: 251738 - DNA, 825 bp, Cannabis indica
agtaaaattaacattttttaattaatttaatatttttattgggttttttttaataatttttattattttttagaattaattatatattataatttcttttttaagaaaattaataaaatggggtaaaattttgtattggtcaaagtttaggggtaaaatgttaatttttaacggtaaaagaaacagagccaaacagaagggacataattatgtaactataatattttagagggaatttttaacaagtcgtatattttagggaacaaaatcaggtagtgccaaaagtttaggggcaaaaatgcataatatatttatatatatatatctcttttatattaaagagcattgttattgggcactagtggtgcccagcaccttccataggtggcgtgtcacgattaattagcgatattgcctaaaagttattttcttaagttatatgggacctaatacttaattacatcaataacagtatgacaccgaggagggtgttaggcaccagtggtgccttttaacaattctctatgttaaatgtggctatctaacagaaattattagtttaatgttttttcattaaaagttaaacggttaaagctaacaccattaaattaattaattaattatcatataatggtatcagggcctcacggtctctttgtttctcctgttaagatatcctagtcttctgacaacgccctctaatattatcgcatctttcaacgaactcttaacacattacacataagtatccatgccttttgcaacaagcccaacattgcgacgatcttctgttagcaaaatcaatgctttgatgaagtttcatat

SEQ ID NO: 251739 - DNA, 641 bp, Cannabis indica
tggagaggccagtgtactggtcacggagctagagcaggccagggcggacaaccgcgacctacacaatgccaatgacactcttctttccaaacttgtcaggctaagccttaaattgagggcctaaagaagaaaaaccagctattggaaacaaactatgctcacagactcatctcatacgtggtatgaggtcgtccatgacatttacagggagaccgtggagcggatgtctggagcaaagtcttctaactcggcattttttgttgttgttgttttttttaattttctccacgtactctttttagtgtgcgaagaggattaatttttccctagtcgcaaaggctgcttgcaatagcaataggatgtttaccatatctttttggagctttacttctgatttgctagactttttaggggctggtcacatctcgaagtacatggttccaacggctagtacttcaaaccttcccgctagtcttcatgtcttttagttgatttagggatagttcatggatttaaacttcttgtccctggagcaacaatgcttcttccccctaacgaatttcctgcctcggaggaccgctcaccaaatgctagcccagagatgattacctacgcagaaaggaaattttgctttttcatac

SEQ ID NO: 251740 - DNA, 713 bp, Cannabis indica
gaatgtaatttatggctacatattaattatttttaagaaattaaatattcaaatacctattaaagttactataataaaggagtaaatcatgcaatgtgatgtaattttaaattaaatcatttaggtatagatataaatagtatatataagtacggtatagtaagtttaatatgagattttgataattattttatatagtgtgtagttatgttaaagaggaattgtaataaatggccttaaatctcacactgattaaagttacatgttcatttaaaaaaaatggtaaatggctttttataaatgtcaatacctaaaatgcccttgattatatagatgaagctcaactctatttttttcgattttgttctactgtttgcttcaacgattcctccattatacagcgattctcaaacaacaacaaaaattattatctcatccatttttttccaactagtttcttcaatcatttctcccgggcaataaaactctcctctatctttttggattcgatttacattgccttgccagatttattcaccggaatcttcaaccacatcctcccacagtcagccattcctccccaaaaaaatttcaacaactgattctcccaaatgaaagcagtagtaatttatgaacactataccttaaactaatatagaaacaatatatctcaaggaaagcgcggtgagaaaaattaatatatcaccagtata

SEQ ID NO: 251741 - DNA, 612 bp, Cannabis indica
ggattgacagaacaatattctaactttgtcactgtgatgcaaaacaagaaaagcctacctagttttgctacagcccgttccaaactcgccttggaagagaccaccattttagagcgagcaaaacaagaatctgctcttgtagcccattcccaaacgtcagatgatgatatgaatcaccaacatccttctcaaggtaattctaatcataataatcgtcataatcgtcataataataattctcgtgacaaaaatggtacaaacagaaaaaacaataagaattctggcggtcgaaactccgacaagggtggtcgaaactctgccagtggttcagctggtgggttcggtagtggtggcggacgtggaagacacccacaacaatggcagcctgggtcttggatgcaatgggctccatggacttgccctccttctccatatccttcctacaacaattgggccagacccactttcactcctccaccaccacagcatggtcttcttggaccaaaacctcaacaggcagcttataatgccaatgcacccagtccaactgacattgaagcagctcttcatactctcagtcttactccacctgatccgtcatggtacatggac

SEQ ID NO: 251742 - DNA, 571 bp, Cannabis indica
tttcttctcttctctaacaaaatcccaacaattcttccccaagaaatcaaaattgttatatgcgattcttcatccccatttattgcgattcttctttcttctcccaaacccaaatttcaatccctgaagccccaataatccaatggtctagagtctctcgtcgatgaatctcctactattttgtgttctcaactcaatgttgtctttgtggttttggctatcggtaatggaggaggagatttgggtatttctaaggctttttgattgccctgtctcagaactttccttcgatttcggcttccaacgctgagaaattgatttatcacaaagttcaccttttagttcaagccaaatttcagatcaaatgagtggaatttcgtgttcaatgaggaagagaacacgtctaggcggcgaagaagtaggttacctactgctcatatctaatttacatgcgatataatttttattttctatttctttgtctctgccaacaagattgtctttggataatgctcttaatacactttattatagtttattggcaaagatgaagtttattggttgatgtact

SEQ ID NO: 251743 - DNA, 1266 bp, Cannabis indica
agtaagattttttgtagtgtgagccgattcggtgagacccagcccgtgaggctttgatcttctggtgacgtggaggcctcatcacattgatagttgttaaattgtgtcctacttttgtgaataataaagacacataaatacttgattgacaattactttatttccttattcgaaagatatgaagcctgtacgtgatcctgaaaataaaatccttatattttgagattttgcaataaattgttatagtacgaagctggatatcaagacgcttattagttacttatctggaagatctattcaatgctatccgaagatacactatgacgaaggtatatcttatctgaacaagtcatttgtccaacatccagaaggcttgacttcgttattggatctagtccgttattttggttgggcctggagcaattgagttgaaaccatttcagaattacacgtggcctctattcgaaacacgaataacaatatgcataaaaacaaaatgagaaaggctaagacacctaaacgtgtcaaacactataggaagtggcatatcgttactaatgtaattcaatatcgagtcttacatattttaattatataaagaatataaaaaatctcttataaattataaaacgtgacattgtagtatgaagcattttaaaatgctaaatagcaatgctcaaacaaaatatgaacaaaatgacagattgctacaaataattataaaagttgcatgcttctacaaacgtacaaaatttcgtatatgaaggaatcaaaagtataatgatgatatggccacgaaatgagtagaagtcccccacaagaaaagtagtagatcgagtatgatctatctaagttaacacttttataggtgttaccttttaatattttttagttgaaaagaagtgttgccaagtataatttttctagtagtggggtattttaagtagtgatcatttgaaacgtgcatgcatgatatgggcagtggattgtagttgtatgaaagagtcagccacttaaaccaaaccactcattaaataatatcaagggcatcaaacggaatgctaggtattccaattcaattgtaataatgtgctcaaatcaaggccaaaccatttgcggagatgaaaatgtgtgcccgtattgatagaacctgttggctgagcagttttgcagctgtctatgtaagtgtcaaacataatattgtaataatataaatatataaaattaatggattccattctttagaaaaaaaataacatatatata

SEQ ID NO: 251744 - DNA, 608 bp, Cannabis indica
gtaatccttcaaaggttttccttctcctttttgactttgacaatatcttctagctgcgatgaaacgagccttgaggatgagaattgtgagtaaaattatcaagaaaactcagcccaagaattgaatcttcttggggaaactttaaagtaccattgttgagctgtttccatgaaagtggttaggcatatgcaacattacacatcaccagtaatcttctagagatcaagctgcatctcaaagtacttaatatgcgctaataggtcttctcatctggtatacatcttccgtattgatttcttgtatttgggcaagggcaaggcatttatgtatgccaagaatggtgatccccttgaccggtctagttcaagatctgaaggttttggactagctattccctaagtcatgtcccatagtttgtctaactgtccttgcacagaaggatctattactatagggattagactgactggccctccttggaggggttgaatactctgatgtgacagggtctggccagccatactgtgagagagtgtggaaggggtcgggccagacctgtgttgtattgcaaaaccttgggccgaccactcctaggtaaggatgttggc

SEQ ID NO: 251745 - DNA, 789 bp, Cannabis indica
ataggcatggctgcttatgaggctttatatgggagaccatgtagattgccattgtgttgggtagaaccagatgagcatgccaccaattggagcagagattattactagtaccactgaaaagattaagggaatccaagaaagacttaagattgttcagagtcatcaaaaaagctataacgatctacattaacggcaagttgagtttgatgttggtgattatgtcttcttaaaagttactcctatgcatatgagattagtgaagggtaagctagccccggagtatgttagacctttcgaggttatcgagagggttaaggaagttgcttaccaattaaacttaccagggcagttgggacatgttcataacatattccatgtatctatgttgaggaagtatactccaaatcaatcacatgtcattgagtatgaggctattcttcttcagtaaaatgtgacttatgaagaacaacctgtcagaatcttggcaagagagctaaaagtgttaaggaatagagagaatctagtagtcaaggtcttatggaaaaatcacaaagaagatgaggctacttgggagttagagtttgagatgtatatgaagtatcctcacttgtttaattttcaacttgaggttgtactttaaaatttcaggatgaaatttcattaattaaggaggggagaatgtaaagactcggttttgaccaagttaaaacaaataataaataaataaatagataaatatgtatatataattctaagtaaggaaccccccccccttcatctctctctctc

SEQ ID NO: 251746 - DNA, 994 bp, Cannabis indica
tctctctctctctctcatctcatattgaaaagaaggaagaggaagaagtaataataagaagaagaagcaagatagcgtagaagattatttttttttttcttatttctgtttctaattataattataattaagtttgttttaatttttatacttatttttcagttaaaaattaataaataatttttttaaaaaatattattatttggaccaatagttgatcaacaggtggcatataaattaaattctggtatatttaacaaaaaagtagtaacagaagtaacacaaatataacataaggtatttaatccgttgaaaaaaaaacatgtggtatttaaatgtataaattcaaaacatatagtatttatgccgcaaataatgaaattcagagtattctgccttactgtgaaggaacttttcctttgaaatacttgagggtaaaacacagaccaacacattagaaaaaagaagattgtgatgtcattcttagaaattctacttgaaattgcttacttctgtttattgatatttgtagtgccaatatgaataacccactccttgtcaatgcctttgcaaatgaactctacagtgtgaaaatgcaccctggtagttgcataaactcgcacttattgatgatgaatctgaagttccaaaaagtaaatctacttggaattgaattatcaagggaataatgtgttcaattcatacttaatagtcttcctccagagtataatagatttgttgtatcttacatggtcaacaattttaactctttcgacatggataagctcgaagcagaattacgagctcatgaacggaatctgattgcaatgccacctcctggttttgcaaactttaatcagaggaaaaggattaagcatgaagcttctaacaaagctgcttcttcaagtacaattgatagtcatattcttcaatgttcaaattgtaatgagaagggccatcaggaagaacgatgtcccaggcttctaaacaattc

SEQ ID NO: 251747 - DNA, 1556 bp, Cannabis indica
gaggaatcaccaagaaggtagaggccatctctagctttccttctgagcagtactgaccctgttgtcttgtccttaacaaagcaacatttttatgaaattcaagaaaatgtcattatcttgagtgagcttagaaacactaacaagattcttggtaatggaaggcacaattaaaacagatttcatatataaaggataagatttatgagaggagggaatagagacagaaccagtgtaagaaataaacaatttcttaccatcacctatggctagagtgtcagggccagagaagggtttggactcatcaagattgcctgaatcgaaggtgacatgagtagtggctcctgaatcaaagtaccaggagttgtcttctccaaagtcttagatcatcgtggttgtataggcctgaggatcacaatcacaatcaatctcagtaagaaaggcacgattgttacttggttttagggttgtccagtttttatcaaaacggtttgacacacggctgtagtgtggccaatcttcatgcagacttggcacacaactttctgaggagcaaacttagagaaacctctgcctcgaccagttggtgcagtgtgatgattgttgttggcaaatgatcgaatacctgttgatataccttggccaagagccatgtttgcctgaattttgacagtgatatcattcatagctagatgatgttcaatcctactttcatgagatagaagaagggcctgaacttcttcgattgacaaggtgtcacttcttgatgtcattcctgaaaccactgaatcaaactctagtctgaggccatttaggatctgaagaattaaatcttgatcatcaatagaggatcctacaatcgccagagagtcagcaatcgattgcactttgtcaaagaatttagagatgggaagatttcctttatgcacatgtgagaattggcctatagctgaagtcgtctggctttggtttgagaagcaaacttctgtttaagtgcgtgccaaacagaataggatgtatcatagtttgcaatagatgcaagaatagcttctgacatagatgagcgtaaccaggataagagtaactgatcctttcgtctccattggagatattcaggattcgagttaccattgagtagtgtagtgggagggggcactcctgtgaacaagatctcatcgagatcatgtccaatcacggtgggaatgacctgagacttcccagaaaggaagttaacacgatcgagtttgattgttagggatgaggacaaagaattagaaaatggattccaagatccagtagcagcgggttgtgaggcatgtgcctgaggagcttgtgttgcaggattcatggcaggggcctgaggatcggaggtagacgaagacatagtcttgagtcatgacttctgataccatgtagagaaagaaagcagggaagaaaagaaagactgagaaaatgcaaaagaagctcacttcattcaactgaaaagaatgtatttatacaagtacaaaacagagcaattagctcaaaacagaaacaattaacaaccattaactaactaa

SEQ ID NO: 251748 - DNA, 1607 bp, Cannabis indica
tggtgtttttctggtgttgggtttttttctttttctatgcttttgtcgatagttttcacataatagagtactttaaaaataacatatagaatttatagtgcggtttttggatggtataacaatgattgtgcaattaggattttcaattaattttagtatttattttatttatttatttatttttttttattttttttttgtgaaaatagaaaaagttcaagtgatactgtcaattattttttaggattttcaataatattgtttgatagttttttggatgcttccgatagtttagctgaactttggctctctttcatttgtgttattttttattgaaattttgcaataaacatttttgatagttttgtgatatactatcaactgtttttcgataagtttgctgacattctcaaaagtaaatgaatacatcctcacaacaccatgattacccacaacgtataaggggtctcggaggtcactccaagatgacaattgacaccacatcatgttgggtctcgaaggtggcacccccaagtattagcttctatccttgaaggtagttaacggtcatgtcacactctcgggagaccctcatcgtcagtggctagtttaaatattcaaatcccacaaaaagctcaaagacagttacaaacacacgaaaatagtgaaatattatcaaaaaaaatcaagacttcaaccacctctaaaaaccaaagagacagttgagatcgacgttggtcgcgtctcctaaagcgagaagcaccaatcttttcccatatataaatatccgtactttgtacattgaattggattgaaaaatccaaaatccacatttgtgaggattgaatgttgattgacatgtagaagtaaccaatccaatccaatcaatataattttataaaaaattatatatacaaataatattttaatataatgaaaatagtaatttaaaagtctaatacatataatacaattatatttcaaaacttaatagatcaaatgtattttttattcttatatataatttttttctatacaatttaaaataaaattaaatatttttctatacatacaattttttttctttctttaaatttgttatttgttattttatttatcttaatgtattgttagagacataaaataactataatttattttattttgttgctagttatatgaaaaaaaaattatctttttcataaatattaaataatataatattaaaaattaatcaatccaaaataatcgatccaatgtgcacttttgcgaattggattggattgaattttaactatagtgcgaattggatccaaaaaataaaatccgcacttaatgtgaatcagatgcactatgagcaaaatagtgcagattggattggatgaacacctctagtcacccatgacctgagaaaagaattcgcaattttaagcccttagagtaaaaaaatatttttttattctttgcattcaagacatgtcttgacttttgaaacactcattaataaaatacaagagagtagactattaccaacatctagggccgaatctctttaaatcctatgtctttctttacatttaatgtgaattctgatatcattatttaca

SEQ ID NO: 251749 - DNA, 1177 bp, Cannabis indica
aagtaagtgcattttaatggggggtttttgattaatggatttttctctatcttcttccttcttccatcctaaacagtcagcatcgttctttcattacaaaaaaaaaaaaaaaaaaccagccgcacgcctcgttcgtcgcacagccgccgccgtcctccacacctttggtaatttttgtttatagttttgatgattttaagtaatttagcttcaataaagaaaaagaaattaattctttgaagctttgtccaggtcaaattttgattattgattctttgatttctgttgatcattttgttgttatgattttgtagtggaatgatacgatatgaagaaatcttattttggaggcagagttttgttgcttgctaggtaatttctgaaatctcgtcgtcgagataagtgaaggatcgatcgccgaggtttgagtggcagccactgccttggactggtgagagcattaggaagatctctggtggtggtggactttccaactttatctgttccacaaaaatgagaaaattaacactcaatcagtgagaaatcaaattcaggtgattgattacaacgattttcatttctcaagacttggaatcatgaaattgtgactggatcgtcgtcaagaccagacccagtaaactgttattggttcttcaattcataaatattttctttgatttgaaatacgagaaaactgttaatgatatctactttctaccagagaaatcgaagataaagtaagcttatactagcaagtgaaatatgagaaaattgagacacaacctgagaaactgaggttagttgatatgctatatggattttctatctctgttatgctattaatgcaacttaacttgtaaatttctattttatggttttaataaactagtatattagcaacttgcatacatttattttatttttaatactttctagaaaaaattaaggttaccttcttcaaatgttaattgagttcagtattggtcctttcattttaaatatccttcctatcaagaatttgcactaaaaaacaggaaagatatgttatgaacactgtaaatattaatttagccataattaattcataaaaattaaacaaatagaattataaattagcggaagcataccggtgaccattaaatcgcttagagaaaggtatgatcttccaattttgcag

SEQ ID NO: 251750 - DNA, 1483 bp, Cannabis indica
tagatcttattttcatgaaagtatgtgttatgattattattaatcgattctagagattttattaaattataggtctgatatgcatgctatatatgaactttcatatttttatgcccgataacagtataaataggtcggatgaaaattttagtcacatggatataaatttgtatcaagtattttacagggaaatattattggatatcttagaatattagagtttaacaaaataatagaattggaccattttacccttaggggttacaagataacttagcaaggaagtaagggcattttagtctttttaccctaagtgattagtcatttttttagaagggatatgtggttgtggctcatccttttgatgatgaccagctgcttgggaagaaaacaaaaaggaaaaacaaagtaaaaaggaaaccaaaaataaaaacacaagtcaaaagcaaaagaaaaaaaaaaaaccaaatcaccttctccttctccctctccttcgtggcttctgaaccaaggccaaaaaccaaaagtttctaccattttcaagcatagttcttgctgaagttgatcaaggagttcaacccctagctcttccaaacatctaaggtaaaacctaacaaaaaatttattggttttctagggttttcattagtattcattgtctatttgtacttgtacctattgaagaagtttagggaggctaggaaaagcttcttaaggttattttgagctgtttagaagttgtttgaactgttttgggtggttttagcaaaagttatgcaagtttgagttcaaagaactcaaacgagacttggttatgataacttaaattttgttgcgaattgggttaagatttcttcataaaaaatgttcattatgatgtttttaggtactctaagaaatttggtaagaatttgcttataattgaatgagtcatgcaatttttaaaatcaggcagtggagtttcggaccgtctgatttaggcaaaatttaggagtccgtttttaaaatggatcgtctattttgagacttttcttgggaccccaattgagtgttttcttaatacttagggtattttcatgatatctatcaatagaaaaacttttacttttgaatttaagtccccaaaagtgttatggcaacacttatcagtttttttttttagaattgtgacttagagcctccgattaccagcaactatttccacttaggttgaccgacacacctaaaattaaaattaaggtaagactagtataactcacatacatatgttcatgtttatggtttttagatgtatgacatatctgttagaacgatagttgatgtatatatgattgcatcttgatatcgtgaatatatgttttagcaattcataaagtatgaactaatgctaccaacactagtacgctagagtactaagtgcatgtggtattatagttggttatacttttaaaagcatgaactagtgctaccaacactagtacgc

SEQ ID NO: 251751 - DNA, 537 bp, Cannabis indica
ctacaaatttcagatttaaaaaaggaaaattgtgaaaaaattttgagccctaaaatcaataactttggctcttgataccaattgttgaaaaataattacagattatgagcatttaatagcatcaaccaaatataatccctaattatcaaagccaagatctagtatttatttagagtatcaaagacaataaaacacatacctcccataccatccatgtgagctattatccttcaatgtcttcaatgagaatcaccagcaagatccttgagcaaaaactagagagaacacttgtggagctaacccttttatcttttaccataccaactcatcttacccctttaccacacataacacacatatatatacatgttattgcctaggcctggacatgggttgggttgggcggtttttgggcggtttggttgttttttaaaatcacaacccatacctggacaataaaagtttggattgggcggtattttagggggcggttttatgcggttttttgggcggtttgggttgcttaaaattcaaaac

SEQ ID NO: 251752 - DNA, 568 bp, Cannabis indica
tttttgtaatttttttatatttttttttatatatattttttttaagttatgccaaaaaaaaaatttggtctagctaggattatacatctaattattaaactacatatgtatataaatagcaaaaagaatacctgaatccaagtggtttatagggagaatgaaattgaggatgaacaataagcctaatagtttccctccaaagaagaaattgttttcccattgtgttgcaattaaaattagttccacaacttataggttccaacacatctttacacccttcaaactctttcttctcctcttcactcatgttgaaaaatttctcaatggcttccaccattttcttcatcacaatatccgaaataccatggttgatcaactgatcgtaattaccatataagttaattaattacaaaaataagaagataaaaaaatagtaaaacagtaaaaaaaaaaaatgcccttttaattaccgagaagaaacccccaattcttcacaagctctgtgaagttcgtggaggattttcgagcgttgatcaagattgtcagatgttagaagcgagatatcaat

SEQ ID NO: 251753 - DNA, 789 bp, Cannabis indica
ttaaataaaataaattttcttacttgatgataaaataataataaaaaaaataaaagatgtttatagtatgacattatttttgtggtaattttttttcatttacaatggttaaacattcaaataaaaaaatactaaaaatatattcatatcattaagcatcctttatagaatctctattaagccacctaatatatgctctacattagtttattatttaactaggtaacataaccgcgcttcgcgttgtcattatactaattaataaatattttttgggttaatttatcattttttttgtttttataatttacgatcactatattaggttatgccgcaaatatctctttattgcattataaaaagtatattaacttttgtgttaattttaaattagtaacaaacaatagttagtttggcacgatttaataattttataataattttaaattttatattttaatcataaatttattatgtgaaaatataaaaaattgatctctaaagtacaaaaaatacttaattcacttcctgatttttactatttaaaaatttgataataaatttatgaaaaattaaaataataacaaaaacatttgaatagacaaataaacttgtaaatataggggtattgtatttttaaaattcaaataatgaagaaaaaaacaacaattgaaacattaagaaaaattaaaagaatgctcaaatattagtatggcatatcataacctataaacttataccttcatacatatacatctattcattcaattattttcttttttttttctt

SEQ ID NO: 251754 - DNA, 668 bp, Cannabis indica
cattgttactccacaactaaaatattcataattttattatttttatcatttaaagttaaataaaagtaaaaagaggaggtcatgggaattacaatatataatgtaatggtcattacattgtaaagtcatgacaatacttagggtaattaatattaaattatgggtataataaaacttatcttatatatgagtaaatattagtattttaaagtgtctacatttaaaggaaactacaaatctgtcaaaatatggggttccttggtgcatgatcaccagtaactatgtctaatatacatgacttcaggggaattatattcaacatccactactccatctcaagattcaacatcaaatattgctcgagctaggatgatctcatcatcagattcttattaaaatggcaaccataagttaacattcaagaaagccataaaaaaattgaaaaaaaacagacatacacaactacaacgcttacatttccatccagatcttcaagccgttctagaaatgcattgtattcttcctccatttcccaatcagggttctgatctttgccttcattttgattcagtattggctgttgaggtggctcagatatgtgttctgcatttgtctctgcatcagaagatgatattgatgaaagttcaattggttcttgaatttcatct

SEQ ID NO: 251755 - DNA, 581 bp, Cannabis indica
aagataagcacaacgttgccatatataattgataaaatcacatcactttgaccaaatgagaagcacgaattacttaatgggcatggttatgtgatgaatcacacaaaatgggcaaggttatgggcaagactacttgattttccaatcgattttaatgtttcataattttttgtgggtgtgtgaatgaaatagttatcaaaatttgaaataaacccatatgatatcatgtgcattgaactagatactttagtatcatgtataaatatctaagaaaattctacaatgtaactcctttaaataaatgtattgatgcacttatctgttatagcatatgaaataattttttagttcaattttttctcatgattatgtacgttatagctatttaagacacgctacaaaattttaagaaatttataaaaatttaataagtggaaaataaggttcgaaaaatatattgcacgcgtgactattttatttttaacgcgtgtgaaatagattgtttgaatattactttttaaacaaatataacacaaataaatattaaaaaaaatatattaaaaaatttttttagataccaa

SEQ ID NO: 251756 - DNA, 1008 bp, Cannabis indica
tgatacatgtcaaaatttgagaggaaaaaaatcataattaatcaaaaaaaaaaatctataaaacattaaatacaaattaaattaaataattttattaattttaattaaaatcatattgctcaagcatggtaaactttagtgcactcatataataggtaataataaagtactattttataaaatttagggtggttttagtgataagaaaatggttgacaatgtatcagttaaatttatagaaatttagttaattttattgtcaataaaaatagatatttatatattacgcttaaatttttttgagtaattttgtcataattattatcaccttataaatcagggagttatgggtaaaattttcaaaaaaaaaaaaaataatgataatttaactaaaatattttttataattttaaaaaaatatatatatttgcccttgtattgcctacaaggcagctcaaatgaccaaatattgccacgtagatgaagcgtgtcatctacttaaggcgccgaaatttattaaaacgagaaaagacaattgggcccactcgagactcgttaatgggcctgctacactgaagagcgtttccacttttctcttctctttcattaattgtacggccagctcagcaacttatttacgatattgccactagaagtcgttggataaaatggattatgtggcaaatctgaaatttgtgttgtgaattggagggtattatagtaatttcagttaccctccaactgtacaaacctgaaaaggaacggcgctttgggcggtttggctgactgagagtgcaaccaaacagctgcctctgttgcctcctttttatttttaaatatttatttaaaatataaaaaaataggactttcttttattttcattttttaaagtattttatttttataaaaatttacataaaaactcacaatgtaattaataaaacaacttatatcctaatccaaattcaaatagcaaattacataattattactgaattaactactaga

SEQ ID NO: 251757 - DNA, 916 bp, Cannabis indica
ctatgctgtaagtgtgtaaatggagccgtgattaggggtgtgcataaatcgatcaaatccaatcacaaccgaccgccaaatattgaatatttaattgtgatcagatcgtgtttatcaagatttttgaaaactaaataaatagagtttcagaaataaataaaataataaatagttaaaaataatttttacgtggtttgggcgttaataattcttagactacgagtcagttgtaatggctccttaggcaaatattttgataatatagtatgtgtttacatataaatttttgtagaagttcagctagtagaaattttgttcaccctttgtacataaaaaatgagagtatttatagacttaagtgtgggtaagtacattccctttatccacctaggattttgtactacaatccattgtaagggtaggaaaatacgtcttcaaatctgattgtttggtcttgaagaaccttctagatcatgcagtgtgtagggatggtgagtagtgtcgtttgggttagggacatgtgtcgcccaaaggtttctcctttatgaattatcctctagaagagccattaggaaaaaaggtgtgtccagaggtttgtacgcgcattaccatggcctgacacagggaaaaagatttgattttatgtcagaaaaagtgtaactgtttgtaggtcgatttccatgtaaatctgaggtgaccatctgcatttgagtaggagtcgtcgtccacgattcaaagagtccttatctggatgtcaggtagtcaaattgttgttccaggacttctcggagtcgggggacgagtatgatcctttcgcgtcccggagacgctaattgggtcagccacagctcttcgcatcaagcttttattaatcccctcacaaattaacgggacatttccgcgaggaattgtgatg

SEQ ID NO: 251758 - DNA, 2528 bp, Cannabis indica
aaacgtaaatttgaaaaaaaaaagtttaaaaaataatatataggataattccccgaaaataaaatggattaaagaaagaataaatctatcgtgtgttatgatagttcaattgtattttgtgctaaatttcacatcatttttggtatgccttatatttgacacactttttacaaaactattagaatttattgcttttaagatgtgctaaattaatatagcaacaccaacgcagccatttaatgaacttatataaccttgtagtaattttaaactttgtagtgcaccaactttggagggaaaagggcaaatgccaaacaccatgttggatataaaaaattcattattaccaactttggtgtgcttattgagatggtgatattaaacaaatgttataatacacattgtttaaatttatcttaatcggacaatattggccatgtggatctatacatatttaaatagggagtatattattgacaagttagaatcttttcttgataattgaaatatgtgaaagaaaaaagatagaaaataaattcactcgtgcttatcaattaaataagattttgttttaagaataatgtagtgagcaatttgataccaatgtaatatgatattttaatagtaatgtcacgttcacttgtgaaatttaatatgaatttcataatatcattacaagtcattatgaattttaattacaattatgttaggtaatctctctttttctctttgtttaataattcaaaacaacaaagacttgagcgtatgtttaaaccttctttgattgtccatctaagtaaaatactacaatcccgtacggtatgcattatcatagtttttttttttttgaaggtagcattatattcgtagttatttaacgatgataatccctctaaactaatattgggacctacaaaattactatgcacatttttttctataaggaatggagagaatataggatggagatagtctttttctcttccaatgttaaacaatgtagaaatgattatggccacgacacgaatgagtgtaacaacttgaaacaagaaattgaatttttaatcagtaaaaataatttacacttgcagaagtacatcaaggctaaatattaaacaagaatatgggagcataaataacacttaccttcctatcttgatgagtatcagctcaataattctatgtatgagagtaagattattataaacttattggggatctacaatttaatgaaaaattagtgatattgataatagtactttattttataacattttctttattaaaatgttagtcaaatttgatacaatagtaaaggattatttctttattatacgctaattattttttatatctttttgtgttcccaataaatattaaattaaaatttattataattttttattgttatatctttgtgagcataactacaattattgtgtcatagctaattttttttctctaaattatgtactaatttgtatcaacaatttatagatggtcgaaggtcatatgaatatgattatacgatgatatatactgtgatgtaattgaataaataatttaaaatgtcacaatattgtaattgaaaattcaaaatgaaatccaaccaaataacatggatcttataaatcgaagttctaaatactccacaaagaataaataaagcttcaactacccccaaagtccaaaccttctttagtcattaatcatacactacctagtggccatgccccaaaattattaaaaaaaaatagaaaaaaagaaaagaaagagattaaaatattagacgttacctttaattaaggcatcatattctcttgcatgagttgtatttttgtttatatatgtatattttaattggtaagggtacagccaccaatcacaggcaaattattagattccatattttagaagcatattcctacgtatatggataccaataaatattatattcgagatccacagttagtaacaacagtacaaaattccagctaattttactcctttttagggttgggtgaattttacattcaagtaagcatccttaaaataatttaaattaatattattagacatatttatatcataaatactttgaattttatatacttacatactatatttttttattctacgaattaaatattatatgttacctttttactacactactactataatttttgatttaattagggagaagttgcaatttttttttattacacattaatttaatataactataaaataattttaattgttaaataccttcttttataattaaagtatcaaatataacctcacctaacttattaagattagagtttctaacacacataataagaagtggttatacagtataattttctcaattaattaagtaaaatgttacatgttaatatattaacgattcaagtcatttttaatttttaaaatcattaaataatcttcaaataaataacaattggagttgaaatatcgagaagaaaaacaacagaaatatattttatttatgtatttattta

SEQ ID NO: 251759 - DNA, 1294 bp, Cannabis indica
taccaaacttaaatttgataatagaattttattaattggatcaatattattttagtgtaatcaaatttatcaaactttgtacatttttcttttgaaaattaccttatatactattttttaagggtaaatattattttggaccctgtgctttgtaaaagttatcaattggactatctgttttgttaaacaacaaaatggaccttatattttccaaaatagtaaaataaagaccctgggttcaattttcaacaattttattttttaatataaccaactttaagacaatttataatacgaacatatacaaaaaaatataactagttttttcataacatttctagattagattatattattaagttttattatttgtagaagcttattaatggcagaaaacaaaaacaaagaagagaaaacaaagcagagcataaaggcagagccaaagaatgaaatgccaagaaaagcttaaccaactagttagcttgagacatgtttattatatacaaagatgatacaaagtacaagtgcagaataggaaataacaaccaaaactgaacttaactaatattaacgaactaacagaaaagtaacagaatgcttagctaacatccccccgcaaacgaaatggcgaggaagcaatttgaagtttgcctttaagataagcaaatctgtcagcagttaatggtttagtcaagatgtccgccacctgatcaaacgtaggaacatagcgaactgagagtcgtttggttaagatgaggtctcgaacaaaatgaagatcgatctcaatgtgtttgcatcgagcatgaaacacagggttggcagcaagtgtagtggcactttgattgtcaacccataacacaggtggttgagagagagtgacacggagttcagagagcagagaagtaatccattgtacttcagcagcagcaagagcaagggccctgaactcactctctgtgcttgatcgagcaatgacatgttgctttttggctgaccaagatatcaagttttcttctaaaaacatgagatagccacctgttgatcttttatcatctatgcagctggcccagtctgcatctgtatacccttgaagttgaaaagtgtcactttgtttaagccatagcccatctgataaagtcccctttagataccgaagcaacctcttgcaggcctcccaatgcttaacagtaggggcatggagaaattgactaagtttattgatgatataagcaacatctggtcttgtcaaattgaggtattgtaaagcaccaatggtactcctgtacagtgtgat

SEQ ID NO: 251760 - DNA, 826 bp, Cannabis indica
actaacctgcctcggaatacgcagttctgagaacttgattcatttttaagtaaaattattcgaataatgggccatacatagcgagacatccacctcgcaacagataagaaaatattgatgagatgaatcggttgttgaaacacttaggtatatgccacattatattaactaagtgtaacaacttggaaacatgtaggacatgattgtccagtctgtgaggccttatggtcaaagagcagttctaaagttttctcagtacactgatgctcatgccattgctagaaggtatgcaagtgtccaaccatctacaagaaaagcgagatgctttcgtccaaatcaccatcaaccgtctttaaagataaggatgatatgcaattatgcggttatcaattgttatccacacgtgttaaaatgaaacatgatcattctcatattttattagacgattacgtattttaaattttaaatgtaaatagttgccaacctatatccctttaaatagggggagaatcccacaaataaggggacgaaaaaaaactgagagaaagagattactaattataatattgtatcaaatactccaaaatatcttgaataagatagactcgtggagtatgcagatttaactgcaaaactacgtaaaatacttggtgttattattattattattatacttatttaactttcatatatatatatatatgtgtgtgtgttaaatttattacgagaaaggctcattattggttaacaaaaatatgtgttgatagtttagttctttcattgagagcctacgtgataaaactcagaaaaaatccctcctaaccaa

SEQ ID NO: 251761 - DNA, 1389 bp, Cannabis indica
gtaaaaatttctttttttatatgattatttatattataattatggtagacacttcatacctattttcgaaaaatgtagaatgatttatattatcaaatacaaggttcaaaacttcaattatacacttgcaatataaaatcaagcatgcatgaaactaaatctttaaattatgttttagacatcgtaaattatttagaatttttaaaaatagatagaatgtctactacaactatcatattgatagatgttcgatatatatatatataagaaaaataaattataatttttaaaatgctaaaaatataaatttatgtaccaatagggacaaaagtagtgtttatattgtcgtcttcttcgtgttttatattgggatttggagcaatatgatcattaatcgtgtataaaattaagtaaatgctagtgttttcaattttgtagaaaaatattttaactaatttcttaattctatcaaattatattcaagaaaatacaagatgtatccaatactttgggaaagctaccagtcatgcatttaatgcaatgcttgaaccaagatatctaaatgattatattcttcttaagactcgcgctgacgtaatcaactacagtttcacaaagctatcttgcacgcattccattaaaaaaagtaatctccacacacaatgccacgtgtcatttcatttcaaaaaaataagaagtaaccacaaactatttatttgaaattcaaaaaggttcctccttttagcctccacctatcctcatatcattcgggagagcaagttgacataacccctaaagtttcaaaagcttagggtgtaaatattatttgtatttttggatgaggacatgcgtaatttcaaacgcaatgcaactcacctacttcaggctcaacagaaggcctaattaagataatggaccaaatccattagcaaaatcgtgacttctggatgctgaacaaatgactcatctgggcgagcaaacttctagcataacatgtattcagaagaactcagttagagtatccagataaagaattagcaagcatctagacatccagttcattatcctactcattaactagatcatgcaatatcaggacttaatcactaagatctcgtccgaggatcatatatcttcccaaaatagaaagatagtaattaaggatcaatcattaaagtgtctttattatccacaaaagtaggacacagtttgacaactatgaatgtgatatggcatccaagtcagcatacatctgttatcctaattttctcccgtatgacgtggcgtgtccatgtggacaagattgatgccacgtggagtacatcttgtcaacaagaaggccaagtcatcatgcacaacatatcagcttaacaacccacgaaaataaga

SEQ ID NO: 251762 - DNA, 818 bp, Cannabis indica
catgcaatgcatatatccatctttttgttctttatctttgttaataacaaaggtatataatatgtaaaaataataggaataaagttacacgattgataaggaattaaacaaataagaggcttaaaattaaaataaatagaatctaaaaatgaatggaacaaataaccatctttttagcatcaatgtcaatcatattagtttccgccacatatttttgttccatttcttaatttacatagagagtgcaactacttttaagaaggggtgacctcattatatttctatcattttcttctacaatttgaaaataattaaattctattacactcggttcaaccaaggaataattacaatttagtatatatctaatatttatgattttgttgcttttcttccataactaagcactgttgataaatgagttaaaatagttcaatctttacactatagtgaaaaaattataaaattaagcttctaataagtgaagtaaattttagctattttacatattttttagctgaataaatagtgtttattttgagagatattatttacaagccgtttataatttgcatctatttattaactattatccaccatattatttattttacgataaatttgaataaaatgtgatagaaggatcatattattgtaaaaatatattttgagagatattatttattagttgcatataataaaaggtacaatttaatagtgtaaaaaattaaagagataaaaatattaattattcttaattgtataaataaggttagagatataagtaataatgtatattcaattttaattatatatac

SEQ ID NO: 251763 - DNA, 764 bp, Cannabis indica
ggaaaagaagatctggtttgggaactgttgttagagactggaacaacaatgttattgatggggtttctccgtcaaagataggagcagttactcctatttatgcagaatctcaatccctatatcaagctttgatttggtgttctgcagtgcgtctgccgattactcttatagaggtggattaccttcaattagttacaaagaacaaacatagatggaaggatcacctctcactttctgatctagtgtccgagattgttaactccttgtctttatttcctaatatgtctttctatcacgtaccaagaaataagaatattttggcacacaatttagatagagattcattaggcttagataaagatttggtttggagaacaattcttccaagctaattctttgtaattgtagctatgtactttattgttgttttgtaacaccatcaaatcatttttagtgttgctttaacctgaattttctttgatactataaatttttcatatatatatataacaattagtataaagtataaataaaaaagatgtaaagaataaaatattttacatacatgctatacattttgattaatacaattttattatttttatttgtttagaagaatatttaggttttattttttattaaaaacattaattggttctattttgattattagatcttataatctaatagttgtaaaacttttataaaatatatgtagaaatttgtattcataaaacctatcccataatagaattctatattaa

SEQ ID NO: 251764 - DNA, 748 bp, Cannabis indica
aattaattaatttactatagaatatatattgttatacggttagtttttaaaatatatatcgttttgaataaattaaattataattgtccctattattcttaataaattttctctttaaataaaaaaaaataaattaattattcacttttatacattaactagttaatatttgattaattagtaataaaaaaaataaatagaattatatccattcaaatttaaatttaaattattattttttaaaatttttttaattaatttatttaatttgtagtttttttaaaaatcatttaatcaaagaagattttgtaagggtaaagaaaaagatgttttggtttataatgattttctttttttaaaataaaataataaaaaaaaagaagaaataagaatacatagagtgattagtagttgtaaaaatatatatttttttttcaaaattggtacataattttttctccactaattactctaattaaaattttcttttgtggcataatcaaattaatatttatcaactgtacatgtattttttaaaaacaaaagaatatatgtatattagtagtcgtatgatatatatattaaaaattagcactggtactttttttttaaaagaattaatatttaaagaaatttttaaaaataagtaaaaacagtaatgaataaattttttttttttttttttatgaatcaggtgattttcattactccaaaaaaaaattgtacaactctatagcattctccaact

SEQ ID NO: 251765 - DNA, 1016 bp, Cannabis indica
agcctaacctggttatgccttgctccattaaccctattcatgaatatacgtaatccatgtattacgttctttcggtggtttatcctagtgatatataccaggtctaacccagttatgtcttatacacataattcttaacatacatgcgtgtattcaatatttactacaacatatataatcttagggtaataaccctaacttgcatactatgtaatcactcatatgatacatttctatatactcagataacatttactaagagtgtcaaccctaactcatgctttcactggattcataatattctagggtaataaccctagaccgcattaaaattaaactcaaggtactagcttaccgagtctagtttaattatgccttaagcgcataattcataatctcaatatatacatatatccgacatggcatagtatttacacaacatatatcactagagtaataaccctaggctattaaaccgctcatattagggtaataaccctaatcccggttacaattactcacatatatcatattcaacataagcgccactgcgcatactctacgtgcaaactactgtcttacctgttgtcccgcaataacagagattccaaacccctgggtgctcctgatcaggtgccggtaatcctagtcacacaatccgggatttcacaaatagggttaatccccaatttcactttcacaaaatataaacatggcattcaaaacacagataatcaaatagagctcggaacgagctttccaacgatataaagaacgtcccaaacggagtcccgagtcaaaagttatggccaacaaaattgggaaaaacagaattctcactgccaaacccagtcgcgacggccaaaaatcccgtcgcgacgactgggtttagaacacccaaaaactccatttttaaggtctaaacatgccaacttttccataaattcgaaccccaaccaaacaaagggtaaaaacacacattaaggctcaaaaatcacagctcaaatgcatctaaa

SEQ ID NO: 251766 - DNA, 521 bp, Cannabis indica
tgggtcttgtgtttctatcccacatttggtcagggtcaggctttgaggtccgagcccaaggtcaaagttggggttagggccagggtctgggttagggttaggagtagtggttggaggttagggttggagtttggggttgaggtgaaggtcaatgtctgggtcgaggtgaggttgtggtcaagattgaggtctgggtcacagttgaggtttaggtacatggtttgggtctaagatcaaggttggggtctcggtcttggatcccaatctaggttcaggtatcagggtcaggtttaggatccgtgtcacgaggtcggggttgttagggtctatgggcttaggactcgagtttagggtaaggattaagaatcagagccatggtcaagatcgagtggtgtagtgaggttagtatcacatatgatacaattcaaagtatatagtttaatttattttttataaactaatagagggcattagaatacaatagcatcacaaactaagcataatataatttaatacaatat

SEQ ID NO: 251767 - DNA, 518 bp, Cannabis indica
ttttaataaagtattatttttttattatttgtatcggtctacttttaaaattggcttgattataatgagagtaggctcatgaatcatgattaagatattgagtgagggcttttgtgaattgggctttaataaattgagtgaaataaattaatatatatgtatatctgcatataaaaattttgatgtatatatttgagtgagggttttagcctacatatgggctaaagtccctccgttcctgtctatgaggtgttcattggatcacatctaatatttttaggcctatccagatccgatccaataatatattggatgttaaattttaccatctgatccgatccaatcaaattcagtcatccaatcgatacaacatccatttaatgttgaattggatcggtgctatccattagatggatttcatatatatttattggtttaatttgggtttattcaatattttagacctagtattttttggatcggatcggatccatgtaatattttaaatccagtatgta

SEQ ID NO: 251768 - DNA, 675 bp, Cannabis indica
tgttgttttacttatgtgttatctctggtttgtccttgaataatgaaatgctctttgagacttggaagtagctcgtgttagtaggatcctgtcttcccttttagattgctcatggtactacattcgattatggtaaaaccgttagctcgatatgaagtctcttgagtttggtatcttcatgtttcaatgtttgatactttgtttaacaatattccttgacatggcatcatggtgttaaatttgatactatagtatgaaccgaagagtttcaaaaaatattgtcttgagaaagctattgaaattaattctcgaactgaacttgaagttacacttcaagaattttgagggataaagaaaacaataacatggtgtagaggcaataacatcttttctaaaagaaaacttaacttgacgaaacaaaactaagctaaacaacaaaagtatcacataatctcgaaagacattaaaagcttgcacgtagtggcaacctcaatttcattagaatggaagtaagaaatgtaagagagatgatgtactcccaagtcccgagtaggagatcaggaataaacatttgggtgtcatctttgatccagttagctactaaaaataacagaacagtgaagctgtgtttttttttccttttttttacagtttttttttttttcatttttttgg

SEQ ID NO: 251769 - DNA, 509 bp, Cannabis indica
taagttattatatttttaaaactttcgtaggttatttttttttttttgaaacggtaggtatttgttagttaagtgtcaagtcgttatccacatatcattttcttattagtatatttaaatttatttttagataaaaaataagaatttagttacttgaatcaatcagaggctgtcaaatgtcaatttacttgatacttaagaggttagtacctacaaaaatttcagaattataatttaaatattattactattaaaaattaaaattatatatttatttacaatcaaaaattgaacttaaatatttatatcccaaattactttaattattattaacataatgttatctttggcataataattcggaatgacttgtataagacagataatacaaatatagagttcaaatgactagtaatatttattatttcttacattacaaaaaatagatatctttagtgataattttttagtaacaacgtaattttttttgactaaatgtgacttttaat

SEQ ID NO: 251770 - DNA, 784 bp, Cannabis indica
tagcaatagcatcaataggggtatagtctatgaactattggacttctttctcctattaattatcccatatttagtcatcatatctaatgtgaccatgttcgatatgcatctatacagataataatcatgtcaactctgatatggtttaaaactggtgagccaaaaatagctaacatcttaaggaggaatattgtagaacattgtcctacatatataagaacatgagctattccacttatcaccaaagtgatttatatcctatgtagtatgcaatttaattttaaattggtagttaattatttatttagcccttagttaattgacactaatgtttaaagaagagcattgttattgggcagtactattagtgatatttcctaaaaattattttcttctgctatatgagatccaattctaattacactaataacgacatgacaccttgtacaatttgttattgctgatgataattaattacatatataatttgggaaattcgaatttgtctatggtatgtctaaaatgatttcaagtcaatcgaagcaagggaagtttgtcttcgaatctaagagagaatcttggttggttaatcaagattttaaggtaaattattgtaagaatctttgttgcgttgttttacattcatttaatttacgaactggaattaatatcttaacattaatttttattagaggttattaaccatactaaggcagttagactcaaaatgaacatgttgggtttattaaatttttttagtatactaatttggctaaataaatag

SEQ ID NO: 251771 - DNA, 824 bp, Cannabis indica
tctaaaacaccccgaatttcactctgaaagataccccgaattagatcggacttgaggagaaaaacccaaaatccctcccatgctggccaaaccgttcgaccagtttgccagtagcctgaaaaaccgatcgaccagtttttccagggcagccatggtgatttctggtttttcaccccaaaactgatctaacctccaccaaacctgctcaaacattccaaaatagtttaatataacaaatataacataaccaaacaactaattcatcacaacttatcaatttgctcaaaatcacactttaaagtgaagaaagcacaatttttaacctcatgtagtttaatcaattcaaccagcccctacacccaactaatacaagctcaaacaacctctaacatactcaaaaatctagccaaacacaatccaaactcagtttaattcttacagcaactaaagagcaaaaccctacctcaaaaccaacttagaaccttgagttttcaatccaaaaagggttaagaacttaccttcaagctcttctaggttgagttggagcaagaacctgctttgaaatgaaggtagaggctgaaggaaaatcctcaaagtgggctggtttggtttgcttgaaggagaagaagagaaggagaagcttgttgttttattattatttttttattccttgctttgcaagctatttcccttaaatagggttttatttttttttcttttttaatcagcccataaaataaaagggacaaaaatactagagattgactaatttacccccaatgaaaaattaaactttaaaataacctaggggcattttggtaatt

SEQ ID NO: 251772 - DNA, 525 bp, Cannabis indica
agccacttggtccaaaagctcaagagtaaacgaagcggtctctccccccaaccgataggccagcaagttttttagggcattaacctcaacgatttgtcccgatagaggcgcagtgtgcatgtcattagcaatctctgccttacagacaatagacatcaacactgcttatcaccaaacttggagtttctctacctcaagacgctcttttagggccctgttcgcttccttctctctctgcatctccagagggtcgaaggggacgaccctcttggggaaggcaaaccccacagttggtgtccacgatgaggtaggggaagggccctaggctggctcaacctcagttgggcataagagggctgggggtgatccctccatccccccatgttgaaatcagtcaccacgggtttttgccttttctaatagaagaactacctcacgcagtgtcagaggggtcagcttgctctgaagagaagcatggtgaacttgttcacaatcgacacaataaaaagaaagagtaactatttg

SEQ ID NO: 251773 - DNA, 531 bp, Cannabis indica
ttcgggtctctattctaatttgcactgtgccccgcctcgactgagataatttcggattgggatcgactcgcctcgatttgtaagaaaaaatatgaagtatctcatgaatctatctcttgacttttcaaatctctttgtttagaaaaaaaaaaaaagaacttttcagatctctcgtattctctttctctaaattcttttttgaatctacactctgatagagagtcttatattattaatgtgtggaaatataatagaatatataaaattaaagagctactcctcttatcgccaattaattttgatatataacctcatgcatcttacaaatctaacacattataccagcacggtactttcttgcaatactccaccgcatatgtgagtcttctttgttatctcttgacttcgtttttgttagtatttctcatataataatgaatattgttattaggcactagtaatatccacttattgaataatcttttataggtggcaccttacaattggttagtaattgtaacaccctaacta

SEQ ID NO: 251774 - DNA, 887 bp, Cannabis indica
tgaagatagatattacgtggttcgaacaagaataatagtatgttatcttgcctactccacagccagaaatagccctttgggctttgattttattgattgagaatgttcaccagagattacaacaaagaactgtcaataacagtttatgtacactcgaatgaagctttgcttcaaattacaaagagtcactcatctctctctgtatctcaactttgattcctctctcttttctcaattcttttcccaacaacttagtctaaatctctgatcgagtagcttgtatggtgagtgtcccttttataggccttgaactgagttggtgacataactgtgataacagaatattagttaattatgttataacatgtccgagcatagggagttgatttgttctaagagtgagggtaattcaaatgtgtagccaaatataacaatatcgagctaggtcggcgaacacatatttataactctgtactaaacaatggagtttgattttcattttatttttctaatatagttggaagaacatctatttgtttctaaataaacctagctaaatagagatttaaatcatattttaatctacttaattattagcaaaataaaattatattcgggtagttgtcatatttaaagaataattttgaaaaaataaaactacaaaaagtaagcaaaaggaaataaaattaaaaaattaataaaagtatttctaataaaatactataaaaaataacgtcttgcaacttttttaagcatattttgataaaataatactccaataataatagaaaatgtacactaaatttagtacattgttaaattttgtacaaaatattgtagacactaaatatatatcagaataaatattacttttgttaattaaatta

SEQ ID NO: 251775 - DNA, 618 bp, Cannabis indica
aatagagtattcttaaatagaggttttactgtactaagctaggaggcgagatgttcatgagtgaagagggtagaaaactataattaattattcaaaattataattatcattaaatttttatccaaattactattttactaaatatttataaaacctcaatttttttcagcaaaataccccggttgggatgaggagaggaataaaggaagctctgggtattggaactccggaaggagttatcaagtatttggggttgccgcttttcagatcaaggcaaaaagatgctgactttaatttcatcattgacaatctaacttctaaacttcaggggtggaaggctaaaacgttatctaaagcaggaagggctaccctgattaaatcggtgggtctgtcaatgcccatttatgctatgcaaaccaccaagttgtctaaccgacttgtgaacaggattgatgccttgattcgtgatttctggtggggctttggagaaagggaaccatggactctaccttaaagcctgggataaaatgtgcctccccaaggtccttggggggattggggtttcggaaaaaccaaagaaatgaatcttgcctttttgtcgaaatggggctagaattt

SEQ ID NO: 251776 - DNA, 1642 bp, Cannabis indica
gattttcatttaatgacctaatcatttcttggttgttgatcacgacttagagggtttctaaagtgtataaatacacccttaagtcgctagtattggttagatctctcggtgtatcaattctatattacttttcaaagttaaagagcgttttctttgttgtgtgaagaacttgagttcaacaagttcttagtattttattattgtgttactctatattgtttcttgttgaaattgtacaggttgaacaccttggatattgttaatcaagtttcgggagaagtcttgtttgtgagtgaccttttcaggaggaaaaagtgcatgtgagtcactcttcgggagaaagattgcaagttagtcactttttaggaggaagattgcaagttagtcactattcaggaggaagattgcaagtgagtcactcttcgagaggaagattgcgagttaaacactcttcgggaggaagattgaatgtaagacactctttaggatgaagtgtgcaagggctacaaattaaagggagttcaaggtctcgacacttcagaaatttgattagaagaattagttacaacagttgcggcaaattcaatgagggagcctttatttgtgtaagtcaatttggttttgtaaccacttgtgattcatctaataaatttccttctctaggcgtggccccgtgaactaggagcaattcgaaagagttgttgataccacgtataaaatatttcgtgtcattttaattttctacattttactttctgcattatatttatgttctatcagattctgtgtctaatagaacagagacaaattctattcaaacaattttactacactcccacattatttaattgtttgataattcaacttggtagttattaaaaatagaatttcaattggtattagagtagttcactaaaatcttagagagatcttgtatttaatttctgtttaatttatttcttgtgtgaaatgtctttctttaaagaaagaagttcggtatctcgtcctctgctactcaatgacacaaactatccatactagaaagtgaggatgagagccttcattagagcacaagatgaaaaagcatggaaagcgattttgtctggatggtctcctccctcggagaacaacgatgatggtagcacaaagataaaatcttaacttttatggaatactaaagaagagaagttatctagttataacaataaagctcttcatgctatctttaatggtgttggtaaaagtttcatcaaacttgtttctacttgtatatctgctaaagatgcatggactattctttgaaggaactgaagattttaaaagatctagatttatcatgttacaaactaggtttgatgatctaagaatgactgagtctgaaatacaatctgaattctgtgaaaggttatctgacatttctaatgaatatttttcccttggtgaaaaacttgatgattctgttttggtgagaaagatagtgcgagtacttcctgacaggtttaatgttaaactcacggctatggaagaggcaaaggattttagtactatgaatgtggaagaattgatgggactcttcgtacctttgaattgaatcagaagattcgtcaaaaaggtaaatggagtgcttccaaagaaaaagaga

SEQ ID NO: 251777 - DNA, 1332 bp, Cannabis indica
agtatgtagtaccccactacctaattacccccctaactctcacacaaggcccaaaggagaggaatttaacctttcattaaataattattattcattgaataagcccaatactaattgaacctaaataaactatcaaaagtaagatattttattttagcaacctagtccattaatctatctagaaataaatgagcttcctatatgcatctaagcccaaaaccaaacatataggctcacacagatcaaattaatttggatgggccctatagtgtttctaggtttacacagatgaaaaaaatacaaaatttacctgttacaaattatttataagatctattgacaattggactatgattgacaattgttaaactgtttaaatataataaccattataaaacataataagtacataaaaagagtctgaatattagtagaaaactaatacagaaaaagactccaaaatataaaacaacataacaaaacataaaaaactaatccataaagtaaatggaattacaatgaaataaaatatacaaagtaactaaaacctagctacattgtctaattatatacatttttctcactatcatcgcattaatcatcactgcctttattatcttttcctttggagtcagaatcttcattatcatcctcatttttttgctctccgtcactaccctcctccttttcatcaccactaccttcatccaaatcttcagcatcttcctctttttcattatcatttgcttcttcattgccctctgaactaatatcttcttcattatcactgctaccatcatcattgaaagagtcactacctttgtcctgtaaaaaaattgtaaacaaaagcatatgtaagaaactaaaacaaaacttgaaaataaccataaaagaactgtcataccttagcaacaaaatcaacaaacatagatgaaaactgtatctgcattgtagacatttgggcagcaaaagaaacaaactgtgcagaaacaaactctttcaactcaactaaattagatgaaatcttctaatgtgaagtatacaacaaatcaatcttaagctccaaaccatccacattttcagaaaaaccattatgtttgacaaatatgtcactctaaaccacagaaggttgttcctaaacaggcacactctcgtaaaaattgtaatcagtgtcaaacttgaaactactcaagtataagaacttgaactcagtagaagtgagtttcatattagatagctgcaactgaaaaaacataaaaggaaaaatatcaataacattttcactaaaaatattaaacaacaaataaacaaactaaaaaaaacgaaaaaaaa

SEQ ID NO: 251778 - DNA, 960 bp, Cannabis indica
tgagtgggattcaactactaatatctttgttttaaattttttgtttaattagtccgatcgctgtccaaactaagttagcatatgttaagtgaaatctttattcccttgtatgtttctttatttaattaattgattctaaattatttataactgaaggagcaagagcgagtgaagaagaagaagaagcaaagtatgaaggaatgtaagggtactcaggaggatgtgcaattgaaagagtgactatttcaacagtaagaagagaaacacaagagcaagagcattatcagataagatcaattgagtgaactaagttgttcaaggtacaaatttcgtaattagtattgatttgttttgtataccaaggccaacattgagtacaaaataggcaaagcaatggaatttcttaatttgtttgatgaatttgtatggtatatgttaagcaatggctgtcttagatgttatgatttcattttcataataaatcctgtttggtgtatgaaacagataattttgcctgaaaaatggatattagggtgaagcaagaaatgttgctctctcgtctcgttattcacaaagttatattatcataattacaaagttactaattttgttataatacatgagtaacaagttttatgattgttgttaacttttgcattatgttattagtttataattagtttttaccgtacatggaataaaagttttagactcgcttctattaatgtaatcaattaatgagatcgattttttttaacagaatgtttgtcctaaatgtgagagtttgttctttagactcgtttatagtttatagttagtttttaccatacatggaatataagttttagactcatttctattatttttcccattcaaatttctggcacaatcgtttgacgaaaatttttttttatcagaatgtttgccctaaatgtgagtgtttgttcatttttttttttt

SEQ ID NO: 251779 - DNA, 710 bp, Cannabis indica
caagtgcagcaacgacgagtcttgcggaaagagaggggaaaagctcccgcttgctaacatggttattgttgctatgttcccagcgaggcatcccagaatgatacgatttacaacgtatttagtacacgtccatattgacccggtaaaagcgcacatatcacagttgtgtgattttcaaatattaatcacatttattttacgtggtatgtaatcaaatcccacggcttcaggggataatggttataaaatatcagtcaactacgtaattaactgccctcctatgttattataaataggggcaagttacactgaaaacgggacgaaaaaattattagagataaaacctgagaattgtatcagaaatctaataagattgactcgtggactatgtagaattttaactgcaaaactacgtaaaaacctttgtgttcttatattttctttaccagctttttaatttctgtgcacgcttatcattacttaagctcaaatatagttaacgaaaatctgcgttaacaaagacatagtctaatttagagttctaattgattaactaaaaccaattaactgagtgaacaagacaatattatctttactagtgcggggatcatgtgcctatataatcaagctcccaataagtagttttgaaatttaccgagtaaattctctatcttattaagttctccgaactccacaatagattcagaatt

SEQ ID NO: 251780 - DNA, 797 bp, Cannabis indica
atgtgtgaattttatatacttaactctcttatttttttagtatcttataaatttgaaaacaaaagtaaaattaagagatgttgccacagaaaaaaaatagagttaatacatgtataaaaattaaaacatacgaggttcaccaccaattaatctatttattattatatatttcaataataaaaaacttgagtgttataattttctcacaaatttacatatatatatatatacaaaatataatttgaaacttgtttaggttgaagagattatatgcaaaacaatagtgtaaaaacaagaatccctttgatatatattaggtgttaattaaaagatgttgcactcttctaaatttctaatcaattacgaaatttagcaatggcaataaattattagaaattgttttgtgtatatattgtacaaacacattaaactaaatttgacaatattgtaactaatattgtacgtgtactctatttgatttaggtttatatagttctctcgtaataagatcaatgaagttctataaagagaaaaaacaatttatatatccttattattctgctggctccacaaatttataaagtcatataaaaaataaacttacatagcgtttaattggagaattaaaacattagttatttaattaatatataattacctggaagcttttctgggtgagtgtagcaaatcccattttctccttcaagtgttggtatgaattcatcaatgagggggatgaagcttacccgaaaaatctgagtgtacttttgcctctaaatgctccagtatttcttgat

SEQ ID NO: 251781 - DNA, 785 bp, Cannabis indica
aaaataaaatttaatctaaagatattatggcaaaactcgttactgtaaggacagttatgacagttagatgtaactgtcattctgttgtgtctgttaagttggttagtagttaacttcggttaacatgttttctagtcttttactggttttggttagtgtattggttaagtgcctttggttcttgttatatataagtcttgtatcaagtgtgcttaatcaataaagagttctttctctctttctctctttcttcctctttctctctgttcttctttccttctctttttgttactttcctaatgctgcaatgtctagaagacttaaccaatccaacatggtatcagagccttttccgccattaatggcgaatatggctactgtgggtaatggaggctcgagtcaccagcaaggaactcaatctgctgcttcaagaactcaaaatcatcaagaagatggcacaatctacttcaatcacaatgtctcaataaagctaaacgatcacaattacttactctggaaacaacaagtcttggctgcaattcgtggaaatcgccttctctggttcatccaagacactgatcatccctcagttcctcactgatgcaggttgcactgtacaaagatacaacccagagttcatagattgggatgttccagatcaacttattgtgtcttggcttctctcttctatggcagaaagcctcttaactcgatggtgggatgcaactcagctcgccagatctggaaagctcttgagcaacattacacctgttggaaattatttt

SEQ ID NO: 251782 - DNA, 867 bp, Cannabis indica
acttgaatgaattgaaccaaaactaagtttccaacctggtacaattgactgcctagcatccaaggatgatgaatttgccaatgaatttcatagaagacgatgccaggcatgtacattttcctcacaacgaccctttggtgatagaggttcatatagcaaacaaaagagtttccacaattcttatagataatagaagctctctcgatatcattttcaaaggtgcattcaaagccattgatcttgtggaagcaaacatgctgccttgtctaattcaactacaaggcttcaatggagataccctgactccaatggaaaaaatacaacttccaatgacaataaatggagaattctctagaagcaatgaattatcctctttcaagtatagtacctttatcatagttgattatccaacgaattataacgccattttgggacgaccatttttgatagattttgaagttggaacatcccttctccacttatcccttaagttaccaggtgacaccagaagcattgggacaatcagaggtgatcaaagaagcgcacgaagttgctatagtgtttaaacaaggactattctcatggtccaggaaggaaatgtagtgaaaccaagaacatctttccaactagcactgagggtggtccaagaagatgagttagatccacaagtaggcgtagaagaagtatgcatcgataacggagaccctaccaaagtcatcagagtggggaagaacctacttccggcaatgaaagaaaagattatctccgcagtcaaagcaaatagtgatgtattagcttggagagactctgatacatgattggaattagtcctcgtgtgatttgtcatgcactcaacatagatcccaa

SEQ ID NO: 251783 - DNA, 894 bp, Cannabis indica
tgctatgttttaggagtgaatccacctctccatgttttggatggctttgtgcatagaatttggcaggggaaagtcgatagagtgaaaatgttgtcttatggtatttttatcatccgatttcactctcttgaggacagggatcaggtcttaaatggtggatacattttttttaatagaaggccagtgatatgaagccttggaatcctaatgaaaactataagaaagaagatgtacagaaggttccagtttgggtgcagctggaggaacttgatttgaaatattgggggcagaaatcactcttcaagattgtagctcaggttggaaatccgataatggtggatagtgtaactagagatagagaaagattgaattacccgagaatattagttgaggttcaaatggatcagaagctgccagatttactagaatttgagaatgagtttagtatgaatgtttcggtggggattaaatatgaatggaagcctatctcttgcacacattgtgcaggagttgggcacgatgctacagagtgtaagaagactagccacgggaagcagaaatggatagttaaaaatgacaaaagacaacagcctcaggtagatgaggaaggctttaccaaagtgcaatctaagaagaacaatggtaatagagaaaatacagagaagaatactgctgggactgaggtgaattacatgctgaagtgggaaacatgttccaagtgcttgaggaagagggaatgatatctgatgataatgagtttggtcagggggctaatttgtacaagacaagaggggggggggaggagagccctctctgtctaatggataaattgttagcatggaatgttcggggagccaacagtcaacaaaaacaacaaatgataaagcaatttat

SEQ ID NO: 251784 - DNA, 563 bp, Cannabis indica
tattttgtgataatatgatatgttatttatttgacattttatttagttttctaattaatgttatgtatttttaggtgtatttcaggaataaaatgtgggattaaaatgaagaaaaacttgagaaaatgggtcaaaagtataaagttaagaagaaaatcatatcagcctttatggaagccccactctcagtcaaagtcagcatccatccgagccatccgtttgatgatcagagggtccagatggtgagtggatctcaccccgacagcaggagcgtaagctccctttctttttctctcagcttgcatgcgtgggacctgcaaagatggtcccatcttctccttccacaatgcaagcgccccatcagcttctccagccaatcagcgcacgccacacaaaatttcatcagccaccaagccaaccacaacctgccatgtggcacctgtagaagaaaaaaaacaagaaaaaaactgagttgttatttgactattctttgacccgaattctacttgaaaaattctaaaaatccttatttttctcccacaatttacacataaatacctatt

SEQ ID NO: 251785 - DNA, 709 bp, Cannabis indica
ttttttttttttgagtaaatatttttataaaattagtacattgaaaatataaaagactctgtatcacagtatttttataaactttatgttatttgatagtatttttataaatttcccaaatatgtgattgatactatagggacgtcgcttacaaggaaatgataataaaatgatttatactttattttgttgttggtgaccacatgaggtggtccatgcaaatgtttggccaatttttattaaatttttgcatgtgattattggtcttatattaattatctcatgactcttgtggttatatattcttaaaaaaaaagctgcacaatatttaaaagttgtttttactagactttaattgaggccagcacataataataacaaaaaccatttctctgtaaagtggaaacgtggctccattgatttctggataaaaattgctaaagggtaatggtacctaatattttttctagtgttatatctttattggtataattaagtatcagattttatataatttaaaaaataacttttttttaatggatagctcttgcaaaaatgtcatgttagataaaaaaaaacccctacatttcaatgataataatttttttaaaaaggtaactccctcactattaaatttagattacgcacacgtaataataataataataataataataataataataataaaagtaatttatagtataat

SEQ ID NO: 251786 - DNA, 803 bp, Cannabis indica
aaaagaagaagaagaggagtcaaactatcatacctgggttctcagtcacaattttgggagcaatattggccagtcctcccctgtctctctctgaactcgtggtgttagcaatggacactcactgatatgaagatcagaaagagaagtgggtagttcttttgggaggtgttcacaatttttaagtataatcttctttaaactgatcaaaggggcctgcatgagttgaggtcttgggagtaatactggtattagttcctcacaatttcttatttgaagctctgtcaatgatggaaaataatctcctaacaatgtcactttgagtttacaacaatactcaaaatgaagagtcttaagacgaggaaaaactccaccttcgataaatgaccactcttcgagattagacaaatattcaaatgtcaaggtctccaaagatgtaaagaataagggctttgttgatattgcaacagaagaagaagaacaataaaactctgaatctattctcaccacaccacaatccgtaatccaaagatatttgagagaaggcagctgtcccaacgacggcaagaagctgcaattataacaaaatacaatctttagggtaattaaattagacaagcagcgaggatctcccatccattttgggaaagcgttgcctttgtagcctataatagtaagttgcttcaggttttgatgaggctggagggcactgagtagttccctttctttgtgcaactcatcaacttcaggttcatgatgataatcccattccaaagataggtgactaagagacttcttactcttta

SEQ ID NO: 251787 - DNA, 768 bp, Cannabis indica
gctgccttcaattgctcaaatgccaaatcttatgcgaccattgaatccaaaatttacaaaatgggataggagacctcatcctcaagttcaaaagccttggaagtatcaaaaaaaaatcccgagagctcgggagtaagtacccagcgtgaaggttgacaaacggtctagtgtgttgggttttgcttatccgaattagatatagtttcgaccattcatctagtttctcaaaataatagagatctatgaagtcagagaagtcaatttcacaactttccatttctcatttctagctcactctgaaatgaagagtttcgagtctcttatttccgtaaaatagtaacatctctaagaaccagtgaccagcttcgctggaacacataaatagaccaagtgatatcaaaatatcacttaggcatcttaaagtacatctcttggacgtttttacacttaccaagcatctaggttgacgtcatatgtcaaccatggcgctgggatgtcaacctggacgttgggtcatgaactacctttagtaaaacaaccataactcactcaattttgattccattgatgtgattcaacttgactttcgaagataattaatgttatgtcaagtcatgtctcacactctagatgtaattatgaagctaccatcatcaaaattcaccccaaaggaagttacaaaaataagctctgggttacccacagcgggacccgccggctctgaaaactggccatcaccaccaagagctaattttcaccattagatca

SEQ ID NO: 251788 - DNA, 730 bp, Cannabis indica
tgagaaaatggcttgttcgaggaccctgccaaaactggctagctggttttacaggcctggcaaaccggctagcccgcttgcaccaggtttccccaaacaagcaccaacttgctcaaaactcatccaaatgcatctgtactttccagaacacttatacaatgcatatacaacataaaccaaccagtaattcacagaaaatcactaaatcatattatgccattaaagaccaaagctttgaattcaaagctcaaacttgagcaaaactaattccatacaccaaaactagctgctagaacctttaatcaacctatattgaccataaaaatcaaaccctaaacatttctaatcctaacagccaccaaaccccaaaatcacatactcaaccaaccataaaattttagaaataaggaagggtggtactggggcttaccttagcttcaagaacccttgaatctccgcagaattttcagaaaaaatagcaaggaatcagctggttcctccttggtttagtgctgctcgaagggaaagggagaaagacaaagagtctctcttgacttttcttaatttctctatattttcccttaaataaaactaaggttaattgaattaaccttgctgaatatttactctaggtgtcccatgactaggcagccacctaaccctccaataaacaaaaagactaaaattccccttagcttacaacttaagcatttttaagactaggggtaaa

SEQ ID NO: 251789 - DNA, 1153 bp, Cannabis indica
agcttcgaagaactctttgtaaaaaagaatcgtgtttatcacaagacgttcatcatcgacctctgaggggaaaatggccctaactcgctattatgatccttgggaccaagcttctatcgagacatccctggatacaacaattaaagacgtgtttaaatacacgaccattttgacccgataaaagcgggcaaatcacagctatatgatttttaaatcataaccgcatttacactacgtgatgtaatcaaaccccatgattttaggggatgattgttgatacatattacagtcaactttgtaattaactgcccactatgtaattataaatagtggtaagcaagatcaaaaaagggacagaaaaactcatacaaaagaggacctgagaaaacaatcagaaatctgaataagattgactgcaaaaccacgtaaaaaccctatgtgttcatattttttatgttatagcttttattttttctgtgtgagattgtcacggttaggctcaaatttgattaacaaaaatctgcgttaacaaattattttaaggataaaatatattgaagggtagaccgttaaatttgtccttactcgatgtaaataatctatatatgatctttaatttcttggattataacaatggataattaatagttgagataatattggcttgtagactcagttaattagttttaattaaataattagaattctaagttagactgtgtgttatttataaatttttactaaagaagggcttaattgtgaagaaagaggatttatgatttattttttattaagagactttgtaaggttctaataaataaataagttaaatgataattttatttgataattaattataattattaaataaatagattcgacatttatatgattaaaattaaaatatgacatttgtgaaagaaaaacataagttgttaaataaatggtaaaattaaaattcgtggggtccacttaaggttaatcttaaactattattttatcttttttaattcaatattatttaaaccataaccccatatgaaatcctacaaatagataatgataggctcctattttcataaactcctcatactattctgtcaaataactaaaaataaagagcctctcatatttcaaaattctctctctctct

SEQ ID NO: 251790 - DNA, 2145 bp, Cannabis indica
ccatccagacaaatcagaggcctacacccctttctgaacccatccttgcaagcttttgagcaaatatacaccctttcaaacaccctttgatcaccttccaacttattctggatcttggcagtactaccaggattggttaccagtattttcttgcaatagtcatccagaatagcatactggttagccacagatccttccaacatctctaaaggaatgttcttagccctgtaaaatgtccatttgctgaccctagaaaatttagtgtttgacgccatctccttgaaggctgagaagtagaaatttgggtttaatctgaagctgtctaggaaatgtctggccaagaaatctgatttgcaagcctgttgtccaagactattccacaagtgtgtgtgttttctagctttttcacttgaaaagttgactcacctgaattaaccctagatgcaaaaatcagccactcacaaccattgcctttacatgtggccctcactcttcttttgtcattactaatgtacttgaagtccttgtcattagcaaaaaaatattccctaaggcctttctgaaaactttaacagtagcaaaaatcatccctttcttaaactaaaaactggccttgtcatactgtggattatactcaggtcttgaatttttcctaacctcaccttcctcatcatcacttgctaaactttgtaagtcatcctcactttcaactccatgtccttcacactcattaccctcaccaccttgattgcaaaaattagtgacacttgaccaccatttgctaggatctgttgctttggctatattcctctcagcttggacatcttactcatattcctcctcatgaaattcaaaatcttgttcatcattggcttgttgtgtcccatttctgttttggtgttgtgatgttgttgggtcaataacattgggctggtttggtgataggtcatctgtagtgggctagtttagtggtatgtcaacagttgggtcaaatggattgggctgaggtggtattgggtcaaatgtagtgggctgaggtggtgttgggtcaaatggattgggctgaggtggtattgggtcaaatgtagtgggatagtctggtgttgtgtcaactatagtaggctgaggtggtgttggatcaaatgtgttggactcatacatcattgggtcatttatggtgggttggtgaattcttggctcatctgtaggggtttggtatataattgggtcttcatcttctctaccaggttgagtatcaactggaggagcatcttcccctgcatcttgaatctcagggtcttcccattctggtccacaaccatcaaagatgacatagtcatcactacaatatccttcaaaatctgactcttctaggccatcctcatcatccatatcatcaccctcatcatctgtatcatcctcatcaactgattcttcagaggagctacttatttcaaccacctcaattcctttacccttactgcctcttctatcttttcctttgcctatgggttctggtatgcccactacatcagccaccacatcagcatctggtggcaattcctcaatcacacagtgttgaagcttggttggtagctctggaacatgaggcacagcagttgggtcatctttccattccaattccagtgtcatctcaagcatgaccaaataaacatccatctctgtccacttcctcctttccattttgtataggatagattggacatctctatctcccaaaatcatggtaccatttctcagagctctatctttggccttatacaacataccaaaaggcaatttgtaacctagagacaacacaaaaccttctatgaacaccctactcattttctccttatcaattctatcaaagtaattaaccctcccaccctcatatctcctattaccaaagggtgtgaagaacatgcccccatggtggattgcaagtgtcaagtagtctaaattatcacctgtaaaattcaatttcaacaaaaaaaaaacaggcaaatcacaggggaagcaacaaattagcatctctcaaacattccaaacacaaaattaagtaaattttttttggtcaactatggaccctactttcagtaggtgaacatgcataaagttacaataatagcaacacaaaaccct

SEQ ID NO: 251791 - DNA, 3030 bp, Cannabis indica
tagtaaacttttgtaattgtattttgtaaacgggatcccggaattttatacatgtaatattttatgttttaaataattatgcaaaattttaattattcacgatttctaataacctcgttgattagcaacgagctgcacagtacgttaaaaatcacgctaacacgcctataatagttagggtgttacagacgctgcgaaagggagatgggtagatgaactaccgcaagtactatgggctcacaaaatgaccgagaaaacaacagcagggcctactccattctcgttggcatttgctcagaagcaatgctaccggtagaagttaatattaagacccaaagacgagatttctacaatcaagaagaaaactaagaactcttaagttatccttggatctacttgaagaaagacgtgctgaatcgcaaatcactaatgcagcatattagcttcaaatcacgagatacttcaacaaaagagtgaagaaaaagctctttaatgtgggagatttggtgttgagacgagtgtttgcaaacaggagagatgcatttactagagtattaaccaaaactgggagggtccctatgttatcgaagcaatagtaggaatcggggtttataaattggcttagcttaaccgctcgctaataaagaaccattagaatattgaacatttgcaaccttattaccaatagacttatgtacttgttgtattttatctttgtggtgtaaattgttattattaataaagttgaagtattatccaagtaattgcaaaggtttactctttaaaattacttgattggcatatatatgtttatgatcaactggaatttatctagaaatatatgatatattgcaaacccactcctcttttaattttttttccaaataattgattaaagctgtctatggacaatgtaaagtcaaaaattgaacctttctcgtcagaaagaaaaaataagtagcagttgaaaatgtgatttaactcataaaaataacattaagctacatgcgaggctgactatacaacgactcgcattatgtaggcatgtattataaacgaggcaccaaggttccttgagaagataatacttaacctaaaatatgtatagaaggcctaactattcatataggcaatcaataattgtacaaagtaattcataaaatggattattcaaagtatatttaagttttcttactaagttataaatggtagatcatgactactcgcgcgatataaaactgataagaatggctcacgaatagagatcatagcaaaatataactactcgcgcacatacatagtagattaataactacttaagcaatttcaaaggaagaacgagatcaatgaaaatgcttacttaaagtatcttaaatttgatcaaaatataattatttacgttgtgaataaaaatgcaaataagcaaacatattaagtttaaatataaaggtgcgaggcaataaatgaaaagataaataaataaaaggtaaagttagccatccaacaaagaaaatttatcattacaaaaattgccacaaggggcaaaccattgttaaaaaccaagcctacattgtaagagactaggacaaatcttcttgctccacctcgacctcatcttcctcaccaagctcttctttcctggacttcttgcagaaggcaagcatggcttcagccccttcgcctaaaaagctgaattccatatcagggttaggtgaccaggtctggtaaatggttctcctggcaatgctattgaccttatttttggtgtcagccttcgcctcttcgagcttcttctggttagccagacgttgcttttcagcctcctcccttacgcgagaaagtttagatttagagtcgttccatttttcggccatggtgtccctatgctctctggtctgacgaagctcaatttcaagcattttagccgctgagacgttttgtgttgagtagcaaaggagagaagcaatccctacgagaaagaagcaaatcaagaggagtaaaaaatggaaaaaaatgtgaacaagaaggagaaaaagagactaacttgatgcatgagttcataactccttttaccaagaccttcaaagctgccttgcgtgagaagctcctagtcgctagacccaagagtttggaagtgacgccaaccattggtagcatgcaacgagcagagttgcgaacctttagtcccagcctcgagaggttggggataggaaggctcgagaagaaccatctctggacgagaaccagtacttttaatactcaatatgtgcactatgatttttagtgatgtcctttgggttgataatgcactagcagcatatggacttgatgaactgagtgttcaaggactttcttgataactttgtgattatgtttattgatgatatcctagtttattctgagttagaggaagtgcatgagcaacacctccgtatggtgctatatctgttaggatttatgacctaaaagctagtaattaatggataatatattacaaaatatatgaaatacaattataagataaatgatacattaattataatagtataataaataaatatctaaaaattccttattcatatggagaaggcataatcttgtaaggacatacaagagaattaggattgtacgatatgaataaaacaaattggtagtgtattaaagtaatgggaatctttaatatagaattgctaagtacagtttactatacactatacttctagtgtgtgtgattttaatttgaatcacatatgtggatacacatgtagtaaaggtactatgtataattcgattgtgcatgcctaatgtaataaacatctttcattaatgtgtcgtttaccaataaagatttattcatatcacaatgatgatcgttagtagatcagcttaaatcctaagtatataagaactcctatttgtgttcattgagttcttagattcacccattaaagcttcttagaaaagatgattcttacaacttctgttttgggagcttaatagcatgagtggctgggaatatgttatacaata

SEQ ID NO: 251792 - DNA, 903 bp, Cannabis indica
aaaaaaaaaaaaaaaccctttatttatttgtaatgttacttacccggaggtgagttgttattataattataaaaatctagtaacctctctaccttaattgtagcatatttctcttaggtagcgtatagttaagaggaatgaaagtataagaataaaaattaaaatagaaatacgaataagaataataataagataaaattttaaatgcataaaaaaaattaataaaaaattaataagttttttgtcttcttacattaaaatagtatttctttcctttttttttttaaatggaatagtcatcattccaccaaaatagtagaaagagcatttcaatgtcattctaatactttaaaatataaccaaacaaattaatgcaataaaaattattttctttctattctatttaatttcattacctctaaccacttgaaatttctactgtaatcttatttgtatctcatataattaattatgactttcattgagctcattgccactttttcatcatataatttacttttctaatttggtataagagccaacacctttcatatatcttaagagaaaatacagcgagaggaaatacagcgagaagtgtgaccaagcattctaacaaaaatttagttgaatagcccaggggtggcaattatttgtgaatcgtattcatgtcgcatcgagacttttgcataataaatatatttaataattgtgtcaggataaaaaaatttgagcataactcctttataaataaattaacatgaatatgtaacccgtttataaatatattttgtttaaaaacaagtcaaccaataataattaataataggttcatgacatattcagcatgttgacttaattataacatattaaaatattaaaataactgtaactagttcactaata

SEQ ID NO: 251793 - DNA, 633 bp, Cannabis indica
aaattaatatataaataatttttcaataaattttgtcatttcataattcatatttatgaatagagtaataaatttaccttgtactttatgatattatattattttataatacaacagtctttcattttccaaggcatgtataattttttattcttggccacaacttataaactccaattccaaagcagccaaacaatatacattatataattttattttcattggtgttggagtagagtttttccgcttttgcatcaatacatatgagattgttattgggccgtgcccatcactttctataggtggcgccttatgattggttagcgatattacctaaaagttattttcttaagttatatgggaccagtgatgatgccttttagcaattctcaatacatatatatgtatatgtattatgtatctattctatataaaatgtcctatataacagaattcttagtttgtgaaaaattattgggtgacttttttttaaataaaaaaaatattgcatgtaaaatgtcagcatctatgtttaatccacttaaagtgttgcaattaataataaatttgttcttattgtttattttttattaaaaattattttcaaattttgatatttagaattagttaaat

SEQ ID NO: 251794 - DNA, 1068 bp, Cannabis indica
atgctgcagaagcaacaccagttgcagtaagaggagactcagtgccatgagaggagatgccttatcagtcgaagatgaagacttcgaatcagacctagacgatttgggaaataagatgggtcttactgatttttgagccactattttgggagccctttttctgggaacagaagaagaagctttcttgacagacacattctttgactcacgccgaggaggcgatgaatcccctggagttggagcaattgcagcagcaggaggtgattttgaaggcacgggtgcgtttgagggagcatattctgaatccaccattttgcttggatgccctaagttttttgtcttagccatgaaattctgaaaaagaaaatgaagaacaaagagacaagaaaccaacaaagagggatcgggtagatgagaagatggtgagatcaaatgacaaaggaattggtttaaataaagatgtgatataggagcaaaaaggaaaccaatttaaaaggaaacaaaaataaactgccatgcccactaacaaagagaaaaccaccccactctttttaaaaaacagaaaatatagaaaatgaaacaagaataaaccatgaaactttccaaaacaaaaccaattaagataaaaaaaaaaaccttcaagatcaacaaataatcaaaatacaatgaataagatatcaatctttaaaaggaaactcatcataataaattagagtaaatattgatacttaccaaacaaatcaagaactaaatttccttcgcccacaagtcaagccacaagcgcctccctcctcgtttttatgatttttttaatatataaaaatttgaataaacaataaaaatgataagaaaaacaagttactctagagcaagtaactaatcaaattcaataaaaagagacaaacacacacgttatgctttcaaaagatgataattaattagtatctcaaataccaaccacactgaacagatgttgagagaaaatagacaagttacaaataatgtgaatcaggataatttttaattttattcgagtagagtgtaacaccctaactaacttaggcgtat

SEQ ID NO: 251795 - DNA, 626 bp, Cannabis indica
atttttataattttaaaattttagcatagtattttttataaacttaatacagtaaaaatataaaaatctgtcccaataattttgtaaatttttctccattttatatatgaattttataagtccctaggtataactcctcatgagtcatattatgattgggactccttaaattattattttatagaatattacatcatgaaaacccattccatgatcacttttcctactactgaataacttcattgacagtacactgtaaagatctaacagtaaccatatacattccctctagaatctcacaacataaaccataatatctatacaagttatttttgtctattttatatatttcacatgttaattagtcaccttgggtaatgaaactacttactgtttgagttttctcatggttcagcgaattggacgataaggatatgcatgcatagagtcgcgttgatatgatatatatgcaactcactaggttgatgagtatgtatgtttcgatcccttttccccatatatatgtattgaataatattattatagatcaacatccaaagaaatattctacttaattggtttattatcaactactcccatgaacatcacacatatatatatatata

SEQ ID NO: 251796 - DNA, 570 bp, Cannabis indica
ttcaccatttttttttaccattttagctcatttttgttattatatctcatccattcaaaaattaaattggtagaaacatgataaaacaattgttaatgagatattcataatcaatttcagtcaataattaatctaatgaaaaaatccaaattgaatttcataattaatagagtttaatcataaaattctccaaacttattcaataattttaagcatgtaatatatcaacagaaagagaatttaacatagaataaaactcttaaagttttaaaattaaacaacaaaaaattcaacataaaataagaaggaaattaatatgtaataatagataatttacatatacatattaattattatacaaattatacgttctatatcatatacaataggtaatctgatgccacatgttagataaattaataataaactcaagatcaatttgtatataacataaagcacaataataatatataataattaggtatgcgtacctgattgatccatagcaattacctcaattctccatagcaattacgtcaattcgatagtgcaatactatcaactaagtct

SEQ ID NO: 251797 - DNA, 455 bp, Cannabis indica
ggacaaagtgtccttacaaggcatggaaaagccgttaagcaacaagtaaaaggagttaagcaagccatcaagaagctacacaaccatgtttgaccgaccaaagggagtacgtaggcagaccaaaagaagcttgtatggatgaccagggtttgagcacaagttggtcagccaaaggatgattgtcagaccaaaaaaggcttgttcgaccaaggaaacctgacctttgcggggaaagttgtacaaaggctagccaacacttgccaaagctggtaggcacttggcctgccagaccctagcaggcacttggccagctagaccctgacagacactaatgtgcagcgtgcaggctggcaggcacttgatgtgcagcgtgcaggctggcaggaacttggtgtgcagcctgcaggcacttgacatgtagcctgcacctggcagacacttggtgtgcaactttc

SEQ ID NO: 251798 - DNA, 1200 bp, Cannabis indica
ggatcggttccatccatgggatgctttaactgattttttattggattggattggatccatccaatggatccaattgatgaatccaatccattttagccactatttaggctgatttcattaaaatatataatttaaaacctaataatccaacatagataataaacaatagtttcaaatccaacctaattttcatgatcccataataaaaatataacacaaatctaatttaataagcaaaagtcttaatatgtgtgcaagtgcacagtaaaacctattaataattaatatatttttttaaaacaaaataattaaatatataaatttataaatattaaatatgattggatggacattggatgatattggattggatcggttcggttatccattggatcggatgtctcatccaacatccgacatccgatccaattggatttttaaaatttgcatccgatctgatccaattatgattatatatccgattctattcgatcggttgggattggatcggtcaattgggattggatcagataattttctgcacacccctagtgggttggtttgaattcagtcattaaaaatgagcgagtttgagtattttttttacatatggtgagtctaaattatccttgcctgtagacctaactaatttattattattattgttattattatatactttttattacacaacttaactaattaagatcaaaactctaaattaaaatcaacactgcccagtactcgtgacccaaaccagaccactcctactgcaattcaccctctagtccagacccacaaaccaaacctcctgtattttttttttgttggggtaattgataaaggttaaaataacaaaagtaacaaaagttacacagtaggtgggggatttcttccatccaagaaagttcattatctatcctaagggcatgcttagccaatctatgagcctcaccattaaagttgcggctaacatgagagagagagagaaagagagatgtcccaagaaaactaaacaataagattttaatatcagaaaagataactcccagtttatagtttattcaaatacactgtctgaccctccaaagctgagaccaaagaaagtgaatcagaaaaaaaccttctctactggaagtcccacatctgagcccacgtaaacctcctgtaatgatcgcatgattaagcatagaaattagt

SEQ ID NO: 251799 - DNA, 1008 bp, Cannabis indica
ttttatttagggcacaaaatccaaaagaaaaatcataggcattagggttgttgttctggacacacacgaccaggtgattgcagctctctcaatgccattaattggcaatttggcattacatgaaatggaggctaaagctatttttcatagtctaaattgggtactttagatggaactgccaattgcacaagtagaaattgatgcattgatggtttcaattgctttgagagcacctttgtctgcaattccttcatttaaagatttaattgtatatattttaagtcttttatcctttttctcttgaatgaatgtagttcatattaaacgttcaactaatatgactgttcatgttttcactaaatttatttgaaaagtagatgaagcttgagaatatacctccactccacctatctacttgtcaaaaggcttgagatggaaagttggaaatggacagcgtgttagatgtgctaccgacccatggcttctaggaaacacaacatttaccccttatcactatggaagggatcccctttttacggtggctcattacataacgactgacagaaaatgggacttaaggatcttgaaagatcactttgggaatgtggatattgagcgtattctttctatacctcttgctcctactcctagggaggacatgctcatttggcatcactcggacacaggctattacatagtgaaatccggttaccacttagcggtgagtttggaatctatggatgttgattcttcctcatcatctaatcgtcaatggtggaaccgattctggtctctgaagctacctaaaaaagtcaagatgtttgcatggcattttattaatgatgcacttcccactgctgtaaatttgatgcagcgcaaaatctcaacttcatcagcttgtatactttgtctatgtgcttaggagtctgtgggacatgcaatcttttgctgtactcgtgctaaagcagtttggaagaagtcacatattaatgtgcttatgcctaacat

SEQ ID NO: 251800 - DNA, 741 bp, Cannabis indica
atggcagggaaaactaaatagatgaactttagatataaatttaacctatataaaatccaaaataaaatagttataactataaagtataagatattcttgcattcctaatctctgtataattaatacaaacaaatatcatttatttaatatccctttaccaaacaacataattaattaaaggcattactttcattctcttttttaatattacattcagtccatatctcaagttagttattaattaatgcttttcttatgtataaacaattaatcaattaattaatttcctgctacatagatgcttcaaaatatcaataatatataatttgtgtattaaaaattaaaataattcaattccatgtgagaccacttcccttgttgactcacccacactgtgagttttatcattttcaagaatctctaaatatactatttcactaaattagtatgaaattttcacaactttctaatttaagaatacactatttctcgtgacatatagattaaggacatggtagttcaattgagtagaaccgctaatcatggatacagaatccataatttctatctgaaaaacgataatttctttcgagcttggcttaatagagataaatggttgagtacttatttcagtaattatattaattcactgaaatattatttataggtaattaagtattttaaggataaaatatattgaatggtgtaacggtaaatctgtccctactcaatgtagatcat

SEQ ID NO: 251801 - DNA, 703 bp, Cannabis indica
ggctctgacacagagccctgaaactccaattagaggacactatttccaaacaccaaaagcaatcccgttttcatcttgaaaattttctaataaacgatccttccttctaaactttggtctgtgactcgtggtgccttccttcctactccccccttcctcctttgcaacattttcttaaaattcaatccgcttgcctctccaacattaaggactggcaagcttctcaaccatctcttaaactccaaattgctagaacgcaggctgaacttgaaaacttgttgaattatgaccagcctggtcctcattctgctcaacaaatttcccacctccaatctgagcttaacagacttctccttaaagaagaaatcctttggaaacaacgatccagagttgattggtttcgtgctggcgataaaaatactcggtttttccatcaaaaagcctctaatcgtaaacgcaataattacaatcgtggtttaactcttcctgatggttctatcactcatgacactcagaccatattcactcaattccactcctactatactgaccttttttgctctcaaggagtttccccatctgctatttcctccattctccagggtgttaacactaccctctcttcttcccaatccgcttttcttgctgaggagttcactgctgatgagataaaaacagccatgttcagtctctctggagacaa

SEQ ID NO: 251802 - DNA, 1833 bp, Cannabis indica
gggcataaaacccaacaggacgtacatcgtccagctcctcgatctcttggacctcagcgtccccttcacgatcctcctccatcttgacggccggatcatgttcggtgctgggcaaaatggcatgccgagtaacttgaggatcagatgcgtcagccagacgcgtggttctctttttacgagccacttgagcaaagtggagaatgcccttcgctagaggaaggtgggctagaacaaagacgaggatgatcctcgtggagaagttgaagcaggtcctggtcgatccgatgtccgtgttcccaagactcacatgagttcatctgcaaaagaaaacacacgagatgagtgtttggtcggaatattgaacgataaataagcaaatatgccgaccaggagtactcaacagattaaagaacgattatgttcaaagaaaagtcagaactcaagaagtgaaaaaatttcttgagttagggcaaaaaagttcatgaagcttagaataagcaagatgaaagatggacgttatgcagttcagaaacaagcattatggctgtaaaattgcacgaagacatgataaagaagaatcgcagaggtttctaaacctagggtttcctaaacatttttctacagcacagtagaaggtgcattcgaaatgtaaacatgaaaagataagcataaaggaaatcaaaaacttactcgagagtcagatgtctgagttcgagcaacgtcaatccaacaagcagtctgtatgaaggcacttcggcaaccttgaagccaagaatttctcttttctctctgaagcttacttaacaaagaagggtgatgaaaatgagtttatgtgccaaccttgaagccaagaatttctcttttcgctctgaagcttacttaacaaagaagggtgatgaaaatgagtttatgtgccaatgttgttggtatttataagcaagtcacgaaaagaggtaattgcctcaaaggaacctcagacgctacagtttccctccttaaaagcgaatatcggaaatcaaaaataatcaagtgcagccgtgagtcgtggagagagaaagtcagatttcgaaatattaattatcagagcatttattagccgaaaaccgaagggacgcccagtcagcctcacatcgagtctcggacggtcgcgctcaacaagtgtccccatctaaaggtagaaacaactcggatgaagtctacacacaacttcggaagtcccgtacagacttggggggcaaatgctatcccaatttttgcactctgacgtggcatcaaatgaatggtgacacgtggaatccacttggaatatcagcccaggaagcatagtctgaacaagacatatcgctggcacactcagagcaaagtattcagcaatctgcgcagagcaaccaacacttagcgaattcagctttcgcatcatgagtcatcagcacaatccctataactcagggattagtttacgtggatatggcaaacacacgatcccactatcaatgtattcagcctcaatcccacgatgcttgtattcagcattgatcccacgatctttctgtttatacgcattgtaacgagagggaaaactcttcctctccaagcttactagccctataaatattgatgtatattcactgggcaagagattggtcaaaaagcagttgagctaagactatactattatctaagaatgatatatttagagatactgttgtaagatactattgaaaattaattttggaccaacttaaattagaatgttttcttagatattaaattagaattaataattaagctgaatttattctagatactaaattatttctattttaatgaatt

SEQ ID NO: 251803 - DNA, 766 bp, Cannabis indica
ttacctaaatgataagcaaatttaataccatttagacatatgtagacatacttagtaccaaaagaataactttctacaaacataataatttcaatatttttacaataaataaataagccacatgttacaaatgtaaaaatttgaatattttttgcaattatagaaaataaattgaacaattaattagtattgcaaatgtaataatttaaaaacttttgaggcaaatatctcattttaaatatcaagatattattgaaatggatatatagagggagagatattttttttctttttctgtaattgaatatctagttacaaaactgctaataagtaaacgtaaaatttcattagatattaatgtctaatggtattatagtatttaacaacaatactcaatatttccttttttttgttggtccaccatagttgtgatgtttttggtaaaattttagtgtgagaggatgaaaatgagttgtgctaacgtgtgtacaccttgtgccacccctttggcttggagagtattgttatgagacatttatattgtttagtatggtgaaatgttgctttataattgcttaaatgttgttttataattagttattgaattttataatatttattaaagtagaataagtagtacttgatattgagttccacataccataaacattctcagagcagactcggctctgggcataggcggattaggactgtgtctagggcccacttagcccagggccaagaaaatatttatcttttaaaatta

SEQ ID NO: 251804 - DNA, 579 bp, Cannabis indica
ccgcatatgattaatattttgaaatattaaataattagggtttatgtatgagattttattattatcaataatattatgattatggaaatttatttgagtgcatatatatttatttattatgctatctatgtaatttctcaatttctgtgattgtgttcggaagctgtggaaagcgacgttgggccatagagagtcgcattttataatttagaatttattcgggaaatcattgctaagttttagcagagttggtattttcggggtgtggtaaatgaccaatttgcccttgggagttggtggctagctttagtagttagaagggtaattaggtcttttctttttaaaaacccttgttttggcttttagtgtttaatggctgcctttttattttgttgactttgattttaaaattaattaattaagaaaagaaagaaaccaaggaagataagctagaagaagcttagaagtgaagtttctatcttcatctcactttccctctctctttcgatccatcaaccagcaaggaaggagattatttcttgctgaaatctttgaattctaattgagtttgaagttcca

SEQ ID NO: 251805 - DNA, 844 bp, Cannabis indica
tgaaacaatacacataatttaaaacaacaaaacataaatattagattagttatgactataataaaaaaattaaaaaaaaaatgcagcaattatttctttgattaatgcaaatgatgtgtaatttatcatcaaaatgtaaaaaaattgcatataatttaaatacaatatccataagaatataaattagattagttaatctgctatccccttatttgcccattattttattgctttgtcttagtttaattttaaatcttcaaaaaaaaaaatattttcacaactaggaattcaattgtctaggcaagacaccttagtagtaaattttcacaactagttgtgtcaaatgctgaaaaaatcgttttggccggtttgcatctttggggccaactgttgattctttcatttgggcagtcaggtgtggttttaggaccatggggcattaaagctgtaaatgatacacttctaaatttgctacatcccttaacttggtccaatgcttaaattcagattttctatgtatacccagaaacatatgttttgctttgcgaaacaacagaataagtgtcagaaataattgttattccattgatgcagctgacaatggagtgagtggctgccattagtactgtcattgcttagcagtggctttaatttttactttgttggccaataataagggttcaaattctttagcaaaatctgtatcaacactaaacagtccagttgaggaagtgtacattggtctgtgcctgaaataatatgagttaaaagagtacatattagatttgtacttataatcaaatattggttttcaatgattaatagctaattatttaccccataa

SEQ ID NO: 251806 - DNA, 726 bp, Cannabis indica
attaatgtgaatcgtgcaaattccagtttatatatcaggttttgatataaatgttgttttttgtatgaatttttacttcaaaagtgtatataacagtgaaaagacatataaaaacaatgcgtgcacttttatgacaattgaaattgtggtcgacatgctactatatatattattaaataccatttcaaaaaaaaaatattattaattaataaatatgaaatatgaaaatgtctgcagtatttcttttaattattatatactataaagtcctattaaaataaattaaatgtgcaatcattctcgatttatagacagtaccgacatcgagcatcagaatttgtaatctccacctgcctaatctatatatatcaatagcataccctaaaatcaaatttattatcaaaaatacccttaagttattaaattattaatttgttgcctagatttgtctatctccgtagattctaaattttatctaagttaaattaattgcatgcttcgtggatttactgcttagataaatgagttaattattgaggacttcgctttgattacatgtaatagggagattgagataatttaactgctttaactttatctgcgagaataatagtatagaagttaagaatgattattgagggtggagaatatttaactatttatttcatatcatagtatcaattttaattcgttttttttatttttatttatgttattttattctaa

SEQ ID NO: 251807 - DNA, 1111 bp, Cannabis indica
gtaatgtaaataaaaaagtagtatttattgtgtgtcaaatttaacacaaaattatttaaatttagtacaagttttaatacgtattaaatttcacatacttcttataacactattaaagtagtagctttttgtaagtatattaagtagttttttttagaaaaatttacatgcacacatattttacaattaaattgtaaaaataattttgctcatttttaataccataatttaccttttaatttgatcatgaacttgtattttttaatattgttagtctgactctactgcagcctatgtgttgcatcctattattttttttttttctcttttgtctctttttctctctatttttaactttatcaatttctacttttttttttttttaataactttaaaaatagttatatatttgttgagctcaagaaaatagtatcattgccacctatattttaatgtaatcattttaaaatgtgaaaagtatatattttttcacttttgtcaaaatcaaaataactatttagttactaaccatatcaattatatactggttagttacatgtcactattgtataattataaaattaaaaacttataagtaaccaattaatattatgttaatttaaatatcatcagtcaccaccaaaaattccaacatcacgatattttttattgacatcattagtaattgaaaagctttttttatatcaataaaaaatacatattaataaaagaatgaatcattttcatgttgtgtgggaaagtaacttcatagttacttctaagttttattttcggtatcataagcaactaaatagttacttttaattatggtgatgatgagcaaatatatatatatatatatatatattttcatttagttaaccaaaagtaaccaaattcgtacaattattttctgaccatatcgttacttacttaagttaaaaaaattatcatcgtgatctactctttaatgtgatcattttaagatgtgggaacatatattttttccttatttcaaaaataaattacactattgaggtaccgatgataccatatactgattagttaccattaaattatattaatattttaaagaaaacttaatttgtaa

SEQ ID NO: 251808 - DNA, 523 bp, Cannabis indica
atttactcttcaaagaacaatgtgagaaggtaaaaaaatttaagcaatgccttcatttatgatcagtactctatatataatctaaaataattgtaaacattatttttgactttgtattttacaaaaattattattggacttattgttttggtaaataataaattaaactttttatttactaaaataataaaaaatagtactgtgagtttaattttttttaaaaaaataaaacataacaataatctatctaaaagtgttaattatgataagattagttacattttttacaaaagttcgtgctaaaaattatttttaaattggttatattaaaaaataaattgtaaaaaattaaatttagggtagtagttattttgtactattttaaaaaataaaggattcaatttatcatataataaaataaattgtctaatagtataaattttacaaaatgcagaatcaaaaattatatttgttagaaaaattaataatgaacccaagatctatttgtatataacatagaaca

SEQ ID NO: 251809 - DNA, 510 bp, Cannabis indica
actagaagtagtaataatattctcatcacatttaactaaagttgccttattggtctccaacccattagagagttgcggctcattagcattaaccggcccagtggataatgtgtaatccgacccaagagacactagcttaccattaccattagtatcactcggcccaccaataagaaacccacccgtttctctcaccacgttctcagcaaggttagaacaacaaatggccttgtcatttaaattagaaggcccaggcccattaggcctcatgacgtctggcccactagaaaaaaccggcccagctacttggagagatgcatgaagtgaacggcccagagaaacaatatgtccacctttattatctttattcaaatgaggcttatcattcaaggaacggtcataagtagggatagtaataggtggtactataccaggcaaaccagcagaagcctttccattagtttcagcttgaaccccaccttcaatacccgaaatggcaaccggcgtacc

SEQ ID NO: 251810 - DNA, 624 bp, Cannabis indica
gatttcttactttatggtgcttttgcttccgagacccgcaaggatgaaatgttttgttgattttgcttcggctactgatgggggtgttgttgcagctgctctatttttgctatagcagctgctaaagtggtggttaagtctcctctgcatggggaacttgaagctctggggtttgctttcaatatggcggctcagctgggagttgatgttggaactctctactccggtgaaggcgttatttgagaggagatctccgcattggatgctgcactatacttacaatagggtcctatctttggctgagcatgggaatgtgggggtttgttggacttctcagattaataatatggcatgcgagtcccatgcgagatggggtttgtctcatgtttgtaatggtttgcttcggttttgggaagtgagtccccatgtgctcactaaacttttagtttcggtttaatgaagttatgttttccagcaaaaaaaaaaatcatataattaatttaaaacataaataccatttccctccaataactttttctttaaacaaaaaattagctaataagtttgtggtgaggtcaaaacaagttagtgataatgtcaaaaaaaaaacacaattcaaaacta

SEQ ID NO: 251811 - DNA, 788 bp, Cannabis indica
gttggatgaccaactttgcttttattttatctttttatttattacctcgtatctttacatttaaacttaatatatttgcttatttgtgtttttattcacaacttaaataattatattttgatcaaacttgaaatactttaagtaagaatttccactgatcttgtttttcctttgattaagtagttattaatctactatgctttttattcgcgagaagttctaatctgccatttatgacttagtaagcaaacttaaacatactttggatatttcattctacgaattactttgtacattttttgattgcctatatgaatagttaggccttctattcatattttaggttaagtattattttttaaggcatcttggtgcctcgtttataatacatgcctacacaatgcaagccgttaggtattcaatctcgcatgtaacttaatgttatttttatgagttaactctcatttacaaccgctactttgattctcctttctaacgagaaaggttcaatttttgactttacattgtccattgacaactttaatcaattatttggaaaattttttaaaatttaaagtggagtgggtttgcaatatatcatgtatttctagataaattccagttaatcatacacatatatatgcccctcaagtaattttaaggaaaaactttgtaattacttgaataatacttcaactttattgataataaaaatttcacattacaaagaagaaatacaacactaagtttactggtaataacacgcaaatgttcaacattccaatggt

SEQ ID NO: 251812 - DNA, 630 bp, Cannabis indica
tagtataaatcacgataacacgtctaaactagtaaggtgttacagatgtggtgaatttagattctttaagatatttttcttaaaatctcctcatttataaatccctatatttatcggatcgattttgtaaggccgagtgattctagggatttagtatttaatttcttatatatttcttattattttaagtaacaatatttattgtatctgccctataaatagtggaaccattcaattatttaaggatttgagttcctattttttagagggcacttatggtgtcaaaatacttgtaattatttcataaaggttgttaagaaactcacctaactaactctttgtgatcttgatactcatgaaagtaatacagtaaaaagcggagtagaatattatcataactatggggttgaacctctatcaaattcctcgtgttcttatttactcatacatatcatttagttattattctttttcataatattattgctttaaagacttagttgttgggttctgtgccctaaataaaactcatttcaatataatcagatttacttattaacaaagatcaaaaataacactttatgttgcatggttcacataatttatttcatgattatatatataatgtat

SEQ ID NO: 251813 - DNA, 591 bp, Cannabis indica
taacaattttcacatgatattagcacttcaattcgataatcatgttccgtatactgcactagttcactcagctatggtaatttggtgttgcatctctcttatttttttttttttgaaacaagtagtatttagtttttgatattaagaatattaaattttaaaataaaataaataaatataatgcatttggaccctccacgtgtccatatttatgagtttacggaagtggtagtaaccgtgtaagataattgtaacattgggtatttttacctccaaaaataaaaataaggtatttaagtgtatagaatttaaaatattaagtatttatgtcgcaatttatcttttacaataatatagtcctttcattatattctatttaattttattgtgaaaaaagtagtgctgtgaattaaataggtacaagaataacgaagggatagaattacgatactttttatatatattttttttaaaatattttattctattgttcattaacataaaaatagtaaagaagtatttaatttcaatctatttaacaactaatttttatcacaaaagaataacgttaatataaaaatttttgagaga

SEQ ID NO: 251814 - DNA, 512 bp, Cannabis indica
acaataaaaataatattaaaattcatctcaaatcactatcagacaagacaacaatattatatttactattctcctaaaaaggtaaaaaccctaacaagtagaaactcctctctcctagcggcgattgggtgcttcttctttggttgggatctcattccagtgatcggttcagtctgacgaggtactacctcatccctaacatccaaagcttcctctgctctcttctgtttttttgagatctaaacgtccgtaccccgcccgtgcctccgcccgtgtctggccgtgccctgtccgtgtccgcccgtgcctgcttgctgactaccgagtaccgaggtatctctttcactttgttgagtttgtttagttcttattaaattatatatacatagtacactacatgatcataatttatattattgataactctatgaaaatagagttatttatatctttttggacattaaattagttttgttctcaagtatttttaatttattttagtgattttattt

SEQ ID NO: 251815 - DNA, 532 bp, Cannabis indica
cctagtaacatgatagggcccatctaagtcaagtggttttttcttttaggttgagccctcataaatgtaccataaggcttagcaacgtcctttggagatgactcaaacagtttcaaacaaaactgttcggaatgatcaataataccacagatgaaacaaaaagtgggaataaactcatacttgaagttggtccaaaacaactcacctcccatatgcttaatcttcatgtgtctttcaaggagacagtaatatcaacagcatggacatacaaataatcacgccacaacccttgaaagtttttcgtatctgtttccacaagagtgctaatatacttagccaccccacataatacatcgtcagatttgaatccatacagcaagtcatgatcctgaacccacaaattcagattattaatcacaaaagatcgtggatcctcccctcgctttaatcttgcaaacacaaattacattctattgaactttcacggagaaccttccacaactcttttcagatttagatcatgataaaatta

SEQ ID NO: 251816 - DNA, 552 bp, Cannabis indica
cataattggtcacttaattttgtatttcactttattatagcatatacattatacatatgtacccacaataggagtttaatccaacaattaatacaaatcaataccaaatataatactgtattaaataatactagtacaatacaatacaatctattaaaatacaatacaattcaatacaataaaatacgatgtactgaacgaaccttatatgtataacatttatacatgtggctttagtattgaaatacataattgagaaaaatctaatacaacacccctacgataaatgaataaattaaaaagaaaatgctattaaaatgtcctcattcatgagagcaaaagtgttgctctcaccaaaggagtgccctatttatatatataaattttatatattttctaaacatacagcacactagaaataaataaatatagggttagttaaattaataaacataaatttttgcttggccaaagagctaccctcagagtcgttcagccaatgtcaagtgaaaatgtcgcttagctacagggaggctgaagtcacttcctaaa

SEQ ID NO: 251817 - DNA, 691 bp, Cannabis indica
tagtcaattatagtgaatccactagtagtcatgacgagacgattggggatgcataaaggatcgcacgagccttcctaaaatacaccagtcattatggaaacagacttgcaacgacgattgatacccgatagtgatgatttataaccaacgagtaactttgaccaagatcggttctagtcaactatagtgaatccactagtaggttttaagagggtattttggtaatttaacattttaaattttggggtttctccccaaaaggtgcaatcaatacacattggagtgtccaactgctagcacacgaaccaaagcacattttttaaggtgaagcattaaatgctcaaaaacatgaagggacagctctatttaccaacctcgtagtctgagcatatgtctccccattcacctagtatgtagtctgagcaagtccacgcatgaacaaaaagttcccacacagacttgggggaaaattttgtcccaaattttgcaccagttgatgtgatgttcatctaggtgacacatggaacatttttaagacttggacaggtgatacctccttggcatgtcgtctagagtgggttattcctcaaatagcttatttaaagaaaaagttggagcatctggacagggtaaatgacaatgttcgactagcatcgatctcacagtaagcccgcattgttgggttttatgc

SEQ ID NO: 251818 - DNA, 1122 bp, Cannabis indica
ttccacatatagctcatattacattcacatatgctatataaatctccgtaatttataaattacgcttatttactcacttatagcaaaatttaaattttatgctgaaatagattagtaggatcataatctcacttattacctaattaacccataatataaatataaaccctaattatttaccattaggcttatcaggatattaccgttgacatcactgtaattgtgaataactatatattatggactgaacagattttgtacacatcaaaccataaacatgaaaactacatgtaaacataaatgagttctaatcttctattgataacaaatcagattagattgaaatgagttttatttagggcataaaatcccaacaagtgaatgaggcttctatagatattctcaatgatcattggatccctacaattaaatgcatctcttataaggataatcttgtcccaccctcaagatttgtctcctattttatcaatcttcttggttattgggatcttcaaaagcttcaaagtcattttgaagaggaagatgttaaagccgtcccagctgttcctttatccttgagcaatactcaggatagcttaatttggggtctcacaaactctagtatctttactgttaagtcttcctatcatcttgcctcttccactgtccatacggcttcctcctcaaatccacattgtcttaagagttggtggtcatccttatggtctgcgaaaatcccacataaaattaagcacttcatctggagggcttataattacaatttccctgtggctactaattcgtattccaggaaagttctcaataatccagtttgttctagatgccacaatcggatggaaattgtatctgctgcactgcttgactgttccaaagtaagagaagtttggaagtattctcctttttatcaattcttccatattaataaaagacttgacattaaacagtttttgtaaaaagcttatgaagagttgagtagtgagaatttggaatctatttgtggtttgctttgggctatctggaatggcagaaatcataacttatttggaaaagctaatcttttgcttcggaatgtgtccaactatgtttcttcttatcttcagg

SEQ ID NO: 251819 - DNA, 547 bp, Cannabis indica
tattatataatatatttatatatggaatacttatgggtattactcattaattggtaataaacaaatttaactataaatattaattttaaaaatattaaaccattacatcttggttaataaaagagaaatttgaatttctatgtttactttagcaacttaattaaaaaaatatatatcaaaaaatacctctttttacactataaaaaatatatttttatctaaacactactggtgtcttttattgggtcattaatggggtgtttattatggagataagtagttgtacatggaaagtatttgaattaaattctttgttccacaaataggtagaattataatttagtacactttagtttcacatgccctacattctcaggccatctccaatgacacggcaaaaacttatatatactatcatttttccctcaaaatgctccaaccacactgcaaaagccaacctattttcatggagctctacagcgtcccactaataatggtgggcactgtagactacggtatatatttttttaatgattaaataatatat

SEQ ID NO: 251820 - DNA, 1710 bp, Cannabis indica
tccttgtaaatgatatttcagtaaactaatataattactcaaatgagtactccaccatttaatctcgctaagccaagctcgaaaaaaattatcgtttcactttcatgtatttaaagaagctatagattctgtatctatgattagcgctctcactcaattgtaccagaggaaaaagcagaaatgacggaaatggcgtactacacgatcatcatgtatttatcaaatagtgtttgaaggaaactcatcgcagagaagacgacgaaaggagtttgaaataagttagaagaaatatacttaaagccatcaattgttagtaagattaatttgttaaaaaggttatacgcgttcaaaatgatttatttcctttcttttaatgagaatattgatagatttaatgagattatggtaggattagaaaatataaatcacaaaattgatgaaaaatcaaggccatcattctgttgagatcacttccaatcgcatatcaagaagtcaaggcagctatatatcaagtatgatagagatgttattgctttggaagatgttcttgccgcacttaagtcgaaagatttttagttacagtaagataaggaattcaagaaagaagaaatatatcatggcaagagaaagatcacccgagaaagtatgttcaaagagtaaataccatcactctcaatcaagatcaaagtctagagataaagaaacaaggaagtgttacttctgcggagggtttggaaacttgcaaagattttgcaagaagtacaaggagcaacaaggcttcaacaaatcttacagatagagtaggaaggacttctgacaccatcaccatgggaaggattctgctgcaatcgcagaagataatgataattgctccacggagagttgttctctatctcagagtcatctattaacagggagtggattcttgactccggttgcacttatcacatgtgaattcttgataatcttgtctttgctaattcttttattgtttaaagtttagttgatttgactctgcaccattaatcgtaattttcccacattaattattcaatatctaagtacttgctatatttgtgtttaatattatattaatactcattttttttattttattttattttagaatgaaattgtgagtttattaattaaatttattgtgagtttattaatattatatagggaaaattactttatatatatcattttttttttaaatttacggtttggattgctcaagtagtttgtatgtgagttattatgtggattttatttaccatttaaattgctctgttggttggtatatatgtaggttactttttaattgtcatgtagaatttttataaaaatataaaaataaaactgttttgtagtgtaaaaataaaaaaattgaaaaattatatcaagtttttttttttctaatttgttaaatataaagaatgtacctaacgtggttttgatgttttaattaataaagttttattttaatttttaattaaactacttacgcacatggaattaaaataaaaattcgaaattgtgttaaatagaaaaatggaaattagcatgttctaacttcataagtcttcttataatggtctttttctatatcatatattaagaggatgactttcaaatttcttttgtcaaacaattatttaattaaagcatgcagcataatacatgcaaattatcatgttctaactttat

SEQ ID NO: 251821 - DNA, 988 bp, Cannabis indica
ctttggcgtcggaaatgctggtcagcagcaatcgattttataccatccacccgtgtaaaatcgctgtacgtcggacatgctagtcagtagcaagcgagagaggaggaagaagaaagacgagaagacaaaaaaaaatattatgcaacttggtttatttacttctatcagttagggtttcaattgtaaacccttattataatattttcttttattttttaattattaaagtatgtttacagctggttatttttttttatctttttttctcaaaaaactttacagcagtttttttttttttaatttaagattatgatatagtgacgcgccatgtgcgtcgggacatatttatccaatcgcgcctagcgcatcactataaaccagtatttttcaaattaataaaattaaaaaaaaatagattttactctttagtgacactctatatttttagtgacgcgcattaaaggagactaacattgaatatttagagtctaattctgcaagtcactaaaaatcactctaactctttagtgacacacaccttttgtgcacgtcactaaatagtatcactaaaagaccaaattgtggtagtgacattataatatggagatgagtagccacattttttgaattcaatataatatattttaaaattatatatgctacttatcttaaataattatatttacattatatttgtgatatttatttttaaattaagaaaataataaataaataaatatattttatatcaattattattatgtatggacttaataaaaaactaaaaaaatagaaaattaaggagacaacaaatagagttatttaaagagattttagagtgacatatcaccgtctcatatttctcttttatatatatagatagatattgttatattattttatataatataatatttagattaaataattaagtatgacaaagtattaattttgtcaaattgcaacatacattatggagttataaaat

SEQ ID NO: 251822 - DNA, 1501 bp, Cannabis indica
atgatgccatcaccattatttttacaagagaatctgtgtttgtaacattaattaacatacaatgagattttaatgtttttcaaaaaaaaaaaacaagactttaacgtaacaataaaggaaaaaaataaaaaattcaaaaaattaattgtttttttacagtattattttttattggctgaagactattaggtttttattatgagaaaaatatgaaatgatctggtgtaatataacaatcaagaatgtaatttaattattttttttagaaaaaaaagggtaaattaagtattataaaagattcattaaactaaaaaatagcttcccgtgtttttttagaagcccttcctaaaaaagctggtgagtcattgcttctttaaaaagcccttttaaatcaaaaaagctcttctcatattttatccaaacatatctaaaagtagctttgagacttcaaaagctcttccaaagccatgccaaacaagcccataattgttagttatcacatcagtatcatgtcaacgccacgtgtgtaattaatttttaaaaaaataatttaaaattttaattttagtttgacgtaattttcttaatcattaaatattgttttttaattaatgatttttttttcaaaatgcataatttttattttttaatgttaaattatacacgtgatgtggtttattgactaagaagtcatgtcatcatttaatttgctgtgtataacaaaacttaacagaattaattaaggaaattatagctagctattgctctcttggtgttaaaatttggagataagatgaatgaggttgtatctcaaaatcaattggcaatgggaagagtagttcattcatcttatgtatcacaatttatttccacacattagcaatgtgggactaactcttaatacttggagctctttttacaattcattcattctcagatctctttctttttctctttagtgcacaagtaaagcttagtcgattttctcgacacaacaaattaattagcggtggcaaaaatcttaattcttgtatatatatatatatagtagtagttataaatttataatagatatataaaacatatgattggagggcactaaatacattcttggcattatttcttatcatggactctatacattgttcaaaatgaaaaagaaaatgaaaacaaagaaaaagcctacaaaatttggcttttgatcttcataattcaatcatatacatatgcacacacacgtacgtaccaaaaccaaacaaactagatatcggagatcatcgactcataatactcgatcatcatcttgatcatcaataataaaagaaaagaaaaactaattattattattatatgtacaaaatgaggttgcttcgatcttcccaataataatgaagagccaaagctagcctttgatatattattattattattattattggacgtagttttgttgaggtttcaagagaggagttttgatgttattgtcatcatcatcatcatc

SEQ ID NO: 251823 - DNA, 785 bp, Cannabis indica
cttattaattccaccatagagttacagtgtcacctatagtttcatagttgttactctatcagttagagatacttgttctcataacattgggaattaagcacttaggccttttataattccttatataattttactgatccattcaaccaccactcagtatgagctcacttcttagtttcttttaggccatttctcggacagtgtagtctttgattcctttttcagtctcttgattcttgtacaactctattttatcttctttgctaatctcatctttgttgcacgatattctattattactttcaatcatgcttacttaactttgaaactagcaagttttccatttttttattcgtccgaattaacaatctgttgttgtagtggtcaagcttattcttgtagcgacgatagacatgtgtcgttaattttaatgagtgtttcttccttcataatagtcttccaaggcaacccaattttctatacttacgatatcgtcgattgctccaaccatatttgtgcattgcaagcctgtttaacttgcaaaaattcatgctttctaaattatactgccaagacctccaaatctttgaacccaactcataatccaatactgattattcacttttaactaacactatatcatatatgcgctaaaatatcgtaagcatactggtaacttattaaaacgagttaaaccctaccatgggttattgtagcccagctattaacttactgttaacctttaacaataggttaaccatacaatctcataatatattaaccag

SEQ ID NO: 251824 - DNA, 716 bp, Cannabis indica
tatacattaaacaatcatgaaataaatcatgtgaaccacgcaacataaaatgtgatttctgctctttagggcacaaaacccaacaattttttgggttcattttgctttcattactcattttcatgttagggcaaagtttatggtaatgcttttagtcgaatcagatttctatggtgaactagttttggtgaactccgtcgtaagtcgtagtttcttgtttgtattctactgtttctttctaacttgtgaacgacttctccatttagggacaatctagggcatgaaacgattttcatacttaggcccctccttttgctttttctttcgttttttttattttcctccatgttcgctacctttgggatatttgcacccggtgtttgcctaggagcatccctagatttctcatttttgggcagacatccggagggggcctctttccagcggttaggggacccccattccctctattaatgtttgggttttgtttggggactaattgctggatttctctttttcagatgagtgaggttctaggcaaccttcacgagcacggtttcctcagcttcgattaggaaattttagaattttatcaactgcaagatatgtctacccccgcgtccagatcaaagtcctcaggcaaagggtcgaagaccttggccaccctggaggaggtgatgaaaggaacagtgttccaagaaaagtgcacttgtcga

SEQ ID NO: 251825 - DNA, 1013 bp, Cannabis indica
cgtggacatctccgactgctatgtggcggtcggcgacggtgtacctggtctgaaataataaagatcttgttttgttggctgaagttaacgcattattgttaactttcaaaaaataaatattaaaaaattaataaagaccttctagcgattaaatattctattaatatttttctttaagagaaaccaactaagctaaaaagaaggagaagtaagaaaataaattttaaagcttattaaagtataaaaagaatatatgaataattcataatagttttttctatttcgattttacttttctttcatcaattcaatcaattcattctttaatcacttacctaatttattctattatattgtttgatttgaaattcattcaagggctttttgtttgttgaaatttagtttgtaactgagattttattatttttataaagaagtcacacgattggagcttatggcatgtttactaataagtaatgggaatcaatagtaaggtaatcattcccttacatttgtttacttgcattattaaaattaggaaagggagaagttgattaaataagggagaaaagaaagggagaacttcccccaccaattttgtaaggaatgccattaagggtaatggatttttattatttttattttatttttaatattaaatatataatgacaattttgtcctttaaaatatgtcttgcaaaataactaccatataatatagtttaactcaaaagggcaatttagtcaatttaagcattccgattacgtttcctaataaagtaaacaagataaatcacaactattccatttctaaaaaattttagtaaacaacatattacaaatattgattccgattatttttcatttattccgttacatttctccattaatttattccgattctgattactgtatagtaaacgtgccattaattggtattgttggtggccaaattcattggcaggcctcaaaagtagggatgcatattttctccatggggatggtgccccgcg

SEQ ID NO: 251826 - DNA, 594 bp, Cannabis indica
agtaggccaccattctatcaccttgagctgtgtattcactcaagacttgattcacaactaattgagaatcgttgaatatgtccatatggttagcctatacttcatgcgccagcttgaggccagctatcagggcttcatatgcgccagctttgaagctgaatttgattgctccgtgcagttgttgcccccaggtgttgtaagggcaatccctgcaccaaacaatcagtcagtgcagcttccatcaacatggagtttccgtgttagttctttgagatttttttggtgctcttgctctcgcttcttctctagcttttgctattctcttgagtcttgaggggtctcaagtgttgagttggtgcactcatctatgaagtctctaagggcttgaccctttatgattgttcttggttggtatgtgatctcgaattggccaagctaaatagcccatttaagtagttagcctgatgcttcaagtttttgtaaaaccttccgcagtagttgatcggtgtacacctttatggggtgtgcctggaagtaggggctcagctttctggaagctaaaagcaagttctaggtcagcttttccatgagtgg

SEQ ID NO: 251827 - DNA, 654 bp, Cannabis indica
cgaatcaccaccaccaccaaccaccatcaatacaggtaccaaaaccaccactactcaccaacaccatcattgtaacttattttcaaactcaatcacacagaaataaagtttacacaaaatccaatctaacaaacaagcaaacacacatatatacatttgaagctccaaacccagatctgaaaatacctaaaaaaattaaacaaacccatatcacataaactcaaacaaacaaatacatgcatctcaaatccatggaagaaacaatgtaacaaacccagattgaaaaaaaaatctcaaacccaaaaacgaaccaagatctgtcaacactggagccattgattccgttcgtcggtgttgcccattgtcctgtcggtgcttcccactgagaagaataggagcgagaaagacgaagaagacgaaggagaaatacagaacgggagagagtgaaaagggtgtgcgatgcgatctagggagagaaaaatgagggtgcaatgggatcaacgagttttgtaactggcaaggtcatccatggcctccgattgacccaatagtaccggaggtagcccatcgcagccatgttatcgagccaaacacgagagagaggagaaagtgagcgagagagagaacagacggtggtctagttcggtggtctgg

SEQ ID NO: 251828 - DNA, 2420 bp, Cannabis indica
ctacctctttcccaagtgtatggataacccgacaaatccatatcatgaagattgcaatcatttaacacttcttgaaaaccatccagcaacgtctgagggtacgggctaccccctcttttatccgagtgagactgcgtgttatttaaatcgccaataacacaccaaggcaaagtgtgttcagtagagagggaccgtaagtgattccaggtcttgtaacgaaacgatctattaggttcgccatataagcctgttaaacgccaagcattaacatcctcaccccccactttgatatcaacatggcaagcagagtatcccaacacccaagcatcctcatcatgtctccataacatcgcaactccaccactatggcccctcgcatcaactgaaaaagcaccatcaaagcccaaagagacccgaagtctctcaactaactcttttcgacttaaagtttcacaagaaaaacaaagttgggtttcttgtggaccacaaggtccgttaggaattgaaacacccttgggttcccaagcccacggtaattccaacttaaaatgctcataatgtacggtgggcctgggaacccgaacccaccacagacccattttttgagcccaaattcaagatcacagcctctacttcagcctccacgttaccacaagtcatctcctcatctgtattattcatccccattggtaattccccactatgtgacagctttctccgctttatttttgtaatagtaagtccttcttcatttattccaataaagtctgcatcatttaaatcaatgttctctcccccaacattaccagttggtgtatcaatcacctttaaaggtcttttatgatggagattgtaaattgcagttgtagacatatctccttgattaatgggattgagatcagattgtattggcctgctacgatttggtatgccatcaattttggcatcagcattcataccagtatggctccccgttgactggttatgaccaccggaatgtctctgcaaaagacattcagcttcaaggcgtttatcaaactctgtatctcccagttcagtacgcaaacactttgctccgataagcttcgtctgtcttcgcagtggtgctttcatgaaagtgccataaggtttgattattttttctgtaggagtatcaaacaaacgcatacagaaacgatctgaatgacccaacagaccacacttaaaatagaaagtagggacatttttatatttaaatgtgatccatatgaactctgtcttcattttccacaatttcattttatgctacaatggtttattaagatccatagatacccgaattcacatataatccctccataatcctaaaaaattcttagtatccgcctctttgaatttaccaatatagttccccacattagtaagtgtccgttcagtcatataaccagtttttaaatcatgtacctgagtccataaatcaagagtattcaggggtatcattctcgggtcttctccctccatcagtcttctaataatcagagctttacgattgaatgtccatggaccgccttctaagacacgagatatatcgatctcatggtagaactgaaacaggtatcgaataccaccattgagctccttaatatagacccccatacctggtttccacaaggcagctagagtctgctacattgctgagaaatcgaccgcaccttcattgagaaatcgaccaaccaggcaccatcgtgcgtcaaacgctactgtctcctcctcctgtatttcctcacagaacagaccaccagaatcctcgtcttcgagggtaatatcaaccaagtcttcattattattactactagatgccatgaaaacgccaagatgaaagacaaaagccaaatcagagaaacctcaacaggacaaaaagacaaccttaaacggaacaaaccatgtcagaggacaagaccacgactttctattattaaagtcatcaacattattgattcccagcaaacagaaacaacgcaaattttctattgaatatagaaataatcctaaatcttaaaaaaaaattatcattccaaactaaaaaacaatatatatttatatataggaagattatagcaatatcaaagtcaattctcaaaaaaataatttaaagatacccttaatagttgatactacatatatgttaaaatactaataatctaaattttgttctaattaatcataagaatcaaataataaataactaaatattaacagaagcttattagaattcataaaattgattttaccatagttattattccagatttgcaatgccatctttctagaaaacttaatctcttgatgatgaaaattcaagtgtaaaaagatacgatacaaaataagaactattacttattataactacaatcaactttattttaagggtaaataccatt

SEQ ID NO: 251829 - DNA, 750 bp, Cannabis indica
tgtttaaacaacatacttgtgagtagatctaagatcctggtaaaataaaatttccaacagttgactactgaagttcagcttgtcaccaagaactgcaattgtcagatggagcgttatgtcttcaatcgcagaaacgacgagatttacattatcaaccttggaaagacatgggaaaagctccagctcgctgccaaggttattttgctatgttcccaacgagatgtctcagcacgatacactttgcagcatatttaatccacatacgcattgacctagtaaaagcggataaatcacaattatgtgatttttaaataataattgcatttgttttacatgggacataatctaatctcataatttcaggggattattgttgtgaaatttcagtttgattgtaattaactgccctcctatgtaactataaataggagcaggatacactaaaaagggacgaaaaatcctttagagaaaaaaccctagttttgtatcaaaaatctaataagatagactcgtggactatgcagaattttaattgcaaaaccacgtaaaaaaactttgtgttatttcttttccttttatagcaattatttttgtgtcaatccatcacgaaataggctttaatttagttaacaaaaatatgcgttaacagtttggtgctttcattgagagccttcgtgaaaaaagcttaaaaaaaaccctccttatcaaaagaagaaaaaaaactttctccatggctgacaacggagaaaa

SEQ ID NO: 251830 - DNA, 1035 bp, Cannabis indica
tgtcaaagttcggaggaaaaattattaattaacctaatttaaatattggcaattttttttttgatcaaaagcaaattaagtatacatagttaggtattgtaattaagtagtttccactttatgtgagtcctttatctcattttccaagaacacttcttcccactatatatatatacttcttaccctttttggaaactcgatcgaagaaatcaacactataaatatataaagttctcttgattaattaattgtaatattaatattgatatatatataacctttattaatcgaagcatgcaaaaaatcttggtctactaaaccacctatgtacattttgagtaaatctataaacatgatataatataattgccagctaccttgccaccttgccattgctattaattagttttatatataattggttcttgtttagaaggtatagaattatggttgagtaatgagtaaagagaattgctagaatgtatagtataacacttttttttttgtaagtttcgtattattatttgtgtaattaaatatcgaatctcagataatttaagaaaataatttttaaaaaatatcgttaaccaatcgtaaagcaacacctataaaaaatggtgaacaccacctaataacaatactcataagtaaaagaagatgagtatggtaagatgtatgagatttacatctaaaaaatttatcttttcacgagactttttaacaaattctcttaatatgactatttttactcgttatactttgaacgttcgatcacaagtgattcttttttattagtttattattcttgaatcacaagtgactcatttttactctattttttgattggttttattttaatttattaccaagtgcagtggaaaaaaatacaatgagattttgtgtatggtaagatatatacatcatcagattcctttttaaaaaaattaattgacaataagagtagtagttcatatatgtatatggctaaaaaagtctgtgacaataagagtagtagttcgtatatttttttagaca

SEQ ID NO: 251831 - DNA, 905 bp, Cannabis indica
tgtttctcaatggtgacattgatgagacaatttatgtggagcaatcagaaaactttatgtctggtgaccaaaagaatatggtttgtaaattaaaaaatccatctatatggactcaagcaagcttctcgtcaatggtatcataagtttcatgaagtaattgtctcatttcatttttagatgaatatcattgataattgtgtatatcacaagttcagtgagagtaactacattttcagttttatatgtcgatgacatattgcttgccactaatgatataggctaactacataaaaccaagagatttctttctaatcattttaggatgaaagctcttggtgatgcctcttttattttagaaatttagatacatagagattgttctcgcggtattctcaaattatcacaaaagagctatatcgataaagtactcaaatatttggcatgtaagattgtagaccaggtgatacccttgttgctaaaggagataaattcaatcttagtcaatgtcctaaaagtaaccttgaaagttaggaaatgcaaaagattccctatgaatcagctgttaggagtctaatgtatcttgaggtatgtacatgtccagatattgcgtacactgttaggatattagatagatacttaagcaaccctagtatgcaccactaaatagcagcaaagagggttatgaggtatcttcaaagaacaaaagactacattctcacatacagaaagtcagatattttgtgattgtagactattctcattttgatttcgttggatgccaagataacagaaggtcgacatcaggctacatttttctgttagttggaggagctatatcccagagaagtgttaaacaaatacttatagcttcttctactatggtaacaaaatttgtagcatgttat

SEQ ID NO: 251832 - DNA, 753 bp, Cannabis indica
gtgcctaagtccatattttttcaagtcgtgctatgttatgcctaagcacatatttttttcgtgtcgagtcatgctcgcaactctcaaattcgtaccgatttcgtacagtgtcaaaaaacccgacccatatttacatagttctccgaaagtaaaatttattattttctcgattttttgttttcttgattaagacaaaagaagaacttggattaatcgtttttatgttggaaatttgcgtaaagtgtatataacctaaaattatattaagtaatttttatgtaaattcttaatcaatggtgttaacccaaaaattttacccggtgatatagacatcaatgtttgacatgtggcatgaaggatgacatcacagagttgagtagacccgagtcatagcaatcgacttgggaggggaccctagccctgcgcccaggtttctccgggatctccaagatggaaattcaaatttcaataacttgaatctagcccattatgttttagtattttgtatcatgaaggcatgaagcaacctaatctaagccctaggagctaaaattacacaaacatgaaactcgaaagtcaacttgggcacctagggtttcacctggcacccaggttgacatcctcaactagggtttcatatgggaccgtcttagtgcgaaatggtaaaaactttcattaagacatcaaatagacataccacatacatattgaggcatcagaattagaatacgagcaagttaatttttgagcact

SEQ ID NO: 251833 - DNA, 528 bp, Cannabis indica
ttttttctttttttcttttttttgcccccaagtgtgtaacgtcattcactttaactcagaaggcaacatgagtgccttctttaatttattgcagcacactaaaagcgtacttactatcgctaggaacttcttctcgcatagtgggactttacttagaggaatatcttggatatttatttttataggttgtatagcagagaattcacttggatgcatcgacttacgagaaattggaatactgtctaacggaccatgtaagggtctggtgagcttcccaaagtacacttgcttgtgtccgtctcttagactctatttccttccttgacacaaatgcctttttctgctctctcgtagaagtcttcaatgccatcatatttccttttcaacaaattcctccataatctactcccagggtgtattccagcagctatgataaacttatgttcatagttggacatccttcctactttggcaacttcagcattaaagtgtcggatgtatctccttaagcattctttctccccttgc

SEQ ID NO: 251834 - DNA, 1231 bp, Cannabis indica
gagagagagagagaataggggtttggccaaggctgaaaaaataaccagaaatttccttcaaatttgacaagaacaatctcttttgttgataataattcaatggatcaaaagaccaaaatgcccttaaggcttacatataacatatgcatgacataagagtaacaatgtcatttatatcacacacactatttcaattaattttcaaaatattcatataacaataaaatgccaatataaagtcccgaaatactcagttgtgactataccgcactgacttgtcagaacacacctgaaaaaagacaaaacatgtacactatataataatatagtccacaagcacacaattaaattaaatttacagttttacccttctcgagtaaaaattacgaaaatacccttagctaaccaacggggccttcatatatcatttatcaaattagttcacatataataaattatataataatataattctataataatacacatttaactagttagggttcactaatccatttccttaatctcaagctattacaatagcagatctgcttacaaaaggattatcacccaaggtctttcatgggcacactgctcatatggatatagtattgcttgaggatatcatgatatagtgggagttttttattttatttgctttatgtttatttatgatatttatgtatttggttataggggtaaaaatcagtcagttatggtcggtttttacaattttataactgaccgtttagaaattataatcgtataaaaccatcgtacggtttttggcaatttttagtgatttttcggtttggcagttttggacagttttttgtggttttgggtggtttttggcagttttgggaggtttattacagtttttggcattttttaatttaaccaattttgtatttcaaaaaccgaaaccgatcgctatgtcaaaaaaactgaaaccaaaaccgactgccaaatttggtgatgacgtggaactgaaaatttggttacggtttgatggtcggtttcagtttattgatttttatgaacacccctatttggttattttctaatcagaaataaagttttcagtttatttactctgttttgttatgtttaagtctgaccttactttagtttaaggagggtcaatttgaaatacgcatgttcggttcacattacatttaatttttatgctacaaatccatgattgatctatgtcatttggctatatttg

SEQ ID NO: 251835 - DNA, 537 bp, Cannabis indica
gcgtccacatcaaactctgctccaagagctgctgcttctacatctgctactggcatcaccgatcttcctgctgcttctcaggtcataccaaatcagattgttccccttaaccttcggcttgatcgatcgaactacttctactggagatcacaggttctctcaacagtccgtgctcatcaactcgaaggatttatcactggtgctcgagcgcgccctccagcaactgttccagacccctcagatgcttcaagattcatccccaatccagatcttaccgactggatgcgtctggatcagttcttgatgagttggctcttcaactccatatccgaagcaatgttaggacatgttgcaagatgtgcttcttcatctgaactatggaatgttctgattcagcttttttcaatcaatctcgcgccaaagttctacaactccgtggaatgcttcagtcgacgagaaaggttctacacccgtggatgaatacatcttcaagatgagatgcttggctgatgctctacatgctgctggtcatgaaat

SEQ ID NO: 251836 - DNA, 721 bp, Cannabis indica
aattactctatatatttctctaataaaaaaaaaaaatgcttttgaaatgtataaataaaaaaacctatatatataaactatgggtactccttaggtgggagcatcacttttgtcccaaaatacccggttatgactataccagccgacttgtcagaaatgatcacctgcagaaagacagaataaacatactatataataatatagtctataagcacaatatacaataaaattacgattttaccattctcggatcaaaattatgaaaatgcccttaacacaccaacgaggtcttaaaatgcaatatatcataataatttcacatattaaatcatataataatataatttctcattagatttaattaatttaattaaggttgctaatctagttattaaactttaagatattacatgtaaagtttataaaatttattgcaaactaaaaattcattgaatcaaacaaattataataattttataattaatttagtctttttttcgttattgaaaagaggattatgtggtattctactctcaccttttttgtctttggctattttgagaatcacgtgctagctataaagagccaatgataaacctagtttaccgttgaccatccaaggcaatgtttgaattaggtcatgtatatcgctcacacaatgaaagggtgtgtgagattggaatccttctatttaatacaaattaatttttatataaaaagt

SEQ ID NO: 251837 - DNA, 585 bp, Cannabis indica
tgttgacatcaatgtaattgtgaataactatatggtttggactgaaaagattttgtacacattaaaccataaacatgaaaactacatgtatacataaatgacttataatcttctattgataacaactcagattataattgaaatggattttatttagggcttaaaatcccaacaatatctggatgatacggctcaagctcctcgttagagtcttatttagattgtctctctagttcccccacttgatatctcctaaacttgtcctctagcttgttcatccgcaattggatgggatcctcatgctttggaccgagctgttggtgaaggtcaggtttcttctgattcaagtgctctcgtagattcagttgggagtagttgctgatagacctcgtcttactcacagatcgcgtcctactcatagactttatcctacatatagacttcatcttagagtgactcgcagatttactggttcccatactttctcgatcattagctcattgagtactttctcctctttaagttgatcgactgtgtgtccttgactgcctcgaggatacacttgtttcttcacgctctgttctt

SEQ ID NO: 251838 - DNA, 2265 bp, Cannabis indica
cactggtgctcgagcgcgccctccagcaactgtttcagacccctcagatgcttcaagattcatccccaatccagatcttaccgactggatgcgtctggatcagttcttgatgagttggctcttcaactccatatccgaagcaatgttaggacatgttgcaagatgtgcttcttcatctgaactatggaatgttctgattcagctcttttctaatcaatctcgcgccaaagtcctacaactccgtggaatgcttcagtcgacgaagaaaggttctacacccgtggatgaatacatcctcaagatgagatgcttagctgatgccctacatgctgctggtcatgaaatcagcgatgatgaactcatattatacattattggaggtcttggtagtgaatatgattccgccatagttgctctcactaccaaagatgttatcactctctccgaggttcaattcctcctccaaacacaagaaatgcgaattgaacaacaacattctgttgctaccctggatcttcaaaatcccacagcaaactacgcctcaaagaaagccagtagctcccctgcttctcctaataacacaaatcgtggtcgaggatcctctaatggtgcacgaggcagaggcggacgatctcatcccaataatcgtggtggtaatcgtcctatatgccaagtttgtggcagagctggccacattgctctcaagtgctttcaccgctttgatctcagctatcaaggtgaacaaagcaccactactcaagaactagtacagatgactcgcaggctttgcttgcttcagcctccacagttgctgaccctcactggtatcttgacagtggcgcatcgcaccatgtcatctctgatggttctaagctaagtgacaagattgattacaaaggaaaaggcaaattaacagttggtaatggccattctctacctattcttgctattggttcttgtgtcattccttctttgcgttctttaattctaaagaaagtcttgtatgttcctggtattcataaaaacctaatcagcatttcacagtttactcttgataataatattcatgttgattttcatgataatctgtgttttgttcttgacaaggtcacgaagagggtccttctacacgacactcttagccagggtctctacaagctgtcacaaccccatttcaccccatctattgtgccttctttagccaatcttgttacacattcatccattgtaaatctcagtacaactgagccacctaataatcaagattgtaataagtcctttccctgtaattcccaaaggtctttctcctgtaacattcccaatcgaattgctgcactttggcacaatcgattaggacacccttctcatgtaatcttgaataaagtgttacaaacaattaatgcttcctgtagtaaatctgatattacattctgtgatgcatgccaatatggcaaaaaccatctcatgcatttctcctccacaccaattaaaaccacacaacctcttcaacttgtgcattcggatgtttggggtccatccccacattccacacccgaaggatatagatactatatcctatttgttgatgactacacaaaatacagttggatttatccaatgaaaaccaaagctgatgcctacaacatcttccttacctacaaaacacttgtcgaaaatcaacttaacaccaagctgaaatgtctccaaacagactggggggtgagtatcgaaagttacagcctcttttacaaagcttacggatccattttagacatccttgccctcaccatcaccaacaacagggtagggtagaaagaaagcatcggcatgtcactgaaatgggacttaccatgcttgctcaagcctcaatgcccctgaaattctggtgggaagcctttgtctctgctgtttttcttattaatcgacttcctaccattgtcaacaactacaagtcaccatttgagagtctctttcacacaactcttgactatacctttctcaaatcctttggttgtgcgtgttttccctttctaagaccatacaatagtcacaagtttcaattcaagactgccaagtgtatctttcttggatacagcccatttcacaaaggttataggtttttacaccctacaggccgcatatacatttcaagaagtgtcaacttcaatgaaaatgagtttccctatactactatttttccctcccaatcatcagtcacctccaccattcacaacaacctcttagcacctgcctttgtcatcccag

SEQ ID NO: 251839 - DNA, 836 bp, Cannabis indica
catcttcaaatattattttttttatattttttttcttttaaaatttagaataacatgactacataagattaattattttttaaaataaaattcccacatcaattaggaactactgtaagtgatatattgtagactatgggccagtttggcacagctgtactgtggggaaaagcagctgtagcagaactgtagaaaaaagctgagctgagtgtttggtaaattataaattttatagtgctgggagttatgaagattttattataataataataatattttaatctagttcattataatcacaaatatatataaaaaatatgttatataaaatttttattttctatatatttttaatttttttccatcgtataaatttatatgcatttgataaaaataatttttaaatattatttattttaaatattttttccttcaaaaaatatttttattttttataatacataataaataattaaataaattttgagtaaaaaataatctattatagagtgttttaatcaaaacagtttttttaaaagtttgtttgtaccaactttagcttttagttgtagtttttccataaattcttcaataagttatttttaactgtttaccaaacaccttttgtcacagtttttttgaaaaataacttttagcttttccaaaagttgtgcaaattggccctataaataatacattcaatttcttactttaatttttgtcaaaaatattatactttttataatatgggtgattagctaatttgatcttacactagttcttttatagaaaaataccatatataatttttaatgttttaatagttttttaatttt

SEQ ID NO: 251840 - DNA, 583 bp, Cannabis indica
tcaaaacccacaaccctcttgctcaaaccctcaaaacccatgaccatcaatagctctctccgatcactacagccacccccgacgagtacgacggcaaggacgactcttcagtttctctctttgacgacgacggcgacccttcagttactctctttgatagctggttggagaggaaaggggtgttggccgagagataagctattgagtctttgaaggttcgtgtttttcctaaagtttgtcggtttgattttctgttatgaatctgtgatgagccaatgcagctagcttatatgtgacattgtttttgtaattttctattatgattgcccataacccctgccctgctgtttgaaattatgcttctttgaagttgtggtagttttatttggctgtttcagttctgggatttcttctattaaatctttatttcttttttgcgttcttccgaaattttgcgtttgtctggctttgaagcttatttgagttttttgtcaacttttgtattaccctcttggcactttaaatcaagttttcagcaagcagcttgtcaatgaatctcgccatgagattagttaggttaggc

SEQ ID NO: 251841 - DNA, 1123 bp, Cannabis indica
tgcaagatatttctacagctccaagaggtgacgacaaggtatttctattcctattaccttggatgttgtgcaaggtatttcttgaattattcatctttaatgtaatttttctagtagtattttgttatcccaatccctctttttgtaatttaagaatatctctaattaagtcttgaagtcttgaaatagtgatgcaattaagaatttgacgagagataatgaaattatctcggcattagatttaactggtatattataaatagataaaacaaatacagtagtttgagagataataaagtcttggtcttgaaatgtggcttagacttaagaatttgagagataatggaattaacggcattgtattactaatacagtagtttgtttttttgttttatctatttataatatacttaaggatatgataatttaatttgtttctctgaatatctgtgatactcgcaccaggcatgtatgacttcttaaatagtgattttttttatagaatattccaaagtgattgaaagactactactaaagggaaaagaaatttaaaagcagcgtggagagaagtcatatcttaccttttacaaaggtggcattatttcttccaaataaacaaattatacaacgctaaaatactatattcctccccaccatcatccacatcaggtttaatctcttttttctttattagtttaatgattttgggttttatttactctaaattctttaaaatcttatttttgatttttttttattaaattagttgagaccaatagttatttaatagtgcaaatttacaaaattaatttaccaagctactaaacattttttttgttaatttttttaatttaagctaaaattttcattgacttccacattgtaactttccaaaatcacaaattcgagctgctaattgatattttaagtaaatttacaaatctgagctactaattttacaaatttgagctactaactgatatttttagtacatttagctcaatttattaactaatctaaaaaatagagtaatgaagagtgatcttaaatagatgcttaacagttaatactctaaagtgtatttaatattgactttttcaaaaaaaacttgccataataatta

SEQ ID NO: 251842 - DNA, 775 bp, Cannabis indica
atatataattaaaaaaaaaattctaatcaaagttaataaagatgcgtacatattaataacaaaagtgttaagagacacattaatgtgtcaagcaccacaaaaggtagcatacgattataagtgtatttcaatatcagttcccataaattttaatttgataaataatttaaacaactgctaacaaattattagataccacatcgtatggtattgagcaccttaaggtgccacatatcaataatagtacctaaaattatttaccaaaaaatagattacaaagatcattcataaaaaataataataaaaaaatacaatcaaagcaaataaagatatgtacatattaataacaaaaatgttaagaggcacattaaggtgtcaagcaccacaaattaaaggtagcataccgttattagtgcatttcaatatcagttcttacaaattttaatttaataaaaggttcaaaaaattgctaactaaatattgtgtatcaacttagtatggtattgagtaccttaaggtactacataacaataataatataaaaaattaattataaaaaaatatagtacaaagatcattcataaaaagtaataaaaaaattctagctaattattgagtactacattattatgttattgactatcttaagatgccaataacaagtaccaaaataatttgaaaaaataataaaaaatataaaagatagaaaaaaagtgaaaaacgacaaaagcaagccgtttttcattcttattgtatagtagatatgtatcttact

SEQ ID NO: 251843 - DNA, 1084 bp, Cannabis indica
tgcatgattcttctgaactgaataaaatttctgaaattcatatatcatttgttttttgttggtggatttagttttattctttggctaatttgaatgtatatttatattgcagataaaatctttcgacatagatagatatgggtatgaggggattttttatggtttttattatgttgtgtacacttttatgttattgcaagtctgatgaacaacaagtagaattattaagagatgaacttctggaaatagagaatcaacttgtgcgactaaacaagtcatcaatcaaggctattaaagtaattttatttatttattattattatcatcttcatctctcgcttaatttatattgaacttatatctaaattgtaacttgtgtattgtgtcatgtacagacacaacatggagatatttatgattgtgttgatttttacgaacaaccagcatttgatcatccattactaaagaaccacaagtatgattttggggtaggtttttcacaaatatttttttttctcttataacttataattttttattttccctaaccatagtgaatttgtattataatatattatctatataagtaggataagtatttgtggtatttatgatgtagatgagaccttcttctcatccttacaaaatggttaggagatacaagcctccaaagaatgtggaacaagtatcgataaataatgggttaaagggtgaaaaatgtccaattggatttgttccaataagaagaactactaaagaagatcttatcagagccaaactatttacgaagtcttatacttcaagtattaattctcctcctacttttcatgtaagcatatcatttacattttcaagttttttttaacaaattaaataatatattccatcattgaaaaataacttcaatttgaatttgaatacaatagcatgcgcttgtttacacatctgatccaactaagaaatacaatggagctggaacaactgcaagctattacacactatataatgttactggctcacaatatacttttggtcgaatgaagttacaaaatgaacatgatatcattcaagctggttggggagt

SEQ ID NO: 251844 - DNA, 786 bp, Cannabis indica
aatgatatgacactgagaaaagtactaaataccggtagtatcttttagcaaaatccaattgaatgatattatatattaatgatcaaaatatggttgttctttattcttttgtgtctgtcatgggggaggcaatctctctaggagggtatcataatggcctatatttatgggtattgttttattttgggtatttcaatgaattattctttaaggttattataattatcaagattatcaatagcatgtagtgtccctttgagctgtgaaattgtatgggtatacacatggttaccatgattttggtgagaattaatgatgaggattagtttcatgataacttaattaatataatagacaaaaccaaaaagaacaaagtaaagaacaatcatagtcacatgtcctttgagttgagccttctttcattttatccatttgtcaggttgtcatttctgttatttgtccattttctattttattgtacatgtatatttatgttggcttgaaataaaaataaatgactctacttttggttctttaacgttatagactcaataataataataattcaactttgggatgtggtttcttctttgtttgtccaataacatttgattgctcctttcatttaaatatatagctagctaggacacacctattcccaaaaagataaataaatatgtattggagatataatttcattataaaagttaagggttggcattgtttttctgttttttgttttataaattttattttaaaaaataaaaaaattgaaaatttaaagct

SEQ ID NO: 251845 - DNA, 1043 bp, Cannabis indica
ttaatgtttgcggatgacactcttctattcacaagagccaatacggttgaagctggaaacatcggcatgtgtctgaagaagtttgaggactggtcgggtcaattatgcagcaaacagaaatcaggtatactattctctagaaactgtgttaaatctcttcgggagaatatcgaaaagaagatgggtattagtactatcaatgaagccgaaaaatacttgggcaacccttttgttttttcgagaaagaagaagaaggatttcaagttcttaaggacaaagcttatgcaatgtttggaagggtggaaaatgcgctctctatcctttgcggggagaatggttgctgttaaagccattgcttcagccattccctcgtattcgatgtccacctatcaactccctatcacttcttgtcgagagcttgatgctattatcagaaaattttggtggagtgggaggttggataagcagagatttctggcgactgtttcttgggactcactgtgtcggcctaaggtctcgggaggcctgggttttagacaaatggaagataccaaccaagcctttttggccaagttggcctggtgtattgcttcgggtatttcacgaccgtggactgttgctttcaaagcaaaatatttcccacgggactcgttttggtctgtcaaaaggagaaattcagattcttttgtgtggaaagggattctcaatgctaggcaagtgatcatgaaaggatcttgtacggtgatagcttctggggcctcgattgatatttggcaccaaccttggatcccttggctaaactatgaagagttcagagatcttatggagtcaattcgagacaaagcaccaggtttgaggactgtggcagatttactaattcatagaacggggcaatggaattctaactatctctgctttctctttggagccgaggtagggaagaaaatcaacaccattcaattagccactgagtttagcgatgatcttctcatatggaaagaggccaataatggtttgttctctgttaaacaagcttatatggt

SEQ ID NO: 251846 - DNA, 566 bp, Cannabis indica
accctaacccataaaattcgtgtcgtgttcgtgttcctgtgccgtgtcgaaagccgttttgccacccctactatatcgtatgagtaacatttggaacatgatgtatgtcattttgggcaaccgaaaagatattatgttgaagaatatccagacgggaacaagctccctagatggatcgtccggatggggacaaaatgatacgctttctggaagtacatttcaaatttaaacggagtatacccacttatagtttcgtccggatcaagtcagagtagttaagtttgagccttcgacatttactatccgggcaagccctaagccttgcactacctattccaatcaggcatgtcggacaagtgtcactttccaaatagaagcatacaccaagtaaagatcttcaatatcctcaaatatctctacgattgtagcttatttatgggactttatgtttgaattcccttttctacgattctccccctttattttaaaataaaatgtattcaatattctgtaatttaatggaaaaatactagaacatattctttataaatagtgagctatattca

SEQ ID NO: 251847 - DNA, 788 bp, Cannabis indica
tattattattattatttgatattatttgacacagataataagaattatattagtacgatttgaccacattattatgtcaatatatattatatatacttttaataggcaatagttatgaatatgtagtattaggaaaaattaagtttttatatttaatatttctatttaattagaaaaatttctcatttttaaattacacggactcaggttgtcctatcagttgtgtttaccaagattttcaaaaataaaatatttgagaactaacaaatttataaaatgcagaaataaagggatgaagagttttttacgtagttcgagtatataagggataattacataaggcactattttttgtaaaaaaattacatttttacgttaaatttttttttcacattgttacggttttccatagaaacaacaaaaaaaaaaataagaaaactacataaaagtaacgtgaaaataacaactaaataataatcaaaacaacaataaaaaataacataaagataacaaaaaaccaacaataaattaacaagagtaccacataaaaaaaccgtattttctataaataaaataaaaaaaacataaaaatatttaaaattccataaaaccgtatttttgtaattttttttattatttttgtgtatttgtgaaataatatctattatttaatcttagtccacgagtcaggttaatagcctcttagagtgtttttgatgtgtttacattatttttgcaagaaaccctaactatgtactctaagtttcttgtggaggagatgaagagta

SEQ ID NO: 251848 - DNA, 921 bp, Cannabis indica
  modified_base (20)..(20): a, c, t, g, unknown or other
gtgctgcaggcgacaggcanccgaaaaactcgaagaaaggaatggagagtgagaggaggaaggaggaagaaaccaccaagaacactcaccaccagagagaggtgggtacagctgcaaagaacagtcaccaccggagagactgaagagaggtggaaacgtggaagggaataagccagaaggagaggcgggaatggcggctctcacaaacgggagaacggggaaaagttaaatattaggggtttttcttttctgagtaaaaaacaaagttttatgttattatctagacatcaaaaagaatggtgtacaggaaaatgtatacatgacctgagcatggaattttctaccaaaagctttttgctcaagttttgtgccaccagaagatgatgccctataaaccccatattaatattcatacacaatttctaaatcttagaactaaacagtataacctaattacgacaaccctaactaatattaaaaataataagaaacgggaattggataatagctaaatcatatatccctgttgtgaactctatacataacagagagaaacacttaaaaaactcaaacagccagacaaagtttcaacctcgttaggcctcaaaatcttaagcacagtacctgttgtgagtgaagtaaatgcttctccggccaatgagtgaaacggaattcctcctctacgatctccgatacggacccgatcagtcagtaaggggttgataatatttctagggtagcgctgatgagttggtgacagaaccaaacagagcccaaaaggccgataaagatgagtaacaaagacagagagagagagagccaggaaattggattgggctcgcgctttgactgtggttttgggtctcctgtaaaaattgggctaactcgaacaatacaacaagaacaaactctttgagaaat

SEQ ID NO: 251849 - DNA, 835 bp, Cannabis indica
aattaaaccctaaatatctgcgaatttgcaaatttgcaaattaaactaagcggtctttacattttatgtacaacccaaaccaacccaacccaataaattacgggttggattgggttgggtcgggttacaaccttcaatcgtagttaaaatttagatatgaaaatctcaagctgaacaaaagaataaataaaaaatttaaatatgaggtaaattaattcaaagctccacagattaaaaacgaatcattacagccattcaattacaggcctactaactaaatagttattacaaatttgaacaatataaaatatataattttcataatcatcaatcatcaatttcaataatcttctactcttccactcttttggtatttctttgtcctcaagtttatggcctaaaattcaaaatagaaaattgatcaaattattaaaaataaattataaacataaaacaataacattattataattgataataatttaaaataattatataactaaaggaaaaacaaaaacaacaaaagagtcacacagaccaataaattgagcaaaaaaactacaagttagtataaatcacacacaaaaaataaaaataatatattgatcaaatcaaggagtgcataaaagacattctactgaatgtcaatcaagcaaaaacatgaatataataaatattaatattaacaaaaagaataggacagaaagctcaaaccacaatcatgatttcaaagaaaaatttttgataaaaaataaaaccatttactttaataacaatacacccagatttatacttaaagatataaaaactataataaaaacatataaaaaatgaa

SEQ ID NO: 251850 - DNA, 471 bp, Cannabis indica
tattacaaaagtttgtcgcctagcgactatacaaaaatgagccatacagtcccaagaccgtacgctctaggcctaatcgccctgacatatacaatctccatctatacgctctcacagctgctcaaccttggccttgcgcccttacccccacatgcaaataatatctgtgagtcagcagactcagtaagaaaagcataaataataacatagcaataattcggatataatcaggcgtccatatacctaaccataatcctaactgagtcaggaacgttctcgaaaaagtgtgactaacttcgaatccagcctatactcagtactctagtcatactgatgtggtagcagataactcatactatctgatagcctaggatatatttgttggcatctcggtgcaactctatgtacacctcaccgatgcctaatatgctaatctgatggcaataggtttgcctattctgacggcaacta

SEQ ID NO: 251851 - DNA, 697 bp, Cannabis indica
acccttttctttggtcgcgactaggttaatttggcagaaagggtgatttttcccatttgcctatggtcgcgactagccctttatgtagtcgcgaccagatacgaaacacgggattttcgaccagttttgaatatttttccattcagaggcacaaccctaattcatatataagggactcgactcatatgacgaaggacatcagaaatcagccctgaaaagtgaatgaaggaggagaggaagctattgtgacaatccggagcgaaatcaccaactagttttctttcttaactcttgaatttctttatgttaatttttgttctagatttaatcatggatgttaatattgtttttatgaactgaattcccaattggggaagacaatgaatgttgattaaagtttttgcctagttaatgtcaattgccattcattttatcttgtttgtaaaattatctatatttgtgtttaactccatgtttaagcttgatcaccttctacatgttctatgatctcaattcaaaatctaaaaagtgaaaattgagaatgctaaaatttgataatctaggttttacgtgaaacgaaagtatttgcgtggcctgtgtgacaattagattattgcttaatgttgattacatattactctaattaagatattgattagagaacatgtgatttagaacctaaaagatctgaaaagag

SEQ ID NO: 251852 - DNA, 734 bp, Cannabis indica
taagtattttgggtagcgtgcctaattatttagggcgttacactctccctctctcaaaaactcattttttctagctttgattttgtggtgaattgcttgtggaagaaagcttagttttggagatttggggctttgctcttacttagatttgagggagcttttctcactttttatttgaatttgttgctgaaatttctaggtttcttcttcttcaaaaccgaaccccttttccctcttaaactacttctttctttgttgaatgtgtgagttgttgcttggatcaaagcttggtttggtaatctttgtgcttgtgttgaggtagccattttaattggtttaatttaattgcaagctgctgaaataagattgaaaagcatgctttatgtgtgaataagtccatttttgcatgtgtgttagattaaggggataatcttgttatttttggcatgtatgtgttgcaaaggtatggaattgttcttaatgattttgatggcattttcttgagttatattaaaaataaatttgtgtaaagatgctgatatttttatagttatgcaagctcttgaattgagatttttgctctagttaaagcttgctgaaaattgatgattagtgatgcatattttggtgttgttggagagtgaattaggtgtaattcttctctaattatttgatttatgctaagtgaaagtttattatgattgtgggctggtttagcatgaaaattggtgttt

SEQ ID NO: 251853 - DNA, 522 bp, Cannabis indica
gattatgtttaacaatttgaagtacaaaatctagatctcacatccaggttcaatgagtatgtgtagtttttcaatagcacctcatctccaggtggtgctaatatagtaaatgcattttgtgattttgtcctattattatgtgttcattgtttcactaatgctcttaagcattccaattgtgttgtaattggaagctcccttgctgctaaattttttgagtttagtcattttgctatgtttgaggtcatggtggaacacctcttatttttgctgtgaatccttaaccatttctcataatcaaattttttcaagtatggtcttatgcgtttgtccaagtcatctagttctgctatgtggtactcaaattgtctttctatgtacgcttttgtcgctccaaagatggcaggttgtactttgcagcatgtgttttgaaggttgttataatgttgttcaataggtgatatccccagtatgcgtatgtaatttttaggtatatttatcttgctgctttgatcaggctct

SEQ ID NO: 251854 - DNA, 560 bp, Cannabis indica
aaaactcctcaacactaaacctaagatatttgccttacaaaacaaacccaaaattccaactcatttggcttttgaacctccctcaacagcaaatcatgaagcaattagtaatggatactatactctggcatccgagatttatttttcaggggttattttgggggctttttagcaacaagggaggatgatgatcgggtaacaaccattgtgaatgaggtgaagtagtatttttagaagaataagaatgaaaatggggggaaatatagagggaaaattaagatgaagatgtaataactgaaaatttttgaaataaataataaaccacccacaactgtataactgcaaaaaagggatattagaagaagatgatgaacaaggaacatgggggagtggaattttagtaatgattatttaacatttaaaaatatttagaaataaattaaaacccaaaagggaagcaaactgtgttatattatttttaatataataatatgtagattaaaatgtggtaatatataatattatgtgaataatatatattaagtatatggtaaataaat

SEQ ID NO: 251855 - DNA, 813 bp, Cannabis indica
cctttaacatacctgagaatccactcgactgttgtccagtgagcatcacctagatcaaccatatacctactaacaatgctagtaaatgagttagattaggcctagtgaaaatcatagcatacatgaggcttccaaccacattggtgtagggaacctttccatcaattttctttctgcattttcttgagacattaagattgggtgaatctaggggtgttgacacaactttagaatcattcattccaaatttctctaggattctttacaaataatccctttgacttagcaatattatctctagagtactttgattaatctcaatacctaagattttcttggcctttccaagatccttgatctcaaattcactacataattgtgtttttatttttgatatctcggttttatccttaccaacaatgattatatcatccacatacaatagtaaaaacacaagttgattaaagtatacacagggatcaaacttacttttgttgaagccaatttgagtgatgaagttgtcaaatctgatattccattgtttggttgcttcctttagtccatacagagacctatttagcaagaaaactcatctaaatttccatcatcatagccctcaggttgaaccatgtagatttcttcttctagttctccatgtaggaaggttgttgtcacatccatttggtctacctcaagcttgtctctggctgctctaacaagaatgattctaattgaggttcgcttaaccattggtggaaaaatttattgcaatcaaggccttccttttgagtgaagcctttagctacaagcctt

SEQ ID NO: 251856 - DNA, 659 bp, Cannabis indica
tgaaatctaaacgtgaaactaaccttagaaatagaatggggcagagaaaataaagctggggaaattgttcaaatcaattcatacagacacaagttcaaccacaactccaaagatgatagtctgagagatagctgttaaggtaacgtgatctgaagtttggcttgaactaaaaggtgaactttgtgaagaaatcaatttctcagcatcggaagccataatcagaggaaagttttgaaacagggcaatcaaaaaatccctagaaatacccaaatctcctcttcctccattaccgatagcaaaaaccgcaatctcgcccgttaactcagctaccccagctgcaaaatccaacgacgattccgccgctttgcatacatatctcaaaaactcagccaagaacgaagcaatcacagcagtaccaaatgcttgcagccaaaacgatttacagaatgaagttcgaatagaatgaaagaactccaaaaccactactttaggacgaagatcagcgcaatctagacatttagacaggcacagagccacgacaaggataacattgagttgagattcagtgacgagagactctggaccatcggaccattagggcttcaatgattgaaatcgtagaagccaatggtgataggtagcagtcgtgaggagcgaca

SEQ ID NO: 251857 - DNA, 506 bp, Cannabis indica
agaatttatggttcaactaatgaataggctgggttttgcgaactcctgttgtattcctgcggtgggcactgcaggtggtttctgcgtagcttggagagtaggggtgcaggtggatatcatggaggtttatgatatgggatttaaggttaaaatagaggcttctcttgactaccctcaatgggtgctgctctgtatttacggcccaccatatgctgttttgaagaagaatttctgggattggttgatccaaaatgtacaacattgcgcagatgcttgggctttaatgggagacctgaatgtaattatggatgaaaatgaaaaaattgggaggcgtcagtactagatacgggaaggtaacattcttaagaactttatgttcaactcaggaggtgttgacttgggttttgagggtgccctgtgtacatggaaaaatgcaagatccttttcccaccacattcgtgaacgtctggatagagtaattgtggatgatcaatggtgtgtttcct

SEQ ID NO: 251858 - DNA, 621 bp, Cannabis indica
agaccattcaacacggtcaaaagttttgctcatatccagcttaatagcagcatatcctttagaaccttgcttacgatgtttcagtgaatgaatcatctcaaaagcaaccaaaacattatcagtgatcaggcgattgggaaggaaagcactctgcgtttccgaaatgacaaacgggagaacatatttaaatctgtaaataatcatcttggatacaagcttgtaaacaacattacaaaggctaatggggcgaaagtccttcatagtagtcggcttcttaactttaggaattaaagtaagaagagttttgttgaatatggtagggtcaccattgtcattaaggatatgtaggactaccgatgagacaagatttccaacaatgtgccagtgatggtggtagaacatggccgacataccatctaaccccggacttttatcagacgccattgatttcaaggtaaaatagacatcctccttagtaaagtcacgaagaagaaaatcattttgatcatcatttatggtagtaaggatagtagatagtacatgtgagagagcccaatgatcttcctctgaagcagtaaatagatcttgaaaataatgggaaataatgtttgtaatcccctc

SEQ ID NO: 251859 - DNA, 507 bp, Cannabis indica
gtgttttaaggacttgtggcatcgatcaaagacgagggtgtcgtgttagatccgtggcacctggtgaatttagctgttatccaccagagcgacttacccgcgaggaatgcggggggaggggttagtgatgaaaccagtggcgaagctagtattagtagctcgactgggataggtgcttggagcctcgagcatatcagggctgaagcaattctccccctgagagagtactttaaagagttcatcaaccatcttggaatagctccattccaattggttctaatttcctacagaatcattgcaagtctaaaggttctgtataagattctaggatgggagtgtcccactcccctagaacttatttatctttattcagttaaggcaattccggtgaggaaacgttgtgcaagatgtttttaataccttgggactcatacaaatgatcgtaggtgttggaatatattttaccaggatctagatttactaacaagtgtgtttttaacatcctaa

SEQ ID NO: 251860 - DNA, 546 bp, Cannabis indica
taagcttcagagcgaaaagagaacttggcttcaaagtcattgaagtgccttcatacaaactgcttgttggatggacgttgcttgaacccgaacatttgaaccttgagtaagtttctgatttcctttatgcttatctttgcatgtttacattttgaatgtctcttctactgtgctgtagaaaatgtttaggaaaccctaggtctggaaacctctacgattcttctttatcatgtcttcatgcagttttatacccagaacgcttgtttttgaacttcacaacgtctgtccttcatcttgcttattctaagcttcatgaacttctttgccctaactcaagaaaatttttgacttcttgagttctggcttttccttgaacatagtcgttctttaatctgttgagtactcctggtcggcatatttgcttgtttatcattcggtattctgaccaaacactcatctcgtgtgttgtcttttgtagatgaacttaggtgagtctttggaacacggacatcgaatcgaccaggatctgcttcaacttttgtacga

SEQ ID NO: 251861 - DNA, 620 bp, Cannabis indica
gagttgcactcaactttgacttgggcccaccagttgccaggatcaaaccttctgcatccggagtatatcaccatcttcctagagacgaacaaacgcccaaccgtaattgcggcgattttggggcctggagtcaaacccacctcatgttcggggccatgctaccacaccaggactacttcattgattttttagtttttgttggccttgcgccttaccaactcattcctcaagcttatcgcctgctttcaagcttgtacattttttatgttgccaagagctgggccccacccagtccggctgaaattctttatttttacgaacttctatccatccccaagaaaggggacaaacttaaggatggttttttcaaactccaggcccatccagctaacgagggcccggtaccttaaaattttcagaagaatgttaaggagtatcgtcatcaatttttcttctcctccgactgcaaagccattgagcgtccagatttgctaattgagtgggttagagtccctcccatgcaccgcactgcccctactaaactctttcttcaacaggccaaagtcttctccacctacgataaagatggattaaacataggggacttggtcacgaccgta

SEQ ID NO: 251862 - DNA, 1071 bp, Cannabis indica
ttagatcatataaggtttatcaaggattcttcatctaatagagattatcacataacagtttattcgtctctagaatagatcaaaatcataaaatatgagcaatgcactatatcaagtaacaaaataaacatataaatgcacccactgatctttcacacaatattgactaatgataatatttcgatgtgacccttttgagaattacaataaatcattgtccttatgcccgaccataaatagatataatccatttaactcgaatgtccttatgagctaccttctcaaggcctaatcaagtcatttaacaagacaaggtctttaaatacgaatttagctctcacatccttataaattgatttctgaatagtcaccactctattattcaataatagtgcaaaacgaacaaatccattattagagggaagactagttataggtttaaattcaccttactttgagcatcaaacaatctattcttaaaatgaaccaccaccaagaaaaatctcccaattattatggtattaagcctaaactttcatgtgatcataattttagcttggaaatcgtgatattattatatcatctgttcagcaaggattaagaaatgttaaatgctcttgattgacaacatagagatatatgtcattaaacttatctcttgcatataattacaggaacatttagaatagtgcccataagatcagagcatatttttctatttttttctctctagaaatttgagctatttccttagtcaattctcttgtaattttcgtgagaaataaaaactcgaagtagacgtagctctattaccatcgcgatatgaggagtgaactactataaattatgtgtgtctctctataatatttacttaactcgttatttatcttgccaacctagcgagctggtgttggctatttttcagtgtcaacaacatattatagtcccatctaataattgaacggtagaggttttaagacttataaaataagagctcttccatttatgtcgttaagccaagctctaagtgaaccatcatttcacttctaaatagttatagaagttatagat

SEQ ID NO: 251863 - DNA, 2174 bp, Cannabis indica
atgtcgctaaaaataaacattgagtttatgccgcttacaaacttaaaattttgagtacttatgccgctatttatccaaaataaaaacatgttactatgtctgttatattgtattattagtaaaattaaatattatattttgtaaaatttaatttaataattattataaaatatctctatttatttgcaaggtgccacttgatgttaagcaatacctatatttagtcataatgaaaagtatatttatcgtaatagttataatatatataagttaattcacaacataaaaattattaattagaaatatatttattcataataaattgtaatatttaaaaatgtgtaaataccattttatatggtctgtaggaccctgctctgagcaatagtcactgggactaagtacgatgattcactggtggatttggctgacacttatggtaattggtgatcaaacaggggatgtggaggatattgtatccatgacaagtaggttgggagttgaaccggaagaggaatgggaggagaatgaggaggcggctgcttccttcggaggacgttcggtggtgggtagaattatctcgaaacatgaaattaaagaaagacgttttacttcaattttcagtaggctctggaaaggcgtctctgactgggacgttaaggtatttgcagaggaaggggagagttcatatgttgggattacaatgaaatctcgggaggacgctcggatgattgttgaaaaacagccatggattttcaatggtggagttttgttgttggaagattggccagatacgggacaatggaaagatgctaagttggataaaatggtttgttgggtaagaataaaaggaattccactgaaagcttttacaaaaaagaatgttattcgactggcggaaatggcaggggagctagttgatctgaaatggattaatgagcaacgaatgtttctcaatggttatgttcgtgtaagaatcgggtttcctttacaccaaagcatttttgtgggtcgctatgtaccaagtggagggaagcagcattgggtccaattcaagtttgagagactaccattactttgctttaaatgtggtatttggggtcacgagcagcaggcttgtaatagctcatgtgtgacggtaaggggggaagatgggcaaaatgttctgaaatatggtaattggttgaaagaagaagatgccatgccaaattgttttcttgcatttcaacaagcaaagttacaacaagtggagacagagggtatccaggaggaaggtgaggcgaggagggggagtagtggcagtgatgatgatacgggggagcttcggagtagagatacggtggtggtcggagaacgatcagtagaggctgacggtggcgcagagggaggagcggttatgggagtagttcataatgggaatcatgttgttgaacgtgggaatgggatccgtgaaaccaggggaacgattgtggaagaaactcttggggatatgggcttgggaaaaggtattgggccgagaattgatgggcttgatacagtgggctccaacaatctgaaaatggataatttggatattagcaaatccattttatgtgataaatatgatattgcttcagcccacttagggttgaatgacctggatctcactgaacaagatagaaagaaaaggaaaaatgctgcacaaaggagtgaagaggaaagagaaagagataggagagctagagataaaggaaagcaaattgaggggaatgagctgggaattggaaatgaaggaatctatgagatgggtagtggtgttgagcttgggggagcggctaagacaatcggacagaggaggaaagtttcgatcaaggacaaggctaggcacaagtcgagacaggctgcagcaagagggccgacgggatctttgggaaggatggagtctttgggaaatcatgaagctatgggaagtagagtgggagagcaaggtgaatttatttttaatactggggtgggatcggctggggtcacgggttccagggattacatggagggagaggtgagtatttctaaggctatggatttatcatctctatgttctgctgaggaagcggcgagccttgcgatgcaaggccgccgagcacaatgaaactcttaagctggaatgtccaaggcattgggaacccttggacatt

SEQ ID NO: 251864 - DNA, 501 bp, Cannabis indica
tttccctaacttcagagagtatgacagcttcattgactgagatgacataatcttctttgcccatggggaaccatataactgcacactgaatggttacacccacatactaaaattagaatatgtttccattgttgggattttatgccctaaataaaacccaatttcattgtaatcttatttactttcaataaagatcaaaaattatatcttgaccttgtcatatgctttgttcacatattttatacatgattatagatttaatatataagtgcttttaaattttgaacatatagttattcacaattatagcgatgtcatcacagtagaaaataattatgattatacaattcaaactatttagtctcacgatttattagtgcactggatacatggtgacatgataatcaacgataaagtttacttacacactaatatgtggagtgttcttttcagagcattagtaaagtatactattattggatgtattagctatacatcaga

SEQ ID NO: 251865 - DNA, 921 bp, Cannabis indica
ctctcttcatcctctacgcttcccaaggattggatgctccttccccccatgaggtcgcttggttcttcaacctgaagtctacccccaagcaaggcaggtcggggtatttttacttctctcagccggtattcaagtggttgagcggcacggatgacaaggccatcagcaaaatatggcgttttgttgatgagtacttcatggtgaaggatccgagcgtcacgcggactcggtttcagcaaattctgacatatcaacgtcctcccctcacccttgctcttagggatagagctcaaaaacttgcctgattgctggaggaagacaggaatatcatccagttgacatctgatgataatctggtgaagtacaggctttacccagtggacttttctcctaagtccgtggcggggaagaagcggaggtctgatgctggccagcctgaacgaactcatttggagaatgagttgattcaactgaagcgagaggctaagttgaagggaggtgccagggccaagcagtatgctcagaagcctttgcatggtgaagatgaagccgaggctgaggctgaggctgagtaggtgaccccattgaagaggaagaagaaactcccggccacgcccaggccgtgttgaacatgcaattcgcataagggagcccatttcacctgttcggccatcttatccctttgcttgaaaagggaaggctgtcacgtccgagataaactcgatgtcaggtgatgatggaattttgactttttgggcgggcattcattctgcattttacttctttttcagttatcttgactttaatgctttgtattttctgctggctttgtttaaccacgctgttttgttctgtgcagcatgtctcggtagatgcttgatgctctaaggaagaggatgggcagaagctctagcgcctccc

SEQ ID NO: 251866 - DNA, 568 bp, Cannabis indica
gttatacccatatttcgagcaagtaatatggtcatgacacgtattaaaaagttggaaaataaaccagctcgtgttatggagcattaaatgcgttcaataaattcgcttcggataatacaattggtagaaatatttaaactcattcttccgaagataagggcaagccatgaataataactaccactttgtgagaccagcaagatgaataagtcaatataaaaggtccatctcgggatacacgaagtacataacagaacgacactatgttagaaagggtagataatgaattttttaagagcttgcagctcattaacccacatactcatgagtatgttgaaagactaagagaaatacacctagtataattcatctcgttaccacactattatagtgcctcgcatttggctcttttgacattacataaggacgcgagaagtatttccaagattacacttagacacaaaaaagttatcttcagaatgaagcatcctaagagtattgtttgtattgcaatatgaagaagcataatcagcaaaattgtttatagataaagaaaaggagcagttat

SEQ ID NO: 251867 - DNA, 602 bp, Cannabis indica
gacttctaacatgcccaaacacttgattggacaaattagtatgtctaatccaatccagtcatgcataccaaacggaccttattggtttttctacatgtggaactatttctagatcaatgtagaaatttttcaaccaaactacttccttagctcctttatcagctgttatatatttgacttccatggttgaatctacaatactgattttcttaatgcttctccaaactacaactccaccaacaagtgtgaacactgacataaattttgatttctgactatcttcgtctgattgaaaatcgaaatcagtatatccaataggatttaactctcaaccaaaatatacaagcatgaaatctcttgttctcttaagataattgagaatgtgctttatagctatagaatgttccaaacttgcattagatgggtaatgactaacaatccctacatcatagcatatgttaggccttgtgcacaacattgcatacatcaagcttccaacagctgatgcataagggtacttttcatgtcctccatctcttgaggagtctttggacattgatccttgtagagattgattccatgtcttgatagtaactgctttt

SEQ ID NO: 251868 - DNA, 5978 bp, Cannabis indica
gagtaggatttgattgatgatggatggaatgatgactaagtggtatttgtgtaataaaacaaactttgtaagtaaaaaagtagatataagcgtgtaggagtatttaaataataaattgtgcaaaagtgatttttcatgtaaaaaatttcaaaaaaaaatgtacatatattttattaatctataaatatatacatataaagccacgtggcagatatatgatgaagtccaacaatgtaaaaacacttttctcttaccgaacattacatggctttccttcgtccctagtaatcgtctgagctgtagttaggtactactctccccaaaaaaatatataaataaatacaaattttaatttaattattatttctaaaataaaaataaaaaataaactaagaagaagaagaaggtagtatcgtctggtgtattctccattgttaatttatacactcgtcaatttcaattccaatttcgtattctaatccctcaaaaacgaccatgtcgaacccaaacgatcatgtcggatctccaaaattggaaccgtcgccatcgcctgctgacgtggagaatccgatggcggcggagggatcagttggagtcacgggagtgttacggcggtggaagagggaggacctgttgagaagaggctctttagctctgagaggaatggcttttctcttctctgtattgtcttttattataatggctacgaataaacacggcgattggaaaaattttgatcgatatgaagaatacaggtaaaattcatattcatattcatattaatcattactaatttattgttattattgattttttttatttgatttaattttgttaggtatttgttggcaatatcgattttgtcatctctgtataccggagctcaggcattgattaaggtccgggaactctccaccggaaaattcttgtttaagcaatcttcttccttattgttcgacttttgtggcgatcaggttagttcaggttagttttttttattattattttttaattaagaaataaaatgtgtttgtatttattattattattattattaataagttaattaaaatttctcatattgaaattgttggatatgaaattttttatctaatttaactaagaaaaatttaaattttaaagagaatgatttaatacatacataattatccaattagtaaattaaatgaaattcaaagtcaagttcaaaggtataatttattaggaaaaaaatacttattattattattattattattatttttaaaggggtttatatttattttagttttttttttttggaacaactaaacgttatgtttattttagttattagttgatttttgttataaaatttggtgtttttggttggaataatttgcattacttgtaataattaagatatctgatgagaaatagggtgtgtgcatgaataacaggctgagatcttttgttattattataatatataataatattagtgtaaattaattgattggacaaagtttaattacatgatttttaggacaaatctcataatttttttatacgtttgacacttgttttccagctttaattctggttataatagcatgtaataagtaagcatatattgtttattgtatattattggtactgcttttccttaaaagaaaaatattaatatagcctctaatcaaatacattaatgaaataaaataaaaggtttataaaataagaaaagtgttaatgatgtttaagaagaaaaataaaacccttttgaaaaaaataaagaagaaaaagatttggtagtaaagttcagataagaataggatgatgatgagtatgtggtaaaaactggtcattatgagtttgcacatgttagtggcccaattttgtcttcaaaacttttggcttattaaaaccttcattttataacccataaatcaaatattcttaatttttaataaagtgtttttacaaatttattataattataatatatataaagaaaaactttttactcatgatgagaatttgaattttatttttattatttttaaatgtatgttacgtgtggaaatgtttaattttacaattatgatatgcacgcttattttgtagctttaaatttataattataatgtgtaattaatcttaaaatatacaattaaatatgatactattttcacttgaaaatatttataatttaagatcaattataacgtgtaattttaataattttaataaccaaatcataatctaaaggtgttattcacaaagtcaatgtaatataatattaagtcttatcacatgtttgaaggttaatttaaagtttaataatagagtaatttgtggcataaatacttaaattaaatacttaagtttaattctagttgcaaataaaaacttaagttataattttgaaacttttgtaggtaacctgactattaagtgttaagtaaattaccacgtgtcaattcttgattggtcaaagtcattaaattttaaaaaaattaatttaaatataccaataaaaaaataacacacgaataataacttaatatctaatagtcaggtacctacaaagctccaaaaatataatttaagtattattaccgctaaaaattaaacttagctatttatttgcaactgtgattaaacttaagtatttatactgcaaattactcttaataatatatgtatacttatatatttgaattaaaattgagaattaatttgcataaatatatatatatatttatatatatatatatgtgtgtctttgaacagattgatgcatacctgttgttatcagcagcttcatcagcagtgccattaacaaacagaatgagagaatcacaagacaacatattcacagacacttctgcttcctccattagcatggccttccttgctttcttcactttggctttatctgctctcctctctggtttcaaattatcaaaccaatcttatatttaatctttttctattatatatatataaatattacagagtatattcttcttatatatgtgtattatgtatttgaggtgtagggtgtgtggttttcatgaccattcattcatgtcattctcttaatttttttattatttttaaatcataagttttggttgtgcataaatatgtgttctcttgtgtaattttattcaacaattgagcaaaataagcaaaataatcaatgtatacatattattactttatagacactcttcaagttaatatattttaaataacaaagttatttaaaatttattacttttattttaattgctcatattggttgatgtgtcaaaattggattaaagaaagaaaataataataataaaaaaatagatacaagaacttctttcgaaaatggcaatctttaatttattttgtgaaaactactacaaaacaaatggaacttgactttcagacagcaatgttattattatttttttctaagttgaaaaaaaacaaaacaaaagctctacaatgaataaacaaatatatctataacaaactctatgtaagtaatcactataatcctatatgaatacaacaacactggcctattagagctatacatcgaaattttccatgtaattttgttctttttttttttcctaaatttgatcaagcgtgtcacctatgactacaaatcattctaacctaaaaatgtatcaaagaatgttgaatcatccttttgctctttgataattatgttcctatcttccttgctcttaaagaaaacgctttgaggctcgggccttgaagcgtacacaccagcaggcgggtttgattttccaaacccgcctgaaagtccaaaactccccgagccatgctgcagcatttgcagggtgtatggagtttggtttgttaccgagtttggtaaccttgcgttgggaacagaggtcgcgtaattcgaggggttagtagtagcgttgttgttgttgttgttgctgttgttattgaccaaaggcattggcctgtgtggcattgtagtaacgacgtcgtttgagatggcgggcctgttcatcgcgtagctgctgctcccccgagctgcagggacatcatggttgtgtttcccttcgtaagtagtgattaccgccctcatgtcgtgcgatgctcgctccacgtgttttctcaccggacaaccgggtgaggtgcacttgtagtagctcctacaaaatcaaacaaaaacaattcatatattgctcaacatttctaaattaaaatatgtaagactcgatatttatgaaaacctaaaaaacctacctcgggtttggatttcctttgactactttttgaccatattttctccatctataaccatcatccaatatatcaatctcactagttgtttgaacaacaactctaggctctttcacagttctattcccagaagctgaaaaaacctcattttcattctctcctttcctacaaaaccaaatacaaaaaaacaacaattaaaccaacttttctagctcaacacagagttaaatcaaaagggtcatcacaattctaattaaagttcttaccatctcttagcttcaggctcattgtcctcattatcttcaaccaagttaaaggaaggcgaatttcgatcaaaaccctcttctccaattgaatctgaggaacaatcctcatgtaatcctaagttctggacagaatggtctgaatttgtgggattaataataatattatgagaagatgatgatcttctagtggattgaggttttggatggttgtgatttcctctataaacaatctcagtaatctgtccatctaaagatctctcaactttcttcttcataggacaattaacactagtacacttgtaataactccttggattttcactccctttcacttgtttttgtccatactttctccaattataaccatcttctgatttttgctctctaacatattgagatggttgagcataatgatgggtttgtggaattttcaattctgaagttgatgatgatgatgggtactcacttttcacttcttttttctcaattggcaaacttatttggtttgtggttttgttgaaatcaaattgccattcttgttgttgttcttgttgtggtctttccattgacttttcctaataaaaagaaaattaagcataagggtccaaaaatgtttatgcaatctcataaaaagtgattttttttgttcagaaaaatccaagaaaaaaaggtttaaataaacataccattgaaacagggccagttctggtttggaatgagaaatcagagaaaaatttatcttcttcttcaatttgttgttgtttatccttagaaatagaattactcctccagtcaaaggtttgaccagtaaaagctccagttgttggagatggaagagcctgaaaatcaaaaaacaagacaaacccattaaaattaaagaaaaataagcaaaacccaataaaacaaatcacacataaagctaaaaagacaagacaaaagcttgctttcttaagattaggaaaaaaaaacttacattagaagaagagagaaacataggagagttaagaaaaccagttgggctaaacccagatgaagttatagccaaaaaagaagaaggggacaaaggattaggattaggaagaggatttggttgaagggttttgaaacttgaaaaatcattattaccattttggtctgaaagaccccaactggtcaagctagagttttcttcttgcctaatattaatattattgttattattcatgttaaagttgttgttgttgttattggcaagaatgtcagtgaaagaaaaagtcatgagagattttgtttgggtttttgagtaagattaaatttaaggacttagagtatatatagaagaagaaagtataataatttaaaaacccctcaatgagaaaaaattaagtgaaatgagatgagcttaaaaattggtatttgatgtagaaatggagaagagaagagtaaagccttttaaaaaggtttttttttttt

SEQ ID NO: 251869 - DNA, 697 bp, Cannabis indica
aacctcccacttcacctctgaacttgttcctgaacctgtagtttctacgaatgaggattctattgattcttttgactggccggcgatggttgcttcacaaccttgccaatcatcatgaaatcttaggctggaatgctcgaggattggggaacccgaatgcattcaaacatctctgattgcttgtcaatcaacaatcgccccatgttcttttcttatggaaataaacttcccaataattccatttttcgtttacgacagtctctacgtttcaataacagccttgaatttccttgagtcggtttgagtggtggtctaatgcttctctggtatgatgatattgatgttacactacttaattatggtcacaccttatttactactatttaaaagctgggagtgagcctagttttcattgtacatctttttatggagcacctgatgctcaaaacaaagaggcatcttggactctcttccaatggtttgctgatgttgctttgaaccttccttggttagcaattggagacttcaatgaaatcatctccaatgataacaaatctagtggttgccttcgcaatgagtcacaaatggaaaattttcgtaaggtgttagagcactactctctctaagaaactccttttgagggagaacctttcacttggattaagaatcatttggctcccgatacaatcaaagagag

SEQ ID NO: 251870 - DNA, 1542 bp, Cannabis indica
aacacccgaggacctgaaacaaaagaatcaagcgtaaaataaccctaaaactagaaacaaagagtaaaaactatccgaaaatatgacccgaaacttagactaattttagcctaacaagagggtcggatagggctaagaaaaccagaaaatgattttttcccttttcaaaaattatttttgttggaaaataacttaaatggtcaaatgaccaaaatgcctctagggtcaattataaccacacatatatatacaagggaaaaattgtcattccaatcacacatacataacacaataattcaaattttctcaattatcttataaatgccataactaaatcccgaaaatgtattttggaccccgaacccagttcagcccaaaatacccgattgtaactataccgcgctgacttgtcaaaaaatacctacagataggcagaaaagacatactatataataatatagttcataagcatgatatatcataaaattatgattttacccttcttgggtcaaaattacgattttacccttatcgagtcaaaattacgaaaatgtccctaacacaccaagtgggtcttaaaatgcaatttatcaatatagtttcatatattaaattatataataatataatttctcattaatacataattaatcttgttagggttgctaatccggtttcataaactttagggtattacaaaaggagatgcccaatttgcttttagggcaagtaggagattgttagggtttataccttgaaaggcctataaagacttttttgattatttaataaagagttgaacattttgatatatgcttgaatatttaataattaataattattattgaataatttacatataaatatcgaaaaatttcttattcatatatgaggatgtggcttgtagttgtacagagaactaagaccacttaactatgaataaaatagttaacaacatattaaagttatggaatctttaatcaacgattgctagtacagttcaatgatgctcgttctttggtgcaagtaatcttagttcgaattatggatttagtatgacattaaagagaaggtattgtatataatagagattatatatgacaatgaccgatatgaataaaattgtctttatcagcatgtcatttactataaatacctaattcatatcatcatgatgattaatagtaaatcaacctttatcttgagtaatcatgaactcttattcatgttattagtttttttaattcactctttaaagtttctcaaagaagatgattcttacaatttatattttgagaatttaataatatggatgagtgggaactgatttacaattatggaatcctcaccttcctaaagaattgaatactggttccctttaagtgttaattatagaactggaaagttgtctacaaatttagatgggatcaaaattatatttccactagtaaattaatggtactaagggataaaacaataatttgaccaaactaattacaaaccaagacatgagggctaatcactagaattgattgtatcaat

SEQ ID NO: 251871 - DNA, 653 bp, Cannabis indica
ggattgaagtgggatttttcttatggttttcctcgaaaggatatcgtatgggacttggctctctagttttaggtctttgggtacttggcgaggactcttcttgtgtaacctatagtcctgcaggcacggtttggggatgcacatgaattcttattgtttccatggccttttgtatggcaaccattatttcttgaatccttctattttgttctttttggcggccagtttggccttgtgattagcgattttttttccttaggaccagtaacttagtgtagctaccgtcatcataagcatcgtatcgtttgagattttctttgtactcctcatcgtttcacccgcctcgttcctcagagcccacatttactcgtgaagctgcctcttcaccctctgggtcctgaagatccttggggggacggggttggcatgtatggttccgagtttccaccattgtagctttgattcttcattgtcgtttctcaaacaacgcttcccacaactctcaatgaaagcaccaaaatattgactgaggttttcgataaccaattaaataagataataattagagctttagaataattaatataggtgacttttgttggaaatattttacaaggatctaaatttactaccatgtatgtttcattaacatc

SEQ ID NO: 251872 - DNA, 1062 bp, Cannabis indica
ctatctaacaaaatatgaccactcgtgattattgatagtgttgattaattaaacaaatgatgtactaaaacttcattttatcagtttggtgacaaaattctacaattaagcattggaagtcttggaaaggacaattccattggcatagttactcaagtggtgttggatacagcagtcctcaaagaaactaccaatggtgtcaggatcaagacttggcaggttgtactacaagttatttgaacacaattttctcatgttaacaactcaagtgctcgaagactcgtctcttacacgcgtttctttctttctttctttgtggggtgttgtttttcagggaggttctggttatgttcaaggcgtacggttccaaaatgtgaagatgatagatgtagccaaccccattattattgatcaattctactgtgattctccaaaaagttgcgaaaatcaggtacaaccttcaaattcaatattatatttccatattttgcattcaaattctagtaataacactcaagcttcttcttattttcttgatttgccagtcatcagcagttaacataagcaagattatctacaagaatataagcggaacaacaaagagcgaaaaggcgatgaaattcgcttgcagcgattcagtcccatgcagcaacatagtcctgagtaatgtcaacttggagaagaaagatgggactgtggagacctattgtaactctgctcaaggctctggatatgggactattcacccttcagctgattgcctcagcactcacgataacaagaacattcaaccgataatcgatcacaatcatgatattatccacactgaactctgataatattggcttgcttattatacaacataaataattgattgttatgcacacacacacacacaaatatatatagcacatgccaaatagggtaaagaaacagtagagtgatgtgatctctagtaaggtttcttggatgaggtttgaggtgttcaagctaaattttaatgggatattacagaggtagtttatacatatatatatactgaaatttaaatgtgtctaaatt

SEQ ID NO: 251873 - DNA, 852 bp, Cannabis indica
ttcagaaaagcaaataattcacgctgcattgcttgattccatacacggtattgtgaagcctggttgtagttttgtaggttcgaaatgagctgttaaagcaaggatgaaagatttataagtggtagataaccgatcataagatataaatttatttaaaggatggggagtagaggttttatcctgaataacagagtgacattcatagtcacgtaaataggctggctgccttattactcggcttgttcttcttcgaagattatctgattgtggttgctgaattgggggatctgttgccgcattctgttctgtttctgaggggaagtttgcttcttgcgagtgtgagtcattatcttgagatgaatcactggtttcattctcttcttcggctgctggagaaaaatctgctatacttgcatcattaatattagcagtaggtaacacaatatgagagaaagggtcaatatgcaggctgtcattgttaagtttgtaaaaaggatatatgttttcatgaaaaacaacattcctagatatgaggaattgtttgttgtttatatcatacaacttatatccctttactccttgaggataacccataaaaacacatgtgcgtgttctaggttcaaatttagtgcgatgtgtagtaagagtagatgcaaaaaccaagcagccaaaattccttcgatgttcatatttaggagctttgttaaacaataatttataaggagtagtattacctaagttgggagtgggtgttcgatttattaaatatgcagcagtcataatgcattcactccaaaaatcaataggtaaattagattgaaaaagcaaagcacgggcaacatttaaaagatg

SEQ ID NO: 251874 - DNA, 608 bp, Cannabis indica
acggccatccgacaaccgatccctcaccagtccaccccgcatcgtccctgtccaatggatctgtaagatagaaagcatgaggatatggattagatcccctcctttgacgttgatcggcaatagttgtatccctcgtacataaatgtgatatttaccacaaataataaaggaacaataaaacgtttctaactgtgcaatgtagccgtcgagacccatgccttcaaaaatctgatgaaacgcaagtgcaacaaccaaaggtttaatggtgcactgattctaagacattcccgtggttaccccaataatcacagagtgatatataatcccaatctccaaaacttgagacactaatctctgcttcatcctcaccagagagagatgggaaatgtctgccatggcttccaagagtcacgtcttctcttgtccattctactgatctggatctctatcgtctccacctccgcaaggccctgcaaaaccctattcatttcctcttacacattctccctccgccaaccccaattccactcctcatcgggattcgtcaccattttcgccgaggttacccaattctatcgcgtcaaaggtgaggcttggatcatagaaga

SEQ ID NO: 251875 - DNA, 593 bp, Cannabis indica
atatatattatataatttttaaagaattcaaaaattaataatattattttagtgttattagtttgttatgatatttgttttaatttattgaaattatatagtatttatgtgatattgtttatgctatatgcgttttattttttatgctattgttatattatttgtttttgtgaaatcacataaaactgtcaaaggaaaaattaaagatgtgaagttggattttttgcttgattgttgtttgagtgtgttcttttccttttctttttattgtgtttatttatttaacaaataattttgtaactttttttttttaatttgaattgcagacaataaacctaaagccagggaagatatattgctgccattgaagattaaagattgaagctttttaatacctctaatgtgtagatttacattcgtgattatggaaagttttactgatttttaattttggatgaccctaagttagggtggttaaaaaattatttgtgaagacattattattttttgttttagttttaaatttgatttttttaaaaaaaaatattatgatatgaaattgaattaaatatcaaatttggcattaaatttaa

SEQ ID NO: 251876 - DNA, 737 bp, Cannabis indica
gtttatggttgttatgttaagttcatggattcctgagagttcttcatatatgcttatcatttctaattgtgtctatgttttgtgaatttctgtaatttcctcatctacaatgattcagatgcctactggtttgatgattggaaacatgagttgaaggtcaatacattgagagttgaaggagaagaagtaataaaggaatgtgccaagctagtggaaaggtgtatcaaagagaatgtggatgggagatcagacatggtggaagtagctaaagctcgaatctttatcaaaaccaacaaaaccctttagcttaaatatatattgtgtgtcttgtcttgccttgttatattgttatgatatgttattttgatatgagatgagatgattgtagaaagaaaggcttatgtactgtcatgatcatatatatgacagtacataatcataaagtttaaacaactaagtaaagtagactctgttcaatcttcaaactaacacagcataaagtctaaagatttctgtggttgctcatctgtgatgccactacaacttcatttgcaatcattttcaagtgtctttcgttgttaaacgttggaaagaacattttccccgaaatttcttcttcatcatcattaactattattgatcgtttgtagagtgtgtagttcacgcaggagtgtttgatttgggttggatggaagttatagccgaagtgtattcgattttccattgaacaaacgaat

SEQ ID NO: 251877 - DNA, 527 bp, Cannabis indica
gaccattttccactctatccaagcataaccaatgttccacaaatgatgcatttataaactttcgcattgcatctaaaggtaacatagtctgattgtggaatctatcatttctgaagctcaacatgtctcatgggttatttaagactcccattaagcactagttgtacatgttagctaggggtcttgtttgtgcttcagtatttttctttttggttcccaaccaaaccaatgtgctctgtggagtgaaattaatcggacttgtattgaacatattggcgctttttttttcttctgaaagtccatgtcttttgcacgactgctgtgtgacaatagaataggaactacgatttcttgataatttttatgcataagttctttttttaactgttattttatcccctagatgcattaattatgtttttactcttagtgtgtagtcaagaactgatcattctatcttttgtgacatcttattcttttgaaaccatctggtgctctcttagatatgcatgtatgagcaccctgaa

SEQ ID NO: 251878 - DNA, 1390 bp, Cannabis indica
tttttccacctatatataaataaattgtaaatactttaaatttagtattgtcaatttgagatatatacaagtactttatattaaaattattatgtaggtaattgtctccaaactcacgcactaacattgtttattttattttatttggaaacacaagcactaatattattgttttgcatctcagtttataaagatacagagtcacaaaaagtcattattaaattttccttttccaatactgcccaatagctgtcaatgtatatgccaaatctctaattataaaccattataattaattagtaagaaaagaaaaagtaaacaaaaagtccttataattcttctttctttgcattatatattttttagagggcccaacaccttaacaataggacagtcccaaacctttagaaattaaagaaaaatgaaatgaaacattgaatagaagaagaggactatactagattacatattggccattgtttgtaggtgaatgtgacaaataatttatgagggaagtagacaaataaaaatatttttaatttgctttagtcagcatttagtgtacaataataataaagttagatccctatggatgagaaaaaaaaaatatagtactactatccatcaattcaagtaacacacattacatacattttattcaataaaatcttatacaaaacaaaattgtccccacatttgttttaaaatgccaaactgccgattcactttgtatgctctacatgtgtcaatattaacaaaatattaatatatgctttttgttttggttatgagtcatgacgactcgagtaaattaattagttttgcatcatataattttgtgttattgtctttcgatatttttttccttttctttctcaagtgttagaattagtcgattgtgaatccttttctcaaaagggaataaaaaaaaaaaacttgggcagtgggatagtgaagtagagatgatgatgaattgattgaagaacttcccatattaattacatcttaattagaacaataatttaggttttcttttatttttttttacataaaaagtataatttaaacctaaaaaaaattatgttgttagtagtaagtgcagtatgtgttttatattatatacataacatttgtatatgccaattattaatgtgtaaatatatatatagttatatataaaaagaacatttgtatatgccattgccaacccctttatgtataatatgtaatattattaatatcaacgtttgactcgctcgctcctaccgtgcatggtggacccttttaatttggtggggctttagtagacaaatatggtggggtctgtgtcctcatcatcaagggcatcaatcagtttgagagaaggtttcaaaatataaataataaataa

SEQ ID NO: 251879 - DNA, 1007 bp, Cannabis indica
attgctgtgagacttactcaccctttgtatatgagtcaacttaatgtctttattgttgcctttgtggtggtaaaagcttaacattttctcacaggtggcaaatggagtaattgatgaaaaggtagtgagaaaaggaaatgaagctgtactgaggtaaacagtgtgtcgcaacatcttttgtttgttccaatataaaagaaatttcatatttcagccaaaagttttggacctcataaaaccatttatttgcttatttaaaagattaaactgtttcactatcttaattctgttttgggtcattgagaagctggattacttaatttgacttcaaagcaagattattgaaatggattggcttgtattattaaccttcaacattattggattatgtggctgagtaatccatgaggtgttaccaataaatcgcgatcaataactgtgtgcagagcgcgctatgaagatgcaaaattcttttacgagttggacacgcggaaaagattttcagaattccgaagtcaacttaagggattcttttccatgtaagctattttcctttttaagtggaaacatattttctcatagcttaaatgttgaatgaatattaaaacaaagaataaaggtatctaacttctcatattatattccaaaatgtgatattaaacaggagaagctaggaacaatgctggacaagatgattcgtgtacaaaacatggttgagaaactaagtttggccctgaaaattgataacaatatgcttcaagctgccaaagatgctgcatcacttgctatgtctgatcttgctactgcagtcgttacagaatttacgtctctttctggaataatggcccgtcattatgctcttagagatggctattcggagcaggttgtttatcactaatattcttgtttatatgtatttaatgtatatctgtagcctaggattaatcctctttgattttgtatttcctaattgtagatatcagaggctttgtttgagatcactcttc

SEQ ID NO: 251880 - DNA, 1173 bp, Cannabis indica
aaatgaaaaaaaaaaaacaaacaaaaactgtagttaacaggaatggtcaacttatttgatttgtgtctttatcttgtcaaattttgcaaatttagaatttatacatgttatttatataaaaatatattatgtattatactataatactatgcattatgtattataatacattcattatattaataatagaaattgcgggattgtgaccccttgtcccaaccattgtagcacgtgtgtcacccagggcataagggacgtgatgacttaacgtcatcctcaccttcctacagcttatcattggcagtgtgctcggggtttcaaactcatccgaaatttagcaattcgtctattcaataccttagggcccagataactcaattttctctgatgaactatttgtgttaatagattagttcgatccaaaagtctcactatgtagatcaagtacatacgctgatttacaaagataccttccttggacctttgcaaattccattctgagaaaatattttaatgcacccaagtctttttcagcttatcaagctcacattgatcactcccattcaacataatatcatccactgacacaatcaagatgggcactttccttcaaatatttatagaacattgtatgatctgcctgactttgtgtgtgtccatggttgtttatcactttaataaagcccttaaaccaagctttagcttgtgcccatataaggacttcttcagtctgcacactttcccagctccatttttttttttcatggacactcttttggctctccatgaaggaagggcagatagaatttactacgagagttagcaatgtttaggatgaaatttatctttgctacaggtgcaaactttagttggtagtgttttttctttggaaactaggatccatgcctaaccctacagtcttcttacactatggcaaatctacaatctcccaagtgccattcttcaaggcattcatttcttcaaacactgccaatttccaactaggctcatccaatgcttcttgtatcttcgtaggtacaactatgtcaaatagtaaatcctctatgggtttttgacatatggttgtaagaaacttatttggtaatgggatattgagttctggtatagattccttttcttgatccagtgttattataaggattggttgggaga

SEQ ID NO: 251881 - DNA, 1411 bp, Cannabis indica
atatatatgtatattattttttaatttcttccttttactcttttcccaaatccttgattttgttgattttgagcgtacacttgattaaaataaattaaaaatttaataaaagttatcataccgaaaatccttgaatccacgtaccttccccgtgtcccaatacagaattcataatcaagtgtgtgcgtctcttttttttttcttcttttctttctcattttacagcagcttttaaaaatgtatagtaaaagttacagcctagtgagatggataaagcaattaagacttgatgagaatcacttcatttcatcgttggcctaattgatttatcagttgaaaaaaaaatgtatggtactgtatgactcaattgtgttgaaattagggtaggcttgaaaagtctcttaggatttataaaccaatttgttttattgagaaaagagagatagacggtctagttcaatgctttattcacatttttaatcaaaccaatttacagataaatcaagcaatgatggtgagaagacatttgctattatcattggattattagctggagttgccttaatcataatcttccttgctttcctgcgaaagatctgtgaaggacatggtaagctttgtttatttttgtgtatgaaatatacgtgcttcattttatctttaataatatataattatatgctttaatctaaacttagaaagaaaaggtcatagataaacttcgatttcacagacaatttaataaactgcggcattaactttttgccctatgtatgcaggtaaataaattatgaagttctttcatctaagttttatgtaacatggtgaagccctttatctaaaacccacgacgctgagcaaagtgactttctttttggtggcttccttttctcttcattatgtaacttttgtttctccttttcccctttattttttggattttctttaaaagatggtccataaaagagatgggaaagatggtatgatggggcacttgtttgaaacaatgtttaaaaagagaatattcctaacctactctccacttagcaaaattgtccaaaataataattaaaaaaaaaaacccatattctttttgtaaagggcaaattatgtgttgctttgttattaattttctatgcctttgttttattatgttgttcaactttttttttgttgagttttcatatgttagaataataatatgaaactatatggatatcatgattatgaagaatcctatatatgcatgtaaaataaatttgtggattgaacatgtataaataaaggatagtatatgtgtatctccaaacattgatccaatcattgataaatgtaagtggttttttctatttttacatcttaaaacagtatttttttttttttttttttttttgcattttttatggaattt

SEQ ID NO: 251882 - DNA, 776 bp, Cannabis indica
actatatgctaatgacatgtgccaccttgtttgtttggtattaatttgctttttcgggaaaaagctctatgaggaatgctaattttgctgctcatgttttggctaagcatgctttagggttggaagaagctagttgttggttggagaattttcctctccaattatagtttgttattgtaaatgtactcttttaatttatgataatggatattttttcttaaaaaaaaaagaaggaatgatgaaaattgaaacaataaacaaatctttgtcatttttaccggacgtgtgaatcttgtaaagtaaattcattggttttattagttagttttttaaataaattcagagtgcatagtttttttattctaacccaaataaatatatacaattttagtttgaaaattttacataaaaataaaataaaaaatacatttatcactaaaatacctctacatgatatattttaaatatcttttattttttaaaaaaattaattattccatgcaaaaaatattaattactaagttacctcttactcatactcctacacacacttacacacagtgatgtcattctgtaaccatcgcacttaaatttcacagttcactcacttcgtttttttttttcaatttcactttttcattttgaaaccacaatcaaaaatctatttctcactaaaaaactttccccataatttttagttttaatccttgctctatttctccatcatccaacgatttatttacaattgttctttctataaattcctatttaaatgg

SEQ ID NO: 251883 - DNA, 783 bp, Cannabis indica
tttgggtacaatacatataaaaagaggtatgtttcaattaaatatagaattagaggtaaatttgattaattgattaataaaagtggtatttttcaacttaccccttagtgttcatcattcactaataatttagggatttttacaaaaaatactgtatttgggacaaatttacaattttactgtcacacgaaattttttataaaaatactctctatataaaacaaccgtaaaatactaaacaaaataattaaaaacaataatggaacaactaaaggtaacagtagaacaattaaaaaacaaccatgaaacaacaaatgaaacttaacacagtatacagcatagaaaatatacagtatttttgaaaaaaaaaacagtattttcaaaaatgttaatctatctggcctcttctaggcgtttcatttcattcaaaaatgtctctcaaactcaaagtatgcagttctactaagcttctacttctaaaaatctcatttttttaatcagaatacaaaagaaattttttaacaaaaagattgtataatttgagatcaattttgagttggtctcaatcattgcactttttatttttatgtatctggggttgagggtggattttttgttatgatttactttgactatcaaaaactctatatacttttgtttttaaaactagatttgaaatattttgctcttcaaattttaaatacgtttaaaatttatgatctggtctatattattgatcttacatttttactttttcaaaaaacttgattattttttatataa

SEQ ID NO: 251884 - DNA, 803 bp, Cannabis indica
tccaccaatccgagtaactactcccacgatcccaagttttttcgccattctggtaactgccctccccatattccacgatcatcggtgtatcgttgcttccggcaaccactaccggaggagatttcctgttgttcgaccactgtcagccgttgatcatccacccgtggagcatcattatcactcggcccttgactatttgggtcttcatccttaagccaagaaccatatttgagtacaacagtcccattcacgtctgtctcagtggcaggcccgaccctgggcataggcgggctaggcctatgcctagggcccacctatcccaggggcccaaaaaaaatatttaccttttaaaattataccatttttttactgattttgaaaaataccatatttttgtctaaataagagcccaaaataatttttttttctatggcccactaaaagtcagggccggccctgctcagtggcttcctctttctcacaatcaagttgttcatgtccccaaatgccacatttaaagcatagcaacggaagcttcccgactttgaattggacccaaactttattaccgtttgatggaatgaatctccccacaaagatgctttggtgcaatggaaatccgatgcgaacccgcacataattattcaaaaaaatttgttgggtgctattccatttgatatccgacacttctcccgccatcgcactaatcctcttaacattgttcaaatgtgaagacatttaatggaaatcctcgtattttgtacccaagagaaaacttggtcaagctttgcatcttgccaatt

SEQ ID NO: 251885 - DNA, 797 bp, Cannabis indica
aaatcctataagctatccaaaccagataggtactctcgtcctctatcgaaatttgattctatttcactatagcataattgacacccacttttcacatttcgcatcaaaatcataaatatttaattggtgatcaaacaattaaaagtaattaagtacgaatgaaatagaatacataaaaattagggtaaaactaaatcacgttaaaaccataaatcaatgtcaaacaatattcatataaatcctaataaaatatttagctactcatgttcatcgtagcaaaatcacacatattaattcagaatagaagaaaaaatagagaagaaaagaatattgaaaactccattaaaaaaaccttcgtgattgaatttgctctctagttttttgtactcctcaactgcctctaattaagagtttctgagtttttttagctctgaaaatctactaaaaatactaataataatgtttttatataggctaacaaagatacctaaaagatactaaaaatatttaaaatttaaacttaaacaagataaaaatcgcagctctatcttttttttggctatctttttatttatttttttagaaatttcctactacgatgactgatagtatttatgtcataactatcttgatattactcagaattggacgattcaagatgttctgaaaagctgaaagagagatctagaactttgatgttttgactttttcccaaatctgatcagatcatagtagaattcagacttgaagtttctagttttattttttggtacaattttctctattttatagatcat

SEQ ID NO: 251886 - DNA, 332 bp, Cannabis indica
catatcttaatacacatttggggtgctggggctagtagtttagctgtacaaaaatcagcatgctgtggttcttaagctgactaaaattatttagaaagtggggggatgcattattattgcattatgctttggaaatgagaaagaggaaagaaaactaattgtatgacaatatggtggatgcttgtagtctaattgtcattcttttgaacttgttcgtgtgagataattcttattgtttgaaaaaattgtgtcaaatgtaaaaaaaaaaaaaaaaaaattaactatcttatttgttttttattttattttgtcatgaacaactattttttata

SEQ ID NO: 251887 - DNA, 483 bp, Cannabis indica
ttgttaaaaatgaggacttataagaatcttgaacttgaagactattaacgctattttttaaaattagagacttatctatatcaaaataatgaattttttaagaatttttaccgtaatttttcctaatataaataataataattaaaaaagaaaatacttggaggaaaaaaaaaaaaattagtctttaaaacaaattgcaacctctttggttccatttattttttatatattacaatatataatttgaaacttgaagtcaaaattttcaacatacaccatcttcctatcatcagttgaactaatatgaggtggtactttccttccacttagtactgccataaaataattaacagtcccagacccagaactagtaatagtacttgactgactttaaagttactcttaacaaaaaaaataagaaaaggacagacagagacccaataggctaggaaaattagtcatgggtcaacttagggctaactc

SEQ ID NO: 251888 - DNA, 517 bp, Cannabis indica
aaaaacaaaaaaaaaaaaacacccaccaaagaaccctaagcagtaattttctacagaatcctcataatgaagaaatcaaaaagcaaacacaagcatttccttcatttgggtttccgataaaactataaaataaaataaaaactatgccccaaacatgtaactgatgatctcaaggaatccaaaaaagagaaaaaattgaatgcttagacttttcttttcttttcgaaacatttcagtttaggaaaagaagaaagacgaaaaggcctaccgtaataggtctctcgggcagttgcatgcagatagagcagttgagattacccccaagaagctcaagtaggtcattggtcttgggaggtccaccatcggctggtccgcctaggggtgttgtcactagagtcgggtgcagcggtgtcgaagttgtgaagcacctcccagtcgttgaactcagtattgtccccgtccatggtgagtttggagtatcgaatgaagaagaagaagaaagaagaagaaaaagaaa

SEQ ID NO: 251889 - DNA, 654 bp, Cannabis indica
atatttaactgacgcctcaaatttaaaaaaaaaaaatcaaattaaagggattttgccaccaaaaaaaggactacttacaaaaatattaaattttgggagcacttttacatttatactgccatacgaaaatttttacaaaaatactatcctcatcttaatttttttcttttatattgtatacactccaaaacacatacgaagcctccatttgcaacacctacggtccgaattaccagagcaacactagaacagccaaaaaacaactattattccagtcagagtgtaagcatttaagatttcaaacctaaaacaataacataaaaaattacgtaaaacaattataaaaccacaataaaactaccaaacaaaataaccaaataaaatcacaaaaaaaaaaatatatacctcaataactcttttgcaagtggagatttctataacatcacgagaggaaaccttcaccttggaaaatttccccttaccctaaatacattaaaaataattcataacagccaaaaataaccattaaaaacataaaaaattaagtatataatactaaacaccgaatagcacatacagaacaacaaaacatataaaatttaacaaaattagagagtgatgaataaaatctcaaatcgatatctgagactgaac

SEQ ID NO: 251890 - DNA, 764 bp, Cannabis indica
tggaacggtgccaaaaatggatatactttcgcctgtaatcaaggttgatcattggctcacagtgatagagagaattcagaatttcatgggggtcgttggaaatgacagagtgacctgtgctacttttcagttccaggaagacgcactcgtgtggtgggaattagtgtccctcactctagacgtcactattatgacttaggaagagttctgagatttgttcaatgccaagtattacaacatggcaatccgtagtgctaagccgaaagaatttactgagctggtgcagagtgagtatgtcagtaacagagtacacagcaaaatttgatcgtctggccaagttggcttcaggtattatgcctacggacttcagcaaaaaggagaaatatctaggaagtctaaatgcaaaaattagacacgacttggtgattactacgaatgaagcgacatcatatgcatagatggttgataaagctctgcgagccgtgggtgcagtaaaatttcttcaggagccccgagtgacttcaagtgtttgtgagatccccactcttcctactcatataatggtagggatagtggtgattccaccactaatcaaaaaagaaaggataccccgtcatctagtgatttaggacagagcaagcagttacgtgggaaccaagggagaggtggatgccatggttattcttaccctaagtgcctacgctgtaagaaacatcatccaagtgagcgcaactgaaagatatgctttcagtgtggcatggttg

SEQ ID NO: 251891 - DNA, 1203 bp, Cannabis indica
cacaatttgccaacctatgaatcgatgctttggaaccattctattccaaatgtttcttgcataatcaaccttgtgggcttgaatataagagagataaaacagtttagcactgaacttacctctttttacaacagctatgacatttgattcattgacagttgaacgaagatgaaggatttttttgaagtaccagctcgcatcttgcttgaatttaactatccagaagctcaaccctcttagatatatcgcatcaatccacctaccccaaaggttgtcttgtttgctggatatagcctagatatactttgccataagcgttatgttccaaatcttcccttctctgaagccaagacctcctgagttcttggggagacaaactttctcccaagagggaatatggaatttgcttctgtttcccttggagccccaaaggaagtctctacaacatttgtcaatagccgccgtgatatttcgaggaagcaagaataaacccatccaatagttcctgattcccagaagaattgaatggatcaattgagctcttctggcaaaagagaggtttctgctagcccaagtgtgtaaattcttatggagtttatcaaggatgataccacagtcagcagatcgccatttggtaggtcttagattcacacctaggtacttcaaagggaaagaaccctcttccatttgtaagatgttagcaagtctctgtttacaggaaattggaatacccccaaagaacaccgttgatttggctttgttggcaatcaaacctgttgcttcactaaatcattggaaggcctctttcactatcttaactgatttgtcattgcccttgcagaagataataagatcgtctgcaaagcaaagattgacaaggcctaaggatttgcaaagagggtgaaacccaaatcccttcttcttagaactctgaatcagaagtctaaataaatactccattatgagcacaaatagaagcgaagacatcgggtccccttgacgaaggcctttttcacccttaaaagaaccttggattcatccattaagcagaagggcataagaggctccttgaagacaacttaatatccaggtaataaactttgaagggaagcagagagcttttaagatatcagccacaaagcaccagtcaaccgtatcataggccttgctcaaatcaatcttcatgatacatctagaagaaat

SEQ ID NO: 251892 - DNA, 1002 bp, Cannabis indica
gctacaaagtttggatcgttagactgtgggctggacggccacctggtcaaaatcctatctagccccatcctcaaaaaatgggctagccatttcctcatcatagtgccccgaggatgacccctttggctggatggtggtctagtctacttcaaattagctcttaaacaacacttttccgttggccagtgtactttccaggaaagtcgtgtcacccatgtaagaaagattagcattggagttgtacagcttcaactcataaaggtcggtcagagctatgctaaattgttgacccttgctggccattcctaggtacgggagcttgccgtggctagaaaggcctacacctggtcgttgtgcttggccggccaggcctacattggatagagtctggccggcaagttttcctttgtggccatttagacgtacaaagggtagggtttggccacttgcaatgctcctatggctggcaaaacctagaagaagcaaggtctggccacccatgaatcctcggttgactaatgtggtttgtgtgttgacaggaggtagatcacaccgattgcaagagtttggtggatctaggtgtctaaagcgatctgcttcacttcttaaatagcaattttgggtgtttcaacccgctcctggtccttgtcagttgaagattgacctttggcacctcgctcaccttggggaggaagtgatgtactcttgccagccaagggcgctcctcattggctgtataattagggtgttgttgagccaaaaatccctggctggccccccgtgccgctagttgctgagatttggttatttttgtcgtttgacctttaaggaaaggtctgccctcgctgtaggttgatcaacatgtcgatagaccctccttgatctatcaacaaatcttccttgaagtggtgctttgatgagatcatggcctcttctgagggttctctagttgaattgtctaattggattgctagcctccttgttgcggtgatctaactctac

SEQ ID NO: 251893 - DNA, 980 bp, Cannabis indica
aaaaaaaaattttaaaaattaatgaattatcaatgacaacatttctaatgaaaaccgccgagattggtatctatctcgacgattgcatacggtaccgtcgagattggagtgcgagatagtctaatattttagtagtgatatatttatcaaatagatagatttaacatttatagagttataattaaaagatggcatttgtgaaaagaaaaggataaatttgaaataaaatagcaaacttaaaatcctgtaaggcccactagggttcagccattaggattaattaaagctatttttttatctttatattttcattttaattctaaatgtaaccctagtgaaggattaaaagtgaaatttcttcatttggattaaaattgaaaaagatatgactttttgaaatattagaaaaatcggattaaggtttcccctattcgcgtgcgcaaggcttattttttgggccgattttcggacaaattcggtttagacatgagcctagcagagatttctcgaacaaggctcgagcctgatcgagaaatgccgcacaagggactgcacacagcctcctccctcgatccaaccccctcattcgcgcgctgaggagtaaacaatgatttttttttttccaattttcaaatttttcaactttttaaaaatcattttttactgaaataaaaaatctaaattttagtaatttttatgtagaatcttattttacaaatataaatctaattattagattaaaattattttttattaattttattattaatttaaattaattttagatattagtagactttaaatttgaaaaatagttttttctacaaatttgctattatgattattttgaattttaattataagattaggtatttacatatttcatttatttatttaatttaatataaaataatcttatttgacattaaaataataataaaatttaaaataatttaggtatattttttctaaatttctaa

SEQ ID NO: 251894 - DNA, 983 bp, Cannabis indica
gttcatatttgacatcataatttaaaaaacaggttttaatttttgttttgaaaaatagtaaaattgttttttgaaaacaacttaaggtttgtttggccttattttttgaaaatagttttcagaaaacaaaattacaaaacaagaattttgaaaacaacaaaatattgttttcagttttaaaaaacaattcacttttggtcaatattatttttagaaaacactaaccaaacacgacttagtttttaaaaactttaaaaactatttttattttcattttctaaaatacttttttaaaaattaaaaaacaaaaaacaagaccaagtatgctcttagtagttggtgtaaaaatttaagaggatacacatggtgtgtactcgatctccaattttgagctaattgtaattcgtaccaaataactttcattcaaagtcgccttgatatgttgaaaaaactatattcgattatcattatggttattattaattaattgattaaaatttcttcttcttctagtgagcttcatttgctttttgccaaatatatggtttcgtgtttttagaccaacaaaaataaaggtatgaccttctcttcagattttaataaggtacagcacggtccctctataacctacttaattggagtttggtataggtaacgaatatgtattaaactaatattaatgagtttaaatccaaattgacttgagttagttaatatattcttaattaattaaacttctgcgtacttagtcagtagtcacggtatagacatagagaacacaaatattaactatctacattgaattaataaaaagtaaattaattaaataaaaggtagaccatacttaactccattagtaacaagaggtggtttttttaatcaaatagtttgaataaattaatattgccaatcttaattagttatgacattcaatcaaatatatatcagaattctttaagttagaaaaccatccccatacaatt

SEQ ID NO: 251895 - DNA, 792 bp, Cannabis indica
gtagcgtgccttagcattagggcgttacacctgcataactaaaaggacactagctttgtatataaaggagcgatccaatatgaataaacaaagacagaaaacctttgcaacagtggactaagcagactgtgatctggttgaaccgttatacatctttgtgttcattgtattttctatttttgttctattgcctgggcagtctcgctattctaagttgagtactcactacttttctgctaaatatttattatttattttctatttggtgttgtccaaatttctccgaaaacatttgatgtcgtctatagaaaatgatttttataatatttctatgatttttggaggagaatcatgacgtgatgaatcgaatatacatagaaatcagcccccagcgattagagatcagccaaaatcaatacaaatcatctttctcaattatcaaggcactgttcaaagaaacacaaaattcacatcaacaagcaatctcaacagtcaccaactttgaaaaaaactagttcatcgagaagaaaagatgaaaaatatatactaaatttaatgagggaggagcaaatcttactgctatatttcagacgttgaagctacccagatcttgagaaagctcaaattgtggagccgcttaggtcctagagcacatcgagttctatcattgtccttgaactcgtccaagttctgaggatgctcaattggagccactcaggcattaaaagatctcaacctttttttagggattatacaatagcaacaacatagtatatttcttttactcctgca

SEQ ID NO: 251896 - DNA, 1030 bp, Cannabis indica
tagaggtatggtatgaaacttattccaaaaagtgcaatttagagcctcctctaggaatattttggctttcatagttagctcccagggaattgaagccaaccaagagaagattaaagccttgattgacatgccttctccaaggaatgataaggatgtgcagagtgtagctggaaggatcgcaatgcattctgtttttcaatgtgttgcacaaaagcaagaagtttgagtggattgaggaatgtgaagaagcctcctaaaaactaatggagcatctgaccaaggctcctatcttatccaagtcagtggaaggagaactattgtgcctttattttgtagtgctcatgccgtgagtgctgccctagtgcaagaagaagtaagggtcatattaccggtgtattacataagtaaaagactactgggtgtagaatccagatatcctatgatagagaatttgtccttttgcttgctaatcacctcaaaaaaaaattgagaccatactttcaagcccattccatcaaggtcttaactaatcatccccatcgccaagtgcttcagaaatgagagtcatccagtagactgttaaaatgggctacaaaatatagccaatttgatatccaatattagccctgggtgtcaatcaagggttaagccctagctgactcatagtagagtgttctggaatgaatgacctaccagacaaactagtcctaaaactgccagcctggaaggtctaccttgatggagtattgaatgaaaaaggagccaaagcaggaattatattaatttatccgcaaggacatcacccatagaacaccctctactttgaatttacaacctccaacaatgaagcaaaacacaaagctttgattgttggcctgcaattggctaacgaagtaggagcctaaagtatctaagtgtataactattcccaaatattggtgaaccacaattttggggaatatcaagccaagggtgagaagatggcttcctgggtatcacggtccagggaaatgttgcacgaatttaaaag

SEQ ID NO: 251897 - DNA, 552 bp, Cannabis indica
tagttatatactactaaccaatctcatactttgccaatgtaggatcctaacgttacacccccctttggagccgacgtccacggcggcccactctacagtggcctactctgggcctaatccacaagtcgccccttccgcgacatcggtcccactcgagggtgcatggctctaataccacttgatacaactacttaggtagaactcactctcaaaagctactctaagagatgaggatgcccaagtagttatatactactaaccaatcacatacttggccaatgtcgtatcctaacaagagtcttggaaaaggggtaacaaaagaaattcaaaacaccaaaacctggtgaaacctaatcttctcatgccacatgagtaactaacacattagcaaattctgtcaatcagaccaaaatatatgtataaatatacaatcaaaaagaacacatcaggctaacacaagataagcacaatcttttaaaaaagaaaaatagcataggatatatcagcatgggctggaactttgtgataaatatctttagtttcacataagca

SEQ ID NO: 251898 - DNA, 1166 bp, Cannabis indica
ggatttgaatgcacgcacgcgcgcgcggacgctcggacagcacccctgtctgaagggcagctcgcgcctacgtcccttggtcaaatgaggctgcttggagcctctttcctaggccaaaaccatgcatccgcgcgcgcaggggtatgcaatgcatacccctatgcctcaaacttgttttcgtcataacaaaagctaatttttggtagaattttgtgtagaatctgaattttcaataaaaaatctaattgtcagaataaaattaatttttattattttttaattaattaaaatttgtttcagatattaataggctttgcgttttgaaaatttgatttctcacaaagtagccttatggttaattttaaaactttagattattttatttattttaattataagatcagatattatttttaattaaattttaaatgatcttactttgatattaatatattatttttttttaaattaatcttgttcaaatttaaaagtttgctaaccatatcatatctttttcaaatttgttattttcaaaattatattttattaattaaaactataagattaggaatatgttaggtttaacattttatcttattagacatttttttttattaaaattatattttggcaaaaaataacatgaaatttgaaaaattagttagtttagtttgaatagatattttagcgttttaaactataattttttcaaacttttttttttttaattattcttaaccatgttgaaataatactaattttttatgttgggtgtgttttgtgagattggaactctaaaaattagatcactataaacatgtcgagtgatgacataggtcaattgagttattttgggagataagatacgacttatttttgttttgttttttgtaattttaagggaccgtgcgatcaaaattttacccatataaaaaatggaactaataccataaaccttacagccattaactctctagctatgtcttcaaagaaactagaataaataaataattaaacaaaggcattgatactagttggaaatcgcagacggtgggggactcgagagaaagagagagaaagagagggctggaagttttgtagaaaaacgaagaagaaagaagaagaagaaaaaagaaaaaaaaaaaaaaacaaaaagaaaagaaaga

SEQ ID NO: 251899 - DNA, 710 bp, Cannabis indica
gcacgcagcctcaatggccaagggaactcggcgtgacataggcttcagacagcccatgtccgagcttcctcggacagggcttgtctgaaaccgcgtggatgccaagtgaatcccctcgtgcgtgcgcacaagtgcaacccagtttcatatattttcatctaaattcaaaaaatcataactaattcataaaaaatccaaattgagttttaaaagcctaaattcattaattttttgtctactttcgagtaaaaatatttcgagaacgaatcgaaaaatattttataacatacattgtgatttccatacaatcatcaaatttacacataaaccatcatcaaaccatccatgtcaacacaaacatcgttttaaatacgtattcatgaaagtaaattattaccatggctctgaggccagttgttggattatgttttactagaatctagatgtactaccatgtatattatttaacatccgaaatatgaatttctaaaacaatttattttaaacacatataaagtttgagaaaccttacattggttgcaacagaattaaaggactccttccgctcagacctctaacccttgtatcctttatgtatcagagtatcaccaggacctgagcctgattctccttctcttgaattggattcttcacagtcttatacactatgattgagtaccaacttgatatgtgtgggcgcgtactctatc

SEQ ID NO: 251900 - DNA, 477 bp, Cannabis indica
attagaatttgttgtgactaaatatatttttagttacaatacttgttatgactaacactaaattagtgataatttgtatctaaatgctatattttagtcacaaataactttttgttgtgactaaaagtcacatttagtcacaaaaattttatgttgtgatactaaaaagttgtcactaaatgtaattattttttgtagagagggtacccacagataaacgtgtttctgattaaaattgctatccctaatcctaaaaaaacctttggaagaataaatatacatattaaatcaatttatttgatcttgccgtatcataagtttatttttattatttttttttttgaaaaggtatcataagtttatttgaacactattattctacattattggtagactataaatagttgtcttctgctaaattaataataaaaaactaatcatgcaaaaagtcaatatactccacccaaaaatgaaatt

SEQ ID NO: 251901 - DNA, 968 bp, Cannabis indica
taaaaaaaatattgaaagtaatttttttttgtttttaaaattttgattctcaattaaaaaattgaaaagtaaaaacagttttatagagcatgtttttgaaattttttttttaccttttcaattttaaaaacagaaaactgattaaaaaagtgttaccaatcgacacctaaatatataaaaaaaaagaatgaaggaagtttcgatggttacatttttattgtaattattatagttatatttttttagccattggatcactattaaatggttgtgattaatttgaaattaaataaaaataaataaaaaatgagttgtaacctgatattaacctgttaatttatttctactttaaaaaatttaatcaagattaattatattttaagattaaattaagtataattattaattaattttttgcaatttattattaaataaggatcttttagtaacttattttttttacacttaaattatttaaatttttataacaaaactctttatgatttaaaattatacacatataattttataattattaaaattttattatacttaattataattttaatttaaaataattacacttaattatataattttttttatttaaatattttaaaagtgaaaaataaaatagattacggtgagaaagaagagaaggacttaatgacagatggtttgaaactatgatagattatgatgagaaagaagagagaaaatgttggattcgacaaatgtgaaagattacgttcattttccttcagcttcttcctttaatgattttctttcccttacttgaacaaaaccctcagaaatccatagctgacacagtcttcctttcacaagtgaatagctccggaaaagttctaaaatacaataaacaagatttgaggtggaaaggcaaatcaacataggtgagagagagaatttaaaaaattcttacaagaggatttgttttgaactcaaaa

SEQ ID NO: 251902 - DNA, 802 bp, Cannabis indica
agttgttctaggcccaatgcccaagtttgcatccagcgccaaggttggcatgtgacatcaacctggacgctgggtgagtaggaaaacgttttaggaatgtattttttgatgcctaagttatatttggacatcttttggccaatttccatattttggtgaagttagttactagttctcggagatgttttgtagaaacgggagactcgtaactccctgattttcgaataagtcactttgccataaaagtgaaaatatgaagttgtgaatttgactcttttggtttcatatcatagctctcagccactatgaaaaactaaataaatggtcaagacagaatcacaattggataagcagaactcaacgcacaaggccattgtcaatctaagtgttaggggtttcttttagagcttctgagatgatgttttgacactttcaaggttcttgaacgctaagacgaggtctcctaccttgtttttgaccattttggagagaatacccgaagtagaatttgcatttgagtaatgaaaaccaacgcactaggttgattgtcaacctgggcactggccaagtactaggtcaacctgggtgttaggaccaattttgatgcccttattgttttccttttctccctaagtttacttgtatctttgttatttctgatgacggaaagaatgcccaaaacactttttcggaagcaagattggaaacagcccaagttaacaatgttatcctgttttttgcattatgatgtggcatctagctagatgacgtgtctttcgttttccaacttgggcagatggtt

SEQ ID NO: 251903 - DNA, 1212 bp, Cannabis indica
ttcaacttaatttattttaaactgtaagatcaaaaatgtgcatttttcactattaatcactaataatcttttttcaagtaattacaaagtgttgctctttaaaattacttgagggggcatatgtgtatgattaaatggaatctatctggaaatacatgatatagtgcaaacccaccactttaattttttttttaaaattcttgctgatcaaaccttactaacgagaaaggaagatcaaactattatgaataactttttgattaaaaaatctgtctgacgagaaaggaaaatcaaaagttataaatgagatataactcataactcacatgtgaagctaaatacttacgacttacattgtataggagagtattaaacgagacacaaagatgccttgaaaaaatacttaaacctaatatatgaatagacaacctaactattcacataagcaataaaaaatatagaaagtgataaatcattaaaagtatattaaagtttgcttgaaacagattataactgttattgcgaggcagaattgataactgctcgtaaatcaaaagcatggcagataataaactgctagcgcacatagtagataataaactacttagatgttattaaaggaaaatatgagcagtgggaaaacctaaagtatttggcatttgatcaaaatatgattgtttaaattgtgaatgaaaacgcaagcaaacaagcatattttaagttcaaatataaaagtacgaagcatccaatgaagataaaaaaaaatgaaaagcaaaagttggccatcaaaccttgcaagtatgtctttacgaaaaattccacaaggggaaaaccactgtctcgaccttacgaccaccaacctaataaaaaaaaaaccaagaccttcatagtattagacttagatagttttgcttccttggctgcctcctcgtcctcttcctcctttttggtctatttgtagaaagcaagaatttcctccttagattcttccaggaaacttgtgtctatatctggattttccatctaggcttgatagatggtacggaggccaacaacattacatcgatcatggatttcgacctccttcccttcaagcgtcaccttagcagcttcaagttcccctttaagcttctcgcattcatcgcttttgacctttgtctccttctcagcagcttcaagactcttcttcatcttctcagcttctttgtgtaa

SEQ ID NO: 251904 - DNA, 1930 bp, Cannabis indica
caaaaccagtaactacagccaatgctactgatgaaattgctccacccgaaccttcctcaaagattaaaggtctctctctcttttacaccttcattcacagtaacatttcatcactattgattttatggattttttaaaaaattggaacagttctggaggagccgttgccagcatgagcagaaattggaaagtttttatgggctgttttcggtggcacgcaacaattgatttgatttggtgaacacttcttttacatttcggcttttctaaacacatcttggctaaaactaatgtaatcatcacggttacatatttaatgtaatcatattgaaaattcttccatatatataaatacatactgttttcgaaaacatcttcggtgatctttgtacaaaaacaaatttggtaactaatgaagcctctctttacgttttccttttgaatggttatttgttaaatggtcacaaatggcttccttcaaatatgtgacccaaaatttgaaattttggatttttttaaaaaagaatttatagaaatatgtatgacccaaaatttgattgtttatgaagttttggtgtgtatatgtttattttattgaatattattgtttaagattagtttaagaaagtttattaattataaaagagtgtcctatagtttagagtatgccttttaattaattaacttaattttgtttaaataaatttagttaggtcattattttttctattattattaattataagttcataaaaaataatagcttaatcacatacaataacattatttagtataaattgcataaaatcagattttacttttgaattaatttatagtttttattcaaaataatttcattcataacataaaaaagaagactgttaatataacctaacagctttaactacccctagtccccattaagtgttgttatactcaataatcccttacataaaaaaagtgcaaaaacaaaataattacaaataatattttagcatttcctctaagcttttctcaatttctttatgggttgtcgatataacttttcttcttcttcttcctcattttttaaaaataatcccaacttctttaagggtgtcccatttaatatgttagaagaagaaaagatctcccatttggaatttcttggaacatatctaaaccaaggcttgtacccgcataacttttcaagttctaagtaatccttcatattttcaccagtatcttcaacttgtataacctgtgttaattatcataatacaattagtttatcatcaaaacaaaactttttatattactatcaattaagatactaaatacaaaattttgataacaaaccttttcgattaaagctaagtgagcttttctttctctaattagtcgttgtaagttctccattttttctttttcttctctttcagctctttcttttcgttgtaaattggcaattctctctctttcttctctttctttttcaatccttgcattttcaaatgtttcgcgttgtctctttttcaactcctcatcaattttatacttcgtggctgtgtaatttgagttggcacgcacgaattttgcagcacgaattttttcttgttcttctctgtctttttgtcgttgtaagttgacattttttttccatttcttctctttgctccctttctttttcaattcttgcactttcaaaaatttcccgccgtctctttttcaattcctcatcaactttatattttgcagctgtgtaatttgagttggcacacactaactttgcagcttgaagagctttcttcaaaggacattctgaatgaaacaacatatttattaataattattaatacattaggtgaatgaaacatataatatagactaataaaatataaaaaagtgagacaaattaattacctttttggaaagatgaagatggaattac

SEQ ID NO: 251905 - DNA, 771 bp, Cannabis indica
atgagaaatgcataattgattaccatcacctataaccaaattttccttaccaccatagtcatgtttcgacatcatgttattttcatctgctgtaacatgattgctagctccactatccatgaaccatccctcactgtcaacaacttctggtaaagcaatgtatgcagcagctatctaatttttcttttgattactttaatttctagctttaggattagatcccgtatatgcttcatcgtatctgttgtagcagatggcagcagagtgcccatatcgaccacaaacctgacaggttggtttggagccattggattgaccaccacaacctcttccaccattgtttccaccaccacgaggatgattgccacgaccacctcctggattgttctgattagtgtggtagttattttggtgtgtatgatagttgctgctacctcggcctcgaccaccattgttggatcgatttgctagatttgcatttggaggagtgggagagtggccagatctggtgttgttgttgagacataggttttggagacgttccattttattatcaaaagcaagtaggattccttgcatctcctgccaagtagttgaagcacgagcttcaatttgcaacacgatgggaagatattcaatgtccagaccgaaagtgacattgtatataagctgattttttgggtaaggttcaccagccaaagccagtgaatctaatgttggaaatattttaccaggatctagatttactaccaagtatgtttcattaacatc

SEQ ID NO: 251906 - DNA, 911 bp, Cannabis indica
acgtttgggatgtctgcatcctttaggtagtcgcttcttgtagacatcgcacgtcgagctgatagaacctagacatgccagtctatattgcattataaaggctgcaaggttcttaagaccaacccgcatttacagaaaatcgttctcctggtttatacaaggacaagagggggatgatcgcatatattcgatatatgcgatctactctcttgtctcggatgcgattagactttggtcatcctcgctacctctcgctgattctatcttaagcgaggtttaaaacttcgaggagtccctcagggacgtctcagctttctttgggaaatctgagtatacgtgtcctctaaataggggtcttatctcgagtttctaggtgagagaaatctcaccataacacatgtgatgctcttgactaatagtatttcaactattcttaatcttgctaacaaggcctcgtactctgccttattatttgaagtttcaaattgaagcctaagtgcgtatgggaatttgaagttttctggtgacatcactattactcttgcccccgagacattctcatttgaagccccattaataaaaaatttctatatttctacttcacttcctattctagagtcttctcctgagtttactccttctatcaagaagtcagccaaaacttgccctttgattaaagtccttgagtggtaagttactttatattgtcctaactcaatcaactattttattaatcttcctgaagcataaggttttgatagtacttgttgcaattgttgatttgttaggatcttaataggatgtgcttgaaaatatggccacaatttgcgagatgcatgaatcaggcatagtgtgagtttttctagaggtgtgtatcttgattatgcacccagtaactttttactaacata

SEQ ID NO: 251907 - DNA, 917 bp, Cannabis indica
aaaaaaaatataagaatagaatatacattttatctattaagttttgtaatataattgtattatatgtattagacttttaaattactattttctttacattaaaatgctatttgtatatataattttttaattttgttataaatatgtgtggattggattggatcggttacttttatatgtcaatcaacatttaatccgcatccgcacaagtgcggattttgaatttttcaatctaatccaatccgcacaagtgcagatatctacactttgcggattgaattagattggattggattgaatagtgtagattgaattgcatctactattttataaacataccctatttataatagaaaatacatttctctaaaaaaaatatatataaactcttattttcttagtagaagaagcttgggatccaagaataaaacttggcgaccaatttattttcctctagaaaaaataaaataaaataaccaatcaaaaatggccacgttactattattcgactgatagttttacgcgcctttttctttcgtaacccccaaacagagaattatagagaaggttccagagagagttgagactgaagaaccttccagattccccgtccgctatataaacccctttcatttccttcctcttcttcatttactctcaacctttctctagctttatctctgaaaatttcaagaaaccttcgtctctttcaacccaaaaaaggaaaggaagctttctttcccatctctcacaagcccagtaaagaatgccgacgcagaaatacccggacggtcctaacctacaaggaagttgggtaggccacgttagttcgttccaccaagtctaagccgaacggacgtcaggagtctaccgtagacccggaacggaccggtcgaaccgtcgcactccgactccgg

SEQ ID NO: 251908 - DNA, 1136 bp, Cannabis indica
tttgggtccgggctgaggctcgaatctagagtctgagtcctgggcgggaccggagtcgggaccggagtcgagaccggctttggggctggattctgggtccaggctgggatccaggatcgggatcatggctgagttcgggtcaggattaggttttgggccaaaatctaggtctgaggccgaggtttgtagccaaggctgtggcccaaagccaggaccgagttcgaagttggagtctgggtctaggttctaagtttgggtgcaaggtctaagttcggggcaggggccgagatcgagttcggggatggagttcgagtctaaggtctaggttcaaggtcgagttcgccgagtccgagttcgagtttgggtttcaagtccgtatccgaatttggagctgaggtttgggtctacagtccgagtctaagtccaagactggggccgatttcaggatctaggtttgattggagtctaaaatattaattaagaaaaaaaattatttttttacttatataactgaagaaagctcatttaaatatataatataatgtacattataaaactacacttcttcgacaaattgatgtgaactattgttttaaaatcctattaaagtgagtagcaacaattacaatcaaattttcaagcacgaggaacgatttttttaaaattttaattttgtttactttcactaaagtaaatgactaattagatttattttataaaatattttgacaggaacttcacaactatactagtgaatgtcttaacatcatcaacaatgagagatgtgaaaattatgatatatttgaatcaatttttaatatcgtactttaatcgtacaattataaaatttaatatttaattagtaattttattaaaaatataataaaaagatagtaattttatcactgataatttaatgttataactaaatattttaccttacacatttaaatcactttttttttatttatatttttctctatactatttaaataatatatttataataaaatattatatattatctaatattatttatttttatactaacaaataaacaaaatatattattaaaataaaaaaatatagctaattaaaaccaaccaatttcttagctacatttaactaagtactat

SEQ ID NO: 251909 - DNA, 873 bp, Cannabis indica
aatttgttaagtattagtgtcttctaataattttactagaatttaatatataaggttaattagattaaagaagagtatacatcattccagcagcattcccttgttgccgatgaagtcacacaatgccacttgctgtaaatcctctccaaataacgtgatctgggtacgcggtgctatgaatcctcggggcacccgaattgtgattatatcacgtttatctttgattcttaaaaattcaccaaccatcaattctagggacctagggattaaaggcatgacctttggtgagaataattcatctttatcatcagcaccaccttgtcgagaaggcatgggacctttcgacatatcacgtcttgatggtggttgagcaagtagaccttatacaaaacataccataatatatcaaatttgatcctaattctaccaaatttttggcagcataacggctgtaattgaattgtcctaaaaattttaaacatgcctatataataacaaataacacagatataacagtcgtttattcatccatcacatatattcacagaacctacttcactatggttgaatatttaagacatccaaactccactaatcattaataattaatttataacaaaagttaccttgagtgttccaattaggtatttaggcccaggaaggaacatgtttgctacttctatacatatctctactcgtcaattgagattgggatttcagcatcctcttacagcatttctgaaaccaaaacctgggcatgtgaatcatcgtagtctttgtagtgaactttgattggaccctcatgttcgtacagatacgctcatgccacaacgttgtcgatattgtcagagcaaagatatactagctgatcaa

SEQ ID NO: 251910 - DNA, 517 bp, Cannabis indica
tgcaacataaaatattatttctgatcttaattaataagtaaatctgattatattgaaatgggttttatttagggcacaaaacccaacaaagacaacatttttgcatgacagacttgaagaataaatctacatagaagaaccagatagttacaaaagcagaaaacctaatcaagtgtgtctcctacagaaatcactttattggctcaaacaagcaccaaggtagtggaatttgaggttccatgaattcatggttagtattgggtatagcagaagtgactatgatccttttgtatactataacattgaaccaatctagttgttgttatatgttgatgatattctatcattggtaacaaaaggaaggcaatagataagctaaaacagagtttgaatacataatttgaaatgaatgatctaggagaagcaaagaggatacttgggattgacataaaaagagacagaccagagagattatcactgtcacaaagaaactacatacagaaaatgattgacaagt

SEQ ID NO: 251911 - DNA, 789 bp, Cannabis indica
aaaaatgtgtgtgagagtattattggtaccctacttgatatgcccagaaaagggaactttctgatgttgtggctcaaaaacataggaaaattgagaaactaagagcaaaaattaaatcccttaaatagaagaaaaatattgtgaaacaagagcagaatgaggatgaggatgaggacgaaggataggtggctcattaggtgtatgttccataagaacatgcttaagtggatgagggtccacaaaaaaatgctcacgagtttgttcccctatatgagtcacctgtcatgtacaatttcactgaacagagggcatctaatcagacagtatttctctactcagaaaatattaacattgataacataggggcccgagattatctgtacgaagatgagggtcaaatcataattcacacttttccctatcatgattcacatgcccaggttcttattttagaaatactgcaagatggtgttgatattccaatcttaattgaggtaacttttgcctaaatacctaattttaacatccgaggtaaatttcattattaattaattatgaatgcttagtggagtttgaatatcttaaatgttcaaccatagtgaagtaggttctgcgaatacatgtactattgtcaaatgggtggataatttttatattgttaacgttttttagtttttttgtattattttatctgttttgtttgttgttaggcatgtttaaaatttttaggaacgtccaattacaactgttatgctaccaaaaactattatatattatatggtattttgt

SEQ ID NO: 251912 - DNA, 511 bp, Cannabis indica
ggtccactagcttaaccaccatcaagacatgatgtgtcgaaggaaaaaggtcccatgccttgtcgaaaaggcagtggggatcaagtagatcattaattcactccagagatcatggcactaatccctcaggcaatcagatggatagttgaagactttttgagaatcaaggcaaaaaatggaatagtcccaatttgggtaccatgtggattcatagcgcctcgtacccaaataacgatatttggagaagatttccaacaggtggtgttgtgtgacttcatcggcaaccaggaaatacttttcgaatgatgtatactcttctttaacctaattaaccttatatcaatttataatactgaaattattataaaacattaatatttaacaatttaatgcaggcacatttgggagggattacctgatttgagacaaatttttaagttttgtgacccaaagcttctcgcaatgcatggtaacaatgatttagaaaagatagagtcttttagggttgcat

SEQ ID NO: 251913 - DNA, 652 bp, Cannabis indica
gttatcagttatgggggtatgctacagggaggcattagggaaatatgataggtactcacaaatcaactccattagactagaaagagtagagttatcttcccattcacttctaactttggttaccaattgagaacaataagagacaatgagacttggttgaagattgattgtagcacaccgattctggccctctagaagggcttgagctttggcaaagaggggtgttaaagcacctatttttaggatcaaaaagcctgcaatcatttggttgtgccattttttaatagtttctcccatacctattttaaaagctttacaatccaaggcagcatccatgcttaagctaaaactggcaggggtaattaagggcaggggtgagggcagtgtttttgggggatccatgctaatttcttgtgtcctgcgttctgggatctgcatttaattattgatcttccttctaatcctgcaataagctaataacaaaatcctccacatcaattttattagtataatgatcactaaaaggagcattgttccttttattccaaatcttccagagaatactgataagcaaggtgaaacttttgttaaggtgatctaagccctgaaggtaaaaaacattgatgtcgcaattttgattattggcataaaa

SEQ ID NO: 251914 - DNA, 603 bp, Cannabis indica
acatcaatcaaaattttaatttacttttatttttactagcacacttttatatattacattatacatcaacttctttaaaatacattatcaaaatctcaaccttttaaaattttattatattttattcatttcaaatatataatattaatatatatacacatctccaatgcaaaaataattactataacttaaaacaaattaattaaaggatatttagatgcaatgaataatattttataaatgtagagcatgaatagtaaattttaaaaaaactttaaaatgaagaagaattttagagcatctactatagtgtatttttagtacgattctttaaattttttgaaatttttctattttaaagaaattgttgggccatactctaatgttagatatttttacggtaaaaaataaagctatgtagtaattgaatttgaattttagtacaattttagcagtattttggttgcaaatatctcattaattacatatatatatctattttatataaagtgtgcctatataaccgaattcttagtttatgagaaattcgtgggagactttttatttatattaaaaataaaataatttattattaaaaataaa

SEQ ID NO: 251915 - DNA, 829 bp, Cannabis indica
gtgtaagggcccaatggaggcttcaagcagggacattacagaatcaagcaaagtacactgcatttaccatcttgactgaggatatagaatcagcaaaacagacatgacaaagttttgtcgatttcatggagactacggccacgacaccaacgaatgcaacaatataaagcgggaaattgaattcctgataaggaaaaacaaaccgcatttacagaagtatgtcaagaccgatcaaaatcagaggaatgacaataaccaagacttgctacctccacaggtagacggacatctgcaagtcatcattggaggcccgcacatagctggagattcgggcaaagctcaggagaggtatgccgaaacagcacagcacgagcaagaaaaagtgatcttggccgtagaagaaaggaaggctaaaatcctacggacaggaggacctaccatcaccttcaatgatgaagacgctgtcaaaatcaggtttccacacaacgacccgttggttgtgggggtccatatagctaaccaaatggtggtcagaaccatgattgataatgaagcgtcttccaatatcttgttcaagactgtctatgaaaagatgggactccagctcaagtgtctaaccccatgtctcctgcttgtctatggtttctccggccaaggagtcgcacctctaggacaaatttgcttaccccttactattgggtaagctccgactagcatgaatatcatggcacgattcctggtattagatgttccttcagcctttaacgtagtgctaggtcgtccagccttgtatgacttaaagactgtcaaatcgatattccactcgtgc

SEQ ID NO: 251916 - DNA, 986 bp, Cannabis indica
tttattgggcgggtacttttcttttttcttaattgggcgggttacacttagatttttataacccgttctttatattgtgttgaataaaatgtagtataaactgactaaatcgacccgtacacccatagttcaaagcgaagaaaagcttcaaagcaaccatggcaaatccaaataaacaagtgaagaacgggatttgaaagcttacccactagtagaaatcattgaggaagatggtggaaagtttaaatcatcaaaataaccagaaaatcccaagagttagaagagaagggggcatcagcctcaaggaaagtaaagagctttcctaaattgctttttgaagagagagaatgaactgtggaaaataaagagctactcccataaacttatatagcttatgtgggatcctctctcacttgccgtgcaacatacacaaaaaatatgcaaaaatgtaaggttatcaattttctaccaaggaatgcgattagacaagcaagagaaaatatttcaaaggctaaatatactgcaagatctgtccgattaaggctacatcaatccaaactaagctggaaagtctctatccgtacagacgtccgcatagggacgtggcatatcaacgtggccaagattaatcacatgggagtacagcttgtcaataaaaatgccaagtcatctactcaacacttcagtaaacgagaggtctgagtacttaggagggataaaaaaataacaaaccaaccacataagggggctagccggccacccctggttgggcccatggccagcataggccggcaagcctctagacattgtagggtcggccagcctctagacattgtagggccggccaacatgcacctggcaggcctttggtgcgcagccttcatctgaggacagcaagctaagttgcgatttgggcttcaacaacccacaaaaataaggaaaaatatcagcaaattccttattcttggggataattaacccattta

SEQ ID NO: 251917 - DNA, 940 bp, Cannabis indica
agattgcaatagaaagaatttttttcttctttctcttaataattttatgttataaatatatataatattttatataaaaaaaagcatccatgttttattaaaaaaagcttaaacaaaattattaattaatataattaataataataaaatgataaaaaaatatgagaaaataaataaatatatataaatctaataaaaaattaaaaaaagaagagaattaaagagagaagatataaagttatgtgaagtgattttaaaacgtcatgtcaccctctcatatctcttatttatatatatatttatatggatagatatttaaaaaaagataataaatttataaagaaactcatcatatatataatttcaaaataactattattattgtatttcacttatagtcactttaaaatcgatgtcattaccggagctcacttatatatgtatagtcattattattatttaattattatagatatattacgtaaattattggaattaggaaattaaattggagtttcaattaattgttaatgtcatatatagattgggaaacagctccatagtcatatatagagtaaatttacgtatacctccattaattagttagaaacagcttaatagttttgatctcttttaacaacaataataatatgaataatacaactcaattagagtatataatacggtttaggattataattataaatgtatatgaattaaagaatatagtatgatttgatacgaaaaattaatatgaataatatgttaaacaactaaattagttttataattttacttaaattaaagttaaacaactaattaattttattacaataacaactaactataaaataacattaaatttagacaataacaaaatacatatatataataaataaaaagtatataaataaataaatgtatttataccgagctcgga

SEQ ID NO: 251918 - DNA, 1729 bp, Cannabis indica
taaattttgctataagtagataattaaacataatttattaattatggagacttattgggaatatatagatataatgtaagttatttgtgaaataaaaaaaaattcaggtccaaagaccctagagaatcgatcgaaggccaacaatgtcacaacagttttagttagtgatattattgggattattgagataagttgtttatagaattaccggagttttttagagtactcggggctgactaaataccctaaggttagaaatttcttagtggctaagaaatgtcaaaataacttttattaataaaattttaatattattattattatcattatctttattattattattatatgtattgttattattattatttaattttatatcatatgttaaaggttttttttaaaaaaaagataccctctccatgctctttgtgcgatgaaacctatcatcaccatcactaattttctttgaatttcttagctgaacctagtgtttctaaccttattagcagctaggtagtgaatcattgaagaggaagaacttgaggtaagaatcggttctcttttcaaattgaaaagttaagttttatatattggctttgtgttttagaacggttagaggatctatgatctcgtggctttgctcgactcattgttagtaagtattatttatttgttatatgattgattgttatctgatgtcgttaccagtatgtatatagaataagcctgagttaagttgattgtagtatgttatgagtagatattaatagagatagcccagtagagctatatgattgattgatacatagaggaatatttattagtattaatgttgttcaagcaatatgagcagtgtgaagcaatgattagtaaagtattgagtacaagtcccatgaggaaatatgtgtgatccgatgaaaactttgactgtttaggaatgataggagagatagtaatttatcgctaccatgatcatgaagtgatgtgtgttgttatgcagtaaactaattaatgaaacaaacagcttaaaaaattaattaagcagtaaacttgttggaaagtaagatgagtatttgatatattatgtgggtcgtgaaatatgagaaattgttaagaacagttgtttaagtggtttagaaaatagaatcttcttaccctgaaggtggtttaaaaccctagaggtggaacaacagataagtatgattgtatccatttgggatttgaggtgaattgaagattgtgaataagtgagttgcgttattttgtgttacaaaagagatgatcagataacataggatagattctgaggaacataaattgaacccatgctaattatagaataactcacttaataatttataaggaggtaatgacaagagcactgatattgctaagataaataagactatctaaattgttagtaatggtatgttgatgtggagaatacttttaaatttcaaatggatggagaatcttgtatatggagtatccatagaaattatgggaaaggtaaggcttatctggaaaatagaagagcacataacttgtgaataaaggaaatatactcaagtgattgagatgtatattgatgagattgacagagtactagttattaataataacacttggatagatttttggaggttttctactctgtatttagtgatgtaggggttataaaccccggattattgaaaggtagaaatttagatgaccttctagtatg

SEQ ID NO: 251919 - DNA, 1342 bp, Cannabis indica
aagtccacctccaccttgtttgtggcttctgtaagtaatcacctaagcctttttagtatcttttgtctagcttgaattgaattgaattgaattggtctctaacaacaacataatttggttgatgtgattttttgactacaggaccaatttggtaaggttcctctttattggggaatcacagcagatggatacgtggcttttgctgacgacgccgagctgctcaagggtgcctgtggcaagtcacttgcttcattccctcaaggtgagtagtgaacacaaaagtgcttgtaatggctgcttgtggtatatatacaataaagggcagaatatatggatatatttgattacacttttgttgatgtggtttcatttgattgtcacttgttaggatgtttttttctctacaacattgggaggacttagaagttttgagaatcctaagaacaagatcactgctgtgcctgctaatgatgaagagatctggggtgccaaatataaggtaattgattggtgtgttacaaatttgaagatacaaattttatacataatagcaatctgggtttcaaactaaaactttgtacacaaactaatatgaaaaataaccaaagtattcaaacgataagagaagaactggaaatttcgtatacattcttaattcttgacaggtgacttgtcaacaatagaaaatggaacagtgacttgttaccctgaatgaactttgttttaatagtgtgataaaggggaccattaaattaattgcatccacacatttcactaattagtctatttggtggggttgaaatcacacaggtggaagggccagcagttcttgcagccacagagtaggaaaggtcattccttgaaatgggataccgtatgagacatgtgcccttttcttcttatatatgtatggttgagatttgaaaggcagtgatgtaaataactgaagctttagctgttagtagggtgagttattgtgtggctgaaaattaactttgctttgttttcttcattagtttgcttcataaattgggcttttaatcttcacgacttttttagtcttttagtaccattgtacagctactctttctcttgtctaataaaatgtctgtatgagggtttgtagtaccaaatattcaccactttttttttcatcatttctataacatcaaattgattgaaggcctttaaaaatttgggttcatctcaaaaggggtaactttttgggatgaggtgatttctcatataatcatctttcaggaagactacaactgtagaaataaatatcttcttatcttcatgattatacactttgagttatatagtccacaaatatacacac

SEQ ID NO: 251920 - DNA, 534 bp, Cannabis indica
gtatttcaagttggcgcccggaaggttcaactcatggagggctttctcatcagaattccatgcacaaatctcctcttctcgccaacttccactgcacttagaagacctggtcaaagtgaagcaaagaccaggagaacctctccgagcctacatcagcagattcatgacggaagcaactaaggttgcacgagcgatcgaagacggaaaattgtccgcgatactggggggcattgaagttcttggagaacttcggaaggacatcaggaagaatgggctaatatattatatgagtgacttccttgatcgtgcggatggttttattaagcttgaagaagccattcagcgagcagaggttgagcaaaaacctagccagccaaaagttccctctgttggaacatctgtctagctcccccagtacccaaacagtttaagctcgggtggtaaacggttcaataacaacaataggaaaggaaatgggaaaaagggaaagtttgatggaaaaatcaaacagactcccaaggagaatcctaccaa

SEQ ID NO: 251921 - DNA, 897 bp, Cannabis indica
atatagccagaagttgactttaaattatacacacaaccaccaaatctgaatatgaataaccaacaactcagagattatcaacatgcttataatcaagcataaaactcttcgttctttgcaaatatcctacgaattttttggttgcaacccaactatcatggtcaagatcagataaatatctcccaagagtattgactacaaaagcaatgttaggtctagtacaaatcgcagcatacatcaaactccctactacacttgcatatgggatgctcttaatttcttctcttttcaagttcttcttaggacattgtcgcttagtaaacttttcctttttcagaataggaatagaaccaaatttacattaaattcatgttgaagcttttgagcacatgattaatgtaagcttcttgagataagctaagaacttcttgattcttgtcatgatgaatctcaatctttaaaacaaaagacgcctctccaagatcttttatatcaaacttggtagacaaaaaaaattggtctcatttagtaataaaaaatcactactagcaaggaaaattttgttcacataaaggacaagaaaagtataatgactcccactgaccttcatatagatacactagtcaaacttgttcttgatgaaactaaatgatatcacaacctatcaaacttcaactatcattggcgagatatttgtttgagagcataaatggattgtttcaatttgtaaatcaaattgtgatttcattttccttgaaggatttaggttgagacattctccattcagaaaataatttttttacatcaatttgatgcaactctaaatcaaaatatgcaaccaagaccatcataattttgaatgaatctttagtggaaacatgcaagaaagtgtcagtg

SEQ ID NO: 251922 - DNA, 937 bp, Cannabis indica
agataagctaagaacttcttgattcttgtcatgatgaatctcaatctttaaaacaaaagacgcctctccaagatcttttatatcaaacttggtagaacaaaaaaaaattggtctcatttagtaataaaaaatcactactagcaaggaaaattttgttcacataaaggacaaggaaagtataatgactcccactgaccttcatatagatacactagtcaaacttgttcttaatgaaactaaatgatatcacaacctatcaaacttcaagtatcattggcgagatatttgtttgagagcataaatggattgtttcaatctatacatcaaattgtgatttcattttccttgaaggatttaggttgagacatataaattgctctctctattctccattcagaaaacaattttttcacatcaatttgatgcaactctaaatcaaaatatgcaaccaaaaccatcataattttgaatgaatctttagtggaaacatgcaagaaagtgtcagtgtaatcaatacatcatctttgaggaaagccttttcccacgtgctttatacctttcaatttgtcccttattatcttttttagttattaaaatccacctacaacctattgatttaaaatcattcggtaataaatctaactcctatacatcatttttcttcatggactcaatctcattatccatagcttctatccattttgaagaatgtggactattaattgcttcgctataagtgacatgatccacaaaatgaccaatatcatatccttcttctctaaggtaaacaaattatcataataacttgttgacttcttttgtctctgagatctccttagaggaggtatttttggaatagcttctatttattgatcatcattttgaaagacaccttttacaattggaatttctttgataacaggaccctcatcaacaa

SEQ ID NO: 251923 - DNA, 925 bp, Cannabis indica
gccacccccagtctactgatagtatcattgtaggtagtcagtgttccatgctctcagaatttttgttccatctagccttctcaagtgatgggtgttatcaccaattttatcttgaactttatatggaccttctcagtttggtcctgagatccccactcctagctcttaagaggctagaaatacccttctcaaaattagatcactaatttcaaatcttctacttttgactttaaaattaaattttttggcgatccacgcatatcctcgtaattaatgttccctagagtcgaggtgcagaccaatgatgaagatgctctttttcaatttttgtgccaagaagtgaacaatcctaaaaaatatagctatttttggaaaacaactccttgatggtcacaccctttcattctcacgcaattgacatgtggacatattatcattataaatgaaagctaccttccgcggttgagtaacatttaaaatatcatgattttattccttgacctccatatgtccatattgaaagagtgatgcaagctgccaccatacacaacattgtagaagcttgggggtaaatgttatccacattctggcattggacacatggaatccaggtcagtatttaaggcccatcaatgggaccctcaacaaaggtaaagttggtcaagtctacttggattagtccttccaggaatgtatcccagttctgcaattgcaaagccttctgcctttagcgagccatacccggaagctgttggaatttattttaccacgaacttagatctactcacaagtatgttgtttaacaccctaaatatgaactttctaaaacaataaataaacacatataaagttaagaaaaccttacattgatggcagcggaataatgtctccttccactcagatctataacccttgtatcctttct

SEQ ID NO: 251924 - DNA, 577 bp, Cannabis indica
gaaactcgcaagaaaacatgttcgatcccctgcctgaaatgtaatatgaagcttaacctgaaaaagtgttcctttggagtttcctcaggaaaatttatgggatttatagtcaacgcgaggggcattgaagcaaatcttgagaaaatcaaggttttgatagatatgccatcactaacaaagcctaaggaagtccgatttatctattaatggaaatttttgtttatctttaagaaaacactaaattttaataaaaaagtcctataaaagtaagtattaaaactttatatattccattaatatttattccattaagagtacgtaattaatgtatatatttcattaatatttattttattgagaagttaatagaagtatgaatgagagtaagaataaaaataagtgttaaaattagatgaacaacaataataatatattgaacatatggttatggttatgagatttatagtgtatatattattttaaaatgtgtaactcaattgagagagtataacataattatataatggataaataaataccaaaagagtctaatataggcacagcccgccctaatggt

SEQ ID NO: 251925 - DNA, 901 bp, Cannabis indica
tttttaaaaatttacacgatttagtataccgaaatatccctttagagtggtgcacaatagacttatcctaaaacgtttttccttaaagttgatatactagccattatgctggttagatgttttctatattatttattaaattaaaatatgtgaaacttaatatgaaattacactaataatagtatgtaacttcttgtgatgcttgacaccttaaattatataatgaaaatacaaataaaaaaattaccaaaaatatatgatccttatttaaatggagcctatcgtggacaaattaaaaaaaaaaattgtctctactttcaatccaaaataaaattttcaaaaaaaatgacataaaaataagttggataaataaaattcatataagaatcaaacgccttgaaaacctaagagttcctctgcatgtccacagagggtgagtcaaggccaaaggcgtagccgatggaaaatagatgaatattcctacactaccccttgttggtcctaaggggcaaaggaggctagattagcgaaaaaatagttaccaattcaagtacgcaaggtgctcctgtatgtctcaagctaatgtttgaaataccaagacgctatgacgttgaattaaccaatgtcatactccaaggaaaaatgccccttaacatttctctagttcaaggacagaaggtgtttctattttttcagggtaagaatgggaagagaaaatatctcgagccaatgtttgagtaccaaggcgctacaacactgaagtaagtcataccatactcattgacagagggataaaatgaagtttgggcgggggcaaaatgtaagggaaataatttaaggggcaaattaaaataactatatgttataaatattattaattatgtggatgtccaaatctttt

SEQ ID NO: 251926 - DNA, 1770 bp, Cannabis indica
caatgctcttccccttgtctaaactctggccagaggtattttccttcttgaccttagatagagtaagtttgtagcattctcatgtgatcccttgatttccctttagacagcctacccgacttttagttgggaacttaatgcacagatggaataccaatacgacaactttaagtcatatagggctggccggcctaacaggacgttaaaagttaacaagacatcaatcaccaggaattgtgccattacagttatgcttctcggagcttgtccaactgtaagtggtacgcgaatttgtccaagtgttgctacactctggccggagaacccatatacaagttgaatgtaaggaatcaagtctttaagctggagccccatcttctcataagttgtcttgaatagaatatttgaggaagctccattgtccaccatagtccgtgccaccatcttgtttgcaatatgtacttcaacgaccaaagggtcattatgtaggaagataacatggctagcatctacctcggtgaatgttattgttggttcccctacacgtggtattttaggcttcctttcctccacgactagaattgtatcattttgttcatgctacaagactcgagcatacttttctctagctttgctcgagtctccagcgaggtgcgggcccccaatgcttacctggaaatgcccgtccactagtggaggcattagttggttttgatcattatctgcctgggcgaccccttgttcttcgtcggcctacacatatttttgtaagtacatgctattttttctaatccagaattcaatctctcgctttaaattattacattcattcgtgtcatggttgtagtctgcatgaaaatgacaaaacttagttgtatctcttttgcttatgtccttcttcatgggagaggatttcttgtacgacaccatagactaggtggttgcatatattatttctatattatttgttaggactgagagagcagtaaatttggaagcattctctttgagatgttgttcgacattctccttgaacttgcctttctttccattaccctgcctattgtcattgttagacctttttccgtttggatttgagctgttgggatattgtaaattctaggcagaagtaccggttgtagtggtgtgttttttattcttcctttgttccacggtatccacacaccgtactgcctctttgagcttaatgaatccatcagctcgatctagaaactcagccatcgatcccacagttaatctcttgatatctttccataattctcccagatgctcaatgcccccaaatattgctgctaatcttccctcctcaatcagccttttaacttttgttgcttcagtcataaacctgctgatgtaggcccttaaaggttcccttagcatttgcttcacttctaccaggtcttctaggtgtgagggaagctggcaggggaaagaaaactgtgcgtggaattcgaaagagaaataaatccatgaattaaactttcttggaggaaatttgaaataccatcgctgagcgcctctacgagtgtggccaaaaattttttgcacggtacattgcctcttaccccttgtcggtccatctacatttcaaagtacttcaaatgggataaagagtcttcttttcctatgtatattttccatattagcattttaaactttgggtgtaggtcaagagcctcgatttcaattgagaaggaggatccccgtgcccggtcgagtttgagacctgtgagttttgggtcggtcagg

SEQ ID NO: 251927 - DNA, 1010 bp, Cannabis indica
ttttacttttagtcacactaaaacttgtaactaaagattatttttttttggctaattataaattatcattattatgttgtgactaaaaagtccgtgactaaaagtattagtcacaaaaactacaatttgttgtgactaaatatatttttagtcacaatacttattgtcactaaaactaaattagtgataacttgtatctaaatactatgttttagctacaagtaacttttgttgtgactaaagtcacatttaattaatcacaaaaatttatgttgtgactaaaaaattttccctgaaggtaactattttttgtagtaatgaactagcaaaataactccttaaaacttttttaaaaagattcaaattataatgttggaattaggcgcacacacttgttttaagcccgccattcttaattcttttgaagaactcactgtattaataaagacacgcacatgtgttcttaatgaattccttaggtggcgtttggttgggaggaatgaaaatataagaatagaaataggagtgagaataagaatagaaatgaaatagaataaaaatttaaaatggaatagaatagcagtttgaatgttctgaaacatgcatttcagctatggcaaactgctcactcaaggctgctaacaagggacaagttaagcaggttcaatattcaggttgcaaacttgaattgtgtggtgtgtgaggcagaacccgagagccacaaccacctttttttctactgtaatctgtcaaaccaggtggctaatgcaatctttcaatggctgggttttgaagggtggtccaaaaaagttcaaagttggaacacatggctgtgtagtacgagaccgaagcttttggacataataagactgattatgttggcagccatgatttatcatctttggaggaatcgaaacaattgcttgttttctctttactctaattctgttaatagtatagtgaacaaaattaaaagtgatgtgaaatataggttatacttgataaaagat

SEQ ID NO: 251928 - DNA, 789 bp, Cannabis indica
ttttagttataatgccaaacatgcactaaacttctcatgattgtattcggcatccttataatctatgcagtcgggtccttaaagcctcttactttcctcataaaggtgtgctggaggctaggtgcggggctaatgcatccttgtttggcgtagtttggtgggggtaaaaagctgattttgaagggctactgatgacgtgttggtaatggggaattggtcaaggttttggaggacccgtggcttccaagaccggtcacatttaagatatatgataaacctccactacctcctaatctctatgttgctgatcttaagtgtgcagatggccgatgggatgaagaatttataaggaatgtgtttaatgagacagatgccaacttgatcctagccatacctttttcggattgggaagtggatgacaaaattatgtggcactatagtaagaatggggaatatactgtgaagagtgggtatagaatggttagctctttggactctgagcaacaccattcggatgatcatgttattgttgaatggtggcggaagctatggcgattgaaggtaccaccaagatcaaacattttgtttggaacttgttcacaattggctcccaactaatgccgtgctagctaaacggggagtcccttcaggtatggtgtgtgtgcgttgtgctaatcaagttaatgagtctattagtcatgcattatgggagtgtactgctagcaagaaattttggagagttagtggtctgttgcaggaattaaaacgttatgagggggaggatctttt

SEQ ID NO: 251929 - DNA, 917 bp, Cannabis indica
gactgaaatagaaagaatttgcagaagttttctatggagaggcagtagcaatatgacaggagcaggtgctattgcttgggagaaagtatgccaacccaagtgagcaggaggtattggatttttgaacattggtacctggaacagagcagcattgattaaaaacatatggacattagccacaaagaaggataacctgtgggttaagtggattcataatgtctacttaaaaaagggggactcctggaaccacaaggcctctatccatagcagctggtattggaggaagcttgtggaaatgaaagatgaagtgtggaaattatggattctttacaatcttccactctatgattgggtgcttgacttgatatgagtcggcatttactcttcactatggttcgaattgaatgaagaagaagaaggaatggattttgaaattctataaaaggaggctctcaacttctagttgtttgacaaagaataaaatttaggttatgagagattgatgagaatgggagtcatcttattctttttatagtatttcaactagagtttatgatttaaattatatggaataaaaaggataaagtaatggctgaaaatagcttaagtggccggccatacataatggacctcactagttacaattttgctattttattcaacaatttatatttctttcactaatgccatattttccaatttcaatcctgtaaatgtcaaaattatttatttaataattataaataattatcaaataaaattgtgaagatttttagagacagaagtctaatatatgcaactagtttggtgccttatctcgagggcctgccaacatgcatggaggcatgatgccttgaggattgaaccatggacgtatgggagtccttgggcaatgagggagactgttcggacaatat

SEQ ID NO: 251930 - DNA, 1150 bp, Cannabis indica
atggaaacttgacgatgtggttagaaatgttacgacattaatggatgaattattttgaggttattcttaactggttttgaatttttagaatgtcagtttaatggattagtaaaattaccataatgcccctaggatttttttttaaaaaagggtttaagtttttgaggggtaggttagtcttttacaagctatatttttttattccttttgaattttgtgggctgacctttatttaaaaaaaaaaaaacaaaagaaaagaaaacatatatatgggataacttagaagctcggcaccaaaaagcttctccttctcttctttcccttcgtgcaagccaaaccaaccagcttgagggtttctcttctgccatttttcttcattttcaagctgaatcttatcccaaatcaacctagagggtttttgaggtaagttccttactcttttgattgaaaactctaagttttcagttagttttgaggtagggttttgcttttctgtagctgtagggattagactaagattggggtgtgtttagggtaggtttttgagtatgttggagatggttttaagtggtttctatggcagcttgaattgagtttggtttaatgaagccaaagttgagttttgttcccttcaatgtatgattttgattaaatgattgaattgttgtgttttaaagcttgtgatatgttgtattatagttattatactgtttttgaaagtttgattaggtttggaggtgttttgggtcgaaattgaaggaaagaacccaaggaattctggcctgccagaatcggtcgacaagttggttctggtgcacaagaattggtcgtcggttgccctgtagggggaattctcgggttttcttcaagttcagcttttggccctcagagttgcgtagtatctgttttaggttgtttatgggttttctagcctattttggagttattgatggctaggttcttattcggtttcaaattagggttttattctggaatttcaatttaaggtattcattgagttttggttgtcgtgacataggaccgggatcgcctagcttgtttttccactcaggtcggcctgcacgcttgagttctgaactatggtaagaaaagtggtaagcaccgtatggctaaatgttagcggttgaat

SEQ ID NO: 251931 - DNA, 743 bp, Cannabis indica
agaaaattttgtattgtgggaaagtgttgggtgagtggggtaaggattatactggcaattttaaagagagaatgaaaaggtgtaagtctgagattagtaaatggaagtatgatcgagatgctctgttcgttcaaaaatttaaagaagcaagaaagaatctgtttgaggtgtttacccagagagagactttttggaggcagcgctccaagcaattatggctacaagcaagagatagcaatagtaagtttttccataagtcgacttcttcccgtcgtcgcaacaatttgattgccaaactcaaagattcgaatgggatttggcatcattgggacacgggtctgactgagttaatgatgagttattttcaaggcttgttctcttccagcggctctgattggtctcatatttctgactgtatttctccttgtatctcggctgctccaaatgaggatttgcttaaacctgttgaagcagatgaagttaggaaagctctttttcaaatgcaccctgacaaggctccgggtccggatggcatgacacctggtttctaccaaaaatgttgggacgtggttgacggggatgtcgctgcacaagtacaaaatttctttctgacagaggttctccctggtgggctcaataatacaaatgtggttcttatccccaagaaaaagcagcctagcatcatgggtgatttaagacctatttcgctttgtaatgtgctactcaaggtcataacaaaagtc

SEQ ID NO: 251932 - DNA, 989 bp, Cannabis indica
acctacctttttagatctggttatcaagatcaaatcattggtaaaggtattggaggtttgggagctggatgtttcagaattagaggaagagtaagcagatcatgagcaagagctacctagaaccattgaagaagttgttgaagtcttgtctttgagggcatctatggcctacttgtagaaggaatagaaagagcgagagattagaatcttctctatttgcacaatggaaggggagagggtggaagatcaaaagctggtcaatgaagctttcttaaattactataacaattaattggggactgcaatgtttgatagacgaccaattaatcagagaattgtgaattaggggtcatgcctttcaagccaaagacagggttttctattataggattttacaccagctgaagttaaagaggtagtttttagaatccctggttgtaaatcaccggggcctgatggtttttgtacttactttttttttttcaagattattgagatttggttgaagaagatgttactagggcagtgctttcttttcattattagggtaaattgcagaaagaattgaaatccacgaccttaactcttatccctaaaatgaagtgtccaaaagatgtcaacaattttcaaccaatagcctgtgtaatttcatatataagttggcaacaaaaatgatttgtatgagattaaaagaggtgctaccagagattgttgctcaaaattagagtggattcattcaaggaagatttatagcctataatataatgatttgccaagatttagttaaacattatggtaggaaaaatgcaagactaaattgtacgattgagttggatctgaggaaggcatatgattctctagaatgggacttcgaggaagaaatactggctgccttgaattttccttcaaaattcgttcaactaatcatggtatgcgtttgaactcctaaatttatcttgctttttaatgaaactttacatggtttcttt

SEQ ID NO: 251933 - DNA, 753 bp, Cannabis indica
atatatatatatatatgttattcgatttgtcagattaagagttatcctctctttaaaagttagtataagtatactattctaacatgatcgaacttatcaaataaacagttctaagaagtggaacttttttgtagaataccaatttgatgctcgtaattgcttctctgatttaacttcttcaaattctcaggttttgcttattgaagtgttattttttatatttatagcagagttttatgatatgaagatgttcatatatacaaatataattaagttgtgtgttatgtgtaatttgatatatgtctgttagtagttattaactttacgtgattcttacgattatttgatgagaaatcttttaggaactttaatatttcaattatcagtatgatattaacctaggcatacacaggttaattattattgaaattgttattattttgattaattaatgactccttgtatatatggtcctttctatacatatacacttgtatagataggattcatctacaagtaatatatatataagtaatgagtatatatatgttattacttcttttaaaaagtctatatatgtttgatcttgttagagaagttaaaaattaaagctgagatttaataggaataaaccataaaactaattactcaatccaaaaagtagtagtcacctctactgatggtagaagaaatagaatagatgaggatcccttccaccaatagaagtagctaacatgaatgattgtgtcttgt

SEQ ID NO: 251934 - DNA, 745 bp, Cannabis indica
ttttcacattcgcacaaaaactctggtcctttaagatctgacaatcatatgatggcattccgtacttctttagacctttgcgctctccttgaaattccttttgcttgtccagacttcacctggtgcaaaaacagacgagatcctcaagctctacaggaacgtctagactgggtctttattaatatggtttggaatgatcgttttgccacaccacatgtgacacaccttggctactacggatcagatcatcgtgcaatcctgagtactattaacttgcaatctaccatttcagagttcaaatatcgttcgcgatttcgttttgaaaagatgtggattaaagatgttgaatgttctcacattatctctcattgctggaattcctctacagctaatccaattgaggttctaaatggaaacttatctcagtgtgcatcagacctgcgatcatggcacagggctaagtatggaaattttaagcaacaaattacctcagctcaagctactgtcacagctctctctaacacatcaatacactcgacttctcactaccagcaagtacagcaggcagaagcaattttgtatgatttgcttgcttcagaagaaaaatattggaaacagcgtgcaaggattgattggttgtaatctggagatcaaaacacgaagttttttcatgcgaaagctctgcaagattttccaacaataagatcaagtttataacagatgaagagggcactgtccacacgtc

SEQ ID NO: 251935 - DNA, 886 bp, Cannabis indica
taaaaacatagccattactttagcagtaatcctatggggatttacgaagctgataacaataccacttatcttgattttcctaatataatgggttgaaagaaaatggttatcttctgctttctcaaagataagttgtaaaagcgtattcaagggtgggaaggtgtttcctttctcgagcaaggaaggaggtcttactcaagattgttgctcaagctattccaagctacgcaatgtgtatatttttgcttcttatggaaacttgccaggcgttagagagtcttatggctaagttttttttgttaaaaactggtttgtcaactataagacatattagttgaatgagttggtctcggatgtgtaagcacaaacatgatgggaggttgggtttcagaagccttagggtttttaatttggcgttgctataggtagcaaggttggcgtctcctcacacatgagtcatccttggttggaagagtgtttaaggctcactattttttctctagttcttttttaacttttgagttaggaaacaatctgagttttgtttgacgtagtgtgcttgaagcttaattccttgttcgtgctagagctcataaaactgttggagatggttcaaccatttcgattcttcttgatccatggctaccttgtaaaaataattcttttgtttctagatcatcctactttatcaaataacaacttgtttagattggatgctaaagattgggatttagaaattctcaatgatttccttacatcctatgatcgtgatctcattatttctatttaattaagtacttcgcatagtttcaatttttggtcttgaaagcttgaaaggaatggcttctatagtgttaagagtgcttatcggttcttggaggatctt

SEQ ID NO: 251936 - DNA, 598 bp, Cannabis indica
ttaataggatcccctctacagctataaacttcaaaactccataagaaatgtggattggacatgttccaaaagtatgatcttatagtctttgggtgtacaacttatgcacacattagacaagacaagttgcagcctagagccttgaagtttttatttttaggctatccaaaaggaatcaagggctaaaatttatagtgtcttgaaccctgcttcaagaaaggcataataagcagggatgtagtgtttagagaggattatatagccatgaagatgatcgaggaaccagttgaaattgttgtggtcaaagatgctaacactgacagtttataactcgaggtggagcaaggtatcaattttgaagaaattgggaaagtttagattaatgacactgaagataattcagatgagacacaacgagatctcagcaactttcagttggaaatagatagagagaggaaagaaatcaaatccccagacagattaggctatgcaaactttagagctttgtccttaacaattgcagatgagatcgacagttagttaccatcaagcttcaatgaagatgtgaacaggatggccattcaagaggaaatgatgt

SEQ ID NO: 251937 - DNA, 581 bp, Cannabis indica
attaacacacataagccgaaaagtcccgaatggagggttaaaggggagaccacagaagtatttttttgcaccgcgcggcagaattttaactcacaacggatcacaaatggctttttttaaatcggtggcacttgaaacttacaacggatcacaagtggctcttatattttagaatttgggataaaatgaatgaaattttatctcaaaaccaattgatgagagaaatagtctattcatattatatatcacagtgcacacataaacaatgtagcaatattaatcagtttgaaatggatagaagtgtagacacaccaaattacctagtgaagttcatattgctactctaaattctatagtttactacatttgggaggccgaaatattgttatgggagaggaagatgtatacaattcaaagtaattgtaataagtagaattaacaaaacaatttgtgataggttttcgatcgagagaaaactagtttaaaaaatagtctgtggtttttgataagttcagtatatatgctcaaccaatttgtacattgtctattggtttttgagaaataaaactttactcaattac

SEQ ID NO: 251938 - DNA, 547 bp, Cannabis indica
atatctatatataatgttgttgtaaggtataatgatgcggcaccctctatgacattttctacatctttgttttctcattttttctatattatttcatttttatatttaacaacaataatacaatatttaaatcaaacacgataatggtcatcttttggtaataaaatctgttaattattaccaaagttaatcctaatactttgagctctcaaacagtcaaatttcctgagatcaacagccaattcacatttataaattatatcaatcactatatacgttttatactcaacttcttcattattatttgacctaaccttagttaagttggtttacttggattagttaggttgactcatttagttaggttgttagaaccatagttagcttttctaactaaccatggtctcgtcttttacattgtataaaagtcatggtactgtaaacatttttctgcagaataagcataataaaagaatcatcttgttcttgcttcttcccctgtttttctcagttcctcatatggtatcagtgttggaaatattttacc

SEQ ID NO: 251939 - DNA, 1509 bp, Cannabis indica
gttttttaccactatttgtttttttttttttgttaagtaagaattttatttaaagaaaaggcaaaactactacaacagacttgcggcaactgcaggagccaagtcctttagcatgccttcagagcaggccatggcacatctcgcccaacccgctacagcatcagccacacggttttcagaccgagggcaatgcgcaaacacaacaagatcaaaacacttacaaatacatcgacaagattcaaaaacagggtaagtgccccaagcgtaaggcaaacaaccatttttcaaggccatgattgccaccttagagtccgactggactttgatcttttttgcgcccaatttgcaagccatttgaagagccaagagaatgccagcagctccccttcgagaaccccagaaaccgtatggaagcgagaagcaaccaaagaatccccaacatcagcaacattcaccttgacagctgcaacaccagcaaccccattcaagatagatgcatccgagaagaaacactgcaagttatcattattctgagaaaccaactcaacgtcaatgtcctcagaccgatccataagattcaaaggcgccagacgcatctccatctccttaactctgagattaatatcagaaatcaatttcgccaaagagaaggaacacccttggaaaatgatcttgtttctccacttccaaatcatctcacaaagacaggctgagaataagagaagcctttcatcctttacttgagcccaccagcaaccaaaatgagacatttcctcccagtgcaaatcatcaacacgaattccccaggcactttgaaaccacacagcacgtgcaacgctgcagaaacagaacaagtgaagggcagactctgtttcctcatgacaaaatggacagcttttatctaccaaacccaaacgaagtttggaaggtaaaatatcagaccaggctttccaaaggaccaatttcaaccgtgggtgaatattagactgccataatctctcccagaccttgaggggtctcttaaatctcccacattgacttacccaatagccacttttcaccgtgaactgcccagtcttggaccccttccaaaaggtgatatctccactgcccaacaacggcctgatgccgagaatagccgaggccacatcttcatcaaagctagctctaatcagctcttcattccacactctcgaaccttctaagaataagtccgagactttggcaaaagcatgtctccgagtatagtgaaagccattccgaacctcttccaaagatttaccaggaacccaaggccgctcccaaagagcagtttccccatcaccaattaagacaccagccccctcaatacaaacatgtcttgcctcaagaattcccctccaagctctcgaatccccagaccttttatccacttgccaagcgtctaaaccttgacagtactttgactcaaggattctcacccaaggtttgttcaacacccgtaagtaccatccatcccaacttagctaa

SEQ ID NO: 251940 - DNA, 610 bp, Cannabis indica
gatcagtgtaatcaattccatcagcttcagagagagcagatgccatactccagtatgcttcctacacattcaccaattaaaaagaattaagtttacaaatttccagagaaaattcagcaaataagggttagtcatagagaacctgaattgcagttatccgatcagtggatacttctccagggaagtactcgctggttttaccattcttttcaagcattatttggtcgatcatgtcagttgctgaaagagatccactttccctaccaagaggactgggtgctaacatgtcagagattagggttcatagtatattttacttcaatgaggaagtggaaaatacgcatagaaggatgatggcataaagacttacaatttatacatttggttaaccatcatatcatggatatttttgacaaactgcatatttacagaatgaacatttaaaaattctttctataacaaagtaaattgcttacaagaaaaattagtcatgccaaagataattgaagaataacttctgctcaagtatttacccttagaaagaaataaacaaaaatcaacctctaaagaccattagagcatcttccacttgcacgttgcttagtcacgg

SEQ ID NO: 251941 - DNA, 660 bp, Cannabis indica
tttctacgatacacattcacattttatatttttttagttgcaactaagttgcacgttataagttggctcgcgacaaatataactgttgcattacagtttcaacagcaacccacgatcgagcttcctgggattgaaccttcgtctgatgcaacattcggtcaaccacctaacaatcttcatctaatgcaaccttcggtcaaccacccagcaaccatccagtaaccttcgtctaatgcaaccttcggccaaccacccaacaaccttcgtttgattgtgtaagtgatagtgcaagaagtattttggtaattgaaagtacaaaaaaggtataaatgttgtccacaccttatgggggtatttttataaataaagtatcaatttgtattttgtatgtaataattttaatattaaataggtaattagttagtttctaatattaacaaaagaaactgaactttcaactcaaatacaaaaactcaaacaaaattttatataccaattaattttaagagttaataaaaaatattttataagtttattattataagtaaaagtaatgtcaaagtatcttaaacaacaagctaatataacgttacctaaaataaataaaaaaataaataaaaatatagcttaaccaataaaaataaatactttaacattaaa

SEQ ID NO: 251942 - DNA, 2836 bp, Cannabis indica
accgattgaccaatctttcaaattccaagccaatgaattcaagactatttatgggattcattttcgcctccgcacccccttttgggcatccatggttgggaatgatctgtcaagatcttcccttagatttgattgcagtggcactctgttaagattgtaggaactggctttttttataattgtgagctctagtctagttttgtgatacacctcagtaaagtaaacacagaaaatagatgaaaaaagaggaatattattgataatttaggaaattctgacagtccaagtttctctcctaggtccaagctcaatacaaatcagaataagcctgtcccaaccctccactctcatgcaatttatttcctaaatataccaaataaagcagataacaaaagataattcaaacaatcacattaactccccaccaaataatactgccatacatatcccctcctagttcttgcgcctaccatatgtataccggattgggggtctatcattttgctggctggttgtttcaaacaaaattattattttctactttattcttataataactgttgtgtttacaagtacatgtacattttatttttcaaaaacaattctgccttatttaagtctcatttttttatggtttaccagattttaaaaaaaaaaataattgtaattaccatgttaaaaatatttaaatagaattatttgatgcttctgggttttctaattaaatgagcagattacctattcttttattctttaagcttacacttttctagtttggatgctcttcaattgcatcagacacaagcaattttattttcaactggtacgacctgcataattaaccatggacttgctttaaacatgctcctactggtgggggcaaaatccatgctcctatcaaaaaaaaattctacatatatattcttagaatctcatgctcctatcaaagaattttattatcaactggtacgacctacataattaaccatgggcttgctttaaacgtgctcctaccggtgggggtgaaacccatgctcctatcaaagaattcttccacatatatattcttagaatctcttctctgctcaacaaaggaaactagctaaaactgatgccaaaatctaactattgaccaactctttccattatccaattcttttattaagaaaaagttcccgtgtttgagaagaaactttgtatcaaccataacttataacctttacaccttattacacagacgaagtttgatttctccacaaaaataaacaattttattgaggaaatagaaattattcaacttaacattcttgaaatctttatcaagcacatcactgtgcacggaagtaaaactgccagagctactaagggtagaaatatcctactttgaaatcacaaaagccacattaaatataaaaagacatataaaccataagcggatcacggatgtgcaatgtaaatgttacattcaagtattcagcagcaatgttgccttcatggcaaaaagatatagaaatagaagtacctttgcttgactgcctccaccattcatctatttgttttcctttctgaagctgctcgctgtttaaatattctctggtagatgtgttcaatgaccaaatgcgcaaattctggcaactgcttataaagtcaagcaagatcccgtgaggagtattagggtcagaactcctatcttctctatgaaaagacataatctttcttgtcgtctccacctaccagatatgtgatgcaatgttaagtttatctatctgaacaatgcacccaacaataaaatattcgctggtcactgctgagaaatcataatgcataacgtcataggtacattctctatgaacatatgagccatatgccctatccactagtgtagtacatatgattcacaatatcctacaactagggaaaatattgtcaataatatagtaacagagaagaaggcatgatgacaatgtttattttcacatttcaaagacaacctttctagcatcattattcaaagcattgatcacaagctcaactcggataatttctgctattagcaacgtcacgtgatttgtcctaagaatatggtggtcacctccctctgtgagacgtaaaactaatttgtccacaaaatcaacaaagtcaatgcacccacttttaataagaaagtagaatatatccgaaaaaacacgccactcttgccagcaattgatatctgcaagaatcaaggtatgagatatcagcatagtcaaaaactacgataaatatttcttatattcctaagtattgaccacaagcaacctctatgataaaaaattaggactaaagtgactagtaaactgttctgcggagtatctgctcctgtcaatgtaactagaccaaaggaagtggcatattcaagcagcctaggtatgaatttcagattgattttttttcctcctctcttttacacatttataacattttaaattgaaaaacaaacaaccatagttattgtagaggagaaatctaccaaaaaaaaaaaaaaagaagtagcacaatactttagtagtaagcatcataaaaatattcaattagtgaaagtcttgcctgaattagtaagcttcaagagctcaacaaatctttcaactgttccctcacaaatcatttcagaactgaaaacagcacccggagtaggtgcttgagcttgaggcttatggcaaggagcgacaaccaacacacgcttccaccaatcgggagatggagtggtgcgaaatgcatgtcttatacaacgcaaagctctctcccagtctaaacttcctttctgaatggaagttgcaatatcctaaaccaacaaaaa

SEQ ID NO: 251943 - DNA, 770 bp, Cannabis indica
acttccagcagccaccaagaagcgtagattaaaaggaaattgcagctcttaatttagtaatttagaggttaccaatattccttttttctcaatttttctcttgtttgatcattaatcttcgaattatgtatctcattattttgaatcacattgattaatgctattagaaattatagttttagattttttgattcccaaattatcctaatgatttatttctattgtctcttatttcttgatgtcatttgggaatttttgagttggttggaaatttcattttaatttgttgtttggtggctatgagataaattaaggtcgggatgtagtataattagttagggatagcgagctttgcccatcacctataattaacctttatttgtactataatataatgtttttttttttagaaaaggaaatgtaatagattcataagcccagataatataaattgttcaagagctgagctcttggtcattacagaaccaatctgcttggatagaagtaagctcaatagacccagtcaattttttatgctatacattatttgagtccagtactgtaatattatttatgacattatgattatgactcatgtatataaatctttgagttgtggttttcaatctatttgaatagatattcatgaattattaagatgtcatttttaataatatcatcagaatgtaatatcacacttaattttataaggtgaggtaattaaattcttttcagaaatttgcggctaaaccctcttatgtttatatttg

SEQ ID NO: 251944 - DNA, 774 bp, Cannabis indica
actagttctgatcatactcctttacttctagtcccctgctcttatgatacagctgcccctaaaagaaggtttcgttttgaaaattgctggctccgtgaaccaatgtgtgcccaagtcataaaagatagctggtccagttgtccttctgatgccattactgaaaaaatagcacactgcagcaacattttacaaacttggggagatagctactcgggtaacttcaaggacagaattaaacatctcaaacaagaggttcaatactggaagaaaggaagggatgctttatctgtcaataaacacaaagaagctgaacaaaatttgtttgaagtctatactcaaagagaggttttttggaggcaacgatcaaaacaactttggttgagggaaggagatcaaaatagtaagttctttcatgcttatgctactactcgaaaaagaactaactctatctctaagcttcaaaactcagctggttattgggtggattggcaaagtggtttggctgatgtaattaaagattattttactgatctattcaactcctcaccacacacagctgatgctattactgacagcattcccacaacaatttcgactgcccaaaatatgtttttgcttgcacctgttaccgaagaggaagtgagtaaagctgtgaaacaaatgcaccccgataaatcacctggtccagacggcatgacaccaggtttttatcagcgtaattggaatgttgtaggcacggatgtcataaaactagtgagaaacttcttcttttct

SEQ ID NO: 251945 - DNA, 648 bp, Cannabis indica
tactgtgtaggaaagggtaaatcagtctgtgatgccatgagtgcgagaccttggcgatgcttgtacatgttcgggccacactaaaccaagcgggttggggtctaccagtgatgtattttgtaactctaattttgccacttaggtcggctcgtaaaatgaacttgtaatatttttatgaaaatatttacgggatcccgaaacatgtatttttctgttgtaaattttaaagttgttacaagtttaattttcattctatttcaaataaagtttaaatttcccgcgcttatctttctagtaatacaaatttaggggattagggtttcttaatcggttggtgtagcgtgcctaatttttagggcattacaattactttttattataattttatataatggcagtttgttgtaaagtattcgaaaagataattttgttttactagtttgataaagtattaaatttctatgatactctttttggactttctaatgtgattcaatttgttgtttgcagaaagtttggagaataataacaatgtctattagtagggtaatattttggcaagttaccaagaagatgcttttgcagagatgatcgatcaatggggcaaagacagcgtctcattgatgttgtaagtgccgtgttgggttt

SEQ ID NO: 251946 - DNA, 1331 bp, Cannabis indica
tgcaaagtgagacaattaatgcaggaaaatagagagaattggaatgtggagttagtgacagagttattaaacaacagagatgctcctatcattctaaacactcctatcaattcaggaagaggggataactattactggaaatttgaaaactctggcttctatacggtaaaaagttcttataagtatatacaactttgcaaaggagcttggagtgctgatatggaagaacaagtgtggaaaatcttgtggaaaattaaagttctagctaaattcatgcattttatgtggaagggtcttactggttgcttacctactagaatgcaactccaaactaaaaatatcaatgtcccttgttcatgtgtctttttccattttcatgaagaatcaatcagtcatgtgttgcttgaatgccattttgcccagatctgctggaatcaggcagcagttaacatctctgctgctgctgtcgggttcgatttttctctctggtttgagagccttttgcatcgtggacggccaagtatgattgaggaaggagtaatggtggcttggtctatttgaaaagctagaaacgagttgctatggaataataaaatacgaactgctgcggaagtcgtcactagttcacgatcagtccttgatcaatggagttatgctcaatctcatcgttttgatcccttgttggtacccgctgccaatcaaaacaaggaagagcaatggtcccagaaattaataaaatcaaggtgaacgtggatgatgcgatctttaacagctttggttcttatggcattggagtagtggctcgagatagtgacagtcggttgatagaggcgtttactgctctgaaagttggtagtgttcaaccagccactgttgaagctcttggaattaaggaagctttgagctggatcatggctaaagggtggtctaatgtagttattgaaactgattctattgtgtcagttcaagctatctctagtttgctttctatgccttcaggttttggtttgttaatttctgagtgtaaacatttgctaaacttgttgtgtgttgtgtctgtgtcttttatttcgcgatctgctaacagaatcgcccattgtctggctcgaggctcttgttattggtctgattacacttttaatgtcagcaatgttcctaatactgtacattctgctataatggctgatttggctattataagttaatgaagttcaccttctattcaaataataataataataataataataataataataataggttttaaattggaaaaataaattaattttttatgaactacgacgtcagttctgatgacatatggcgtc

SEQ ID NO: 251947 - DNA, 477 bp, Cannabis indica
tatgatgagtggtgaggggcgagccatggaaggtctcgcctattggcgagacatggaacccctagttaggtgatgcttgaagccccttggtatgacatagagccccttagcaaggcatggagcccatggagccctttagcatgaggcgtggagcccttgggtgagtcccaggccccttgggtgtgccctacatctcttgggcgagccctttagcatgaggcgtggagcccttgggtgagtcctaggccccttgggtgtgccctacatctattgggcgagtggtggaatccttggggcgagcttaagcacttggagtagagtggactctactagtattttagtcataacttgttcgatataattcaaaattgaacaattcaagatgttttgaaaaataaagaacggaatctacaaattttatgtttggctctaagttaaaagataccgaaagctttcactatgtcaagcctcatagct

SEQ ID NO: 251948 - DNA, 1092 bp, Cannabis indica
ttaagtattttttcaaggcatcttggtgtgtcgtttaatactttcctacaaaatgcaagacgttagtattcagcttcgcatgtagcatatgagttatatctcatttactacttttgattctcctttctcgtgggaaaggttttttaattaaaaacttcaaaaaatttaaaaaaattctaaagtaatgggtttgaaatatatcttgtatctccagatagattccggttaataacacacatatgcccctcaagcaattttaaaggattacacttagtaattacttgaaaaataattcaactttattaataactgaagttcaaaatattatcaaattactggtagtagggtcgcaaatgtttcacgttccagtagttctttatcagcgacccattcagccgagccaatttgtaaactccagttcctactatcgcttcaaccacataacgaccctcccagtttgggttgaatactcctgcagatgtgtcttgtatttgcaaatactctccttagtacaagtatccaacgttgaagagtctcttctttactttcttgttgaagtatctcgtcactcggtgttggtatgttgtattagtaatttgtgattagtgcattttttatcaagtagatccaagaacaattttaaaagttcttggttttcttcttgattataaaactctcatctgtgagtcgagatatttacttctactggcaacattgcgtccgagccaaatgctagcgagaatggagtatgtcccgttgatgtcttctcagttgttctatgagtccaaagtacttgagatagttcatcgacccatctacctttggcagcatctagtttcttttttatagtatccttcaaggtcttattaacaacttctacttgtccattcgcctaaggcctataaactgacgagaagcttttaataattttgttcctttcgcagaactcaatgagtaaatttccaccgaactgagttccgttatcggatactattttcattagaattccgaacctgcatacaatgtttttgaccacaaagtcgagaacttttttgcggttatggaaaccagaggttcagtctccgtccattt

SEQ ID NO: 251949 - DNA, 669 bp, Cannabis indica
gttaagttttcactagtattctattggtgttttactagttttctactgttgttttgagttgttctgctttgtgttttactggtgctttataaaaacacagtatttttgaatttttgtaaaaattaactcaaattccagtatttttgtaaattttcttagttggacttggatagtgaatccgaaataaattagagatattgagttaagcaaaagaaagtggttattttgtcggtgccaattaatggcttttattaaatgttattaggttaaataaaattttcaatgttgttgaatcaaacaaagcgcctgtagctcagtggatagagcgtctgtttcctaagcagaaggtcgtaggttcgacccctatctggcgcgttaattatttttaacccaaatcatatacattatacatcttttgacttttcagcgtgattttttttttttttttgaaaaaaatcaataataataagttagtatattcctttcaatagaaaaaaaaaagatattaattagaatgttttatttaaaaaagaataataacactaacttttttttattttttattttattttaataataagaatattcagagtacaaaagagtaagaagttccattggagtacaaaatttttcgactgttttatacagtcgtttaaagtattcacatcg

SEQ ID NO: 251950 - DNA, 709 bp, Cannabis indica
  modified_base (655)..(655): a, c, t, g, unknown or other
acatataattatgggttcttattataataaaagtaagtgcttgataacaaaataaatattcattactcaattatgatatcctattacattctaagaaaaaacaccactgtccaacaaagttattgtaagataaattttgacaatactaaaaaggcaaatatttaaatttagacaagaacaatcatcccattatgtaagtactcatataaaattgagattattcaaaatttaggttacgaaatagacaaaatacaaacaaaaatacaaaggagactacaaaaatgaaagtggttcagttaaagctgggtttgcttaattcacttttggtaataatttccagcttagtctatttgtttcggatcaccattttatatataaagcaagtgtctgttaagattacacaatcaattaattagaatcattacttcaataataacatcattaaataagaaaaacgtttagatattaaatatatgaacggttttgtctgttcgactattccttgattgcagcaatgtatgtaatttatcaatttgccccgtttgagcattcgtatcccacacgcgagctctcaagactctatggtgttgcactcgcataatagggcttaggactttgaatgtcagcgaccacacttgatcgtactttttggacnttccgtgttgacaattagagccaacatgcttttaagaaatcatcaaaaacacta

SEQ ID NO: 251951 - DNA, 755 bp, Cannabis indica
agcatatacttttaaattagtgtacattcttaaggacctaagattgtacctactatacatagcatcatctaatgctctatgattgaataacgatactcaataatagtttctacattaaattatataaaactcgatacttaattacactaataatgacatgacacttaagatattactaattaagtgttatattagtgtcttttaacatttctctttaaaattcggttaattaactgagatatgtagataaatctacatacgtggtggtgaaagattgttaagggtcaccgctaaaatttggataaaagttctacagtacttgacaaattattcactatatatacatttttacacttaacgaaatactaataaaatatccgaatcttaatatattaatgtgaattttaaataatgaaataatgttgaattgtatcattattgttgggtggtgtgtgtggggctggtaaacattggtcactttcatggtcctttctcatggttggattcttgctcactgattactttaaggtagtattttaatgttacaaatccattcacacttgcatggtattagatagaagtatcaacttacatgaaatttttatttaatcatttatgactagcacaccaccacaaaataaacaaaacaacactttaatatatgcacataaaagggaaatgggaaaaaagaaaacactatgtattagactaatcatggtattctttccaccaaaaaacaagataataataataaa

SEQ ID NO: 251952 - DNA, 2584 bp, Cannabis indica
ttctgctgctgcaaacgattacagtttttatattttcttatatacaactgacatttacaaaaacgcggtttttcaatatatatttaagtttaactcatagttgcaaataaatacttaaatttaatttttggcgggtataatacctaagttataattctggaacttctgtaggtacctgactggtgaaatgaattgccacgtggtaatccttaattggtccaagtcattaaatttttattctaaaaataatagtttaaatatactaataagtaaattaatggtacgtgaataataacttaacatttaatggttaagtacctacagagttctaaaaatataactttaatattattacagtcaaaaattaaacttaaatatttatatcgtaaattattttattagttattacttgttttaaaaataatatcatccttttaaaaatatgaataataataataataataatattttagtgctcggattataattaactattctcacgttatgtaccacacaattctcaatactaactatagtagctagcctatggagtgtgagtaaagtcatgttgtggtaaattttagagatattttataacctaattaattaatatctcaaatacatatataaaattatatattaaataatagtaataattaaatgatttcttttaaaaaattaataaataaatgtttattcttataaattctaaataataataatttgtcattagatagtagaattgaaagatgtagaaaaagcaataataataaagatctgtaattagctatataacctaatgaatacgacacctatcatactctccaattatcatgtatggaaaaagctaagccaaaaaggggactacaatgagtttgagtactgaaatgaataatattagccctcccaaagaaaatgacatacaagaaagccatacagatattagaagttgctttaatatcatttttttaatgttttctttttttaaaaaaaaaatatatatatcattttttaatttattataatcttttttacatttttgcctctaaatttttctgacaattaaaaattctctttaaattattgaaattattagatttaaagactttagtttaattgcatcaattttactaatttaataattgtttatgtactaaattatacttcctaaattttgatatctattaaatcatctttcttgaactttgacatgtaacaaagtacgtctcttgaactttcatctatattaatttttctttactaaaattagacaaaaaatatttaaatccaacaatctcaataatttaaagagatttttaatgatcttaaaagcttaaaattattatttaatacatgttaaaatttagaaagtaaaaatcttaattaatctttttttattgccatctacaccataaattatattttatatacatgttagtgaatcccataactaatgtatatatatatttagaaacattaggatatttataagaatttcttcattcaatattaagtactagctagagatagaactctggttcagaaaaaatattactagatagaactcatttattttattattgtttccaaacatactcgatacacttgaaattgaaaattctccagaccctttattattcttgacaaatagtatatatgtatcgtactgtgattataatattatagactatatgaatcgattcgtatctttctcaccctataaccacaattttttttacagagttattttttttttgcctttcttagcaatctccatagagagagaaataaaaacaattcactactacaaaatgaattattgccaacgtttattaaatagagacaattataaataaaaataatgataattataagaaaaatatggtgatgtctaaatatagaatttttcaataatatatctataataaattaatttattaaaaattattatttattgagttcttaatatttaaaataaatacgattttataatatatatttttttatgttattaagagcaataaaataaaaatttacatgcctacgtaattcatttttaatggctaattaatttattggtggaaagtaaggtaaggttattcatttttccaaccaaattaatatgtttagatgtgatttgaatgaataattagtcaatgatcttgatttttgattttttttttttttttaaaaaaaacttgtctacattagtttaattcgaaaacataaactacagaccaatatcaatatgtgaacattacacagtgctataaacagttgctaaatagattaactaactccatttattttgtacatataatatagaggaatgatgatgactttttgttgccaaatttatacataattgtagttgggtatgccactttgggttaacactataacagacagcaatatacatacttattttttatatctattcataattcatatgtatatgtatgtattctcgatgtgtattaccccataaattggtaaaaattagaaaaaattaagtttttatgcttaatttttctatctaatagaaaaatctcttactttttacattcatatatactgtagattg

SEQ ID NO: 251953 - DNA, 611 bp, Cannabis indica
aaattaagaatttaattttgaaaaattctaccatacatctttctaaataagatgtactgatgtattcctatttattttgacgcccgacagacttttttagtctcattttttatagtcgtgtatgttatatttatttaagacatccaacaaaattttaagaaatttaaaaagaatttaacacgccgaaaataatgtacctgtgtattgatgtagtcctacatatttcggcattcaaagattttttttagtctattttttttatagttgtgtacattattgttatttaagatatcctgtaaaattttgaaaaactttaacgcgccgaaaataaacttcaaactgtctgttgcatgtgtgacttttttttttggagaggtgcattgtaaaaaaacttttaaatttattgtatgtaaatttaaatgtgaatactacatttggcgactaaaccacctgaatttttacgtttttgtaacacttaaccacaaaaactaaaattttggtggcaaaacctacttaactcccattccattttgctttgtacccctccgtccaaaaattacagttaagtgccacggtggactatcacgtgtacacacgtgtacacgtggcaa

SEQ ID NO: 251954 - DNA, 502 bp, Cannabis indica
tttgttgggtgccgaaacaaataagagtagatttgtacaatacttttaaaaatatgcatggtaaaattttctaaaaaataattcttcattttacaaatacaataatataaatatacataaatattaactaaataataaaaaaaattaaaaaaaaaaaaaacaatgccgtgtctacactgcacggcatatatgccgtgcactgtagattaaactacaaaatgctgcaacaaatgcagcctccttggaagatatatacacggcatacaagctttttgcggtctccttgtagctgctcttactgtccactgataagatttgtcatgactatctttagcatagagcagcagggtataaatcacctagattggtggcattgaaagaggtctataaaccataaaaaataaggtggtttgggattttaaaatttagaaaaatggaacacagcagttgttgaaaaatatattttatctttggcccaaaaacaagataacctatgggtgaa

SEQ ID NO: 251955 - DNA, 2093 bp, Cannabis indica
ccgaacattccaacttgctaaatcgcaattatccatttgattcaacagataaagggaccacctccaccttttccaaaccatctgcctccattaatacattaaaaacattccctgttgaagcttttgcctccaatttagaccttggaatcaaagtaccctgtctcttagctggagtaactttcctaggagtttgccatttttccaccaactcagttttttcaatgtgtttagatgtaggtacctgccctatagattgaggctgctgctctttttcaccagccgaagctactggtttaggatcctgcttcttctctttagaaccattaacatctcttcggcaatctgcttgcatatgaccataaccattacaattcttacatttgactggaagccactcatactcaaccgcttgttcaaccaactgatcaaactcattcagaaactgaatcgattttggaggagtatccatgatgtccatttcaactagaattctagcaaattgaactctagttcgatccttagtatattggtccaccataattggtttcccaatagtactaaccaaagcactaaggctattgttcccccaatattgaagaccaagatcatgtagccgaatccacaaaggaactgaacgcacaagcttaatcgagtttaggtcagacgaccaaggcctaatgataactggtttcctgtcaaaatgaattatcccaccctctagaacttggtctcttgttgcttcatcattgaacctaaccattgttaacccttttgccattctagctatctgtgttatccccaaatgtccccaaactctccttagaaaaccttcaaacacagttaggggtggattagccccaagaaccatacaaattacagaagaattccagtttgttgttcttttacttcttccacatctactttagctactttaataccatttttgatcataggttcagaataagcaagcatggggtcacgatagacattgtgtacctttgtgaatgcattccaatgagtcttggctgaatcttgaaggttccccttctccttttccatcaattcctcttgttccactgcctgcgcccaattcggactcagtcgaccaccaacaccaggttcgaaaccagaacaggctaatccctgccctaattcctctgtttcgactatctctgcaatgagattcaaacccgtgactccatcgttttcaccagcttcttccatcgcaccagtggcactctcattctgctcaacagacggctcagggacgtgatcggctggctttcgaaccactttcttcctcttcgccatggagggaggagatagggtcacgcacgcctctttctccatcatcttctgtactttatttttatgccatttatttcttcttctaaaaatggcagcttagctaatgttgaagaaaagtggcagttgtacttggtttttctttgttaggtaaatagggtacaaagtaataccctaaaaatagaagcctaatcatttctaatcttggcccactaggtttagtctccttcctccacaacagccagctggcgtaattttgagtgattgatacgttcatgctgatgtggacaaataaaattcattttttcaactctttccacatcattgcccagaatgttgaattcgttgcagcaatacttcagcaatgtggcccaatttcagcttttatgccaactttgtccttgcatccttttcttttccctaacaatttaattattctttctcaatagcaaacaagcaacatttaattaaataaacattactaaaataataattttttacaagacttaaaaaataagataaaaactagttaaaattaagcaaacaaacacactttcactactcttcttacaataatttcagtttaaaagtacaaaaaataactctataccataatgttattgttagaatatggttttacgaggatctatatgttgggttttatgacttattaataaagatcagaaataacattttatgttgtatgtgtcagctacagtggaataataatcttaattatatgttcaaaagtttattccttgatttgtcagttcactggatttagactg

SEQ ID NO: 251956 - DNA, 1107 bp, Cannabis indica
tttagaaaaaatcttattacatttttatatgtattacggcttgaagactctaaattattttttttttgttctcagtaatgcaatttagaattctaagttttgaagaaattttaataaaaagataataatatcagttcaaatattaattgaaatttgttttatttttattttattatatataaataatattttattattttattaaatataataataaaaagtcacccatgaatttctcataattagcatcaaatatcagttcaaatattaatgagatttgttttatttttattttattatatataaataatattttattattttagtaaatataaataaaaaattacccatgaatttctcataaaccaagaaattcagttatataggcacactttatatagaatagatacccatttacctaattacaaaacattattaattaaaaatatttaaaaattagattatcactttttttagatcactttttccttaaaacattctctcccgtttgtttttagactattttcttctcattttattttgtggtaatcattcactcacaatcaaagatttcataatctacaacaaattatgtaaaaagtgttatatatttatgtaatacgtaaaaaaaatttaaaagtcaattttctcttgttttttccaaaagaaaaaatattaagggtcgaataattttaagtagcgtataatttctcaagcaccagtccattatttgtaaagatattgctcgaagagtataatcaacaaaagtgtagtctattaaattctaaaaaaaatatgttactcatccttattaattaattactaatttttttaagttttcatttaaaaaagattactgtctttttttaggctaattaacattttttttttcattctttagaactatgatttagtacatgttaaagtttgaggacatgatttggtagatatcaaagtttggagagcataacttagtacataaacaatcattgaaacattaaaattgaatgaatcagacaaaagttcttaaatttaacaatctcaataattgagggaaatttttaatggccaataaaatttaggaagtataatttagtagatatcaaa

SEQ ID NO: 251957 - DNA, 1351 bp, Cannabis indica
acattctcctccataggggtatgagagtaagcagagacgctagaaccagagttttcaacaacaaacgatccaactaaaggatttttcataatttcggatctgttcagggatttcgacgagtcctcagaaggctcatcaaacaccattcttgaatcattatcaatctgtttagtatcccaagggaagtcacgaatgacaacaggatgcttccttgaattttgtgcggcctacaacagagggaggcagaggtttcaaattttcttttcttgaaaggagtggtcctctcatttatttcagaagaagtcaggaccccaatatccccgccaatcttacgaatctcgtacaagtcaagctctgcaaaatgtttgagatcatgtaataaattttcttgagcatgaaagaactgggatagagccttatcttcatccgattgcacttttgcttcataaaccccatcaggaacatttgagggagccaaagaagtggtcatctcaacttgttcgtccctctgtttactatgtctaggatcaatagtaattggaatacaacttacgggccttgggtttccatttccaccttcatgtgaagacattccattactatctagcaactcaggcccagagggaataatggtaccatcaggcaaagaaggcccaaaggcaggagagttgttacatatgatggcctgcccatttcttgacaaacacggcccatgagggaccggcccaataaccaagctattccctccagccgaaacaatagccacctcagcagaattcaagttaaaaggcccactcttttccaccaaactcggcccaatagaactaggcccagtgcatataccattttcaccaacggtcccctcatttaaaatactttgacctcccattgaccggtccttttcttttatcattaaaaaaggaaatttctcaggtactctttccacttccaatacctccgtggttcttcccctaccaagagaagcaatgcctgatgcaactcgaggaggacgtgacttaggaatccacgcaatacgctgggactgcccgagaacaactttgtcacgagaagtcaccatcgaggtatgcctcgtccgtcgaaccgggttggagattttgaaactcgggtcatcaacaccctctgccatggcctccggcgacaaacgaacatcccccgtcgactttctttgagccacacccaaaatactacgggagccaaacggttttggcccggaaaaaacatcacgatacgcagaggagatggatagccaaggaccgaacataggaaacggagtgccatcgatattcgcaaccgtaaccggcgacgacaaactacatcccctccgttgatg

SEQ ID NO: 251958 - DNA, 560 bp, Cannabis indica
gtaatgggttttatttagggcacaaaacccaacaccaatatccccgccaatcttacgaatctcgtacaagtcaagctctccaaaatgtttgagatcatgtaataatttttcttgagcatgaaagaactgggatagagccttatcttcatccgattgcacttttgcttcataaaccccatcgggaacatttgagggagccaaagaagtggtcatcccaacttgttcgtccctctgtttactatgttcaggatcaatagtaattggaatacaacttacgggccttgggtttccatttccaccttcatgtgaagacattccattactatcgagcaactcaggcctagagggaataatggtaccatcaggcaaagaaggcccaaagacaggagagttgttacttatgatggcctgcccatttcttgacaaacacggcccatgagggaccggcccaatacccaagctattccctccagccgaatcaatagccatttcagcagaattcaagttaaaaggcccactcttttccaccaacctcgacccaatagaactaggcccagtgc

SEQ ID NO: 251959 - DNA, 3059 bp, Cannabis indica
tgtgatcgagccgtgtaagattggtgatgttagagagtcacacattgataatgtgttgaaactaaatgccatacataaaaacatgtgctactcctctcatagtcattgctaattaattttgagacggaatccatacaccttatcaaatactattacaacatttctcagcatggatgaaaaagccttcttccaacaacatatatatggatgcaaattaatgagtactaataaaataggtaggtacatatatgtaggcataccttatgagctagtgataaatcttgttctaggtcattgacccgtttgacagctgcagccagcatttcctctttctcaggaggcatggatactggtttcatattaagaacactaactttttcttcaagttcagccatgcgcttcatcatggccatatactcagtgttcgagatggcctcgacagccgccggtacgtccaacttatggtgtttgatcattgtcatctcattgtagtaaatagggctgccatagacagccatttcaataattttctttggcatgtttcgtgttagtcggatcattgtgacaattcccatcaccatggccaagattccagaaaataacaaattgtttgatccttcagtagttttgcaaccatcattcatgcacaaagtacttgtatctttcaaagagaagcattttttaatgttacaaaagatttcaaattatatagccaaagcaaaaatataagtatctttagacaattcttttgaggtaataattcatattgagaaggttaactaaacctttattttggatgaatctatctcttttagtggctttagtccatgatgcatccacattcttgtcaaccattggggtaaagttgtcatttttgcaggcttgggttgttaaagcaccctgtaatttttggttttaatgaggacatagaataaaaagaaaggcataactacaatattttcaaaatatgaattttatgaaagtcaaagatttgatttatataaaatttccacccaaagtttactatcaagattaaataacccacgccatagtttacattatggcgtcggttatgtttgattctataacatcgcttggatcagtgttattgacgaatttcgttaaaactgacgctaaaagacttaaaaaattgtctctaaagtccaaatttgtactagtgtcttataaatctaaaagatttgaagatattattgaaagtgtagagaagttacttcagaaataaaacaaggtatcggaggctcccttgaagtgtctaaagctgtttctgagttgaaagaatgacatctcttcatattttttgaaaccaaatagagaatataatagtcattagacaatgaaggatatatataaacaaatagttaatatatattataaggatataatatatgaagtgaaaaaacttatgtcaagaccaagtatatttgagcttgccttctctttcttagagacatttttctcctcgtagtcatttaatgctcttcttgtgcatttttttacttcaccattttgcaccatctgtttcatcaaataacaaattcttaattaggagtcttaattaaattatatttttctcatgttccatgtcaatagttgttgtttttcattgatcttgtttgatatatatacaaattagtaatctcacatattagatgactcaattagaagatctttctaatattccttgatttgtctttaaatttaggtttgcatgaacttcatgtctgatttttcttattacattaaaaaaggtgcagtgtaataattttgtgttgtagtataaaagtaggattcaatgtgattgttttaggattacattgatcaattttttggcatgacaaaaaataataaatctaaaagtatttttataattaatatatattgataaattaatatgatattaactagttaaatttggaccacctctagagagtgtatgacatgacacaaaaataataaatttaaaagttgttaactattatatgtatttttaggggttttttcatttttacacttttaaaatatatatatttttttgtattattatgaaattctactcagaaatctatataacaactaacgaaacaatctaaatcgcaaccaaaattcgtataacaacccacatagaaactaccggagtaatccaaatcgtaaattaaaaaaaaaaatttaaaaaatagtatatggagtaatttcccttaaccttaagtatttctaggtcgttccacggacccttatcagagcgcatgcaaccaccattgtctccacaagtgcaagtaccacccaaaaactctggcaattcactggtttaaattgcaaaataacaatgtgagaacgatagatttgaataatagataccaaataatacaatagccaattaaaattagaattagcatgaaaaaaaatagcaaaactaaaaggaagatgatgagaaagaaatatgaaaataacatcatttattccctactgaaaagaacttacttagcatcaattatttcaagcaacttgctctggtacttgttaccaagaacctagtgcaaataaaactttatttttagcttcaacaatattaaattaagattatcataactagtttaagaagggttcataatatataggatttcacttacatgaatttttgaagtggtctttggatctatgaatgatttaacagtgctccacaataacctaaatccagaaccagcattaatgatgaacatgcggttcagggtctgtggaaaaacaagaaaattaaagaaaaaaaaaacattagcatcttaaaaagaaaaaaagagaggaagcaatataatcaaataaaaaagtaaatgcatggttatacaaatttcccattatcccaaatatagtattaaatttgacacaacacttactatataccaaatttccaacacattttgccataagagcacatttttagctagttgaactatatattagctttacattatttacttgcatctctattagaaaggaattttttattttttatttttatggagaaagattttaaccctttattttct

SEQ ID NO: 251960 - DNA, 629 bp, Cannabis indica
atgtttagcgatgatattagcgatgtgtttcgcgatattttgcgacatttagcgatgtttcgtaacatcgtaaaaaaataaaaaaaaaatgcgaaaaacaagcaagttgagaattcatagattttggagctttgggcttcacgatttctctttgtagtttcgcgatatcctcatcgattttgtcctatgtttcttcttcagagtgggtttcgccagaggtggtgcggtggtcgtgggtttggtctgggtctagttctggttcggtctggttctgtggtcgtgggtatcaattgggtttggtgagagttagagagaaaaagggagagagggccaatagaaagaggaaagtatgaggagggtattttgagatttaattaattttagagtatttaaattcctatgtattttaatgtggcatactaaaagatcatggacaatttttaagcatgaactgtcaaattttcctttaaaattcattgttcaaaaaagaaaagatttacaattcattaggcaactcattctaagttcctttgagaaggaactcctcgaactcattcaagtacttgttctgcagttccatattcccaaagatttgcctcatctcatgtgacttagctcggagtggttct

SEQ ID NO: 251961 - DNA, 727 bp, Cannabis indica
aactggagttcccaaataatccaaaaaataataaaattacatcaatatactatagtaaaaaatttatccttgtatattttatgttgttttctaaatttttaatggtgaatttattcaaattaaatcataatagttgcattacacagttgcataaatattttgctatcagttatttcgtctaattgaaactttcgtcttatgcaatctttggctaaccactgaataaccttcgtctgattgaaaccttcgtctgatgcaaccttcgaccatccacttagcaaccatcgtctgattgaaaccttcgtttaatacaatcatcacgcaaccacgcagtaaccactttgcaaccattttcttattgtgtaagtgatagtgtaagagatatttggtaattaaatttaacataaaaaatataaatattgtccacaccttatcaaaataattttatatataaagtatcaatttatatattctatataataattccaattaatgaaaatctttaattaaattaaaaaaaaaaaaacgtaaaccaagaaactataaggaaagaggtaagtagaaaaaatacctaattagttaataacacatatctttctctattctctaatttttgtcttaattgtttcatcattccatttctttcttcttctattctaagcgtaataatttcctaaagaagaacacgtgattaggcccaccgcagatttttgtcctcacgtggcaa

SEQ ID NO: 251962 - DNA, 2097 bp, Cannabis indica
tgtcgagtttacaattttttttacacaaagtttctaaatcacacacaagtattttttctcttttcctcaacacttccacacactctattttcactcccccaaaacttggtgtaaggctttatgataccattcaaaatgtaatgaggacaaaaaacaacagtgtgcatacatctttagttcaatgggtaaagaaacgagacaggtttaggctcaaaaggattcactaaggatattcattttatggtaggcttgaaaggctcaaactgtatggtaagcacacagtttcaaaatttcaggacatttcacaatcaacaacagcatacaactatcttcagcttatttccaaatcataaaaacaaacaaaaccaaacaaaaaataaattaaaatttttaagtcccccccccaaactgaaattcacattgtcccaaatgtgcaaataaaacttaaaggaaagagacttactcgagacccccatcagaaggggttcggtggtggcggatgatcatatggatgaaattgaggaggtggcgccaaataattggggtcctcgatcccaatgttcatgcgagtgataagagagttaagttgagtgacttgactctcatcatatatactcctctgaaccatgtaattctgcatatggttgttttgttgaatgatgtagttaagttgtgcatgtgtgtactgcatcgctaaatcaattgggccaggcaattgttgtggcacattttcctcctcctttgcactttgttcaccaggacgccttctgccttgtggttgagcttttggtagtggctgcccatagggatggggctccttgagcatattgaccatgctcacatccatctttctctgcggcactactttgttgtcaaagggcaattcattcacctcagaagcttgacacaaatcagtaataatcccagccaacccatgtccacctcccaaggcgctttgaaccatcaattcaaaactacctcgattaacttgacccagattaatcttgtaccctttcatgatggcgtacacatatttcaaacgatccatttgcacataagaaaagtgctttctaggcaccaaccaggcactcacaaaatacaaccatattttttatccataggatttatttaacaccgatgcaaaaaatttggcgacccatcctgcccatcattatcatggaacctcaaccccaggaacccaactgtttcagctacatccactaaatcaagatgttcatcctctttaatcaccctcaatcgatgttcatctctagtgagatcgggaaattcatagagtgtgttgattgcatcaattgtggttgggacttccttattgcgaactttaaccagtccatgtttcctttcaggccagttggccaagaattcacaagccatggtgacattggctcggtctttgacatccacaaagctaccccagttcatactttcaatttgactctagattgtttcaaaccttggttggcgtctcaacggggtattcgtgtaatcaatcccctggtcttcaatgtagggcctatccttcaacttaaggaaccgttcttgagccgcttcacttacaaatcgggtcctatcaaaagattctcttcgattggcccgagaaggattggatgatgaaccaccctcttcatttgcccttgttctctttggtcccataatggcaaaaaaataatttcacacaacaaaattttcgggaaattttgacagcacctcccctaatttattcaattcccataatttcaatcttactaaaattcacaccacaatatttcaacatcacccaaatcaaccaaaataaactcctcaatatttcaagtaacaatcaaaatccaccaatacacaacaatatcaccaataatacgcagatagtctcaacaattaatttctatagaaattaatgttggaaattattttaccaggatcttagatctactcacaagtatgtttattaacatcctaaatatgaactttctaaaacgatgaaataaacacatataaagttaaagaaaccttacattgggtgcagcggaataatatgactccttccgttcagatatctagcccttgattcctttctgt

SEQ ID NO: 251963 - DNA, 747 bp, Cannabis indica
tgcagagtggggttgtgccgtcagactttaagacatatgggagtttcaatacgcctcctcccatgcggcattaaatgcgagatgactgttcagataggatctgacacctcctggagatgctttgttgtagttttgctctccgggagtatgtgagatttatatgccttctccgggaggcatgtctaaggttgatcctgtgcttaagaagacttagctgaattatttaaacgctgaaccctttccacctacgtgtcatcatccggttggtccacgtattttaggcaaaatcaggggcaacagatccaataaatcttcattcttaaaaacccattccattttagaatagattctctctccattttcttgattgttagatcaagtaaaattagaaccacacctttttaattcatctgccagtcctaaagaaaacgattgattagcatcaactaactcacttgcactaactggccttcctccaatcctatcatcacaattaaacactgaattaaattctgcacagattaaccaacgcttcacatgcattgacaaatcagttaggctatgtcataaatctagtctctcattcacagaattactcccatacacaatagtatggaaaaatactttattcatacctcatattctgactttgcaatgaagaaattacttgatttcctttaaaacctccattgacaaaagttttgagcctcatttgcgaaattctaccctcaatgttggtgctggaat

SEQ ID NO: 251964 - DNA, 681 bp, Cannabis indica
cctagtttggttacaggtgtgggtttgggttcaggtctcgggtttgtctaagtcttcagggtccgggcacaggtccaagttcaggtcctgattctaggtcccgggtccgggtccgggcctcgggtctaggtctggattttgagtccggtctgggtcccgggtctggatcttggtccgagtttaggtcgggttcggggccaagtccggtcttgggtccaagttcagggtcctggggtccgggttcagtcctaggttcaggttcgggaccgggtttaggaccgggtacgggtcctgggtttgggttcaagtccgagtctgggttcggtcctggctccgggtttggtcccgagttcgggttcaggtttggtcccgagttcgggtttaggttttggtccggccctgggtccagatttggatgcccgatgggtctggtccagtttgaggtcctgcggatctaatccgagattcaataagtatctgaatgttttggatcataagtgatccgtcgaatcgaagctccagcccactccaactaaatggatctttttgacatgcctagctagtataaaagtcaaatagaaataacaacgttctgttattttccttacaattaaataaataaataataaaaaaaagtcatttccttggctttcaaggagtgcatagctaaaattccctatg

SEQ ID NO: 251965 - DNA, 685 bp, Cannabis indica
tctcaaaggtaatattcctagtggaattagtcttttgcatgatcttgagattcttcaactggctaacaatttcttaagtgggagtattccttcttctattggccaacttaaaaatctattacaacttaaaatattggatctttcttctaacaatctcacgggtccaattccaacttctatgtggaaccttaaaagcctcatctttttttctgtaagtaccaaccaactatcaggagcactgccaattaacatatcaaggcttgagaagttggaggtgttatctgcttttgcaaataatttcactggttcgattcccttagatattggaaacttgaaaaaccttaaaagtctggttctttcgaggaaccatttcacaggtcctattccaacttctctatggaacctcaaaagcctcacccttttgcaacttttcaaaaacaatttggttggaaccatcccacccaagattggaaatttaaagctcttgtcaatttttgatgtcagcaccaaccaactatcaggagccttgccagttaatatttcaaggctgagtagcttgacgattttatttgcttttaaaataatttcactagttcaattcctttggagattggaaacttaaagaacttaaaaaatgttcttatgagacctatcgttacaggtcctattccaacttcgtttatgg

SEQ ID NO: 251966 - DNA, 881 bp, Cannabis indica
aggacaagagaaagagcttatcgtatgttccctttatatacaaactaattattatccttaatacttaactgttaggtacttactaaagtttcagaattataattaagtattattactattaaaaattaaacttaatgtatttatttacaatagagagttaaatttaggtatttaaaccacaaattattctatacatattttgttttttaaattaataaataacataaataatactggaataattaggtgtgttcataaaatagtcgattcaatccaatccacaaagtgtagatattcgtacttatacggattgaattaaattggaaaattcaaaatctccacttgtgcagattagatgttgcttgacatataaaataaactgatccaatccaatgtacatatatttataaaaaatatttaaaaaattatatatataataaacattttatgtaaaaaaaaataagtaatttaaaaatctaatacatataatacatatatatttcaaaacttaataaattaaatgtatattacattcttatacataattttttttacatacaatttaaaataaaattaaccattttttttatacatacaatttttttctttctttgaatttgttatttattatgttatttattttaatttgttgttcgatatataaaataaaaaataatttattttattttgtactagttatgtgaagaaaaaaaaaaatattttttcataaatattaaataatttaacattaaaaagtaactaattcaacataaatgatccaatctgcacttttgcgaattgaattagattgaatttgagctattgtgcggattagattagatctaaaatataaatccctacttagtacggatcagatgcac

SEQ ID NO: 251967 - DNA, 734 bp, Cannabis indica
ccaacccgaatcatctccaaaatcaggcaagaatgtcgaggcataggcttggggatcatactcgacttcctgctcagtaagataagcacgcggagtggactgattattagtgcctggcttgggaggcacccaatttctgtcgaatcgatagtgacacacgggtgcagtgtgtccaaatcgaaggcataattggcacagtgggcgattttgctgagtggagctacgataacctcctctagtaggattcttggttgcaggaggacgatagggaacgtttcttgaaccagatacggcaatgtttgcttgaagcttcatgctaagatctgcaacagagttgtgatgatcgagtctactttcatgagcaagaagaagcgattgaacttcctcaaacgtgagatcatcactgcgcgcggtgatgccggagacgacagagtcgtattcagggccaagaccgtttagtagttgtaagatcagatcttgatctagaataggagaaccagctatggtcaaggaatttgcaatagactggactttgtcactgaagtcagagatggattgtcctcctttgcgaagcgtagaaaactggcttttgagttgaagaagacgagcctttgattggcttgagaacctctgttctaaggcacgcgaaacagagtgagaggaggtgaagtttgcaactgaagccaagaccgcttctgtcatggaagcacacaaccaagataggagtaattgat

SEQ ID NO: 251968 - DNA, 950 bp, Cannabis indica
cccaaattgtttgagataatatgtcttgtaaactaaattaattggttttaattaatcaattaaaattctaaataagactatgtcttgtttatgaaattttactaagcaatgtttaattgagaagaaagagatgatttagggtttatttgttatataataaataagttaaatgataattttatttgataattaattataatgattaaatagatagatttgacatttatagagatagaattataatatggaatttgtgaaagaaaagataagttcttaaataaaatgacaaaattgaaacctgttgggcctactagggttcaattaagccattattttatcattgttgattatatataattcaaatcctaaccctatatgaaatccaataaatagaaagagacaactcttattttctaatctgaatgagaaacctattgtcagacaacttagaaaataaagagagagcctctattgaattcgaaatcatcctcctttttcttcttcatatttttgaaatccctatagtgagttgaggaattgtccacacaattcaagacaatactcaggcctttgtggatgattgtgaagaattccaataaagaagaagatataggtttagatatcttgatcatactttgtgacagaaaggatcaagggttagagatctaaacggaaggaggcattttattctgctaccaccaatgtaaggttttctatgaacttcatatgtgtttatttcaatgttttaggaaattcatatttagaatgttacattacagttctataatcaacatacatgttagtaaatctagatcccggtaaaataagttccaataacaacttatatcgataaggtgcttgaaagattctcaatggagaattctaagaaaggacagtttgttgggtttttgttccctaataaaatctatttcaatataattacatttact

SEQ ID NO: 251969 - DNA, 810 bp, Cannabis indica
aatatgataaatggcaatattatttaataattatttatagttattaaatagttacaattggcagttaaatggttgaattagaaaattggcgtttttgagaaaatcagatgcacaaaagataaaactgcaaaattgcacgcaagctggacacaataggaggtattgcccgaatgatgcagaacctcaaccacaggtatgaatttgtctaaagcttacctttttttgtattagttttcacttagcaagaatgattcaattcttctgtttattagggcccaaagaacaaagcaggcaggccacccatccaaagtccaagcaaggaaactctaaagagaagaaaagaatggcaaaggaaaaggctaagaaggctgcacaaggtgatggagatgggccatctactccaccaaacaatacagcagggtctaatgcataggatgcaacattttgatgtagtattttgaattagtattttgacttagtccttaggaatgtgttaggattgcagaaacaattagtgcacaagatgttgtattttgaattagtgcacaagatgttgtgttaactgttaagcctaatttatattttttgttaggtattttgtattacactttcatgtttggtgcagaagtatgcacataatataaacatctggtatttatttatggaaaaggagattatatcaaaacaaagatgactacatttcatactctttcattgatcaacatcagtcacactttgtgttttcagttacacatcattgttcatgatttgaaaaaaaaaataacatacatattgcaatacatattacaa

SEQ ID NO: 251970 - DNA, 623 bp, Cannabis indica
ccccaacataagatcatatggatttgattttagacttgattagttcaacctcgaagatgattgtagggtcttgaggggtctttgattagcgtgctttctgggccataatttcaaaatctaagtcacttggtgaaaaagtaacagtgactggaggtaaaaacattgacctcgctaagggaatatcaatgaaatttagggggttcagcccaagctgcttctctcaaaaagtggcacattccctcaattatctcttgtaagaatcacctataacggctagaggtttcatcttggctggttttaatgagatgatccccaattttctcatcatttacttcaataatggtttgaggtatatgagttttcggtctaaattttatggcaaaaatttgaggacaaattgattctaaggattttgggatcgtaatttctgggataaattgggacataattatgactaataatatcctaatttctggaaaaacaaaattcaaatacaacccgaaaaatctacaaatcgtataatctaaaatttcctaaccctagagttattcagacgaacaaaatcaaaattacccaaacaacatagcagtgcaaataaataaatattaactaaggagaagaaa

SEQ ID NO: 251971 - DNA, 1099 bp, Cannabis indica
attttgggcagaggaaaacttcgtaagggaaacatcgaaggttgtaaaactgggtcttgatgatttctagaacgggaagtatgatttgacaaaatgtgccgaaaaaatgtaagagataacaagggcatgcaagtttagggagaaggtggttgggattttggcaaaaagcttgaaggtttgatagctaaaaatggcgaaaagtgatgtggagttttaattttatacctaataggtgatcaccgttcgatcaaaggaaatctgatctaatgggtgggaactttacaagaatggaacagagaactttaaatgaacaatgatgtgcctcgaagttttgaaccgtccaaattctaagcatacaatttttaaacgagaaaaatacggttatacccctagagacatttaaaaagttctttttaattaaaaagcactttttaggatacaattgttatcccaaaattcgactattcaccaaaagttgacacatgtcctacaaaaggaatatgaatcagttcaaagaacataataattaaattgtattattaaatgtgatttaaataactcgttctagttcattaaagtttatagaaatattcaaactcgctaactacatgagcatatgcgcaataagaataataactattgacagatatggttgatgagacaatatgttcacctcgggataaacagattatacaataagaaagtacaagatgagacgttaaaaacttacaactcattgactcacgtaattgtacatggagaagattacattcatctatcttgccatttacgctacctcgcaaataactttacgatatgaagaatactgcgagaagaagaatatctatacttagcattgtttcctataaagacggataagaaggataactcacattcagcgagaaacaaccttcttagtcagcgtaaccgtttaaagagacaaagagttgttgggtagttattagatattatcccatgtgcatataattgaaacgtggggaatgtccacgtttcatgagcagttgtaagtgaatagatctcaataaaaatagctggcatcctatacacttataaatagggatagaatccgtggaaaaaa

SEQ ID NO: 251972 - DNA, 931 bp, Cannabis indica
gccatggtggctccatgagaatcactttatagctcgacccatgagttcttgcgaaaattgcttcgccttggtgacagttttcgccttgagtccatgagagaactaacggaggctactcgacaagctcccatgaacattgacagaggtctcgaaactgaagccaaagtttcaccttcaacggcgatattatcactgatatcataatcattttggcttgttaataaatatctttaagcattgttgtgataatttcaatacgcaaagtaatagactcacaaagtgtgaggttggtcctacaaggattctagttaaatactttaaaattaaatctttacttctatttagtgaatttaaaattaagaaaaaagtaagattcaaaacactaaataaatagtgaaagtgcgaagaaaataaatcaaaaagaaattaacgatgattaaagttaggggtttcgatttcaattgtatctattgattatggcctaatatggttatcttccttttaccaaattctatgtaatagcaggtttactaaggtaatttataatcttctcagatacatgcaaattttctactcccgtgataaattaaacaagcaacatacattaaacacaaaaaccctacgagctatctaaaccatacaggtactctcgtcctatattgaaattcagttctatctcactataacataattgacactcacttctcagatctcgcatgaaaatcatagacagttaattggtaatcaggcaattaaaagtaattaagtaagaacgaagtagaatacatagaaattaagggaaaataaaatcatattagaaccataaaacaatgtcaaacaaatatccatctagaccctaattaagtgtttagctactcatgtttatggaagcgaaatcgtacatattaacttaagaaaagagaagaaaata

SEQ ID NO: 251973 - DNA, 669 bp, Cannabis indica
acctttctattctattcttttttctttttctttttttcattttttagttcgtttcatttttcattatagctttttgtttgaaaacttctcccacaatcaaaactatttttgatccaaaaaaactaattttgtccatctttctcaactgccttcctccatcatctggccacatttttcctatttttttttgttctgtaaatggtcattttgtcttcatcttccccatcaccattgctgaaaaaatctttaaaaatgggtgaaatctcttgccaataaatctaaaggcaaacatccagttgttgaagatgatgaatcagactttgctccacctaccaaaaaaagtgattgatgtttagctaagaagaaatcaaaagttaatattgctgaaaacatttcattccctgaaattaagaaaggaaagaaacaagctactgagagtctgaaaatttctttttaatttctttatagttttgcactaactttgccctaacttttcttattactaatttctttaggagaaaaaaatctcatttattctatttttaaatgggatattggcggctaaaccacctgaactttacggtttgtaacacttaaccataaaaactgaatttttggcggctaaactacctaaaccctggttccgttttgctctgcacacctccgtcc

SEQ ID NO: 251974 - DNA, 671 bp, Cannabis indica
aacgcagtgtttggctattagaattacattttagtattttagtatagcgaggcaatttaattagacattaggaatgtcaagaatagttgagattttagagttgaccaaattaccctatggtgatttagtgaatttttggcttaaatgggggcaaaatggtcttttttccatttgtgtcttttgtcttctagtgacttatatttgtgctaaataattagatttttattaagtttaatattagataaagctttgagtttatcttttatttagaaaattagaaattaagacaaaaagaagcatttgctctctccaagctctctctctttccctcgagctccctagaaccatttagggttgggggtttttctgctaaattcaaggatttctagcaaacttttagtgatttctaactcaaggtaaggttctagctcatccattgttgttcttcttaagtttcaagttatatgctttatgattttgctaagggttacgatctgtggtaattcttgttgttgagattttattttgaggttaagattagattatttgagctgtttggaagctagttggtggcttgatttggttgttagacaaagtttgagttttaatggtgtttaatggtgtttttagttttagaggttatttttggtttttattgcttgaattctctt

SEQ ID NO: 251975 - DNA, 982 bp, Cannabis indica
atcatctcctgaatacttgcatttttagccttagagatcactgcaacgtctgggaattgctccttcagtgaggatcccccaatccatacatcctcccagaagcgaatatttgctccatttcctactttgaacttcaccaattggccgtattcgtcgtaataatcagaaatatctttccacggccctcttggagatgctcgaactccccatttagtatcccaaaagttatctgccttgtcgtaacgacttttgattactttgtgccacagggagtttggttctaaaggatatttccataaccatttcatcagcaaccctttgttcctcagctctagccttccaattgctaaaccgccctcactccttggtttgcatacctcatcccaagccaccagatggtcaccccctgctaagtctctaccttcccaaaagaaatctctcatccaaaaatgaagagttctgagtctctcattttcgcaaaacagcaacatctcctagaactagtgaccagcttcaccagaacacgatacagactaagtgatgtcaaaatatcacttaggcatcttcaagtacatctcctgaacgtttttccactaacccagcgtctaggttgacgtcatatgtcaaccatgggcactgggatgtcaatctgggcattgggtcatgaacagtcttcaacaaaacagtcattactcactcaatattgatccgattgacgcgattcaatttgcgtttcaaagctaatttaatgctctatcaagtcatgtctcacacttcaattgcaattctgaaactatcgacctcaaatttagcccccaaggaagttataaaataagcttcgggttacccgcagcgcgtctcgccgggctccgaaaaatgactatcaccgtcagaagctaattttcatcattaaatcatcatctacggtcgaaaacatctgatttgtatttttctcctatttttgtgggtctccttcaactat

SEQ ID NO: 251976 - DNA, 1189 bp, Cannabis indica
caggcagtctacttaccatgtttcgagttgccgccattgttgtaaaggaaaactatggtaaaaatctctttgagctctgaattaaagtaccaaaatatgtactgagatttttagaaactgattaataaataaataaagcttaaagaagaataaattaaagataaagaaacaagaatttttacatagttggagtgttaatgagccttagtccacgagtcaatattattgagccaaaaaagctttgaagtatttttacacaagagtgttcttgccaaagtttaagaaccctaatctttagccctttatttgagaaattattttcctaccccttacatgaagggataatgttctatttataggcttgagtcgggtatgagtgaacccagacccgttagggtttcaaggtgtcaactaagcacagtgatggggtaaaatacaatttatattgactttgggcaggttaggtaagacccaatttacaagataacaaacatccgtacttgtggggaccgtttggtggtgacaggtttcatgcgcctccatgttggtacagtgaatgtcagagagtatggcgttggacaaaaaggtagtttccttttggtggtgtgagcactccttgggtataacataggggacaaagtctgtgattcagtggaatcctatgtcagagggatgtcacgtaggatgctttctagatgtctccgggtgcctcttcatttgtcctttttagattatcccatgaggatatctgaatatatcctgatggacctttcatcttctaggcaaaacaatctttcccggaccaaagtggtctggctttatcatgcatgtaagttgggctcacatccggatccggaaccatagcctgattttgatgtgggttgatcctttaacttgattgtgcctaggaatgggcccattctggctaattttgggccttggaagtacacatgtcattaatcaaaaaatgtgaataacaactggtaatgaacaagtcaaagaactcaaacaataattaggttaaagcttaaccatcttaggattgagatcaattgattatgatcagctaagtgacattgagttagaaaatatatcaatgtaaatttatgatatctttttcattgttaatatcagtctggtctgatatatatccaatgcatcatatacgagtttactttgctaatgtctt

SEQ ID NO: 251977 - DNA, 510 bp, Cannabis indica
taactttgtgggaatttttccccctacctttttttttacccatcgtgattcaccacatatagggcaaaaccttttcttctcattctccttcctgaaaatggcacaattatacttgcatacatctattgagtcgtaacccaaaccttgatcgcgcaatcgcatcttcgactcataatgcgacttcggtaattttgacccctccagaaatagttcaatcacgatagacagcaacatatcgaaagagtggttactccacctattcaaaaccttgcagtgcataagttttaccagtgcattgagggccaattttttcaacctggatacaactcagactccatctccttaaataattcatcaaacttgttgttgtcattgatagggggttcattgaaagaagtagtagtgctggcaaattcgtcaaacccaggatcccctcttaacatgtctgccaacacatctctcatttcctcttcgtcgctttcaggaagttcaactgcgggctgagaaaaa

SEQ ID NO: 251978 - DNA, 864 bp, Cannabis indica
tagttcgatatgttaccaaatcactacttttaacatatctctatatatatttatatatatatatatatatatttatatatgtttaaactactgagtttccttttaggtaggtaggattgcatcctctatttcaagatattacacaaggaaaataaaaattaaagcttcatggggcatgcattctctatttctagttcgagggtgtacgtacgtatgtgtttattcaatgtcaccaaaattattatatctaaaaattaaccttcctaagcgcaatgaatttgaagcccactttattgataaataatcaagataaggaccttccaacattaacttttaattaataaagtgaagtgagataaatcgaaggtaccttagaaaactacataaacataaattttaaaaagtaactttgattttgtatctatattcggctttgttaggagaaaagtgtatttaccaaaaaaaaataaatatgaaaacgttattgaaaagtacatcatgcatctgattttgtccctttatttcttgtgtaaaaataaagcaagagcaaaataagggatttctgaaaaatttgccaaacttactatttaaaatattaaaatttacaaaataatctcatttaatttactctaagtgatcatgatggtcctcatgatcgttttgcggtcataatagtcgtttatatggtcccacaatgtaactcatgatcatttttagagaaatttgcggcaaaaatccccaaaaagttcagtttgatacagataagtccccaacctccaaaaatagaggacaatagtccccaaaggcaaggtttttatttgtccgttggtctccaagttaacagatccgttaaacccatttcaa

SEQ ID NO: 251979 - DNA, 2004 bp, Cannabis indica
aaaaaggactttacaacttataatattcaatcctttgcacatcggatggtacctataagcagagttattggctgccaacaacagtcttcttgtgagatattccatgattaacacagataacaaaggggataaagggtcaccttgcctgaggcctttttctcctttaaagcttccttggagtctaccattcatcatgatagagtaggtagtagctctaacacaagtcatcaaccaagcaatgaatctagctggcaagttgtaagttgtgaggagaatttcaagaaattctcagtttactgtgtcatacactttgcttatgtcaactttgatggtacatatagaggaaacattccttttattataattcttctgtagaacttgaagaatcataacattatgagcaattgatctccccttgataaaagctccttgattttgatggactaagttagtaagcacctgagcaagcctcaaacaaagaaatttggagatgcatttatacatagagagcagcatgctataaggttatagtccacaactttagcaaggatatctattttccgcactaaggatactattgtcgcatgaaactccttcggcatatatcatgtgttaaagaattttttaattgccttagagacttcttatcccaattcaagccacatctgcttaaaaaaaacctgctccatatccatcaggacctggagattttgagtcagggatgctaaagagagcctctttgacctccttgctcgagaaaggctttaacaagcttagttgctgatcaagattaattcgagtacccagagccatgctatcatagtttatacttttcgaaggcatgctctgagttcccatgtagcctttgaaatgagcaacaaaatgatctactactttgggaaaatgatcaatactttctccttggtcattagtgtaaaagacaatcctgttctccactcttctcttcttcaaacacgcatgaaaatacacattattatcgtctcccttattaagccaagtaaccttgcttcgttgactcaagaagctatgatacatgttttcaatcatgcaatatttatctactgcctccttttcctgttgttgtaacactagatttctcggatcagcttgcgaattcatctttgctgcaatgagcatatcctttgctgcctcatattctttcccaacatcacctataacatgattattgaatctcttgaaacaatgtttaagtcgaacaagtttgaagtaaagagtcttcatccctgtacatctcaaaggtttgttccaacttttcataaccacattcttgaattcaggatgataagcccagaaattgaagtacctaaatggtttaactctaattttttcactcaccttaactgaaaccacacaagcattgtggtctgatatagtttcccagctatagtgagctttagtatttggaaagctgtcattccaatcctcattagcaaatatatggtcaatcttggaataaattcttttatgcccctcttgattatttgcccaagtgaaattggagccagtgagcaaaagttcaagatgtctctgagcaagccataaactagcatcctgaatatcactaagagtcactgcaatatctccttctctatcctccaaatcaaaaagagcattaaaatctcctgcaataagccatagtttaactagaaattttaactttaagagattactccaaagttgtttcctctcctcatttgtgttgtaaccatacacaaatgtgatgcagcaagcattattttggccatccattttgatgtagcattgagtatgttgagcattctcctctataacaatgacccgaacaaagctctttctccacacaataagtaagcgaccttctactgtagaactagtataataatcccaatcaacaaatttcttttccatgaattccctgactttaatccctctcaatttagtttccaaccaagtaccaactcctatcttatttttagaacaaaa

SEQ ID NO: 251980 - DNA, 1233 bp, Cannabis indica
agatgtctaatactactattagtcgttgtttttaatttttattaaagtaaaatatgtatgatttaatattaaattgtactaataacgatattacaagaacagtcgagactataagtgtcttttaactttaaattaatattttgaaattgaaatttttatttcagaagagcttatttgatagcccataaagttcttcttaggtaatgatgcacggagtccacctaaagcaatagcctcacctgaaattaagatcttatgtagtgtgaataaaaaaattggttcttatacaaatactaatcttgccaaatattattaaataaaattatttgatacaatggtaattaaagatgtttttgaaaattcaaggaggtcacacctaaattttatttccaacttggatctaacacctacattaaaataagtttgggactaatttatgaaaaaaaatatgttagagactaaaaaatgacagtattgggtgttggataccaataatgttctttagcataagtaggttgtgttattattaattacaaaaacaaaagctttataggagaccaaaacgagaaaaagaatttcaaaatcttattaacaaatgctttttatttccaaaatatattctatacataacatatcttagtagtgcaataattgaaaaatcatttccaattttgtgttctttaaacattgcttaaagtcatatgcctttatgggaccattaattagtatcatcattcattgacaatccaaacaaatagagacagacaagattttcaggtcttactattggtagttctggccccacaaaggtgtaaaacctttgtggcttacttggtgataaatggtcttggaaactcaacctcaaaaacattatctctcaaagaggttttttggccaaagaagaacaaaataatagcaaatgatctataaagaaatgcacaccaacataatttttatatatctatatctatttgtatgcatatattcagaatgagaggtggtgaggccaaaaaatccaagactatggacttgtaattggttagtggaaattaaatcatccaatctaatgataatcgaccgattcaaatacaactgactgtgccaaacatcagatattcaattgtgatcggatcagattggatgttatttttgaatatccaattggatcagatcagatcagatcggatgttgaatgagcttattttatatagttatacgtaaaatatatatgta

SEQ ID NO: 251981 - DNA, 809 bp, Cannabis indica
attgggttagcctattaaaatagtatcaacctgcccaacccaactcacgtgcagcactaaacagaagaattatatttactaatactaatttcgaaatgacattttacagcacttagaattagagataattaagtatggaatatgtatgcttcattgttttagtttcttaagatggttttaatatggttattagacaatttcatgggtgatatggtatctgaaattataagttttggctaatctgcttttataaaagttgtttctcaagtttgagacattggaaatcaaaagcttacttttaatttctcaacaattaaatacaatttcttataattttgcagattctttagttattttcatatcttttcccttttatatatttgacaatgcgtaactggtaatttctacttctgttttttttgctagtattcatatattccttgggtaaatctactagattcttctgttttgaattgaccttataattgcctgggcctttgaactgaccttaaacttgtctaaatttgtgtataaatatttgtgtggtgtattgatatcatgattttgggatatttgcccaggtgttctttccgtagtgaattgagaactgattaaaatggttgacagtacttttaatcaatgctatgaaggtcagttactaagctatttttcttttggttttttttctttcaccatgaagtactcatcaacaaaacaccctagtttgctgatggctttgtggtccgtcccgctcaaccacttgcagcctggctgagagaagtaaaaataccctgacctgccttgcttgg

SEQ ID NO: 251982 - DNA, 1792 bp, Cannabis indica
ataaatataataattataaaaaacaaaatataagtatttatcaattagtgataacaaccaacgtgtcatgaatatatacgtacatacatataatattataatatattattaaaggtgtatgtttcatgtggaggaatatgatttatcgtgtagtagcaaactagcaatcacatgcataacatgacataacctcaatctcatgtggaatccttttgtgctcttacttttcttctaaattactaattaaatttcattaaactaaatcaattattacagacattgtaaaaaaaaatcaattattacaaaaaaatttaaaaatgtataaataacattattaacagatcgcttaaattttatattatagagaaagtattataaaattgaactttcaacaagtgaagtaaacattaactattttatatatgtatttttttcaataaataaatgcttaattagtatgtatagagataactatttattgagctaaatatatttattattttcttaacttttatatttatgtgtaatattatattaattatttatataaaatgaataaaatatattaaaaatgtaatatttaaatcatatatagaaaaattgatgtatggtataatgcaaaagtttgaggtaaattagataaaaagtatcctactgactcgaatcaatatcagtgtgtaatatgtcatacaccccaattaattaagttgtgaatatttattttttataacacttaattttaattaaataaaaatttaataaaggctttttattttttattttaagcccataaaaaagtaaatctaagcacgagccactactagaaaaatgggtttcagtgacccatattgagtgactctaaaactatttagtgacacttcactgcgcgtcactaatgagggtgactggaaagcctatttttagtgacacttcagcgcgtgtcactaaatccttttacaatcactcattgtgcgtcactataagcatttagagtcaggttttgtcagggtgaaaaagtaaaagcaacctccaaaacgcgtcactgtaactttttttatatatatttttttatattttacagatacagtgacacacaaaaaatgtcactatatttagttttttttaaaaaaaaaaaatatattcaatttttttagttcagatattatagttttgtgatgaattactttccttttttaattcacattattgttcttatttaatttaacattagggtaaaaaaaagtgtagatcggctactatttctttttcaaaaaatgatactacgattttttaatttgtatgaataatgatatatgtataagtaacaaatttttatacacttacatctaacataaaatgctgaaaagattttataccaaaagaaaaaatatacttagaaaattacagtaaacaatcacatgaacaaacacaaatataaaacctaaaacaaattacattaaaatatttcaaaaagaatacataattgttttaaagaaaatacaagaacaatgtaaacccaaaattatgggtatgagaatttaataaaaaaataaaaaataaataacttagttccattgatagtgttgatcttcgtccctaactagctgcaaccctggaaccgaccattttttagcctgaatccatacaaatcctccatcgtctgagtagaaagaacggacatagcagattcaacaagagagagagagagagagagagatggcacatatcaaatctataaacaaaaaattaaaaggaaatttgaagaatagaaaaataaaatactaattagaaa

SEQ ID NO: 251983 - DNA, 1350 bp, Cannabis indica
caccacctcataatcattagcataaattccatctccctcaacttggttacggtcagacccgctgacgaattcgaccataccctccactgtagctgctggcaattccgttatttgcatctccgaatgaacttctcccatcttagccttgcctcgtgccttatttttaatagacacacgttttctgcttcccttcctctgttgattctccccacaaatcccaacaccagtccccggagcaaaactctccgccatcgcgtcagccaccaacactttccccttccacactaccctctgtttgagtaatagcaatagtattcctcccacacttcctctttcgtccttccccttcattatcagcagctgaaatatcttcatcctgatcaatcccacggcttcgaatccccttctcttgagtcaccgtctcgttacattgtttctgtgcattattctcagagataaccttttgttgattactaggcccacaatcctttagcccaacacaattaaacccatcttgtgtaacattattattatgtgtacttttagtggactctggcccattatgcacaatgcccattccctttgcaaagtctattgtattctttgacttattcataatatcctgaccaagaagctccttcccacgactcacacctaaacccacgtcttcctgtaactgctgcctccgaagaaaccgttcggacgtggaacccgtggcctgacttgcttccccctccgccatcttgctcagctcctgtcgtcgatcctcctccgccattggtctgtcagcaagctcttccaaaccatcttgacgttgtcgggccaaagtttgtccattagctacaaaacaattgggaatcggatcatcctctcttaaccatattccatatttcggaacctggccgcctgttaaattaacctccattaccatcgtcttgtcacaccctacttgatcatgtccccaatagccacacttaaagcatagaagtggtaatttttcaaatttaaactgtacccaccttttaccaccatccaccggaatgtatcgtccaacaaaaatcgcactccggatcgggaagccaatctttacacgaacatagccattcaagaaaatctgttgaggattattccaaatgatgtcttcaacatcccccgccatactacctaatcgcttaacattattaacagtcaaagctttaagcagaaaacccctcatcttaacccagagagaaaccttatccaacctcgcatctcgccactgtccactctccgaccattcttccaaaaccaacactcccccattaaacagccaaggttgcttctcaaatattcttttagcatcacttctac

SEQ ID NO: 251984 - DNA, 1181 bp, Cannabis indica
attatccacaaactaacccaatagcaaaaatttctaaaaatgaaagtacatattgaaccttgactaatggaaattgaatttggaaccgatatcaaactatactcacaagtcacaactactcattgaaattgaagttattaggtgtaggttaggttatatgtatactgttgcaactattataaaagggtgcaatactcaaatggagacttttttgattcgttagttttttaatttttgttgttgttttgtcgttaaaactaagagaatgcgcaacaaaatttgttaaaccatacgatattactgtttaaactatatgaataggtgcttattgtgaatagttgtgtgggagaatgcaactcttaaaatatgctattagtaattttatttttgttaaaattaactatttattagggaatattctgttaaaaaatatgccaatctgttaaatgcacaacaaaaatagttagataggcatttatataataggtaagatatggggttcatttatttttatactttaaattattattattatttttttatttttacaaaaatttccataaatatctattctatataaaatgtgcttatataacaaaattcttagtttacgaaaaattattgggtaattttttttttaaattcaaaaatagcagtttttctttggacgagttaaacactcttgcaaatcagtttaattagctatttctttacataagccgctgatatgaacaactactcttctcaaataacttaaaaataaaatatcccaaaaattatttactatatttcaatcgaaaaattatttaccatatttcaatcgcggaggaggcttaaaaattttctattgaaattttcaatctgtagttgagagatggtgaaagagctttaatctcgaagccgatagaaagatttgtagatatagaatcaaaacggaatcaaacgaaaaaagatggtttgtcccttgcaaattgaagtcatcgaaacctaaatcgaaattgtcatcagacctccctctaattccttctattcatctatctcagtggaacaagggaaattagaaccttcgacatctattgatggcacaattttcagttttctgtgtgagtgttgcgataattttgcagacgcaagtgtacgtatcgttataagtagtaaactcaccaggagtgaggtcgatc

SEQ ID NO: 251985 - DNA, 1463 bp, Cannabis indica
tgtaacaaatatttatattcttatgtctaatttctcagagttcaaatctcccatgtatataaatccgtaaatactgttgtttatgaattaacaaaatatgctctttcggtggactcaaaaggtgtatggatggaggaacctccacctcctctgatatctattatattatataatagcattttatctaaaaaaaaactataattagttatttgtgaggtaaaaaaaaaaataacccaaaaaataaataaattattggaataagaataattgtattacatgaatgttgtgataatcaatattagttgcttaaaagagaaaagagaaaacaaagtaattgtcgtatagcaaagaaatgtatgaaaataagaatatgtggctagaaatggtgccacaaaccaagaagcaatgaccaacccaacccaaacaaacacctttctcttctcttttcccatggctacatttccctctctcttctctcaaacccaattttctccatggctttcataaaccacacctctctcctttctccaactcccaaactcctcttctcactcacttcaccaaatccatcaccactaatcaaaccatttctcacccacaagaggagtctgagtctccacaccaagtatggtgcaaccactccttctgttgtagaagaagaagaggagggcaataatgtccttttgagttcaactagggaggaagaaagaagagaatcaaggattttggttgattatgattggactgaagaatggtaccctttatactaaccaaagatgttcctgatgatgctcctttgggtctaactgtttatcataaacaattggttttgtaccgtgatgggtctggtgagctaaggtgctatgaagatcgatgccctcataggtaactttatgatcattacttttgtttaaacactataataatagtaaaaatcataatatttgtgtgtttttttaagaaaatgaaataatggaatgttttgtagattggctaaactatcagaaggtcagttgattgatgggagattggaatgtttgtatcatggttggcaatttgaaggggaaggacaatgtgttaagattcctcaggttggtttgtttttggtttattttcaatagtatttatatacccaataatactaatttctgaatgagaaaacaagagtaaaaacatgatgtggaaaaaaggaaaacgagaaaagaataaaattgctttaaaaatcatatggtttttggtattaagttataggacaattctatcatggactaggaaaatattttagtctattttttttatagtcgtgtatgttgtagttatttaatatatttttcaaaattttatgaaacgaaaatttttacgacatcgagaataagattcaaataatttattgtgcatatgactttttattttatacgagtgtaaaatagattacttaaacattactttttatattgtaaatt

SEQ ID NO: 251986 - DNA, 1123 bp, Cannabis indica
atggcgcttccttgtggcgtacaaagacttaacaaatatttacaagttatctgatccacgtttcccatttcgactggtccacgtattttgggcgaattcaggggcaacaattataatatataatattatatataattttaatttttatatatctatgttgtcctaattttagcactctcacatggcatcccacaatggtgacacgtggaatcaacttcacatatctattcgcaagagatatgccgaacagaacaccacaaatatttgctcggatgaagccatctcaaacgggcagtggacagcccagcaacatgctaacacttagcaatttcaacacttgcatcgtgaatcacagaagaaatccctataattttggggtcatatcacagggatatgacaagctgtccaaatcccttgatcagtgtattctgtatttaatgtataatcttgccaattatatttattgtaaacagaagggaaactttttcctcaaagcttatagccctataaatagtgatatattctcactggggaaagggtcgaaaaaaattatctaagaatacatattgagagacatcattgtaagagttctatgaaaaggaatcattacattctttgttcttaagtcaataaaaattaaggggagtaggctattaccgaactacttggggtggaacctctataaaaactttgtgtctttatttatttcaccaaattgcatctatattatactacttgtcacttacaattaagactcactgtcgttggccaaaagcgaggtcaacaatttggtgctttcattaagagggtgaaatcaagctccctcattacttcaaatctaatcataaacgcaagggtggtacagaatcgtagaggcgtagttgatccaacaaatctactggcagtggatcctacactgcagaatccaaggaatgctagggttccaccaaccacgaatcctgaacaaccgtcaactttaggtcaaggagtgacgactcctttgagtggaatcgcgcctggtgtgcaagagactggaaataccagttccgcagccaatcaggacattcccaacactgaatttctgcccgcaataaatgttcgaacaaccattagagatgacacc

SEQ ID NO: 251987 - DNA, 636 bp, Cannabis indica
catttattgcaacaataagtctggaatacatatcgctaacaatcgaactttcataaatgtaccaaacacattgagctagattgtcactttgttcgagaaaagataacaaactcatcaatttgcctcattccagttagtaggaaccttcaactagcagatgcttttaccaaacctctaccttcttctactttatcatctcacattagcaagatgtccatacatgacatatatagtccatcttaacagattacttatctcttccacatgtggttattttggttaggttagttaggagttagttaatattcggttattacactataaatttttttacttttatatagttacaacaaaatatgtggctaaaaataaaatagttgtgactaactacaaattatcattcctatattgtgactaaaaaatttgtggttaaaattattagtcacaaaaataaattgctgtgactaaatacatgtatttttagtcacaatacttgttgtgactaaaattaaattagtgacaacttgtatttaaatactatattttagtcacaagtaactttttatagtgattaaaagttacatttagttacaaaaaatttatgttgtcactactgcaaaaaccccccctttagag

SEQ ID NO: 251988 - DNA, 518 bp, Cannabis indica
tgttggccagaccaagaacagaatttttccaagcagccccaataaccctctgcctcagataaattagctctgcccaccaaaattaaatcatccgcgaagaagatatgggataaaaccggacctcccctgctgaatttaattcctttgatagccccctggtcgagggtgttggaaatcagtcttgagagaacttcagcagcccagatgaacaagtaaggggatagggggtctccttggcgcagtccacaggagggttggattttcccgacctgacccccattcaaacaaacattaagagttgtggttgaaatacactgcgagatccaaaaacggaacctctgagggattcccgagcactccagaacatgatcaataaacttccagctcaacctgtcgtaggctttgacaaggtcaatttttatggcaaagaaaccttccctacctttcttcctattgaaggagtgaatgacttcctggacaatcacgttgttgtcatggatgttccggcccgggacaaa

SEQ ID NO: 251989 - DNA, 866 bp, Cannabis indica
tctcctttaattttgtatctcttcaattttttgggtttccattgtagaaaataaaattgttcttgacttgttgtaggagatatatagaaaatctaggctcgatatttcgtaatttctactatagtagatcgtgcgacttagttgtttgtgacattttgacttcaatctcgcactgttcgattttcaccttgctctttcaaagcttcatgaaagttaacccttaaccccaaaaatttcaaactcctgggttatgaacttaatctttacgcgtttttcatcttttcgatccgtcgagtagacctgatcagtatatttacctattttcactcgatatcccgaccaaatactcatctcgtgtattgtcttttgtagatgaaccctggtgagttttgggaaggcgaacaccgtatcgaccaggatttgcttcagctttggtatgaggaccaacctcgtctttgcgctagtccgtcctcttcgagtgatggattttctaactcaaatttcaaagattgggaagtgagtagtgaacgttctcctactctagaacccgaggtgaaacatcacttttactccgagaagatcgcaggagaaggctatgggggatttgtttgggagcataggaagggttggagacgttatcttccatccaactggacttatatcgtccaggctagtgttgttgacactcttcctgtaggccatccaagctctggagccttcgtcattctgattgctattcctaccatcactgttgtgcgacatacacaccaatatccatccaggagaagcatgatggcccgcacaaaacagacgatgcggagagttgatgcaattccccctcatgtggcccagcatgccacgctgcc

SEQ ID NO: 251990 - DNA, 642 bp, Cannabis indica
atgtggtgttgattccaaaagtctctaagccgtcgctggtcaaggagtatcggcctattagtctttgtagtgtgatgtataagatcgtggcgaaggctgtggctctaagattgaagggtaccttatctccgctaatttcttcatttcaaagtgcgtttgtgccgggtcgctcgattcatgataatgtgatggtggggtttgaattgctacattctctctttaaaaagaataatggtgtaagggggtttatggctttgaagctggacatgagtaaagcatatgatcgagttgagtggtcttttctgagtgctattatggataagtttgggtttcctagacggtgggtggagttaatcatggattgtgttacttcagctcagtatagctttttggtcaatggaaagcctcggggttgtgtggtgcctactagggggttgagacaaggatgtccgctctctccttatttgtttcttttttgtgcggaggccttgtcttccctgttgtgtcacgcggagcttagtggggagttgatggggtttcggtgttccagatctgggcctagggtgtctcatctattctttgctgatgacagtctgatttttgcgagagctaatggaagggaagcggaatctatccgtcgga

SEQ ID NO: 251991 - DNA, 1514 bp, Cannabis indica
gtgtaattatatatatatatatatatatatcgtaacgttataatattttttttgtcatagtaattaatctttattgtgattttattattttttctttttgtatggttattctcatgatttataatttataagtcatgttagacaaaaaaaaaaaaaggagtcaccccaaaattttgaaaaaaaaatcaaattaaattaatttttaaaaattactttcaatatatatattttaaatttccttttcacattattttttcttaatatcaaaaataattttttaaaatgatgtataatttattttatattttctaataaattttcatacatttttttttattaacatttttatcttaatatttaaaatatgttttatttttattttatatgtatatataaaataaaaatattaaaatagggtgtactcatacttttatgaggtgcaaataaaattaagaaaaaataaaaaatcatacactctttgttcaatcacgatatatataaatttaattaaagatatataagttaattgagtaggttagatattgtctgagagactaattatttattatttgtaatttttgtgtctcaattattgatctgacaattatatatattttattatttgtatatttaaagtataaaattaattaccctttaaaaaaaagtataaaatatgtatacatttgtaaggagaaacaagtatatattaagaaatctaacgtgtattttgttttcgaaatagaaataaaataaaatctactaacttcttctttaaataaataattagctataaaacatttacaagtaaaataaacagaaaaaaccaaacaaaaattataaatctacaaagaactatttgtaatatgtattttatactcacttcatcccaagattttcctagggcaaggcgtggatagagtggtgcttttggattagcaaatactgatagcaaattagataccgacaccaatttgggctgcaatgcaattattattattataattatatttaaaccaagaaatattatgatatgaataagacattaaaacaataatgtattatattaattagcaaaaaaatataaaagttttattattaattattaagctgatgataagagaagaataatactcacagctgagtagcctcccgaaaataaagcaaaagaaaaatcagatctcatattaattaacaagaacttcaagctcgcttttccagtcttcacataatctttactcgaataattggcatactgaaactgatgacaccaaaataaaaataaaaataaattaaatagagatttttacattaatacttattttttaatgttacttttgtacaaatctttttttctacacttttacaaattaatttttcaatttttttacaattttaaaatttcaaaaatattttgtttaagttatttttaaaatttagaaaaagtaactaaaaaaatacaactaagtaaattaatatcaacttctcaaatatactacaaaattttaataacttga

SEQ ID NO: 251992 - DNA, 556 bp, Cannabis indica
gcattggttcgacaatgaggacgctgccttctcgaaaaaaaatgtggaaattgtaggtccctcccaaggtgaaaaatccactatggcgggctgcaagaagttgtctacctacgaaaactcagcttcggacaaagcatgttgctattactcctctgtgccatgtctgcttgcaggaagatgagactacatcgcacattttagtcacttgcagagtggttaaacgctgctgggatagagtaggaatcggtaccaaagaagctcataatggtactttctttgactggtgtgtggaatcttttaatactttggaatatgatcttcaatgcaaacttgctatggtttgttaagcaatctggaatgctaggaatgaaatcgtttgcaatggaaaaagctttcaagaagagaacatggttccaaaggctagaaattttcttgatcaatgtagatgtgctcataactctaataatgagtcgtcatggcccagttttaaggcgggtgacaggacggagcactggttcttaccacaagctaatgctatcaaggttaatgttgatgc

SEQ ID NO: 251993 - DNA, 500 bp, Cannabis indica
ttaagaagtatggtcggcgagacattcatttgggattgggccttgtaaacccaattgcaagccgacctactcgatggatgccacctcctcctgattcctttgctctagcgactgatgcttcagtagttttggggaggggctttgtcggattagggggagtgatacgggatgcagcgggtggtgtggttggcgtggtcatcaagtgtggtaggggatttttctgctaatgtggcgaagctgcttgccatttgtctggggttgacgtttgcgcatcaatttagttttagtatcttcattattgataatgattctactgtagcaattggttggattaataagtttcacataaattttatttttcactctattttattagatatccattctttattagctgttggtggttgtggttcttgcagcgccattccaatggtgttgcccacacattgaccaatctctgttactagtttagggtaggactgaatatttcgagcgggttc

SEQ ID NO: 251994 - DNA, 801 bp, Cannabis indica
tttattattatcattaacattaatattctatatattataatggacttttttcagttttaaccaaaaataagtaataatattacaaaaatacttctaactggccaaataaacaaatatacagcctaactaaaaaaaaattacacaaataccacttacacacaccttcaacccaggatccatgcttcctaggcaaccatcgcgcaaccacgcagtaacctaacgcaaccgaaatgaaaaactcaaccagaatgagaaccattattaattctagcgacttcacatgtattagggagtcgttattagtctgttattgtttgttattttctattattgcagagctgtcttaactggtttttcagttatacagttggctcttttcattctctccagtgatatatatatgtcactttgtactctgtaataaaatcaacaataatggaaagactctctttcaattctcttttcttttcattctctctgtcttttctttcttttgttcttgttcatctttgattttctttctgatctctttcatcgtgaactgaaggaacaacaatcacaacatggtatcagagctcaattcgccattaacggcgaacatggcgattgtggcagctcaaaacctagccaacccttagaatcttggaaattccacaaacacacatcccaatttgtagagaagtcaaaatcgtgatgccgatgagttctcccctgttcactttactcataatctttctgtaaaattaaatgatcacaattttcttctttggaaacagcaggtccttgctgcgattcgtggaa

SEQ ID NO: 251995 - DNA, 1237 bp, Cannabis indica
gagggacattgtagagtcccatagaattaagataaattttgcagtttgattggagcattttacgaaaaaaaatcacattacatataacattttgtcgctggattagagatggccttaagtctatattttttgtatcgtgccctaattcatatttttttatgtcgtattcaaacccattttatattgtaagttaatattgtttcaattttaactatacttcaaatcatgtgatttacacataaatactctatttaaatataattttttatatattaaatcattttaacatttttaaaaatttacaaatgtaaaatataagaaaataatacatgagtacactcattttaagacaatacatcataaaatttcctattatattttggcgcacattttatgactcgaataatatgggatatgcacttaaattgtatatatttataacatattattagagaacattgtcccacatagattaatgtaaaagtattgagccatatataagaacatgagctactctactcatcaccaattggttttgagatggaaccccacgattctcatcgtggtatcagagccatatctctagcgggctttcgatacacaactatccagaaagttagccaactgcacgagattcagatggtccaaagacgcttgagatctgaacaaaaaaagcgagcaaatggcatggcttgtgataaggtgattcaacattggtgagtaaaaatagccaccatcttgaggagggatattggagaacattgtcccacatgaattaaatataaaaagtattaagccatatagaagaacatgggctactccacttatcaccaattatttttatataaatacattggcggacctagaatttaaagtgagggggggcaaaagtaaacttaaaaaaaatgcctttaatgggattagaactatgagtgtgcataaatcatccaatccaatgacaagcgatcgccaaatattggatgtttattcgtgatcggattagattggatgttatttttgaatatccaattggatcagatcgggtgttggatgtggtgttcaaaaattcaatacatcaaacatccaatcaaactagttattattttcatttagtttggatgagtaattaaattttatattgttatacgtaaaatatatatgtatatatgaaaattattattaaattttactctttatttttattggataggtccaatctaatctaatacatacagga

SEQ ID NO: 251996 - DNA, 941 bp, Cannabis indica
atatatatattatatatataagcgttttatgttttggtagctgaaaagtgcttcagcaattatattgtttaaccagcctagccaacttatggtggttccttcctgtatataatagctcttataaaggtcaatcttctaattatttatttttgggattttcacacaactaaaaaaaacagagtaaaaagacagtgagatatgtagccatatctattattatttatatatttgtcactgtcacactcgcacactcacagaagagaagttgattcaaacttacttatttgattcaacatcctctaatatcttatatgactataaaagggaaagataaaagtcacagagtgccataagaaagggaaacaaataagagtagtttaagataaatgtagctattttcaaagaaattcaattttgaaacaaaacattttctttttcattttaaatattttgtggtcagctaaacagctgtggctccaagaatcagctataaaaaaattaataataataaataattttatattatttattttatatagttgaaatggagaagagggaggaaaactaagaaataagaaagtggtccacgcgtgtcaatgttaatcgtgtgtgtatgaattgggagggcaaagcgtgctaactgctgagccattctcacgtgtgatgaggtctataaatacccaacatttatgtgtgtgagtatacatatataggcagaggacgcactagagagaagcttgtgtagtgctcaagcaaaagaaaaaaaaaagaaagaaaaggggtattgagtttattcttgtgtttttctttgtaaaggtttaaggaacaaatagacaagagagggaggtgagtggatattctttgatttgaaataaccaaagaagaaaaaaaaaaggaatcggtattatttagtcttaggggaaagaaataaagatagtaaa

SEQ ID NO: 251997 - DNA, 699 bp, Cannabis indica
ttaaaaataaaaaagtagaactaaatactataactatagtattataataattttataaggaattatgaaaggtgatagtatatatatatatatatatatatgtatttgtgttaaacattaaaaaagaaatgaaatgcaatataatataatagaaaaaagagatatataaaattcaaccagcaacatagatagtcacgaggaaataaataccaggagaaaaagacaccgtaatttttaaattaaatacagtgcacaattattatttataataatgacaaatttttgtcaaaagaaaaaaaccttttttaaattgtaatttttttaaaaaaatgataatgattattttcttatattactaaaacacatcattcattatccaaaaagaaaaaagtaaaaccatacaccattccaaaaatcaatatcaatatatatataaaggaaatctaattagcaagtataccatttaataaaagggaaaattaattaaaaaaaatatactcatgatctcattaaaagattcaaaaataacaaaattatacaataatgtaattattttaattttattatccattattattaataaatattttttatctaaaatactttaactaattaatattgtttaataataataacgtacaatcatcaatatatcaatataaaggagagtttaaaggtgatgatgtggcatctcatatt

SEQ ID NO: 251998 - DNA, 561 bp, Cannabis indica
aaccggaatcggaggcggaacggagagagagaggaagggtaggtggctctgttgtagttatagagtaagaacgttattaaacctatacctatttcttcttgtattggtgtgtgatatttttatcggttaattctatatcatttaatttaataatttttaatttttttttttacaaagttatagattctgaaataaatcaaagttatatattcaggataactaggtaggcaaaaatccattccaaatgtactcgttgtctaatcctaaactagccctagcacatgtatgtatgagcaagtttattaagatctctagatacaaatgcgattgagagagtaggactaaacgacaacaagttcataatacatgaaaccatatcactaattaccaaatgattacaaaactgactataaattttatccaccaagcttttacaatctaactctatgacagcaacaggtaggttgatcgtttgaatccactgtcaagccagaagtaaagctttagcctcagctatttctggaggcacattccgtaggagcaatgtgttggaaattattt

SEQ ID NO: 251999 - DNA, 838 bp, Cannabis indica
ctttcttttcatgagtaaagatgaaatttgaagagaggacgggtcaagagatggaaatcatgagagtctagtaagcggcaattgacaacccttctaggtaggccactatactgatcagaagagcctatcaggtcactggttagcagccagtgactgatgctattatttccacggggccacagaacgagtcaaaaaaatgtttggctaaacacacccaacaagcccaagtcggtagaccgtccaatccaaggccacaagttcaaactttgggctaagtggtagacagatagatctcaccaacacgtcccttgagagggaatgatcagtttaatccacgtactcagatggagatatcaggctaatcccttgctcaaaacggttagacgcaaaggcctctttggacatcagtgtttgaccaattgggtacgagcacgaccttagaaatgatctgaatcgcagaagaggagtggacaaacatgatgttcatcctaccatacaaccaagcaatatgaataactatgtacctggtacagttctaagagaccctcgtgtgacacaggtcggtcaataggtaagtcatgttaatccattggtgcaagcacaaatagatcattttaagagccttgttcaaggcctaaccagtccaaaactcacagatatagaaattgaatagactataggatctccattctcactagaaaccaacgctctcgacgtaccgcctaagttcaaaattccaacacagaaaatgtatgcagaaaaagaatgtctttgtctcacattaaatatttggaaatacagatggacttcaaagcggtgagagctgatgtacagtgca

SEQ ID NO: 252000 - DNA, 760 bp, Cannabis indica
gcagttttatcagccactgatttcttcttccacactaacttcttttccttgttacaatggacaaccatatgccccaaaccagcacaagctgcacaagtggttgggagccattcatactctatagtttgttccaccagttgccttttctcattgataaaagaaatagtttttggaggttcatccgatatctcaatatccacaagaacacgagaaaatttcaccatagacctttcttgagtcactttgtctatcatgattggcttgcctattgtgctaactaaagcacttagattcttcttcccccaatactgcagccccaatccattcaaccttatccacaccggaacagaattcaccattttcattgcatcaatttcagtagaccaaggcctaagcaccaccagtttcctatcaaagtgaataacccctgcttctaaaataaggtcacgagttgcttcatctcgaaaattgactaaagtgcatccagagtgcatccgaaccaccttatcaatccctagattaccccaaatcctcttaacaaatccttcaaacactctaaacggtggattggcccctaaaacaaagcaaacaattgcattcttccaaaatgaagcctcaacttcaatctcttctaggtcaagcttagctacaatttggtcacccactctcataggtttagtatacgaatgtttggaagagggagtgggtacctgatttgatttaaatttgctccacaagtctctcgcatcagattagaagt

SEQ ID NO: 252001 - DNA, 943 bp, Cannabis indica
ggcatagacctaattttcctattagatataactaactccccactaggaaataaggttccaaaccctctttcgataaaatcacgtccctatctttgatcctaactgccatagacctaattttcctattggagataaccaactccccgctaggcaatagggttccaaaccctctttcgataaaatcgcttggcctacccaaaagatcaattactcgtgttgccacatatgagtctgtagctcccgagtcaaataacacagtataaaaggagttgttgacaagaagctaacctctcaccatagaaagactaggttagcatcagcttgagtgatggcaaacacccgagcaggtacgggttttgccttcggcttctgctcttctatctttgcctgaggacaatctttcttgaaatgccccaccatgccgcagtgaaagcatgtcttccggttgcactcacccggatgatgtttcttacaacgtggacactcatggtaagaggattctagcgtccacctctaccttggttcccacggaagcgcttgctctgtcccgaaccaccaaatgctagattacactttcttttctgattagtggtggaatcaccaccctccctaccacaactaggagtaggaagagtgggggtcccaccaacactcagagtcactcagggctcctaaaggaactttaccgcaccttcggctcgtagtgtcctttcaaccatctccacataagttattgcctcattattagtaatcaccaggtcatgtctaatttttaaatacaaacctgccaggtatttctctttctttctgaagtctgtgggcacaatacccaaagccagcttggccagacggtcaaattttgttgtgtactcagttactgacataccatcactttgcactaattttgtaaattcttttctcttagcactgtggactgcttcat

SEQ ID NO: 252002 - DNA, 597 bp, Cannabis indica
ttttagtttttattttattatatatatagattatatattaattttttttatgcatacatattttaatagtagtatatttaattttgttcgcataatatatattttttgagtattaatttattattgtttataatttctttgtggtatataattttgttactacgatatattaattttcagtgatacgatatatcaaatactattgtatatatttaatggtccactatatttattcgtttttgttacaatatattaatatgcaatactaaatggattatataactaatttaatttatacatatttttttaaaaaattaacatgtagtaaatatatttttataatttttatcagctaatttattatatttgatcattttattaattttttttttaaaaaaagaacatttactaacttagtttctaaatttaagattattttgtatctcaacccaaaaaaaatttatttttagttgtatttatatagacttcttgttatttttgtgcacaagagtctaatataattgtgagggttgtactatgcattgtggcatatttcttaaatgcatcagaataataaaggaacatacataaagctat

SEQ ID NO: 252003 - DNA, 531 bp, Cannabis indica
gcaatttcaaacaaaaagaaaagataagttagggaaaaaagccaaaaaattattaaaaactaaaaagggcagaaaatttacataatcgacaaattatcgatattccattgacatatcatcgataagaaatgttaggatttcgagagattgtcccatcgacagaatgtcgacatatcatcgatatcaaattgacaaggtgttctatcaaaaaaatatcgacacacactcaatataatatcaataaatgcacattgcatgtcatacacgtatacaattggacatttaatgctaattttttcccacctttccaacttttgttctatctcgaggcaatcgacaatgtcggcatattatcgataaagtgtggcctcaattttcttctattatcgacaacctattgacaatgtatcgtcattatatcgataaatgcacattacataccatcacatgtacaataacagatttaatgttaattaatttttcctaccttcccaaaaattattctgccctataaaagcacatttcatcttc

SEQ ID NO: 252004 - DNA, 1201 bp, Cannabis indica
ataataataataataaaaaagtaaaaactatttcatttttctctattaggctctttaataaaaacaaattaacaaactcgtctttgcaaaggcttgaaatgaaatgggctcatttgttgggcttaagttggaatgcttagtaatataaaaagaaaacttacaaaaatactgtcacacagaaatcttttaaaaataccgtgtttatataaaacaacagtgaaacacaaaacagaacaactaaaaacaacagtggaacaactaaaaaataaccgtaaatcaacagtgaaaacttaacactatacacagtatttttgaaaaaaaaattcgccccacagtataaaagtaaaaaaattgaaaatttcagtatgtagtgtaattattcccaataaagaaatgaccatctcatataaatattattagacaccatcgatacaggcccgatcttaagtataggcaggttaggtttatgcttagggtccatctagtccaagagccaaaaaaaaaaatatcatcttttaaaaatacatatttttttattaattttgaaaaatattatatattttttttttaaataagaattttaaaataaattttttttcttataacccactaaaattcagccactttcacttacacctaataataatttcatttacaatttcataaatgttatgcttcctcctaccaaaaaccaaccaaaaaagacttctctcaagataagttagtatgggatattattaatgtcaacacaacaaccctacatatccctttgatatggtcccaatttaaaagtaccaatcaatggtacatttgcctttaaaatcagacaaaaatcaagatgaagatcaagatcaagatcaatcaatgaaacattaaaggattaagtttaagaaaatcatggctaagctaggtggggaccacctcaattcattcaatactctattttaaattttctatttttcacttttggaaaattccatttgaatattattattattatttttttgttcattaaacaatttaatttgaatcttagtcaatggcattgttaagtgtaagagaaattatatttaatttggtaaataaacctttgaagaccggcatatgtatgagccaatcaaatctttgctttttgccacgtgtcatttatctatttattttaagtaatacttagaggttgtatactattgactatgtgtgt

SEQ ID NO: 252005 - DNA, 560 bp, Cannabis indica
aataaatgaagaacagtttcaatatgttttactcaatacaacaatgcatgcgaccttcatagtgtgtattgtctgttcctatacacgcacaagctcgcaggcttagggtgcgttcttgttaacacaagactactgagtcccatgctaagatatctgcgtcctaatcgagtcgcatatatggataccttgtttgtgtcgacaactcaagaagtgcgagtctttatcgagtcaccgatcacgttaggtcattcggaccagctcgttaagtaaagagttgatctttactaaatcgaaggagaagtcttcatagacatcacatatatcgtggtatatgcgagacttgagtacgtccttcttggtcctacgtcatgtgagacgtaataatgcgactaaactctatcaaggtcacatcatctcgctgagcttggtttaggcgaggtttattctcaagagattctcttcagacatctcagcaaccctcgagggatgtgagtccacgtgtcattcatatggaagcctaatctcaagtttctaggtcaaaaattcacactataacacat

SEQ ID NO: 252006 - DNA, 953 bp, Cannabis indica
gtaaaataacttccaacagatcgcccaaaaaaaaattatcatcgtcatcctcctcgaaaccacttctcacatatattgcattcgctccaaaacccttacaagattcatcctcctccaccgttgttctgctcgtcttcatcctcatcaaaattttctttcaaaagctttagattacgtttcacttgacgatgcttgaaactttcttcgctttgcaagctttggatttattttgaaaacacgcacagatcaatatccacaaaccaaatcatgactaatagaaatttaaaaaacaaataagacaatgttgtgcttacctttatgctaccatgagagagcaaaggaaagggacagagtgagagagagtagaggagagggacaaccggcaagggtcatggtcgcaggagccaaaaaatgaaatgaaatttacaaataactttgaaaaatgagatatgatttttttttttgggggggggggtgttatatcttaaaaggagggaaatgaaatttaaaataggaaaagtaaaaatttgaaacttaagatgcggaaaatgacatttcagatccaaaacgcgtaaaattgaagcatgagaattgcctacggtttaaaaccgtcggccattcccttttaaggcgcgtttaaaagtgtcgcctataccttctgacagtttaaagtcgtcgggaacatcctatttttcctgacagttttaaacactgatcacttaattttttttagtaacggttccccaaaaaaagtgttttaaaaccgtcggcgataatcatttttgtagtagtgcgtctttggtttttaaagactttttctaacttttttatttaatatctgacatatttaattttcatgttttagcatttagatgctgcatttcatttgatgaggaggcgacaacatttttacccagaggtgcacccaagtagatgtgtcatcatgcctcaca

SEQ ID NO: 252007 - DNA, 863 bp, Cannabis indica
ggtgttaaatcttttcaagctttctttttttggggtgggtgtacagtagaattggttggggtacttttttttactttgtttaatttttcctcgtgtagtaatagtactctggctcctggttgctgcttcaccttctggtttctgtttatggctcaggccttacttgtaatgcaaagacgagtctcagtgaaaagcatcaaagggaaagaagtctgtttttaaggagttggtttttttttttatgactattgagaggcaaagtttgaaagagacaaatggctttgggagggtatagtatagaaaactgtgtttgtgggtgtttattatcaagatacagatagagtagttgctttcaattaccgagactattgggttttctctgaattttctcattgattctgattaactccttcgctgtgtgcactatcattattcagattcagtggtcagaacactgttttagtgcacagtaaataaatataactacagcatatgagtcaaacaaacaatgcctggtgttttcctccaaaaataagttcaaattcacatattcaactttaaaaaaccatagtcatagtgtgatttgtcttgttaagtctggacccacacaaaaggttttttgcttgcataaggatacccattaggttcacatgcattacaaattggtataaagtgatttggtcaaatttctaattttctcttatggggacaataggtgagattgcctttctggttgttcaacttgtgaatctcaactaatatattatatgagctaagattcaaaatccactatgcccaaaaaaaaaaaaaaagctcttttcaaaaagtgacaaaactttatagcgcttttgcaagcaatcttt

SEQ ID NO: 252008 - DNA, 852 bp, Cannabis indica
ccttgctttcccaacattgccaagttaaagtctcttaaatctcgaaaaccaagcccacctccttttttatttttgctaagtttgtcccaagccatccaatggattcccttattagaattcttcgacgattgccaccaaaatttggtcatcattctctcaatttctctactaatttctaatggaagaaggaatacgctcattgcatatgttggaagagattgaagaaccgttttcactaagatttccttacccgctcgagatagaaacttgccctcccaaccttggatacgtctccgcaccttgtctttaaggaatcccaaaacaatggtcttgttacgagacattgtacttggcaaacctaaataaaagctaccctcagccacctctccaatattgaggaaattacaaacttgatgtctcacaatcgacattgtattggcactaaagaatatggacgatttagccaagttgacttgctgacccgaagcgagctcaaacttacgcaaaagctcttgaatacgaccagactcctccaaagtagctttacaatatagataactatcgtcggcgaaaagcatgtgagaaactcgaggcgcaccattggccaccttacaaccgtgaataaagccatgattttcatacttacgcaagagagaggagagaccttccgcacataggatgaacaaatacggagagagaggatctccttgacggatccctctggaagggattataggtcccatttcatgacagccatggatgattcgataatttgtcgaggtaacacaagacattaacaagccaatccatcttggagcaaaccccattttcatcaatatagcttccaaaaaa

SEQ ID NO: 252009 - DNA, 989 bp, Cannabis indica
aattataactaattgggcaagataaaatttatcaatcacccacatgaaaaaataaacaatattaactttggaacaaatcaaaacaaaagaatagtgatctatgtaatgtaaaaatatactacccataatgatttttaaaccatgtgggactttttactatcactactcatattaccaaaagtattaaaaatatgaaaaaataagaaaaaaggaaaaaacaaagaaaactcacctagaatgctacatcatctctcttttaactttcatttatatatatatatatatatatatatatatattgattgattgatattttaattgattgttagttttttttttttttgaaaagaacaatatattgcaacttgaagataagaagtaagtacaggttacaatatatcaagatttggaacattaccattccaaatgacctcactctgaagtcctaaagctgtcctggctaacttatgaggacatcattaagattcctatagacatgctgaacagaaacagtaggaaaattagagagaggatacaatttgactaactaagtctgaaagggaagacttatctttccacctatgtttaactttatttattaaaacttcacaatcactttcaacaatacacaaagggaatctaacaattgaacacaagttgagagctacaaccatcgcctttgcttcagctaaaagaggagataagttaccattcaaaggagatgaaactgctgccaccacctcacctcgagaattcctaactgctgcccctatgcctattttacttatgctattatccactgcagcatccacatttcattttaaaaaacctgaagcaaaaaagtatggtcctctgaattcgatattcttcggccttcaatctttgcaagctctgaactctgacccaaatgaactgcactacagtcttgagcttcatcaaagtcatgtaatagggctttaatttgaaactcaacaaaagacaatatagcc

SEQ ID NO: 252010 - DNA, 751 bp, Cannabis indica
ttggtccaggcattaattaaaaagatattgcttaaaaaaacagggggatgaagttttgagcagcttcaatcttggactttttgaggttccggttggttgatttaggttagactatattccttccaaattttaaattattgtttgagtaattggctagaatagaagcagcctcaacccttccccattttttttttcctattttttttttacttttgtagtaagaacttgttgaagatagtttgtgacaataatttcttcttagctcgtaccattttagtcattatttctttgaagcagcctcaacccttcactatttttcttttgtttaacttttgtagtaagaacttgttgaagatagtttatgacaatatttctcagttcttattttccattttaagtcgttattttttatcttattacactatgctatcgatatttttccctcgcaaatttgattgttatatatcttgagtttcataatcatgtattagtttcttatagataaagtaactatatatctatatttccaaattaataacaacaacaataataataacttttaactcagattggaaagattatttaagttggacatgtttttacagttttcttatagaaatatttgtgaaatatatattttaaataaataacaacaacaataataaaaacttaactcagattggaaagattatttaagttggacacgtttttacagttttcttatggagatatttgtgaaatatatatttta

SEQ ID NO: 252011 - DNA, 1008 bp, Cannabis indica
aaaaaaaaatgtggtattattaatgaatcaaattaattgctacaggagcactaataaatttaagacaaacattagtctaaatacgaattccaaatgcacacacgtataatagattttaccagtatatgggccacaccatttgcattacaagaaatgacctcacatgaaccaccaccgcagctaaaagagaaacaatatcctcaacaataggtttgtagataatattactactttgaaatctaacccaataacaaacacacaaaaaatcagtctcaaccttattagacaccaaaaaatccaaattaaaagcccaaaggagccccacttaaagagccaagagttctgcaacctcaaccttaaaaccacccacacacccaatagctaggccacccaaacaacccctgtatcatccttgatcacgccaacacagcccacaaaaccctgactcgaggtaacagcaatatcagcgacaaagagaaagagccccgcaacataggaacccaacccaaggggtacctagttttgtatgcatgcatgggtgatgactcacacaccggaccaccacacgcgcaccgtgtgaccgacttgagctggcgagcgagtgaggtgtcactttattttttagaaaaaattatttataaaattgttatttttttatttaattaatcaaaaatagttttcaaacgtgtttaattaattagtaaatagagacattttctcatcctgattttcagcattgttcccatgatcactcgttctttctaacgttcccatgattagaagtgtctttctttccgttactatattctgtgcattccccattttaatgcatcagaatgggagaaatacatacttttttttcacagaaaaaaactatatacagttatattacgattatattacaaaatgtgtttccaagcagtagtacgatttattaggtgtagtatttttgacggtttctctatcgtgtaatgaagctcagatacagtggttcgactcgattgtttt

SEQ ID NO: 252012 - DNA, 506 bp, Cannabis indica
ttaatgtttaatttagttttttaaagtttgaattttctctaaactctcggttgttcattaattcttattacattatttgaatatgtcgactaatttatcttaaagatatataagaaataattgaacttcatcataattgtttcatgatcaatagtaccctttttactaaaaatccatttttttttcctttttggcacttataatccttgttaggatagtttcttcttcttatttttattataaaacattgcatagtttcttacttagaaatgataatttcattaaaaataaaggttatgattttgttttttcgagttttgatatagaccaaatcgtagccctaaacttcttatgttttttaaatttttcctaaactttgacatgtagcaaatcatacatctgaactttgaacttttaaagtctttaatttttttttttttcaaactttgacatgtacgaaaatatcacccctatacctacctgttagtaaaattaaatagaattag

SEQ ID NO: 252013 - DNA, 662 bp, Cannabis indica
aacctacattaagtgagaaacaaaaacaaaagagtatataaaatactccctttgcatgaaagcactctaacacataaaataaataacttttgaaatggaaaattttacaaaccacaaacaagataactttaaaacggagaagttcacaaaccacaaacaaaacaactccctcacaaacaaacaatccaaaaaaagaaatagtactccccctttttgtctatcaacgagccaaagataataaaaaaaatatgaacaaagtcataatagttcaaaacacataaataaaaggaaaaagataaaagatggaccacttattcatcatcattggatcagaagaatttcatgatgttctccatcctcataagaagtaaggcttgagttgtctccattcttcccaaacacaagttgaattcagccatttctgtagaagcagaagtggaggcagatgcagcagtaggttcatcagtagcaccagcggaagcaaaccgagcctttttcttagcaaattttcctttaggaggtttctctggaactttaaaagtggtaccaacagcaggcacttctatggtttcattcccaagaatcaactcctcttggttagacaaaatcttataaatcaaatgagaaaaaataagattaagtctaggtttcttgccctttct

SEQ ID NO: 252014 - DNA, 852 bp, Cannabis indica
aaaaaaaaaaaaaaacgactaaaaaaatctcttgtatacctaaatagatatgggtatattttaatttacacaataaattaaatattaattttataaatagaaataattatataatatatataaaaaagattggatgtcgatgtacactgccacaacatatatgcaactgtagccacaccacaaatttaagcttcaaaatgaagtttcattggaggcatatataacaccaaatttggcttatgcattctccttagagctcttagtagtaaaatattccaaggttatgttaattttaatattcagttaggaggaataaaaatataaaaataaaaataaaaataaaatagaatcaaatttaaaagtataaaaataattaataaaaaaattaggggaatcaccttatgcacggtatttcttagtttattttctgtttttatgtgatttattatgttagtttatttatatatatatatttatttttctagttttacgttaataattattgtacattttatttatacggttttttatccaaacatgcattttttattcttgttaattattttttccttctactttccacgcatatttattgggacaaagttttaatacatggatcaaattttgattaaatagaacagataatatccttttattgactattttttaaataattaaaacaatagactaactaatttatgagttaaagtgtaacaatcataaaaactaaaaataaagaagaaaaattattcaactagttaatttttctcttgactcttgcttgtttgatttttaaagttattaaaatttgaagcatatgaaaacaaaagttctttgcttaagaactattag

SEQ ID NO: 252015 - DNA, 714 bp, Cannabis indica
ccaaaagcaggtccaaaaaaaaaacattaagggccgggggacgggccttaaaattgtctccccttaaaagataataattaaaattgtctagaaagagggaaaagaggctgtaaatataaaaagaaaaataaaaggaaagatagtgataaactggttggcttagtcaatgcggggtggaagacgaggccccctacgctcctcgaccaaggcgtcaagtctcttcttcttctccaagaagcgaacaaggacttcctcaggcttgggataaaaattgagcttgatgttctgggcatttgtctcccaagccatgaaaatgccatcgtctaagcgcttggtgaaatgattgcagacgacgggggctagaagctcatctcttttagccttcttaaaggcttgatctttaaagtcccttagctccttcacctccacggtcaggttggtcgttgagtgcaagtccgcttcgtgcacctcctccatggattttaacttggcagtcagctcatccatagcttccttggcttcctgcaactcgcgcttggccttggccacagctttgccttgagcctttagctcctcctggtgccttgcctccgcctgagcctcattctgctgggcctcctcctgaaatgttttcctctcagtcgacaagtctcgcagactcttcatggcctcgtccatgccccaaaattcggacatgacgtacccatggtcaat

SEQ ID NO: 252016 - DNA, 627 bp, Cannabis indica
ttaattttttagcgacggtccccgaaaaaaatcgtttttaggaccgtcgcgaattctgatatttgaagtagtgtagcaatggtcattagaaatgaatggggagatattcaagccatcaaaaccacaaagagcataacaactaatccaaaacttagcgaagtgcatgccctctgccttgtagcggaactatcagtggagtttggctgtaggtatgtgatgtttcaatacgaaaacatagtggtcacaaaggcatttgttatcaacatggaccacggggtagcctatactatctccacagctagaaggtgtttgattaggttatgcagccaactgagggactgggaagtaattcatatctcccgtaggtataattttatagtgcataatattgcaaaatgggaaaataccaccgacataattggattagtctcgcaaatccctctagaccacagtgtgttggatgactatgtttagtggccatcaaacaatgactaggcctgtacaattaaaatcttaatccatttactattttttctctgctttatgttgtttctttaagttttcttatactggtatatgaactggttgtagtatttaattttgtttcaatgaagttgggtgcttatg

SEQ ID NO: 252017 - DNA, 501 bp, Cannabis indica
gctttaccttcgagtattgcttccttggtctcagatgatttgatttaataaaacttatcatttttcaaaaaaaaaaaaagtaattattatttttttaacattaaattgtttaaattacatgcaactgtttatttatttatttttacacaaatacatgaattgaatagtatctattgcctgttaattttttttcagccaagccaacaatgaatgttcttttcaacttaatcttagaaaaatctttttagttcaacttaatgagtgttttttcgattttgctttctgacccatgttgatttgctttctgggtctttgatttcgaccctgaattctgatattttgttgaaccacaaaatgttttctgttcaaattggttctcatttttcggcagatgctcaagctttccaagctcattcgcttcttcctgaggttattgatagagggcttcaagactagccaacggttgcccaaatcttcgcaaagtggcattggttggtgcta

SEQ ID NO: 252018 - DNA, 1563 bp, Cannabis indica
aaaagttgatgggaaaattagttgtcacgtcaatcagtcacatatatatatattaaaaaaaaactaattataaaattttttattgtattgaaaaagttttgatgtgatgtattgtcacttttgtgatttttttttttaaaatataatcatgaaaaaacttaatactatcttttttttagtaatgtataataactttcattatttacctcattcttcatttatatatatatatatattttttttttcattgtgtttgggctctctctccactattcaccttcttcttcatttttttcttttctttttctcaagtctacaacattatccaaataaaagctagtaacaaaaacaacagcatgttaaagaggaagaagaagaagaagaatcaggaaagataagagtgtggttgtgtgtgtgagagagagatagagagcttgctctgtgatgaactttttgtataaatctttcaaaaacttccactaagtttatgtcattcggtgtctttgatctcaaatcgttagctccatctctaccgtacttccaagtccaccatctttctccaacttacccttttctgttgctggtttgttttattgttgttttaaggttgttttatgtttcttttttttatctacaatttttcaaaatattattatactggtctattttaaatagtaatatgaaaataataaaatttgtatgtaagttatttttttcaatatcgtatgctccaatatatgttcagtttttctccgttgttccactgttgttttttagttgttctgcttctttttattttttatgttttctcctgtatgttctcttgttgtgcctcagctccctacatttgttgcatttgttatgttgtttcttttcccgactagcctccgtccttttttttttttttgtattcttccagatttcaccctttcaatgggaggtaagactattacgtctttcatattttgtgatacatcccactcaatttggtatcctattgggtacactgtttcttcataagttgttagccaatttttttggtgtagtaatttgaaaagagcttgtgtagtaacctgttgcacgttcatgcatgttctctctttgaggtctactatccatgattctttcattatggttacctcaaacaaatatttagtggttagtttaacctgtgtaatttgaaactaacatttattaaacatacgaaacgcacaactcaaaaacaaacattaaaaaattgatgacaaccccaatgttattatgtttaagaatttaaagtgctcaaacaacaagttaaaagaatttcgagatttatatttgagcatcatttgtaattttggatttaaaagaatttgggtgggtttaagcttctaacctttttgttccgttgatttatgttattgacgaaatttttgggtgtttatttgacgttgattttaatttttttgtttcatcttgccgaaattaatagttgttttctgactattttggtgtttctctagtggttcggtccgtaggtattgaagatagagttttcgtatgtgtttggaggtatggacagta

SEQ ID NO: 252019 - DNA, 642 bp, Cannabis indica
aagcacaagttaaagtgaaagaacctgtcaataataccaaatcaaataataataataaatatgtaaagcaaccaaaactatatacatctttacttcaattctgcatagtaaataaaaagaaaaagaatgaaagagttagtgaaattacccaagccatgtgatttatggtcacttcatcaattggttcacacttgctcacgttgacttgaccacatataagagaacaattgtctgaaacaaccaattttaatgtttcttttaaacaaaaaaaaaaacaattttaatgctaaattctcacatataattgaaaaaaaaaaagaaaaaagtataatatggtttagtagagatagtaaaaaggagtaaaagaaaaaaaaaatataccttgtaatggttagtagaggaattagtcttctcagaatccaaacacaaattattaaaggctagatctctctctccttcaaaatcaatgtaaacaaaataaaaactaattttttttcctttaacaatgaaaaccaaaatccttcattttcgaaaagatcagtgcttttttttttttgaaatgaaattaatcaaaagctactgaagtactaaattacaagccaaaatcctatatctcaaacagaggtaaaggttttttttttt

SEQ ID NO: 252020 - DNA, 693 bp, Cannabis indica
attattctcgagaatataacaaagcataactgaaagcataaaaatccaataaaaaaattattggccaaccaagtagttcataacatcaataagtaaattacatatataaatgtaatctcaaaagataaaacaagaaactcttactaactcaaaggatcaaaagattataaaatacccatatcaacaacatgtttattaaactacacgacacttaatcatttagttagaggatctgttaacatcgacttggtcttacaatattctaccacaatgtctcttttcctgaccaagtctctaacagtgagatacttttatttccatatatttagaagtactactaatctcattattctttgaaaagaatacaacaatattattatcataatagattagtatagagagaaaatagaattaactagtcgtatctctaaatcaaattctttaatcataaagcttgcaaagatgctccatagcatgccacagactcaacatatacagtagatgatgtgactaaagtctatttaatactttttcaagaaatagctacaccagcaaaagtgaaaatatagccagaagtcaactttaaatcatctacacaaccattaaaatttgaatatgaataaccaactacttgaagattgtcgatatgcttatacacaagcataaaactattcattctttgcaaatatctca

SEQ ID NO: 252021 - DNA, 924 bp, Cannabis indica
tgaagaacatcagatttttgtttcattaaaaaaatccaagtgaatctagtgttgtcatcaactaaggtgagaaaatatttatgatttaagtgggatggaatatggtaaggcccccaagtatcacaatgaataagatcaaatttagatttggcaaaatcattatgtttggaaaagggaagctttttttgtttagccataggacatacaaaacaaggagaaagtttgtgaatattatcaatattacaatgaagtttattgcaaagtaaagctaatcgcttgtgtgaaggatgtcccaatcgggagtgccatatatcagcagtaaccgtggcattgcaggttgcagcaggagagttatccaagacataaagtccattgttttctctacctttgccaatcacaatcttgtgttgattttcctgaatgtaaaaactgttagtagagaatttaacctcaataaattcattactggttaatctactcacagagatgatattgaacttgaaattgggcacatacaatacattctcaagaatcagatttttggatatgggaacagtaccatgttgattaattaacaaggattcattattaggtaaaatgagtcttgtagtggaagtgtgactgatgctttgaaacaacttcatattattacatatgtgcctagtggcaccagagtccaaaatccaagaagtgtcaaagaatttggaagaaatacaagttaggatcataccagaattgtctgttgatgtgcagggttctgcaatagacaagttaccattttgattggcaagaaggttgagcaattgttgatattgggttgcacttagttggggtaggagagtgtgggaatcctcagctttaacacttgttttcccactggtttggacttggttagccacaacatctttaggcttgttgggtttg

SEQ ID NO: 252022 - DNA, 616 bp, Cannabis indica
aaaaaaaataaaaaaaaaatggcgagatcgatattaataagtgagttaaattacttaagagcatggcacaccaagtttctacatataatggcttaatgataaaatagttagctaaaatttaacatgtttactaaagagagactacaactacatcattcaaaataaactttaatttttctcttttattaaatttcttttcgtctatgctacttgttgtagcctaaacaatacaaggcaagaagattagctatgtaatctagcacaaataaaattcaagcaactacacaaatgtagtttttaattattattggtttgtactcaaaaaacaaaaacagaggcattcaatagtgtaaccgttaatatttcgcattagtacatcatttatacttttcttaaaagtaaaacccaataattattgtggtaagcccctatggcaaattactgccccaaaagattagccaactaccaacaataatgccaataaaaccaacatacaacccaaatcatggtcgatttatagaaagctaaacaaaatctgagataatcttaataggcaaaggaaaaataaatccaaactgaaataatttgtttggattttgcattatatattcggatc

SEQ ID NO: 252023 - DNA, 561 bp, Cannabis indica
aaatgctaaaagatatcagtggtgcttagcattatactatgtgtcattatctttattaatctaattaagtatcgggtctcatatagtttaatgtaataaattttaggaactatcactagccaatcacaaacgacatgtctagaggtgttagacactactagtgcccaataacaatgctccaaaatatataataaaatcactctaaaaaaacaaaatcaataaaattagacaaacaatatcgtttacaatataagggaaaaaaattctaatagcacattaactaagagactaagaaaccgccagcgttggagcataaaagaagtacaaaaaatgctaaatttctcatccaaataaatatgttacgaatcacacccactaatgacaatcaatcattgatcttccaataaaaaaaagaaggaaaaaaaaccactatgcaaaatcgaagtaagaggcaatgacaaactaacaactatggggaggcaaacaaacacaagagatttgaaaactgtatcacatagtgaaaaatcgtgcctttcagtatgccaatatatttattaaatt

SEQ ID NO: 252024 - DNA, 699 bp, Cannabis indica
taaaaaaaattataataatgtatgctataattattaaagatattttataaaataatatttgtacaatttattttacatgtctataaaataaaaaaaattacatatctaatagattgattaaattttgttgttgagtgtattaaattttttcgaattttttaaaattttacagaatatcttaaataattacaacatacataaatataaaaaaaaaaaaaaaaattggactaagaactctctccgatgtgataagcctattattttagaattttccaaagatttgtattctaattttttgttttaaaagaaagttttcattctaatttaagtatcgccattaagtttatattaataaatcaatgatacataatttgaaattaattgtttgtaaatagtattaatagtaagagatatgaaatatagattaaaataatcttgtttttttctgtgttaaaaatgtgtgtgtgttttttttttttggaaagaatgttaaaaaatgtatatacagcagaacctttatccaagaatacacttagcaccaattaaattatattctaatcgggaagttataactaaatagagttacactggaaaaaaaattcaaaaactagaaaaatatcaatgtaacaataataacaataaataatcattaatactatatcataatagaaatattttagagtaaatataattccatac

SEQ ID NO: 252025 - DNA, 509 bp, Cannabis indica
tttttcctttttcttctttcttctttctttttcgttgttcactcagcctcagaccagatgggtgtttagggtgagaacatcgtggttcagggatttaagagccctcgagacgagcgatggtctcggactatgagacggcgaataaagatagaagtgtgagagagaacgaaacggatcaagagatcggtttagaaggagaacctcgagctagaggttttggtatgcatgggagctcggtccatggtcagcctcgttcgtcaatggcaaaaatagctccaccggagctagcagcgatcgcacgcggggatagggtccaggaaaattgtaaagtctttttttggcaagttagttgacaaaataatttttccttttatggtaagattcttgtgcattcataaccgatttcttaccttgtttattcggtttgtagttgctattttccttgttaggaaagttgcacttttcagctgaacttttctttgtttggaaacttcttaaaagagaagcaa

SEQ ID NO: 252026 - DNA, 649 bp, Cannabis indica
tagagcaagacatcaactttcccactgtgtaaatctctattctggtatttaaggatatgacaaatgtattatactcactcaaaagccctttcaatatcacaaccacatgatcttgatcgtccaagacttctccaactgatgtaagaagatcaactgtttgttttacttttaataaataatcgttgaggcttagaatccattctttaagttttgcaacttagtccaaaacttcaagatctttgaggagacttgcaatgtgaagtattttccaatgagctctagatttcttgtgaagtgctgcagccaaccattcctatcaaaagactctttgtcatggaggggagtaaccacaaaacgaggagctgctcttgaaactcccacttagaatcagttggatttaccatgtttagctcacgattcccattattcaagaattcagctagaagaggttctttgatgtatttcagaagccaacttcctctgacaacaacaagaactttctgattccataagagaaaacttttatcattcaatctaatcaagatattgcgattaaagatcacaggttcgtgatttgtgtgtggtctgattggagcttgaggtcctttggtttctggaatcaaagcattgttacctataaccatgttag

SEQ ID NO: 252027 - DNA, 1047 bp, Cannabis indica
gttgagcaaattcaggagaatggttattactgctgctatggcaagtcttgtatacaatatttggataatgacgaacaagtgcttatggaacaatgagaagcaaaatcctgtcaaagtggtacgggtgtcacacatagaattgagcttttttgaccaaagaaagtatcggatgaggatagacatttgttctttagtttgtagaatattgtaactaaatagaaatagaagcaattgttgagaactaaatgtatagatgattattttaggccctttagttgggtgctatgaggatgtaaacaaactgtttttgagcgaatacacttttgattcatcaaaaaaaaaaaaaaatctctaactcattggatcggtcatataaatactctcaacccagtctatgctcaggcctcaaacttaaattcataggaagttccttttactgtaagatattgttatattgatgcgatttgatgggaattgctgctgtgcttcaatacatgcagggctctgtcatatcatagatgctagtttattctgtttctgattatgctttaaatcttcttgatggtgaacttaaggcgattttggaataaattaaccatttactcggactcaagagtcaagacatgctattttgctgctttgacttgctagaatagctcctttgagatttgcataactcgtatggtgtaaagtctaaagccaaagtctattcttagagtttgctaggcataaaacaaataaagaaaactacatcttataatattgattaaaatacaaattgaaactcatatatatttattctaaatgaatttgaaaaatagaagaccgaataatatttttttcaacatcttcacgtcaacaccaagacatttctaatatttggggcatctactgatgtatggcattttcaattcatccgctgttttttcttttttttttccttttttcctttctaaaagatcaatcctctacgaagcaaaaatggctggaaatgtaagccaataaccacatccaatccccccgcaaaaacagctttaataaacactt

SEQ ID NO: 252028 - DNA, 546 bp, Cannabis indica
agctttattgtatttgtgataatataattattttgtgatactccaaactgtaaaaaactgtaaaaaccgcattgacaccacaccattttttgtagtgtggtttttgcgattttttaatttcgcgatgcgagtacggtttgaaaaattagaaaaaccgcatgtgcgggttgatttgaaaaaatagccaaaaactgcaccacccgcactgcgaacacccctataaacaagtaacgcgatgaataataattgataaatagaaatttcacaatcaatacataataaaacatctcctatcaaaatttagactcaatctaatttgtaccaaaagatactagtattttctatagatacccaaaataccactattatttaattttcccgctctttgtgtccctctctccctcgtgctctctctgtctcgaaaaccccaaccaccaccgaaaactcaaatgatggcatcccaaacaacagacaattctccattttaacttaattttcactctagtttctccctctcgcccttgctcaatctatctctctctctct

SEQ ID NO: 252029 - DNA, 500 bp, Cannabis indica
tcttatatatggctcaattctctaccatttattacatgtggaacattgtccacaatagagggaaatcacttcaagagtgatactcccattacatccttccacacatacacttactgtgattttggattctctctctaaacttgactctgaattctgaactatgagccttagagttgttttgaaagagtagaggcacatgtatttataggtgttggtggctttaagttggtgtcaaagccaactgttataactcatagcagttttcttcagattcaactgataagagacaagatagaactattgacttttacagattaagtgagtttaatcttaacatattataaaaaaagacaatccatcttgtatgcatgatgtttgcaaagccttttattgtggaaagaatcaagtcagtttcttatcaattactttatgggatttaagaaaacgtatgaagaacttaatgtgttattgtcatttagtcctaatgtgaaagttcaaca

SEQ ID NO: 252030 - DNA, 983 bp, Cannabis indica
agacccaaactgagactggaactcaggcccggacacgttcgtgtacccagaccggaactaagacccggacctggacctaaatctgggacccgatcccaaacacagacttggacctagatagggatccggatacgaaccttgactcggaccaagacccaaactagaatcgaaatgctagaactagattctgaccgagatcttgaccaagacccaaacttggacccgcattcgggaccccaacttggacctggacccaaacctagacacacatcggggtcaagacttggacacaaacccggacacaaacccggacacaaactaggacccgaactcaaacccacacctggaatcagaccaaaagcgagactccgaccaagaccaaaactcgaacccagaccaggatcagaaccaaggacttcgacccaaaactaaatccagactcagatcgggaatggaacttgggactcggacctcacgtagaccgagacccaggacgcgaacccacacctgaagcctcatctggacctagactgaaatccggacccgaacccaatctcagaccatgactcgaactccgacctgaactcaaacccaaactcgaactcagaatcgcaaatggaactagaactgaactaggaccagggcaaggacctaaacccaaacccgaaccaagatcaaaacccagacacagaccttaacccgaaccgagactaggactcgaaccctaacctagaacgggacccaaacccacacaataagtgttacctggaccaaaaatcaggatagggacctgggaaacagaacgaggatcgggaactagtacccgtcccaaacacgaacttgaacctaggactcacctcgtgactgggcacaaaaaatggaaccagactgggacccgagattgggatcaagatctggacacagcgcttggaggaaacccgtagtcggtgtttggatttgggaccaagccctggacccgaacc

SEQ ID NO: 252031 - DNA, 683 bp, Cannabis indica
caacgcacgttcaaaagctagtagattcttataagtccccatttttttttgtaaatgttttagtttatagaatttttttttttatatatttttatagtgttcttaaaaaataatactaaaacaacaagaaaaatacataaaaataactggaaaacaatatcaaaacaataacaaaaaataacgtacaaataacaaaaaataacatacaaataataaaaaatcaataataaattaacaaaagtataacataaaaatacatcaaaatgtcgtattttctgtaaataaaaccgtaaaaatatttaaaattccgctgtatttttgtaattttttttattgtttttgtgtatttgagaaagagtttttagcggctaaaccctcttaattatcatttcacttacatttaaacttctaagctcgagatttgatggtaaaatcctctaaactatgattccgtttgtatttttaaggtgtcatccaaataaacactcaaatgccaacataaactgctcatgcgtacaatttttgtatacatagcatatctatattggtacacaatattattatttaaaaaatataaaaaaaaaaattattataaaataaaaaaaaattaatagtttctttttttcttttctgttctttcttttttttcagatttttctttcttcaaattttttttctattcc

SEQ ID NO: 252032 - DNA, 446 bp, Cannabis indica
gtctctatcatttggtttaaaaagaaaaaatattaaaaagtacccattttatctaatatctttcgatatgttaatatcattattatttcaattaaatatcgggtcccatataatttaatgtaataatttttagagagtatcacgaattaatcgcaagtcaatatatctaaaggtactagacaccactagtatccaataacagtactcttaaaaaataaatacatttgacagaaccaattaaaaattttgaattacggcacaatataatctaccatgatctttatcttctgatatcatcaagtttttcatccaatccataatttattggcatggttgaaaatagtgttgtaaatattggttaaacattttaacaaagcaataaattggctcaagcctcgaggtaagaccaagactaaacacgaaaaatatagatttagacataacac

SEQ ID NO: 252033 - DNA, 1147 bp, Cannabis indica
tgacattaaatattaaataattcaaacaatatgcattattaatgtactttaattagcaatatttttttttaaagagcatgataagaaaaaaaatcacattagttcaaatatttattttaggggacttatataacacctcacctgagtttgagatttaacatgcttcaaatgagacaaaaattattatactgtagctatagtgatattaatttgacaaaacaagttttgataacctggatggtacacaatttttaataagaaaaataatttttttaatgtctttaatttttttgagtaaattagtacaataacaaggttaaatgtgtaatttagttttattgggtagatgtatttatcttttaacagttagtattttttatgaacgaatttgtattccttccactatatgttagacaacccagtaaaaaaaattatatagatacaatagttctttttatttttcttatttcattatcaagaaattttatttagcctagagaaagtcaaaagattcaaaacatcacaatattagtaaagaaaactaatgacaaaacaaatatttgatttgaagcatacccatgaagccagcatgtgagctgtaattgcattcgtcaaattattaagagcagagaataaatgatctattgcaacgttaattacaacaaatcttgtattaagattgggcttttataatctattgtggacttctcttatttgggatgtttttcagctttgtatatgtaccttacttttccaatgagaattttaccatttttctaatatggtatcagatgacatatactcctcattctaacaacttttctctctcaaaaccctaatcgccatagttcaaacgcgaggtgctctctgtctctcgccggccgtcgctgccattgctgtcgattaacactcttcccctattaagcttcacaccaggttccttttgtagcttaggcgtcttttccagcacctttgctgatctttgaatgtctgtcttcaacactcgttcgtctcccctacatcgacgatcgtctctactgaaatcttgaccaccggtgcttcatctccaccgatcgcgccgctaccacctgaatcttgccaagtgtgtctcgtctacgtcaccattctgctgccatctccgtgtcct

SEQ ID NO: 252034 - DNA, 991 bp, Cannabis indica
tataaaaataaaacttgtaataattacttatattttatagttgttttataaattatcctacgaaagttccattgaaatataaattatagtgaacttttttttgaacaaggcaataacttcattcaaaaaccaaacaaggtacaaacaaaggcaatagcagtagcaatcccacagagaataaaagcaacccctaacaagggaactacctccaaaaccacctaccaactctcaatgaccgatttcatgtatacattctctttgctaagtttatgaatacccaaacccaatactctacttttaaccaaattctttatctcccagctaaggctaacaaccatgctacatttagactcaaataaacaagtgattcgatttttctaaatacaatacaaagctgaagagaaaatagtattacaaatttgacttttaagatcattcatagctgaagaacaccactgatgcaactctaaaatagtctttgccagtcaacaaaaccgaaccacatgttgatttcattaaagaccatcttcccgaagatgcaattaataaatagatggctgtgattttcatttttgtattcaaaaatagggcaaagagtagaagataaagtcataaactgcctcaagttatctcttgttagaagttgagaattaaccacttgccagtagataaatctatgcttaggcataatgagtttattccaatctgtcccagcataagtaactgtattggtcataaacgagaattgtaaaattgtttaactttgaacttacctcttttttcaacttgcttcaaggaggcttcgttgacaacttgtcttagtctcaaattatagtgaacttgaagtttataaattgagttgttttgacatgatcaatcatacacaataaatgataaaataatttgactaacttttgttgaggaaccagaaaattcttctcattattgttaatttataaagcttaaataagaatgtgcatatattttgcac

SEQ ID NO: 252035 - DNA, 1272 bp, Cannabis indica
aaaataagggaaatttcactttttgtccacgtctctctgtttgttttcttatgatcttttttgtcctttacttattcataactccctcatttcgatgtattgtttttgcaggtatactccggatatttgctcctatacaactatgttatcagcttatgtgaatgcttccgatatggagggtgctgaaaagtttttcaccagactaaaacaagatggactaaaacccaatgccatcacatatggaaccttgataaaaggttacgcaaggacaaatgatatagagaaaatgatggagaaatacgaggaacttaaggtaaacggtgtaaaattgaatcagaagatattgaccacaattatggatgcgtatggcagaaatagggattttggaagtgctgtcgattggtacaaggaaatggaagcttgtgggcttcctcccgatcaaaaagcaaagaacatccttttgtctttggcaaaaacagaggacgaacagattgaagctaaccaacttgtaggacttgtcgatcataaaagcattgaacaaagagttaatggggttactagctatgatgatgatgaaagtgacgatgaggatgaggatgaagatggtcttagtgacaatgaatttgttcctccatcgaatgctaattctcaggaagagaattatgatgaacaaaggcaaatcggtgataatcaagaaagcctcgaagcattgcatttgctgaaaatctgctgatatgtgaatgttaggatacagtcatcacacaccacaccagatcaactgagataagttgagagtgtgtacattggaatgaaaccgttccatagaaccatagtggcatttaagcatatcaattttgctctgatcgttacagtaaacaaagttttgatgatgttacaattgtctgtattatttactgatcataatttatgtattaatattatgtatataatttatgtttcttagaaatatgatttatttgtactcaatcaacagtatgttcagtgctgatgtgaaaaaaaatgagtttggtaaaaagaaattagttgactattcattaatggtgaaggagagatattccattctcttataagcaaaattgccaatgtttggtcttttaatctaaactaaactaagaagagagcacgaagagttacatagccaaattactagaaatagtttggacaactctttcatgcgctgataattaattcagagttttcttcattagctgaagcctttaagcgatcggcagcttttgcaacctataaaca

SEQ ID NO: 252036 - DNA, 609 bp, Cannabis indica
tattaaaatgagtcttatttagggcacaaaactaaacattcattaagtactccaaatctaaacaacagcaaaacaacaacaacaacgccgctagtaatgatttctttcttttcattcgagattccctcatggcctctattccaaaccaaaccaagagacaattatctgaaaaatttcgtcgcctcaagaaaaagtttaatgccaaccgatcaagttatcgcttatatcctcctactcattagcacgatgagaaggtgtttgagctctccaacataatttggggtcatgatgatcatgactgcgatcgcaatcatgatgataaaaataaacaagtaacaattagtggctcagatcgaagcgataatgataatgatgaggatgatgaagtgtttttgtccgatgagtatgatattgttattctattgtctgaatcacttgaagataattttttagatcatggtgtgtgttttgattggctagaagaaaatgatgtcaagaaattggaagagagttggaaaatggttaaggttcttgaacacaaatatgttatcgagaaatcaagtttagatatctttatgaatcgttcgaaacttcaactctagggactac

SEQ ID NO: 252037 - DNA, 1012 bp, Cannabis indica
ttgacattaacaacaactgaaacagaaatatttacaaaaatttcaacttctatagtaatggaatcacagcattgagtcatcaagttgggtatctgcttcacatgaaatctgcaagaaaatatcaaatatgtaaatacttttgcacatttaaagtaatatttaatgaatggtagactattactctaaaatcatactgaacttaccacaaaagatgttggccatgcaatggacgctccaacagcatcacggattgtctttatacatccatatggtttaatcaatagttcattaggcttgataggaactttaacaataacttcagaaaaaaaagatccaagttcttctcctccaacttttttagatggatctttgctgcaaacgataccaatagcaatggtttcaagcttatttgtgacacttttaatgttgactttccccaacctgcataaaaaattataaatcaatactaattgttaactaaaggagaagaagtagtgttgaaagtgaatgatcatgtaatgagttgaagattattgacattattgaaagaaatgtgcactttaataatctcattgcatccgtgcaacatgcaacctatatgatgataattttctattgatatgctttaacaaaggtagtagaagctaactataagatatacatatacatacatatagacaaactgacaaagcaagtactgtagagaatattttgagaataaagtgatgaaaattgttgtgtatgttcaagttttaaatgtgatgcaaaagtaatgagataatattttaaaaaactgataatataagagtactagttacctcaatgacaggagtatcatacgcaggagatgaaaaccaaagttgacgtctagtttctttattaagtgaggtggtagcatttatgtcctacatatatatacaataaattaacaaaacaagtatatagtcgatagaatagtaagttaaaaatcaacaaaataaaataaaactaaaccagatttgaagatgtggca

SEQ ID NO: 252038 - DNA, 770 bp, Cannabis indica
tagaagcaattacctaatactgttaaaattaatgcccatctgataatttcaagtgaaatgagctcggttcacatcatgaagtcaactccacacaagtgtaaagttgacttgtgggacagatttaaagcccaaaacttttcctagtgacatggacattaatgtttgatacgtggaaagaaggatgatcatggagttgggtagacccgagtcatagcagccgacctgggaagggaccctagccttgtgcccaggttgacctctggagctccaagatggaagttcaaacttcaataacttgaatccaacccactatcttttattattatatactatgaagacattaaacaacctaatcaaagcctcgtgagctaaaattacacgaatctgcaacctagaagccaacctaggcacctaagttttcacccagcgcccatgttgacattcccaaattggtaaaactttatattggcacatcaactagacataccatggacatatttgaagaatcagaaactatattcggagcaagttcatttttgagcacctggtgctagagtaccccagtgcccaagttgacaatttattaatctgggcaccttttaagtatcagatcgatgatatgacttttgcatcttcacgaaaaaagtgttatgggaattttttctgtcattagaaataatgaatattcaagccaacttggggagaaaactacaaactcgagcccctagagggaccagcgcctaggtgctagtgcacaggatgacaatcaa

SEQ ID NO: 252039 - DNA, 745 bp, Cannabis indica
aaaaaaaaaaaaaacaaaaatcttttaattattctaatatatcaaataaactttgtaaaattaaaatttaaaactaaacattacttaaactatgcaaaaattatattaaactatactaatcttttttccctaaacaattaaacttacactaaaacttttatttacttaaactacattacatttattttattttttctagtaataaattaaacattaacattaaaattaaaatgctataaaaaatttataaatctttttaaatcaaaattttaattctaaatatactaaagatattttctaaaaaattagcttacaatatcacttaaaataaaataaatttcacaaaaaaatcaaaatatagagagtttatatttttaaaaacataaacattagctatctttatcaaaataaaatttgaatacttggcatatttaatttaactaacaaatatacctttattcaaattaaaatatttacaaatatatcaactttacatctaaaagaaaaaatatttatgtatttttaccccaatctaatatttttagtaaaatttatcctaattctatcaaaatttcgacaatataacaactataaatggacattcccgaatattttaaacatgcaaaaaaataaaaaacaaaacaatacaaaagaaacaaaataatattaacaatacaaaaattatccacccatccgaccgcaatataattagtcgcagaacttactttactacagatgaatatct

SEQ ID NO: 252040 - DNA, 748 bp, Cannabis indica
aataacatcatcaacataaaccaatagaatgatgctagaagaagagtgtctcataaacatggaatggtcagttgcagagtgtgagaacccttcttctagcaatgcagtagaaaacttttcaaaccactgcctggatgcttgtttcaatccatacagtgatttcttaagtttgcacactgcatttggtggcaatggtgtctcccccttatgactataccctggaggtagagtcatatagacatcctcatgcaaatctccatggagaaaagcattgttcacatcaagttgatgtagaaaccaacctttaatagcagcaagggccaagattagctttactgtcacaagctttgcaacaggtgcaaatgtttcaaagtaatctaccccttctagttgactatatcctttggcaacaagcctagcattgtgcctctcaatagaaccatcagcattcaattttatcttgtagacccacttacaaccaatgacatgttgatctgggggaagaggaaccacaatccatgtctcattcttctccaaagcttctatctcagagtccatggcattgtcccagactgggattccttttgcttgctggaaactaataggttcctgcatggttgaaatggcaagcaccagagccttgaattttgaagaaagtttggagtaatcaagcacctagtgtagaggatatgcagtgactggcctactgtcctgagaagcaacaaacaaattattagaggacagaaaa

SEQ ID NO: 252041 - DNA, 2745 bp, Cannabis indica
atgagttgagaatacactgtaatacataaatttatttaccctatagaatctaatagcccactctattcctgggtgttaagactggcttggaagatttctgtgcaaattcttcaacaaagtttttagattggatgatcgtaattatactaaaagatagtagtgaggatcccttgataggctacaatagatattatcttctttttgttagtctagatttaacctatatatatattttgttgagatccttaggcttatggttcatattgaataaaactatcttatcaaattcgcttttgcttttcaaactctgacatggaccataaaactaatattaatctccattttcggagctacttctagttatgtgtagaacattttcaaacaaattgcttcttgagccgcttcagaagttgctatgtattcaacttccatatttgaatcggctatgttggattgcttgatactcctccagaaaactgcatcaccaccaagagttaaaaatgatccacaagtagactttctaccatcttatctgattaaaaattagaattagtgtacccagtaagttcaaggtcactacttgaatatactagcatatagtctctcgttcttttaagatacttgagaatgtgcttcaccgcaatctagtgttccgaaccaaatttgactgataacaactaacaattcctactacataacatatttcatggtctattacataacagagcctacattaggctccctacaacagatgcatagggatactttctcatgtcctcttgctcttgaggtgtctttggatactgatctttgcaattccatgtctggtcgacaattgacccttcttagaattctgcatagagaacttttcaagtactttatcaatatagtttgcttgagaaactgccaagagcttgttcttcctatctcatagaattttattgcccagaacattgcttgcctctcccatatctttcatttagaatttgtcagccaactaaatctttacatttgataatgttcctacatatcattcccaatgagtagtgtaatgatcgtatactaagaatataagttagtaaggaaattagcactaattaaatgtattatatgactatatgtgattattttattatgtgagccctatttttatgaaaaaggcattaggagttataattttttaatttcagcaattttattaaattttaagtgtattatatattatatatgcaatttattatttttataatttttgctcgacaacaatagaaatgtgacagtttgaccattagagtaacatgggtttagtttagaatctttcttatattgggggtacatttatttgatattggtatatcaggtttagacggggttgtggtggttaacagttttacccttatgttttcagataacttaagtggatagtaaaagggcaatttcgagaatttttcctaggagtttaagtttaatttttttttttatgaacttagtttaattttagtcaactttttttttctttgctgaagtaataaaacatttcaatataaaaataatagatacaaaagacaaagccaacctcttcatctctatctctttcccttcgacctcaagggaaaaacaagaagaaccaaggtgtttctttagtttttttcactaatttcatcagacctttttctcttggtttttggaagctttacttgggcgcaagcatgcaagtttttgaatttagttttttctgaacctaaaaagtttaggggttgttttctgtggtatatttgagttatttgaagtataattggtttgattttgatggttaagtgtcgtgttgagaaagtttaagttgaagaactcaaatttgactcaataatggtgattttgagattctaaattttatgagactctactgcttgggatatgcttattgagccttgtttaggtattctagagagtttttaccaagtctaggattgatttgggcttgaaatgagacttagtgttttctgcagtagaaaacaacaaactatttatgaagaaatggtctaccatttttattggcaggaacccagaaaaacaatttattgtttttcaagcagttttttcgtagtctcatttttttttttgtgtgtcttcaatatttagggtattggcatgctatttattgatctagaaaattttagttttgagtataggtccccgagaaggtttagcaagttgtttacccattttacatgattgtgacataggaccttcattcagcaagtgaatatccattcaagctaactagtacacttgaatctagaaacaaggtaagattagtataaaacgtgtatatgtatatgtatatgtatatgtgtatgtatgttatatgcatgttgtagtatgtactttatataatgataacactagtacagttgcagtatagactgcattggtataatatatgatgttaaatgggtataacaacgttattgacactagtacgggacgaatgtagagtgcatgtggtacaacactcagttatactcggggtgcagtttagccctaccaatactagtacgggatgagtacttagtgcatgtggtacagggggtcgtacttctgttaagagcattcttgatttatctgaagccttataaatatgtgtatgggcgtctagatacaagttggtaatatgtattatattttagggtaaatatcattttggatcttgtgttttgcaaaagttaccaattggaccttctattt

SEQ ID NO: 252042 - DNA, 1597 bp, Cannabis indica
ccaacccaatcgaagagccaattcaagaccagcaatagtcactgccaacttgaaagaatagcagagttgacactcactttcgaaacactcaacgccaccaccaccccgactgtttcacttctcgctttgctagcataatccacataaactcaaattttctcaggttttaggaataccctaacaaatatcctgtattttgcccgtgtcattgttaaatttggtctaacttttaacaaatactaaatttgatgtaacttttaacataatattaaagaaactaaaatatgatatgggcttgagattttttcactaggattactcttaagattttaatgaggcatttttgttaaaaaaaaaaagatatttgacatttcattatagatactataatttaaaagtaatataagatacaaaaatagtattataatgtttgataaaattttccaatacacctagaaggttattgcaatacactttatttgttttgggattcatcagaaatttttagtcattttttttttcatgtacactataattatttagaaaatttttagaaaattctaaataattttaattttaaaaataaaattcaaatatttcattatacataatttttttttcttatacgaatggtaaataaatatttagactttatttttaatgctacaaattattttaatttttataaaaattaacgaataattttaaataattataacaaacacaaatatgacttttttttttttagaatgtacatattttcaagagtgtagtagattaagatcgagtaaccctttattatatatttatgtggatagacatgaaaaggtgatgaaaattgtaaagaacaacttttataagaatgtcaatattgtgttaaatttagcacaaaaagtgaacaaattttatatttagtacaatatttactatgttgttctaatgcacaataatattttaagaggtaatttagtctaaaaaaaatatttaatgacaaataataaattaaatatttaaaaatttactaatatcaatattgtaaataaaatgtatgtattaaagtatttcattgattaatgataaaagtgtaattaaaaaaaaaatatatttattgtgtgctaaatttggcacaatattatatcttatgccaaatttagtttaatttttagcatgtgttaaatttaatacaacttataacacactattggagaagctttctattaaaaagtgctaaaaaataataatacaccacctatttagcactttgttggagatgctctaagatttgtattaaatttagtacaaaaaaaataagtttatattaatatttaactcattatttataattatactctaatgtaaagatataatgacatgtttattaataaacaatgagaatcaatagtgagggagtcatttccttacatttgtttatttaatttattaaaatttaagaaagaattaacttgttaaataagggagaaaagaaagaaaaaacttctcccactaattttataaggaacgtcattaagggtaatggattttatttatttttatttaagtttttaatattaaatttataatgacaattttatctttt

SEQ ID NO: 252043 - DNA, 876 bp, Cannabis indica
actattaagtgttaagtaaattaaatttcacgtgacaatttttgattggtccaagtcattaaattttatttttaaaaaaaaattaatttaaatataccaataagaaaatgacacgtggataatgacttaatatttaatggtcatgtacctatagagtttcagaaacataacttaagtattattactgccaaaattaaacttaggtatttacttgtaatctggagttaaacttaagaatttagagcatctctaatgaaaatacaaataagtgatgtacatgtaaatataactcactttgttaaaactctactctaatggtgtgctataaattgtgatgcaacataataaaaaaatgaatccaatcacaacatagcatgatgcaaaatttgcatcacaataaatgttatgcttttatttatcattatgtcatttttaatattttattattaattttagttagcaagctcatttacattaaatgacttgcattattagtaaattttatatttattttgcattattagtattattttatatattttttaatagattattaagtgaacattaaattatatattaaattttacatcaagatttacaattatgcattaaagtgcaatagtaaaagttgatgtaaaaatatcacaaaactatttttgtgtcaaatataactcaatttttacatttttttttttaaaaatagtcttatgtcgttaattactcttattgtatatgtagtagtgagaaatctattgccatatattttgtacactaaaagtgtatttcaaaataattgtgttattaagaagaaccagacccccaagtcgaagaccttagggttctagaccagtgattgcccccttccagggccttgga

SEQ ID NO: 252044 - DNA, 1971 bp, Cannabis indica
cagggcatcgatgaggtgtacatagagttacaccaagatgccaaagatatatgctaggatatcagatagtatgagttatctgctaccacatcagtacgactagagtattctctctctctctctctctctctctctctctctcgtaaaccctagaaaccagcaaggaaccatggattttcttcagcaattcaaagattatttagcatcattgttgaggtttcaagcttgggtaagcttcctagttcattttctatggtttctttagtttaaacaacttcttttgcataatttttgagatgttgggttcttagttgttagagttgttggattttgtattttagtgatatattagggttgtttgagctgatttgaagttaattgatgggttaatttggtgtttagacaagatttgagttttagaactcaaactttggtttctaatggtgaatcttgattctgtgcatgttgaggtgttttataaccttggatatgtttattggggtataatatgcaggtcttgaaggtttggatttgaattgcttaggtttttgaaatttttgggtcacctggtgtaaaaccggtttcctgaacttttcgtggtcaattcgggttagtttcagagctttagttggttaattccctgttagtttagggtattgccatgttaatttttagtagaaaacttttagtttaaaacctaagtccacggttgtgatttagcgtgtcacttatccatgttatgaacaatgtggtttatggacctgtaattcaccaagaagatgttccactcaggttggccggtaaacctgaattcagaaacaaggtaagattagtataatgatatgcatatatgtatacatgtttagcgtacatgttagttgacgtcagaataagatgtcggggtatcggtgaggtgtacatagagttgcaccgagataccaacatatatatgttaggcaaatatatagtcatcagattagcatattagggtgtaaagaccgcttagtttaagtttggaaattagtagataattagggtttaattatggaaattatttattgatatttaaataattatttatgttgatttatttgaattcagaatgcctttcatatgtcatatagtggaatttaataattttgcattttcggtgcccgacaacatggaacgcggtgtatggctcagtagaatcataatctaatattttagtatagcgggggcggtattgttagacattgggaatgtgaggattagtccggaatttagagttttcccaaaataccctttagtgctttttaatcctttttagtatgggaggggaaaaatgatcattttgccccataaacttttgtcctttagtgaacttagtattaagtaattaatggatttattttggtttaggttggctgaaataagataggtattatgctattttgttcatttattcaaaagattaaaaattggaaattcaagagaattgcttttctctctttctctctttcgaccacttcttaagcagctaggatttgatttattgttctgcatttccagcaagaatcttcaagttttttggagtgcttaagctctaggtaatttcctttagcttttctttagtttcttgaagtttaagaaaatgagtatttttgcatgtttgatgattgtgtggctgtggctgttgttgttgtttattattgttttctaaaacttaaatatgtttaattgagtggattacaacaagttttgatgcatgttagttggatttaaccaagtttggaattttaaactcaaaactttggtttttatgagtgaaatgttatttagcttgttgtagctgctgtggtgagttgttgttgtgttctgaggtttagatatggacttttatgttgtttaatgcttaaattagaagctgtttgaagggttagtcaagttttgagtttttgaactcaagcttgactcatcaatggtgatttt

SEQ ID NO: 252045 - DNA, 1491 bp, Cannabis indica
aaggcaaaaaacaaatattatcaaatgtatgatttttcaagtaataattctttgatattagtatattgtttattaacttttataacttctaaagtaattgtagaaaagaaatcaaattatatagacagctatattgttgaggtgtaactcaaatatctataatatataataaaattcttaaataatagcggttaaaataatcttctatgacatgttataggtattcaaataataattatgtttcttttctaaagttggtactaggttaatttatagaattacaatttggaaatacgagtttttgtgttagaatgccttgataaattttgaaatcaaagggatgggtttgaataaaaagaggattcatgttataatattattaagtatgtggataggtatagtttggaattaataccaaaattattttctattaaaagtggatttaagttcagttaatttgttttagtttttgtattttatgaagtcaatcttgtactcagtgtaacaactacttgaaaactagcataactcttttcaatagaaaaaacatgataaactaaatcatgggctgtagaattaattaattaaataataaattaaagttaaagtttgtatccaagtgttagtatttataatataaaattaaagagaaaaaattttaaattatatgcagtcatataaacaattttgataaaactgaatacgactattaaaaaaaattaaataaataattttctacaatttgataaagctagtgtaatcataacaatagttattagatctaaaatgttagatatagttgtattataaattaatatttttaaaatttgtttcaatgggtattatgttacaaattataacacaagtttgtgtttccactctaaacacataaaaagaccaatttaacttttcctagaaaaaattttattgccacaagattattgtctttgaaattttaaagattattttgctaataaaaattcaatgaagaataatgtaaataaattacattactattttgtttcaactagtagtgtatttcaatatttggtgaaatttatggaaaaaataaattttatattttggtaggattctcggatagtatatagttttggcgtttgtgaattgagaaagtttttttaagaaaaaactatgtaacattaattttgtttcttcaagttttaatatttgttttcatggtagtccttttaaatagggataatgaatggtgctcgaaggttgaagatatgaccaagagtatcacaggtttttatggacagttgttcacaacgggaaccccatctttaccaaaaattgaggagttacttcaagtagttaaacctgtagtaacagaagaaatagactcaacactaagaaaaccgtttgcagccgaaaagataagaaaggttgtgttttccatgtctacagataaaagtccagaacctgatattatgaatgcaaaattttaccaggagtattgggatataatag

SEQ ID NO: 252046 - DNA, 829 bp, Cannabis indica
gttgcccgtgattccaacggtgaagttttcccttctgttgttgggcacatgttgggtagtttctctcctaaaatggtagaagctttagcgcttaaacatgcaaccattcaatgccacctgttgggttaattttcaaaaagtgcaatttgattctaattgtttgaatgtggttctcaagtttaataaaaaggtttctttagtttcttctttgggtttagttttatcagctttgagacgtagtttgtctgttttttattatgccagtctttttttttctgctctagatctatcaatattgttggccattcatttagctaaatatgccttctcaaaagttattagcaaggtttggtggtctgattatccttcttgtattcacaatctcattgttagtaagataaattaattcaattagcttcccctcccctttcgtgattgaaaggtgggttttgaagtttttttctcaaaaaaataaataaataaaaaccaatgaaatattgaaaaaaatacagatattatgaggtcgtttggtaacactatttattttttaattttataaataaaaaaatgaaagtaaaatttgtattttaattttttttaaaataaaaatgtattttataaccacttttaatttttttaattttaaaaatagaaaataaaagtgtagttctatagtctttttatttttattttatattttaatgttatttaagtcggatctaggttcggatctggggagtccaagactggggattaggggcgtagttcgagtcctaaggtccaaattaaaatcgcagtccaaaatatgaattaagaaaaaaaactgttt

SEQ ID NO: 252047 - DNA, 3100 bp, Cannabis indica
taagtgtgctacaaacgtaacgaaattggccttacgatccgtagagacaataaaaagaatggcgaattgagaatagattaaagaggagccagaaagaactacctgcaccttaacccagatataaacactgttcttctaaaccaaacacaaaagaaaaaaaaaagaaagtctaaatggcacacactaatttaaatggactatataagtccttgacaagcaagatgacattttttacttgaaaaggagaaaataaattagacaaaaataaaagaaaaaagggagaaggctacttattgggtttattgaccgaaaccgagcatggtgagaagagaggttcctctcaagccttcttactctttggcttcttttgtttgatttgtggtggatagagagcacggaagaaccaagcagcacataatgctccaatgaatggacatatccaatacacatagaattgatcccatgtgttgtgccagttattcacatatgcccaaccaaacgcctgcaaataaaaaacacacaatatataaggattatttcataaatattctaaaatgacaaaaattttacatttttacagattttaatttttttttatacaaaaatacgagcctagcccaccttagcccacaactgggcctgagtacaacacgatattctttttagaaaataggatcccagcataactctaaaatatttgggaaagataactaacttcagtactaataataacacaaattctaacttaacttagactcaaaatgttcgagtttatgatgaatgtatatcaagtaagaaaacaacttgctcagataattgataatcccacaaacaccaaaaagagaagaggaatgttaagtttgatctcaattatactttaaatgattccaaggagaataaagaaaacaccggtcaaaaggtaacggaatgacagcaacattgtttttcttttggatcagcttaaaagtactttccttttacaaccctgtccatggaaaatggaaaaacctttctgtaagattctaaaagctctcctttttatcacttaatcttctgaaactacagtgacttcaattgcataaagagttctccttccataacttaccctcttaaaattactctgactcaggccctataaattttcttgttatgatttcgtaggacaaaggcacaagtatagtgagcgtaagttacgcctcggtctctagttttctactagaagaaaaaactaactcataattttaataagtaaacaataacaagcaattaacagcaaagaaaggagtgtaatatacaagcagtgcatttacttttcttcttaacaaaatacatcatttttgttagatttttatatctcctaacccttctattttttatttttttcttaaggatttactgataaatgatggcttgataagaaatgcacactccactataacccagtaaagcttcaagttatgttataagtaatataaaagtagaattatataaggagaatttttcttcttggggtattttagagaaagaggtaggaagttgaggattcaattattacttgttactccattcaatttgtttcataattcaaaaccacaccagacataaggtaaaatggagagcaaattgaaattgaagggttgttgaaagtttagaactcaaaatcttaatgtttctcaaaagccaatgcgagccaaatgtttctctctagagcaataaacattactattgacattatcttgtctaattaatatttcaagcttccccctggtttctgaagttgaggagacagtcatttggtttctgtactaaagttttacctcaaaagattaccctcaaggttccattgatgccaaagaaaacatacatcaaatagccaaaaaacaagattcctaaaccagctcaagcttctttaaacaggatagtgtcaaaagcaacaaaaaggttgctactatcttcttccaaataaggagattaactgtattcataacccaatcgacacacaataagttacagtacctaaatcctgtgggtttctacaatcgtcagacaaatggttaaatagaaagaaaacaacaaggaatctcaaacctaactaaaagacttgctaatactcgaagtgaaacaaagtaaaaacaatcttatgatacatagaatataccaagttcaattcaaaaatataatataaatccaaaatccaaatgaaaaattgatcttgaaacgtgtcttttcaacgaataccgacaaatttggcaagtaggattgaaagaatcgaattagagccaaacatcaatatacagaatcacataatatatggaatttaatacgacatcaatcagcgaaagcaatcaatggcaaaagaggaggaataatttacttacattggcaggattcatggaaggtccagtgtaggaagatccagcaacaaccatagtcacggtagcaacagcgagcaaccacgtcttgaaaacagaatttcgagggcccttgagtattataagaaggacagcaaaagtaattaagaaagtcaaaactccctcagctatggctcctgtatgcaaatcaactttcaatgaaggccctccaagcatatgcttataattctccggcatcacctccttgatggccaaagctccagccacagcaccaaatgcctgtcaaaccaactcagatcatattaatctctgtcccatgcaattactatcaacactattcatgttagaaatttggaagtgtggtggagaaactaggatagagtgaagtatatggtaagatgccaaaactaattgacaacgagtgatgtagaatcctctaacattctcctcaagatgttggctatttttgctcatcaatattgaacggctcaatcacaagtgatatttttggatcattattcctgaatcaatatgatgatacttttagtttactatttccgaatcacaagtgatatgatacttttggctcactatcttcgaatcagaagtgactcttttggctctattttttggaccggttgttggattttgataggataatttagtcaaacattaaaatgaacaagaacatgaacactaacactcccattagcaatcttacatttagg

SEQ ID NO: 252048 - DNA, 1042 bp, Cannabis indica
actgcacacacttatgtctgacaagtgtgtacaagtttgtaagtctcctttagtaaaaaaaatcttggttcacattttatgtaacttgtctattttttctcaacatctcgtaagtatggtttgtatttgagatactaaattcttatgatctttgagagcataatatggttatttgtcctttttatgaatcttggaaagatgcatgcattagaataacttgatttttatataaaatatttagttttttgaaaaaaaaaataataattaaaaaaaatgtcgtgtgacttgactgttgggctaaaaaaaattagtcatttgtctttcttttggtaagaatcaacatgtgctttgtttgataattttttatgagttttctcttaaagtttcatttcttattctttatattttatttaattgttgatcacgattgttttttagatcttaatttttggaaaatcttggtttctttttgtctttggcccttatagataaacaaaaagggggagtatttggaattttaatttggattgtatactcaactgtgcagggagagttgaggtttgtgtttgtgttcatctttggtcaaagttagccttttattttggtttaatgttgtacttttcagggggagttttatatttgttttgctaactttgtttataggtgtttgttaatagtttatatagatacatatctatttaaatatagagaattgttgtgcactagtggtgcaacactttttataaatggaatcttacaattagttagcaatattgtttaaaagttattttttttagttatgtggaacttaatatttaattacatcaataactgtatgacacaaaaaatggtattagcagacccaaaaattatagtgaagggaccgtaatttttttgtaaaagcaaagggcaaaaataaatttaaaaagaaaaaataaaagtgtaattaataggatttgaaacttcatcctctaacatattggtaatctaatttaaccattacacaaagtttattattatgtctataaatattatttttttt

SEQ ID NO: 252049 - DNA, 513 bp, Cannabis indica
aaaaaaaaatcgctctatcacaaaggagcaataatcactggccaacaaaaactgtggcatattgtaacatgttaagctacacagttagtaagacatatcatgtagactcacttctagtcttactgttaagtgggaagctccaaaatcaacctttgcaaactgtgtctgtggagcacttgggttcctggatgtagttatcaaaattttaggatctttttcagctacataggggtactcatcatcgacatgaaccaattacaaaagcttaagaaagactaacctaaatactagtatcaataagaatccatcaaataaatctgaacccaaaccaaaagaatatgaacataaataaaaaattcctaattcagactataaatactcgaatcagaacctaatttcttgacatatcaaaaacaatacaataataatgaccaattcttatgcaggttgccaaatttttatcatattataacaaatttatgaatattcagatttgctattatgataataatt

SEQ ID NO: 252050 - DNA, 1322 bp, Cannabis indica
ttgattgttaagtttaaacacgaaatcccaatttttatgtaaaatatatatgtttataaagtttaaagtttaatcaaaattttaatttggcacgattttcaagaaaacctttgattagcaaagacgagcacagtaatttgaaaatcaatgtagtgtgcctaagctttagggcgttacacgcaaacccatcattaatactaggagagaaacacactgaagatttagaaaggttcaccaaatgaccagaataaactttctcataccaacccaaaatatccctgaatctcatgcaactatcttgagaggcttctaaaaaaaagaaactgtcatcatcaaacaaaaggtgggagataacagatccccttctcccacaagaaaggccaaaatattcccaacacgacatttattgttaatgaccgcagaaaggccctcaacacagatcaaaaacaaaagggggtagcggatcaccttgacaaatcccacgagtcagagggatgttacccacaatattaccattcacattaatagagtttttttatcgaggagacacaatgaaaaaccaaggaaacccaaagcttaggaaagcccaaccttcttaccaaggaaatcaaggaaacacactaataggcttttgccatatcaactttgagggccaaaaaacccttcttgcctttcttgtgacgttttataagattcaaacactcaaatccaatcatagcattatcgatgataagtggtccaggaataaaagtactttgttcctcaaaagtaatactaccaagcacactatgcaaccgattagtcatcactttcatcacaatcttataaataacatacataaactgataggacgaaagtcagtagttctcaaaggttatttaattttaggaataaaaaaaatggtggtatcattgagactagccaaagaaccattacctttgaaaaaatccagcaccgcatgacaaacatcgatctcaatctcgtgccaaaatttttgatagaagccaacctccataccatcaattctcaagcttttatacggattcatctggaatagagccgccttaacatcctcattggtaaacgacataagtagaagatcatgcattttaggggaaaacataagcggcaccaaatcaaacatctgactgaaatcatcaacttggggggaatcaatagcaaacaagttctcaaaataagaagtaaagacacaagccatccctttgttcgaattcaccaagctctaccaccatcaaacacccctttgatagccattttattttctttgagcggtagctaacttatgaaagtaagacgtatta

SEQ ID NO: 252051 - DNA, 1027 bp, Cannabis indica
agaaaccgactccgactacgggttttgtccaagccctgggtctaaatccagatcccaatctcgggtccctatcaggttcgatttctgatgccgagtcacgagcagagtcctaggttcaagttcgggtctgggtcgggtactagttcccagtcctagtttggtttaccaagtccctatcctgattctgggtccaggtccccgttattctgtgggtttcggtcccggtctaggttcgggttcgagtcatagtcttggtttgggttaaggtctctgtctgggttttgatctaggttctggtttgggtttaggtcctggtcctaatcctagttctagttcggttctggtttggattttagttcgagtcggagtttgagtcctggtctaagtttgggttcgggtccggatttcaatctaggtccagatcagtcttccagtgtgggttcgcctcctgggtctttgtctaggttcggtccaagtcccaagttccaataccgatcttagtcttgattgattctgggtctaagtccttggtttttatctttgttagggttcgagtttgggtgcgggtctgggtgtagttttgggtctgattctagttgtgcgtttgagttcgagtcatagtctgtgttcgagtttgtgtccaggtctggacccaaatctgggtctacgtccgtttccaggtccaagttcgggtcccgtgtgcgggtcccagtttgggtctttgtcaggatctcagtctagatctaggtccagcatttcgatcccagtctgggtcttggtccgagtccaggttcgtatgcggatttgtatctaggtccaattcttggtttgggatcgggtcccaaatttaggtctaggttcgcgtctcagtttcagtctaggtacacgaccgtgtccgggcccgagttccagtctcagtttgggactgaggctagttctgtgttcggttctaggtcttggtccgggtcctggtcatggtcctagtcttgttctagggtactggttcggcgattcttgttcaggttct

SEQ ID NO: 252052 - DNA, 665 bp, Cannabis indica
tccctaatgcgaattgcatattcaataggcctgggctgggccaggagtttcttcctccttttgagcggagtcacctgctcttcctcagcttcatcttcaagattcaagggctcttgagcatacttcttggcccttgcacctcccttcaacttagcatcacactttagttgaatcagctcattctccttatcagctcccttagcccagctagcaccagatttcctcttcctccccttcactagcttaggaatgaaatattttggatagagcccgtactttacaaagttgtcctcagaggtcaactggatgatattccggtcatcccccagcagctgagcaagctcttgagctctatccctaagggtaagagtgaggggagggcggtgatatgtaaggatctactggaatcgagtgtgggtggtgcccatgccatccaccatgaaatactcatcaacaaaacgcctaattttactgatggtcgaaccgccagtgcccatcaactacttgaagtctggttgagagaaatagaagtaccccgacctgccttgcttagggctggacttcaaatcaaaaaaccagctaacctcgtagggggatggcatatcccacttctgggaggcatagagaacgaagagggcagacagatacttaatgcccttgggagt

SEQ ID NO: 252053 - DNA, 707 bp, Cannabis indica
aaaatattggggcgttacaggtgtgggattgcacaacttaccaagtgtttccccttacggatcacaggactgctgactgtcacaattattttttagattttggtaaatggataatctatataatcacacaaaactcaaataaccaaatcacacagccgaaaaaacaattaattacacctaaacgaaaaatatacatttattgtgtatcaaatttttttatggctaattgtgtatcaaattaatttagtacaatattatatcttttattaaatttgacataattttcatatgccaaattcaataagttttttagcacaccattagaaaattctttttatatagaagtactaacatatgataatgcatcacaaatttgacactttattagaagcttttttttttgaaaaggaaaaatattttagtcaagctatcaccaaaacaagatacaaggcaaggcctcacaaattaaaaattgtgtatcatgagaattatatctttctctctagatgtgaactttaaaaaacaactcattctacttttagactaagctttaacggctactcaaaggtgacatgtgctcaaaattcttcatggcatccactattgtgagaaagaggagaaactacatttaatgcatcaagaatccggatgatagtaattggatttgggatcaataggaaatcactaaatgcttcctaaatcattat

SEQ ID NO: 252054 - DNA, 640 bp, Cannabis indica
agaagaaagaagaaagaaaaagaaaaaagaagtaaaaaaattatttttaaatattatttttttaaaaattttgaatttttttaaatatttataattattttttaaaattaatattacgtgggccattaaaatttacaacatgtactagtgtgtacacgtgggctgtccactgtgacacttaattgtaatttttagacagaggggtacagagcaaaacaaaatgagagtttagtgttaaaaaatttaaaattgaggtggtttagctgtaaatattctttattttattggttataattaatataatcatataaacctaaattaatagatacgtgttatttaagaaatctaaaaaggttcatcacttcatcattttctctctagaaaactgtttgctcgtgtgttgaggtaaaaataagatcataattatattatgtatcataatcagtccacattaatctttgtgtgttatggaagatcaggaagatcgaagtgtaagttctattaccattctaaagatacagcgtacaaaaaaatagcgaggatacatgaaaagtttcaagaggtaaatatatttttgtttatctttttattttttatgtaatgtatattgatatggagatcattgttggaaattatttta

SEQ ID NO: 252055 - DNA, 1869 bp, Cannabis indica
ttagatgaagaaactagaagaaggaatacctatgtttattaagggaaaaaaaaaggaacattgtaatgtgaatgtgatcgaaggtacaagagaaaaataaattaaatatagaaccatgcatatgaacataaacacgctataatattgttattataattattattatataattaatggtgtagattattcattttgaagtccgtctgaatgagttttattaattaataaatttcttaatttattcaaaaaaaaaatatatatatagtgtgtaattattttacaaactaatcgattattaacacatgctgcactccttttaaaaataataaaaaaaaaaaacatacagaaaaaaacagtaatgtgattattggcatataaatgcaatcagctccattcatttaacataacgtaattgttatttataaaatcataaatatatagtaacttgtatatacatttaaaaaaaaaaataataatgtagtatttacaatacaaaattttgggtgaattattttttaaaaataaaaatttaccacaaagctttgttccgagcatttgtgtaagcattaaaagtttgctattatattcaacaaaaacatatacaagtatataatgaaagaattaacggttagaagttttcatattaatagaattagaaatagttttgaaactacattacataaaataataataatggaaataattacctcatgtctcatgataattatagtaagagaaaattgcatcgaaagggtgaagtggcaccaagagctcccccaaacacttcaataagaaggctattaattattaataataataattaaattaaattaaaccttgattgaagtcttcagaggaactccaggagacacccctcccaacttctcatatatcttattttattatttgattcttacaacttacaaactgatcatcctctatttatacttgagaaaatatatatggttaattttttctttttcaaaaaaaaaaaaaaaaatagggtgtacatgtggctagcttcatagtgagcataaaaatgtgaacctggtcaggatatggggtagatgaaggtgttgatgcatatgaattggtgagaatgagagatactcttgctaataaacttttgagttttcttctctcgtaaattttgttatgtactaaactatgctttttaaattttttggcaattaaattttttttctaaactattgagattattagatttaagaatttttgtctatttttatacaattttaccaattcaatgattatttatccctagactttaatgtctattaaattatgttcctcatcttagagaatgaattattaagctgctttttcacttgcttgcccaggaaaatatttttacatataccaaatcatgttgtctgaactttcatccatgttaaacttttattattaaaactggacaaaagtctttaaatctaatcatctcaatagtttaaggtgaatttttaacggtcttaaaagtttagaaatataatttaatatatgtcaaaatttaagtgggtaaaaatcctaattaagctgaacttttttatttataataagtgtagttgcactaaacgacatcctttaattatccagctagctaggctgaattgtacacttatctttggtaaacctctctatagattaaagaacaaagattatcataagatgtagtaactaataactacgtacatatgctatatatattaaacagtgttattataattcttaaatcaaattttaagtcccaaaaatgatatgctgtaaatattttttttttaatttttttttttatttattagtattattatatagttaaaataattctctataactttttaaaaaatttct

SEQ ID NO: 252056 - DNA, 759 bp, Cannabis indica
tctcaccagtggtacttgaagtttgataagactgtgacattatttggtttcatcaaaaacaaatttgaccagtgtatgtatatgaagatcagtgggagtcgtcatatttttcttgttctttatgcagatgaaattttatttgtcatcaaagatttatcattactaaatgagaccaaatttttctgtctaccaactttgatatgaaagatcttggagaggcatcttaagttttgaggattgagatccatcgcgacatgaatcgaaaagttcttggcttatcccaagaagcttacattaatcgtgtgctcaaaaggttcaacatgaatttatgtaaggctgaaactgttcctactctgaaaggggacaaatttagtaagcaacaatgtcctaagaatgacttggatagaaaaccaataaagaacatcctaagtgtagtacgatttttttttatgtatgcttaggtttgcactagacctggcattacttttatagtcaatattcttgaaagatatttatttgatcctggacatgatcattgggttgtagcaaaaaaaaaatcataagatatttgcaaagatcgaatagttttatgcttgtgtataagcatgtcaacaatcttcgagttgttggctattaatattcagattttgatagttgtgtgaatgatttaaattgaacttctcgttatattttcactttaactagtgcaagtatatcttgaaaaagtattaaatagactttaatcacatcatctactat

SEQ ID NO: 252057 - DNA, 775 bp, Cannabis indica
atataaacaagattatattccactgtgttgagaacactataatcattaacaaatacatatgttctggacttaatagaatttatacaatatacaataatcatgaaataaatcatgtgaacaatgcaacataaaatgttatttctaatctttatatattagtaaatctgattatattgaaatgagttttatttagggcacaaaacccaacaatgcatccatgattgatctatgtcatttggttatattgatataggtgaccattgatgagtttagctacgttaaatgttgtgaaagccactttgatcctatgttagtataatcaatggacgagattgttttgaaatacccataattatgataacaaaagtttaagtgtttataaggttatacactatcaaaaaacatatgtagcctaagtgggagattgttggattaaaatcctcaatatgggctcatatgtatattagtgtattgctatttaaagtttgtgggtcattaggtatttaaagtatcatggactaaatatgttgataccctaagcgatatttctaatttattgaggggctaaattagaaacacttaaaattaataacctagctatgaggtaataaattggcagtgccccccaagaaacaagtaaaaaatttctattctcatcttccccaatcaagagaaaaaaattagataactataagtcttgttttctttgaagatcgttacccaaaatgaccacaaagattatctctacaagatggattaagatcatcactatcta

SEQ ID NO: 252058 - DNA, 560 bp, Cannabis indica
gatatatggaaggtgtagagacaaaaattaattgtaagcttagaaattaaagtaattcaaattcaaagagagaaaggctgcctattttctaaacgacaggtcgaaatttgggaaaaatagttcctgagactttagacgaggataccaaaactaaggtaggttgatatgtattatttaattataatgttgtagactcttttattgaatatgtattatttattatatctctaataataaaaatattgaaacattaagtaagtatgactaatacttattaattttgtagagatcatcgcaatatcattgcacaacaaaatcatagtcaaagagcaatgaccttagatcggattcatagtcagacatttttttcctggtttgcacaaaaggtaagcttattttcaattcttaattctttgtattagcttaatgagttcacaaacatattgagtgtaataatttatttattacaattttttttgtcaaagataatcgggataattgactttctgaagatctatattgtctagctaaaggaccaaacaatattttcaatcgattta

SEQ ID NO: 252059 - DNA, 1532 bp, Cannabis indica
attcatgcattaaaaatccaatggtaaaaaccccaaaaattcagattaaacatcataaacttcaaagctccaacttaagcaaaatcaccaagaacttcaagctcaagaacttgaacttgaacaattaatttcaaagttcaataacagaataaaaacacaataaaattccttttaaattctgtctaaacctaacccaacatcaattcaaaagatccaagtacaaacatgctcaaatcaacaagaaaacaccaacatgcatctcaagaccatcccaacctatttcatgcttttcaaccataaaatcacagcagcaaattcattaaatttcagcaatagaaaaactacctcaagcttcaatgcaatgatcaagccacaactcctcaaacaattcttcaatttcaagcttgaataccaagcaaatcaccaatttttcaaccaaatacaaagagagatagagagagagggaagggggctgttttagggttaaggtaaatgcagaaaatgaatttcatttttttacaaataatgcctttagttgaaaataaatccaaaaatacatatttaccattttgcccctagggccatttctcacatactcaaacaatcaagggcattgaattcatttcatatataacacatatttaaataatttcagattattcacacataaataaaatgccaataatttatcccaaaattatatttcggccccgaacccggttcagcccgaaatacccgattgtgactataccgcgccaacttgtcagaacacacctgaaaaaggacacaccagatatactatataataatatagttcataagcacataaataaattaaattcacagttttacccttctcgggtcaaaattactaaaatgcccctaactcaccaacggggtcttaacatgtcatttctcatattaattcgcatataataaattataatataatataattctacaataatactcaattaactagttagggctttgctaatccatttccttaattccagggtattacagtctttcttggttattctcgtcttcagaaagggtataggtgttattgtcccgatctcaacaaatatcttatttctattgatgttacttttgtagaaaatacaccttatttttcatcttctaatactcctactagtcaggggaaggatgatgatttgttggtatattctgtcacatcctctatgcctgctacatgttctgacgagtctcatgctccttcacctccctcggtcataacccccacaatgtctacacctccaccccttccaccacctctcccactcccgtggcctcctatagtgtacacaaggcgccccctcctccacctcctgtttcatgtcctacacctgcatcttcgtcatcagattcggaaatcaaagatgatcttcccattgcactacgtaaaggtaaacgccaatgtacttttcctatttcttattttgtgtcttataatcatctctcctcttcttcttgctcttttattgattctcttaattctatcactattc

SEQ ID NO: 252060 - DNA, 743 bp, Cannabis indica
aattttttagtcaaattttttcacatggtcatgtacgttatagttatttaagacatcctgcaaaattttaagtaatttggaaaagtttaacatgccgaaaattatgttcaaacagtgtgttgtacgcgtgactattttattttatacgcgtgtaaaatagactatttgaacattgttttctatattgtaaattattccgaatttttcaaaattttgtaagatatcttaaatagctataacgtacatgaatatcgaaaaaaattagactaaaaatttttctgaatgccgaaacaagttaagggtgcactagtacatcccttttaagggagtgcattgtagaatcacccaaagttaagttttattctcttataaaaaaatctagatattccatttttgatttcttatttatttattactactactactacttcttcttcttcttcttcttcttcttctgctctgttctgatcaaaatcccaacaatggagtttccctcatatggccacaccactcaccaccaccaccaccgccgtgacgacgaagacgacgatgataatagacaaagaccaaactaccctcctccaggtacacactactcttctttcaaccaacaaccaccaccaccaccacaacctccgacctcccatttcccccatgatcactcaccaccttccgtaacccatctccaccactcaacacccacccaagattatcaaaatccttcctttcctcctcccccacct

SEQ ID NO: 252061 - DNA, 771 bp, Cannabis indica
tcttacctaatatataaaatgtctatctaacagattttgttgtgtacttaacagattgttatatatttaacagaatatactaaaaagttaactttaacagagacaaccattcacaaacacctattcgcacaaatcacaaatgattcaataactttctatgtatatatataagcattaagtggaatgggtatctgctaaaaattaaaacaaacaagtaaacaaaaattaaaagctttgtcaactatatctattccctcgcctaatcggatttttgtatttaaaactcttcagttaacgtcgtcgaccaccaattcagttatttaaaataaatgaaatctaatagataaagtaccggccaccaattaagatatttaaaataaataaaatctaatagacaaagtactggtgcagaatgaaactaatgcaaatgagatgagggagaaagatgcatttatgggggtaattttttttttttatttgggctcatagattctatttaatctgatggtctaaaactaatatcataaaatatgtttattgaatccattccttttatatattaatataaaactaggtatttgggaagaagaagagtagtttttctgggaaagagaggatcgttagaatggttaggttattaaatctttgatttaaaattatcaaaggttgtttgggatatttttttttctttgagatattttcttttattattattattattattattatatttttctcataaataaatgaattaataaataataattaaat

SEQ ID NO: 252062 - DNA, 1316 bp, Cannabis indica
aagggctagagatcttgaacaaaaggagtcattatatttcgctgcaatcagtgtatggttttcttaaacccttatgtgtttatttcattattttagagaattcatatttaggatgttaattaacatagttgttagtaaatctagatcctggtaaaatattcgtaacaataatgtggtaagattcattgagccctgtcaagaaacgaaggaccttctcttgattctttaattttacgttgtcagcagaggcttgacaagtgcaaggaatgcaaggttgcagctcgttgatctcgtcccaatgctcgaagtttggtgaagtaagtcgtaacagagtcatctccttggcatagaacaatgagagattcattgagctcaaagaggcgaggtccattaccttggctgaatcgattagtgagcttcgtccacgtatctgcagtagtgtcgagaaacatgatacttatgttgatgtcaagagaaacatagtggatggtccaagacatcaccatttgggtaaaatggatccaagaatgaaacagaggacttgtaggcgttggttgcagaagagtaccttcaatgaaactagttttattcttggcgccaagagcaaggttgacatccctatgctattgctaaaaattattatctaacagtggtggagtgacaagtattggaccggggtggtcgcctgggagcttaaggaggaagaccactgtgagtgcgcgccatagacttcggtgaagaagacaatgatgatccgaggagaacaacaggaagcgtgtaggtgatccgaaaaaagtaaatgtggtctacgagtcgtctgataccgtcttaggaaagagagcagagaaaagttctttattacaaagaaaatgaaaatgtaagttgaacattatggtcaactgaataaatatataaccaagcagggataactgaacctatagtcaaacagactaaatggttctaataagtattgattgataattcttttttgttttttttttaaattaaaaaatttaattttaatttttcacctaaggctcccaaaccgcttgtgctcgcgttgatatatatatatatatatttattaataatatttcagcaaaaaatacaaccaatattaataataacttgaaaaacgacaccctagaaaaattgagaaaaaaaaaaataagagccatgaataattttcttcttatcaaatatagtttactctaataattagtgtaacatactagtattagttataaagattaagtttcattattttattaaaatatcttatgagatttttattattacttttttgacaaatgatg

SEQ ID NO: 252063 - DNA, 821 bp, Cannabis indica
gttcattttgttttatgttgtcggaagaatttagacaacgtttgacgtttagttgaaaagaatgaaaacataataatgagaatgagaataagaatacgaatggaataaaatttaaaatgtataaaaaaatttgatacaaaaattattaattttttctcatcatgtattagaatggtctttctttccattttaaaatggaattgtctttccaccaaaatagtggaaatgtcattccaacactttactatgcaaccaaacaaagaaatgaaatggagattgtttcctttcttttctattctatttcattagatccaaccaaacgccatctaatgtaaaataaagatttgaaacttaattaaaaaatagcaagtactcaacctagaatgacgagtgtttaaacgaaactcccagataaataggattataataaaagcgatgaacacaagaagtatagtggttcagtctcagatcacggtctgcttagtccactgttgcaaggattttctatcttctcttattcatgttggatcgcccctttatatacaaagcaagtgttcttttagttacacagaacttataattggttataaaaccgttttacattaaatattaacattaaattgaaaaaaaaaaatcgtaaaatgaataaataaaaaacagtttaaattcgttttactaaatataacaacgtatgagacttctatagtgagagttgcttgttcatcttctcgcacaagttcccagacttagggtgtgttttatcataaaggaggctaacgaacgtcgtatccaggtatctgctgttggaatatgttttacca

SEQ ID NO: 252064 - DNA, 1434 bp, Cannabis indica
aagtctccacaataaaaataaagttgctcacaatagaaattctaaagttttgaagaaaaaataaagttcaaaagataaataaactagcttcatgattcatccactccagaaattgacctacatgcaaatttaagaaaaatataaatatgtaatttatacacaataataaataaaaaaaaatcacaattaagtatataactttgtataccttataataacttagtcaacgaccacagtttcaattttcttcttctcctttgatgtttgtttcctttatctgaattatctaaaaaaaaacttatcaaaatataattgaaaataaaataaaataaaaaataaattaaaaaagaagagtaatatatttaccttcttcaagaaagtcataagcttgaatgtcatccaagtatttctcaacttgaatgccttcatgtgatgccttcaaccaattctgagtgcaaactagtgcctctaccatatttggactcaaagaacttctaaatgagtctgaaatacgaccactagtactaaaagtagattcagaggccacagtagaaataggaatagcaaggacatctcttgcaatcaatgacaaaacattgtacctcctagcattatccttccaccaagtaaggatatcaaatgaagaagtcattggatcaacgatctcatctctcaaatacctctcaatatcattcatcttctcactcaaacacttcatcacttcttgttgcaaatatagagataataattttcttttatgaatgtgcttgatctcactctttggtggtgatacactactattgtctttttcaccctcaatcttagatttgttctccatactatagcaagtatacaaacgttgaagggtttgctccaccttgagcacaatctttgtaacaatttcagtatcataaacactctcaaaacaatatttaagatacttcatcttatacctaggatcaagcacaacagcaacaatatttaagatacttaggatcaagcacaacagcaacaggaacaatctttgtaacaatttcagtatcataaacactctcaaaacaatatttaagatacttcatcttatacctaggatcaagcacaacagcaacaaacaacataacattgatgttttctacatccccccaatatttgtcatactttcttttcatactggctgccattacagataacaaatgttcatcacttgaggccaaagcagacaattgagtgtgaatttcacaaatttcatgataaaaggtgtttgatgtaacatgtaaggtaccactaaactttagtgtgacttcataaaagtgcgtagaaacttgacaaatatcttagcactctcccaatcagtactagtaggcggtctaactctcttcttcccactttcattttcattgaagtaactcaagaatctatcatcttcctcctcat

SEQ ID NO: 252065 - DNA, 990 bp, Cannabis indica
atggtaataattagattttttttgtcacacacaaaacaaatttttgtatatgattattatatgtaaatatatattttgacaaaaaagtaagaagaactggagatgtaggaatagatacagttaaagtgaataggattagttaggatttaggattgaaaagtaaaaaaggaaaagtcaatatcagatattgatcaagaagaagctggcttttcttccccaatatagctagttaccaattttggttagaaagatacaagagcaagtttgatatgggagataagatatggaagaaaaccaaaataatggtcctacccataattttatttatgattggtatatgtattcaaaacgcaaccaatatagttggacgtttttttattcagcattgttatttagtattttaaggtgcctaataaaattaataatgatgtaatactttgtaacgaattagtaatttttcatattatttattaaattaaaatgtgtgagactcgatattaaaatgcaacaataataattactattttttgtggtcctcggcaatttgttacttagtatttctagcatttatgtatctttgatataattcatattgtcataaatctttgaaaatattgaatataatgcattaagttccaattcttaagatgtaagaaagcttttcactccaatgagatgacatgcttgaagagacttgcaagcccaaacaaatggaaaagaataattcatataaatatatacatatataatgaggaattattgggtagcaagaggaaaaagaaaaattaatagcaataatagatttaaaatatccacacaaaaaaaaaaaatatctagcataaaatcaattgcatttacaatacaaacaatatcgttaaaccaaaacactaatctagctgattttgtctccctccctataactaatacttaatcatagataaaattacaagaaacatatatttacactagctagaattgatagacattaaa

SEQ ID NO: 252066 - DNA, 737 bp, Cannabis indica
tgggtcgttgtgcatgtattgcatgtatcacctgactttgaagacttttaaattttatgtttatgtattgcatgaatcactctaactcttcagattgttaaattttatgtttagggtttacttttaaaattgataattgttatcctgatcgttttgtctttatttatgttttaaagtttttacccgtgtcattattttttttaagggagaggcatatatcgataaacaatcgatatcccatcgataaataattgtgaagttgagaaattgaaaattagacaaaactatcaacattcaatcgacaaaccatcgatattattgataattaatctactatcgatatacaatggacaattcatgctaaaagctaattttggcaaattattgataaactatttagaaactatcgacatactatcgataatggtgttcacagacctcgacttacttattattgacaatatctcgacatactatcgagaaaccatcgagaaaccataaaaagcccagtaattgcaagaaaactagatctggacctttcacataaaaaataacaaaataacaccaatgcaaaccaaataccatatatatataacggaaacaaacaacatactattttcaatgtttaagaaattgttaccaaaatacttatccattggggtgaatgattcttaagattgaatggtcacagagagatcgagagattggatagatatgtgtttgagagagagagagag

SEQ ID NO: 252067 - DNA, 1224 bp, Cannabis indica
atggtaataattaagatttttttttttttttgtcacacacaacaaaatagatttttgtatatgattagtacatgtagatatttattgtgacaaaagagtaggaagaactgggtatgtaggaatagatacagttaaagtgaataggattagttaggatttaggattgaaaagtaaaaaggaaaagtcaatatcagatattgatcaagaagaagctggcttttcttccccaatatagctagttaccaattttggttagaaagatacaagagcaagtttgatatgggagataagatatggaagaaagccaaaataatggtcctacccataattttatttatgatttgtgtatgtatccaaaacgcaactaatacagttggacgtttttatattcagtactgttatttggtattttaaggtgcctaataaaattaatactaatgtaatactatgtaatagattagtaatttttcatattatttattaaattaaaatgtgtgagactcgatattaaaatgcaacaataataataattattattttttgtggtgcttggcgttttgttacttagcatttctagcatttatgtatctttgatataattcatattgtcataaatctttgaaaatattgaatataatgcattaagttccaattcttaagatttaagaaagcttttcactccaatgagatgacatgcttgaagagacttgcaagcccaaacaaatggaaaagaataattcatataaatatacatatatgatgaggaattattggatagcaagagaaaaaagaaaaaattaatagcaataatagatttaaaatatcccacaaaaaagaaaaatatctacaataaaatcaattgtatttacattacaatccgtatcgttaaaccaaaacactaatctagcttattttgtctccttccctataactaatacttaatcatagacaaaattagaagaaacatatatttacactagctagaattgatagacattaaaaaaaggacagctacgaaaactctcaaaccccaaactaaagtttgaattgtttgctatggtttagcttacgccacagtagatcaaacatccaacctcattttgatgatggaaagacacaaataaaataattgtatacttttaaaaaatagaaattaaataaaaaataaaaagaaaattagcgctcaagtttacccatcacgccacgtgtcaacagcccaccaaa

SEQ ID NO: 252068 - DNA, 608 bp, Cannabis indica
ttatttatagaatcggttctatttttaattataatcgatttgaattattgcgtgtttcttgtttttattcattatgttatataattggttttattgtaatttatccacaatttgagttaaatagtgttatttatttttatgttataaaatcggttatatttttatttaaatacgagacatctacttcttgtgatttttccagtgatttttctgtcaacaatgatttttctggtgacaataactttttcgtcgactttttcggcgacaataacttttctgttgacttttgcagtatcggtgacttttctggcgaaacttattattagaaattttatcaaatttatttattgtcttttttctaatttctcatattttaaactttaattattttttaatctcatatctttttgcattatttatgtatttattttatgctaattagcaatttctcccccgaactttggcatgtactaaatcatgcccctgaacttttttggctgttaaaaattccccctgaactattaagattattaaatttaaggatttttatctaattttaagtaaaaaaaattctaacatggatgaaagttcaggggcatgatttagta

SEQ ID NO: 252069 - DNA, 615 bp, Cannabis indica
atatatatatatatacacaattaaaattactatattacaaatatttgaaaggcattgcaagacgggtttgctatgtttgctataatcctttgttgggtccatttgaaggcaatgctagacatgtttgggaaggacaaagggatagatttattactacacaaaaaaaaaatattttagtaataatttttagtcacaatataatttttttgtgacttacttgtgaataaaacatagtatttaaatacaaatatttgtcactaatttagttttagtcacaacaagtattgtgattaaaaatatatttactcacaattgtgatttttgtgactaatacatttagtcgcggattttttagtcataatataagaatgatcatttataattagttacaactttttttattaaacaaatattgttgtgactaaaattaaattttttttgtagttatataatgtagtcttttagaaaactaattattaaaatataagagctaaagaaatataattcagagagaacatgttggtttcattctgttgtccttatttttgttcacttgacgtggtatctccacatagaaaaagcagaaaatacgttgaagacaggtcagcactaacc

SEQ ID NO: 252070 - DNA, 542 bp, Cannabis indica
aaaaagcgtttttgggaccgtcgcgaatttggccttttgtagtagtgttaaaagtattatttaattattaaaaactattttttaaacaaaatagtgtagtgggactctaaaaacaaagtcatttatgagtataatagtgtcccattagaataaatattttgtgaaagtaaactatatttagtgttttagagtctgttagagatagcttaatgaaacaaaagcaattatatatatatatataagtcgattacatacattaacatacatatcactgcaattatttataatgatatttttggagaaaacatatacaatattcttaacgaaggttcacactgcgactataatattacagctgaaacctcttcgatttgaacctggacataaatattaatttaagcacaaagagttaatacatttttattccccttgacggaaaaacaaattttcaagcaaatttaatttgattttcttggttgtaaaacgagggagcaacgtgttaaaatatatattcccaggtaataaggccacgtgtatttgcc

SEQ ID NO: 252071 - DNA, 1274 bp, Cannabis indica
ggccaatcggggcagtccataactcacttaatgtatgctgatgatctagtggttttcctaaaggctgagaatgatgtgctggattcatttctagagtccatggagaattattgcagatggtcggggcaattgatcaatgttcggaagtcaaaagtctttttttccaacaactgctcgaatgattgccgtgaagatttcctacacaaactggggtatgaagagatgaaacggggagaaaaattcctgggaaatccttttcttatcaaaggtagaggctctgtggattttgatttcattactgaaaaaataagtaagaggcttgaaggatggagggctaggcttctttcgcaggcggcgagatcgattctagtaaaaaatgtcttggcgtcaataccactgtactctatgtcgacttttcttcttccgagaaagacgactgatgccattgatggcatcctgagaaaattctggtggaaaggaaatgttcaagaggggagatttcttgcattaaaggcctgggattcgatgtgcaagcctaaaacctgcggaggactcgggtttagaagaagtgcggatattaatttcagcttaattgctaaactgggttgggacatggcttctaacactcagtccctttggaagtcggttcttctggaaagatactgtcctcactctgatttcctatctacgacgatccccacatcggcttccttagtggcgagaggcatctgggcaaacagagacttcattgcagataactctatctgggcaattggaaaaaattctcaggttaatctctggagtggtttatggtcgagtaaagatggagtcgtttgtgatagtggggaccttaatccgatgtgcaaagtggatattactgttggggatctcatgctgaactctggggagggatgggatcataataagcttgtcttgtggcttagacctgaggcgattaatcgattggagggggtggattttggcactttactgaatgaggacattctgtattggaaatcctctccagacggttcctttagtattaagagggcttattgggacctcaatcggtcgcgattctttgagaaagatgctattggtagtcggatttggaagttgaagatgcatgaaagagtgaaacttttcctttggaagttgtatcagaattctctcccttttggctgcaaattcagagagatttttggttctcaacctggcctttgtatgttatgtggggaaagtgagggagacactgtgagccattttgttgccaa

SEQ ID NO: 252072 - DNA, 864 bp, Cannabis indica
aaaaaagaagcatccgtaaaagtgtaaaaaaaaatccataaaattttaaaaagaaaagttcatttttaagtgtattatgtaaaattttctaataatatactagagtcgttgttcattgtatcacatttagtggatttggactcaactgatccaatccaatcgaattgagtcaactgattcgatctgatccaatagatatgttggatttaatcagtaccaagcattggatgtatgaactgttttttattgaattaaattggatccatatccaaccttttttggccatcatttaaattgaatttcattaaaataaatatatataattaaacataatttaaaaactaattttcacagtaataaaacataaactcaacatatacataataagtattaatttagtcaaatataattctcacgatgctataattagaatataacaacacaatcaaatcgaatctaacttaataagcataagtcttaataaacaagttcaatacataaaatgtaaatatcatataaattataaaataaataaatattaagaatcaattaattaatatacactcacctattcatacttcttcatccatacacttctgtattctaacacgatatcagagctaaactaaaaactcttaactgatccaaatctaaaaattggttaaaaaagagacgagctaaaagagccacttgtgattcaaggataatgtgccaaaaaaaaaccactgtgagctaaaagagccacttgtgatcgagtcgtgcaagattagtgagcaaagaaaataaccactatcttgagagaggatgttagagagttccacattaataatatgtgaaaaactaaataccatacataagatgcat

SEQ ID NO: 252073 - DNA, 1721 bp, Cannabis indica
aaatataaataaaaaagaagcatccgtaaaagtgtaaaaaaaaaatccataaaattttaaaaagaaaaattcattttaagtgtattatgtaaaattttctaataatatattagagtcgttgttcattggatcacatctagtggatttggactcaactgatccaatccaatcgaattgagtcaactgattcgatctgatccaatagatatgttggattgaatcagtaccaagcattggatgtatgaactattttttattgaattagattgaattcatccaatttttttgaccatcatttaaattgaatttcattaaaataaatatacataattaaacataatttaaaaactaattttcacagtaataaaacataaactcaacatatacataataagttaatttagtcaaatataattttcacgatgccataattagaatataacaacacattaatcaaatcgaatccaactaagcataagtcttaataaacaagtttaatatgtaaatattatataaattataaaataaataaatattaagaatcaattaattaatatacactcacctattcatacttcttcacccatacacttctgtattctaacacgatatcatagctaaactaaaaaatcttacagtaactgatccaaatctaaaaatcggttaaaaaagagacaagccaaaagagcgatttgtgattcgaggataatgtgccaaaaaaagaaccactgtgagctaaagagccacttgtgatcgagtcgtgcaagattagtgagcaaagaaaataaccactactatcttgagaggagatgttagagaattttacattaataatatgtgaaaactaaataatatgtgaaaactaaataccatacataagatgcatacgctactcctctgattgccaattggttttgagatgaaaccacatgcaccttaccatagactcacttattcttacttcttcaatcatacacttccacattctaacatattaagaattaatcaatgtatatttttttaaaataattaaataaatatataaatataattaaatgataattggatcactattttattttgttgtctattagatgggatgtctcatccaataattaatctattttcaaatccaattataattaaattaaatactttttgtacatacctctataaaatacagtttgtatacgattaatacagatacatataaacagtatttgaatccatagactcaacttatgagttaatcagccacacaatttttgacaataagtacgtggttatattaaaactatttcataataagaaaagtctacaatcatataaatcacatacattattaatttgagactctttaatatattgtctaccaattaactctaaagattatgaagtaattgatttataaacaatgcaaatgaataataagcctattttctaatataataaatctgatgtagtgtattactgctaattctagaagaggaggtattttaaattaggttgaataacttttacactattatccgatcgatggaattcactttttgatttcttttgtttaatttatcagaaacaagttaaaataattgaagagagcaatactaaaaagaaaatcaatcaaaagaaaggaaaagagtaaataataaagcgttcgccaaatttgagatattgtgattctatgaaaagctagaaagtgaaagaacctgtaaaaattc

SEQ ID NO: 252074 - DNA, 564 bp, Cannabis indica
aaagagttttatttagggcataaaacccaacagggaattctctgttaaaagggcgtattgggaatgtttaaagctttctttggagggagactctaaaatttggcacaccatttggcacaacaacttgcactgccgaatatcgacaatgatctggagagtagctgctggatgcctccctacaagggatagactggtttttgttcaaaacaagggctgtacgttctgtgaggaggaagtggaaacgcaggagcatctcttctgggaatgcccctttgcaaaagctctgtggttcagtggtctgtttgctctaagaacttcctcttttagcgggatggacagtaaagatatcatttcggaagccattcttcttacccctcctggggtaagaaaggaattcttgacttatatgggggttttattcgaagaaatttggagaacgagaaatgaatctatgatcaataccatagcagttgacattgcgacaattagaaacagaatttcacagagatatcatgaattcacttctattttagacccagtttcagtggctagcaagtttggtgg

SEQ ID NO: 252075 - DNA, 1629 bp, Cannabis indica
agtaaataaaagagtgagtgctttgtgtatattgtgaccaagttaaagtattcaagtcttggtgtaattgctttaacaataataaagtaattacgttttcacgtgttgtggtgtccaacagttggattggatgatgttatataatttggctgagggttccttacacgaaaaaatgtatcttcaattaatgaagcctgagataatacctatcacaattcacaatttagaatattgtccccaacaggaatttagaatagaatgttacacttttatttgggcttacattaacttttattggttttattaaaacttgagttgattggatagttctttgttgtgttagcctatattattggtgatcaatagttgttgggcttagcatttgtgtgtgtaaagactaggtgaaataaaagtgtgggcttttctagttaactgaagccttggatgagtaggtccagtccaacaagagttatgtagttaagtctcctccctaactctataaatacatattgtctcatcgcaattgtatactttatgataattagataaaataaaaactacttataatttagagatctaggaaagaagacttagttgatagtgttgcattatcaaatagcagcagttgctatggatcaatcaggtacgcaaaatctaattattatatataggataaattgcgtcaaaatcctcaaaccttttattttgctttcacttaacccccaaaacccaaattcgtgcggcataactcccaaaactgttgtcctgttagttaaaacacacctccatccccctgaccccgttattcgtttacgtggctcagtccatccaatgccaggtaaactcgtgctcgccatgtcattaataatttaatgacatgaaaattaaaaaaagggtaatgaatttttttaactaatggctaattaaaggaaaaaaaaacaaaaggaaaaagtaaacagaaaaaataacatattaaattaaaagacatattaaatcattaaaagacacattatgttaaaacagaaatggtattagaacaatacacacaaaattaaaaccaaactaataattgtaaatctaaaacataaaaagagatagagaagtacttgagaaatcgaaagaaactacaaaaaaaccaaactacaaattatcaccattttcgtgagaaatcaaagtaaacccaaaaaaacaaaaccttttttaaagtggtagagaaagcataaaggggggaaacgcgaaacccagccagcccaagaagagattcatcatcctcgtgggaaatcaaagaaaacccagaaaaattttggaagaagaaggtttttgaaatggtgtatcatcatcaaggtgaagaagatgttggaatttattttaccaggatcttagatctactcacaagtatgttgtttaacatcctaaatatgaactttctaaaacgataattaaacacatataaagttaagaaaaccttacattggttgcagcggaataatatgtctccttccactcagatctctaacccttgtatcctttctgtcgcagagtattatcaagatctgagcccgaatgtccttctctttgaatgtgatccttcacagtcttccaatctatgattgaggtaccacttgctgt

SEQ ID NO: 252076 - DNA, 516 bp, Cannabis indica
attgggtaaaatcaggggcaacactcatcaatgggtaataccaattaagaagtgttctatatatatactaggttaaaattacgcgcaaatacacgtaattcttagtttattacgtgcaaattggatgaagactaaagagcgacaaaagagaggtttcaatttttctttcaacaaagagggcttttggtttgattgttattatttatttatttactttttgttaagttaacgtgaaggtaacgtcaaggtgacccgttatcgccttacctctttattatttgttcagaagtcttatctcgggtgctacaacatgaagaaatgcttggtaactttcaaggccttcgaatcacaaggaatgctctatccatcacacaccttttctttgcggatgacagcctcattctttgcaaagctaataactcctttagtatttcactaaaacgttctctagacttctattgcaaagcttttggacagctcatcaatcaagcaaaaatcaagtctatctttctctcc

SEQ ID NO: 252077 - DNA, 772 bp, Cannabis indica
tttttttttcttttattaattttgaaaaatatcatattttttaaagtgagggctcaaattttttttttttctataacctacaaaatttcaagactgaccctatcttcaagcaaggaatctcgtgatgacgtctatatggggagagaaaaattttctttattaattttttaatttttaagtatttttaaatgattttttagagtaatcggggatgaaattttttatctttcaattttttatacacttattttttttttttgtgataaaatttccttaagtttaattttctttaaaaattgagacgtcagttaaatattaccgttaaatactaactggatgactactgaatgtgaaagaaattcttcaaagtcaataaaataataattcatttagtatttaacggtgatattgacacatcaaatttgtataaaaaataaaggtaaatagcggcataagtacttaaagttttgagtttgtaagcggtataaacccaatgattttatttagtggcataagtacccaatgtttgtaaaactgtaatttttctctattttcgtcagtacaggctccgttttaaaatttattaaaaaaaaaaattggaagtaactgatactacatatttttcgtccagaccaaataatctaaaatttgggtcttatatgtactgatgaaactggaagaaaattacggttttataaatattggtacttatgccactaaaaaaatcattgagtttatgccgcttacaaacttaaaactttgagtaattatg

SEQ ID NO: 252078 - DNA, 718 bp, Cannabis indica
ctccagttctagaacaccactaacttcttttaatgattgagtaacacaattacaatacagctgagagtgattctttgttttggattctctaaaggtgttttttctctaacactcttccctgagaaacttcttcatctataaagcctcccttttacaaaacccaaaatccaatcctctctttctctgtacatttctctctacctctcaatcaaaaactctctcaaagcacttacgtactgttcttttattttctagtcacttgtaaaatgaagaggtatggttgtatttatagatcgaggatatgaatcccgaaaggcggtggcttcaaacatctaagtagttaaatttgattaagacttaatcgacttcttacaatgagatctccaagttaactcttggcatcaagctctatgtagacatgtatcatgcttcttggacggacgtcccaaactgatgaagcgtaatctgaaaggacatcccagataggcacaaagccaactagaacaaactgtccggaaccccttcttgatatgaacaactagccttttggaactcctttctaaaggacgactagctttcctgaaccacttcctagagggacgacaagatccacgagacttctttccggataaacaaactaaccttcttgaactttttttcagatgatgactaggtttccagaagactactttcggatggacaagctagcttttcggat

SEQ ID NO: 252079 - DNA, 498 bp, Cannabis indica
atatatataaatacctggggtaaaagtggtgttgaagtttggagccaaaacataagagcacattagggagtttatcatagttgttgactcactcattgcatcttcgtatggaaagccaagatcattaaacatttggagacgacttagcaaaacctaacaaaatattattattttcaataaattatctatgtacaactcatacttaaatgtccaatatcataccaatttagtattttatgattggtaataatttttcatattatttattacattataatgtgtgagaactaatattaaaatttaaggtgtttattggattacatccaatatttttaggcatattcagattcaatacaattatatattagatgttaaattttactattcaatctgatccaatcaattcaattacacgatcaattggatcagttctatgtattcgatgtatttcatatatatttattgtacggatttatccaatattttagacctagtatt

SEQ ID NO: 252080 - DNA, 684 bp, Cannabis indica
tgttggccagcgcccttactaaattaaagactccttgctctttatgatatttatgttattctatagtaataaacagcaggaagaatatctaccatgaatcaagatcccctatctaaatatgtatcccatattattatgtctaaataatataatgatggcacatcatttaatcttgcgcaagtctgttaactgaaaaaaatgatagaactaatctttttaaagaaattattatcatgatataattaaaataactaaaaaaaaatattaatgatatagtacttttcttctttgaataataaggacatagtattaataggaatcattgatgactaaaaaaaagcatatacctataattcttcttgtaataagaaaaaaatggttgtattaataaaaacaaatcaaaattaattataattgacgtgaaaaaaaaaaaaaacaaattaccagttgtgcacaaatattagaataataaaaaaaaaaaataaataacttaaataattcttttgaatctgttacataaaatagaaataatcatttgtaaatatttgatatagtactttctaattttaactattgtttagaatgatgatttaaagttaggatataattttaactatgtcatatagtacctaaaaaaaatcaatatattcttgttatataacgaaggataaaaatcaattatat

SEQ ID NO: 252081 - DNA, 629 bp, Cannabis indica
gagtgaataatatttatatagagacttttaaaaggttgagagagattttaataaaaagaatttgaaagatgaaaagttgtaaaatctttgaattgtcttcttaaataactaaattaaatattttaatattcctggtaacttttctaattgagattttttacaaagtaacttatgaatagtttctatagaatgcaaagagttagaaagtgattattattaaattattacatgttaaagtttgtttttaaatgctttacattattattaattaagtgatttaaataataaaataataacaaaaattgatatatttgtaaaaaaaaaattataaaataaagaaagtagaagaaagctcttaaattatgccacttcactttttttaaactttcctttatttgtttatatatatatatatattgattctaacgcttaaacaaatgtattgtactttatgtgtgcaagtgtagtccattaaacattattaattatctaagattgcaaccttattttttattacaagtctgcagtgtatgaatttatggcatgtttagtttagtgtaatgggaattgtaatagaatcattattaccattacattgtttgctttcatttttaaacctttgtaatggc

SEQ ID NO: 252082 - DNA, 816 bp, Cannabis indica
tggtgtattgtgatacatctagatggggtgtgggctgtgtgttgatgaaagcagataaagtcaaagcttatgcctcacggcaactacaggattatgagtaacattatttagcccatggcttgtaacttgcagcagttgtgtttgctttaaagatttggcgacaaaacttgtttggtgagcggtgtaaagtttatattgatcacaaaagtctcaaatattttttcattcaaaaagatctaaatatgagacaaagtcagttgttggaattagttaaagactatgattgtgaaattttgtattaccccgagaaggaaaatgttgcagtggatgccttgaaccgaaagggtcctgaccaaactttcaatccagcaatgatttctcctcagttaacctcatatatgtctagggtaaacattgaatttgtaattggagaattgcataacctgacactttagtcaaatttgttggagaggatcaaaatggtacgattagaagattctgagctagttaaggctcgagaaggtgtcttagaaggcaaagttaaggacttctcaatttcgagcaatgagatgttgttgtttaaggctcgggtgcgtgtcccgagtaatcttgagcttaagaaggaaattttgaatgaagcgcacactaccccttactcattgcatccaggtaccaccaagatgtatcaagatctgaagccctattactggtggtacagaatgaaaaggaatgtagtggattgtgtgactaaatatttaacctgccactaagtcaaagcagagcattagttaccagcaggactactttagcttttaa

SEQ ID NO: 252083 - DNA, 875 bp, Cannabis indica
attcaacgccccagttgacatataacctggtgcgctcagttctgcttatccaattttgattccatctcaaacgtttgtgtagttgttcatgttaaatgagagctatgaactcagataagtcaaattcacaactttatatttttactttttcgacagtgactaagtcgcgaatcagacaatttagagtctgtcgattctacaaaatagaaacatctttgagaattggtgaacggcttcaccagaatacaaaaactagccaagtgatgtcaaaatatgacttaggccataaaaatacatcatcaacacgttttcccttggcttagcatcctggttgacatcatatgtcaacctgggcaccaggtgtcaacttgggcgctggtagtagagcagccttccataaaatggccatacctcactcaatattgattcaattaatgcgattcaacttgacactttaagctatttcaatgctctacaaagttatgtctgtcactccaatcacagttcttaagttatcaagtccaaatttcgtcctcaaaagagttatgaatttaagctacaacttacccaaaaaaaggtcttgcgaacacaagactccaaaaattgaagaccgacctccagagtcgatttcaccgtaacatcatcatcagcagtcaaaaatagcttaaatgtatttttcatattttattattattttaatcggacctccttccctataaaaggagcggtcttctagtttgtttttaacattcagagaagtacccataaggttagattatctctctctagaaattagaacatttagacttagctatttttcttgtaatcattctcgtgagattaaaaactcgaagtagacgtagctctattactat

SEQ ID NO: 252084 - DNA, 419 bp, Cannabis indica
agtcctagtggaagagtagaatcaaatttagttttaaaaaactattttttgaatccgatatgaactttagaccccgaatcttatcacaataatacataacacaaatctaatttatttgtatagagatttactttttttttggcctatatatcaggatttctttgctacttttcgtataaacaaaatgaacatccaatataagaactcgacataccagtgtcttttagatcagcctcaagacttagaaaaatagtgggcttttagatttaatgagatgaaaataattttctaatcacagtatatttcaactcatgagacactgtgattgtgattgaaaaaaaacacaacacactagtatgtgtgtatgtgagtcgtgtagagagagagagagagagagagagagagagagagagagagag

SEQ ID NO: 252085 - DNA, 582 bp, Cannabis indica
ttaacaaataaacccaataattaaaccataactacaaaaaaataaaatatatatataaaaaaaaataaaactacggtcgtgatgaaattaattctcctcaaattacgattccatttattagattcgttaactcaaaaaaaaaaaaacatatataaaaaataaaactttacgatcgtgatgaaactaattcccctcaaattacgattccattcaaatcagcaattttactgggatgagatgcaaccaacatcggtagaaaaagaattccaaaataatacgaatgtttctgctatatgacatccgacaagaaccgaaccatgcctcgtcttcgttcaacggagagagccccgtgaatggaaattcgacaccagtgtctgctcctgatagttccggcgcttgtatggccatgaagcacaacccgggtatagccatggattggacccaagaggaacagactgttattgaagaaggccttgccaattgagtattatctcgatatgttgttttgttcaattgtttgaaatttcttcttgttttgactcttgagctttctaactacgttttttaatgaattattttggc

SEQ ID NO: 252086 - DNA, 663 bp, Cannabis indica
atttggatttgacccctactgatattattgcttggattgacacattcatttcagattaccaagcagccgtatctgatattaacagatgtagtggagctcacaaattacaggtttcgggcggggaaaaagtcgttccccaaaatcaatacctacttcaaactaatgcagcgattaacacgacacaaagtaggatggattttggagctgttgttcatgactggcaaggtaatttggtagctggtttttctgcacctgcggttgggaacttgcagcctttaatggcagaggctttgtctttgcggccagtttggagtggtgcatcaatattcaaatccctttggcagtggtggagacggactcaaaaatgctggttgacaaagtccataataagaaggcagatttttcagccctctctgatgttgttgaagatataagatgttctttatctgctttccctgatgctcacctgcgacacataaacaaaacaatcaattgcagagcgcacaacctggcacgaagggcattggggcaagatgaagaatcctgttggaatgctttaattccaactctataatggcttctcctgaagctttttcgtcaaaaaaaaaaaaaaactataaaacaatcagaaaaataaccccatgacaactataatagaactat

SEQ ID NO: 252087 - DNA, 3420 bp, Cannabis indica
taaaaccttgttcttgaaggggtcatgaacagtgggtgtactcgggtagaattagagaaactgtgactgtttttcaggggtgtttctcgagtgttgaagagctgtgattgctcttgaattgatgtttgtattgctactctcttattccacatgttaatgaagaattggtgatgttttctcagctgaaatatggccagggatggaattgatctctaggaccggaaccaggataaaatcttgttgtcttcttcaatttcatttttgcttgagttcattgtgttgttaattggatttgtggtattcaagttgttaattcattgtaggttttagattgattttttgatattattgttgctgaaatttacaatagattcaatccaatgttcattgaatggtggaaccattggattattgagattaattgaatcaaatagtaaaagttaacatctaatatataattagatatattagatgtattaataaacaattattgtagtattcatactaaacatgaatgagctgtaaaaatgaaaaataggagataaaatttcaacccgactaactgagatgaacttttcaacacggtcaactcccgcgggaaaaaaaagaaacttattgggaaatatatagtactagtactagtacaatgaaattaatgaaggtctccactccacgcttactcctactcaaataagcgtttgagattagaagaccctgagccacttggctttccattccacgccactatggcaaattgttcgttgaacctctctgttccatgagcaaagtcaaagaagacatgatcgttgacattttcacagagttcatactctttctctcctctcctacctccacaactaggatgtcctctgtactgaccacttccacaacatgcaactttctcttctttgaaaccatattttgaagggtgatttaatctttcttccgtgaatgtgtactggtcaacaaatgagtatttgaatcctttgagctttgtttccaacttttttagcatcatggaaagttgtgtattgtgtaattttataaagggtaagaatttatcaaagcaattatttcccccttcaagcactctaccgtatggatagcacccaaaatgatccaagtttaaaaaccccattttccttcctccaatgttataaatttcctgactcacataacaatatataatatgatgaatgaaaaaaaaacagataaataaacaaataaattttgaaaaacagggaaccataatgcataccttaatcactttggttaagttgcctatgaccatccccacaaacttttgggtgttagggatggtgatgtttctttcgaaagggaatgagtaatcattgctcccaacactaaagataaaaacagctctcgaaagcaaagcttttgcctctgcattccctaattgttttctcagctgattgctaacgttcttgaaatattcaagctgagtattaagatctatcacctgaaaaaggcatcatcattcattgtgatgagatgttatattatttgtctaaacataaagaggaaagaatgtaaacataaatatagattacaaaaatggtcatagaaatatgtgacatacaactatatctcttccagtctcgaacaaagcaccagatccagctgaagcaaaattcaccccatagctataatcatgatttccagggtacaaatatggtggaatgaaaggtagcttagcatactcagctgcgtacaattaaacaattattagttaattgtatgtggagtttacaatatataataatatacacttgaatttgaaacaattggctataattatattaccaataaaatctgagataagtcgaccatcacaaaatctaccacttgggtacttaaagaaagtttcaccgtatggataataattggcctggcctatagttttgatgtagttattatttccagcatcaaagagtgaatcaccgaaaataaataagcttgctcttacatcaggttgaggataatgacggtaagatttagtatgaattacgaggctgcttatacaagaaaatataaagagagaagtaataacaaagctagattttgccatgatatatatgagacctcgtcaattaataacaaagcaacgtttcttgtgaacatttatatatagagtactactatactcgatgctatgatagatgacattaaattaaagagtattattttataataaataatatatataaataaataaagtgtaaatactattttggatttatattttgcaaagttacccattagtattctattttattaatgataatttggaccataatatttttttttaaagaagtaacataataattcattgagcccctatttaaatcgaacttttctcgggttagaaataatatagaaattgagttacatttgttagagtaagaaatagaaagatgaatttttagagttatgataaaaaaaaaaaaaaaatagttcaattaaaattgggctcaatttcaaggacaagtctttccttgtctattcctggtttgagttttaaagtgtattagactactacgattttaaatcaagttaaagtcaatgttgatagctctgattgatggagttggtaggttcgggatggagtatattgcgagaaatcacgaggatgttggatcgaggctttcaccgttagtcatgttggctgagttcaacctaaaattgcaaaaattattaacatcgaagaagctttaagctcgattatttgtcatcaatggcctagtatttttcttaaaacagatagaatttacatatgccttctgaatttggtcagttggttcataactgtaagagtcttttacttgatattatttcttcacattttgtagaacgatcaatctgtaaataaaattggtcattatctcgctcgtagttcttatttctccacaaattgtgtttttcaggaaaataatttttctcctaaagtacctaatattataatagtagaatttttagttttatcataatcatacatttttattaaaataaataaataataaaaaataaggagaccaaatattgatttttacaaaagtcgcctaatctaaaataatattaatttatatatactcaagatcataatcaggatacgaaaccattgaaattaatgtttcataaattttttagccacttttgtaatctaaatgtgaacttcgaactttgaatgaagaatttaataaaatgaaaaaaaaagcatgtactagactgagtctaataatctactctcacggctcaccgatactaccgcatcaattaatattatcgtattagatcactcaatttgattacatgtgctttcatgttctactacacgtacgtcattaataataataataataataataataatatttgagatattaattttattttttattt

SEQ ID NO: 252088 - DNA, 920 bp, Cannabis indica
taacttattaactcctccttgtggcactgtagattcagaattgcactcttagttatatagaatgctctatatgtaccaagatatagatacgttatgattatccattgttacaatccaaatagtcaaagatcctctatagatgatctacatcaaatgggataaatttactattctacccttcaatgtattttatccttaaaatacttaactacctataaatgatatttcattaaactaatataattactgaagttgaatccatagacaaaagtaacatgaaatttcctaacttgttgcttcgagtgaacatagcttgttgcgttggttcacagttgacgcaaatagtgtaatttttgcatcggttgtgaaccaacacaaatgccttcaaaactgacacaaaccttgcatcaatacataatcgatgcaaaattcaaccacaaattaattgcataaattttttaatttcatttgcatcaaaatcgacacaaaatatcatatttgtagtagtttaattgtctttatatattatgaataatcaatttgtcttctctgtaaatcatagagacccaaatgagaaagaaaaattaattagaaaaccaaatcaaagagaaaggaaacaaaatcaaacatgaaaaataattcaagagtaaaacatgtatattatgaataaccaattagtcttcgcttttcaaagtgtagattaaaaattaataatgtatctcaagaaaataaaatgaagaaactaactttttgtgttacccatgccatggttggttggagctactcgtagagacctgaaagagaaaaaacttactgatgatttgtcattgtcagcggtgtgagggtttgagaagaagaagaccgtcggggtaggcttgagaagaggaagaccgacaatgtgagggcttgagaagaaggaa

SEQ ID NO: 252089 - DNA, 519 bp, Cannabis indica
caaccttgtgcaaaagagcatcgaacaaggacatggagagaggtttctggagccgagttacaaaaaggacaatgggtatcgatgggcacatgtttggttgaaagctgaaatctcgttggaagacaattagaggttactcgccataggaaatctagcacctttggaggaagtttcagctgccataattctttccaaaagcccgaattagcctccatagtgttgcttcctttgagtacttgttgcaaagcgtaagcacttttaactgtgaacaagccattgtcttccttcatccaataccaagtatcattgccaacattccttgtaagaggaatttgccaaaccaaagcttgatctctttcatttagaacatccgaaacaacttctccatcccattccaatgagtcaattttcatcaaagagctaaccatatttcccacaagggctgggtgccgagactcaatgtaaggattcaaatcattggctagccatggatcattcaatatgttcgttgtagaccca

SEQ ID NO: 252090 - DNA, 640 bp, Cannabis indica
taaaaaataaaaatagaaataaaaaacattcctagatatgagaaaagaatgtatataaaaacaaccctagtttggggtgtaatgtatacttatcctttaaatatttaaggtgcttaatagtctcttctgttataaaataatatagaataatataaaatagataagaagaaaaaaagaagaagaagaagaagatgatgatgaagagataaagagaaagtgaatgagaatttctcagctgtttattccaatggggtggacctctatttataaaaaagtattgactaaaggaatggaaaactaaattaatatgtaataaaggaaaatacaatcaagcattaatagtgataattaatatggtgatttggacatccataaataatatttcataataccccccttggatgtccataataattgcctcaataaaaaccttgttgaaaaatttagtcaaaagaaaaagagtacagtgtaaactaactctctctcatttaggcattcgtggagatcttctaatagacgaattttgatcttgtctgtcatcttctcaaatgttgatgttggtagtaactttttgaataagtttgcaagattgacacttgattgaagttcttaaacagtaatatgtattttcttgaaacgt

SEQ ID NO: 252091 - DNA, 596 bp, Cannabis indica
aattatgtgaaccatgcaacataaaatgcgatttctgatctttattaattagtaaatctgattatattgagatgattttttatttatggcacaaaacccaatagcctcctactcccatacttaattaatttttcaggaaattaaatggccagaaattaaagaacaaaagattatagaatttctacatttttaggtgtacatagttgcatatcctacccaccaagtgagttgggaattggagtgtctccaaatttctggtcactttttgaaatgcagctcaaaattttaaagaaaacattttttttgaatagttcatttgctttcatttaatttgtgtttggcccataggcgtacatgaaaagggaaaagtaaaaaatgaatttaaaggaaaagatggttggatttggacacccccagtttactaataatatcgacacaggtggtctgcattccaagctcgtggaatctctaatatgtccagtgttttcaattgatatgccccattacgtactttgtgccagattttgtaaggtccttccccgatgggtcctagaacccccacttttggctatcgagaggctgggaacactcttctc

SEQ ID NO: 252092 - DNA, 745 bp, Cannabis indica
attatcacctcatcacatcactcgagattctggattattacctccgcgacattacgatctcggtcttggtttccccaacatgaacaataacttacgtctctcttcctctcttcaagatctctcaacttaccaaaagctaaattagtttcataattctttatacacttctcatcaacaaagtttctcaaaggaaaagccttcgcctttatcacatggatcccgttactctgctcgaaagaaatgtcttcgtgttctcttcctattcctttatattcttctcttagattttattgtttatctctttgtagtttttatctcttcttattggtcttaaggtttgtctaaatatgttattcttgattgtggtagtactggtactagagtttatgtatatcaagcttctttgtatcaccattcacaacgtactatccccattgttatcaaatctttgaacccagaaaaaagtttacatagaaagcctcctctcaaagtggtcgcgcttatcatagaacggagagactgaaccaggattacacgaattggttcacaatatttttggtttgaaatctgctattaaaccccttgtttgttcgggttacgggttagaactcgaataaaaaacactcacttttaacacccgagctcgaaacccgcgtggagtatttttgggttggactagacccgaccgcacgggttttcaattttttggtttttttggcagcgggtcggggcgggtagtcgggtt

SEQ ID NO: 252093 - DNA, 2600 bp, Cannabis indica
tcattcgttaaatgttcattgtttaataaaaatcatgaatgatgaacatgagaaataaaaactaaaagtgttaaaataaattgtgaactaaaaattcaaagtccgtacttcatagtccattaatacatactgtactagttattgtccactataatccattcacattatatccatatttataaaaatatttaaattaaaaaagtgtttatacatttaatgttcatataataagacataagcatttataaaataatgattatacactaatatattatacacatacttacataatcttaaattttttatctccaatttaaaaaataaaatatataacaaaaaaaataatataaaaaatcatatttatatttcaatttttagtttcattgttatacatatacatacatataatttttacaaaaatcttatataaaagaatacattatttattttattttatatattaaatattttaaatcataaaaaataataattgggttgttggataaaaaaaaaagccacacgagagtttgtgggcgggtacgtgtccaacccgaactcgcacgaaagagttgactgggctggacccgacccgctcatagaaaataggttttcccaaacaaataggttgaccaagttgagcccgagcgggttcgccgggccgagtcaaatacctgaccaaaatattcaagcctactcagataagaattgctgattagatgtgttatataattggactcgtttcatttactgcttatgtaggaaaattacgaccatatactattttttattttattttatttttttttcaaatttacggtttgggttgctccggtaatttctctggtgatttttatgtgagttgctatacgaattttggttgtaatttaggttgaaaagtttttgtgtgaaatttcgtaaaaataaaaaacaaaatactttaaaatataaaaataaaaatatatacgtctaaaaaaaggtataacactacttacgttactacttatatatcaagccaaaggcgttgaaaaacactagttgccaaattagtattgtcacatgccatgtctcattagataagcgtagtgtagtgtagtgtagataaggtaagggcttattatgaattctttcttcctatctaaggttatcattaaattcagtgagaagtaatattgatgttttaaattttcagtgaaatatatcatatggaccacctaagttgttagcttgatgtttcactagtgttttcacgtgaatcataagtgtgatcaaaatagtatgcataaagtattacatcttcatacccttaatggaactgaccttattgaatattattatatataagctgaaaaattatagaccatgtgtatccatttgagatggaactaacaaattcaccaactttatctcgcctacctttcacatcataataatatataggttttgttttaagtatttggtgaaaataattgatatataaattgaaagaataaattgatataggatgtgtctataaatatatctatttttgaaaaatagcattgtttctagttcatgcaaaataatgtgttagatgtctgaaataatgtaattaaagaagataatgttttacaaattataagtgtaagaaaataactatttaatttgtggagcacaattttttgttttctatacagtattatgagatgaagattttattatgaaggtatcagatgacagatattattatatatgtaccaaaatttttgtggacccaaataattgtgtttggtgaatgagttaggatgaagagaacaatagagaatagtacacaattatagagactacaagtttgaaacttgaatccaaaaacgtggacaaccaccaagtaatatgtatctaatcacatgcatatgcaattaattttatatatgtatatatgcatctctatatatgcatgcatgttatactaatccaataggaatcttagaaactaaggtaaactaaacgtgtcataatattttatatatttaatagtgtatatcatagacagactaattaatattgtcatgattaataattttagtgctgcttgccacaatggttatggctgcccatgtaaacattattagtgcggatcaaatgcttttaaaattcgtctctggttttgccatcacgttagcttgctttaattatggtctttgatatttacaataaacaatgcttctattgtgttgttttatattaatattatttaatataatatgtttggtattagtttatattaatagtttgtgtgaaattatattacgtactataaatttgaccacaactctgatttcatttaggtccggtctggagtcgggttcgaggtcaaggccaagttggggtccaggtacgggtcttcagttcgggttcgatcgggtctatgtcgaggtccaggtctgaagtttggggtccgaatctgaatctgttttgggatctgggtttgggtctagggccaagtccaaatatggggctgggtctgaggccggagtcgggtccgcatagtaataggacgttgtgacagtcagtagtcccgtgattcgtaaggggaaacaccgggtaagctgtgcaatcccaca

SEQ ID NO: 252094 - DNA, 853 bp, Cannabis indica
tgtgtctttaaattgctttactatacttcagtcgttataaactacttgtcgcttttaaaatttgactcactgtcgttggctaaaagcgaggtcaacatattacattgctcatattttatgatagtgatctattctggagacgattaaactgttatttgataatatatgtaagacaaagaatccttgacaaactttatatggtttaagtatttagatttttcgtgatgagatcaatagtagactgaaatatcttatagttttcattgactaactattattgtaattaatctttagattttattgagaatctttaaactgtataaagtgtgatgtttcataaaaggccttaagttcctgtgtatagataataacgaaagattaattttgaaattattccatatatatatgcttattgaaggcagcctatggtttactcaagtatacacattcctatcatggtattctgtagtaggcatgctaaattggtacttaatttttcatccttatggtaccaataatgtgttacaatcgacaaaccaacatcttgacatattgtagttggttttagtgaaatcgattggacaggctgcataaatgatataatccacttataagcattcataagtctatgaggagctattttgtaattaagtgtcatatgaatacctacaacttcctctttcatacaaagcgagtataatggtatggggagttatatgtgattaggcgttgtttggatatttacagcatcctcatttgtaaagttagtgttgttgggttttgtgccctaaataaaacccatttcaatataatcagatttagttaataaagatcagaaataacattttatgtt

SEQ ID NO: 252095 - DNA, 597 bp, Cannabis indica
tattaatatatacacatatcctacataaaaataaatattaaaactcaaaccaaataataaaatatatgtttagattaataaataagattctataaatataaagcatgaatagtaaattttttttaagaaaaaaaaaatatataaaaagaacatttactaacgtgttttttagtacaattctttgaaatttttaaaacttcaaactattgtgagtactcttacattttatctattaagtatgtaatttaacttttcttaaaaaaaaaattttaaaaaaatgaataatatgcacaagatgaagccaataaataagaaattatagaattatatgaagaacaatttagagaaacatatcaataagaacttggaaaaatatagctagaaagaaatctcatattcgaatcttcgaatcttaaactgcatcatatctattcttctatttaattagtatatattaagttaaggccattttacaattttgtatacattatttaaattaattacaaaatatgtgaaaaaaaaacttattaccataacttatctatatttaatttatatttaaaaagttattagattattagattattactttattaa

SEQ ID NO: 252096 - DNA, 1068 bp, Cannabis indica
taagtcctatgcaatttgctgatgatacaatatttttcataaaaatgatgattccgttcacaagttgctggatattctaaagactttttgtgctttatctggaatgaaaattaatatgcataaaagtcaaattttgggcttgaacatggaagagaggtagttgaatctttggctaatatggtgggatatgaggtgggacagtggcatttgaaatacttggggttagctctgggaggaaatcctaagaaacaagctttttgggagcccgtgttagcaaaatttgttacacaaggggagaattttcaagtgtcgaaatacttgttgaaggccacgcaaacagaaagcacaagaaaaaagaagtccggctaaaaaacgagatccctattgattccatcatcaataaactcaatgaacaccaagaatagatcgatgtaatttatgatcctaccttaaagaagtttctttgggccaaatataacaccatgcgaagactatggaaagatttgaaaagaaacaagcaaagagaaaaatctctagttgaaaatcttattgattacttgcaaaacaggctagatgggcggaagagtgtgtagttgtctcgatggtgcaaattgactcttattcaatctgtcctatcatcgctaccaacacatttcctttcattgtttagagcacctaaaagtgtcataaactctctagaaaagatgatgagggacttcttttgggaaggaggtgatttggcaaggggtgaccatctggtggcctggaaaacagtatgcatgccttttctccaaggagggttgggtattggtcagttggagtcgagaaacagggctttcctcatgaagtggttgtaaaggtttctagtggaagataagactctatggcacaaaatgatcaaaagtagatatgggaaagctcgtaactttaggattcaaatatgggagactctttgtcgtacagagggtcatggaagagtattgttgcatatatgatgtatttttttacttggtttcggctcaaggttggaaacgatgaaagaatcagattttgggaggatgtttgtgt

SEQ ID NO: 252097 - DNA, 912 bp, Cannabis indica
tttttttttttaaaaaaaattcaattaaatatttcagaccacaattccaaactaatccgttttaagtggattgatttagtttgagcattttattaatgtggtttgatttcaaatttttaaaaaattgttatagtggttttgctttaaaaaaatgtgacaatctagactaaaccgatttgtgaacaccactatcaaatttagtatgctacgaatattgcaatacatcaataacactttagtacataataggaccggtcaaaggttctatatttgtttttgacattggtttccctgaaatcattggagtttggaaatgtttgatgttcgacatatccaatttttgtagtaattcagtaacatatttagtttgtgtcaagtacaaactagtaatgtctcgacagacctcaatactaaggaaaaaatgtagggatgcggtatagtttctccaaataaaaaaagtctctaagagtttcttatcattcatagaaagttgtagactcgcggtagctggtcctggaaggctttcttgtcctttcaagaagggtctacacgaaagctagccctccttcagaaaagaaattttggatagccagttaattcctcctaaaaaggtagtttcggatagtcgacgtcagctggctcttttctatctgggaaggaccttcaaggagtaccttgaacagtgactccagaagccctcatactcgctctcggatgcactcttacttaggctgacgtggagacctcgctcaaaggagagttggttaaagttagttatttcctaattaacttaacaaccttgattcttgcagccactgactttaggatcttgatcctaagcttatatataccatatacacttatcatttcagatatacgacgatcagagagagagagagagagagagagaga

SEQ ID NO: 252098 - DNA, 780 bp, Cannabis indica
ataacatggtttgacatatatatctatatatatccttgtctctataagtactactagagaggtactttcttattacaattcaaaaacaaagaacacacatacttatatatacataaattataattattcatcaacatgatctagtgacaatattgatgatggtgtagaagtagaagaagaagaagttctaggggccaaacatattgaaccaggggaagttgtaccactacaacgatttgggtaacaacaaggggttaaaagagcacattgttcaccaagtttgcgacaacctataaatggcacacatttgtttgcactgctcagaaatcctgcgcagcaagcccttcacaacaaattttcatttcccaaggtaacgcactgcaatactcatcttttatataacaacgatcattactacttgggacaatagtaacactatgtgctactctagtcccatagcaccaccccatattactaaccacaaatagaaaaattattaaactcttcatcatcatcactttttagatgtatatatgtttaaatcttttttcttcttgatgataaatttgtatatagggaggtgtatatatagtggtatttataggagaagttaagctatagtatcgatagctacatataaaaatattattatagctgtaatctattggatcacctcaattatttttcattgcatataataattgaaaatgttagttaatcagcaatccattgagacacctattaacattgttattggacattagtaatacttaattagca

SEQ ID NO: 252099 - DNA, 533 bp, Cannabis indica
taagatattctagaattttctaagtttcttagcttacaaatatagtttctaggtaattctagttttctctaattttcttagttttgtgtagttaatactaaaattttctagataagaaaagtgtagaaatgtgtagcacttttcatcatggaattctaaactagatcatgttatttttacacagataagaaactatgtcaaatattgcattactgaaaatcaagattatcaacctattatggaagactcaacaattaaacttcatagtgatttcataccgtataaagcacggagaaaatcaaagggtttgtcttcttctacactaattgatgcaaaaaacttccttgaagccatttcaatccgttttacattacaggtcaaggtgcctggaaaataaaatatggagcattaatcattaacacaagcaatgttgacattaatcattgtcatctagctaaaaatggattaatataatacgacataacttccgattcatcaaataaaaaaaaaacgttttttgatccgagtgttaa

SEQ ID NO: 252100 - DNA, 1560 bp, Cannabis indica
atacgtgccttgtacgtaacttttttctagttcttatatatgactcaatacttttacatttaatccatgtgggacaatgttctctaatatcttccctcaagatggtagttatttttgctcaccaatcttgaatcaccttatcacaggtcatgctatttgctcacttatttttgttcgaatctcaagcctctttgcaccttctggatctcatgcggctggctaaccatctaaataggtgtggattgaaaacccgttagagatatagctctatgaagcttataaatatacaatactatcaagaacacaaataacttgcaaaagcttgagctagaccatgacctcatgatctttatttatagacaaaggaatacaaggacaaatttgttacaataaaaactagctgtaactaactctcttaaccaaagtcaaagtaactgaaaacatagcaacaccaacagaaaataaactaacaggtgtttatcctatatttatgggtaagtgattttacgagtgttcatccaatccaatccaagccgtactattttctcatagtgcatctgatctacattaagtgtaaattttatattttggatcaaagctagttacttttgaatatttaattatttattaaaaaaaatatttttttaaacataactaataacaaaataaaataaattattttaattatatatattttttttaaaatataaataaatatgtgtggattggaatggatcgattatttttaaatatcaatcaacattcaatctgcacaagtgcagatatccgtactttgtggattggatcatgcatatattatgtattttatgaacacccttaagtgattttactataaattgttgttggggtggttatattacatgtatgtagtcatttttgaatagatctatacatttctacttgtgtattattgattttatgaaacacaataagtcagtgaagttctcgatgttatctcaatttttacccacatgacgtagcatgtccacgtaggtaatattgatgccacgtggagtacaacttgtaagcaagaagaccaagtcatcatacacaacatatcaattgacgaggaggccaaatacttaagtggaacaaagagacaataaactggtcagcttaaggggtctggccagaccctcggtcggccctattgctagcataggctagcagcctccaacaaaggaagggccggccagcctccatcctggcaggcactttttatgcctctacatcttacatcttagacaacacttcatgtcacgaattgggcttcaacaacccacaaaaataggagataatgttcagctatttacctattcttggggactaattaaaatattattgatttattattttaatatgtaacaaataagtgatatctcctcattttaagggatatcaacatatcatctcttgtaagctctcctacataaagtgcactaaactgaacctaatctctcttagtctaagttttgagttctaagtgcaagatactctttgaagctctaagttctaaaaccctagttctctctctctctc

SEQ ID NO: 252101 - DNA, 1111 bp, Cannabis indica
tttttgaccgctgaattaggctctaacccgagctttatatggagaagtttagtggaagctcaaggagttctcaaggcgggtttaagatggagggttggggatggtttatctattcgttttgcgatggatccgtggctaccaagggatgagtctccaattccaacttcggatctaagcgcttataatgacctcaaagttcaaagcttgtttaaggtaggggctagggagtgggatgaggaagtggttcgggacatttttatcgaaagggaagctgagtttattttgggtatccctttagctaggaatgatgctatagattcttggtattggttgaaggaaacctcgggttgttattctgtaaaatcagcataccaaatactcatgaaccgtgataccaatgttgatggaagggctggggattcaaagttttggaaagagttatgggaaattaaagttccgcctacggtcaaagacgttctttggagagcagcggctaattgtctccctacaaggaagagactttttgagaggaaggtgcctttggactatagctgtccattttgcttagtctctagtgaaactatcacacattgtcttcttaattgtgattttgctactgcttgttgggagaagcttgccgtgtgtgttgggggtcgggtttgggagtcttttcgtgactggctgcaacaacttttaaataccgctgatgctgagaaagttgcacaagccggcacgttatgttgggcgatatggaaggctcggaatgatttagtttgggatcagaaaagccggagtgctaatgatgttgtacagtttgcgttaaggtctattgatcaatggaagaaagctcagttgagtgaaaactatccttcgttgaacccgatgtttctcaacaaaggtgatgagctatggactaaacccgtctctaatgggatcaaacttaacgtggacgctgcaatttttgacagcgacaaccggtttggctttggctttgtggtgagggactgtcacggtcagctcttggtggcttcggggtcctctcggccaggacaaactacaccagctgatgccgaagctatgggaattagggaggcgttgagttggttgaagg

SEQ ID NO: 252102 - DNA, 1922 bp, Cannabis indica
ttataattagtttataattgtttcaaaaaaaataatatataattaaatactaaataaaaaattaatacatattcagatttaaataataattgaaatatattcagagataagtctcttttctcttcggttattaaataaaaaccgaagagaaaagtaacatttgtcttcgattttatataataaccgaagataaaagctctttttctagttgtgtatatttttgttattttattttgtttaaaataagagcagtaccggatattatgtttattgtaacattgatttagaaaaatttaataattaaaaatgtttaataaaaatatatataattgctcttttgtatgtaggtttatgggaatcatgactattggggctgggttcgacgtgagacagaggtcaacaggaagttggtggagatatacggtatgggtactatggtagagcattgcctgaaggtgaatatgacttttatttatttaatattctacttgattgtgacttttacaaggatatatatctatgtatttatatgttttggctaaaaatagatgattatgattaaaatattaatcaaattaataagtaaatatatatagataagtttgaacatagtatgaatctttttgtcatttctatttttagtgcctgataaaaagtgtgtttgcctagtgtgttttgaatatagatattgagacaatgtcaagtgttcggtgaaaggcctcagtgatgtgttttgagttttgttgcaacttttgtgcttcaattctatttttggagcctcatagtttgtatattttagatttcatttgtgccttgtgaattctatcttctttattgaattattttattttattcaagtcactttcctttctaattagtataggtcaatttaatatcgaatgtttgtaactagattaaacatattgcttcttttggcctagacaattttcagttttaagtcaagaaaaactgatatcacaagtaaatattggcattacaggcacttattagaggtttcagttttagaaaattggatagcttctaaagcagacaactatttctttcaaaaattccaagcttccaagtggattagttatgtatgcatacatagttaatgtctattaatgtctgtttgcatcaatattgtatcatatttttttgccagtgcaattttttcttatggtctttggttttcgttccatgtactacatacagatgagattattattttggcaacattaggtagttatatgacctaatatcttataagtgtcatagtttatggaaagaaaggagttcaagaaagtgtacttttctaaagtatggaaactgatttcatgagtcacccagtaatgtagcacactaaacatggtgagaaatatattcatgctctgcactaagaattttttctaatatgtactaagatgattcattattaagttagtttcttcttttttagtgatgcttattcgttaatttttttttcttattttgtaagaattattaatagaaaaaatattacagttaagaaatgttaatttattaatacaaattgacccaattaatacttgccacatggcctaattaatgttacgtgatgaagttaagcatcaatatatgctctgattagtgtgtcacgtggacaactgagagtgtgccatatttcatcttatgtggcttgccatgtcatacattgagtcgttagtgtcagctcattaaatggggtccacagtaatttttacctacaaatataaaatattgtaggggaagatctttctccacaatcttttacttacaattaaaaaaaaattgtttatttgtaggtaatgatatttacctacatatgagtgcactactacaaatatcagaattcgcgacggtcctaaaaacgagttttttaggggaccgtcgctaaaaaaatt

SEQ ID NO: 252103 - DNA, 550 bp, Cannabis indica
aatttctaacagttagtatcaaaactatctttttttacctctaattatatatagtatttatatgtatatatatacgtcatacataagttcgtatctacacatacatacatatttgtttaaatatgcatatatactgcacatatatgtttaaatcttatatgattgatttatgtttttgttgtataatgtattagaatatttcatgaactcatttctaataattttatacaataaaattactgtatatatttcctatattttggcattttttttttggaccctatgtatctagtccaaagttttagtttattcatacatatattatgcttatatttattataaattattacgttgatatatatttttctttgggcttttttatttttacacttttaaaaatagttttttttttttttttgtatttttacgaaattctatatagaaactcctattgcaactagcgctgcaacttaaattgcaacaaaaaattatataaaaatttctattacaactaacagtgcaactactttagaaactcaaaccgtaaatt

SEQ ID NO: 252104 - DNA, 1650 bp, Cannabis indica
tgtaatgtgatttacaaattgatatcaaaagtgttagtgatgcgcttcaaggatgttctgccctcagtcatatcagaaaatcaaagtgctttccttccaaatcgccttatcactgataatatcttggttgcttttgagcttgttcatcatctcaaacacaagaaacaaggtagcaagggatactcggctctcaaactggacatgagtaaggcctttgatagggttgaatgggattacttatctgctataatggctaagatgggattcgcaaatcattggatctccctcatcatgcgctgtctatcttcaaatagtttctcatttcaacttaatggagagatagttggaaatgtgtggccaacaagaggtcttcgccaaggagatcctttgtctccatatcttttcttgatttgttctgaaggactttcaaggcttttgagtgatgaggaggaaatgggaaatttgctcggattaaagcttacaaggaatgccctgtctgtctctcatctgttattcgctgatgatagcctcctattctgtcaggctaacaacaactcggcccttgccattaaagaagtgcttgatgtctaccaccgtgcttcgggtcagttgctcaatactcaaaaatcaatcatgtccttctcaccaaacacttcgaatgaggcacaagctttctttagccaaacattggaaatgccgatctgtgaatgtcatgaaacatatcttggtcttccagcatactcttctcataataagcaagagttgttcagcaatgtcaaggagaaaatttggaaattactacatgcttggaatgacaaactcttctctgttggaggtaaggaagttcttttaaaagcagtggttcagtctatccctacatatgccatgagttgtttcagattgcctattgggttttgtaatcaaattgaatccatgatggctaatttctggtggggaacaaataaagatggctcgaagatacattggaagagatggaaattattgtgcaaatctaaatttgaaggtggaatgggttttcgatcttttattgatttcaatcaagctatgcttgccaaacaagcttggaggttatttgaaaatcctaattcactcttaggacgtcttttgaagcatagatacttctctcggaattcctttcttgatgcccatcttggacactctccatctttaacatggcaagattcattggggaagagaacttctcatcaaaggcttgcgatttaaagttggtaatggttttcgaattcaaagtggtcttgatccttggatccctgggcatgatgaattcaaacctatttgttactcaggcccaccttcaatgccggtttctaccttcattcttgacactatggaatggaatttggatcttcttcacaattattttgctcaaatagacattgaccgcattgtcaccattccattaagcttctatcaatcacaggatagaatgatttggcattacaacacaactggagaatattcagtaaagtcaggcttccatcttgctaattccatctctgaaaaaaaccaagaatcgcaatctgatgacttcaagagctggtggaaatttttctgggccttacaattgccaccgaaggtgaaaatctttgcttggaaagtaattcaaaa

SEQ ID NO: 252105 - DNA, 511 bp, Cannabis indica
ggaggtgcatttctacaccttcggatctcgcgagcagtctgtctcaagcggtgaggcgcacgtcatttaacggtctttgaagcgagaactcaacctcctagcatgataagcaggtcgcaaggactccttaactagttttcaattgcatgagtcgcttccctctggtgtaactctggcaatgcaactacaccaagtgacaaggacaacactgagtgaagtgcgccaaaaatggccagttctacaaagagtaccataaccaggcgtcactggtaacccagtagacgccgacggtactaatggtctcctctcaagaggcgctgttgctggatccatttctgaccaacttcaccaccttgagataaggcaggggaagtgattggcagaagagggatctggcccacacgccgacactagtgttggaatttctagctggatagagtcgttgtgtctgattaccccttctgagttagtcgttgtaaccgcgtcagatcatagcgtctttgtctaggcc

SEQ ID NO: 252106 - DNA, 651 bp, Cannabis indica
tttaaggttatgtaaaaatatctaattaaatgaggttaaatttatcattatgtatgattttaattttcaaataaaatttatgttttaatttaagagtacttcgattgtctaggattgtttttgatcaatggaggactgctcaacaacaaaagggtgaagcgttgttgttggtgaataacaacaatggctgcgagcagtggcagaaaccaacggcaaatacgatcaagattaatgttaattgagctatctttaaaagtaagagtaaatacagctttggttgtgttattcgtgaccatgatagttgtttgatagaagctatggctggcaacagaagtggatgtgttgaaccagagcttgctgaaatttttggggtcaaagaaagacaagacttgtcggaggtggtggttgaatcggatgctttactagtggttcaagctatcatagctcggttcccatgtcatctcagtttggattttttgtttaagattattgagaatcatggagttccatctcaaaaccaattggctatgagtggagtagcccatgttctttatatatggctcaatacttttacatttaatccatgtgggacaatgttctccaatatccccctcaagatggtggctatttttgctcaccaatcttgaatca

SEQ ID NO: 252107 - DNA, 624 bp, Cannabis indica
gagccgctgtggcatggtgcggtgcggggcccaagtgagggaggtttccgatgatgggccatggtcgagggcctggaggtagggggagtgaggatcctctgcttcgcagcttcttgatgagactgtacactccgacagccaagagtatggagaggaaagttatggcgattgtcggcatttggtgcgtgagttgagttgttctggtggcggaaatgatatggctacttggaccagtcgactcactaggattatatactaaagggatatttgctccataaatatcatcagtttttggttttatacacttaaatactacatgtttttttttcacggataaaataacttaagttatagttacttccgtcactacttttctattaaatcctattcaaacacacgagtatttgcgtataaatacctgatgttctagattttatacatttatatatgtaaatgtaactttaagtatctgaagaaaaaaaacgtggtatataattgtatgaaatttaaaacatcaagtatttatgccgcaaatactctatgtttgataggatttaatagaaaagtagtgacggaagtaacgaaaatgtaactttaggtatttaatccgtcgaaaaacaaaca

SEQ ID NO: 252108 - DNA, 570 bp, Cannabis indica
aagccactaagggtaagaagtaagctcccaaaattcattctcaactctttctatgtttatctttcatttcagtcatgtttgtctcagtcctgcttaaatttcttctatatatatatatatgtactcatagcaaatagtctgaaaattggggaatattcatgatacttggaattacagtcacgattcttcgccctatcgcttctgggtttggtaatgaaaccccaagctgcgaggcatagcgattattggactgtaattgatgagattggatttcgtatgggctcccgacgttttgatcatgggttaagggctatggcatatgcttagggttacgaatgaatcagattacggggtttcgttacaggtgttaagagatagtgatttcgttactgccattttcaccggagctcggaaccgaaggacccggtttcggtgagatggccgcaccttttctggattggaatgctgacattgataaactcatgttgaatacggaggagaagagggttaaaatgactgatgaaatgagaaggggttatgattctgtgttatggaaaagtaagattttga

SEQ ID NO: 252109 - DNA, 849 bp, Cannabis indica
agtggtggctgctttgtggtctctaaaaattcctagaaaaattaaggtcttcgcttgacgtgtttgtcatgatattcttcctactggctcagggcttttagctcatcatgttccggtttctagaagctgcttttattgtggttggcagtttgatgatgtcttacatgctattttcctttgccctctttcaatttaagtttgaaagctttcagatttttggaatttcgtcaagcctagtctctcttggaagatcatcaacattcttaattatctcatgtcagtattttccccacatcagttttgtctcttcattattttggcttggtgcatttggactgaacgtaacaaggaaaaacatggtaccctgattaggaatgcttcaatgattttgagttgggaaattcaatattatgatagttggattcaggctcaacaattgcataagtatacgactaagttttctcttcccccacgagttattcattgggtagaccctcccagggccggcccaaccaatttgggggccttgggcgaaaaattaaaattgggccttttattaaaaataaaatcattaatcaatacttcataaatttaacttaaaaaaacaatacctcataaattcctttacatttatttagtaaatttaaatattctaaataaaagtacaataaaaatattattcaaatttgttgatcgatctatcccaaaagtatgtcttccttcttcaagtttgtcatatcgaacaatctccaatctataaaacttaataataacattagtttatcaaaattattagaaaaaaaataacacagattgattcatctaaaaatttatctttcttgctttttg

SEQ ID NO: 252110 - DNA, 737 bp, Cannabis indica
acatagtgatatttggggaccatcgcgagtaacaaatattaatggatctagatggtttgtatcatttattgatgaccatactaggacaacatggaccttccttatgaaagaaaaatctgaaactgcttccatttttcaaaaatttcattccatgattcaaaatcaatttaaccaaaagattcaaatcttgaaaactgataatggaaaggaatatttcaactccatacttggtccatacttgttagatcaaggaattgttcacattagttcatgtgttgatactccgcaacaaaatggagtggctgaaagaaaaaataggcatcttcttgaagtttctagatctatcatgttttcaaataatgttcctaaacagttttggggggaagccttactcacagccacctacctcatcaatcgtatgcctagccgtgtattacaattcaaagccccaagaaatttgttacttgcaacattccctcatatctcagctttttcttcagatcttccattcaaagtcttcggatgtacagcctttgttcatgtttatgatcacaacagaacaaaacttgatccaaaatctcacaagtgtatcttcatcgggtattccaacactcaaaaagggtacaaatgttactccccaatttcaaaaagagtttataacactatggatgtcacattttttgaacatcaacctttctttcccaaatctggtattcagggtaggggtgttcataaaa

SEQ ID NO: 252111 - DNA, 633 bp, Cannabis indica
ggggttgagcgttcgtcggggttcagcttcgacgacggagtggtcggggttgagcgttcgtcggggttgagttgggctgtgtaacaactgtcggctgagatgggttttttcttgggtttgttcggctgagagagaggaagagagaggctgatggtttgaaatgagaggggtaatttaggaaaattagaaaagtggtcatatatgaccaattttaataactttgcatttaggggaaaaattataggataatgtaagtatattaattaaaatttccctaatgttattaactaaatattattttacaggtattgattcaaatatttcttataggcacatatttatataaaactaaataaaattatgtttctaattttttttattattttttctaatttttatcttacataactaactaaaatcaatatatatatataggaatacgattttgtcccgtgatgtactttcacggaatgtattccatggtacattagatgggtcttagggtacattaaatgagtgttagagtacgtttttactttttaaccctaattactcctagatcaatctcagacgtcagatcaaataactccctcatctgacggctgtgtacatcacggattacaatccgtgaaa

SEQ ID NO: 252112 - DNA, 1207 bp, Cannabis indica
attagggcttaattatgaaaaatatttattaattttgaattacttagttacgataatttatttgaattcagaatgcatttttatgtcatagatagaaatttcataatttttcatgttttgtgcccgaaaaaattggaacacggtgtttggctattacaatcacatcatagtatttttagtatagcgggacaatatagttagacattaggtatgtcgggaatagtcgggattttagaattttccaaaaatacccctatgtgttttttatgctcaaatggtcattttgccccataagtttttgtcatttagtgaatttgattttaattagtaatctgatttttgtgttaatgggctgaaagtatattaaataaaaaaaaagtgttacatttcatttactcaaaaaataagaaaattgaaaaagaaacattttcactgtctctttcaagctctctgtttcgaaccctcctagaccagctagggtgttgatgtttgttcatcaattcttgttaatttccagcagccttaagtgaatccaagataaggtaagtctctaagtaacttcctccttagtttcttaagcttcaagttgtgaatctttgcatgattttggttttaaggagctgtggttgctgttattggttgttgttgttttctgagattgcattatgtttagatatgttaaattaagcatgtattaatggttgtttgaagatttaaccaagctttgagttttagaactcaaacttggagctttaatggtgatttcaaaatttgagcttgggtaactgtcttactgcttggaaatgatttattggggtataatatgcaggtctagaaaatttggttgggtttggaaacgatttgcttaggctttatttattcttgggttttctgggtaaaccggttacacagattttgcagcatggaatcccgaaaattcaacttgtcgtttcctgctagtttcaggtctttagttggttaattccctgctagtttagggtattgccatattaagttgcagtaaatagggttttggtttaaaacctaagtcctgattgtgatttagcaagtcacttatccatgttgttatcgatgtgatttaggagcctgtaattcaccgagcagctcttccactcaggttgaccggcacacctgaattcaaaattgaggtaagattagtatagtatcatgcatatgttattacatg

SEQ ID NO: 252113 - DNA, 871 bp, Cannabis indica
tatgccgatatgtctagtcctcttatagaaggcttgatttttgctcaagtgtagtgcactttgactatcacattgcactatacacttctttgatccaatcccaactcttgaatgacctttcaaccaaatgacctctttgacagttgataggctagttttataaagtacgttttataaactgtttgagaggtgtttttgttaattatattcattttgtgcagaattacgcttgtaaactatttatttcagatttaaatggcaaaatttataatacgaactaaaaatgagaagaaagatgttaaatgaaattaaaatgatggatttatcatggaatttagagttttgagatataatgggtgaaaaattctaaattttggatgctcaactccgtttgtgatcgaaaatcaaatctaaagttttaaaccaatttttggttatgatgcattcattttcaagaaaatattgcgaataaaagttttaaaaatcgaatattctaaatctaataaaaatgtaaaattatttagaaaatcaaactaaaaattatgtatactgaaataatgctaaatttttggagaagaaaaaaaaaagaaaaacaaaaataattcaaatttgttcccattataatgaatcttacataaattaattttttaatatcttaataaattttaaaataaaaaataattaacttgtgaattgctcaattaatttttcagttttttttttaatttttttaataattcaaaataatttttttttaaaagatattataatatttaaacagtatttttttgaagagagtacaaatgtagaatcggatagttgtcaaaattggaaagaaaaaatgctaatttgtaatgacacaccaccattt

SEQ ID NO: 252114 - DNA, 650 bp, Cannabis indica
ttggaaataataataaatcctacccttatgaccatcggaccccccaaatcccatcggacccgagcatcggaccatcggacccccaaaatcccatcggaccatcggacccgagcatcggacccatcgggcccgatttcaatttgaacaaaccatgaccatcggacccctatcggtccgagcatcggacccatcgggcccgatttctattttgaacaaaccgagaccatcggacccgtatcggtccgagcatcggaccccatcgggtcttcctcttccccaagcaaaataatacccatttcttagatccgacaaaaatttccctaaatctaacaaaatcttaagtttcacaaacacaatcacaaacaaactcaatcttcaacactttctcgcaaaaaaaaaaaaaaaaattaaaaattaaaacataccttggccttggacattgtgggttcggttgggtgtgggtctccgtcggcgtctcggtcggagtgggtctccgtcggcgtgttggtgattgtgattttgggtggaacgcaggtggatcggcagtgggattgataggttagttttgggtttgatttgagagagaaaggaggaagagagagagatggttgagaataatgagaggggtattttagggtttagggaaaagt

SEQ ID NO: 252115 - DNA, 759 bp, Cannabis indica
aagttttttttcacttcatatgtagattctgggaagcagttgtcaaattgaaagatacctttaaaagcagctaaaaattgagtaaaacatttattgctcactctattttctactttaatgttgtaaaactttaccattgttggtaattttaattttttttacaaccatcgaataggggttttagaattctttaacgcaagtctaatggatgatcatcgaaatcattatcccctatatcatctaccccccgcttcactaatggatatggatcatcagctaaatgttcgccatgccaatactaagtagtataacttctttagatcattgtaatatttccttaatcataatatttcctttagatccatttcaataatctacacacgatcaatgaagacgttcgggatttttagaattttttaaagcaaattctaaaaatgcattgaaccctacttgaaatcgcaatgtgtctctttcctcacgtatccatgatttatccataacaaatattctaacaaaaaaaaatcagtatttagtaactaattataactagttactacttacacaatgtaactaactaggtttctcacaattatatcatattaatttatatattactataactcttgttttagtttgattcatgttattaagttgtataagttgtaattaactaactaggttagtgtttagttagtggaatggatctgggaatggaatggctttttctaaagtgaatccatttatttgtttggtttgtca

SEQ ID NO: 252116 - DNA, 4076 bp, Cannabis indica
aatatcactattaaaaaataaaattattgaaaattaagctcaagaaaaaaaaagatagtctaattagtaacttttgcaaaggaatatctaaaagagtatttgcccttattattttagtgttaccatatttagggttttagtaagctttattttttttttttttgctaagaagggttttactaagctgaatattggaaaacccactgaaatggcggattcaattggcagagccctacgtgatggtgccttggagggagaacacgctccagctctcactattaaggattcaattgcttcaccctttgggttcgacgtcttctctcacgtcctcacccagctttcttccaacattttggccggaaagtctcagtcaaggtcgttatatttctccaccaaacaccttatgttcttttttttccttttccaacttcaatttttcatttttcaatgtttaaaatgaatttttctaaatgattgcagaggtctagtgctcgttgcgttttctcgaagcccttcattttacgtgaattttttgaagagaagaggagtagatgttgcttcttctcccaaatggttccattccttgattttctacagtttacttgttaatacttgttaagacacgtaaagagccatcttgatttaattatatctatctatatatacatttgtatgtactgttctttgtaaaagtagcacaatgaatttacattattagtgcttggtgaaagttttctgagctagaaaatcgtacaggattgagattttggattgttacacggaccctcttggttggaaatgtggtttagtggagtcctcagatgctccaagcctctctcgcgaagtttccaacacaggcactatttgtaggaatgtgaaggacgtaaatgagttgttatctagaattatcgaacttggtcaaggtaccaccatcatcatatgttagtgttcatttccaatgataaaattataaatttgataataatgtgtttgtattgtctcttaagcattctgaaaatttgaacttcctagtaatttcagaatgtcttcttatgcttgtaggattggttggacaggggaaatttcgtttttgcactgcaatagattcggtaaggctgcatattcctgaactatagggcctgatagatatgtactttggggtttaccgaagacaaaaagaagtattttgtttaagttagcatactttgatgcatcaagtaattttccaattttaaatgtggatctttggatatataacttcgatgttttgtctgccgaacaatactttcatttgttgttttgttgtttttcattcttatgcctacaatgctccaaatggccttttttttttctaaaaaaaatcattgtctaatgacaagatttttgtgagggagccggaggaagcttccttacaagggcctttgacatggaatggaatagagatgttataagtaatttatttcctctagtcctaagaagaagtttataggaattatagtttgtgatttttatggaagatttattcagtaggctacattgtttttattggaaaatgccctgattttttttttctttcattgtcttgtcctactttggcagcgataagtcatgtttggcttagatactcaattttatcttaaaaaaattacttaacttggcaaatacaacggctttcatctcacaaatgctaattatactttgacacatggaagtctaggttttgtagatgattgtgtgactttactcagcacgggactgaacacaggaagtgattgtcatttgtgatgataatatgactgcaatatatgtcaaacaacatatatggactgtaataaaaatttcggcagtattactaatggattgaagaatctggtttgtccaacaaaattaatgaaaacactgtgctctcatactctcctccccattttattcaaatcaactaccccaaacttaaacaacataattacctgtacaagtaacgaagttcatgtagacagccaatcattactagacactaaaatatccactcacacactgccacatcctcataagatctattaggctgcagtggcattagttgcatccttcttaggcctccaccttgactatgtaaaacgtgtagcacgtctatgagatgattgatgaatagacaagctaggataggtatgctggaatggttattcaagttgtgatctgtaattaatgctttcctttgttcaaggaaatcagatatggtggtgctcttgaattagtatttgggatttttttttcctgctgtaatctttgtcatacaataattttgagtctatttcggggctataaagaacatgatcgacaaaaactctatctgaagatctaaataatgtttaatgttttacattaaaatttaaagtattttctttgttgtaatctagatccaaaatgatgagccatgaaggttttacacttctaatatacttgctggaaaaaaatcaatatgaaaaattaataggtattgctttgtttcaaaggttttgcaaaataaataaaaatattttatcaagtgaacgaaatgctaatatgttcgatattgatgtagcatacttcttgtgccttgtagttattttaactgtttcactttctctctggtcactgtttttaattatttacatatcttttccaggtaagtgaattgttaagacatgcgtcaatgtcctcggtgtcaggccttctaagcaaccttcgtagccatggtatatacataatatacttcttttggtctatgttccaaattttaattgctcacatttattttcttttagtagcattttatttcagtgtagtttttatattttgttttgctcagttccatgtagttttattacatccacttcaatttcttatgccacaatacattacttcagttcatgaatttatttttgggaccatatctcattaggaagtcttaataacttcttgacatttcatattatttattttgcacaagattttgacgttgcatttttttggttatagatcagatttcgagtatcttttggttgctgcattcagatcttcatgaggacagggtcatggctgcatttgagtatatgtcctctatggtggccagtgttgaaccattaaatcaatatgcaggtggacagagaggtactacaaatagcctttctttccttgaacaaaattctgctaaagggaagttaaatgttcggttcaagcgtagaaatggccgggttcgagtggcggtgatctttctctccctttttctatctctctgcgtgcagtttgtatgagtgatgttttcatatcaatctttaaaattttgatttcaattctacaaatattgttcagtccgaggaacttcatgtagagcagtctggtgtaaactttatgtctgtttctcccgaagatggagtaataaatcaaggtttaatcccaaaggtgcgttctcttgttgggtaattttctcaatctagcagtctttctgtttgtctcttgtctcttgcttttgctttttcttctctcttggagcattgttttctcaattggtattacaagatttaattgtttggttatttatcacttgtgacaatatacaatgttttataactgaaacaattaatttggatatatcacctgattatcaaaggtattggtttgttactgaaatggaaattttatatgcaaagaatggcttgcactctttactataatttcctggacttaaaaattgtaaggttaggcggggatcctagttcttgtttttttaaaaaaaaaataaaaaaaaataaagaagaattagttgaaattttgatacttacataattagtgcacatgcccccgaagaaatgaagatgctaatttgcattgtggctcgggcaacataaattgttttcaaagaaattatatttgtatataatgtacatattatttttttcttcaattccttcttttcctagtaatggcaaggaactgtctttttctgcaggtacaatttaatcttcagctgtcagagaaggagcaaattgatagggctaatgttgtacttccctttgaacatcaaggtgaaaggccaacac

SEQ ID NO: 252117 - DNA, 585 bp, Cannabis indica
gtttaaatttcatttattacgactttgcattgattggctaaaaaaattaaattatcattgtggtgctttcattgagagctttaaccgaaaatcttgaagtttttaccagaaaaaatggtgttaacccgaagatctcaagaacaacctgatgaggaggtgtataatacccaacaagtttgatcggcgagcaatcttgccagaaataatggtgagcgacccccgcatcctggtaagggtggtgcaactaccactaacgatgctgcccaaactactgctggtcgtgggaccattggccaaactgtctctacgggatagacaacggttgggcgtaccacaaatgtctctaccgctggaggtggcgctactgatggggccaccagaaggagaaataccaaaatgttgtcccacctaatgatggcacgggccaaactcaaactaattgagaccttagcgtctttagactacggaatgaaacccatgtggatatcaaaagaattgacccagagatggatcagttgcgggacgcgataggttgaatgcaaggtcagtttcaaactgtacattaggagcaaacttaaactcgag

SEQ ID NO: 252118 - DNA, 514 bp, Cannabis indica
tacccaattgattaattactcttgatgccacatatgagtgtgtagccccagagtcaaatagtacagtaaaatagaagttgttgacaagaagctgacctatcaccacgaaaggactagttgcaacattagcttgagtgatagcaaacacgtgagcaagtacgggtttcgcttcttgcttctactcttctttctttgcatgagggaaatctttcttaaaacatccaaccatgtcacactggaagcatatcttttggttgcactcttccagatgatgtttcttacaacgtgggcactcagggtaataataaccctgcatccacctctggcttggttccctcagaactgcttgttttgccccgaatcgcctgatgccggggtaacctttcttttatggtttgtggtggaatcaccactattcctaccatatccaggagtatgaagagcgggggttccacaaacacttggagtctcttgggactcctaaagaaatgtcactgcaccttcggctcgtaga

SEQ ID NO: 252119 - DNA, 1293 bp, Cannabis indica
atggattgtattctgttgatgcgggagaacatagtggtggggtgcccatgctttggcgtaataaggatgatgtgtagttgcttggctattctttttatcacattgatattcagatttcggaagtagcttattctccttggcgtttaacgggtcattattgagaacctaatagagcagttcagtataaaacatgggatttattgagattgttaaagtccgaatcttctcttccttggtgtattattggcgacttaaacaatactactagtcatgcagagaaaagaggaggaaatagatatccacagatgctggtgaatggtttcaatcaagctttatctgactgtgatcttgttgatatggagttagtcgggtatccttatactttggagcgtgggagaggcactgattcatgggcttaaaattttcttgaccgagctcttgcttattccacctggttccaaggtttcgtatggctcagctacataatttggaagtctctgtttcagatcattgcctggtgcttcttgaaccgacggtgccatttcgtcaatttcagtttgaaaatgcttggcttcgtgaaccgttgttcgccaggttgttaaagatagttgggagctttgtgaaggtcaccatattatgaagaaaatctcgtattgtggggtatctcttcaagtgtggggggtgagagtatacaggaaattttaagcaacgaattagccattgcaagcgagaaatctagtattggaagaagcggtgtgatgttatatccgttaagaagttttgggaggctgaacttaatcttagtgaagttatgaatcaacgagaagtgttctggcgccaacgctctaaacaactgtggcttcaagaaggtgatagtagcagtaagtactttcatgctaaagctacttctagaaagaaatacaatactataaatcggcttatgaatgtgggtaattgggttacttgggaggatgagttgccaaatgttatggttgattatttaactaacttatttacttcaaatgtggccgattattccactgtggtagaggagattactccttcgatcaccgtggatcaaaatttgtctttgcttaggccgattttggaagaagaagttagaagtgctttgtttaatatgcatcctgataaatcccctagtcctgatggtatgaccccaggttttttccagaattactgggaaatagtgaagagcgatgttgtgaaccaagtttgtcaattctttgtgactggtagtattcttgatggactgaatgacacaaatattgttat

SEQ ID NO: 252120 - DNA, 778 bp, Cannabis indica
attataaatagtgacaaacaagatcaacaaagagacgaaaaactcatacgggagagttcctaaaaaataatcagaaatctgaataagatagacttgtggactatgcagaattttaactgtaaaactacgtaaaaataagccctgtgttcgtatctttatttctatagcttttatttttctgtgtgaaattactactgtgaggctcaaatttagttaacgaaaatctgtgttaacaattttaatatactatttcaaattaaaataataatgttatcttttaatttaaaatatactcaatattaaaatatctaaccttataattaaataatatatataatattgacaaattaacaaatttttaccacctgaccataatttaaaacatataataatcaatttttaaacttaaacctcaaaatataaaacattaataataatctattaaaaattcaatattatttaatttaaaaaattgatatttaagtttaattattaaaataatattttatttagatattagagtttgaaaattgaaaaatccaaaattgggtgaaaaatcacccatgtgcgcaccaggaggcttcatgcagccatttacccgcgcacacgaggggttccgtgggctgatccgtgcgcagaagaccctactagcagagtgatgtgcgcatgtgtcccctattcgagatgtcgagctgatcgagttcagcaagatttgtctgaagcatccgcgcgcgcagcctcgtcttgtccgagtacatctgcgtgcgatgctcaaccc

SEQ ID NO: 252121 - DNA, 595 bp, Cannabis indica
tttagcgtcgccctgatcagcgtcggtagcgaatttcgcaaaaatcgacgctgaaagggcttaaaaaccgcctctaaagggtgtttttgtagtagtgtgagatgaatttgctactagctttgtaatttacacaatttattccttgatcaaattgcccattataaaatatgaaaaatagacttacgttcctttcctgacattttgaaaattcatttatggtcagtctactatgagaaactataaggaaattataatgcaacagttatatttgcgagccaactaacataaaaccatagaacaactaataatttcacatatttaacacaaacgaatattacaagaatcgtgttttatctgtttaggtcgtatatttgacaattctgagccctattttttataatactatgatgttgtagtagcaaaataattattcaactaacgtgcaacttaattgcaactaaaaatgttaaatgtgaatttgtgtatattaataaaactaaacatgttataaaagtttctttaacgagctttgtactgtattggcgatataaaacacttacaaatataataaaatttattgtatcgttatcagttt

SEQ ID NO: 252122 - DNA, 934 bp, Cannabis indica
aaactttgactaatgcatatcgaccacatcattaggtaacactagttttattatttatgacgttactcgttaattatattacagtattagtattgacctcgctatgtctgttttgcaatgcagctttagattatttattaattaactacaaaaattataatttttatacgtacatataaatcatgtatctataataggatgcttttttggtcttcatgttaaggacactttattacacatttattaatgatctaatggtggcaagaacataaggagtataatagtgaatatggaatttattacaggattacatacctcttctaaatttttaatgaaattttaatacttatttcttttttttttactttatgcaactttttctcctaatttatttatttatttttaatttttcctttttaattaaaaaataatcagtaaaatttatttttattttcaaatggttaattcagactttttttttccttttaaaagaaaaatattttcatgatggtttagaaaaagataagttgatctaataaaaattagtgcacccctctcggtagatcccttattttggcatccaaaaaatatttctaattttttcagtggaccacttgtaaatttttagaaaatttcaaatagtttataatgttgaaataaggttcaaatattttgttgcacgcgcgaactattttttcttatagacgaggtaatcaactgtttgaattttattttcgacactctaaactaatcagaattttatgaaaatttacaggtggtcctaagtactacaatgtagacgatcaagaaaaaaaataatttaaaaactctcatagatgccaaaatatagaagaaggtctatcgaaacaacccgaggtacaattatttctaaaatatttttctttttctaaattaatttgttatgatgaattct

SEQ ID NO: 252123 - DNA, 523 bp, Cannabis indica
gatgcttctagttgagactttctaccaagtttattttttaagaagatgttggaagatcaacatattatgagccaactgcctattcttaataaaggcaccttggttatcatgaatcaggctaggaagcacttttgaaagtcgagcacagataatcttagaaatacacttgtagagggtattgcagtaggcaatcgacctatagtcactcgcatccttaggattgttaatcttgtgaataagggaaatagtagtctcattgagatcttttggcaggtttccatattgaaagaatcccaaaatggcttgagaaacatcctctccaatttcattccacaaccccttgaaaaatcttgaactaaaaccatctggacccgggctcttggtggtgtggatatcgaacaaagctttcttgacatctgacttactgaaaggccaaatcagttggatttgttgagggagatctagcttgttctcaaaccccaggctttccccttcaatctttctagtagctgagcttttcttc

SEQ ID NO: 252124 - DNA, 580 bp, Cannabis indica
taaaatatagtatttagacacaagttgtcactaatttacttttagtcacaacaagtattgtgactaaaactaaatttaatcacaacaaattgtaatttttgtgactaatacatttaaccgcggattttttagtcacaatataaaaatgataattaataattattcacaatttttttatttttagttacaaattttattgtcactaatttttttttttttagtgtttattattttaattttctgaaatatgctagattaattgcggtttgactagatctcttaatattttttctcttttttgacattggactatctctcattgatgatatatagaaaaagacttacagtatttaatttattagctatattcacatgatagatcacaatcacatgtatatctaataaatataagtaaataataatttgcttatatatatcacatgtacgtataggaggtatgttgatgattgttcatgatttttgaattttcctgtaacataaatttattttaattaattgtgttttttattaaaaagaaatacgtgttatattcaaattttaatttatttttcatttcaca

SEQ ID NO: 252125 - DNA, 722 bp, Cannabis indica
gggaacccaagcaatagtcgcctggaatgagtttccaaggtcggatgaagcttgtgaaatttgtgtcttctgatctgtgttctttcatactggataagaattaaactttaaaatcaactaataagaaatcgaaattgttaggtttattagatctcctacagatctcaaccctccatgtctaagcagtcagatatgtacaatcttccttagagccttacaccactgttttttcagctttcaattttctcttacatgtgaacgatatgttacctgaataatgataaaagtttaatatataaagtgaaataattcattttgaaattatttttgagataaataatataaatagtatagaaaatacatataattttaattaattagagagtaaccacaacattttaattaaataaaattatagattattcacctcatattgtttttatctttaattaagagtgataaattcaactcaaactaatgtctaaaaaataatcttgaatttgaagaaattaagaacatgtattccttttgcttctattagtgtcaatggaaactttggcttgttgcttgttaagaaaataaattagttaatcattgttaattaattaattaattgtgtattcactggtttattaagtttgttatattgttttctgcaattgcctttttctgttttgagttggtctcctctttccaacattagggccacttgtctttcatct

SEQ ID NO: 252126 - DNA, 877 bp, Cannabis indica
agcttatccttggtgaggagacattggccacaattttccaccatagcattttaagtctctcatagatttttgaaccccaaataattctccacttgttgtcacagtcagccatgacatccacattcttgatcaccttgtaagccaatttgactgagaagttgtcgttgcattctgggagccacaaccatgaatcctcccgaggtgtacttggaagcgagatatttaaaatgcgcttagcatcttcctctaggaaccacattcgaatgagtggttcattccagccgccttgagaaataaagttgcgcaccatactcattccagcagaggcatcaaacctggggttgggttgaagggtgccccccggtacccaaggatcgaaccagatggaagtcgagttcccatcaccaattctgcgacacaacccctttcccaaattggctctggcctttaggatggctttccaaagaatagaatctgaagttttgatctctacgtccaagaaattccaattctttaaatatttggcatccattaattgacgccaaagactttccttgtctgttaaaattttccaagcccacttcattaggaatgccttattgattgcttcacttgattttaatcctagtcccccattgactttaggacggcaaagagtctcccaggcaattggatgcagttttctttgatgtggagaatcaccccaccagaaatcccttaggagtttatcgatttggtttgccgttgaagatggtataacatcggaggatgctacatagttagccaaagaggaaccaacattcttgataaggcacgccttgcccgcataagataggagcttggatttccaaccttgcactctagacaacactcggtc

SEQ ID NO: 252127 - DNA, 647 bp, Cannabis indica
ataagtccaaggccccgcaagaaccgtatagccaaagaagaacttaatagagttcctataggaagcacataccgggctaaatatctaaggaaaggcagagttcctggcaagttccaagccaaaaggcagagttccttgcaggttccaagccatagactaaactttgggcaaccgtacccaagggtactcgccagatagtgtcattgtagaaggttgggtatcagcaaagtacagtcctaggtgtaacaacttagacaaatttagagtcttaagttgaacattcgactataatagactcactattaaatttcatatagagtttcttagggaaccacgtatgagacttatgttgcatatgcctacaaggccataatagaattcttgtcgaggtcaaaagaggacaaaacactagccacccacttggaaccaaggcctaggccagtcagagttcctaagctttgagagggtaggctaaggtcccatgacccggccaacaaccagcttgggtcaccaaacttaggcatgaaccagtcagattctagggtgaaattctagaacccgccaactcctatggaaaaaccctagagccagccacgtctcaaacaagactcctagggccagccaggttagtttcgaatcaaattttg

SEQ ID NO: 252128 - DNA, 974 bp, Cannabis indica
tctagtgatagagtaccatgcccacacatagcaagtcaaatgctcaatcatagtgcggaaaacagtggttaaccaaacccgaaggagagaaggagatccaggctcagattttgttattactctgcgacagaaaggaacaaaggttagagatctaagcggaaggagtcatattattctgctgccatcaatgtaatattttctaaactttatatgtgtttatttaattactttagagaattcatattttgggtgttaatcaaatatacatgttagtatctagatcttggtaaaataagttaagttccaacaactagcctcagagccatggtaatgatttagtttcatgaaatatggatttaaaacgataatttgttaatttgaatttgttcatgttggtttatgtgtaatttgatgaatgtttataaattataaaaattttccataaaaataatttattttttgttctgaaaataatttatttggattccttgtaaaaaaattaagcaaatttattttttacaaaactcaattctgataaaaattaaaaaagatatggtgtttaaagtttcgggtgcatatggtgtcgagaaggggtgcatcacacgaatagaccctcagacaagacgaggtcgcgcatagatttagacatttcatgtctgaagacacggttagctccacgttcggacacgaggatgcacgcccagcaccctgctagcaatagcaaggtctttcgcgcgtggatcaacttctaaatcctctcatgcacacacgttgaaggctgccatcagccctgtcccctcgggtagcccaaggctgctatgcacctaaaattcgatttttcgggggattttttccacaaattttcgaatttttttttaatttcaaatcttaaaattctaaataaaatataatttttaatatttaaacctaaatattaaattttttaaattaattaatttaattttttttaatag

SEQ ID NO: 252129 - DNA, 947 bp, Cannabis indica
tgttttgctgtgatcattaaaagatatataaattgttagatttgatatggacttagcaactttacggattctggtttgtttcttgtttggaaccctggataagtaccctgtgttgtattataattttcttacatatataatgtatactgtcaaaattatgctattatatgtcgctacatataatgaaggggatatatagtcattgtctttgattatgatacacattatgatacactagtaaatctagctgctcttaagaataaatacaaattttagttctatattttaaaattattagtcgttttttatatttagttaaactataatttagatattgtgtttctcaaaataaagtataatgatatactctttctaattataatcaaatatttttatcttattcttaaaactttctcttagtaaccttcaataacgattgtgatttgtatttattgatttaattactacataaccaaacttacaattaactaccgaatcaaataaatccaatctaattataaaaaaatgaatatcaagttaccattggattggattaaatcggttttttaaggaaattttaaaatctaattaaaaatcgatctaatataattacatgaaaaacatattttctttattcatatataataagaaaaatattcaaatttttctttttatttgttgttcattaattttcgataaacgtgttatacttaactaaagaaatccctaaaaaaccctaaaaactcgtgtatagtttagtttttatgcattttttgagccgacattaaaacttaaacgttgaatagaaataatatttatgatgcccatccatagtctaaactatctattttttactaggtaccaaatagccaaataaattgtaaataaattaaattacataataattctaaatttttgatttttgataatttttttagctaattatg

SEQ ID NO: 252130 - DNA, 1229 bp, Cannabis indica
atatgcacattgttattaataataaatagtaaataatcttaatatattcatactcatatagtaattgtccttaatgtgatgaaataatttataataagtgataacaacatatgactttaatatttactctttgtttcgggaaagttaaaagcatatttaatgtgttttgcaaaatttaaaagaaatataatgtagcgaaaatgaatgaaaaaatgttcttgaaattaaagaatataattattaattaaagtgttaatatagaaaaccctatgaaaaataaaactaagcataattatcttaatcttccatcgacgcaacaatttgtatggtgaattaattgtgctttgggatcatccgttattttagatctacatacaattggattctccatttaataaatgataatttctctatagttttttaaaaaaacaaacgatgtttctgcaaaatttaattttaatattacttttattaaaataaattttagtgtgtaattgcagaaaatatattacttatatataaatataaatatatgatattttaaatatgaaaatatacctcattatttgaataggactttaattgaaccccatgattacagtgatgctaccaaccccaccaaggacaagatttttagtgtttaagagcccacggggccacaatattaagcagacatatactggctttctcaagagcagtctgcccctcttcaacccatattctacatttttcagttttagatgaaaaatttacataatagaaaaagatatataaatctcatttttcttaagaaaaaccaagtgtatcacacattgtagtatatacataaaatactacatctagagcttacaattagatatacgtaatactaagtactaactccattgaaacacaaaaattatatcaagataagatattaatgacacacttataaagatatcaatatgtatgaataatatgtatgtttttgtagaaagcagaagaggatgacgaggactgtgaaggcgaataaggacgagacaaagatgagggtggccttgtggctgacgtataatccgcgtctggggtgaacattgttattcttatgaacccatggttactacaccactttagattgatatgttttgaaggaaattaatataatatgtttgaccaagaatatggatgcaccatacaatttttcaaaactattcttttttatcgttaatagtattatgaagcaatattat

SEQ ID NO: 252131 - DNA, 3248 bp, Cannabis indica
agcacctgcctttgtcatcccagcgtccacccaaaccatccctgccccccatgtccagtttggctctatagacagctctgcagcctcctcttctagtcccaccacttcccaaactcttgccattccaaacacattacccaccactactggtgatccaaccgaagtcaccacaccagctgttgaaataccacatgctcctccacccattccccaaggtcaccacatgcaaacaaggtcaaaatcaggaatatataaaccgaaagtctaccttgtcactgcctcccaaaaccctgactttgccattcccaaaactgttaaacaggccttacaatctcccaagtggaaaccagccatggatcatgagttttacgccttaaaacggaagaaaacttggacccttgttcttcctacacctgacatgaatattctcactaataaatgggtttatcgggtaaaatttaacaaagatggcagtgtgcaaaaactcaaggcacgtcttgtcgctcggggttttcaacaacatcctggtttggatttcaaagacaccttcagtccagtaatcaagccgtgcacaataagagtaatgtttgctttagctgttacctttggttgggaaatacagcaaattgatgtaaacaacgcctttctcaatggcgatttacaagaggatgtctatatggtgcaaccggttggctatgaggatgagacaaagccaaattatgtttgcaaacttcacaaatcactttatggactaaggcaggcaccccgtgcatggtttgaaaactaagcttgctttagttaattggggttttcaacagtccctctcagacacttctctgttttatactcagaaaaatggctctcctctattggttttggtctatgttgatgatctcctaataactggaggaagcaccactgccatcacagctctcatcaaagacttacatacaaatttctcactcaaatctcttggaccagtcagttatttccttggatttgaggcatatcgaaatgcatctggtttatatctcacacagtccaagtatgctttggatttacttgataaaattggctttgatgatgccaaaccatgtgacactcccatgatattgtccaacaaacttgcagcacgtgatagttctccttttgaccaacccgaactatatcgcagcaccataggtgccctccagtacctaacatttaccagaccagacctggcctactgtgttaataaactcagtcagtatttacaagcccccacagtgaatcaatggaacgcttgtaagagagttctcaggtacatcaaaggcaccccacatcttggcctgcactttaaaccagctgctgttcttgatcttcaagctttttctgatgccgactgggcatccagtttagatgacaggaaatctacgagcggattctgcatgtttttggcaacaatctggtcaattggagttcacgaaaacagagggcagtagctcgatcaagcaccgaatctgagtatagggctcttgcttcagctgcaactgaattagtttggatcagctccttgctcaaggaactcaacatcaaattacacaagaatccaccagtgctgtggtgcgacaatcaaagtgcccaagctcttgctcaaaatcctgtgtttcactcccgtaccaagcacatagaactggatgttcattatatccgagatcaaatagcagctgccaaactcgaagtgtgctacattcctactgcagaccaaactgctgatattttcaccaaacctttatcttcccctcgattccagtttctttgtaacaagctccacttagaacacactaagtatagcttgaggggggatgttagtgaatagttacaactgtattgggtagttataagttagttaattactcagcttctttatctccttgtaacaactttctgttgtaacattattgtattcatcatatataaataacactcatatgaggtttagcagtatcagctaactcacttttcacatctcatctttccaactctactagcataccagaaaagaatggtatagttatgttcttcctcgctgtgacttgagtagaaagctttaacttgttattttgcattggtttgcttttaaaagttgttatcaatgaataaaggttagaccttaaagcatacacatctctttattctctttctccacacgtaaaatttttatggcttaacttccgctgcggcttgatacgttcatgtcctgcaatccctctatctttgtagtggtttcttggcaagaaatctgaggatgaacttcatggttcgatctattacattgtttaaaatggagtcaaattgttgatagatgttttgtctttcttttggaagaatgtgtcaccaactatgttcagataaaatggatttaagttttccatctactttgttgcagtcgtagtctcatacattatgcaaagaaaaaaatcaacttcggtgataatatagttcatcagattgcagtatgttaccatgttcagaagaataaactgttcgattaataatttgcttcaccatcacacattacaggtgctagtttaccatgatctgcttggaatgctacagcacccgcatcatgccaaagtaaattctcaaaccaagttcatttataactctctgtctttcacaaagcattttactgaagcgtgaagcaactcactttttgcaggtcacccctaagttctgcaagcagtttgcgtgtgtaggagatgtcataaacaaagctctcttggagtacaagaaagaagtgactcagggttgcttccctggtcctgcgtacaccccttacaaaatcaattctgcttatgttggggatttctcaaatgagttacaaaaattgggtttggacaaggcagcatcagcagcagctgaagctgctgaggatattaaatcacctagtgaaggcagcccaaaaagtgagtagaatcgtgatagctcgtaatatactgtgcttgtcatcctagtaggaaattccactatacactatggctaccattttcagttttgtttctgggtcacactttaggttttaaaaggtaggagaaaaggtataagacagggaaggaaagttttcaaagtaaggcagctgaatttcttttgaggcaaaagtaaaagttaataatagtttagtctagaaattgtaagaacctccaataaaaaataaaagcttatcaaaatgattaatgcttatatcagtttccagtcttgctttgttc

SEQ ID NO: 252132 - DNA, 841 bp, Cannabis indica
ccttatcattgactttcttgagttaatttttttttttatttattcatttcttacagaggtttgtacaatgagaggtatatataaagggttctttaatcataacaatgagaggtatgtacaattttattggataaattgtctgctaattaggagtttcattatctttgctttaatcactcatcttttgttttaatgggtttgccagattcttgccaaaaattactgagacccttttttccagctgcaatcatttttttttttcaaattctgatttctggatatctgactaactgttcaatgattttattggctcggttttacatcttggtcatatattatgatgtatctatcttttcatcttgctaatttcttctctctagggtaccataaattatcggacttactcggagagcttcaggtactcttttaattttcttattattattcttaattttagatttagcttcgtatatgttgttaaattaataaagtttacatgtttgttaatctactttcttcttattgttgggtggatttgattaatttcgattttgtagtttgggttttcaagtggctttgtaacgatcctatggagttccacattagcatataggatgaattaggtcgacaaatatatagtttctgcgaaaatttgagccaccatagacttgataatttttttagtttatttgtgtatttatgcaaaaaaaaaaaatttgaatgaattactcttttaaaattaaataatgttatataattaatttaaactctatataaataaatactttttttttactttctattacaatcatcatataattaaaactctatataaaaataa

SEQ ID NO: 252133 - DNA, 497 bp, Cannabis indica
attttaaatctaaggtttttttttttctttaacttcatgtgttaaatgtatagtaaatcaattaatatatatttttaaataaaatatattaaatatataaaattataaatgtattttaaaaatatataaatataatttgatgaccattagatgcaggggcagagatattctatgactttagtggccttgccccctcaccttttcattaaattgcagtattagtaatatatgtaggtaaaattaaagaaactataaattattagtattcattaatttaattataaggttactattataagatatatgttatattatatttataaaaataaatactatgattataataatgatcttatagatgaaaagatataataatgaataatggtactttgtaatttttaaataaaaaaatgggtcatttaagtaatatattttatttaatggtaaatatcattttggactttgtgttttgcaaaaattatcgatgggactctctg

SEQ ID NO: 252134 - DNA, 632 bp, Cannabis indica
atgactgatgttcaggttgagaataaggtgagtctgcaacattctgttgggaagcatcagcaaggaaaaaaaaaaggtaaaaaaaatcaagtgaaacagaaccctttaacacaaaaggaaaaatttgctcataaaaaataacatccctagaacaaaaatatcctatttgtattaagatgaagaagtttataggctttcatcccattaggataacccatgaaaatgcagggagtggctatgggggaaaattttgttcttgtagcctctaaggtagaggcatatgtaagacagccaaaaggccttaaatgttcatatttagggactttggatttgagtatctcaaaggatgatttgtgtttaaggttaggggtaggggttctgtttatgagatatgttgcagtacttatgcaatcttcccaatatggcaatggaatataagactggaagagcaaagctctagcaacattttaacaaatgttgatgcttcctttccataacagagttatgttgtggcctttgcacacaggaatgatagtggataatgcctaaagaaaagaataatgtaggaaattgaggttgtttagtattatcagctctaattcttttaatttgtgcattgtattgggtttgga

SEQ ID NO: 252135 - DNA, 745 bp, Cannabis indica
aaaaaaagataaaataaaatattatatttttttgatgatgtggagattttttgtacctttaaaaatactaccattagagattggcaccctataattaataatattcaataatttttattaaagtaaaataaatgagactgaatattaaattgtaccaacaataatattataactcacaaaaatattagaattagaggtgcctttaaaatttctctttatcatatatgcttcaaaacttgatgcataaattctctacatttaactcacctttttaatttcttcattaattattttaatatatttttgtctctcactctctctctcttacacacataaaaacatagataatattaatatataatactttattaataaaaaaagttaaaagaatataatatttaaatgatatataaatgtaaaagataaaatagataaaattaaattttaataaagtattttaaataataaaatagagacacatatgagagttttatagtatgtaaaggggaatttaaatttccatgcttaataaacttataaattggctctctaaattaatactatgcataattttttatatgggataactttttcctaaaccccaaaatactcttcccattttctccaaccgtccctctttcttcctttttttccaaaaaattgactgactatcggactggccccatcggactggccatcggacgggcatcgggcccacatcggacccgattttcaaaacccagaa

SEQ ID NO: 252136 - DNA, 985 bp, Cannabis indica
agttcatatttagagtgttaatcaacatacttgtaagtagatctaagttcttggtaaaataatttccaacaaagatctcttaccacatcttcatcccaggcccgagtatccatttgaaataggcaacgaacagttttattaacaagggcaggatgccttgtttcaacaaagccattagtgttatgagggagccaagggtcatcaagaattgagacattcaccccattagcagtagttcttcaagctcccaaatatatcaagcttctagattccaagatgcttcgccaaataaagcttgggttatctcccaactcaactgagaataaactaccatgtgcatagtacttggccttgtaaatcctactgaccaacaaactatcattcaccaaaagtcgccagaattgtttccctaaaagagccaaattaaagtctctcaaacatttgaaacccaatcctcctgcatgcttatgacgacgcaacctatcccaactcatccagtttataccctttccactacaaaaaaaaataataataaataaataaaaatatatatatatatattaattatatttttagtgacttttttttcgtgaaatttgtaacacttggttgttctatatatttattttcatgatttttgttatatttcattatttggaaaaattgttgttttagttatttcaaacatttagttacattatgcttgtaacaatagtattttttatggagtattaaacttaaaaattaattgtaatatttagtttttacgtatttattttcatatttttaagttaatattaaaaagggccaagatgcaaaatggccctaaatccaacaattaaattaataaatgtccctttttaaaaaaaattaagaaaatgtccattctgttaaaagtttgataatgaaattacaattataaccttgaataattaagtgtttggtatagttattttgcacaatagtatatcgtttttatgtacaa

SEQ ID NO: 252137 - DNA, 944 bp, Cannabis indica
taaaataatttccaacaatactgtcaagtctggctataaaatggccttactccttgaagatcagcaaccaaacaccagcacctctgctgcaatgttgtggtggaaaaaattctggtctctctccattccgtctaaggttcatatctttctttggagagcaatccaagactgtttgccggtccttgatatcttgcatacaagacatatcagtgacaccgacttctgcccattatgccaccgtgagaaagagactatactgcatgctctcttccattgtaagcgaccaaggaaattctggcgtttatccacctttgctgttagaaatctccttcaaacacatgtttcactcaaaaatattttaatccatgtctccacgatctggtctaatttggaattagaacaatttgcttgcattttatggagtctttggacagaaagaaacaagggcgccatggttcaaaaactcaaccgattgagttgttgcttttcaaggttatgatctatcttgatgattttcattcagcccgaggtgcaaacaacacacagcagcagacaatgtcgaagcatcagtctcctgccccaccacatgctgcgatcccatcttcaattgttccaaaatggttgaatccgccttcaagaagactgaaactcaatacggatgcggctgtaaacaaagctactcaaattactggttttggtgctatactaagaaacagtagtggtgattgtatcgctgctatgtcaaggccttttccaggctgttttaaaccagaaattatggaagctttagctctgcttcatagcctgcaatggctcaaggaccttcggatgcaagtggattacattgaatctgattcactcttgctgattaatggcttgaaatcccaacaagccacaatctctgattttcactgcttgttgtctgatattttacatttagtgtc

SEQ ID NO: 252138 - DNA, 542 bp, Cannabis indica
ctggcaaattaacagagtactcacgccactgtaatcatcagataaggaataaagatttcattcaattgatgtggactgactcaaaagcaacatcaccaccagtgttgagctatttcctgatctcatagatgagccatagtctcaagttacatttgagaatgaagaagcggagtttctatacaagcaataaattcttgaaccctctcccgtaaagttcctcactgtgaataaaataataccaaaatatgtcaaagaaacgtatcaaaataagttgcgtcttctcacatatagatgaaataatgatacagcagattaaaatagctatacaactctccaacactccatttccacaccagtaaacatataccttcaatgccccaacataatcaattaaatcattctcaaaggcgcatcctctgcttagcttgttctgttttttccaggggatatcttgcatccacagaccttgatatttgttatttcaatcaacatggattaagtttgctgtgtgcacagtaatcccactcactttgttgcttcct

SEQ ID NO: 252139 - DNA, 1024 bp, Cannabis indica
tttgtcaaaataatatttttattgagtatcacattattaataatgttggaaaattttacaatccaccctttcaaaagagtataatgatacattattatttgttttggcatttgagagaattttaaaatttaattttttttataatcatgtatgttgtagttatttagacatgcacaattatgaaaaattttaaaaattttaacacgtcgaaaacaagattcaaataatctattgaactcgtgacttttttaattttatctatgtctaaaattgattgtttgaacactgtttttatattgtaaattattttaaatttttttaaaagttttacaagatgtcttgaataactataacataaacaacaataatttttttttaaatgtcgaatcatatgcactccttctagaagggcgcatagtagaagcatacaataaagagatgatattttagtctaatttattagtgtatatatctttacttttttatatgtataaaaaattactttttttacataattattttatatttatataaattaggaccaatataaactagttttaattcaattcacattaaaaataattcatttttatagattagttgtgtaaaaaagcaagtctatattatacattctcaaagagtgtttcagtagatttttttatatgtttgagtatttaggaaaaaatcttaatttttcttataattgaaaataaggtttaaatattttattacatgagtaattattttttttataagtcatggtagaaaattgttcaaaatttattttcggtacgaaaaatttataaataatcttaaataactacaaaatacacgatcatgaaaaaaaatagattaaaaaactacttcaaaatacttaaacagatagaaaatttaccaaaacacgagaagtatatactacaaattttcccaaaataagtatgaatatttttttttaaaaaaaattaaaaataaaaatttgtaagtgaagatgataaaccctagccctagtcgaatattaatgtag

SEQ ID NO: 252140 - DNA, 1056 bp, Cannabis indica
tttttcttactaaattttttttttaccgatggaacaatctcaacccatatgatataaaaatgagagactttttttaagtagatagaaaaattaagcataaaaactcaaaaatttctaattttacccattcatgggtagtacctattgcccttaattttgcctaaaatatgtggacctgtatgaagacgacacgtggagctgggagggtctgcccttaaagaaatcaactaagtcttgggcaacagagaagtgtctctgggaggatgactcccggagacgatacgagaaggatctttgtactcccggaggccgaggccatactaaggtagcttcgggaggtactgaacactatttgaacaatcacctcgcatttaatgtcgcatgagagaaaacgtattggaactaccataagcgatatgactggaggcgtaacccctcttttgcagctattacgctgtgattaataaggctagtgacgtctactttatgaggaatcacatcaatcaagaggggataaaagattacatctacctaacccctaagatacttacggtataggtaatgtatttcctattttatatctgctaagaatatgtgcccctattgaacatgcacgtaaagacaagtgattcagttctagggatcctcccagaaaaaacactataaataccccacaaacacacttagacgggggtcgagaattctgggttcataagaattaaagagagtaaataggagagatatccaccaagaacattctctgtaataaatactctcataaataacaaagactcgtggactaaggctcgttaatgccccaaccacgtaaaaattcaatgcattaagcttcctacaactttcttatacagattatttaattggttgctgaaaacctcggtcaacattttggtgctttcattgagagctgaaggaagcgtcttcaaacagacaacatccttaaaagtttcattaagcaacaatggtcgaaacttgcaacacacgtcagccccgtcctcctcaagacgctcaaaatcctgaagacgaagaagtggcttc

SEQ ID NO: 252141 - DNA, 583 bp, Cannabis indica
caagtaagatttatattgttatcttaatcaatttatattaaaaaaataattaaaccataaaattaaattaaattatatatgattatttattgtatcatttacaattaatatagaacataatattaaataaaattttagaattggatttggttaaacagattaaatttaatcgatatactaaatcaattatgtattactcataattctcctaactctctttctgccaccatctcggtagttggaaattctcttagcaaacctctgttcttggaaagaatctcctttagtattttttctttgtgttatatatataaaattctttacaaatactgttacatttactatgctaatactaattattaaagtgatttattcttattttgtttttgagataattattttctaaatttctatgattttaatttaattataacgtaaaaaaaacctagcataaaatttacgtgcctcgcatgtagctttttgctagtagaatagatatatacctattataaaattagaaattgtgcgtatattcttttactttggatttttatgtgaaatatcatttaaagtatattgttgt

SEQ ID NO: 252142 - DNA, 560 bp, Cannabis indica
aggatgttaatgaaacatacatagtagtaaatctagatcctggtaaaatatttccaacagaaagagtggtatttgtgtacatagagctgcactaaatatcgataaatatatgttaggccaattttaaagccattcgtttagcatatcagtaagagttgtatcgatgtacatagagatgcactggatactgacacatatagagttgtgattagctgtatgggtgcttggttacaatcgtataatatatttttgtttatacttttcttactgagtctctcaacccacaaatattatttatatgtgtatgtaaaggtaaagtataggctgagcagcagtgagctcgggatagatgaagattatacatatcgaggcagtaagacttagagtgttcagatctttaggacaatagggctgcatgttaatagtcgttaggcaacaaattttgtatacaagtactcttaaatcatttatttatatatatctaatttaattaaagttaatttacaaaattttttccataaaccatttgattagcatatttgtgcacaataattaaaaaa

SEQ ID NO: 252143 - DNA, 711 bp, Cannabis indica
ttccaaacttgatttctaactcagaatcacctcaaattcaacaggtaaacatcgaaactagacccatagctaccaaagaataattctacgaaattagaatctccataaccactctaaatcacaaagccactatataaaactaatcgtttttagcttaaaaagaaattaaatcataccttaagttttctcttttcaaggatttgctatcccgctactaccagagcttgaaatactaagttttgagttggaaattgaagaaaatggattaaggaaggagagaatttcgtcgcacaaagagagaggaggattttgttcttcgttcttctatttatgtttcttaaaacataatatatattaacatttttttatgaattagatgattttattgctcaaaacaaaatttgtacaagcacaatggtcacaagaccggtattatatacagctacaaattacaaattactaaaccaatgtacatctttatcactaactttcttaggccaaatcaatctaactctaaactgtacagtttctttaatcctcctcaataattgttcaaccggctgttgttttccattccacatgtgctcattttgatccctccaaatgtggtataccaagcttgccaaagcaacaaccattaccatctttctgaacttgctgccttgaaattttagcagccatttgatcactcgaagcaaggttacatcaact

SEQ ID NO: 252144 - DNA, 673 bp, Cannabis indica
ccttgatgcacaattcaaactaaagatcttggcagcttacacttggactcgaaattgcaagatgccccaaaggcatatctatcacccaaagacccttcactctccaaatattaaaagaatcaggctgccttggatcaaaaccagcatcaactcctatggaagccaacacaaagcttggtaatgatgatggctaactcttacaaaatccaactcaatacagtagcttaattagcaaacttctctacctcacaatcacaagacctggcataagctttgcagtcaacaaactcagccaattccttcaatcatgaaggaaaccacacttacatgctgcaactcgagtcctacagtacctcaaaagctctcctggacaaggacttttttttgttctatgcatcttgtccaacacctcattttcaggcttttattgatgccgattggggagcttgcctcaatacttgaagatcaatttcacgatattgtgtcttccttgggcaatctctcatctcctgaaaatccaagaaagaacctaccatttctctatcatcagttgatacagagtatagggccatggccaatgccacttgcgaacttacatggctacactctatcattaaagatttccacataaaaacacagctgccatcaaatctattctgtgacaattcagcag

SEQ ID NO: 252145 - DNA, 926 bp, Cannabis indica
tagaaagttttaaccctctagaaaattttaaaaatggatatcttgttacttttatgttgaaattgtatgtttgatattttttttcctttgcagcatattgatgtattattttactatttgagaaagaagattaagtatgatcaatttatcaagcttaaagtcaatacaactgattgtttttttgcaactcaaatttttgagttgtatggaaactatctttgcaaggggaagaatctcttttctgttcctaagaattctaaggttgctagctatattgaggggttctacatgctttgttttaaagtcatggttgttgcttgattatgttttgattccagtgaatgttgcttcattggcacattttattgtgatcatatttgacattaggggtagatttttaaaagtatgtaattccatgtcaagtggaaaattcaaaaacttgaatgttatcccaatttttgtattctgacgtggcatcgcatgaatggtgacacgtggaatccactcggagcatctgctcgggaagcatagtccgagcaggatgcctcactggcatgcccagagcaaagcaatcagtgatccgcgcagagcaaccaacacttagcgaattcagctttcacattgtgagtcattaacaaaatccctaaaactcagggattagattaccgggatgtgacatacacacgatcccactatcaatgtttccagcatcaatcccacaatctttgtattcaacattgatctcatgatctttctgtttatacgcattatgacgagaggggaaactcttcctctccaagtttactagccctgtaaatagtgatgcatgttcactgggcaagaggtcgaaaacagtttagctgagactatgccctaaatatattatctaagaattatacattaagagatagtgttgtaagagctat

SEQ ID NO: 252146 - DNA, 1017 bp, Cannabis indica
aaaactaacaaaaatataaataaaattgaacatgaagagttaggcacgtgaattgcacgtgtagcctcacctagtataaataaatgtgtttagatgtaaaatgataattatatataaatttatattgttttgttcgagaatatagctagtattattgaaacggttaattaagattttttgcctctaaattttgacatgtattaaatgatatctcttgaactattttggccgttaaaaattcttcttgaattattgagattgttagatttgacaacttttgtctgatttcattcaattttattaatttgatgattttccatatactaaattctacttccaaaactttgatactatcaaatcatgccctccaaattttgatatacaaaattatacctcctaaactttaattatgctagactttctttataaaaattcgataaaagtccttaatgttaaactataatataatataaaaataaaacatatgtgaacgatatgtaaagcagaataactatagacatatcgaaatcgcatatgcgatgaaaagaccgaaatacctatagctattgatgtttgagcttcaatcccagtgatagcttcgatatgggaattcaggcttcctcgctctctcaactctctttagatgaaattttgttgttttcatagaataagtgaagagctcggggaacgagatccaatatttataggtgagatactccatcagtatctacgcaacattaattgtcagaatattttgacaattaattcgacaaatcaaattgagtaatgaatatcaaaatctaaccatatatagaatatcacctaattaatatttttcagattcaatgaatataaaatattcatttatctcaatattaattcttttattttattccataaatataaaatattctaatattctcccacttggtcagtatttagactaaaatattcaaaattaactttattcattatataataaacatatgaatatacaatatatctcattatatcttg

SEQ ID NO: 252147 - DNA, 1462 bp, Cannabis indica
atagttcaatctattcttaaaccaaacacatgattactttcagcataaattataactctaatgcatatattctaaaaatggatccttagagcttaataaaatttccagaattgaaaaattataactctaatgcatatattctaaaaatggaacccacaacaaataaaatcatacataatcataaaatatcaataattaatactaatcatcttactaatctatattctaatcatacagtcattaaaagtggttatctaaaagaatttttttgtttaacataatatttagaatataagaatatcccgttaaatttaacggtgttagtaaagttagttttataaataaatatagatattaatattatttatttttaattaattaaaatatatattaatatattatttgtaacgttattatttttaatattgggactttgggagtatgtttaattttaatattcttgaattttatatttatttttttattattatttttaatattgtgatatgttcaattttaatattcttaaattatatatttattttttgtatttttatttttaattattgtgatatgttcaatttaaatattcttaaatattttattattgtaatttttaataatgagagtatgttcaattttaatattttaaattttatattttgtttctcaattttaaacttaataatgtttttttaaaaagaaaataaaaaacctagtatatagatgaatgtccataattaattgtatatattatatatatttgggatgggtggcaagtacctacgccccagcatgagtacacttcatgatagtgttgccaccactaatgtttttagctattcttatattaatttataatatcaaaagtaaaaataataataataaaattatattattggcgctcttgtgacaatagcatcattataatattaagcattgacgatatttaatactattattttatgagttattaacagttttttagttattaaattaaattatgtttcacttaatatttttagtaattctcctttaacatgcctgaattaatgtatgtgattaaacatagaacaataaattaacaaaatttataataataaataatgggattgtgagtcaaggatgcataataattcatattaatgtgaaattggaatatgaaactaattaacaagtatatggaatgaatgaatagattgtaataaagatgatggaacttgttcatttgactttctaacattccagaatacgacatatatgctagatctggttaggaaggaggggcatgtgggtggatggatgtggccccctttatcttttctcttcttcaatttttataatattttgttattttttttttttttgtaaattattatttttattgtgtatttaattaaattattgatttaacttcctattttattaaataagtaattaaaaacttttttttttaaaaaaa

SEQ ID NO: 252148 - DNA, 1111 bp, Cannabis indica
aaaatatcatatgcatgtgagcttggaattttcccccagccatgcacaaccacctgagtggattcaagtacagtgcccatgtaaaaaccatgcatgcatgacatgcaatagggacgcgagtcccttaaagtagagcaagcacagccgggtccaattggacccgtgcgactatgcatgagtggcgaatggagcacaaatccgtgagggttcaaaggtggtcggaccaccgtcgagcaccatagggacttgatcccttcctcccgtgctcggcctcctgctcatacgagaaagactcatatgggctgagagattcctccctatgttccgcgccatgtgacgttgctccattcctgtggccaccatggccactgccgacctggtggctgtcaagctgccggccacggtgactgatggtggtggctgtccctatcctttttgatatccaaccgtgtatatatgtatatgtatataattaaaagatataatgtatatatattatatatataatgtataaatatataatatatagtatatacactataaattatctattaaatatttaatgtaaatacttgagtttattttgggatatttatttgaatttgattttaaatgaatatcatagttattatttgaattctatttgaattctaaattcaaataataattatcctaattattgattaataaataataaatcagttttattatttttaacaattaaaccaaaataataaagttttgtgggatatttatttttttaaattcatatttaaactaaaaaaatataattatttttagctttgaaattcaaacttaaacctaaaaccaaattaagaaaaaagttgtcttaatccaaaataaataataaatattaatattttaagacaaaactaaaaaataattaatttatcttaaataaaagtttatttaagaattaattaattaaaagggtttaaaagatgtattaaattaaagcttaatttaataataattaattaaaattactttaattaattctgaggcttacgacgatcttacaaaattacaaaaatatcattgctactatggagattagttgtgtaatttttagtttctaatttcaaaggtt

SEQ ID NO: 252149 - DNA, 744 bp, Cannabis indica
tactctcttattatctttgtatatattataaattaccaggttatttagaataagtagctaaaaatatatattagttcacttatgtaatgaactagaaactcaaaatccaaattttaaaaatataataagaaaaagttgagattagtggaaaaacatcatacacgttgtgtagtatttgaaggctaataatgatcaaaagctttaaaaatttattattgggtgttaaattaagaatcagacaattactaatcttttcctttcaatcaaaaagaatttaattgttgcaagaaaaaaaaatcaattaagaaagatcttagcgtgagcgaaacactacacttgaaaaaatggaggttctcaatttcttcaaagtcatcatatttgggagaaaaataatgagtagtgcttttaacaatttctaatattttatttaggtttttaaaagatctggagattctatatgtttcaaattaattattttcatatttttaactttttattatttttttcaatttctataaaattcctttatttctccaaaaattttctaaacaacttataaaaaatcgaaatagccccaaatattatgagcaacccaattacactacatgcctcagcacccaaatcacagcccaacaacacaagatgaatttttcttttttgagaatcttttgaaaggtgaccagttattgatatgccaaatatttatatatactgtaacttgttactagttttttcaattttata

SEQ ID NO: 252150 - DNA, 3604 bp, Cannabis indica
aaaattacaaaaatagtatatggagtaattaccaaaaaaaaaaaatacacatgcaattgaatttttaaactcttttcaagatcattttaaaattttaaaaaatagataaaatgcttcctttaactagaattataatttcctaaaaaatccctaccggtatccctactagtcaaaaagcttaaataatgttattggatttgctactaggtgacatagtaacatcctaacaagtgagatatagtcaaattaaatccagacatagacaacacattaaacaagattaaagaaataatggtctaaatgctcttatgctgtcatggacaaagtctcaccaaaggtggtcacaaacaatgagtagtaaatataacaactacattccaatgtgtcagtacaagcgatctgtatactaacctaaaaattataagctgcttaactggtcaaaaaccatctaacaaagatgcttctaattcttttgtacaaacctttcctcagttcttaactgaggaaaaactcttcttctacagatcttttgtggctacaacaaacatcccggaactccatttaccttctactgggatggcgatgcctgtcccatggtgtcaaattatccggatcgtatccattcctgctttcgtcaacccaattttcatatcgactggaaccataatctattggtgacaaacgtggtggataggatgaagcaactgagccatggtttaaatatccttcatcaacaaaacggcttcgtctacctctgtctggatcaaaccttcctactggatgagagttgtagttggattcatagctaccatatctgggaaaatatgttgctgagctaaaactatcgtcaacaccgggtggcccatcatctctttgttccctggaggaccacctttcctcacgctgatgtcctctgctgacttgttctgatacataactaggcctgcggtgtgatcggtttctagaaatatctgaagatgacggtgaagctgcccagagtctctcatcagcattttctggaataggtccgtttatccctgggaactctacactctttttcttctgtggttcacggggtgtttcgataatttctccatcctcctggccgtccttcgcaatatcaatatcaccaaatattataatacctgatggttgatcctcgtcatcaggatctgagaaatgccaaggtatgataagatgggttagtatggagagatagtattatgtcacaattttttccaaaatttagaaatttaggccacgtgcatacatgaattaatcaataatttcttacagtaatagtagcaagaactcatcattaatgattgaaatataagaaaataatcttcccaatagactattgcatggataggcaagagaagattcttgaacaaaatttgaaaattatgaattctgttaatgggatcaagttgtgatgtataagcaaataattatatgttctgtatataataacaagaaattacatgtaatctcaaaactaacatgagaaaatcaagatgactatatataaaataaaaatcatttcaattaccaaggtatcctggagggtatccaatttcgcgcattcttcttagccaagggggtggatcaagctcctgcataatccacaattcaaggcaaaaagaaacagaattaccagacaaggcgtgtgtagatataatgtgtataaaaagcaatctcctcaaaagaacaatattacagttaacaggagatgttcatacaataaaaaaataccactcctaataattataatttatttaaataaaacaaaataaagaaagcggtcaatttttagaaattatgcataataatgattgatcagtcccttcccatatttaacttaataaatagaaaaagtcctcatttccaatttgttcgttcaatgatgttatcattataagttcataggtccaccaacaagtttgatactcaatagcaacaatgtctagtctcaaatttatgatcagttctctaaagcatatatctcgaacgtacaggatatcaaacatatggttgaatgaccagtaaaagcacaaattcaaacccaaagccttattacttaagttcatgatagattgtagatgtatgagttcaagcatgcattatatatttgacatgaactcagattatatcttgacattaattttaagtgaccaaaatcaaccaagaaaaataacagattgccatccaagaaaagaaaaggccaaattaccgagagacccaaaagttgccgtgtttcagcatcaagagctcctggccttaaaccatcatactttccagctggagaattctgataatatcgagtttggttgcgtgaagcactattttggttacgcttggacttgagctgtttgcgagcattgttgacagcaactctatcacgaggttttggacattcattcaaagaatgattataggaaccacaattgaaacaacgggcagcgtcatcaataatctccacacctcttaaaaaatttcaacaaaattaattcaattagcaacaacagaatctataaagtacaatacacgtaaaagtaaaatgtaaatcttttttttttcttcttcttctaggaagcttgaaactggattgcatccacccacccaattgcttaataaatgaaaaagcaagtaataacacaaacatgcaaacaagcagccgatttaatcagaggaatcaattttctaaacaagattttcaacttttatggagttgaaatattttgttgataaatcactgaacatgtaaattcaagtatgaagtataaaaggatttgaagatgaatcttctatatcattttctttactaagatataaacttctatacattttttactaaggtaagataccaatatatatattgacaaaagtatgataagtttacataatatttattcaggtaagattccaatgagtaacaatgtagtacggtgtttacccctcgatgttatttataccatcatctgatgtcaaacccaatgcaaaaccacgatcatatagaggcacagagttacaatccaattcaacgaattccttgttctgctctttccttgtttgcttgtccatccagaaagactacaaagtaaaaaaaacacttgagaagaataggtggcattgtactggtatccacataggctcacaaacaagtttaaagcaaaaaagtgtgtgtgactttggcatggttctgaacagaatatggtctacaaagagttaatgtagcttattcatttcccaccaaaggaaaaaaaaattgatcacaagggcgcattctcaaagcaagtaacttaaatattgaataacctgcctccggctacacaaggaggaccgagtacatataacagtggaagctcaccacagatgatgttttttccaagccaacatttaaagcaggaaagaatgtctcttctccagattctaatgcttcaattggatcctaaacagacatgtttcaaatagattaatcagagttcaaaatattaaaacaggaaattaacaaaaagcaactgtattgaatgccgaaggaaaacaccaagccaagttggtcaatcagaaaaccgatgaagataaatttcttaaataggaaatt

SEQ ID NO: 252151 - DNA, 491 bp, Cannabis indica
agatgacccacgaccgagaagacccatgacaactcgcgacgacccatgacaacccacgagaagcacccaagacaaaccacaaacaccgcactacttccggcgaaacccactcgcttgttttctgtattttttttctaatttttgacgatgtcgcgaaatatcgcgaaatcatgaaacatctctaaatgtctccaatccacaacagtgcttgttttctgcatttttttctggttttttgacgatattgcgaaatattactagatgtcgcgaaacatcgcgaaatcgtgaaaatatctctaaatgtctctgattcacaatatcgcaaaacacatcgcgaatatcatcgctaaacatcgcgaaacatcactaaatgtcgccaaatatcgcaaatcatatctaaacttcatccttgacctcaaatttgttctatcattgtaaatacatcgctaaatatcataaaatatcgcaaaaaactagtaaactagaagaaa

SEQ ID NO: 252152 - DNA, 648 bp, Cannabis indica
taccggttccaaataagagagttataaactctaagggaattaatctaagccacatactatcacaaagcttggaaatctcaaaatccttgcctcaaaaatctttacagccaatgttcctcttaatcatgtccatcgcttctataaatttttttctaataccaactccccccttgtggagcattggaccaatcttggctttttatatacaccgaattaatctactttacccacaaattatctatcttttgagcaatatctctaacatatctttccaaagcagcaaagttccaatgctcaatattcctaaatcccaaacttctacgagatttagaatgagagatatcagaccaagagacaatcatagtaaggaagaatcaaacttactttcccatgagaagtttctacaaatactattaattttccctaatatatatttaggaagggtcattatttgagcccaataagtatgaatagccacaagaaccgagttaatcaacacacatctacctgcataagagatattttggtactccaaattcttaaccttcttctcaatggcattttcacattttactttagagatttttttgagcaaattggaatactaagatatctaaaaggcaaagaacttctaacatatcccaaaca

SEQ ID NO: 252153 - DNA, 842 bp, Cannabis indica
cgtggatgattcaagatcaaggagaaaagaataaacaaattcaaaaaaagaagaaagtgaaccggagcgaaagagatccgccgccgccgaagaattaagggaagctgttgaattggtctgacccgattttctcaagcaggaccgcttcatcgtcgacccagaacaagcgcagcaaaccgacccagagaggtagagagagaaaagcacacaactgacgttagattggaaagaatagataaaagcaatattaagtactattttagaaaagacatatatagttggaaaaagtaaatgcatattacattggaaaacaaatgtatatatttatattctatatacaacaatatataaattaataagattcaaattaacaataaattattctagcagatttggtaagttgtcctaagtgacatgagttaaatcattgtaaccttcatttgatgattttatgccacttaattttcttctattttattttatttcatttttttaagatttttatctccactttatcattcgagtgttcatccaatctatttcgcactgagtgcagatttcatatttttggattcaatatataagaaatattattgatgtcttatcacacgtcttattttagtctatacaacaattaaatctataagaattgtcccataataacaagtttaattaatatactatttatgaaaataaccagcaagtaggaaacataataacagttctagtttctagtcattactttttctggttgtcccatgtggatcaaaccaagtaccacaagcttggttactcctagttatcacaagtttggttactcctagttgctaatatttgttata

SEQ ID NO: 252154 - DNA, 796 bp, Cannabis indica
tcagcagcttcgtcctttgtcagcacggagatctttttcttagcagcaacagcttcttattggcgtcgcccaactccaaccgaacagctccagcttccgccctggcctcctcagcttccttcttggccaagtctgcctccgccttcaaggggtcggacagagccgcgctcttagaagcaacagatttagcccgagagtaagtgtaggctaacttcagaccggccaacacagaggaaaaaattcagcatctggagttaagtattgaaagttaaagggaagtatcaaaaaagacttacccaaatgaactccttcaggattccccccaccaacacatccagagatgagtcactattagcaccagctagttgctcactgacctcgggaaccagccgattcatatagtgggccagcatctccttgccctttttggcctctagaagcatgggcaaaggtggagttggtgcctacacccgctcaggagtactcctgatcagtttagacccaacagttggtgctccagactccttggacttggcagatttgggggtcaatgacctctccagaagttagctcctcggaaaggtcaatgacctctctaaaaggtctcttttccaaggatccctcaccgcccttagactttttggccggaggagaggcgctagagcttccgcccattctcttcctcagagcatcgatcatctgtcgagacatgtctgcacagaacaaaaacagtatgcttagaaaacagccatcagaaacacaaggaatgaaagtcaagaagctcaaaagtaaagta

SEQ ID NO: 252155 - DNA, 754 bp, Cannabis indica
ctcttgattcgtgtcacttgatttagctttgctttgcttaggaacatcccttttgggttttctccgtttcttttctaaattgattgtgtatttgtattccaaagtatataaagtctttttctgcccttttctaatcaaattattaacagaaaaattaactgtaatgatgcataggatgtgatgatttggttggtatacaataataatatttaatttaactaacatcaattattgatatgagtgtgttttgtttgatgatgagaaagtcaaaagtagaatcatatcaattctctcacaaacaacacatatataaatatattcattttctatatctctaagcttttaaatgccaaaatttcactagtatcatgaggaagaaatagctttgtttttgtgtaaaacaaaaagaatatatatttattttgagtagtttttcaaagggataagaaaaaacgtattaagaaattatatgtctaagcataattgcataagtaaaaactatgaccctcattagtgttggaatatttataactaaatttgtcacctcaaggtaataattcattggaagatttattgtttttattttttaatcacaactaaaaaaattagagcaatttgcggcgaaacccccttatgttttgatttttatacacttaacccccttatctttatttttggtggcaaaacccccttatgttttaatttttatacacttaacccccttatctttttttttggtggcaaaaccccctta

SEQ ID NO: 252156 - DNA, 1172 bp, Cannabis indica
gtacatgcctacccatagcaagtcaagtactcaatcatagtgtgtaagactgtgaagaatccaacacttgaaggagaatcgaactcatatcttgataatactatgcgacagaaaggaacaagagttagagatctacgtgggaggagacatattatttcgttgccaccaatgtaaggttacttaaattttatatatgtttaattttattgttttagagaattcatatttagagtgttaatcaacataccctcagtctccaccaattctgtgaattctttctgcttagcattgcggactgcctcattataatacttggcgttgaataactctcggaactcttcccaggtcataacagtgacgtcccgagtgagggacaccaattcccaccacactggggcatcttcctggaactgaaaagtagcacatgttacccgatcatttccaacgactcccataaaattcaaaattctttcaattactgtgagccattgctcagccttcatcacatctggacctcccaagagtactggaggtgctttcttacgaaacctctcgtataccggctctatacggttgccagcaacaagttgttctattggcattgcaggaactacgacagcctgagcttttggtggaggcactacaggaggaccctgttgccttagtcttaaaatttcttcatctcgctggcggatacgatcttgcatctccgtaaacctctgctcccaatctagaggagcttggggtggattcacaagatgaccaccctgaactctgccacggcctcggccgcgaccacgaggattctagggaatttgatttccctgaccgccttcggtgtcaaccctattaccctaactccttgtatttcgttgggcatccatttaataggacttagcctacgaacccataagccaggcaggtcagacaacgatcataaaaacttaacaccgctcttacagattttaacgcatttaaaataaacaactataaccgatatgcttcctaacatgctttaataataacatataatactaaacaagtacgggcttactaaaccgtgagctaagctttctctaacgaagattgtacatgtcttggcgagcttcggtagacaaacctgacggctctgataccgaaattgtaacgccttaacgctaaggcacgctaca

SEQ ID NO: 252157 - DNA, 634 bp, Cannabis indica
ctttgattgcctttcacctggaaggaccgccatctacctggtttcagtggatggagaagggaggtgggttttctgattgggattcttttttacgagcattgcgattgcgatttggtgtctcggtgtatgaagatcctttgggcagaatagcaaaattgactcagacgggacgtgtggctgagtttcgagcagaatttgaagagcttatgactcggatttctggcgtatccgagcaatttttcctgaatttctttgtatggggtctgaagaatgagattaggagggaactgttgttatcaaaaccggtggacttagctgatgccatggctaaggctcaactatttgaagataggcatgacgatttactggggcgcggtaagacggcgagcaatcgtacagggtggtctccgaggtttccgatttcaccaccaacaggtcagagcccgactggatctgttataacttctcctaactctactgttgcagtgccaccaaaattacacaaaccaagttcttcgggactaccagttaagcggttgtcacctactgagatcaaggagaaacaggataaggggctttgttttacttgtgatgagaagtacagtttcggacataaatgcaaaaaccgtgttct

SEQ ID NO: 252158 - DNA, 688 bp, Cannabis indica
tgcatataatataattccttgcacaagtgggtaaaaagaaaaacaattctttgcataaggacatagaaatgtgtggaaaaaatgtattatttgcttgcaatagtgacaaagcatatataccaaatcgtaccttttaattttaaggttgttaatttttttttttttctgaactattgagaattgttaaattcaagatgtcatgacctgatcgcggcatgacaaatatgtaaaatctataactcgggtgatcaaaaatcatactttgacccttgtagaaaaataatgtttataaatgatttttaaatttatattacaaaatacttatttaaaaataataaactaactcttatatctataagaaaatatttgtagagctttgtaatggcagcaagaagaactggtacataccagatggtacaaaccagtagaaaaacagagaaaaagaacagaggaaaagaaatgttgccaagaaaagcttaaccaaaatggttagctcagtccgttttatttatagagaattgtacagaaaacaaactcaagaaatcaacagaatcgtacaacagctttaactaactaactaccaacatataaaaccgtattaactaactaagtggttaataggttatatcccccctcaaacgaaacttaaaggtagctaagtgaaatttgttctttaagtacaaaaatc

SEQ ID NO: 252159 - DNA, 917 bp, Cannabis indica
aaaaaatgataaaaaaatattgagttttatttaaatgtttttcatataaatttatttttaatatagtgtaaaaagatgtattttttttttgatattttctttaattaagtagctaatttaagcgtagaaatttaaatttctcttttaatattcgccattggatcaaaatttaatggcttaatatttttaaaattaatatttatagttaaatttatttagtattgggtaatacctattaagaaggattccataaatatatatatatatatatatttatatatattaatgatatttacattttaaaggaaaatttacaagtttatatacattttattaacttattataatatatgtgcaaaaaaaaaaattatttacaatttattataattttgttaaccattaaaaacatattcttaactttatatacaatatatatctttatatattaaaagtgcttatctatccatatttcttggtataacaaattttatttttttctgttaaatttaacattaaacaaaaactttcaaaatttttaaaataataaatatataaattactatccaatggttgaactaaattcctatttttctaaatagttttgaatagagatattttaaaaaattaatctaactaaaattccaaaaatcatggtagaatgcgattacatttttattttctcttaaaacatttattgcgatttcacttgcacgagaatatatatacaagtgttggggatatggagcaacaaatatctttgaatactacaaccaagagtgccaccaacaatcatttttctgtggtaagaaaatatctaaggtattcatgttatttgttcaacctgaaagctaaaaaatgttattgaaggaatcattgtaatcatgatttgatggatgataaaaatgtgctttacagtg

SEQ ID NO: 252160 - DNA, 556 bp, Cannabis indica
tattatgtcgggccatagaaatatatggataattccgtactatgccataaaaaaatgtggctagtatcctaccgtgcaacaattttataaagtaggctcggtacaacttgtaagctcggtaattttgtaccgtactcgaaaaattcgtattgtatactttatttgggccaactcattttttttaagtagaccaacacattctcttatacgagcttaaatttattctatatttttgcatttttatgataattgatgagctaatcagctaatcactaaaatttatgtgtattttatagttttaattacttttatattttttttttaaaaatagttacacataattatgtaaaaacaattataattattagaatttgaatattagtagtatcattttagatgataaataaatattaattatcattcttattattatcaaattatctgatcttttaatatgtcgtgttaattcgtaatatcgtgttgtgtcatgcttaatcttatatttttttgtatcgcgttatatctaagcatatttttttttcatatgaaattgtgc

SEQ ID NO: 252161 - DNA, 359 bp, Cannabis indica
aaaaaatcttgcaatcctagctactaaataagttctaaaaatataaattattactattcaaaattaaatttaagtattcatctacaaccaaaataattgtaaagttaattaaattttaaaaagtatacacgcgaattacttaaaacaaaatccaaaaacatggtaaaaaagtctaccctagctatatattttttaaaaaatagatgtaactaaatccaaaggtagttggtaaataagttttgtatgtgcaataaaagatcatgaataaaccaacaactaaacccattaaataaagagaaatgctaaaatgtactagtggtgtcaaacaccttcttacgtgtcaatatcgctattggtct

SEQ ID NO: 252162 - DNA, 710 bp, Cannabis indica
tatacctcaaacttaaactaatattccacattttttaatttccatctttcgttcattatataccatatcacattaaaataatataccacaatcttaaactaatatactacctttcagttttttttaatatactattgcacataaaaacgatatactattgtgcaaaataactataccaaacacttaattattcaaggttataattgtaatttcatcatcaaacttttaatagaatggacattttgttaattttttataaaaagggacatttattaacttaattgttagatttagggccattttgcaccttgacccttttgtattagggaaatttaaaaatgcacctaaaaacaattttttatatatatatttttatgattttttttatttatatttttacgattttgtattgtttcaatgttgtttttaaattgtcacaatattatatttagacaatgtaaaaataatgtgtaaacaatgattttcttagaacaacttgtcaataatgatttgtaagaaaaaaagtttgtaaaaatataaataaaaattcaaaattccataaaaacatattttttttgggtaaatctgaaataatcccaaaataaaaattctccttagccctcatttaaaaaattctatagcccaatccctaacaacattaatccttggaaaatactacaaaacttgaacaagaggaaaaaattctatga

SEQ ID NO: 252163 - DNA, 604 bp, Cannabis indica
aaagcctcaattgatgatgcatcgatgagagggaaggcaattgtgcaggagacaatgctacacaaaacaaagaatttctgtccagatctaagagcaatatatatttatatatctatatatattttcttagtaaatgttcttattttgttcattgaaaaaatgaatttagctttttgttatttcaatttccacacaggatgatgtggtatttaataggaatgacacatggagagcatttccaaagtctagacgagtatttttccttcaacgatctatctagagagttttatgtgaatctgattaagtgtaaacattcagtatgtattatccggatgctcgcctgtatgcaactgttcgagcaggtcctcaccatccagtgaagccaaatcctctgagcaggataacaaggctgaacaagatcttcaatgatatttttcataaatatatttgcatttatatctcaattaaatgggaaggagccatttgcacctcggaaataggataacttgccccacttgcattacatgagaaggagccatctgcacatcgcgagcctacgatgggttaatatcactccaaccgcatgccctacctttttggcctc

SEQ ID NO: 252164 - DNA, 865 bp, Cannabis indica
tcaaagagcagttcttaaatttgctcggtatattggtgctcatgccattgctagaatacaagtaaaccaaagtcattcatatgtgtacaaagtgagatgcctccggcaagatacctttggaagggagttcctattcctgtcagcgttgaccgcattaaagatactttaagtcacagttgtgtgtttttctaatgttatctacacgtatttaaatggaacataattaaagcccacaatttcgggggaatattgttatagaattcgaatttaaatgtaattaactgcctacctatattactataaataagggcaggttacacaaaaaaagggacagaaaatctttgagaaaagagatactaattataaaaccctaatcctatatccaaaagatatctgaataagatagactcgtggactatgcagagttaactacaaaaccacgtaaaaacttggtgtcatttttgtttctatttagtcttctcaaatttcttataatttctgtgtcaaatttattacgaaaaaaggcttattaattggttaacgaaaatctacgttaacagtttggtgctttcgttgagagcctacatgataaaagctcagaaaaatcccttctaaccagagaagaaagaaattttctccatggctaatcatgatgaaaacgataacagtcgccttgaagagacaaactgagatcttggaaaagagccaatgggctcacaaaggccacccacttcaagaactacgcgttcaacaagatcaacacgttcaagaagaagtcaacgtgatagtgatcaaaacccaaaaacaaggaatgaggaaaccaacactaatgctggtggatctgtacctatgagtgaaggagctt

SEQ ID NO: 252165 - DNA, 572 bp, Cannabis indica
aacataaataactgctaatttccaaattaactaagcgggctttacatccctggacctatgataggatgcagttgattatagagcggttaaaggttggtgggaatccgaaggcattaccgttgaacacccttgacatctgcgttcaactccatgatatggagcctggatgtatgtctcaagttactgttgctaaggtgggtaatactatggggaagtatatagagtctgatccgaaaaactttataggagtatggagagatttccttcgcatcagggttactttgaatattgataaaccattacgcaggcgaatgaagctaacgaaggatgatgggagctggttctggattaattttaagtatgaaagggccccaactttctgtttcatttgtggtataattgggcactcggaaaggttctgtcataagttgtttcatcagccaattgagcaaatagtgaagccatatggtgaatttatgagggcctttccccaacgatctcacaagaatattggttctcgatggctcagaaccagggggtggagccccccgacggaggttggtggtgctgga

SEQ ID NO: 252166 - DNA, 1062 bp, Cannabis indica
ctaatttctagcattataaaataacactcgcctttaatcttacaccccatacagcggtgattagaactatgcactttataaacaataagagaatgaaagtaatgaatttaaatttgaattgtaatattttttttttttaaaaaaaatacattttattgtatagtcaaatctaatataacatagaattaatatatatatatatatctaataacaacatctaattattttttttgttatttatttatttatttattttctatatttttttttctattttcttattttttatatttacaaattaaaatatctattaccttttaaaatacttttgagaagtttattcaaaatagttttttaattgtatgatattatctgataatttaaattaatttttcttacattatctcttcattctctctatgtaatattattaattttgatatataaatttataaatcgttattatatttttttcaagatattgacaattacaagtgagatacggtgatgacaaaaattttaaatatagtgacacgtgagatacagtgatgacaacaattttaaatttgatgaatttcctatagattaatcaattgtgttattagttttttcctattctattttttttctaattctattttttatataagtttaaccacacaaaaataatatttatccaattgctaaaattctatatttcaatttaattaacgcaaaatatatatattttgaaaaatgattttataaaaatatatgtctattaaattaattaataattatcatttattgagttcacaataattaaaaaaattaagactctaaaaagattaatttatttttcttttgttattaagagttaaaaaataaaaattttaatagctactcaccattaaacaaattatataaaatgttaaaatttaaaatttgatataattttataacttaattatcattagataaaatacaaccccacgtgaagcacgatttgttttctagttttaagatatctttaatgcattatctaatgtatatatgtatatctttttattttttcttctatgg

SEQ ID NO: 252167 - DNA, 1427 bp, Cannabis indica
atacgcctaagttagttagggtgtttacacaaaaattttcccttgtaggtcgaccggttctgctacaccagaaccaaccggtcgatcggttctggaaggatacatatcttgggtttttcacccccaactcgaaccaaaaccaaaccaaacctatgcaactgctccagatcaataaattatcataatcacaacatatcccaagaatcaattaacaacaattcattcattcaatcaaaattgcataatcaagtgaaattagacttaataaacttcaccttaaccaaaccaaagcaagcagtcactaactccaactgattcaaacctaataatactccaaatccaatctacaaacacattctaaactcaccaaaacatcacagctcagaaattagacttaaccctaagcaaaacttaattcaaaccatggaaattcaagctaaagaacatgaaactcacctttcaatcttgggcaacacttagaattaacttaatccaacctagacttggttgattgaagaagaaaacttagttttcagctggtttcttaggattttcgagagagagaaagagagagcgaatatatgtatcctttttatttcatctttttgtttttaatttacagttcctacccttaaataaaaaaacaaagaataaacctaaagtttatctttaattctaccaataaaatgttaagaaaaatcacataagacaaaactaaagttatacatggtaaaatgactattttaccctccccctaaacttaaactaaacacattctaggggtatttttgtcattttcttattttcccgattaaacctacttctcaacattttaacctagttaggtataattccaatataacacaatttcaaccatagtgacatttctgaccatttcgtcgagttccacaattgccaggcccaaaaatattttattcaaattatcgtatctacgatacccacatattctaatacaatctccgtaattaataaattacgctttattattcattaatttatatttccctaatcaactcataattagtttaagtaggattataatcctactctaatacccatataatcatatatttaataaaatatgtcaaattaaaatatcaatatatttttcgagatattacagaaggattttctctaggggcatgttcagctttgctagcgaactttccctttttcccattgccttgcctgttgttgatgttagaccttttactgcccgagcttgaattgcttgtgattggccaggtttaagctcgaattttgctcgctgaatgacctctttaagtttgatgaaaccatctgcgcgatcaaggaagtcactcatagaatctactggtccatcttttctgatatcctttgtaaagcccgcttagttaatttggaaattagcagttatttatgttaat

SEQ ID NO: 252168 - DNA, 672 bp, Cannabis indica
atagggaacaaatgggtgtacaaagtgaaaagaaatgctgataattcttttcagaggtataaagcgagactagttgccaagagattcaagcaaaggccgggaattgatttaggagaaacctacagccctgttataaaagcttccacttatattgactatagcagtttcaagatcatgggagattagacaacttaacattaataatgcttttcttaatggcaagttggaagaagatgtttttatggaacaacttcaagggtttgtggatgcatccaaaccagatatgtttgcaaactcacaaaatccctctatggattgaaacaagctccaagagcttggtatgatagactcaaaaatactcttgttaacttgcatttcaagaactcaaaggctgattcctccttattcttttacaaagcatctggttcggttgttatggtgctcaaatatgtggatgatatcattgtgacaagcaacaatactagtaagctaaatcaatttattaacaaactgcatactatgtttgccttgaaggatctgggtcccctgcattatttccttggtattgaagttcacaaagatgagaccagtttgtatctaaaccaaggaaaatatgtgaaagaactcctactcagtttttctgaatcataaagtctgaagaaaagtgtaatt

SEQ ID NO: 252169 - DNA, 800 bp, Cannabis indica
aaaaataaaaaaaaaataagggtggcatctcccacgtgtgcgcgtgaaaacgagtgatcacttgcacgcgcattaggacagggtttgtctgaagaaccacggcggccccctgtctgaacagcccagcgcgtgcagaaatcttgcaatgcaagatgcgtgtgcgtgataccccgagtgtgtatccctcctacacatgcagatggtatgcaatgcatacttgcataccatccgcaccaaatgcaattttttttttttttcattttttcacttttgatggattttatttaggcccaatactaataatagttgtttaattaaggttaaattcctctcatttcggccttgtgtgagagttagggggtcattagtagtgggtgcgacatactgaactcaaccctccctcacatgaacaactccaattgtgaaggcccatttaccttatttgaataactgtaatagattaattacactagtttaacctaataaaattgattagcaacataattaatttcaaaatacatgaaatttatttttcatcagattatttttaaattaatttaagaaaaacacgcttagtttaatgaaaatattcaagataaactatatgtatttttttgtgtttaattaaataaagaagttataactaattagattcttctagatacttaattatttgaattttcacagaacatatatttaaattaattttggatcaacttaaattagaatattttgaaattaataattaagtagaattttctagaaaattagctattcaatactcttaattttagatcaac

SEQ ID NO: 252170 - DNA, 513 bp, Cannabis indica
tcaatccatttaagccctcttcaacaatgtatacctacaaaaagtctcaaaatcaacatacttgatcttccccagacaatgtgagattgtacaacttatccagtgtttctccgtacagatcacaagactattgactgtcacaagtctgtgtagttgtgaattggtttgagtccaacaagtttgaatttggaatttattggcttgttggtaatttatgggtttatttggatttgagattttatttgtttatataaatttgtttctgtattcttaaaaatcgagaatgaatagggaaaaaagagtgagctgataaagatagggtaaatcttttttgggttaccttttttttcttctctgcgtttggagctgacatttctggttctggatttggtctttttgatgatgaagttatgaaattagagttaaagttcttttagttagattattaattttagtgatttaattgcagatatttaatttaatttcactaaaatgagtttttttttttaattt

SEQ ID NO: 252171 - DNA, 895 bp, Cannabis indica
aaatatacatagcttagttggtttatgtgtataatatattatccaatgttatgggttcaaaatttgaaatatgacactcaatttttaatgttttatatatatatttttaagagtgaaggcccaaaaatttaattcgccttagactcatatattctcaaggtcggccttggttaacattcacgtcttaaattatatgtttgaatattttttttcataacgttattcgttatagtgataatatcattcctaaatttttgaaaaattatgaatagtttacagtattggaaacagagttcttgatattccaatttaccacgcgtgttcaaaaactttcaaatctatttttggcactttattcgaaattttttaaaaatttatatgaatggtgctatgagtataacaaacaccgctatgaaaaagattaaaaaaatatttcagtatgtgttttctggcacagagattgactaaaaaattgtaatagaaagttgacggtagcacttcaaatttgaaatgcaaaagagaaaagttaagaggtgacacattgatatttatgtaatttaatatggaattctatatattttaagaaattgctaaaccatggtattaaaccatgtaatttaatatggtattaaaccatgttcaaaaaaaaaaagaaattgctaaaccatggtattaaactgttgggcttgggcatcttaaggtgcctaataacaacactcaacaatgaatgtgaccaattacactagcggcaaagcttcaaaaaagtgtgaagaatgctagatttctaatctaaattaccatgtgacaaattatacctattaatgtctatcagccaaagacctcctaataaaaattaagtaataacaatccactattcatattagaataaaagaaa

SEQ ID NO: 252172 - DNA, 795 bp, Cannabis indica
gagagagaaagagagagatatatggaatcaatactgtgaagctcagtcaattgattggcttgtttgatctcttatttatgtaggtgatctttacaagaatggttagttacaaactcagctaaaacaagttgcacaaaatagaaaaataactaacttaataacaacatgttagttaggtataaaccgtattaactaacaactaattacctaactagctactaaccaccaatatctacaatatcccccctcaaattacattagtcaatacaaagtgttaatttgtctcgaaagaacaaaaaaggagttgcagccaaaggctttgtaaagagatcttccagttggttttgggaatctacgtatcgcacatcaagttcttaagccaaaactttgtctcaaacgaaatgaatgtcgatctcgatatgtttattacgatcatgaaacacaggattggaagcaggagaccctgctcctaagttatcacaccatagaactggataggttgggactgtgagttgtaattcagagagcagggattgaatccaaattatttcataaatggccagtgtaagagcattatgggtgttcgcggtgcgggtggtgcggtttttaaccattttttcaaaccaacccgcacatgtggttttttcaattttccaaaccgcacccgcaccgcgatactaaaaaactgcagaaaccgcaccgcaaaaaataatgcggtgcggtgcggtttctgcggtttgaactatcacaattttttttttgtaagtcatcacaaaataattaaactatcattaa

SEQ ID NO: 252173 - DNA, 549 bp, Cannabis indica
aatattcttgatgaaattatctggcaagggctcaagtgacaatcattacactctcactatctatgctacttgacactttgttattgataacaccactgatttatggcatgataaacttggacacattgattacaaaaatctgaaagaattatccaatggagggatcgttcgaggattacctaaattaggtaaagaagctataggaaaatgtggaccgtgtcatctcgtgattgaaagaaagaatcgtactctaacagaaatggctagagtaatgttgaatagcaagaagcttacaaggcgtctttgggccgaagcaatcaacactccttgctacacaatcaacattgtgtcttacgtccaggtactcacaagacatcatatgagatttggaaaggtaagaaaccaaatgtaagtcattttcttaaaacactccttgaagacgagatgccatatggtcaaccaggaaccaaggaaccggaagttcgccacaggaataagggaaatctggggacacaacctggggtacatgggtcatcgttaagggatcgc

SEQ ID NO: 252174 - DNA, 898 bp, Cannabis indica
attcatctctttgttgaaaccatggacaaaaaattctttttgacttttgtttatgggtttaatgatgagattgggaggaggaagctatgggctgatttgagggaaatagccagtacagaagcttgggtggtgcttggagattttaatgatattctcaataaggaagaaagaattggcaccaaggtcaagtataggaattcttcggaatttcgtgattgtgtggatgattgctaccttgaagatgtaaagtttgtgggtagtttttttacttggtgtaataagcagttaggagatgaaagaatctattcaaaaattgatagagttctggcaaatcctatctggcttgatgagcatccgaatgctgaagttgtttttcagaatgagggcttgttcgatcattctcctgctgttctaactgtctcggcctcttttattggaggcaagaaaccgttcagatactttaggatgtggtcttcgcatcctgaatataataagctgattcgagataggtggatggagaaggatagtggtacaaaaatgtttcagatagtgaccaagttaaaagggctgaaaccgaaacttaagcagctgaatcatcagtattttgctgatattcctgctgctcatggtaaggccaaaatggagcttgatgattgtcaaaaggagctacataagtgtccattgaatgctgagttacaggttcgggaagctgctgctaggactgaatttgctaccattcaagctgcttatctttcttttctccaacaaaaagcaaagattttatggctcaaagatgggactccaattcagctttttaccacaatagtattcgtgctaggagaagtcaaaatcaaattttttctatcatggattctaatggggtaagagttgataatcc

SEQ ID NO: 252175 - DNA, 583 bp, Cannabis indica
ttaatttttttttactttatactatatttaatactaaaatataaatttgcattaatttttatcatgttatgcaatgtagataaaaaaaaagacgcaccccctcacttattaaaaaaaaagtgtcgtccccctcaacttaaatcctgggtccgccactgcaggtaacttgagatcttgagttgtctctgttactcaaattgtataaaaatacatttgttctctctattacaatttaatgagaatcaatttagtcatcccattctttcattatcctaaaactaatttggtatcagagccacactattggtgacctcatcgtttccacttctcttcttttctatcttcttccttcttcgagcttctctgttcttcaatggcgagagaaggaagaacttaaattcatatatagaaataatcatgaaacctttgaagatcctaagtgatttgtagcattaaaaaataaacctagtgctaagtcccatgcctagttgacctagtgctaggttctagcacccaaattgagatattgtcaacatgtgccattttcaataacagttcatacaaaatcttccgagtatattct

SEQ ID NO: 252176 - DNA, 777 bp, Cannabis indica
cacaaagctttagcttttataatatattgcatagatcagtaaacataatcctaggcttttgacaaaacattaaaagattcaataatatatgaacagtagcatcatctgataatttatgctcaatacatgtgggcctgcccaaaatgttagaatttaagagtttgtgtcctatgtattatgaaacataagctaatgatattcccagtatttgagaacatgagcatctatcttggtcgttaatgactgcatatttcatgtgtgggttccatatagtattataggtccacctttgcattttaaccattcagagttcagacacaccacgtgttagtagtatacaatacctaacactagtgggaaccacaattaaaagttgctgaaaaggcttatatttggttcataaaatatttttgagaaaataacaaaccgttaagttaaattagacaaaattatcactaacataaaaacttcatttattaagtaaaattttaccagtctaaaaactacatataataataacgaattttattgtgttctataaaagaaaatttattcgtaaattataataataatttactcaatttatcatctagtcttaactttaaaaattcaatttttaaataattaaatatcacttttaatcacaataaaacttttgttactaaaaaataatatttagtaataatttacaattaatataattttaatcacaacttataatataaattgacaatttattacatctaaaaacatatacctttaactacataccacttg

SEQ ID NO: 252177 - DNA, 535 bp, Cannabis indica
aaaaaaatatataacttaacaaattaattttataccctacatatatgattataaaaagagaatgttaagtgaaccttcaagtgttaagcgccacaagatgtgatatactcttatttgtgctatttaatatcgagttttacatattttgatttaataaataatatagaaattgctaactatttataatgcaccacatcagtatgatgttaggtatcttaaggtgcttaagaacatctctaatacagtattagcactttttaaaaatattaaaaatctctatattatcaaaaaaaaatataatattttattttattttttttaatgttattttttgacacttatatactaaaatatagcaagagaatacttttgtggaactctatttaagatactcttacttcaaaaagtattctaatagtaagcatttctcaaattagttaacatatgcattattatttaatatattattttttttaatatattagaagaaaaggaaaaaggaaaaatatgagtatatgacattaatgcatcaata

SEQ ID NO: 252178 - DNA, 1779 bp, Cannabis indica
ggactcatacgtctccatgagttagaatactcgttgacactattgggccgacctaatagtgggtctaagaatgccgctagagtttaatgggtacgtttccattgacttgctggtatgccgcttgcacgagacgtggcataaacctctaagagatgcggagtgtgccttggccacgagtctcaacatgagatgacatgagtagtcattcgtgggctagtttggatgcacgtatggggcggatgcaccatgctggaaagagacagaggtctaatacatgcaactagttgggtggcatgtctcgagggcctaccaacatgcgtgaaggcatggtgccttgagaattggtccatggacgtatgggagtctttgggcaacgagggagactattcagacaatattgaatggggatcgatagaagcattggcaggtcagcttggtattgatatcttgtcacacatgttaccttgctcacgagtgacgaggtgagcgtcggtgttgggatttattttatcatcgtgagaacctatggacattgcgagtatcttggcttgagagcctcaatgcatggatgcactcatggatgcttgcgagcatgacttgacgagagttgtttgagagactgaagtgtgcatgaggcacacggacgcgcgaaaaataagcccattgttactcgaacggttagaagggtgacatggattagagaagtcaaggtgctgcacgggagttctgatgtctgaaaaggtgagcccatggcagtttgtatcagggccaagttcatctcagtgggaggtgaaccttgttggcctatcctagaggggatgtaggcgtgtggaaggatgctagaaaggcaactaccacgtgcaattgtggagaggcgcaacaaaatgtttgaaacttgttggcatagtacaaggttgattgggcaatccatactatatgctttttacactaggtcgagttttcctgagtgacatcgtaagccgcagggtgcttttgttaaaaaggaagctcgttggcaggggtgttgaagtattttaggggctgtcagattcttgttatttgcaacagtggtcgagagttgttgactgagatggttcaaattgggatacacatgggatgcttcagttgctacgtgtgtgtgtcaagagggatgcacatggagaccaaggggggaagatgccgcaatcatcacatgattattgtacttagaggtgttcgcatgtgagcattatttgatccttatgcgagtgccgagatagttaagtgggatgtgttggcttgtaaaagcgccagtggtcataagtcacacaaaggcatcgatagagatgcacagttgtggaatgaatgcatcaaagaagccaatagggctaagaggaccgagtacacacattgagatggtgctagagtttgagtgaaggctaaagggttgtgccagcaagacttagtagtcatgtgagcatgcaaaggtcaaaaggggtgctagagtttgcatgatggccaaagggtttaatcattggaacttagtacatcttgggagctggtagggcataattctagtgtgaattagttggatgattgagtggataatgcacgtatatggaaatcgataggcgggatgctcttttagatggcatggtatgcataaagagttaggcggtaaggcactcgcgtgtgggcatgttgtcaaggacgtcaacaaatgaaatgggaaagagatcctcacggttcactcatcagactagggattcattacaagcatcaagatgagtatcatggaga

SEQ ID NO: 252179 - DNA, 1352 bp, Cannabis indica
cgaagctatcttcataagggtctctgcctcaaaataggtaatggaggtgccacttctatttgcttccatccttgggtcccagggggtaatctccaaccaacgcctcacctacaagcctctgctgggattagtctggtaagcaatttcatcattcaaaataggtggaatgaagagttaattaggtgttggtttcacaatgaggatgccatgaggatactcaatattacccttcttaagcggcctttagaggactcttgactttggttaccagaacccaatgtgattttactattaaatccacctacagagttatcaagaacttaagggagagtactattagtggtagaaaatggaaaattatttggggagctaaaatccataataggcttaagagtagaaaatcctttccaacagcatgctcacaaaagaaaaacttagatccatcctcagcataaccgacattagtagtcttctttgctctttggcaatggaaagctccttccatctcttttaggactgtccttttactagagctattttgttcggttgttcttagcagatcagaactagtgatgctaacatatctgattgggttaattggctgaattggttcatgaaggaggagcacagacctaacactattcatcaccatcttcttttgggggggtactgtcattattttcgaaatcatttgaaaggagagaaattgtattatccataatgaaaaatcaacacatttaactgttaatttgaatcacatcaatggaaggcttcttgaacttgctgagattcaattgccagctactgctatgctgtctaaatggctcccacctcctgcaggctggattatgtgcaacactgatgtagcaatcggggaggctcaatcgacaggggaggctgtgttcaggaatgaggaagaggttgtcacaaaaattcttacttctcgaatttgtcattgtgatcctctagcaggggaagtagttgctctttgttggggtttagaggaagtgtataagcaaggctacaagaacgtgattttccatagtgattcaaccaatgcagtatttgcagtgtaacggaaacgccatgaggttcaaaccgtacaacacaacatctaggacttagtgaacatgttccatatatcagtaagcaatcttaacctttgggaggtgaatttgattttgagaaagtgtaattgtgtggcccataatgtggcttaatgggcaaatcgatacaataggtttgggaacattgatttgtctaattttggcagtttcttgcacattggtttggcagatggctgtgagtttaatttcagtttaggttagtttaattcgaattgctttgttttt

SEQ ID NO: 252180 - DNA, 1258 bp, Cannabis indica
aattgtgtttgaaagggtattaatcccttcaatgtaaatgcttgaatccaaaatccttgatagttgtaacgatagatatcaccaaccgggtctttaattttttcaagttttgtcaaaatttcatcaattttctcatcatctctctccatattgtatagaaaattattctcccaacacaaaattttattggaattgctagagatgactctacactacacttcttcaatcctttaaataattataataacagcaataataatatactactactaataaaatagtaattttattattgcacctaatatattgtctttactagtgaaatatgcagatatgatcttatatcaagattttatcccattatttaagagtaggtcacaaattatatactattattatatgaccaataattctctcttaaattttaaattgttgttgctttgatataagagtatctccaatgaaagacacaaatattatattatatttagtacaaaaaattcaaaatttataattgtatttcaatacatatataaatttacataaaagaatacatataaatatacacactatcataattgatataattaaaaatatattaaataataaatttttacatttaatgcaaatatattaaataataaataaatgaatctcgtttttagtaaatttttacttttttaagaagttttgaaaaaaaagaaaaaccaatacatttattgctttttgatgtaaataaaatatcaattagtaatttttttatttaaaaaatttatttacaaaattttacacatatataaataataaaataactatttttttttcatccaataaaaaaaaacttcattaatcaacaagaacaaatacaaacaattaccccaagaaaccaacccggggaaaccagaaacacaaaagattcaactacctgttacataagctagtcaggtagtctttttttctgtgtagacattgtccttttacttataatttgccatctataccttacggtactctttacatcattacaatatcttttattgatctaggatagccattaaaaatatatctgggttaggttatttttagaattaattttagattaagtttagtatatttttaatttagttttaattgtgtttggagaaattttacgcttgttatcttttatttttacagatttaaaatagaagaagattaaaaaatatcaaaagaataagataaaaaaaatgtaaaagaatctcacaaaaagataatatat

SEQ ID NO: 252181 - DNA, 996 bp, Cannabis indica
aattaaacgtagctagtttagtagctccaacaaaacaagtccaaattattctcgtggcacttaacccctattacctcaaaagtcatggtcatcacaatcttatccgcctaaaaaatattaggattaaaacagataattagtttctcaaaatttactctctaacctgaggttgcacctaaaattcatactttgacttctcaaaaatcggtttataaggttaatagttgacttctcaaaattgcaactaaataaaattctcatttttttttttatcacttattatttctctattttctatttcatcaaatctattctatgtgttagtctatttttaagtaacaattatttaggtggaaaaattattttcattgtagttgagcctctttgagtgttgcaagtttaggatcccttgaaatctccaagtgatagcggcattttatgtgatatactaatttcatttattgcaaatgatttaatttggcaatatcgcattaacttagaaaacaaataaagttggttgcaagtaaatgattatttaactataattaataaaattaaaagtcttgttttcttggtaaatttttatacgctttcaatttttacttttaggagattttcttttcactatttgaccaactaacttttagtaagggttcaatatatattaaaaaagattatcattagcaatattttctccctgcagttgtacattctagtattgataaaaatagattattaatagtttatcaaatattactaaattaaaatataacaattattttaaccataacccgtttagagcaggacagagaaggggatcaccctttcccaaacccactttgtttaaattgcaatttttttttttaaatataaatataattaaaataatgaatatagtgtgatttatagaaaaggaaatttatgtgagtgtgtttatcccacattaataatatgtgagtagtttatattagataaattaacaattaacccaagatc

SEQ ID NO: 252182 - DNA, 974 bp, Cannabis indica
acggtgcaggccaaactcagactggccgcggccctggcatctttgcagcgcgtaatgaaccccatgtgtacattgagggaattgaccccgagatggatcaactgcgagacacgataggccagatgcaaggccagttccaaactgtgcaccaagagtaaaatcaagctcgagtggctttgactgaaagtctcgctaaccaaaggagagaattccaatctttgctggaagatcatgctcgcgagatgaggaggcgccaagacgaccaagatcgtcacacccaagaggctggcgacttaatacgaagctacttcaaccaaaacactcaagggatgggtactaatgcccacaatcaatagataccttaaaccaaggaactagagggagagggtggtctatggacctgaagagcgcccaaggaaccaagagaggactaggagtcacccctccaacagggttccccgcaataatattcgaccacccccggccgatgagcaagtcctacccggtcatcatatgggacgcgatgactcccacaatgtccgtctaaggcggagtggtggaggaaactctagaaacaacaatagtgaccgtggcagaaacagtggaaggacgccccaacgtagggagtggcaaccccgcgatcaacgtggccaaccacgagatggcgatgatcgcccaagaaattgtaggtctagggggagaagagaagaccctgaggtcaacagtgactaccatccaaactaccctgacggtcatggagatgatgaagctgaaagtcgggctaacaaccaaccaaatcttgagctggggggttatcaagccagagggccgtatgccctaaataggcaacatcaacatgaaaatccaccccaaaggggtaggaatgaccaagtaccacccccggcagatggaaaggctgacaatcagaatgctggaggaaggccaagaactgggttagtttttgaacgggtagg

SEQ ID NO: 252183 - DNA, 528 bp, Cannabis indica
cggttttacaggcattgtaaacccggttagctggttttacccagaaaacccaaaaaaattcaaagcctaaccaaatcgattccaaacttaaccaagctttcaagacctgcataatataccctaataaatattttccaagcaataaaaccattacccaagctcagaatctaaaatcaccattaaagctccaagtttgagttctaaaactcaacacttgcttaaatctactaatagacatcaaaacatgcttgaatcaacatatctaaacataaataaacttctgaaaacaaaaccaaacactaacaacagctacataactcaatttatcaaaatcatacaaaattcttaacttcaaactcaagaaaaccaagaaggagttactagttgagaccaccaaaatccttatgaaactagcttaaatttcagaaaaacacatcaaaccctagcttgttctagggatttcgagatagagaaggagagagttgaaagagagtctttttgatgtattttctaattttgaataaatga

SEQ ID NO: 252184 - DNA, 571 bp, Cannabis indica
caactagaagaattaagtatgagaccttaagatgaaacctaagtagtatatgttcaaataccattggactatagtaataattatgcctataatactacactgttttgttattcagtctttaaatacttttaaatctctaggcaaaattctacatttaatcctattaatataattttttcttgttcaattttaataaaaaaacagtatgttgttcaaatcattagcacaaactaaggttaataatatacataaatcttataaatctatagaaaatatgataatcatcatcgttgtgggtacatacttacctttctagcaacaattcaagcacatcttcctataatttcaagcttcaaaatcaattcaaagcgagaaatgaaagaaatctgaacttttatctcgttatagtatcaacataaatttcaagcttcaataatcaatttaaagtaagagatacacccttaatagttgagatacttctacaccactattgtcattattgcaatgcaaaattaacaaaaaattaaccttaaataagaaaaggagtgacataaaaaaacaaaaaaaaaaa

SEQ ID NO: 252185 - DNA, 1158 bp, Cannabis indica
tgctacttttgattttcctttctcgtgggaaaggttctttaatcaaaaactttaaaaatttaaaaaaattctaaagtaatgggtttgtaatatatcatgtatttctagatagatttcggttaatcatacacatattcccctcaagtaattttaaagatgacactttgtaattacttgaaaaatgatttaactttattaataattgatgttcaaatattacatcagaaatatgagttacaacttcagtttactggtagtagggtcgcaaatgttccacgttccagtagttctttatcatcaagccattaagccgagctaatttgtaaacccaagtttctattatcgtctcaatcacataaggaccctcccagtttgggttgaatactcctacagatgcgtctctcatatttgcaaatactcaccttagcaccaagtctccaatgttgaagagcctctttctcaccttcttgttgaagtatcttgtcactcggtgttggtatgctgtattagtaatttgtgactcagtacgtttttcatcaagtagatccaaggaaaattttaagagttcgtagttttcttcttgattataaaactctcgtctatgagtcgtgatatttacttttactggcagcattgcctctgagccaaatgctagcgagaatggagtatgtcccattgctatcttctcagttgttctatgagaccaaaatacttgaggtagttcatcgacccatctacctttggcaacgtctaatttctttttaatagtatccttcaaggtcttattaacagcttctacttgtccattcgcctgaggcctggatactgacgagaagcttttgataatcttattcctctcccagaactcagtaaataattcaccaatgaactgagttctgttatctgatactatcttaatgggtattccaaacctacaaattatgtttttgactacaaagtcaagaacttttttgcagattatggaaaccagaggttcaacctttgtcaattttgtaaaaaaattgacagccaccactgcgtactttactcctcctcgccctgtgggaagtgccctaatcaaatcaatcttacaaatgggtaaggcgaggtcatcattctcagttccgttggtggtacgcgaggtatatgcgagaatct

SEQ ID NO: 252186 - DNA, 1354 bp, Cannabis indica
cgaatagactagctcgaaaagtacgacacacgataagtctaaaaagcacgtcacgacatattaaaaattttataatttattaataattataataaaatataaatttatcatataaatgaattaaaataaaaataaaacttaaatataatatactgaatattataattttataattaaaactattgaaacattaattaagattatatattaatttatttataaggtatgatataaaaatttgaatatttataagttaatatttaaattctaatgataatgatgttaacaatttttttatataattatttataaaatattgtttaaaaattatataaatataactaaaattttgaaatatatataatttagtaattgtaaaaaaaaattatgaaaaagtaaagtacgaatttaagtccatatatgaaaatgggctgacctgtttaagaaatacgggtcgacacgagcaaagcacgacacaaattcgagcacaacacgaaaatacaaggtcgtgccgggcttaccctttaaaattgttgacacgacacgacacgatccatattttttgtagcacgacatgacctgacctttttttaaaagcacaaataaatacgactatcacagacgcacgaacttacaacactagtcctaaggtctccattcttgacattaggggaagagagattcgaacttgagacctttttttttgaggagaagtgtgagactactagacttagtaggctatgcttatgaccacctcataattttgatattttgttcattaatttgaattagtttggtgatattaaagaaggttttagttttgaatattttagtttgtgatttggagttaatttaaaaaatttaataattagaattggagaggtaaaccaaggaagaagaacaaagaaaagtgaaaaaaaaggaaatatatatttactttttaaattgaaatttttaatagttagataaaccaataatgcttcaattttatatagtgaaaattatatatttaaaattatatatttcatgagattttatacaaatttgtgtaaaaatgtaattttttttctaaagaaaattattttatgaagaaaattaaaaaaaaaaggtaaaatagtataagataactagttaccctaagaaggtagtggattgctctaaggaggtaactggttaccctctaattaccctaaactatttttctcatatttttcattttttttaaaaaaatatcctgtaaactttgcccaaaaactatacaaatgaaagcccccttaataatatcaaagaccatttacacaatttgggtagaattagttactagtggtgtctaacactctcttatatgttaata

SEQ ID NO: 252187 - DNA, 1799 bp, Cannabis indica
tttttaaatattaatttacgtggaccaataaaattgtgccacgtgtacactgtgtacacgtggacattccaacctggcatttaacagctaaaaatggacggaaagggctaagtgctaacagaacttgagtttagggagttttgcggcaaaaattttagaattgggggttagttgtaaaaacctccctactttagggggttttaccgcaaatatccctttattaaaacattatttagctcttaataactccaactagtattattatgaaaaacaaattggtctaaaaaaactttctatgaaattaaatataaagtccaccaaaatacattctatcccaatatttaatatcaaatttatatttaaataaaaaattatgtttgatgtgattgtgaaattgatatgcacacgtatatatgatgtgtacacacaagacactaacatatatgacatatatatgcacatgtgtgaatgcatatttgcatattgtgagtcaaaaattaggtttatttgagtgataagtcctctaaatatataagataagattttccggcaaaaacgacctttccagacttttctctctcgtctctcaagtatgaacaggggctcgttttcttccccagcacgttcacaccttctctctgcaagtttccacaaggtgaaacccatgcccagctccagatcgttcgatcatggtggctccgattcctcctccactgagacacagcaaagctcgacccgtccaagccgagccagccgtctccctctgcagatacccaaccacccccgtcgcatcaccatttactccggccttctcccaaacccgtcgaaccgtaccgagtttaatgcggctcttacaagtactgactttctcttacaaatctccctattcattgtcaaaatcgttccagaagaactggttttttattgaacaattcaaatacatttttggtctgcctattaaattacactctggaaattgtactctgctaagatctgggggtaatgggaaccctcctaagtatgtcgacagaagggatttaattccctttgctagactgtattcgaaacccacatttaatttgttctgtatgtgtgttctgtctactgcctatttcaaatcctttgtgcagcaaaacttcctagtattaaatgcctttgatacgactgatactgctctgctttacccatataccgtgagaatttatctatttatagataagactaggagaagctttgctccgtgtgacttagctatacatactttcctctttctggatatcattctgtcatttagtttttgtccatataaatacctgtttatccctttctatcacgtccatcttcaccattcacagctttactcaagcgtcctcacccatatgtgttcctgtgcattctagtttcagctttcaaccgtctgcctcttgttctcctgtactcatattttcctatcatacgtcaatatctcgtaagttttgtttttgggtcagtttggtttcgattggttgtgttacttttggaattgctctttgggttactctggggttatctcttgctgccgtggttctcttttacataatatccacttccctgttcaaccttgctatcaatcaccctcctaatcatcttctttttataacccattcaaaattcttgtattctcaaattcccactcagtctctccccctcactaaaacacggcctggttcttacttgagttgtgatacttattgctcttcagttttttgctctatggaggatctaacaaactctctttctgttgctctcaacctcacaga

SEQ ID NO: 252188 - DNA, 4614 bp, Cannabis indica
caccttgtcctcaaggtggaaatgagggaattgatcttgtatgactgcaaagtcttcccaagttgcttcagttgccggtaggttctcccacttgatgagtgcttgtggtggcgttttgtgagtatccggacgaatggacatcacggcttcaggattcagcaaccattcaagatcagaagtgaggttcgggggcagttgggctgactgctggtttgggccaagtgcagcacgcagcaatgatacatggaatacagggtggatagatgcacctggaggtagttgcaaacggtaggcagctgtaccaatgcgtgagaggactggaaaaggcctgaaatatcgcggtgcaagcttctcattgaggcgtttggccactgtcctctgtcggtatgggcggagtttaacatagactaggtctcccaccttaaaatgcacttcccgacgtttcttgtctgcttgtgccttcattttctgctgagcgcgaaggagattatctttgagtaacaccaaggtggcgtctcgggcttgcaaggactgctctacttccgaaacctttgtgctggctggttcgaaacgaagcaagggtggaggctctcggttgtaaagagctttgaaaggggtcatgcctgccgagacgtgataagatgtattgtaccaatactctgcccatgccagccacttcccccatttgtttggtttttccccagcaaagcaacgcaaataggtctccaaacacctgttaacaacctcggtttggccatccgattgaggatggtaagctgtactttgcttcaacttggtgccatgcaagcggaagagctctttccaaaacaaactaaggaaaattttatctcggtctgagacaatggagcgcggaaaaccatggagtcggaccacctcacgaacaaacacttcagcaaccgtggctgctgtgtaagggtgcctcagtgggataaaatgcccatatttggtcagtcggtcaaccaccaccaagatagagtcaaaaccatgcgacataggcagtccctcgacaaaatccatcgaaatatcctcccaaacttgttcgggaatgggaagaggatgcaataaccccgctggcgattgagctagatacttattctgttgacagattgcacattcagccacaaacttttgaacatctttcctcattgcggaccaatacaagtctcttgccaagcgctgaaatgttttaaacacccctgaatgtcccccaaccttgctaccatgatactcttctaatatcaaaggaatgcatggagaagtggatggtaatacaagtcgtcctcgaaatcgcaacactccttgtactagtgtgtaaccgccaccatccaaacctttttctaagtcttggagcaccttagaaagcatgggatcagccctcacttgatcttgcaaatttggtatagaaaccacattgggtacagtaatggcagccatttgtggctcattctggaccctcgaaagcgcgtcagccgccttgttctcgagccccggtcggtattgaatctcaaaatcataccccataatcttagtaagccacctttggtgctcctccgccaccaatcgctgttctaggagatatttaaggctgcgttgatcggttcgtaccacaaacttgcgccccaggaggtatgggcgccacttttggatagcaagcacaatggccatcaactcacgctcatacactgacttggcctgggagcgaggggacaaggcttgactgaaataagcaatgggccgctgattctgcattaggacagcccccaatccgaccctagacgcgtccgtctccacaatgaaagggctggaaaaatcaggcaaagctaataccggcactgaacacatggtttttttcagcctttggaaagcattttgggcctcttcattccatccaaaggcatccttcttgagttggtccgtgagtggccttgctattgttccataatccttgacaaacttgcggtagtatcccgttaatcccaaaaatcctcgtaattccttgagtgttttttggaaccggccattgtgtcatggctgccactttggccgggtctgctgccacgccgtgcgcggaaatgatgtgccccaaatactcaacactctcctgcccaaacaagcactgtttgtggttagcatacagctggtgttgctgcaatcttctcagaacctcttttaggtgaccaacatgtgcttccaaagaggggctgtacaccaaaatatcatcgaagaacacgagcacattatgacgaagtaggtctctaaagatggtgttcataagagcttgaaacgtggctggggcattggtgagaccaaacggcattacgaggaactcatagtgtccctcatgagtacggaaagctgtcttctgaacatcttgtgccgccattcggatctggtggtaacccgacttaagatccagctttgaaaaaatcttcgccccatgtaactcatctagaagttcatcaattactggtataggaaatttgtcaggcacggtctctctgtttagggctcggtaatcaacacagaatctccaacttccgtcctttttcttgaccaacaataccggactcgagaaaggacttgtgctaggcacacagatccctgctctcaacatttctcgaaccatcttttcgatctcatccttttgaatttgggcatagcgataagggcgaaccgagattggtcccaccccttccctcaaggtgatatgatgctccttttcacaaactggcggtaaccccgggggcatgttgaatatttccttgtattgatctagtaattccgccaccggttcaggcaccctcttctctacttcaacctcttgtgtatgtatagccccgaagtgaacccagaatccataaccattctgctccaccgaataaatcatagctttcagagttatgggggacttacagagactcgggtcaccttgcaaagttacccaagtaccgtctctttcaaatttcatgaccatagatctccaattgacttgcatattccccaaagtttctagccattttactcccaagatcacatcagcaccgcccaactctagaggaaggaaatctgttactacccggagtgtgcccaactccaacgatacttgagcacacactccttcagccttgactctgtctccggtacccaagagaatcccatatccagtggtctgcgtgatgggaaggcttgcagcttctaccacttcaagggcgatgaaattatgggtagctccgctatcaattaagacagttacaggctgctgcccaatccttcctgcaagtttcatagtgtgtgctgaagaaattccaaccagagaatttaaagagagagtggcaagagtctcttcaacctcagtttgctcgcccgatgccggagaaggtggtggtgactccacggctggtagtggttcatcctcatcggcaaacaacaaaacttgtagaaacctctgctcacactcgtggcccctgtgatattttttatcacactggaaacatagtcccttagctcttttttcttggtattccgcctccgacattctcctcattgtcggagcccgctccgtcaggtttcccgactgaacaggaggtgttggtggagtgggggcaactgagatggctcggttctggcgttaaggagttatgggacttacagtaggcttgttggatcgaacaggttgccccgacggaaacaactggtgcccatcctcaatcctttgggctgtgtccataatttgggccaatcccacgggttgtaggatgtgtaatgaccctttgatgttgtctttgagccctttaacaaaactcccttccagtatatgctccggtacccccggtaccctcgacgccagggcctcccatcgtaggcggtaatcccgaacggtggtcgtttgtgctacagataagaattcctccgaaaatgatccaaccggagccgctcgaaatcggtgcaacattaattgcttcaatgttgcccaagaggtgatcggccttcgctggttctcccattgaaatcaggtaagagcatctccttccaacccgacgatggccgcctccaacattagtggctccgtgagacgggatatgagaaaataacgctctgcccgatatacccatccttcgggattatccccagaaaacagtggcagctccattcgagggggacggtagtcatgacccgagaattgggcatggtggtatggatttggatgaggaggtggctgtggtgggaacgccgtctggggtggcggtgatggatggaatcgaacctccggttcgatttgagctgaggaggacgaatcttccctgtttgccgatcggggtcgaaagtcgttactggcagcgaccgtttcgaccgtggtcttccccgccgtaaggaatttggtcagttgagccatcatcaactccggtagtctctgcacttccgctctagtctccgaaacctccttgcccaattgagatttcacttctgccatttctcgttggacctcagcccgaagagcttccagccgttcctccgatatctccatagtagcatcctttcttggtcccatgatcttgctctaataccaatttgataggaatttccagtcaaatt

SEQ ID NO: 252189 - DNA, 664 bp, Cannabis indica
aatatttttgcccccaatacttcacttctagatcttctagctgaatccaaataggcacagtcctaatatcttccttttttagattgagatttggatcccaagccttcataatgacaggccttttattaaataaaatctatcccccaaccaatatctcatctctttctgcaatacttgtaaatcgaattatgaaaatgccatatgaaatcatacctactttgttcaccttgcctttccaaattcgtctagcaaaaccatccagtaccgagagaggtggattggcaccaaggacgcaacatacaatagctgagctccagtaggaaatttcatcttcaatttcatccattgtaatctagacttaatcctttttctttaaattggcaaaagaagagtctaagctccgcttcactgagtcaggtctgaaaatcggtggtgtaattgtaacacccttcgagattgaactttgacattcttggttagccgcaagaaaaaatccaaagtctgcagcaatctcatcttgcctctgcaacaatcgcaaagaagaatcaggggataatggttgaaacagcttctggctcgtatccttcaattgctcgtcatcctcatcgtcatctgagaattccaggggagcaacccccagaatttcatccatcgttttcgtctt

SEQ ID NO: 252190 - DNA, 602 bp, Cannabis indica
taccttgtttaatattcctggtcggagtaaagatggaattaaatcccgtctagatttgaaagagatggggattagaggaaatttacatccagaaattattggtaaacggacttttttaccaccggcgtgttatgccctgactaaggaagaaaaacgatctttctgtacatcattgtctcacgttaaagtacccgaagggtattcttcaaatatctccaatttggtagatatggacaaattaattttgtccggactgaagtctcacgatcatcatatactgatgcaacatattctgccggtgagtatccgttctgttttacctaagaaagttcgctatgccatcaccaggttatgtttattctttaaatctctttgttgcaaagtggtagatgtgtcaaagttggaaaatctccgattagaaattgttgaagtgttgtgttatttagaacaattttttcctccatccttttttgacataatgatccacttaactgttcatctggtgagagaggtaaaaatgtgtgggccagtgtatttgagatggatgtacccaatggaacggtacatgaaaatcctaaagggttatgtaagaaacagaagca

SEQ ID NO: 252191 - DNA, 931 bp, Cannabis indica
ttttgagtattactcatgcatatgtccaacgagccaggagcattatttattatacatatttatatatatctcgctgattacaatgataatgactcataaagagaaggattgaaacgaagctttgcatgagcaaacaaaggagtcgccttaaagagagtgtagccttcctcaaatcacatcgattctcaagaagatggcaatcaagattaaagcgcaagggctcatcgggccaggcatcagggttggtaccgagacttaggccgactgaagaggatgtggcttcctttaggaataaagtagccgtaaaataagttccaacaatattattcttggttgttggatatgcgattattgatttattattatagttgttgttggtggtattcgaaatctatataaattttttttttgtatgtgacagtttaaaattgacatgtatagtgttaacgactattagaatggtcacctattccatagcgactatgtagaacagttgcttattcttcaatagcaactatctataattgacacctattccatcatgttttttgttggtggcataggcataagtcattatgttatgtttgttcactaatagaggcaataaacatcaagttggtttattttcacttatgcccttaaccattttacttaactgtctgttatgacagttaggatcgagttctgcatcagaagctataaatagccaaattgctatagcattcgggcagcattgttttgggagaggttgagtgctagttttagtgttttaacaaagagagattcttggtgagagagttgatatgtaattgaagctttgcttcatgagtgaatactttgtaatcaactttgtaatcaactttgtaatcctttctattctagcatcaataaagactaaagccattggggttgttctggccgaggagtaggc

SEQ ID NO: 252192 - DNA, 832 bp, Cannabis indica
caaaagaagcatctaaagagaatatgagaggagcaaaagaaatgagtttcaggctaataatactaaactttattttcataattgattggattactcaagacagaataactcacttgccatatagatttttcttttatttttttttcaaaaggaaagcttacgaatgagagaaatctagaaagattaacctgtagtccgtaagctatgagtctcaagaacaagcatcaacaaagcaaagaattcatcttcatagtctaaaaccttatgaagaaagggtcttctcaaagccaatacctgtacaaagtacaatgacacacaacccttaacaatggagctaagttaatcgcagtgcttcaattgctaacaatcaaaagcaatacatacataattagaaagctaatacgaattgggcaactgggcaaagcaagaatattgaaattgaaccacaaatgcactgcaataggcaataatctttctttctttcagtttccgttcttagtcagaaaattcagaaataaaaattctgtagagaaaacaaagtgtgttcaaaaatgaaaagttgggtttgggttaagaagcatagctacagtatcagtataaacatgtataagaaagattattagcattaggtaaaagaaaattggcggtgggtgtagggatagaggttttgcttacaccgatggaataggtaagagcaccgcgaagactggccggaagctattgagccgccgtcatctcgaagaaggtgggacgagtcccttgtcctcctacctggaacaacatcttcttctacctcgacactccacactctctctctctctctttctctctc

SEQ ID NO: 252193 - DNA, 519 bp, Cannabis indica
tgaacacttaaagtacctgtcctcttcaaaaacaggaatgcaatttattgagtaataacattgtaaacaaaagcctaggaaacaaagagtttctaaatcaggaaaaaagtaacactaacagtatttcattgcttaacaacactaacagtattgggaagtctaattaccaatcatttattagcatgatttacagcatgatgtgctttacagaaaggaaaaggcaaatacatagaacaaactactacaaacgatgccattggatgtctagattctgagagggctgaatacaccatcaacattttcagaattcataattagcttcaaactcaaactcataattctagttaatcggagaagtttccagcgatttaaccaatagagcaacttcagagcattaaaaaatcagttgaccggcggcagccaagataatatatcattaacatagataacatattcataacataaactcacaattaaccaaaatttctaataaagctcatacatagtcagtttactccc

SEQ ID NO: 252194 - DNA, 1441 bp, Cannabis indica
taaaagtggcgcactgatatactcctacctgtaattagcactcgagagatttatttagtcttttttttatagtcgtgtaaattatagttatttaaggcatcatgcagaatatcgaaaaatttaaaaaaatttaatatgttgaaaataaaattcaaactttctgtcgcgtgactcttttatttagagagatgcattgtaaaagcaccttataatatttatattattgcaatataatattttaatttatcgactttagtcgattttacagcattattatctttaatctaattagtaagtttatttaaattattagttaaatataaaaattgtggtaatttttgttaattaatatgatattaatttttttattttattaaaaatttaatataataataaaaaatatttttagtgtaatttttagtattgtggttggagtgaaaatattttttaatgctagatttggtgatagtgtaacacaaaatttagtgtatcattggagatgctctgagttttgagtaaaagggtaacactgtgcatacgtcaatgggcatgggtccctcccaaattctgggatttttgtttcatgataaaaaacaaacatttctttaaaaatgtttgggaaatttcagctttttctagattttaaaccctaaaaattcaaataccttgaaaagaaataatctacaactatcgtataataagaaataacgattaaatgaaataaaccaaaaaaaaaatacacagtgaaaaatgagaacttattgttttcaagacaagggatggatttatagtgtgtacttcacttgaaaccaacaatatcagggtctggtatataacaggatgttcatttagaaaaaatagtgatgtggacgatagagtactggaaaaaacagtgagggcatatatgactcacaaggaagagaagaaatagataatctttaagcactctaagagcatctccaaggcaagcaatattgaaagttgtcataaaacttcacattactcaaaaatataatattttattttctctttcctccatatcatttttggtcactttctactaaaaaatactccaatgctaagcaactctagaaattatatctcatacacgtatcattcattttaattataatattctattttattattttcttttgtttaagcaaataacaattatttgaaatttaaaaaaaaaaaaaaaaaaggaaagagaaaagtcatatcaccattgctcctgtcaagctactgtagttgctaactatttttctccaatgatatagctaaagctaaatgtagcccacctcctgacaagctttgatgagcaacattaatatatagagcattggagctgctctaagcatctccaatggaagtgtaaataagtggtaaaaaactaaaatataactcatttaacaaaaagtgtgctccaatagtgtgttaa

SEQ ID NO: 252195 - DNA, 617 bp, Cannabis indica
aaaaagtattgttaaatgtataaattaaaaattaattattttaattatattatagtaaaaaatatgtaaccatcaaaattacaatgaaaatataagattgagtaatcactcattagaaagctattcttcaaaacaatattcttaaataaaaggtttacggtgttaaaacaacttacttgaaattgagaaagaacttgggatttgaaagaggaaatcatggtcttcacttaagagcttgggataagttatgccttcctaaatctcttgggggtctgggtttccggaagactaaggaaatgaaccaggcctttttggctaaatgggggtggaacatgctgattgggtgcaagtctttgtgttaccaaattctggaaacgaaatatcttaaaaggaaggacttcattagttgtcgttataagaattcagattcttggttctggtagaatgtggttaaagctaactctatcttgaagaaaggagcttgtaaggtggttggggatggtagggatacagacatttggggggacccttggatccctcattacaaagcattttctcctacgcctgttggtgtccctgatgctggtgttactaaggttgatgatctgttgataaac

SEQ ID NO: 252196 - DNA, 1292 bp, Cannabis indica
cagagttatgttctataactttagaataattatttcagtactaattttattattctgcaattaattaaactaattaataaattggtaattataaaatacacaattttaattggtatcagagcaagtcactaaactcttagtgagatcttgagattattttattttgtttaatttattttgtgtgagatgtagttctttgcaaaaggaagttgtatctctcaactaccactattgaatgatactaattatccatactggaaggttaggattgttggaaagcatatttaatcaagatcttattttactattcaagtatgttgattatttctaatctaacatcctaaacatggaaccttacaaacaattataattaaacacttaaaagtttaagaaaactttataaaattacagcagaattatatgtctccttccgttcaattctattacccttgttcctttctgttgcagagtatcaccaagaactgaacttggatttctcctccttaaaatgtgttcatcataatcttccacgaaaatctgagtattactttgaatagtgtgggttgtgttgggttttgtgccttaagtaaaattctatttcggtgttatcttgaatttttatttatcaataaaggaacagaattattttattacttatttaaatataatgtctggtccacaagtttgcttcatggtcatttgcttgatttataaattcttttaaatctttatcacattattattcatgattattgtgttgtctacatggtataaagtaatcaagattatgtgatcatatattaatcccacgatttatcaatacacatgatttctactgatatgataatcaacaatgtggtttacttacacttagatagtggtatgtcttttccaaggcattggtaaagtaagcttgtattggatgtattgttatacatcggactggatcgatatacacatataaaagatattataaacttaccacaatatctttctaagttaatatcacttacttgatcttagatcaatgatctcaatcctgagatggttaggatttggttcaattatattatttatgttctttgacttatttgttaaagttgactaattggatcttctcaatacttacatcttgagaatatggttatacaattgagtgggagcactaatcatatatacataatttatagcttctataaatacatagaagtcaaacaatgatttttttttagcttggctaaacgagattaaatggtggaatactcatttcaataattatattagtttattga

SEQ ID NO: 252197 - DNA, 564 bp, Cannabis indica
tccgatgtaaaccctatacatccttacaagtttactttgttaatgccccagaaaagacatttcacctaaccaagtgtaaataaatcacatcactggttatcatgtcagtgtaaatctaatgtgaagataaatcatgagactaaatagtttgacgcatataatcacaattatttttcactgtagcgaaaatactataatcgtgaataactacatattagcaaaatttatatattaaataaataatcatgaaagaaacatgtgaactaagaaatatacaatagtaaaaaataatctttaattttttattgataagtaaataaaatacactgacattaaattttatttaaggcataaaactccaacaaaaatatctcatatcaattaccatttatcttttattataatggtattttattagtatgataaataatcaaaacgttactttggaagtttttttttaaaaaaaaatggatttttccattttaggtcatattaatttagaattcatatatgttgccgtgtgtgtaatggtgcccccataatttctcatatgttgtttgcgga

SEQ ID NO: 252198 - DNA, 1529 bp, Cannabis indica
aacacatttttatcacaactttttttaaaaagcagctgggcaaataatatattacaaccaaaaaaaaaaaaaaacagcacctcgaatggctggtttagtaaaacatataagggttgtattgtattgaagaataaactgtgtttgaataaaattttatattttattaattattacaaccataaatattaatacaatacgaattatttttttaatatataacaaaagatctatatattaattagcatgtattatgatatttaaaaatagtctagagttcgggaaccagacttagtccaaaacccggaccctggaccttagaccgaactcgaattcaaacccgaacccgaacccgaaccccaaacctcaaacttgaccccaaacctgaacctaaacttcagccctagacccgtaacctagaatcgaacccagacccaagtcttggacctcggacccgacctccatcccggactttttcccaagactcggacctatgttaaggaaacaagacaaactagttttagctaaaagtttattagttaaaaataaagaatgctataagttaagtaaattttaatagaaggtacttaatcattgaataattttcaccacccattttatttcttccaaagcctatataaacccacatatgatcaatttatatatacccaaaatttaaaaaaaaaaaaaaaacggaagaagaagaagaagaagggctttagttaaaagcttagagaaagaaaagcttttgagataatttttgtgagaaaaaatcttaggtataattgaggtgtgggttgtgagaagtagtgttgtaaatattttgtgtatttttgctcttaagttgctgtaaaagatttgcagaagacttagacaccaccaaaatttgttatcaaatttttttgtgtgttattactgctattattttattctctctaatctaatttatagaaaaatttgcgtaattttcccaacaatcggtattagattgatattctcggttgaaaattctattcgaaagttagatttaagtgagagtgatggccgcagacgaaggaaaagtgaattcgataaattaaatggtacagattttgggttttggaaaatgtagatcaaagactacttataccagaaaaagctttatcaacctctctaaaaaaagaagcgagagggtatgaaagatgaagagtggaatcttcttgatagataggcccttcaaagctattcaattgatgttttcttgcaaaatgttgttttcaatatagcaaaggaaaagaccacgatcgactactcttatggcaatactctctaatatgtatgagaagtcattagcctcaaacaaagttcatttgatgaggcaattattcaatttgcgaatgatgaaaggtacattggtagctcaacatctaaataaattcaatatagtcacaacccaatagaattcagttggaatcaaatttgaaaaagaattatgagcattaatatttttctattctctaccagactgttggaatgctacagttatagatgtg

SEQ ID NO: 252199 - DNA, 1873 bp, Cannabis indica
aaaaaaaaaatattccagtatatagttttagatgaaggttgactaagaggttaatagttgcactccccgtatatatgcctatatgtatatatattacacattgagtttatgaatattctttttatcttctcaattttctatgaaaaagaataaattattattgattatttacatacctgaagaagcttggcaaaaactcacagcagagaaccaaagccagagacctagaagtgcccattggaaaagagcaatcttcatttggagaatttaactattattattatttttattataagtttcaagtactcaaaggtgatatatattttagtgatatgataactcttatgggatatataaatacatagctatggatcgtggagaagtaaattgaagtttatttcacttaattataagccagccaaggacttaaacaatggacccaaattgagcttttctttaataatttatttattattgtgttaataattttcatttatgacactcccaactgccaactgatacacaattcatataatttcatatatatatatatatagataacttcttttttatttaacttattaatttgttaggagagaagccacatgttataataatgagcattgttatgcattttcaatggtattttttatttttatttcagttaaaatagcttaaaatagagagtcattgttgttgctccaaactttctactatagttaatagttaattattttaatttgtaatataaattaattttataaaataatataaaaaaatagtagtgtcaaagattaaaatactatttaaaaagtttagcaaaaaaataaggagatttctacattaagagaactttctatctattattgattatagaaagccatttttgtatggttagaactcattttttccaaatctcactctctattttagctaaaaattgtgtttagaaagtatgattagagatgcttagacaccttaattaaggtgccttttaacaccacaccgatctaaaattctttggttaacgattttctatataatttattaaattaaaatgtgtgaacccgatattaaaatacaccaataacagtatgctacctcttatggcgtttagtacccgatagtgttctctacctaatttttaaaggttgtgggaacttcaactcttatttttctttctataatggcttgtttatttatttattattaatttaaaataatttatcttttaaataactagttagtttttaattattaaaatacagttattttttctttttatcttgttttcatatttttgaaagaaaatgtacatttattttgtatttttaatctaataaaatatatttttttattttgttttttgtcttaatgttttgttttttttaatttatgtaatgtaagaaaaaaagaaaaaagaaaaggtgagtataaaaaatggagtgtatttcctttccaaaaaaaaaatggagtgtacttgaaaaaattagcgtacaaataaaatatcccaagaatggggagaatgtaactaattaataattttggaattctattaattaaggaggacatgctataaagcaggctcttattcgcttgaggttgtggaggctctgggaatcaaggaagctcttagttggattaagagcaccaattggcacaacgtagagcttgagactgatagtcttctcactgtccaagcaatccgaagcagtcagagaatgtcatccattttcggcctggttattcaggattgttgtcatttgttgtcttctctacctagtgttaaaataagttttattaaacgatcagacaatcgagttgctcatgctgttgctaagcatgttcaattttcctctggttgtagcatttt

SEQ ID NO: 252200 - DNA, 656 bp, Cannabis indica
ccaaacagtggctcaatgaaatgtgaatcatgggtaagcctgagtcacttgaatagagagagagagagagagaaatcataccccagatggatgtaaagagacagagaatgctgactgaggagcgcattgtatttgtgaaagaatctccccatttatattgaaccggttgagcaggggttctgccccaactgctagtatctgatatggaccaaaaagatgttaaaagcttcactccatatctaaccgttgagaataaaaagaaaagccactcacttggttttcgtcaaaaaccacatcctgcacagatgcagaagttgaaatcttcgaaatacattcagaagcaggaaggttccatactgataaactccgaccactcccacaagcctaaaaatgtttaatttgaagtaagaaatactaaaatgaagaaaagaaaaagaatactactataataaattcgtactaaccaaccagctttcacttgcatcaagactaatgcaaccgacatacgaggaatgtcctttcagcttcatttcctttcctggttcaatcacttgaatacactttccacttctgtaatctaagttacaccgcattacttcctcttctaaaaagatagttcagtactacttaaagctaattggaggaaaacaaattga

SEQ ID NO: 252201 - DNA, 621 bp, Cannabis indica
ttattttttttttcttaaatttgaattttaagtccaactaatgtgatcccatttttaaaaatttatatatatgttttatttatatgtgtttagttgattaatggcttatattattttttgacaatttttttacttaaattttaaaaagtaaaatacgcgcccatgtgatctccattaatcccaagactttatatatattttttatttctctctctatctctttttgtaagttggtatttatagaaaatttcttgagattggtgtctaagataaagaaatttttttgagattggtgtctaagataaagaccatcaactaaggattttagataaaactcttctcctcactcttcactgtttcaaaaatttacaaaactcacttctttcattcatttttttacttgggttttgagagagaaagcaatatatatattaagagaaagttttgtgggtgtgcttcagagagagagagagagagaaaaaacttgaaacgacaacaagctgatgaaggagtgtggaggctctcttggtgaagagagtctatcccgtgagaatatcttcaagaagaacactactgaggaagaagaagaacagcagacaactcaaactttctaagtaaaaa

SEQ ID NO: 252202 - DNA, 759 bp, Cannabis indica
cctgcaattcagcagaacagggtaactactgtggatttataaacatgtccagtccactctttgaaccgcaacaccataagcattatcctatttttcaataggtcaaacacagagaaaagaaagcttacaattatggctttaattggttttaccacttgattatttatcactaatatttgaaattgtcttcccacttaatcaaatccatgcattattataattcaaaagattgtacaacactcatcaaatttatactttgcttcaacaagttaactataatctctagagagagagagatgaatacaaatttaggcaggtcaaactcatcatgctaaacaccaagttgaatgctaaacccgctttagttttggatttctatggacgctggaatattttttttatctgaaaataattgctttgctatttatggtgttgaattttaaaggttttatcactttgtgcagactgagagtgaacttgaggtacaagatctgcttgataatcttggacttagagataagcaacaatttgtaagttttcttagaattattaaaggaatacactataacctttcttatagaagagtttgaatatcttatatattcatccatagtgaagtaagttttgaaaaaatttgtgtgctgcggtgatataaggatgagaacttgtgtattgttttattgattatagttgaaattaacaaatggttatggttaataaaataggggaaatgctacccaatttttatagatatatttt

SEQ ID NO: 252203 - DNA, 596 bp, Cannabis indica
tatatagtgatatttaaatgaatgtagaaaaaaataaagaagctaatatatgttgtaatgtaaaagtttatcataaaatattaaaaaaaaagaaaatttttgtgaactattttaaaaaatagagtacagaagctgatacgagtgctttaagcttttatcataaactaaattcttcagagagaaacttaaatctataaattcaaaatttgaatcttttttttgtttgtggttcagaaaattttgcattacttcgaaacaatttacaacaccttagcattacttcaaaacaatttacaacccacaaatcacttcaaatctctctattcataatttatttctttatttattttttctatccgataaaaaataatgtggtagtcatttttataaaaataaatagttaaactcttaatttgttttatgtacagagttaatctactgggagacaaaagtcactaggggtgttcatcaaaccgctcaaactgcccgcaccgcactacaccgcaaaaaaaactaacggtttgaaattctttgtcggtgtggtcgcggtttgattttcctaaaccgcacggtgcggtgcggtttgcggttttgta

SEQ ID NO: 252204 - DNA, 593 bp, Cannabis indica
caacctaattaatccatagagtttaccaattaagcacacagtttctatctcaatccatatcacaaataacattggtaactcaattattcaactatcatcggttcaattattgttattctaaaaatattaaatttaactaataatactaaacttaaaatagaaaaaaaatagtaaaaagttaaagtcccctcctccaaacttagaatacacattgtccccaatgtgtcatgcaaaacaagggaagatagacttacctgcacccccattagaaggggtttggtggtggtggtggtgcttggtcataagaatagaatcggggtgggttcaccaagtaattaggatcctcaatcttgatattcatcttggtgatgaacaaattcagctgctgcacttggttttcatcaaacacactcctttgcgccatgtaagttgcatgtgcatgttctgcgcgctgaataaaataattcagctgatcatgtgtatactgcatggctggatcaatagggccagcaatgcgttgtggtaactcttcatcatgcccttttgtgcgctcaggagattattccttagtgctccttgctatgattgaggag

SEQ ID NO: 252205 - DNA, 587 bp, Cannabis indica
tctgccgtgggtctgtgggtgcggcaccgagagaaagagagaaagaaagaaagagaggcgaaagagagagagggctgatgggtgtgggattttgagaggggtaattttgggatttaggtaaagtaggcatatttttcatagtataaaatgtattggttcaaaaaaaaaaattttgaaaacttttaagtatagaaaatcaaatttcccttagatatttaatatttaacaatcaattattattattattgttattaaattgaatcgaatcgatttatctacctctaatatctaattagtgttgttcttctgattaatgttattctcttagatttttctattttacttttgaggttctaataaaaaatatttattattattattattattattctgaaaaagaaaacacgagtaaattaaatttagtcacacaaaaacaaaaacatgagtaaaattatagatttgagactggagtaatttcgagagaataaagagaatgaatattcttcagccatcttcttcttcaatgcaatcttttcgccatggctgcaccatcggagtttggcaacgatctcgattacgaccaccgt

SEQ ID NO: 252206 - DNA, 554 bp, Cannabis indica
attttgtcctttgtattatttattatagagttctaatcttgttgatttgatatttctattggagcacaataacttccaacaatatatagcattgatgatcgaactatagttgcttagattcaagttgtatatctattagtaaaatctacataaaatattgtttttttaaaaaaaaaaaaattccatttttatagttaaattttatatacatatatatattaacaatttttttttttcaattttatgattttttattttttttaattataattttacactatcctataaaaaacataaaaataataaataacatacaaaaaataataaaattattgttataaattataagaaaataacataaaaacattaaaagtcaataattttgttaaaaaaattatacacagtaaaaatatttaaaaatttgtataattaattttttgttgatatttataaaaatatccctatagtactgttgattccaattaagcctagaagagcttagtactataacttttcttgcaaagttaaatattattatattattttatataata

SEQ ID NO: 252207 - DNA, 798 bp, Cannabis indica
tagaactgacaccacaaaaaaaacttttagatctggccatgaattactcaagccaaatctgagatccaaacagtaaaattttacattattaaatctagaaataacaatttctcaacccaaaaaaaatccaaaaataacaatatacattttaaaatttaaacaacaaaccatatattataaaaagaaagaaatacaacaaactcaaaaatcaaagtgggatctaaaaaaaatgttccaacaaagtcttgcttctcctacacatccaaatccattgacaaccatgtcgcccatgaccacgccactcatggccaccaccatacacaaccgaggagagatggttaaagacagagacagattgggagagagaatgtatgtaggttcacaatttcggggtagaggttttctagtgcagaccaacgtgggaccgaagaacggtctgcatctagcctggccgtgctgctcgatggagaagagatgaaaatgagagagagagagagagagagagagagagagagagagagagagagggggcggtacagtcaactcagaaagagagaaagagaggcgaaagagagagggctgatctgccgtgggtgtgtgggtgtctggtctgccgtgggtctgtgggtgcagcaccgagagaaagagagaaagaaagaaagagaggcgaaagagagagagggctgatgggtgtggattttgagagggtaattttgggatttaggtaaagtaggcatatttttcatagtataaaatttattggttacaaaaaaaaaattttgaaaacttttaagtata

SEQ ID NO: 252208 - DNA, 432 bp, Cannabis indica
tgtggcttaggggaggaatccattgagcatttatttctttcatgcgaggtggcgcaacacttatggcgagcttcaccttggggtatctaccctgtgtgcaaaactggaattcgtgtttgggactgggtgaaatttatatggaatcttaggcataaggggatttatgctgaggatgtatttctctttgcttcgattgttgttgacactatctgaaggatgcgcaatgaaatggtacacaataacactcctccagatgtggtgaaatgtattgacaatatttgtacttattttgcagagtgacatgattctttcttgcctactcttactccgatctcgagggagatttggaatcctcctcctcaggattggatcaaactgaattgtgatgttagagtaggattagagactatgtgcattgcagttgtagcaagg

SEQ ID NO: 252209 - DNA, 1207 bp, Cannabis indica
aataatttccaacacaaacatggttagtagatccaggatcaacaatccaaatagatttgtcattctctaaaaaacatgattaaaaaaaagtgttaaccttcgttcaaatggttcagaagactgggaaatcttgctttcaaatgtcccttctctccacagtgagaacgtagaaaagtatgcctactcagttgttctttaattgtctctattgctggttcaatttcgattatagctctcaaaattgaactcgaagaagcagcattgttggaggtgtcatcctcaatatcttcagcttttcttttgcccttatctggaatactgggagggagccttccttgcaagtgataaagtatgttcataagcacgcagttttaacgtctagcttgtgtatgtcggataagttaaagttgttaattatgtacgatacaacaaatctattatactcaggttgaaggctattgagaagtgaattgaacccattgctcttttgatatatcaattcccagcagtatttgctttctagaactttaagttcatcatgagcaggtgtgaattgatgctctgactaagagacattttcacactatagagttcatttgcaaaggcatgtaatagatgaggattggggtgtgggttgtttattttgacactacaaatatcaataaacagaaataaattacttagttcaaataaattcatacaaaaatttagaaaataacaagtaaggaaacgtgtttgcaaaaatgccaaaataaaacatattcaattattttccaaggtttccaatagaatgatatagtgtcctgtttaggcgagagtcaaagatatcattcatggaatagcgtagtaagcttatctaaaatggacacaattctagcaactttttactcgatcgaaaacagaatgcaacgttgtcccgtttaggcgagagtcaaggccattcctatttcatgagcttctaccattatttcataatttgtaagccctactcttagcagccactattagggttaggggtgaacataaaatccaaaaaaccaaaaaaacagttcaaactgacctaccgaacaccgttggaactgaaactgacaaaactgaaaacccaaaaaaaaccgctaacggttaaaactgccattgaacggtcgatttttttgggtaataaactcaccgaaaaaaccgaaactgatcgttatacatatatatatat

SEQ ID NO: 252210 - DNA, 1061 bp, Cannabis indica
gatgttcgttagtttaagagaatataaaatcgaacggtgttaattttataaatatacataaatattaatattacatttttgattattttaaatatatataaatataaatattatttgttttaaattaattacaatacaaatgttaaattaatttaaatatatataactattaatatattatttgtaatatgattatttttaataatattagtatatggtcaattttaatatatattcttaaactttatatttattttctttaaatgatttctttaaaaaaattttaaaaattaataagtagtttcatttaatttataacattttaaaaatacacacaataaaaataaaactaaaaatataactaaatatatatatatatatatatatgcaaattgcaatgtacctaataataacttagtatatatatatctaattttttagataattaattgatgtattttcagtaataattaattgacttatttgaaagatatctaaatcgaatcttggatcaaaattaatttttttttatttttttctacaccatcctatatattagtccattcatttgtattacttttattgactgaaatgttatacttgaggtactttttatttttcacttttattcatatatgttacaagttataataattacttatatttttagaacatatattttgtgttttgtcaattatttgagatatgtacatatcaatattaattaataaggtatttagttttatggcattattagaaaaaataagagaaaattatactaaagtattacatcaaagtgatagataatagattgtctttctttgtagaagccaatcaatggcaatggtcaaggtacaaaacaagaggtacaaaccaagaaaagagagaagaataacaaattgccaaataaagcttaaccaattgattagctcaataccttttacttacattgattaaattaaaatagtactgccaaataggaaactattaacttaacattcttttgagacttttgatacttctaaggcaatctctttatattttgcttgtgctaaatattt

SEQ ID NO: 252211 - DNA, 746 bp, Cannabis indica
atatataataggattatatatatgtataattaataatatatagggagctaattaaaaataatttatataatttatagctattgatttaatcaaatgactcaaatgaatttttggaaacttaaacataattaataatttttattatttataattaatttttaaatattattaattagctctaattaacaaaactccacaccttccaaacctatatttttttgacttatttaccttataaatagttttcaattaattacttttttaattaggaatttatacatttatttttaattaattttattttttacttgacataataattgcggttagaaaagaacaaaatattcaagttatttaatgttacaataatcaatttaaccaataatataatcatgatgtaactagtaatattatcttatatgaagtataaagacatgagttcaatcctttcaaaagacatgtttttttaatataagcttttaaattaatttaataatttaaattttttttctaaacaataatatattattttttaatatttactaatatggaagaattcttatcccataaaagttgtaaagtttgtaattattgtgtggtagaaagtcttcaatttttatttgttaatatatattgatggttgcattacataaagtataatagtgaactataaaataacacatgcaataataataataataataataataataataataataaggggcttattcatttttacactt

SEQ ID NO: 252212 - DNA, 1225 bp, Cannabis indica
aagccaaattgggacaaagtgatcatgagagaaaatcttgttcgctcatagctctaaaatacaatatgctcgtagataactatgatcacagataaatctgctcgtagataattgtgctcatagataactatgatcacagataaatttactcatagataagtgtgctcgtagataactatgatcacagataaatctgctcgtagataagtttgctcatagataattgtgctcgtagataactatgcttgtagataactataatcacagataagtttactcgaagataattgtgctcgtagataaatgtgctcgtagataaatgtgctcgtagataactatgctcgtagataactatgatcatagataaattttcttgtagataattgtactcgtagataactatgctcgtagataactatgatcactaataaatctactcatagataactgtgctcgtagataattatgatcacagataaatctgctcgtagataattgtgatcagagataaatctgctcgtagataactgtgctcttagataaatctgctcatagataaagatgactcaatctgcttgaagatgacctaatctgtttacccatagaaaagatggagacactttatagtgaacaactcgcagtacttagcaagttgaacctcagcaggtagaatttttcttcgcaagggggcatgcccaaatatcactaattaaagtggttgcaattgaagaagtaaaccttctaatctagtcacaaccagaaaaagaaaataacttcgaattttattatatacatggattgaattgaaaacttctaatctggtcgcaaccagaaaaagaagataacttcgaattttattaaacatggattgaagaaaaaaaacttctaaaatggtcgcaactagaaaaagaagataactttgaattttattatagatatggaaaaattatatcatgatgaaatttttcacataaaactttgaaaatatgtataaactaatatctaatcaacctgatctagaacaggaaaggttaaactagttacatataaaagaaaaatttacaaaatgtgaaagttaaacgagcatatgtattacaattacttattaattaattttcagtaatactttgagctcattatgcttaaaagtttaaagaagcatatctagtcgtagtacatactcccatacttatagagttatagtcgtatagtacgtactcccaat

SEQ ID NO: 252213 - DNA, 634 bp, Cannabis indica
atatttttgatattttttaattgagtagtcaaactaagcctagaaattcaaaatttaattttattatttgtcatttgatcaaaatttgatggtttaatatttttaaaattaaaatttatagtcaaatttatttagtaactatttatgagtaatacccattaaaaaatattccatatatatacatatctttgccataatggaattctttcactctgtttacatttgtgcttagtcttaaaggcggatccaagatttaaattagggagagtaagggtcgaagaagggcaatcactcattcttaaaatcagcattcttaagaccaaagagtcgggtggaaaaggaggagaaagcacactagagggtaaatattttttttttacatgttaaaaattaatataaccttatattttcataatattaaatatagtttaaagtaaaaaagaaaaataacaaatataagtctttattcaaaaaggtaaactttaaatattaaaaagtagggtgttcataaaatattcaatttaattaaatctgtacgatctaatccaatttaattaaatctgtacgatctaatccaatttaatctctaaagtgcagatatccacacttatgcggattgaattggattagaaaa

SEQ ID NO: 252214 - DNA, 2883 bp, Cannabis indica
ctcaagggaagcttaaaaaatgagaccaaataattaagctgtaataattattaatatatagagagatcaacggtcatgatcatcagatctcatctactggtttccctcaaattcaatcacgtccgtccattcctcaatcgttcagacactacaatatttttcattataactattaattaattatatatatataatgtttcttttatttcttaagaagacgtacggtttatatattataatcttcctttcatcatgaatgcatgtatcatcgattatattagttaattacaaattaatgttgaaagtgttaagtctttaattactaatatatattgtttaattaataccaaaaattagatatatggaagacaatttattttatttttttcacccaaatgttgtgatcatgggtgtttaatttttttttttcaaactaaggaatgttgtttgatttatatttttaatttctgatcaatgtctctcttatatatataactatatatatttctttaaatttccaaagatatattagaatttcctgaatcaatagtacttaattatatatatacgaataaatatttattggagatgttcaataatatgcgttaataccattcaaaataaataatatccattaataatgtaacgcattataccatatattaattaattatgagttatagttatattatattaaaagaataatattttgtttaattttaatcaaattcatggcggaattaattaattcttcacatatttgttgatcttgcttatatagcaaaggcatgctgacaccgggttaatgaggcatgttgagtttttttaagttgaaagtgtatgttaaattgttatgatttgttggtctctttagcgaacttgaaatgtgtgacaaagtaaaagttctgttgctaatatggtatggtggctgttagcttcttgctagtgttagtgtagagtattgatcagtttcgagtgttatatacgattaaagttaatatgtatatacatcttttatttttagacctaacttttataggattgggtggtttgctcgtgactattatggtactgtcctctatcattctttgaaactataccttgtcgtgttcaactggtgttggccgaggcgattggattgaagaaagcactaagttggatcaaacaacaagaatactctcaaattgtgattgaatcggattgtaaaagcgttattgatgctcttcatagttcaactcaaattttatcctctttgagtttaattattttagattgtcatactctaatttcagtgatcaacaatatttttcttgtatttttgttaaacgattaattatttaatgattactgcttattctaatgcaagttgtagttatggtagagactagagagcttgtttctactacttcaaacaattattttagaagatttgtcaattatacattgcaacttttgtcaaagaaaagaaaacaaaaatattaaatatataaagtaattttatattcattaatttatcaattattgcaacatttatatttattaaataaataaaattaaattgagaagcctaattacgatataaatattaatgtaagtctaatatataattatagtaaaaaagacaaaacaaaatatgtgcaaaaaatactctgcccatagtccatacatgctttcgctgggcatagtcttaatctgatcctcttcttttgtaatttttttattttttttttacttattttataaaattttatggttttttttttgaaacaaagaaaattattattaggcaatggccaaaataaatctaaatttggtaaccccactactaatttttttttacataaagttgggaaataaaatcttagaaacattaagattcctatacaagtcaaatgccataaatcgtcatacaagacttttttttgttcaaaagctttgtaacaacttgtcaatctatctctacttcaatttgaatacaaagcttattggttatatatattataatctattataaattaacagaaatgggattgcaaaattctgttgattaataagaaatatattatgttttatatagcaaaagtttgcaaaaatataacttttttctttctttcaaaatggttattttaggagaaagaatgaataaaaaaaattaaacaaaatatgagaaaaatagtataaggtaagtgaccactttgataattagtcaccctatatttttttttttcatacttttttataagcttatttttttttataaaagatatgaatcttttttgcacatattatctcataaaatgtgtgatttccataatttaaaatagtatgacactctcaaaattaattttctattgttacctaaccttatttgctgatatagattgatgaaagacttaaacagaaatattatgcaatatgatcagtaataactaaattaataatcttcagataatgaattataagaagatattaaatagatacaaaattgtaattttaataattgacataagataattaattttgtatatatagttttttttaatattatttgcaatacatatatactaattaagtagttatatttttttttctcaaaaaaaaaaatagttatattttaaatttttattttagtaatgtatattttagtttttttaagttatttaataaataaaaaaaattattaaaaatatttaatttaagtattatttatatatagagaaaaatataataatatttaattttattgttaattataattttagtttaaccacgtaatagttttaattttataatattttttactttttttagaaacaacacactttttctatatttttaaaaaataataattaaaatattttttttttagtaactgctatatat

SEQ ID NO: 252215 - DNA, 378 bp, Cannabis indica
atttttatcacaataaaaataatattatttgtaattaaaaaaataatatttatatacaatttataattagtttaaggatatatatttataataaattataatttttgtaactaattaatattttttttatatataatcaaacaaatattgtatattgtgactcaatttttttttattttattatttttttgtagtaattaaacataaatttggctcaatttgaatgtataaatatctacattttcaagtgctgatctatgtatatatacgtatagttttatatgcaagtggccatatataaaaatagaatatattgtgttaatgggaataaaaaaagtattgctttaattaatcatcattcattggtttcctcttcat

SEQ ID NO: 252216 - DNA, 1373 bp, Cannabis indica
tttataataaaatagtgatgatacacacacctttactagactgacttatagacttcaaaatctcactttgcaccattaatgaccttatacacattccattcattgaactttttttttaaacatatactctccaattcatcatttagggtggcaccacccttaggtcaatacaagtagaattattacaatatttattatcaaaatacttgttttctaaactaaattctattgaagattttattccattttaaaatttgggataaggtgaatgagtttttatttcaaaattaactaattgataatgggaggagtaactattaggaacagagcatttagagaagaaaatctttattaaaatgtatcttataaattgtacagagagaaaatgtacatatataagcaaaagccagtagcagcttagtaaccgaaataacagaaaaaaaaaactaacttatccctaactctaataggccccttcaagttggagcgtagaagtttcaaacacccaacttggacaaaatatctttgaattgagtagggaaaagtggcttcgtgagtatgtttgctaagttggattttgagggaacatgattcattcgaagaactccttgagtgactttttctcagacagtatggcaatctatttcaacatgttttattctttcatgatatattagatttttcagatatgtgcatagcagcattgttgtcacagtatagagttgaaggtagtgtgatgttgatgttgaaatcacgtatgattgaagtgagccaagtgagttcacaagaggcatgcaccatggctcgagactctgcttcagtagaggatcatgagatggtttgttgtttctttgacttccaggagatgagtgattgtccgaggaagacacagcagcctgttatggatcgtcttgtgtcgaggcatgctccccaatcagcgtctaggaatgcttgtagttggattgattttgttgaggaagcatagaaaaaaggccttgtcctggagagttcttcaggtagcacagtattctagttgcagcttgcatgtgagggagtcgtggggattaaagatactaactgagtttgttcacgacaaagctaatgtcaggccgtgtgattgtcaagtaaaggagcttccctataagactcttatattgtgttggctttggaagtaattccccagtgtcattactgaattttttgtttggttccatgggggtggaagctagttttgagccaaggtaacctgaatcttgtaagagttgtattgttaagggtctctgtgagacatatgccttttgaacaacgagctatatctcgagaccaaggaaaaaacgaaggggaccaaggtcgttttatttgaacctagtatc

SEQ ID NO: 252217 - DNA, 494 bp, Cannabis indica
ccgagtctcgagcgagacctcggtaattccacgaagggattttcatggcgaatggggggcttgataagggccgcctcctcgcccgattgaaagttttgcacactatcgatcctcgcatccaccaaattaagttcatcttccaactttctgctagcattctcttgagattgaaggttcttcttctttgctggagctttggcactcatgactttcttcctctttttgtctccacctgacttggaagaagaagcacctgaaccaagcttaaacggggttgaaagagggcaaggtgaaaatgggggtagagttggtattactttagaaaactcctgcatattttcttcagttctttgaacgaaaggaatgagattgagactagctttccatttcctgggttggctattttcatgtatttggttagataagtctactgggtcatgaaaaactgaaggcataggttcaaacttatctattggggcagggcccattaattc

SEQ ID NO: 252218 - DNA, 559 bp, Cannabis indica
ctcaagcagtatgacgtgtctccgtttcaacttacccccaacagttatcgcatagccttaggcttttatgcgatgtatatggagtacggacatagggcaccctcagtagaagagttcagctacttctacgatataaagagcgtaggcctccaaaatggcttctattgcttcagcaagtgggccacttctgagcttaatggggtggaaggcatggtttccaacaagggagattgaaaatcgaagttgttttatgtgttcaaggtttccgggattaggactcattttaaccgtcgacctagtatgtcgcgtgtttcctgagtagtcaatttttgagttattttatgactttaatctaactcgctcttttcattgtcgtagataaaccagctcgacctacacttgacacgacgctcagagagactgcttgtaacaccctaactagcataagcgtattacgtgatttttaaacatactgtgtagctcgttgctaatcaacgtggtttatggaaatcatgattaattaaaattttttctttttaattaaacatataaaatattt

SEQ ID NO: 252219 - DNA, 970 bp, Cannabis indica
atgagatgtatagtgaatggaggcaaccaggagagcaagctagttttttttcttagataaaatgcacaatgtttatctagatttttatatttattttcacttggctatgccaatttatttgactggttgtgtaattgacaatattgaaatttatctttgaatttatgttttgttattggtgtgtatatcaattcagttttgtttctttactgttgaatgtctttatttttcatttaagttcaacatttcaactctaattattagttttacattattttgattccttatttcagcatggagacttcaaaggaagaggtccaggacaaaataaaagattttggagtgaagatgaagacaaacacttgattgaatcacttatcgagctaaataatgaaaggaagtttaaagctgaaggaaacttcaagccaggtcatcttagagctattgagatgaaactaaaagagcgaatgcctggatgtgacatacaagctaagccatacattgagtctagaatgaaaacattgaagactgattttcaaatagtacatgaaatgttgactggatctttttgtagcgggtttggatgggacagtaatagaaaaactgtaactgcagaaaaatcagtgtgggaagcatatttgcaggtacttatgtttatatatgctctattataatatgactagtggtttaaaaatgtattggactttttaacttggcataatgtttggaacttcttatgaaatacttttgtatatatactttagagatatgtgaagtaaaagatagattatgcagtgagacttataacgtaaatcatcaactttctcctatatttttgttcttatccaacttgtgaattatcagttaagatatcatttcatctcttatacatgcagagtcataaggaagcaacccattcaagatcaagtcattccttggtatgacagcttgtgtgcagtttttggcaaag

SEQ ID NO: 252220 - DNA, 893 bp, Cannabis indica
aaaatttagtatttagcatcacgacaccaagcaccttttagattcttgcaaaaatttataggcacttttaattgaataattcccacaagtctcaagtctccagttccaaccatcatttacagtcgaatcactaagttgaatggacaaaataaggtcctgatcacgtgaaacaaacaagtctctcacaacatcctcatcccaagcgcgagtgtcaacttgaaagaggcagctgaccgatttgttcacaagagcagggtgccttgtaacgacatagctgttagaactatgtggaagccaaggatctgcaagaatggatacatttcccccttagtgattgttctttgagcacgtgaatgtactagatctttagcttcaagaatacttcgccaaatgaagctaggattatctcccaattcagcagaaaataaattaccataagcataatattttgccttatagagcctactaaccaaagagtcatcattaaccaacaatcaccaatattgtttccccagaagagccaaattaaagtctctcaagcttcgaaaacccagtccccctgcatgtttatggtgacacaaccgctcccaactcatccaattaatacctttaacactactcgaatctgaatgccaccaaaacttagccataagccgctctaactccttacaagtgtctaaaggcaagagaaatacattcatagcataatttggcaatgcttgagcaatagatttcagcaatacctcctttcccgcacgagacaaaattcctcctttctcgcacgagataataatgttagttatacataaaaataaaataattagtcattaaagaaatatttttattaattagtatatattaaattttatcgtattttttattaattaaaatga

SEQ ID NO: 252221 - DNA, 1232 bp, Cannabis indica
ttataattaataaagtcttaactaattttttaaatttaacctattatcatatctatgatattagtgatgttcaaattattttttaaatgtaacctattatcaaattgaaaatattatgctaccgaaaattcgacagcatcactatacaattgattatttccaaaattttaacacctacacaaaaatcacaaacacaatactaaaacagttcacatgcatattaaatttttgcatctcatccgaccgcaatattcttttcaaagaatttacttcactaatatgaatatataacatattcaaactttttatactattataaaacatataacataatcatactaaccatccaatataacgaggagtgatttttgataaacaccgagcaaagggacaccaaaaatctatttagcaaaaaaataaatattgagtaaataaaattataagtatagtactattataataaacacactatttatatataaatatatatatatggactatttcttaatgggtattacccattgatggttactaaataaaactataaatattaattttaaaaatattaaattattagattttgatccaatgacgaataataaaagagaaacttgaatttctatactatcactttaattaaaagaatataaaaaattatcactttctacactatattaaaaatatgtttatatacaaaatacttaagccaaattcaacttttttttgtcgaaaaacttttgtatttaattttttttcaatcgatgtaacaaccccaactcatataatataaaaataagagatatttttaattagatagaaaaaccaagcataaaaactcaaatttttattatattacccataaatgagtaatacccattaagagtgcacccatatatatatatatgtatattatgcgtatatataaactaatgtacacacatatatacttttacatatatatattccaatttatatatacatatatgtacgtatatatacatttccatatatatacatatacacacatatataaactaatatacacatatatgcctatacatatgtatgcatatacacacatacatatacatttatataaatatacatatacacatatatatatatacacattactagaaaatggacattttatcttactttttatacttgaaaaaataaaaagtgggaataaaagtatgttgaatagtttttaccccacatttgtataaggc

SEQ ID NO: 252222 - DNA, 771 bp, Cannabis indica
tttaggagtacccgtcgttacacaatgtctccatgcttaatatccaatttttaaccttagagttgtagtgttttgcgaccctttgattatacgccgccttactaagctcaaacctttctctaatctctttaattccatttagcgattcgacaagcagctagtgattgtttgttcgtcgtatgtaattcatcgatgggatggaggtatgagctctttgggtatcatggctttgtacccataggttagagcgaagggagtctaacctgttgttattttttctgtagtgaaataggcccataatacttcaggcacttgttcaggccaattcccttttgcttgctccaggcgcttctttagcgtatccttaagagtttggttgaatacttccacttgtccattaacttgtggataggaaacagctgagaaactcttaatgattccatgtctgatgtagaaattagtaaagaggttgctgtcaaactgtgttccattatctgacactatcttctattggagtccaaatcaacagatgatgtttttgtccacaaaattaagaactttctttgatgtaatggtggctaagggctctactttggcccatttggtgaagtacttgacttccaccacagcatatttaactctgtctttccccttaggcagtgagcctatgaggccaattcccaaaaaataaatggccaaggtgtttgcatactcttgagttcttttggggcagctctgcgtattttggagagcctctagcatttttcacac

SEQ ID NO: 252223 - DNA, 1012 bp, Cannabis indica
acatgtttaacaatttattaaattttgtataagttaattttgcattgtggaggatgttattttaaagtattttttgtttaaagataaatagttggattcatttggtaataaaattcattaggtaaaaaatttattttttgtatgaaaatcggtgattcaattatgcataatagaagaaagtttgagatcgaacttttgttcctaacaatatttggtacatcattaataactaccaatcataaactcaaacataataactaccaacaataaatactaaacactacattttgttctccatttctattttgttctcatccatgtccttactcatatactaaaaaaataatgtatattctaatcatcaagatcaactacgtaagactcctgcaaaaaattaaaaacaaagaaaagtattaataataaaaattaataatttatttgataaattacaaaaatttaactaattattattggtggatcaacatcattatcttcatcattcacgttgttgtaaaaacaaaacaaaaattaattctaataaagaaatgaatatatacatacaattgttaaatgatatctattttttttgtcagtcatcaaccaattttgtgtacatactaatgcttgtagaaggatgaagcctcaatcgatgtggactcacgtgtttaccaccagtgctgaatgtagattttgaaacaacagtgttgacaagcacatcaaatacatccttggtaaagggtatttggggtatttgaggcccatcatacttaacaaagggtatttgaggcgcgtcaccttccaataattgtatatatcaaataactcttcagtcctaggtaccaagttctcctctaaatataaatccagtttagacttcacattctctactcaataggaagctctaacaaatctgtcaaagttgtaaaaagggcatccaatcgccgtgttgaagaagatgttgatacattttccacctaaaccctttttctctcaaatgaggaaacttagaccc

SEQ ID NO: 252224 - DNA, 758 bp, Cannabis indica
ttttttttgaaaatctatagtattaatatttttttttaacaatgaataaaattttattgagaaagaaattagcgttgagtacatcataaagaagaaatcgaagattcttcatcaaaattagctcactatccaccctaagtgcgtgtgcaactaattcatgcatacccataatggccgattgatttgcatgaaaaagagacgccttagaaaaattggacagtaaactaaaaatatatatcaaatagagagcctaaatcattacaaaaagaaaacctcttaaaaaaggtagagatcaaatctaaacaatcatgctcaaaagaaatgagagggagtccaattccaacaaccaatcaaatgcaatcatcattaagagatatccttgagtccatctcaatccaatcaagaaagcgagaactgttgctagaaaagttgatacctagaccaaaaatatcaaataaataaatttaataatttaataaataaacgttaaaataacaattttaaaattatgacatatggattaataatatagtaaaatttgaagaaagataattgtaataaaacttattttttgaagtccttgcatcttcaccaagtgagtaaaataaaaacatacctatataaaatatataaaatttaattagtacactacttaatagtaatattaaaatgagaatttttattaaaacgaaaaatatttcgaaatattatattatgaagaaaaaacttatctctactaactgcggaacagatcatgt

SEQ ID NO: 252225 - DNA, 1320 bp, Cannabis indica
tttatattcccaccagttatgatttttgatgtatacgcaatgtacccatttcacccagagattgtccttcttgtttgccactgcccaaacatgcttaaactttgttgcagtattccattgagcaacattcagcaagcctaagcctcccttttttttcggtttacataaactttcccatgcaactgaaccagcccctatcattacactctttcctgtccataggaaactcctgcacactccttctatctctttaatcactttcttagggagaatcatgattcgactccaatacatatgtattgtaaggagaaccgagttaaccaatactagtctgcccgcaaaagacaagtttctggttgaccaaactctaattctctttgtcattttctgagcaaggctgatacaatcccctgctgcaattttccttgcacagatgggcaccccaagatagttgaaaggctcctcctgcctagaaaaaccagtcatatccagaactcgtttaatctctttttcatccattccactgaaatatattgcagattttgcattatttggtgttaaacccgaagacttagaaaataatttcagcccttgcatcaagagataaatgctcttaaagtcccctctacaaaatagaagcacatcatccgcaaagctcaagtgattgagcttcatttcagcacatctttcatggaacccaaagtcctccttcttcccaattttgctcatgatcctactaagatactccatccccagaacaaatagtaaaggggacataggatcgccttgtctcaaaccccttcttgcttcaaaaaaaccatgcatagaaccattaaacatcaaggagaatctaggagttctgatacatgtcgagattagtcttataaatttcttcgggaattttagatgactcaacatttcttctaggaaatcccaatccattgtatcataagccttttgcaggtcaagcttgatcatgcaattaggcttagaccctttcctaccataattcctaatgagatcttggcatatcatgatgttatgtgctatatatctaccttttataaatccaccctgatttagagagactaaattagggaggatatttttgagtcttgtacaaatcaatttggtagcaactttatataacacattacaacaagatataggccgaaaatcactcactttattaggacatgtaatcttaggaattagtgtaatgacagttgaattaatctcttttaaaagattacctgattccaagaatgaggaaatagcatcacatacatcatttccaactagctcccaattatcttggaa

SEQ ID NO: 252226 - DNA, 1025 bp, Cannabis indica
tttgattggacctgggtatgctttgcttgttttttgttcgtcatcccggccaaatactcatcttgtgtcttttctttgtagatgaaccctggtgagttttggggaggaaaacaccatatcgaccaggatcttctccaacttttgtacgaggatcaacctcatattcatgctagttcgtcctcctcgagtgacgaattttctaattcgagtttcgaggacagggaagtgggcagtgagggaacacctaccccagaacccgaagtgtagcaccacttttattccgatcaaattacaggtgaaggctacaggcatttcatttgcgaactcaagaaggggtggagacgttacttgccatccaattggacatatattgtctggccagacgtagctgataccattcttgtgggccatccaagttctggcgcctttggcattcccattgccactcctgctgtgactgttgcgcggcataccaatcaaccaccgtccagggataggatgatggcccacacaaaacaaaccatgcagaagattgctgcgactgaccctcacgtggcctggcatgccacgatgccgagcgctgaacaggcccgacctgctgctgaggaggaagattatgagggggatgtcaaagtccaagaaacagaggattaggtcgaggtccgtctggatagtccctctgaggtcgaggaggaaggagctgctaggcctttgcgctttggaggctatagtgaggccggggaacaaatgtccaaagttggtgacgtctttgtggaaggtgatgactacgtcacggaggagtatgccgaggcggttcctcaaaggaggcaagctgcctttagggctcggtgggtgtgtccctcgtccattgtaactcaagcccagttgaggagtttggagaaggatggatacttgggcggtttcgaattctttttcccttctccaaatcaccgggcaactaatccaagggagggatactgtgcctggtcgggtgcccactgttggaatttattttaccaggatct

SEQ ID NO: 252227 - DNA, 867 bp, Cannabis indica
ttatgaaattcactatatgacataaaaatgcattcaggaatcgaatataacaacataaataattatttaaatatctataaataatttcataattaatcataattaactgctaatttccaaattaaactaagcggtctttacatatcgggttcttcataaaattttcatgtcaaattggttggccaattcccatgtgtccacgtgaattataatattggtcagtttcttttcgctcttggcactggtgtctccattgattttcctaccttgatgtacactaaaatggtggattgtgctaaagctaaaggggataagcatactttgtcttatcctagtgtggtgcaacgtttggttatgagaggtcatccaatcacacttgatcaggatgttactatgcatgttccctctaatgaaaaatcatttcaatcaattttcaatacgcatattcctctatctgtgattgacatgccactgggcaattctggtccatctaaggttccctttttgtctgctatgccttcagttactctttcaagtttatcctctactagctggcaggtgcaattatattctgtggttcaaggcgtggctcattcttatgctacaaatcaacagcaccacaaaaggtttgaataaggggtcatcaatgtgctcactgctatgtctaaggttcttaagtccctggagtctatgccatctccagatgctgctcagtttgagtctggttcctcataatagcttccaaagcacgctcccatgtccactgaattgactttatttcctactactcctgtctagggggtttgagttcaattcccgttgctacaacaaatgtaaccactgcccaggggaggtctgtgtctgatg

SEQ ID NO: 252228 - DNA, 519 bp, Cannabis indica
aaagggttttatttagggcacaaaacccaacagtacaaccctcataggcgaccactgtcatctttttggccaaaaagatggtattgctctcttgaccaattggtgaagaactaatgtgaccaaagtagttttctagcatctatattaatgaaataagtaagaaataccatccaagacttcccacaagctatggctgaccactaccatcttttgaccccaattgatggcagtggtctctcattaggatttcaaacgtcgaaatgagattttgggatcctgggacccccaaaatatgattcactataaaaaaaataaagtcaaaacacaccccaaggggtccaagaacatgcacggccgagaaccgccatttggtcgtgttagtgctcacatcttgagcaaaacaacacaaactaccaatcagtaaaacgggcataactctcacaattgttatccaaataacttggttttcacattggaaagatatttttaagacggatctaagtgtgtctcatagtcata

SEQ ID NO: 252229 - DNA, 1507 bp, Cannabis indica
aaaataaaaaaaaaaaaaacaatgtgaaatagtaaaatttgcaaaataattactctcaatttactctatgtgaccaataatagtcccacagtgtaaatctataagggtgcgtttggaaagccacaatgtaattggatttgtgtgtaattggaggtaattacacaatttggcatgtttgtctgaccatgtaattacacttgtaattggaagtaattgaggggttccaattacactctccaattctcatggccccccatgagaattgaatgtaattacactgtgtaattactaaaaactttccatattaaacattagctattaaaaaatattattttcccatgtaattactaactattttgccaaacaagatattaggaattcatatgtaattaccacctcatatccaaacacaccttgcattttaaaatatagtgtaattactaaactgtgtaattactaccctagtaattaccctacctagtaattacacagttacttccaaacacaccctaagtgcataatgtaatttttggttgaatacataattattttgctaataaaatttttcataaaattatttttacaaaatcctccaataatgacttggacccatgaaaatctcttttaagaaaatacaaattaattttttctttctttctgtgaggtccttaaaacaatgtcaataatatatatgttttactttaaaaaatactaacggacaccataaaatgtggcattctgttattagtaaattttaatattggattttacatattttgatttaacgaataatatagagagctaactaattataaggggctaaatgtcccagggccaaggaagacctttatcgacatatttttgataggttcttgatagtttaagtaacatatatttataatgtgttatcgattgattatcagggggttgtcgataggttctcaataagagtaagaattttattttgttgttgttatgttggttattgttgcttaattatcgacatattgtcgacaggttctcgataggatcaagaattagttttttagttgtcatgtttggtgattgtctgctgattattgatgggttctcaataggatttagtattgcatttttcgctgttacgtttgcattttatttttattattattgtattatttaacttttgttgatatcattgataagttgtatttttccctctattgtgttttttctgtttcttgataggttttcgatatgtttttgataggattctaacatttgttatgttttatttcttcaacagcaactaattgttttgagagtgttattttctcgcctagatgaagaagcatatgtcatgataatcacttacaatgattctgaggtagtgattgagatgagtgtagatgagacacatccttaatatgacgtccaggaccctgttattatcgaaagtcatgctaaaaaagcaggataacaaattaaaataataacatccttgtattaaaaatattttgtataattt

SEQ ID NO: 252230 - DNA, 449 bp, Cannabis indica
aatcaatattttagattccgactagactcgaacccaaatcccccctctctcacggccctggcactgaacccgaactcgaatgatgggctatgatactgtggctcaaatctggctcactcttcgagaatactacactgcactcaatcgtgctaatgttggtcagtataaaacccttcttcacaacacaagaatgaaagattccctcagtgatgatcttctcaagatcaaaagtattcttgacactcttgcttctattggacatcgtacatcaccccaagatcacattgacgcaatcttcaatggccgaatttccgattacaatgtcttcattacctctgtcaacactcgtattgatgcctacagtgttgcagagatttaagctcttctaatcgctcaagaagtgtttcttgacaaagcagctaaagaacttgatgttgggttttatgccc

SEQ ID NO: 252231 - DNA, 2716 bp, Cannabis indica
cagtacacaatataaaatttacacagtattttaaaaaattatatcctacaataagaaaagaaaacttaataatttcaatgtacttggtgtaaaaactccaattattaacttatgtaaaatgcagtgtaaaattgtatttaccgattatcacatattgatccataacgtcatcaattaatagaagagaaggccttgacatcattttgggccatatcatttccaacccgaaacgtatgtccaaggcccaagagaagcccatcaactggagaggaaatgtacaaatgaatgaaattcctattttattttatttttatttttatatatccaaattttagtgcccaaaatatatatttccaaaaatattatcaagattttcaaaaaaaaaaaaaaaaaaaaatcaagattatatatctttgttatgacttacgactgtatggtagtaaagtcagaaaaatatataatttctaaacttaattgtaagataacaaaaaaaaatacaataaacaaaagtatgaattaaaaagtatcattaaaaatttaaacatgtacaaaaaaaaatcttaatttcacaattatatataactaaataaaatgtatttttaaatcataattttaatgtgatcatataaattagaatttctccatgcaaataaaaaatcttcatgggtaaaaccatcagtaatcgcagccgtagcagttacaataatttcttgagattgaagaaagtgtaatatagattcgaacatgtgagtagagcatggtacagtgatcggttcatcatcaacactacatattgatattgcttctttaatttcattgaattgttcttcgaaaaattttgatgacaataatttgattggaacgacatatcgtttttgttcatcaccaatgaaaatcgagacaaattttccttgagccttattcttcttgttatgccctaatttccatgagcattgttcttcttgttgtgccctaattttaacttagacatcaattgttcaaaattctctttaaacactggccattgttaggttcttgctttagaaaagatttttaaaattattaattaattatggtttgggtgtgttaaatattaataagattatttggtataacaatttgaatttgaacaggattagcatttcttcatataaggggtgatagatatatgttatataattatagctaggatagggtttgttttttaatatatattaattttgctatataattttgatacgttatttaattttcatgatttttttttcagtcaaataagcagatatttttaataagtttcattcaaatttatcaagaaactcaaattaattattaataataatattaatggatatttttagtctaataaaggagaaaaaaaatataatattaataaaataaatcaaattgaagagagatatagataattttttgtttgaacaagatagataataaatattattttagttttaactatttttgtcgttttctcagatattatggcttatttattttccaaagaatgtcgtttctcagacgggaacttgtcgtttttcccaacatactgtcgttttattagaaagaaaaaaaaccgagatgtattgtcgttttttatgaagttatcgttttgtgtggaatgttgtcgttctttcaagaattattctttcttctttttttttaagatcttgttatctaaaatctcttcgtatgttattttactcttgaagaaaaatatgtttttatatagtttattattattattatttggaaaaaatatgatcaattatcatatctatgatcaatatcatatctatgtatccttcaacttgatagcattttcagagaccacgataagtgaattagattaatataacttaaggtaatttgcgatttatgttttaatttttatatacttaatccccttatgtttattttttttttataaatttgaaatttcagttagatatactgttaaataccaattgaattactactatattagtttcgagattttattgtcacatatacacaattatatacaatagttattcagataatatttaacaattatatttaattggcgcctcaaatttgtaaaggaaaataaatcaaaagaattttaccatcaaaaataaaaataaaaagattaagtttataaaaattgaaacataaagaaatttcgacgcaaattactttataacttattattgtgcgatcatgttatttttaatactcttgatgtgagttttagtattgacaaatgacattattaattaattttattgatcttcttgctcatagtttagttaagtggaatgagaatctttcgtctgttgcttatcatctagatgatattgactttgcattttcctttgtaacttgtgattttgttttggttgctcttgaatgaattccttttttggaaaaaaaaatcacattactaatgattccaaatcagcaattttagatttcgtgttttacaaaagttactaattggaccctctattttgttaaatgataaaatggatcctatattttctatactatttttccatattttattttttactatactttaagggacatgatctggtactatcgtataaattcgggaacaaaaccctaattattcaatttaaattaagtatatttacttcataataaaaagtaatctatatgtatatatatgatgttaaaattacaaaaaaaaataaaa

SEQ ID NO: 252232 - DNA, 525 bp, Cannabis indica
tttttttttaatgaatgtaatgatagattgaaattattttaatataataactttaaattacttcgaaattttttttaattcataatattttaaaatgttattctatatcataaagtaattattaattttatagtaaagtttggcaataattatacaattaaaaaaaatatggctataattatgttctttgtgaattaataactctcaacttagttttttagagacagattaaattataactagcaaaatattaaaacaaataaaagacaaaaactttgaaaccctctctctcttaaggaaacaaacaatatttaaaaatacatttacaagaaagaaaaaaaattagcaataggactattagagaagtaacttttttttttctcgtcttctttgctcaatcaacatactgatattagtgtcttaagcatagagaaaccacactaatgtatctcgaacttagtgattaaactttattacgatgacaatactgtaagggcctcgatgtcttgtaaaaaagccaaaaaa

SEQ ID NO: 252233 - DNA, 537 bp, Cannabis indica
aaaacattcttcatcaccatgaccaagctttgaaggcataggaatcaatctaaattgctctttctccacatcaaaccccatgatgacaaacttattattaggagcattggaattataacaattccaataaataactccattaatatacttaggacctccttttattggaacacaatgttgttgaggttgtgatttttctagttcaatccattttgaatcttttagtgtgtaaaaggtagtagtaaaaggttcacacataacattataccaatcaacaacagcacatacaactttatactttcgagttgatttatcgaaccctaatccgtacgaaaaatgtttttgtattacaccatttattaattctacgtttaaaggtggtaattctaaaacatcttgtctcaaagggttaatcaaataaggtgtagtacctaaggatgttactcttgagaagcaaagtataccatttgcacaactctcaaagaacatttcgtttttgttatcattcaattgcgaagcccatggaaacaatgactt

SEQ ID NO: 252234 - DNA, 801 bp, Cannabis indica
tttattccactttttaccctcacaaaagccaattcctccacttttagggagacacaccttctcccacgaagctaagtgcaacttagaacggttcccagtgataccccataaaaattctctagatcttttatccatggcagctataactttgtttggaagggtgaaaatactcatacaatagtttctgatgctgaggaggaccgtgtgaatcaattgagcatgccctgcaaacgaaagatttctgctcgcccaacactttaagttcttgtttatcttgtctagaattgctccacagtctccagtcttccatttggctggacgaagcttaaccccaaggtacttgagagggaaggaaccctcttctatttttacaaagtccaggatctgagctttgataccatccttaaccccaccaaaataaatgtggaatttggtcttgtttgcagagacacctgtactctggcagaaactcataaaagcctcatttacacatctgaccgagttaagattccccttgcaaaaaataataagatcatctgcaaaacataggttagttagcttcaaatgtttgcataaggggtgaaatccaaaccctttcctcccagagatttgggctagcaatcttgtcaagtactccatgataagaacaaagatgagcggggacataggatctccttgacgcagccctttttcacctttgaacttaccctggattcttccattaataagcagattataactagttccctttaaacaagtcataatccaatcaatgaatctagtaggaaagcatagggaatt

SEQ ID NO: 252235 - DNA, 907 bp, Cannabis indica
ttttctctaaaataatatattttctctttcataatatttagtataatattatatttaactaattaatatagttttatccaataaaactaaatagttaaataatattaattatacaattcacaattatcataattaataataataaaaataatgccacaaattactattttgcccttaagactttatttctcatagaaattaattctcactcaaaatatattcatcaaataaaacttttctttgtacagtgttgtatagaggtgactcggggaccatggacctatattttaaagctccaataaatccaagacaattatcaatctcgtcaatagaataatctggtttattaatttcattattactccaccgtaaatatagaattgcactctttgataatataggattatatttacaaaattcttacttatagtccattgatataattaatatatgtagctcgtcctccaattattagttcataattagagttggtaaaaatattagtttaccctctaattatctcttgattccttatgtactattaattcaatgtgaacaattaatctataacttattatagatttagatccaactgttagcacttccaaaattaacactataagggaactaatattcgatcaattaggaaagtttagattctactattgtataacatgtttcaagccactcatgttattaagctcccaaaatagaagttgtaagaatcatcttctttgagaaaatttaacgagtgaatcaaagaactttgtaataaccgcatacttaagatatagatgagtagggtaattagtattgattttgtggttatatgttaatatcttatgttgtgggtcctatttttaagaaataggcataagggttataagtaagaattttgtaaatataa

SEQ ID NO: 252236 - DNA, 973 bp, Cannabis indica
tgacattcagtagtatacaaattataatcttttggatttggtgtaatgtgttatgctcataattttgcaaacaattatgctcataattttgcaaacaattattttgagcataaatatgggtattggacatgaatacttatacttttgaacaagtttttatgtgattatatagtttttttttaaaaatatatgttaggttttttttaaagaagtaatattttatagtaaattcaataaatataaatttatatatatcaaattttttaaataaatattaatttttaatttttttttttaaaaaaaatatatatataagttgaatatatttaatttaattttttaatcatgttttaaaaataatagtatttttgttcaaaattaatttattccattccattccattatatagtcaaccaaacataagaattgtattcaattattgattccataaatctaaccaaacaacctaatcctattcctattcttattccattccattaccattcctattcttattcctattcctattccattgctttcattacctccaaccaaacgggcccttagttcattttctggtactaaacgtatttcactggaatttgtgaagtattattgctcttttcttcacccactgggctaatatgattttatatatttatatccatacttactatagaaaatatatatacatattttatattaacaatagttttaaattattaatttcaaaaactaataaaagaaatatatattaatttacttttcctattactataaaatttatattttttaaaatagaatatatataacgttatgaacgcttatattttttataatcactgtaattgttacatttttttacctgtaataaataaattagtaataagtaaagaaaataaaattaaattaattaaaatatttaatagatatttttagtaattagtatttatttataaataattttattttt

SEQ ID NO: 252237 - DNA, 924 bp, Cannabis indica
tttcttatgtaccattaattcaatgtgaacagttaatatataacttattatagatttggatccaactgttagcactctcaggatttacactataagggaactaatatttgatacgttaggaaagcttaaattctacgattgtataacatgttcccagccactcatgttattaagtttcaaaaatagaagttgtaagaatcttctctaagaaactttaacgagtgaatcaaagaactcaatgaacataaacaggagttcatgtatacttaagatttaggccgatctactaatgatcatctttgtaatataagtaattcttttcatggtaaacgataagttaatgaaatatatttattacatatcggtccagtcatgcataatataattatacacaatatatttactacatgtccatctacatatatgattcgaatcaaaactacaacactagaagtatagtatatagtaaaccgtacttggtagttccatattaaagattcccagaactttaatacactactgacttatttgattcacatcgtataatcttaattcttgtgtacatccttacaagattatacattctccatatgaataagtaatttttagatattaataattatactcctataattaatatattatttatcttataaatgtatttcatatattctctaataaattattcattaattacttacttttaggacataaatcccaatagtcatagcctcatatatgaataaagatttttttgatatttatatataaattattcaatataaaatattagcaatgtaatattcaagcatgtatcaaactgttcaactacaatttataaataatattgtctttataggcttttcaaaatataaactctaacacgagcacctctacactgatgagaaagagagagagagagag

SEQ ID NO: 252238 - DNA, 789 bp, Cannabis indica
catgctgtgagtgctatcctcatgaacaacaatctgtataccacatcagcaaaatgctagttgatgccaaaagtaggtaccccctcatggagaagctaacttatagtctacttttggcatccaaaaagctaagaccttacttccaagaataccccataaaggtgtaaatcgatcaaccattgcgacaggttttacaaaaacctgaagcatcaggctaactactcaaataggccatttaacttggccagtttgagatcacacatcaaccaagagcaaccataaagggttcagcccttgtagacttcgtggctgagtgcataaactcatctcttgaaatcactcaagatttaggagaaaaccaagagctagagaagaagcgagagcaaaagtaccaatagaatcctgaagagctaacatggaaactccatattgatggaagctggactgatcaactgtccggtgcaggcattgcccttataacagctaggggcaacaactgcacggagcaatcaaatttagattcaaagcctcaaaaaatgaggctaaatacgaagccttgatagttgagctcaagctggcacatgaactacgggctgaccaccttgacatattcagcgattctcaactagttttgaatcaagtcctaggtgaatacatagctcgaggtgaaaaaatggttgcctacttgagcaaaataaaagacttactaagtcagctcaaaggctacacaatcaggcagatccctagagagcaggatgccaaaacagatgcacttgcctgtttggggag

SEQ ID NO: 252239 - DNA, 843 bp, Cannabis indica
tatgtgttctttttaatttttttattaaattttagcaacaacccaccacgtgatgtcttacttcctaagataatatatatgtgtttatatgtatatatttatataaatattcctcttgaaaaaatcaataaacacacattatttatttttcaatgtatttgagctctttctccatgttcatcttcttcttcattttattttccaagtctacaacattacccaaataaaagctaaccctcaccttttgtagtaggtaaccttaaaaaaaaaagagtatgtgaagaaggaagaagaagaagaagaagaagaattgggacagataagaatatggttgtgtgtgagagagagagatggagagcttgctctctgatgagcttctggtagaaatctttcaaaactcccactaagttcacattcttcagtggtctcaaagcgttagctccatctctaccgtacttccaagtccaccctctttgtctaagttatccttttctgccactaatttattttgttattgttttaaggttgttaaattgttattttcttttatttctttattacattgtctcaaatattattgtactgctctatttttaatagtaataggaaaataatgaaatttgtatgtaaggtattttcttcagtattctatgctctaatatatgttaagttttcctccattcttccacagttgcttttaaattgttctgcttcttttcatttttgatatcttctcttgtatgttctcttgttgtgttttaccttctcacatttgttgcatttgttatgttgtttcttttcctagccagcttctatacacttttttttgtcttccagatttta

SEQ ID NO: 252240 - DNA, 711 bp, Cannabis indica
atctacccctccacctccattcgccagaaattccattattagaccccaatcacatttctccttgtttttttccaccaatatcaccaaacccagaaattaacttgagcctagaaaacccttcgcccaccttcctctcatctcatcatcatcgccgacttctcttcacctgaacaacgacctcatcaccattttcgcatgaacccagttgtaccagtcccgacccgcctcgtccattatcatctcattaaagttaacaaaaaataataataatatcgtatatcattttagataaagaaaaaaaaaaatcatatcctagcaagaaaatagggggagctaaaaataaataaatggtaattctatatgtgtaacctcatgataactaaataaactacaacaaaccattaccatcagattaaaaatcgatagtttgaaaaatacccttacaggtgagaagaaaagtgatgctctcacctaagaaaaattctatatatataatagtatttatgggtaagtttataagtacacgagatatttaggtagacctctatatttcggcatacatattatttttagttcttttttttttttggtgattatgtatcactactacaaaaataaattttttattccaatttttagggagactttatcttagtttaataaaaactggaatatatgccattgagataaaagctcttataaaaagcagga

SEQ ID NO: 252241 - DNA, 648 bp, Cannabis indica
aacataaacaactgctaatttccaaattaactaagcgggctttacatagtgggtacgacatactgaactccgccctccctcacatgaacaacctacattgtaaaagctcatttgtcttgtttaaataattatattagtttaattgaataaaatttgattagcaatataattaattctaaatatttaaaattaatttctcaatagattatttttgaattaatttagagaaatatacacataatttaagaaataattctagataattgatttctatgtaaactagttggtaatttttctaagtatttaattaaatgaaaattaatatttaagttgaacttttcttttaaaattcaagatagttaaatattggatactttttgacatttaattaaattgaaagttacatttatgttgaaaattagtttttaattaattttaggtcaacataaattagagtgattttcacaatttattttgttttatttcatagattttgaatttatatatatattttcaaatatattaaaatttcgaaaaattagttaatatatttatagaaaattaaatttaagttgaagatcaatttattaattaattttggaccaacttaaattgagtaattttcataatatttattgaaaattaata

SEQ ID NO: 252242 - DNA, 951 bp, Cannabis indica
cacggagcaatataaacctgaagtgatcaaagatgtaattatattatttatatacataataatatcaatctaacaacattgaatctttatccaaaaatataggggtttcccattaattacctcttatctatatttaatggcacaaacttcccctcaagggagggatcccacattcttgtaaatgagagctcaacctgttcctcactatccactataaccctaaagcacgtaccttttatcctgcataagaaaacaattcattgttccaactagcttaaaaataaggaaaataataaagtcatttatctaaaacaatgaaagcaaaatctgactagtaattgaaacagaaatctcatcacaatgagaactattcttgggacaacttttgaacatatattaggttgtcaatactcaatagaaaatgagaactgttcttgggactacttttgaacctatactagagatgagtgaggcatacacatcaaaaattcccttgcttcccggcgcactccaaacgagatcccagtacctacataatcatccaaaacacaatcatttctgaatttaagtaactggaaacaacacacattacaaatatccttacaaaacaaaatttaagctccaaaaccattgtcctcatctagcaactagatcttacccaaggctatcaatgaaatctagtttttattactctgcattactaaacaaacagaggtgaagcaaaagttttgcttgtttaaacttttgatataacagtatgcctaaaaaggctctacttttggaaccttttatttacccaagtaatgcatcatagaatgaaagaggaaggttacagattaagtaggatacaaaaacaagtaccctctattggactccttattaagaacttcaagaagattgtcaaggccattatatcgaatgccagtaacaatcccatctggaacagacaat

SEQ ID NO: 252243 - DNA, 519 bp, Cannabis indica
ttaacaaattcatatgttttggacttaaatagaattcataaattaaatcatgaaataaatcatgtgaaccatgcaacgtaaaatgttatttctaatctttattaataagtaaatctgattatattgaaatgggtttaatttagggtacaaaacccaacacattctctattcattattctaccaacttcctagcactgttagtttatgtcgatgacataatcattgctagcaataatcataacgatgcctctgctttcaagctattcctgcactcaaaattccacctcaaagatctgggttcccctcgattctttcttggattggaaatcgctcgatcaaaagcaggaatagctatctcttagaggcccttcatactccaactcctatctgaatcaggttcccttggcaccaaagttgtctctacaccaatggatgctaatacctcccttagcaaggacaatggaccatcggttgctgatcctactgttggaatttattttaccaggaccttagatctac

SEQ ID NO: 252244 - DNA, 1065 bp, Cannabis indica
tgcattgttgggtaaagcactagcgagatttgtggtttgtgattggtcatttgtccttgaaggggaccgtgttataggttcgtaacagggttactgttcgggttgcaggagatggaatatagtctagtatggggttttaaatagtgataagtggacatggttagctagttgcagaagaggatggagtagggatggtatttgtgacaggaagatgagtattgtgtattgtttgctcaatgaaaaatgaaccagcaaggaacatatgtgttagatggtacattattgaactgggaaaaataaagacaatagtaggagaactagagacattgttagatggttcttgtggcgatgttgatgaagtagtaacaagaaatgtattttcatcaaaaatcacatttcttgcattgagtagtctctcttgtgaattttcacacaagtaacccttgtgtatggaagaatagcccaagaatgtaaactgttgtgacctgaactccatcttgtgcttgttgtagggccttaataagtgagggtagcaagcacacccaaatggttttagtatagtgtagtctggtatttgtcctagtaaacactttgggggagattgttggttcaaaacctgagttggtaacctgttgatcaagaagactgttgtgtggaaggcatgccaccaataagtgaagtccaaacctcattgtgctagaatactgagtctcatttcagttatatgcttatgtttgcgttcaacccttccattttgttcacttgttttaggcagggatgtctaaagactatccccttgatctactaaaacttggcaaagggtcgatattcacctccctaatcaacctaaactcttttaacgggaagattgaattgcttctctaccatgcttttgaacttgatgaacatgtcaaaagcttgagattctataactaatggataaatccaagtaaatctattatactcatctaagaaatggacataatagctatttctatctttggatttaatgtgagatagaccccatagtattagtttaagtggttgagaagctcttgagttgga

SEQ ID NO: 252245 - DNA, 634 bp, Cannabis indica
tgtttcaagaataaaatacttatcattttgatcattcttgtggcaattgatcacctcagatggatcttctgtgtctcccatcttagcattgggatcaacattacccttttttaggatcggtgaagtggagactagatttgattcggttgaatacaataattactgaacataatcttgaatggtatcacgacttttttcaactttcaatgaaagacccaaaatgtttaccgagatttttggaaaatgaattatttaatattagagctaatgaaaatgtaataaagaaaatctaacatgatgaagacactcaatttttttacacgttaggagcgttaacaatccttagtccacgagtcagtattattatcagataggctagaaaagtccaaggaattacaatgagtatgagcactctattctcttcttgagcaagtaagtcaagagttttcaaccttgtgcatgaaggatttaatatgtatttatagagcagtagaggtcgtacttagttactattttcctcttatgaggaatttacaattaatacatagattcaccactacacactgcacttttggtatcaattttaaactgacacttgtacctttagtgcgagttagtagaactgacacctatt

SEQ ID NO: 252246 - DNA, 1245 bp, Cannabis indica
attaaaatagttttatttagggcacaaagcccatcttcttcttcaggctttagttctatcacgaggtaaagttctgtgagtaatgtccgtgactgccttagacttaggtatttttcttactttggtcctttttagcctaacattttagccaattatgcaacctgataggataaacttatgtgaagtccatgaagatgtgtaaaaaggaattcgggcgtatttttttttaccaagaactttgacagaatacgcatcttatctctggattcgttcttgagtttagctcttgagaaaagaattcaagtgtgtttccctcgggaagactaagttgaaaacgtttcctgctcttggttgcatgtgaactaataactttggcaaacagacgcaagaagttgcagctgttagcaatcgggcgtaatgtacccctcaaatgagctgggaattttggtctcaaattctcagtcatttgcttggagtctaacttgtatccttttccagttcttatggaggaggtttgagtgtggtttttccttgttccaggaagcatactgttcttggagtctaactgtattatctgtcttctttgacttgtttgttaaagttgacctaatggatcttctcaatacttacatcttgggaacatggtagtacaattgagtgggagcgctaatcatatatataaaatctatagcttctataattatataaaagtaaaatgataattttcttttagcttgacttaatagagataaatggaagagctcttatttcagtaattatattagtttattgaaagatcatttataggaagctaagggttttaaggataaaatacattgagaggtagaacggtaaatttgtccattcttgatgtctatcatctatagatgatctttgattatttggattaaacaatggataattcatagtgtatcaatatttggaacatataaagtgttctatgtaatcaggagtacaattctgaatctatagtggaatcaagaggaattaataagttaagaaatttacttggtaacttttagatctacttattgagagcttgattacataggcccatggtccctacattgtttgggataatattgtcttgtagactcaattaattgattttaattaaccaattagaattctaaataagactatgtcttgtttatgaatttcactaaacaagggcttatttgaaaagaaagagagaatttatgatttatttgttaattaagagac

SEQ ID NO: 252247 - DNA, 5146 bp, Cannabis indica
gattttggactcgcacgaattttccatgaatcattagatcaagcaaatactcacaggattgttggaacattgtaagtaatacgagcaaagattggttataagtacagtttttgataaatcatttgataaacatatttttgtttcaatcaactgcagaggatatatgtctccagaatatgctatgagtggattattttctgagaaatctgatgtctttagctttggtatcttgatattggagataattagtggaaggaagaacacgagtttctatgatgaagagaaccaccgaagccttgttgcttatgtgagtagttctttctttttttcttcattgaatctccagaatatatttatatatatgaatcattcttatgaagataaaaatataaaatactatacatgtatctataggcatggattttatggagtgaaggcagagcaatggaattggtagatgaagcaatactgggagacttgtgtaattcatcagaagtaacgcgatgcatacatgttgggcttttgtgcgtacaggaccatgccaaagataggcccaccatgccagatgtagttttaatgctaagtaatgaatctcattgtcccgatcctaaccaatctgttttaactgttgaaagttcaccaatgcagcaattgcctagtacgtggtcggtggatgaagccaccatctcctatgttgatgggcgataaagtctcactatgataaccatcttcttactaatacaagtaaaattttgccatgtacccgtataaaacttttgtccgttgttgtgccactgaatttctaccattctgtaaaaaattcataattatctatcaatagttggaggcctccaccaaatagtttctgctaaaaccttctagaatcggtactgacttctaacacatggctcatcacgatcacgtagtgcatcagaatcaataagatgcgtgaccaggaagaatactgtatgctacagcttatgtaataacaactaaacaagattacatttacatggttactttcacagataaactgtactaactgtcaaagctcaccgcagaataccaagtccgcattccatttccaccgaaatcttctttcaaattattataaatgtattgaatcaatttgagaaagtcatatctttatgaaagtagtgctctcataacatgtatcaacgtttcatatcaaaactaagaatttctaaaaggccacgttataaaagtgcaagtggaaaaaaacttttgaagctgtgtaggatgacatgtttattttgtttgtcactagtgtaacaaagtccaaccaacctcagaatcaatccaatgcataaaagatgaaaatagaaataaaaataacgacaacaacctcaatgacattagctatgataaggaacgggtattgaaaagttcaacctcagaagaaatataaatagcttaattattgacgtttaaatttctagtctttagaactttgcttttacacattaattcacaacttacttctacaagataaatcagtatcagaaacactaattctcttcttgagaggccatatgggagataaaaataaagaccatatttctctagtttttcgtatattaatcttattattctactctattccattagagttttcctacgcaatttctaacataactcaatcaaaatcattgtctcaaggacaaactcgaatatcccctaacctaaaattcgagttaggattcttcagtcctaatgataagtctaaacatcaatatgtgggcatttggtacaaggaaatttctccacttgcagtggtatgggtggctaacagagagaatccgctggcagctacagacacttcagcaactctaaacattgccaaaaatggaaacttagagcttttggatgaaaaccacaactctatctggtcaaccaaagttgtcgtcccttcaaatagtagtgctgttgctcttctcttagataatggaaacttagtccttagagatggcatatcaggagaaaatctatgggagagcttaaaacatcctggggacacttttttacccggatcagtactaggctttaatgttaaaacaggggagagttttgtcttgacctcgtggagaagcgacagtgatccatcacctgggaatttctcttatgcgatttcccaccaggctccaccccaagccttcattttgattaataagttaaccccttattggagaagtgggcctttggataaatctaagtacgttggttctccaaacatggatagatcataccgaagtaagtatcaacttgttgaaaattttaataagggaacaacttatatgtattttatggactggtacaacgggtccgctgctttgaaattctatatttcatcgcatggtgttttgaagtctgaagtgaaacagagtgggagtaatatttgggaaactgaatggcaaaagccagatactcggtgtggtgtttatggggtttgtggaccttttggtgtatgcaacatatcagaatctcctatttgcaagtgtttgaaaggatttgaaccaaaatcatatgaggaatggagcaagggaaattggacaggagggtgcttgaggcgtactgaattactatgccagaaaaacacaaccacttcattgtcacaggtcgaaaaaactgacggttttgttaagatgggaatgacaaaacttccagatttgtacgaatatttgaatgttaagggtgccgatgattgccaattatggtgcctgaataattgttcttgcttagcttatgcgtatgcgaatggaataggttgtttggtttggtcgacaaagagtcctctgcttgatattcaggagttttcctctggtggacaagatctttttcttcgccttgccaatgcagaacttggtgagcttgtagatcaatttacaaaataaatttttcaataagataaattgtccttattcatttttttttttttatcatacatttcaaatttgtgtatattccttaaaattatcctttcagaaggaggaaagacaagtaggaagaaaactataacccttgcaactatttttgctggtgcaatgttattagccatcatggtactgatctgtttttgcagatggagaactaataaaaatggtaattataaagataactgccttaacttctatcaatttcaatagttctcatatctaggaatgaattttgatttgaaaatacacagtaaacaaaagtaaagacactgcaaagcatttgatcagtttggagaagccaccagacaatccaagaaacattttgcaattttcaactcagctgcaagaaccccagcttcctttttttgactttagtagcattttagctgctactaaccactttagcatattaaacaaactcggggagggaggatttggacctgtatacaaggtcacttcttgtctcttaattttattgtgagagaaacaaatgcatttctacaattgatttcagtgaaaaacaagattcataaacagaaaaatatgtgaaaaacttgcagggaaaattacaagatggaagggaaatcgcagtaaaaagactctcaagtagctcaggacaagggattgaagagtttaagaacgaaactattttattttcaaaactccaacacaggaaccttgtaaggctcatgggttgctgcattgagaatgaggagaaattgctagtctatgagtacatgccgaacaagagcttggatacttttatatttggtttgttacttaaccaaattactctctcaattatactctatgtcatataatgctaaatctaacttaactttcccgacctatatagctctaaaagaattttggatgaaatcaggaagattaatagtcaactaaataacttaaaccactctaaaccaatggattttgattttcatcagatgcaagaaaaaaagaacaactgaagtggggtacacgctttaacatcatacattgtgttgctcgaggtcttatttatcttcatcgggactcttttctaaggataatacaccgtgatctgaaagtcagcaatattctgttggatgaggatatgaacccaaaaatatcagattttggactcgcacgaatttttcataaatcattagatcaagctaatactcacagggttgtcggaacattgtaagtaatacaagcaaaattctgaatttagtacagttttcaatgaatcacgattaatatatttttgctcttcaatcaagtgcagaggatatatgtctccagaatatgctatgagtggaatattttctgagaaatctgatgtctttagctttggtatcttgatattggaaataattagcggtaggaagaacacaagcttctattatgatgagcaccatcgaagccttatcacttatgtgagttcaaacatacatgcatatatatatatatatatgcattaagaagataaatatataacataatatatatgtctatttatatttttaggcatggcaattatggagtgaatgcagagcaatggaattggtagatgaagcaatattgggagacttacgtagatcatcagaagtaaagagatgcatacatgttgggcttttgtgcgtacaggaccatgccgaagatagacccgccatggcagatgtagttttaatgcttagtaatgaaactcaatgtcctcaccctaaacaacctgtctttactgttcaaagctcatcaagaacacaaatgcccagttcctcttctgtgaatgaggccaccatctccgtagttgaaggtcgataaagtcaattatgccacatagataacctttaatccaaaagatcgtcccaaaagttgagcgaccttgactataaatatacatgtaaaagtttcatccgccgttacaactgaatttttttggggggaaaaatagaatattgctaagtttaaagtagaataccaattaagatatagtgttaagttgggtaccaaaactcctctaattctataatttttcaataatattttactatactatattcaagatttgattttttttttcaccaaatgccacttcctttttcttctaaaatgttcaatttgtagaagcaaaatgatatgaaaaaaatggagcaaaggaaactggcctgtaaaggatatgtggagtgaaggtagcagaggttgatgag

SEQ ID NO: 252248 - DNA, 438 bp, Cannabis indica
ataataaatatttacttaaaaaataattctaattctaatatataataaaagtaaaaatttcatattattaatagttttatttatcaaaagataaaattccataaaaaaaaaaaaaataatctattcacaatcttattaattaatattatttggagttgtttattaagaaatataaaatttattatatatagaatttcaaattaatttgtgacaaaaaattattgttataaaaataaattaatagggtaatgtagaaaaatattagctagggtatagtatcttacctgttgttaccaccgtatcttactaaacttttaaattttaatacacatatatgttataacaacttttaaattttaatattttttattataatatttttaataatatcatgagtaattattttaataaatttcatattttttacttaaaaaaatt

SEQ ID NO: 252249 - DNA, 514 bp, Cannabis indica
agtttccaattctttttgccgaagtaactttcgtacccttgctcatctaatttatagagattagattaaggcacaaatctgaaacatgccttaccttcttcattgtcaaatgacaaccaacattcgtttaaataattacatctccaattccaataattttggagcatgtagaattacccatctttacatttccaaagtcaccagctttgtatgtggtaaacatctctctattgggagtgatgtggaaagaggctcgtgaatctaccacccactcaaccatgttatcttcgacatgcaaatattcgttaacaatcactatttccacatcttcttctatagtggcagctgtagctgtgttgttgtcaccattgtttttcttcttgttggcctcttgcattttctgcttcaaaatcctacaatttttcttaatgtggcctggcttgccacagtgaaagtagccatcgattttgcttatgtattttgatctgcctctggacttgtcatttctattttt

SEQ ID NO: 252250 - DNA, 970 bp, Cannabis indica
tttggagtttcaaattctcaatgtccttggatgtattacgacgagcgtacaaacaacgctcacaattaattcctgacaaatatttttgaattagttgaattttttcatattaaattttacaagatttatgtaaacctcttatttattattttaggtaatagaaaccataataaatttattataaattaatcatcaaacttattataaacttattataaatttcactagagtaattttatacatcaaaatatcttttttgaaatttactgttgctttactcttaacaatttttaatttcttacaatccaaatccatatatataccatacaaaatcgtatattctacatattcgcaatgattccatacatcaataattgtaaatgagatagtaaatttaaacatcaccacagaaatcattaaattctacaagtaaaaaaatttgtagagaaaatgtgtcgaaatgcacatttttataatatcgttctcatcctctttgataagaaatgaaaaagtgaacgaaagacatttagagtccactctgcctgaccatataggatcaaactgactaattagaacaaaaaaagaaattaccgcaaacaagaaccaatgggtttccaaaaatcagttcgtaactcaaaaagaaatcaattttttacatgctgtttcttttcagcagcacaaaaacttggcaaaaatattcattccttaaagttagagtttttttatcaaaaatattcttgttaaagaaaaaaattacattggcaaaacaaaatactctcattgaacattcagtaaaacccaaacttaaagcaagggaaaaaaactagcttacagaattcaagagtttgtgggttttgtttggttggctagaaaattgtaacattgagaaaaataaaagtagaagcaatccgaatatgatacagaaagtaaaaagtagaaaagttgttctctctctctctcactcacatac

SEQ ID NO: 252251 - DNA, 822 bp, Cannabis indica
aaaaaaaaaattaatagttggccccctagtaattaagttctagctccccctggctttaagtattcttactttttcaaaaatttgtggaagaatctgagctcgagaatttttcatatatatatatatttattataatatatatatagggtaaatctattgtaaggcctattgttactacctcatgatacggggaaggtaattggacaagtaagattaaagtaaattaattgtccaactaatgtaggtgtattcttatacagctgattttctctttaaattaaaaacactacaagaaaacccgcttgccggcgcattgttgcgccggtaaaagtatcctaattacgccggcgaagcttatctgggaagcttggtcggtaaaggacttttttccggcgcgtagactaactgcgccggtaaaacttccttttaccggcgagaaatcacgcccgtaaaaaataagcgtcggtgttaagaaatgcccttatctgctttgaacctgctttgataagcttttgccggcacaatagggcgcctataaaactattggcgccaaccgtcagattggcgccaatagttttagccactttttaccggcgcactattgcgccggcaaaagtattaatttttattttttaaaaaaattaattaattaaatataattaattaaatttttttaaataattataatattatattaacaaaaaaaaccaacataatttacattaaaagataaaccaacattaattatattatgttctactaaaatcagtatataaacaaaatgttaaatgttcgaaccggataataaaaaaagtacagttc

SEQ ID NO: 252252 - DNA, 737 bp, Cannabis indica
attaattactatcaacttctttctttttgagtgtttttctttcgaattttcctttaaaagttttattgaagaaagtttttcataaaaagaaattcaaattcagcttaattaggagaaaaaaaatgaagtcccacaaggattttggaatactttttttcagtgtttatatttctttaagtgggaagttatgcattttaactgtttaagaaattaataatcttttaagttatatctatattattttactatatattattaataataaaaaggtagataatggtatttaattttagtttcttatctttttaaccatgataatttcaaaatttattgatggggtaatctttcacataatttctttctattcattgtacacaaaagggttagaatctttacagcttctttctttacaatcagtttggttttgtaaagttattgtaattattgttagaattattattgtggactaatataattatgagcttaataccataaacacaattattaactatgtgccctatatttattcactatcataatgggatggttaataatcatatattatgttagaggcatataagagcacccttaaaaactagaggaaattacacttcgtatgggattttaaaagtttatatgataaatatggcacatttaagtttggccaatttatatggtatttttttgtttttaggtttttttatggtatttgatatgccatatatatgtaattaggt

SEQ ID NO: 252253 - DNA, 568 bp, Cannabis indica
attaacgagctgtagtccaagtgtcaatataattaattattttgctagtaaagcttaagggatgacagtaagtatgtgcattctactctttgcctgagcaagtataccaagaatttctaaccctttgcatgaaggatttgtttagtatttatagtgtacatgtgaaggtcctgctagttaccctttttcctccaatggggagcttacaaataatatattcaccttttttttttgaaagattgtttaaataattcactttgggcttatctggtgaagcccgacacataacacaccttgtgtatgctgacgtggaggccttatcatgtagttagttattcataccacatcctattcatgggtaatcaatgacacattaattacctgattttaaattatccagtttctctttttagtaagatcttattctatatctaagattttgggaaaattatgcttccgaatttgtacagaggacctcttctaaataaacaaagacataccatttcagatgctgactcagcttgacgaaaccttgcctgagtgagtagtattgatgttttctaagaag

SEQ ID NO: 252254 - DNA, 3332 bp, Cannabis indica
aggatgagcatggtttgccatcctccaacggtctagatagtgcaatatagtcgatttaacgcaagtaaaatgtgttgattcatcatttgagaactagagaatggcacatatcagtaatagtgactaagtccaaagatagtggttgaagcagccttgctggagaattggtaaattgtgcattcaactacaagcttctagacatcttttctcactccttgccaatatagatgtgttgcgttgaaatactttaaattccccagaatgtccctctacatggttgacatgatgcttttgctacaataatagaataaaaggtgatgaggacggtataagcaaagcaaacaacaaagaaacttcaaaaatacttgattcatagaacaatcacaataatcgtggcacaaactcggctcttgcacaatcttttgaacaatggaatcagtagctacatgagcttgtaagtccataagcgagaggatattttgaacaaatagttgctaattaaaccatttggtgcgtgcgcgagagttcattagttgctttgttcttaaggcccgcctatactaaatttcaaaatcataccccagaatttttctcatttatgatgctttgatactactagctgttgttctagcaagtatttcaagtttcattgatcctttcttactagaaatttgtgtcccaacaaatagggctgcctctcttggacgacccacactatggccattaattgatgctcatatacctatttagtgtgagcttaggaagattagacttgattgtaatacacaacaggtttgtgattttgtatcagaatttcccctaattcctgacctcgatgcatcaacttctaggacaaatggagctgaaaaaacctcccgagtagtgaaggaccaacacaaggcttatttctttagctagtctgtaagaggctgagctatattgccataccctttgaaaaaatttcgataatgataatagcctgtaagtttaagaaattcctgtaatccttcaatcgactttggaatcggccaattgttcatggttgagagcttgttggggtctactgaaactccctcgatagatatgatatggccaaaatatttcactcattttggggaataaacattttttttcggttagcatgtaacttgtgtcgctgttgttgccccaaaacgagttccaagtgttgatgttctatcgactaggttgtacaccagaaaatcatcaaaaaagacccaaacaaatttgcccaaaaattcccaaaatacatccattttgaggcttggaacgttgttaggccaaagacatgacaagaaactcaatgtcccttgtgagtgcggaaagccatcttctctcgatgtcgtgggttgatactctaatttgatgatacctcgatttcatgtccaacttggaaaacatagttgcactgtacaattcgctaagagttcatcaactccaactccaactccaagtccaactcccatctttctttcaaacagactgcattgggcttgaaatagactcatacttggtcgaactatccctactctcaacatttcttgcattaactgcttgatctcatctttcaacacttgagcattttgatagagatatcgatatagggccatcctcttattttgagagtattttgtatttgcgaggtcgtttaggaggcaatccttgtggcattttgaacacctactcatagtggtgtagttgggttaatatctgcactattggaggctgctagttggtcatttcacatacggttagggcccccaactgcacccaaaagccctgatgctcttgttgaatggtgtgaatcattgccttaagaaaaatttgggatttagaaaggttaggatctccttgcaatgtcacccacattcttcctgtcaccatggtccgccaatttacttgcttacttcctaaggtttccaaccttttgattcctaacatacatctctctaggctctccaatggaaataatttagtgactattgcccccaaatccaattaattccacctaaccataattccctttgtgcaaacaacactctagtgcctagtaacactccataggaagtagtggtgatgggaatgttcgttaaggacacgatattcatagaaatcaacatgtgttgccccattgtctatccaatatcaataagacatggagaatttatatgcctcttatctaacttcttgtcaaacttttaatatacctcgtgtgccctcttatctttaaattagctcggtcaatcgatgtatgttaggagtcttagggagcttggtggaaccaaactttgttgaagatggatcatggagttgtaaaagacgatacatgtgcaactggtatcgacttgtcttgacatggagtaaatgaagccttggttggaataaggttcggtttcgaattgggcccttgagtagtttggcccatgtacaaggattgatgaccaacttatctttattagcctcaacaacttgttttggagatgggacgacaaccatgaacgaacatccgatcgattttggaataagggaggagggtttttgctcgtatttagcctccacatcaatcgacacacccaccgaacactcaacttgaatcatccaattagtgagatttgacaatgtttagtcaccaccacggataccacggatgaggcagattatcctcacttgctcgagaagagcttgatccattagctccttcacttgtgctagcttttgtgtaactcttcctgccatagatggcacaaattcaatcttcgagtcgactcacccaacataaattaggaatgagtgctgtagatacaataaattaagaaatgagtgctatgatactaattgcgaacaatgagaggaacaaattatcttgctaagcacaattaataccaatagcaacaaaatagtagccaaatagtagagaaatataaatgtagagaagactctcaattcttgcataacttcctattcctttccaacttatatagggttcctttggtacctaaatcgtattgcattgtataatattacattaatacccaagtaacttcaatacccaagaaatggttgagctcccttaattctttcgtgtgaaactgggtatgaatgaaagactcaaggggtgagatgctttcagtatcatttttagcaataacgatgtcatcaacatataccactaacaaaatgataccagcagttgatcttttataaaatatagaatgatctgacttacttttcaacaaaccaaatttctcaatagcttgactaaatttaccaaaccaagcacgaggggtttgtttcaatccatataaagatttgcg

SEQ ID NO: 252255 - DNA, 1038 bp, Cannabis indica
ttaaatgacgaagattattatgatgaattttaaacaacttatgctcacttattatgataaattatctttagtattatgaattcattaattattcacttattatgataaattattttaattactaataattagtttttatttaaattatttttaaaaattatttaaaattatgaaacttttcaattgaataaaatgactattatgatgaattattttttttaatgagtgaattatttaattattcctatttttagaaatcataaattatttttatgatcatttacttatgataatggaacttttagaaatattttattaatttgtatctcacatctcacattttctcaatatcaagaattatagcatattatgacaagttaattaataactattcatcatactaatttaaatataaatttcttacttattaaattatgtaatcggaaaaatattaatttaaaaaattttgaattatttacttaagttttaatatctcaatatcttattaagttaaaaataaagtttaaaattaatttataatttattttaattttctactacaatttgggcaacataacatttataactagataattttcaaaaaattaaagagaaaaccaacaattaaaagaaccaacaaggataacaataaaactaaaataacatttcacaatacatatattaattaaaaaataactaatactaaccttaaaatgcaagttcttcccaaagatagagaacaccaataaaaagagagtaacttctacaaaataatcatttaaaaaataattagtattatatttacacctaaataaacatcatacattcacatacacacatatatattcacattgatattcatattcacacatttatatttagacaaatatatatccacatatctattaatacatttaaatttacatttacatatatatatatatattaaaaatatacatatatatattgattagactttgttgtattcactgaaataatcaattacacatactgcatttttagttaaatgaaaaagaa

SEQ ID NO: 252256 - DNA, 1576 bp, Cannabis indica
tttctaactttatatgtgtttattattttcaatgttttaaaattcatattaggttgttaatccaacatacatgatagtaaatagatcctggtaaaataatttccaacagaaacttgttccacctaacccgaatatgaccattattactaatagatggctctttagaataaagtataacgcagatggatccgtgaacacacacaaagcaagattggttgctcgaggtttccaacaaacacaaggaattgacttctttaaaacatatagtccggttgtaaagccttgcactattcgcatcttgtttactctcgctgctcattacaactgggatattcagcaagtagatataaacaatgcgtttctaaatggagagatcaccgaagatgtttacatgagtcaaccccaagggtttgtagatgaagaacacccagattacgtttgcaaactaaataaagccatatatggattaaaacaggctccaagaacctggtttgaacaactcaaacaattcttgcttcagcaaggtttttagcactccaaagccgataatagcttgttctacagcaaaaacaatgggaaactcatcatgctactggtatatgtagatgatatattaattgctggtcatgaactcaagcaagttcaaagtatcatagacaatctacacaaacagttcggtctaaagaagctaggatcggtcaattatttcctggggtttgaggctttcagaaatggcactacatatcatcttactgaacaaaaatacataagggatttactcaacaagaaaaatatgacagacgcaaaaccacaatctacacctatgtgtgctaataccaagttgtctctcacttctggacagcttcttgcagatgccaaacaatatagagtgtaattggggctctccaatatctcacaatgacaagaccggacattgcctttgctggaacaaattgagtcaattcctcaaggctcccacaaccgaacactagggagcatgtaaaagaattttgagatatcttgcaggtacatctcatctcggactcaccttcaaaccagccacccaaatcgatcttcaaggttacacagatgccgattgggccggctgttatgatgacagaaagtcaacatcgggttattttgtttttttgggacaaaatctcataagttgggcctccaaaaagcatagagtggtagccagatcaagtactgaatctgaataccgggctcttgctttagcaacatctgagttagtctggattgaatctcttcttactgagctttctatcaacctgtcccactgcccaattttatggtgtgataaccttggtgctggctctcttgcttccaacccggtttatcatgctagaactaaacatatcgaaattgatcttcactttgttcgggacaaggtcattggcaacaaactcgatgttcgatatgttgattctacctacaagatagcaaacatcttgactaaaccattgctagttcaacaatttgtgtacttaagagacaagttaacacttagttgtccaagtgtaacttgaggggggatgttaggattatgttagtt

SEQ ID NO: 252257 - DNA, 619 bp, Cannabis indica
acaagacaaaatctcaataaaaggacaaatttcaattttgccccttgcgttaaacttaagcaacttataggtctaggggtaaagtggtccaaaactataaccccgcctaaccctgatattccaaatatcaacatatgaatatcctgctaaataaaagtaactaaactcacacatgtgactctactggccatccgtcgcattttctaccgttaccgagagcaaaaatcataaaaattgtaaattttgcatataacataaataatacttttagagtttaataaaatctctggaattgagaaattataactctaatgcctattttctaaaaattgatcccacaatcatgcataatcataaaatatcaataattaatgttaattgcttttactaatccaaattataatcatgcggtcattaaagtaaaaatttattaattacattaataagtaaaaataagtaaataaaaataaagtgatttttattgtggtgtaaaatttagctcatatcttttgtgccaaatttgatattacctttagaatttgctaaatttagactactttatatatcactattggagtttgtttggtatacgttgaattacaccgtaaaatgtattgta

SEQ ID NO: 252258 - DNA, 545 bp, Cannabis indica
attcttatatagagacatactttcttaatacatgacttaaaaaatatataaccaattacaatatagaagttattcttatttataattgacccaaattggtacttgatattttataataaattatatgttattcttgaatagagtattcttaaatagaggttttattatataaaacaataaaaagacaaatacaaatcaacagaaaaatagtaagatatcaacctcattgaaatatgcaaatcattcataaatcaacttcgaataaactacaaaacataaggaaaaaaaaaccactacttttattaatcatgtaagatagagaaatatataggaggagtgctcctaatttttttgtaagagagaaaacaagtgttaaaaaatatgagaaaaagtgtgaaagtaaaagaatattattttagtaaaaattaaaagaaactaattaagattcttttataaagtttgattaattaaaggaaaataatatgaagtagtttgagtgtgagtagaaagaaaacgtaaaagagagaaaaagatatagaataagt

SEQ ID NO: 252259 - DNA, 572 bp, Cannabis indica
aatggcttcaggttagtgctttctctaaatttatgatttagagttttctatattaaagcacttttaggaatatgttcatatctgtgatttatatatttcttaagtgttttataaaccctaacaagtggtatcagagccacctttgttgaattaattaaagatgtgatgattttattatgaaatttggagatttcaaaattagggttttaatctacttagtatattatatatatatatattcgatcgtgttgcgtaatttgggaattttgaaattcaatattgaattgtaatatgattgtggcttcagtgagactcgccaccctatttttccttggattaatacatttatgatgtgctatttgtatataatttatgaatttagtgttattgatatattaatggttgggctcaaaatcgattacattcggttgggccattaaataacgtaatgcatatatataattttattttatatactataccatatatgtacgtgtatatatatgtttggctatatatatagtttcttttttttttagcagagaaatatgtattcaatgtttctttctttt

SEQ ID NO: 252260 - DNA, 1216 bp, Cannabis indica
aaaatggttttgttaaggtctgtgggaagagaaccactatgaaaaaactgcttaaccatattgctgaaattatccttaacaaccggccaacacttctggaaaaaaccccgggtcattccatcaggccctgaggatttatccagatgcatttggaacaaagctttccgaacttcttcatctgaaaccagtaacaaaagctcagcattctgctgtgatgatacacgagtttgcacgctgcctgtgacttctctccagtcagtttgggaagaggaaaaaagctcgtggaagtaagaaaccataagatcattcaaaccactatcccagtcaacccatgcacccgaacgatctttgagctttgcaacaaaattatttcttcgtctcgcagttgctgaagcatgaaaatacttgctattattatctccctcttgcaaccataattgcttcgatctttgacgctagaaaacttcccattgcacataacatttggccaagtccttctttgcttgtttgtaattgactatagagacctcatcctgacccaacttccacttctgcacttcatttttatacttctttaacctttctttgaaatttccagtaacctccttaccccaaacagccagcttatccccacagaattgaattttatgcctaacatcagcagactcacaagtctcccagctatcctttacaatctgataacaaagaggttctctcaaccacgcattttcaaaccaaaaccgcttgacagaatggtggactgcagtaggaaccatgaccataagaatcggagcatggtctgaagttgaaatttcaagattatggagcttagcaaaagtgaacatgttcaaccaagcaagattagctagccccctatctaaacgcacttcgatccaacgattattaccccgcccacgctcccaagtaaacggataatcacataatttcatgtcttgaagtccactgtcaatcaaagactgttgaaaaccttggattaaaaaatcagggtacctattaccgccccttttgtcatcatgagaaaacacattgttaagatcacccatcacacaccatggtagattagaacgattagcaagagtgcgaagcagattccaagtagaagcacgcctactcctattcggttccccatacacaccagtgaaacgccattcctgcacactttcagaagcaacctcacatctatataagcatcaga

SEQ ID NO: 252261 - DNA, 502 bp, Cannabis indica
atcatcttcaaattacaaccaagcacactaaaccctaattaattcaaaaaaagaataaatcttttcagaaacaacaactgaaacaaactaacatatcattgtagatactaacatactgtcaataacaagaatctaaacgaaacaggggaacatatgtatgaatatctattccaaaaccgttgcttaacaaagttaccaagcaacgacagcaaagaaacgattagcagttgaaataccaaagcattcagatccaaacataccttaagcggaagcacaagaaaacaatccaccaaaaccctaggaaagagttaaaacctagaagttgggaacaataaaccctagaagaacaaaaaaaatagctgaaacgaagaagaagggaatggaaatgtgaataagagaagaggcgaacctgagttgaggatcgaaaacggcgtcgttcggagagagttcttgaaccgaagagtctgtcgccgagtacggggatagaggagagagagagaga

SEQ ID NO: 252262 - DNA, 851 bp, Cannabis indica
ctagctaggattttgtaattttaatgaaacttggactcatgacttaaatagagatatcacaagcactagtatgtgttgtttctgtgtcgtcagttgtgctaataaaaatattctaataaagatactattatatatttatataaagctaattaggatttttgtctcctcaattttgccaaattatgcttcctgaactattgagattgttggatttaaggaattttgtctaatttcattcaattttactatttcatgattatttatgtactaaaccatgcttcctagattttgataactataccaaatcatttcattcgaactttgacatgtataataaatcatgctccctaaactttcatccatgttagacttttttactaaaattgaacaaaagtccttaaatattccaacaatctcaatagtttaaggggtatttttaacaaccttaaagttcagggggcataatttggtatatgtcaaagtttaggggacaaaaatcttagttagtctttatataacaagctaattaattaaggtatttgccccaaatcatctcgtgcggttaaaaatgctcctaaattaactattttctcaattttattatcataattcattataaaaatcttacttttagtcacaataaaatttgtaactaataaaaatataaaagttgtgactaattataaattatcattcttatgttgtgactaaaaggtccgtaactaaatatattagttacaaaaatcacaatttattatgattaaatatacttttagtcacaatacttattgtgactaaaagtaaattaaggacaacttatctaaatgctatatttaagttataagtaattt

SEQ ID NO: 252263 - DNA, 1049 bp, Cannabis indica
aaaaggcagtacactgccgaacttgaaaatgtgtaaaaaatggggataagctaatatataaaaatctataactaatggcagtatactgccaaataaatataaacagtaaaaacgtaaatgcaagcatgtcacagtatttttgtaataaatgggaaaaagttagtacatcatgtaaatttcccaataaaaacagtataatctcaaaattaaaagagcataaccttaatgttgaaataaatccccatattattgtacactgctcatattacaaatacacagaaattacaagcagtaaaaagacttatgtggccttcagcctctatttacctagacaaagcagttaaagttagttaacaaaagtttagtaatactttgtaactaactctcctctctttgtgctctaatacaacaacatatataaactagtagcaacaataacaacataaaaaaaaaaaatcagaggtaggagaatacacaacaaaaatcatatcagttttcaaagaggagaaattgagtgatttaagggttcttggagaagacttacaatggagtaagctttggaaccaaggtggtggttcggatatccatggcaagaggatgttgttcatgcaaaagaagagaagaaacacaacattgttagtactgatttagagaggaaaaacagagagaaaaagaggagaaaatcactgtaaaatattcagattaccaaaataaatacttgtgtgttttggaatcgaaacccattgtaatcatttgatcattgaagatccatagtgaacgaggcgagctcgaagaggacgtacccagcacgattttggggaacctctataaaaccggtgttatctcttccttttatttttctgcaattttttatattgtgtttatgtgatttctgggttgttgaatcggcttgggaaaggctcggtttaagggattgttttttgggttttgtttatgatcagggaagggtgaataatcgggttgtcttgattttctgggttagatttggtgtgcttttgtggttgatgtcttcgtgttcttcaatgaag

SEQ ID NO: 252264 - DNA, 556 bp, Cannabis indica
atgattatgtataagtgatgatgagataaaaaaaaattattaatctcttagaatgaatgttttgtaagtcgtaagtatttcactaaaaaaaactaaaaaaacatgatgagaaatacatcgaacaataaaatgaatactcgcaacattttcagtgtgggggaataggaagttttatttttttttaaaaaaaaaagatacaagattgaatattgtggagagtgattagagaatacaaataggaattgtttgagagaatgttgtatgctatagtgtgatttgagcctaaattaaccttcttatctacctttcaccctagtcttacattataaccctataaaatcctattgatctttaaattatgtgtaattacattagtggagaatgatttggtaattaagcttatagagtggattttcgttgaaatacacatttcttttgagatgagcattgattgttggcatgcatgaattgatttgaatgttagtaatatgatgagttgattgcacacacacaaaaattaagtttgaaaagtgatttatcttgagttgaaattcta

SEQ ID NO: 252265 - DNA, 1070 bp, Cannabis indica
tattaatattatttagaataagtaaaaaaaaaataaaaattcttataataatagtttttcataagaaattataattatagttagaaacacactaatttataattttcttttcaataatttatatattaaaattaaagatcaaacaacttaaaaaaaaaaacaaactcttgttccaagcataccttaaaacatactgtttaaatcttacaacacataaaaaaattaaaattaaaatttcttctctgttgcaataagaaagacaacatgtaatttaattaatttctgtttgcaagcacaaaaacaagttgtaacattttacattttttttttgaatgttttaaaattatgcttttatacaatggtggaacagaaaaatgaatttgataattaaaagggtgtaattcttgggtaataatacatatgtaccttaaaaaaaaaaaaactaatgccttctagatttctccacgtcaacagccaggttttaccagaattttcccaattaatcttttccaaatgaacacttacgaacagagaagccgcatattttttctattatatacttcatttcacctccaaacattttcgtatcatggagaaaacaacaattcaaatccatattatcactgatcagtccctcccaccagaatcaaatcgaccagaccctctctctctcacacaccacacacacatgtaaagtcctcggtagaaagaaactattctaacgacgagcctataacgagaacgttatagcgagaacttgtcctcattatagaccctattttttttttatatgtataagcaatctatatatttatgtaaaatataatatttaaaaaaaaatctacaaataaacacaaaagtgagatttattgtatatgagtttgtatatattttagataataagaatgaatggcttaactttgaaaaaaaaaaagacttgtacacatatattaataaaaaaaaaaactttctaataataactgtaatacaaacaaaccttgttataaatataaagggtaaaaaacaaaaaaataacaaaaaaggaaaaaaaattaacaaaaatacttagg

SEQ ID NO: 252266 - DNA, 826 bp, Cannabis indica
ttttgccgtaataatacaaaaaaactaatattttattgtactttaatatctatttttttttgcagtaataataaaaaatatattttgtcacaattaaatacaaattgtgaatttttgttgacaaaacaataatgtggcatcgcatattttaatatttttttatttaatttatattttaaatatatttttatgttagctcaatattaccatgtcatcatcatttaataacaaagcatattaatgatttgtacatataattgcaacaaagtattaaattttttgtattacttccgccaataaaaattaagaagtaaattgtaataaaatgttaattttttatattattatcaaaaaaaaaatatatttaagtattaaagatcatcaatcaaaaagatttaaacattattgttgcaaatatttctttttgtaatggtatctattgctcattctttatctttcatttttatcataacaattttcacagtccttttccccccaaataataatgaaaaaacaaatttcgttttcttatgaaatgtggtaattattgtttattaatttgaaagggaaaaaaacaattgggtcaaccattaattatggtttctcagaagccaaaaactcaattattcgaacacgaatccaaccatgttgtacaaaaatatcctaagctcaaactcgattaatattaatttaattaatcaacaaatgtgttatattatatatattaattgtaactaaattacattattatatctttatatattaaaagtgtctatctaacggcatttcttggtttaacagaatatacttaaaaataaaagaatat

SEQ ID NO: 252267 - DNA, 753 bp, Cannabis indica
aaaaaaaaaagtaaatatattttctcttagttagatatatagtgtttgtaaatataaataagtttgattttctcttcacaaatttttagtttgtttaagttatttatttaattttcagtaattttagtttgattttttaagatatgtgtttataaataaaataaaatttgaaaatattttttttaaaaaataattaggtttttaattaaacttaatacaatttttattaatttaatacttttatcaatttttttaattttttagaattaatagaaaattataatttttaaaattattattattattattattttttataaaaggggacaaaaaatttagtattggtcaaagtttagggggtaaaaatactactttttaacggtaaaagaaatagaacctaactaaagggatgtagttgttatattttaagaagaattttaacaagccgtatattttagatggcaagattaggtaattaatgtcgaaaattcaggggacaaaaatattaactattctatataataacatgaagatcactcattcacaaccttaagtgtagattagtagggatacaaaaaatgtcacttttaccagcacagtttgctactgcgctggtaaaagtaacttttaccagcgcatttcgcaaactgcgctggcaaaaaaggttaaagttttaccagcgcacatttgcagtggctaaaatctaacttttaccatcgtatttacgcgctggaaaaaagtcatttttgccag

SEQ ID NO: 252268 - DNA, 563 bp, Cannabis indica
cacactagcgttggtagtccactattaaattaacttatcacttagcctcttcgatctaccctacagcctcttcttcaaagcccctttgtcttaagaattggtgatctttcttttggtatgccaaaatacctcttaaaatcaaacatttcatctggagagcataccactatattctacttgttgcttctaacttgtaccataggaaaatcattgataaccccatgtgctctagatgtcatagccacatggaaacagtctctcttgcgattgttctagggtaaagaaaatttggaaacactcacctttttataactttttacttcaataaaaagtagttagatattaaacagtttgtcttctatgcttttgatcatttgtgcaaagaagatgttgaattaatatatggtctacttttgggtgtatggaatttcaaaaataataatttatttggtaaatctgactgtctacctgacaatgtatttggttgtactaaatcatatttttaggattatcgaaataaaaactaagaacctacagagatgtaaaggagactaagttggtta

SEQ ID NO: 252269 - DNA, 1800 bp, Cannabis indica
tccactggatatatattaatgaaactgcttgaaggtcgggtctctctctctctctcacacgtattgtatgtatcactgtactttgctctttcatccattattcaacctagtggacatcaattaaaattcaaaaagactagaggcatattatgttaggtgggttgtattgagtcattgctcattatggtttttcttaccagtgcattagactctaggcactcacaggcataagtgaaaatggtactcaagtatttgagcaacttaataatcaaatacctctgtatatatgtattcccatgataaaatagaaaagacaattagcaaaaaaagaaaatagacatagtcatcatatatccttaaaattagtttcaattttggtagttgttttctgttcattaattgtagttttcttaactacagcagagtattggattgattcttgaacaaagttcattccttttgaaatatctaaggaagcatggtacaataatcaattatagaaatcttgcatgatttgaaaaaagaagtttcatcatgtgagtgtaaataacaataaaagtagaatatactaaagcacagccataaataaactttcacttgttaatatgattgaataggacatagtctagaatcaatgaacaaaatagacaactcttgtcttttttccattagtttttgagttgaatagtgtaaccagcagcataggaacaacacaacatatgtacaagtactacataaattctataatatataaaagaaaaatgaatatgaaggcccttaggcctagactaatctagatatcaagatatgctaatgttatggtgttgattcactagaaagtaatttcattttcagctttgatttattgcaatgtattatgtacaaagtgcaaatatgatgtgtgtggagggagggtccccttatacggctggaaacacaatggtctatttttgggccaatggaatatgccattattcttcaatttttgcaacaaaattccaatcgggaaaaaaatgtgcagagagtggagaaataatataattatctagttatgattatcagaatttacataagtgttagctaaaaaaaataatcattttatattcaacttaggaatttaggagaggtggtatttggacattctctccactaacacatacacccaccatgttgtgggggcttatcatataatattattttttgtcctcaatgtatcactatctttttgtttttgaacaaattgtgtcactagctttgatcattatggtatcttgaaattttctttaattaatagttagaagcaatgcactttcccatttgcaaaaagttcaaaagtttacccaccgccacatgtgtactcaatggtattttaggttttattttaaaaataaaatcttctcaatagttctttaaatactacaacttttttttgaacatgaggaaattttattccaaaaaaaaaacagaacaaataacaagcaaggcaagctgcaataacaacataccacaaaaacaactctaccagctattgactatacttgatgcataattatctcttcttttttttttttttaaattaaataaatatataaataagccttgtgatcctcaacaacttttatcacatcacatttttaatctccctactaagcactatagcagagttacaaacatcatcaaaaatacaactacttttatttttccaaatcaaatataaagcagctaagcatgtcaaaaagatctatttagttggagcgggttggagctccgattcgatggatcacctctaatccgaaacat

SEQ ID NO: 252270 - DNA, 1190 bp, Cannabis indica
aataaatagattaaaataaatgtcaaacgaaaatacaactctttaaaataataagctttagttataaggatattcgatctccattggttgttctacacaattcttcttgtaatgagtaatcatccttaatggatgaacgttcattagcaatttaacatcgtagaatctcaaaagataagtattatttgcaagtgttttattcttagtaacgtccaccccaatagtgcctgctaagagtaagacttacaaggtatgaaataatggtgggagctcataagatagaatggccttgactctcacctaaacgggacaacaccagattctagtcttgtttaaataaaaggttgctagaatggtagccattttagacgagttgactactctattcaatgaatgatatctttgactctcgtctaaatgggacattgtatcagtttgttggaaactttagaaattatttaagatgtgtttgtttcgtattttcacatgtcattcttacttgcaaattgtatgataatttctaaatgtgtatgaatttatattgaacctatgttgttttctattattaatgttgtagttataaattttaaatcttcattgttggtctaacttagcttgttgtttttaatgggacaaatcccaaaggattgccatccattagacaaacataatagtcttagatctttacatttgtaaatacaacatctacttgtacatccaaagatgacaacttagactagtgtttacaatatgaaacaatgaagaatttttataaaataagaataactttgactctcgcctaccgacacatcgttagattcttactttaatcgaaattatcttttagtttttcctcttagctttttcatttagaattcgcttaaatattatatcattggatgaatggtttataaatcatctacttatgatgtcactctaatttctcttatgaaattgaatggcacagatgactatattcctgacattctatctcaaaatgatataaatcatcgatcttagaaatctcatacttgtatatgtttaattagggcaacttaagcttagagttagattagtagtggtggtccaagcttgaataattactcagaaatatctggtataaatttaagtctttgactttaaattttagattctaaataaaattttttatttcagtttcctagaataca

SEQ ID NO: 252271 - DNA, 1668 bp, Cannabis indica
tattaaacttgcattttgtagattctaatatcttaataatcttattttgtacatcatatttaaaaactattttcatattcactcatctttaatctttaatctttttattacttgtcttttatttttctatactaaaatctcatcaaattaatattggaactaggttagaatattctcgatttatttaaaatagtttattttggtgttagttaattcgcatgggtttgatctcgttcttacatgaacattatattctgaaacgattcgtgcacttgcgattataaatattaaaacaccctcttttaagaacaacaagtttttggcactattgccatggagttgcaagaaagaaacaatttttctactagttagtttttttttggaaaaataaaagaaaataactagtagaagaattattttatttttatattctcactatcatctttaaaaaaaagttaaaaaattgaaaaaaacatttgaaaaaaaaaaagaaatttatacatatattgttatattatatttatatatatttcttggtagttgatgatattttgtgtctcctacatatttattagttgaatgcattttcgcctcctaaccttttatttttatttttctcttagtggttgagtgcattttgtgcctcataaattcttgattgttgagtgtatttttgcctcctattacttattttctctagtgatggcattagtgcctctcctaacttttatttttgcttatcattttagttgatggcatcttgtgcctcctaaaatcttattattattaatattactactactattattatcattattattgttggttgatgatattttgcgcctcctaatttttatataactatctactattattattgttattatttaaattattgtatttagttagttgtaattttatttactttgtttaaaaaaaatactcgaaaaaaaaactaaaaacaaagcttattcttttaacataaacaatttttgctaaaaggaaatttggtaaagtttccacctacacttaataattaaccctagggagttgctgttaagttgtgagtatgtaaaatcgaataggcatgggaacaagttaaaccaaaaataaaaaataaaaaaaattaaacatctaaaaaaatcataatctcttcgtgttataagtatgctctgtggttgcggtttataactgatcttccacatcagaaatttgtcttcttgagattatttgtgtttctttgtgaaatttgtgacattgcatgcatcattggcaacgtgattctaaaaatcgtttggtaaaaagagtagtaactttaggtgaaattgaaagtgtttttgaaaaattaagcataatggaacaagaacctaatattgcgcaagaaaaaacactacttgaatatttttcacctatttcatctaatgctccatcatgcattgttttgcctactactaatgccactcattttgaacttaaaccttcaatcattcaattgttgccttctttttatggtttagaaagagaagacccttacatgcatgtaaaagatttcttagatatttgctcaacttttcgttttcaaaatttttcggatgaatcggttaagcttaggttgtttcctttttctttaaaagatagagccaaagcttggttaaactcacttccaac

SEQ ID NO: 252272 - DNA, 629 bp, Cannabis indica
atgtaatattctatatatagttagatttcgatattcattacccgatttgatttcctaaattaattgtcaaaatattctaacaattaatgtagcgcagatactgatggagtatctcacctataaatataggatctcagtccccgagctccttactcattttgtttatacagtaaattccatctaaagagagttgagagagtgagaaagcccgaactccagtaccgaagctatcgcagggattgaagctcaaagatcaatggctgaaggtatttgatctttcattgcatatacattacgatatgttaatagtttatttcccattacatatcgttcatatatgttgtactttcatattatatattatagtctaacatatgtaacatggttttgctttgtttcgttattggttcttttttgttcttctttgtattttgatggctccccatcaaattgttgttagtggttgggaataacaggttctctacaattgaatgggttgttagtagttcaatggcgaaccttacacaatagttgagtgctcaagttacgagattaaatgaatctgctgcaatagtttctattgttgtctcttctaactgatagatgaaactaaatataggtgctcttaa

SEQ ID NO: 252273 - DNA, 1553 bp, Cannabis indica
ggaaacatgctttttgtagtaggggtatcctattttcctaaaaaaatatgattaccttaattttttttattaactatgtattagtattttttaaattaatataattttttatgtaaaaaaaaataatataattttgtagaaaatttacaatgcatctttttaaaagggaagtatcatgcactcctgtttgtttcggcatgcgagagagtttttagtctaatttttttatagttatatacgtggtattatttaagacatcctacaaattttttacaaatttagaatattttaacacgccgaaaatagggttcaaattaggagttttcatctaatccaattcgtacttttttgttcatagtgcatctgatcctcactaagtgcggatttcatatttaggatccgatccaatctacataataccttaaatccaatctgatttaatctgcaaaactacggattgaattaattattctggattggttacttttaaatattaaattatttaatatttattaaaaaaaaatttcttcacataactaacaacaaaataaaacaaaatactgttatctgtaagtaatatatttattttaatttataattacattctatatattctataatatatttccattaattacttatttttagggcataaatcccaacaactgtttattataaagacctaatttttatcacaataatcatccatagtacgtagatcgatataaatctcaagtaattatgaactcattcatttaaatttttttgaatagtttacaatgccgaaaataaaattcatgatattccagtttaccacacgtattcaaaaaatttcaaatttattttcggtactgtaaactattcaaaacttttaaaaaatttaaagaggatgttgtaagcataacgactacctccataaaaaaattttaaaaaaaatatattccagtatgtgttttcgagcacgaaagttgactaaaaggttacaataaaaagttgattgtatttgtaagaaaataaataaataaatgatggagcagttttggttattatggttttgaatgatgatattatgagttgtttaatttattaattaaattatatgtctattttttttatcaagtaataattgagtatctgttaaacaaaataaattattaaaaaaaataagaagctagtatcaatgatattatttaaatgttaatttgaaattttaatttaataataaaaataatcagtaattaattaacataatataattgttgttgctataatggatgtaccatttttttttatcaattatgttaaatgcacaataaagacatccaatttttataaagaccaaaaaaataatgtgaactttcttaggaaaaatgtgtattttgatattagtattgtgtattccatggcaatacgtcttccgcagcagtacaaagaggcagggaatcccttgccatatatataaatatatatatatatatatctattctatataaagtattctatataaagtgtgcctatataacataatttttggtttataaaaaatttatggg

SEQ ID NO: 252274 - DNA, 635 bp, Cannabis indica
aaaaaaattaaaagcaactacaaaatgtcgatccactaactcaaaaatatgtatccattcaaaataaatatatactcatttttctacttgtttaaacaacttaatcgcaactaaaaatgacaacactacataaatgtacaaattaattggacatcaataaattatgtaaataacatgaagaaacataaaaataacacataaacaatcttaataaaacaaaactaagtacaaacaatagacaatcgatgttttcatgttatttttgtgtggtattttttatttttatttttttattgttttgataatattttcctattactttcatatagttttcttgttgtttttataaaacacctaaaaattttaattaaaaaataaaaacaaaaatgtaaaaagaaaatatttaacagtaaaaatgttaaaatatttgcaaaaataataccttgtgtaaattttctaaaagaagaatactagacaacaatgttactttatatgcaaatcatttaggcattaatttttgtgtcaacaaccttaaatatacacttataaaaaaaagaaatttttacatgaaaaatcacttttgcacaatttattaccaaaatactcctacacgcctatatcaacttttttactta

SEQ ID NO: 252275 - DNA, 513 bp, Cannabis indica
agtcgaacggaggctccttgggtttggaagtcacttcttggtcagacagctcgtgcacaattcctagccggcgtataggctcctcttggctagccaaggatgtcagtacagttccttgaggcctcacttcactccctttggttgttgcttgacgttttttctatatcttgtatcgaggctctattctactattgttggggctatactacacatgtactttatcattggcttacgtgggcgtgccacgtcaggtggaaaaaatttgggataacatttgcccccatgtccctgtttgaacgtctggtcagatagggactttctagccatcatcttttctatagtagtctttgttgagcagccttatctagcaaagtattggcctttaacttggcatgcttttggatctttcatcttctctctctatatacatctcatcttctcttctggggtatttcttctttgtacctaccattaacaagtttcaagctttttaagcttttggaaactttttga

SEQ ID NO: 252276 - DNA, 1084 bp, Cannabis indica
tgaaaattaagaaaataagaatttaagagaaaaatcaaaattagggaattatctctcttttcccttctctctctttgaacccaacaagatccaagaggagttgttgctgaattcttcatttcaacaagatttaaggatctttttcaaggtgtgggattgatttgtagcttgaggtaaccctaattacctttattttgaggattcttgtgttataagcttgcttttggtttatgattttatgttttgatgggtgttagggttaggatgttttatattttgttttctaagtttgatttgagttagaatgatgatctagctgctagttttgagttgtgggtttgtggatgaacaagtttgagtttgaaaactcaagcttggttcatccatggcatgtttttgtttgatgtgttttcccgagttctactggttggattgtattgtgtatgccctaataaggtactctggaaggtttggtggcatttggaggagttttgagcaagaaatggggtttttgggtgaactggtgtaaaccggctagccgattttgccagggttcccgaatgctccattttctcaactctcatctattccagtgccgttgttgggtgtttccctatttcctgagttagtgtaatccctagagtgtataacagaacttagagttgtaggttcgggtttccctggattagggttttagtcatgtgatttacctggtttcattatgtgattagggcatccatctagcacgagactttccgttcaggtcggccaacacacttgtatctagaaagaaggtaagaactatatataatgtatagtatgaatatgcgaatgtgtgtatatgttaagtgtatatgcatgcttatatgttgtgattcatacactaccaacacttgtacggttgcggtacatagtgcattggtaaggtgtatgaggtttgaaagtacattgtggtgttaccagcacttgtacgggaaggtacaaggtgtctgtggtacaacacttaacagtactcaaggtgcgatccataccctacctacattagtacgaaggtgtattgggtgcatgtggtacatggtacatg

SEQ ID NO: 252277 - DNA, 685 bp, Cannabis indica
taatctggattacattgaaacagagttttatttagggcataaaacccaacagaaaaacactcatggcaaaacttggtagggattgggcaacagatttcaccaagacttctttcccagctttggacataaatctagtctcccagcttaggatcttctttctcatcttttccttgagaaaacccaaaatggcattcttactacgctccatcgtacatggcaatccaagataagtactattttctgaagcagccgacacccccaagaaattacagatatactctcgaacattctctctagtgttgttgctgaagaaaaccgaagacttgtcaaagttcactttctgcccagaagctctttcatacacagataacaggtgaagaacatttgcagcttcagttccattagctttacagtaaacatacgagtcatcagcgaacaacatatgggaaataattggagcaccgcgtgctacacggcatccagatagccatctattctgcacatatctttgaactaaggaggagaagccctcagcacatattagaaagagatacggagacaaagggtccccttgtcttatacctctactatgaataataggtcctagattgtggccaccatgagtaattccgtacttgattgttgaaacacaaaccatgattagtgaaacaaattccctacttag

SEQ ID NO: 252278 - DNA, 692 bp, Cannabis indica
gcaaatcccatactcgtgcccaagcctaacgactcatggcgcacatgcattgatttcactgatttgaataaagcttgtcccaaggacaatttccaacttcctagcattgaccaacttgtcgatgccactgcaagtcatgagcttctcagtttcatggatgcatactcgggatataatcagatcccgatgtatgaaccagatcaggaacatacctcgttcattacagatcgaggtttgtattgttacaaggtaatgccttttggtttgataaacgcaggtgggacgtatcagaggctggtgaatatgatgttcgcagatttgattggggacaccatggaagggtatgttgacgatatgctcgtaaaatctcaacatgcaaaagaccatgtcaaccatttacaagcgatgttcgaaatactacgacgatgcaaaatgcgcataaatcctcttaagtgtgtctttggagtcggctcatggaaattcctcagatttatggtgaatcgccgaggaattgaggcaaaccatgcgaagattaaagcattagtagaaatgcgatctccgactaggccaaaagaagtctaaagtctgacaggtaaagtcgtcgctctaaatcgtttcatatcacgatcctctgacaaatgcaaagaatattttcaactcttaaaagctaacaagaagttccaatggaccga

SEQ ID NO: 252279 - DNA, 630 bp, Cannabis indica
gtatataaatatgtatattctatgaaatcgatatacaattcgaacactattttctacactctaaataagatatagtcttatttaaaattcttatcgatttacaaaatcaattaattgagtctacaagacaatattatctcaagtattgtggggaccatgggcctatataatcaagcttttaataagtagttctagaatttaccgaataaattctctataattcctcccgactccactataaattaggaattgtactcttcattacataaaacactctataccaagtataaatacactataaattatctattattttaatctaattaatcaatgctcctttatggatgatttaaatcgagtagggaggaatttctgttttacccgtcaatgtattttattcaaaaatacttagctagttgtaaatgatattacagtaatctaatataattactgaaatgagtactccaccatttaaactcgtttagccaagctctaagaaaattattattttacttctatgtgattatagaagctatagattccatatctatgattagtgctcctgttaggctaaaattagtctaagtttcgggtcgtattttcggttagttttcactctttgtttctagt

SEQ ID NO: 252280 - DNA, 533 bp, Cannabis indica
aaattaaactcagagtcctatttttaccattttagaaaatacagggttcattttatcttgtaacaaaatagaaggttcaattagtaacatttgcaaaacacagagttcaaaatagtatatttaccaatttaaaaaatacatataaaaattatttgttaaaaacacgctcaacttaaaactttttctgttatattaataatatttaattattgataaaaaaaaatactaaatatgtggatttggtgatggattttattttaaataagttagttaatactttttcaataataataaatatattgaagaattttaaaatatttttaatttagctgattaagttttattatttgttgggtgcttttctattagtttttcataaaaaaaaaataaaagatattatttaccatattatattagaaaattatatagtatcactacaacaattgaaggcattagtggcggagtctttagcggcggaccctctccgccgctaataacaggggtattagcggcggacagtggggtccgccgct

SEQ ID NO: 252281 - DNA, 775 bp, Cannabis indica
tacttgtacaatagacagtatgccaaaatgcaaaatatattcaggcccaacaataagttattcacacaaatcaaaaagctaagcaattgaacaacgctgaaactaatattgccacacacgcaaagtatgtttacctttactaagaacttcaagattaaggtccttctcgtgataaaaaactggattcttaaaatgtttaaataatatgtagcatacaccattccccacctgcagacacaagaaattaaaaaacaacaaacttatagtgccagctagtaagctatctgtcaacattttccaaatacaaaattcaacataaacaaaagaactcacttcaggaaagttcttgttagataacaaaatgggaaagaaaatgttttctttcactattagttggactaaattacttctgccggctgcagaacaaattaaactgccagactgaaaaccgataatgtggagctgaggaaatctgcaacaatataaccacactacatagcatcagatagaaagatatgaatagattaatagataaaagaaaaagagcaagagagcgagagcagaccacatattgagtattttagctaaaatgtcttcagggaatttgaaaagtgcaaatatcaattctttacctttgttgaagtaactttactttttcaaaaaatgtaacagcttcaaactcatttgtgaaagaactttcagaaaattgtccagcgagtactaagtagtttccattttttttaaagacattgttgctcccttccaatttgttcaa

SEQ ID NO: 252282 - DNA, 718 bp, Cannabis indica
taattattaattaatttaatagatatatatttttataaaatcatttttcaaaatatgtatcttttgcataaattaaattgatatatagaattttagcaattgataaatattatttttgtgtgattaaacttatataaaatataaaattaggaaaaaaaaaatataacaatcgataaatctataggaaactcatcaaatttaaaattgttgtcatcaccatacctcacttgtcactatatttaaaatcgttgtcatcagcgtatctcacttgtaattgtcaaaacctgaaaaaaaaaaatataatgtttttttttttttttgagacaaagaggctgcaaaggagaaacaaacaaccacaacaagcagccaaagaggaagaagaggaacttcctctagctaacttctctagacctgagagcttctcgtgcacaattatgagcgttcatattaaattgtcgaggaagaaactgcaacgaagcaccagggaaatttgagaagagcaatcggatccgagaaactaaaccagaaagagcagaattgtcctgccaggccccatttacttttgagactaaatttagacaatctgagaaaactacttgtggggaaaattgaaagtcaatgcaccacttgagactctgcaaaagagcttggccttctgagaagataggagagacagcaccaggcagccgacgataatgagaagccaacacagtctgat

SEQ ID NO: 252283 - DNA, 505 bp, Cannabis indica
tgtaatagtttaaattgaattgtaatattttaaaaaaaatattttctgctatataaccttattaaatataacatagaaatagatatataatcacatttaatataacatagatatatatagattagagaaaatttatatttatttatatatatatatgtattgttttttaaggcactgtatttttgtaaaagaattataattttacatttaaagaattgttttacacttttataattatttatagaaataacatgaaaataataagaaaattacataaaactaacaagaaaataacatctaaataacatcaaacaagaacaaaagataacatacaaataacaaaaaatcaataacaaattagtgagagtataacataaaaaaaccgtattttttgtaaataaaattatgaaaattgtaaaaatatttaaaattctatacaaccgggtttttgtattttttgtcatttttaagtatttgtgaaataatcccaaaaaaaaaaaaaaaa

SEQ ID NO: 252284 - DNA, 734 bp, Cannabis indica
ctacagtcgggagtttcattctctggtgcgaaagaagaggaaggctacagtgacgatcgttcctgtgatcacaaatggagaagaggttgaagctcgtgggagaagaaaactccatcaacaccaatcaccttgctcgccccaattggatatcaatacctttcgtccctggtagtagcagccgagaggagacgtacaaagagaaggagttacaatcgacaaagggggggaacttccagtggtagccgtagaggagctagacagaatggtaaagccccagtgaaaagattgggaatcgaaattagagaagaactaaacgcaggtatgaattcaaatgtcggaagaggagaaaatattgagactaatctatctgagaagttaaactgtgttttgggtgaggaggcggccctatgcaagcccccaccgtcgccatgaaaatcctatcttggaattgccggggtattcgtagaaccccggcaacccaagcccttctggcatgggttagaagatttagtccggagtgtatttttttaatggaaactaaatgtagtgaagaaggaatttgggaagtggctagaatgttgggttatcaatttgcatcgactattccggcggtagggatagggggtggctttgctctcttatggaatggtaccattgagttggaagtcttacaagcgaatgggggtgtttttgaagttgttatcaaggagacaataactagttcaaaatggtgt

SEQ ID NO: 252285 - DNA, 302 bp, Cannabis indica
ttgcgactaaaaaattatcactaaaagtaattaggtaattagtgtacgatctttatgagtattataaatatttaaaagattatttctgtatttgattggactaattattaaagaataatttattgtacgcacctaactttgatgtattgtataattattggaatatttgctatggattttctaggtgcttttacagtgcacccataaaattaaaagtattccaatggtgcacttatttattttggtgcgtatttgagaaattttttaatataatatttatatagtcatatatgttgtaatta

SEQ ID NO: 252286 - DNA, 1096 bp, Cannabis indica
aaaataatttaataaaataaaatacctacaaaatattgcttataatacaccataaaaatttaacatatattattttaatatatgttgaacaactaacaaacaacttgataacaactctaagtcaactaactaataatttaataacaacaaaaatttatttacggtgatacgtttcaaaaaaaaaaagtacaaatcattaatataaactcattacattttacccagcaaaaaaaaaaactcattaaattaaaaatgaaaaaaaaaatataatttgagaaaaattatgataatgagttaaatccaaaatgacacacagttcaagatatacctaaaattatttcaaatatataaataaacttgaaatcaacctaaaatacacatttgaaaactaaatatttatccaaaattatataaaaatatattactataaattaaagaacgtagcaataatacaaatatatttatgtttttacatgcaaataactaacaaacaattaaatatatattcatttttttattgaacaactaataaattacaactgaataacaactcaaaaattaaaatttatatactatgtaaacaacctaaaaacaacataacatcaacccccgcattgtgtcattccaatatgaaacaaccaacaaacaacccaaaaacgacatgtatcaatcttattttgcgccaacctataataaattacaaactaacaaaaaattaacacatcatcaatcctacactatacaaattatgaaactaaattaacaaaacaaacaaaaaataatatcacattagcatctaaatgtatgattgttagagacgttaatataactaaaaaactaccacattaataatatcacacaacaacgagtccaacatatatcacaaactaatctaatttgcaatgtatactaattatcttagaaaatatgaagtatttatttgtagtattaagagacttaaagtaaaacaagtgtaataatgagtatatgaaaatatcaatcattataatttaattaaaaaaaaaaagaatcattatcttgaaaataaaaaaataataagtcaaaaaaaataggggccttttcatttttacacttc

SEQ ID NO: 252287 - DNA, 694 bp, Cannabis indica
tctcagactataaatgttcagccgccaaatctccggtcacaggttccacctgtgggccaagtagtagatgggcaaaccttgtctagtaaatcatcaggagaagtcatacccaacaatttcaaccaggttaatggtgtcggtcaacacattaaccaaaccaaccaatcattgagacaaccaggcattttcgtattcgatagggaacaactcatgatatcagaaacaatctgaataggaggagaggagtagacgatcagcttgatacgccgaatgtgcagcccgaaacccgtgctcaaattcccgctaaaaaagatactaacgtgactcagatcggccgaaattccaaacaagttaatccagttgtgcaagcacagttggacgaactaagagtatattccaaggcatggcttgtcagagaaacaatgatctcgagttggaccgagcacgtggaacccctttctcccccaagatcaatgttttggcattgtcccacaagtttaaaatgccaacctggaagatgtacaccggaaaagaagatcctctttcccacctcaagtatttcgagatgcaaatggatctatagggagtacgaggagacgtatgttgcagaatttttcctgccaccctctcggaagccacccaacaatggtacttcaagctggcacccataaattattgggaatattttaccagg

SEQ ID NO: 252288 - DNA, 621 bp, Cannabis indica
tatgatttatttattctaatgctattattctttttgttgttttccttttgaaattcacacagaaagcgaagtcattgatccttcttgcgacgaagtgaatcagtccgtaaatgtggagtcaaattctggacatgttgaatcagatgaagaatcagtttcttgtagcaaattaaagaagtcagaaccaagtgaaatcgaagttcaatcaccaaaagttaacacaagaggtaaataagcaacatatacttctgttgttagatgcaaataaatgaaattttgtgcttatgtaatgttgttagcctttgcagtgtcaagggctaagaaaagcaacctaaaagctctgaagggtaatactactaccacaacgactagaagaactaggtcgtcaaataagaggttgtttttacttttacaattttttttttatttcaatttcacggtgtcttgaaaaaaataacccacatgaaaataatatttaaacaacataaaattaacacactattatcaaaaaaccaacaacaaaataataagaaaatatcaatagttagtatttattttaaataaaaacttgtaaacctagaaatgtttgaaattccggacaactttatttttataattttt

SEQ ID NO: 252289 - DNA, 1483 bp, Cannabis indica
gttgaagtcgtaacaagtctaaaatactcgaaacattatagttgcaacgttgttgtattggtgtttgcatatccatttttattagatcatccaaagtatttttccagttagaatttattactccaatgttaatgttgttcaatgcttgtgaaaatgtagagttcaaatctttcctagctttactgtttgtttgacatataaacgatatccttgtgtctgatttccaaagcattggatgaatcgacacattagctgcagttggcctgcagttaaatataattatttaagaaaaataattaaaaatttatcgacacaccccaaataaataataattccaatcctttctcaagaaaaatattaattatgaaattgtaggatgcattccaaataaatttgtgtagtatactctgtttttttttttttgtcattcagaatccgaaattgggatatttgatatttataattctattttttgtatgtacattatagaaattaaaacatcctacaaatatttgctaatttaaataatttagagtgttgcgagttcaaattgtatgttacagatggtacttgtcattaataatctatttgaactctaatttttgtattgtaaattattcttcatgaatatttttataaaatttaccatacatatacatgtagatattttatataattacaatatatattcaaatttaatataaaaaagaaatagaatttacccctaaaccctaatataaaaagagatgacatctattaattcattttctaaaaatttaatattgctatatatttaactttatgactacaattagagatgttcattcaataccaattacgaacaatagactcaaaatctaaataccaatttaatttgaaaaagtacggatagatcgattatttagattggttacttttaatattaattattaatattgtaatttcttcacataactaacaacaaaataaataaaaattattattattttatgtctactaacggcaaaattaaaataaataaaataacaaataacaaatgcaaaagaagaataaaaaattgtatgtataaagaaaagtttaattttgttttaaattgtatgtagaaaaaaattatatataagaatggaatatatatttgatttattaagttttgaaaaatataattgtattacatgtattagacatttaaattaatattttctttacattaaaatgttatttgtatatatatataattttttttatttttttataaatatgtgtggattggattgaatcggttacttttacatgtcaattaacattcaatctgcacaagtacggatatccgcactttgcagattaaattagaatagatcgtgcaaattagattagatcaactactgtactccaaaaaaaaaaaactcataagtaaattctataattaacaaatccatcccacttcatattaattttaattatgaactttgggaaaagaaatgat

SEQ ID NO: 252290 - DNA, 625 bp, Cannabis indica
caacttcaaacattgagaccaaatttttctactaagcttctttttctttctcttctttttgggtggttttttatggtcaaatggtgttttgtctttgctttctcgcggcttgtgatccatagcgatttctttaaggggaatcttctttctcacctttttactattcttgaatttggactcttcaaccatgttaggttccaaatccccaatttctaagcattctcctattatatctgaagcacgcataggatgaaagaccttgaatgtggcttgctcatcttgagctctcatggtaagctcttctttttcgacatatatcaaagtccttcccgtagcaagaaatggcctccctaaaataattggaatttccctatcttcctcatagtcaagaataatgaaatcggccgaaaaaaatgcacttttcaacttgtaccaaaacatcttcaatttttccattcggatgggccatagaacgatccgctaattgcaaagtgacggtggttggccttgcttccccaattcccaaattcttgaaaatagacatgggtatgagattaatactagctcccaaatcacaaagagctcttccaacatctagacccccaatagaaattggaattgtaaa

SEQ ID NO: 252291 - DNA, 521 bp, Cannabis indica
tcaatttgagaaataaaagcaatgaaattacacaagtttctaagggagtttttagtagtgacaccttgagagggatcacctagaatttggtctataggaggagcacttttgaatttccactcatgtggaagattagaattcataccttggctttcatttaccattttcatgggcagttcctctttgggagtttgtgaaggagcattggaagtctgtccaatatcaagattttgaatctcatcttccaaacccacaacatcatcatctaaacttttgcttgtaggcgggttagactcatcaaaagcatatagattcttcaacaacattagttcttttgttatatattctataagctttactatgtgttgaataccctataaaaatttcaacattagatttggcataaaattttctaaggttgtccttagtgtttaaaatatagcatttgcatccaaaaattctaaatagccaatgttgggtttttcccctttccaaagctcataatgttgggttttatgccc

SEQ ID NO: 252292 - DNA, 907 bp, Cannabis indica
aatcacgtaatacgcctatgctagttatggtgttacaacataggtcctaacaccgatctccatcttgtactgccgtaatcatcaacgggacacgccacctaactacctcaatatcagataaactttcgatacaagggcgccatatagatcttcaatcgcgaggttatcacattgagggtttcttccacacatcgcaaatgcagtccactatcccagcgcttgaacttttggctctgataccccttgttgggccccgttttttcaccttgtcgggccgctacctcaccttgacttccacattagtatgatattgtccgcgttgagcgtaagccctcacgatttgaatttttggcaccttcccaaaggcctcatactgatggagtagtgtccatccttatatacccgtaattcttcccattcctagctaatgtgggactttggttgcataccccaatactattttagtggaataactattccacttataaatgggtataaagtcgattccaatataaaaataaaaacaaaattaataatttattttattaattttttatgcatttctaaattttattccattcctattctcgtttttattccaacgcaatctaacacattgaaactatttatttatttatgctctcttcgatagaaaataataagattttttttattattatctttttgtacctctaatttatattcttgaagttatgattttagctaatttcatttacttaaatagacacctcagcacatttttaaacacaatttatcataaactactacaaaaatttgtgtttatgcctttttttaggcaaaaataggggtttgccctgacaaaattgaattaactttagccagtgcttttatggcaaaggtcgtcgaaaattcgtcagtgctatat

SEQ ID NO: 252293 - DNA, 538 bp, Cannabis indica
agttctatgatgaaaccactcaaactaccatgtgcaatccattgcatgtcactattttacagctctaagtcacacaataaatgagcgtaaacacgatttgagcatttcttttcaaagcacataaaccacaaaccacatcaataagcaatatataagtatcactaaaacatttaataacaacttaaactaacatttttctaacaatgcgatgcaaggtctaattcgcatttatgaaattttcaaccacaaattgtactacaacaccacgaaaggttcctacaagcacctaaacttctccattggtggcaccttcgccaaacatttgaaatggtcaatcaaatctagtctataataagagataaatgataaggggcaagatgtcaaatcatcataaaatgtagtcaaattgttatgagtatattttaaacattaagttttatatattttaatttaataaaatagtattagaaactgctaactaataataaaacaaaccttgatcgttccaagttctaaccattcttttctcttagtgtaa

SEQ ID NO: 252294 - DNA, 710 bp, Cannabis indica
ttttttttttttttggtataaaagtctataaactaaactggtgacaagagaaacttacatgcaagtaagaagagaacattctcttgctgtataataaaaataaaaactgacttttcttttccaattcaattgataaaagagaaccttctctgtagaagagacgtaagtgtccaaaaaagctgacaattcttttccaattcaataaagagaaccttctcttacaggtaggagagagacccaaaccagaagacgtaagaggtgacgcaaacatgattaaagatatggaatggtattatggtagacttctgactttagatcatcctacgatttaactttgtcttctttgttcacaatctttataaaaaagaagcccacaccaacattcagtccctcactactctaactctgcttacaaccactgtctgtattgaaacgaaaatcaaacaaaaatggcaacagtaatgagaaggactaagctgggttcacaaggtctgcaagtctcggctcagggcctgggatgcatgggcatgtcggccttctacggcccacccaagcctgatacggacatgatcgctctcatccaccacgccattcattctggcgtcactttcctcgacacatccgacatctatggtccattcactaacgaaatccttctcggaaaggttgcttctctcttttactcacttctatcatattatattttattc

SEQ ID NO: 252295 - DNA, 900 bp, Cannabis indica
gattagcaacgagctgcacagtatgtttaaaatcacgctaaaacgcctatggtagttagggtgttacaatttggtatcagagccgccaagttgtctttcgaagatcgtcacgacatgtacaatcatcatcagtagtcagctcgtttcatggctaagtaagcttttattgctttagtagtttattttatattatgatttaagaaaagcttgttagagagcaggttagtagcttgatagtagaataggcagatgttttttaatttccaaataagcggcattagtaagtttttctttgatcacgatctgaccagactagctcttggttatgcaggctgttctaattagtatggacaccaggcaaaacatcaggagccaggataattcagttggatcctgtggtggtcaaggagctcagattcccctaaatattcatggtcgtggtagtggtcctagaggcagggcacatggctggggtgatgttaacccgccacaggctgcccaagctactcaagatgcccaaaattgggaaaataggtttgcaacgatgcaagccaggatcaatgaacaagatgataagattcgatggttgagatagtagggtgctcctgtagtgcctgttctagaaataccagtggcacttgcccctgctgtgcaggccgaacttgtggttacagtgaaccggatggaacccctgtatgaaaggttccgcaagcaagcacctctagtttttctaggaggtcctgatgtcatgaaaactgagcaatgactaacagtgattaccagaatcttgaattttatgggcgtcactggtaatgatagggtggcttgtgccacttttcaatttcaagaagacgctctggtctggtgggacatggtgtccatgattcatgatgtgacaac

SEQ ID NO: 252296 - DNA, 627 bp, Cannabis indica
ctttcaattccatctctctttcaccttttttctgggccttcccaacataccactctttctcatcaaacgtctttccattaagaccatcaacagctcgagctgcatcatcggcgtcttcaaagttcacaaatccaaaacctttggattttcctctctcgtttctcataaccactacactggtaatacttccatattcaccaaaaatgttgcttaaatcatcttcattcaaagatcgagaaaagttctttacataaacattgttgaattttcttttctctttccgaacaaaaggtccaataaaaacttgtttgtcattaaataacatcccgttaagcttctcaatagcacactgagcagcctcttcactctcaaattgaacaaaaccgtatcctttagactgaccccaaacgtcagtagctatcttgcacgacaaaatgttgccaaagcttgaaaatgtttcatgtaaagctttgcagtcaattcctttatccaagtttttaataaatatattgccagttccactctttcgaatactcgggtcccgattagaatacattattctaattggcttaccgttaacaacccgaaaattcatgacattcattgctcgagaagcatcttgcggat

SEQ ID NO: 252297 - DNA, 1058 bp, Cannabis indica
gatgactagtaagatagtgtataatacacattatacaaactaagtataatagtcgagtaaatccaaaccactaatagcgaggcacccatctctcaataggaatggacgctcatggtaccttcactaatcagctccagacacatttcaagggggttcacaactctgtcgaagtcagctctctcagatagaagctgacatacaaatgatattgactgctgaggttcaccttgtcacccagaactggaattttcaaatgcagcattatgtcttcgaccgcaggcaccacgaggcttacattatcaatctcggaaagacatgagaaaagctccaacttactaccaaagttattattgctatataattaggcatatgatatatatagcctcttgccttgtagaatatattaatatatcactcaccattgggtagtattttataattgccagactattccatatatacaatcggtatatactgtaagtcttttcattacttcgtctcaccatatacatgtatatatatttaattcacataaatacacattctgccacctttatatatctatatatgtatatatactatatatatggccattgaaaaatttatgaaatgacaagacctcttttcatgctttattatgtaattgattgatttcacaattttcctatatctacacagtaaaaaaaatttattactcctttgtcaagatatattattatatataatataatacataaatatatgcactgcactattaaactaatgatacatatacatatatttacatatttatatatacatatattttctgttttacaattttttttgacagtatatatcttgatacatataacaataaaaaaaaaaaagtcatatcactaacatatatatttaagccacacattatgcctatgcccataaattggctactttagtttgacttgaaaatttatatcaaattaattttgattttttttaatctatacttttatatcagcaagtaagtggaagcgactaatttgagtaattgattattttgcattgataattcccaaata

SEQ ID NO: 252298 - DNA, 897 bp, Cannabis indica
taattaattttgatttgtttttattaatacgtacaatgatttttttcttattacaagaagaattataggtgtgctcttttttttcatcaatgattcctattaatactattcaaataagaaaagtactatatcatttttattttttagttattttaattatatcatgataataatttctttaaaaagattagttctatcatttttttcagttaacagacttgcgcaagattaaacgatgtgccatcattatattatttagacataatatgggatacatatttatagataggggatcttgattcatggtagatattcttcctgctgtttattactatagagtaacataaatatcataaagagcaaggaggctttagtttagtaagggcgctggccaacatagttgcctggtggatcatagttgcaagtgatgaaggtacccttattattgttgcaccgaaccttagcacaccccaaacgaaccgagttacgccacaccacttgagtatagtgcccgcaaaccttgccagcagcgcaggtgttcgagttataattatagtcgacattctcattgacccacatttttacggcatcaacacctgaaagatctgcgcttccccaggccagattctcgccataaggtcctctagagtgcaccaaattgcagtcacccatgcgttgttgggcgtattgctgggcgtaggacgccaccctgtcatcccatctcagctgccccacacccaccgcagcacgagctgagttgtgagcgttgaggtagtcttgtgggttgttttgggcaatggctagccctactatacatgtcaggaatagtagggcttgaaaaatcttaacaggtgattcagacatcattttaagactataatattataagattttttg

SEQ ID NO: 252299 - DNA, 676 bp, Cannabis indica
agttttgtcatcacatattataattttgcccatataaatttatattcttttttttttttttttctaatctccacatattttcatttttattctcatatatctactctagtttctataaaatttatattttttttataataaaaataatatttttttataagtgtaatttttattaaattttttttacccctaatatttgtggctggctacgccactacacgatgcatcttttactatttcaacatttaaaaagaaatttagtttaattttttttacgatgatgtacgttatagttatttaaggtgttttatagtattttcagaaattcagaataatttacaatatagaaaacggtatttaaactgtctatttcacatatgtataaaataaagagtcacgcgtgtaacaaactattgaaactttaaactctattttccacgtgttaaatttttttaaaatatttttaaaatttttacaagatgccttacatctctaaatgtacacaattaagaaaagaaaattgaactaaattttttttactagatacaaaaatagataagagtaagttagtgcaccctgaatatgttatccctgtgaaaatttcactccaaatttcaaatgatcagcaacctttaaaaatttaattacgagtcacttagaagtgtaatgaataata

SEQ ID NO: 252300 - DNA, 1450 bp, Cannabis indica
tactgaatgtcacaggcaatataaattgtcttgcaaattatattagatcaaagtgaataaacatgatctttctaactctttcccgagctgtgtactaaagagagccatcagaaagaagtctcgcccattcatccttctcatcatctgggatattgaaaaagtaagaaaccaaagcattatcttgcataatcatgcgagctaccttatgacgttgagttgtagtaagtgtagtggtcctttctaactctttcccgagctgcatatgcttttcattcaagtcttcaccaatagctttactcaaacgaattgaagctttttcaattacctctgcgataatacaagctgattgtgtaagtgcatttgaaagttcttcatgatttgcagctttccttttcttctttgaagacccatctgattgagtgtgagattgagcacctcttgttgcatctgaaacagacatagattccacttcatccacattattagcattgctgaaatcatcttctccaagtgtagtgttttcctttttagcttcaagttcttcaacaacatctgttacagtctctgcatgttttccagttgcacgatctttgccaaaaactgcacacaagtcgtcataccaagggaatgacttgatcttgaatggggctgcttccttatgactctgcatgtatacaaaataaaaaccaataagtctcactacataacctatcttttacttcacatatctctaaagtatatatacaaaagtattttataagaagtcccaaacattatgccaagtcaaaaagtattataatagagcatatataaacataagtacctgcaaatatgcttcccacactgatttttccgcaattacaatttttctattactgtcccatccaaacccgctacaaaaaggtccagtcaacatttcatgtactatttgaaaatgagtcttcaaagttttcattctagactcaatgtgtggcttagcttgtatgtcacatccaggcattcgctcttttagtttcatctcaatagctctaagatgacctggcttgaagtttccttcagctttaaacttcccttcattatttagctccataagtgattcaatcaagtgtttgtcttcatcttcactccagaatcttttattttgtcctggacctcttccttttgaagtctccatgctgaaataaggaatcaaaataatgtaaaactaaaaactagaattgaaatgttgaacttgagtgaaaaataaagacattcaacagtaaagaaacaaaactgaattgatatacacaccaataacaaaacataaattcaaagataaatttcaatgttgtcaattacacaaccagtcaaataacttggcatagccaagtgaaaacaaatataaaaacctagataatcattgtgcatttaatctaagaaaaaaaaactagcttgctctcctacgttccct

SEQ ID NO: 252301 - DNA, 533 bp, Cannabis indica
ttggaaaatttagagtacaacaatgtcaatgttgagggttgaatttagactgaagtctcttattgctgctttctgtttgttgatatgcatttttcattatttttgagttgctaacctttttttggtttcttttgcagagggagctcaagacgttcgagatgagtttcctggatacttttaagaaaaaggttgactcatgtgtgacgtcatataccgcggggtgagaataagaaaacaaaagaaaaactatcattcttatgttattactaaaagatttgaaactaattacaaaaattataatttgttgtgattaaaattaaattaaagacaacttgtaactaaatattatattttagtcacaaacaatttttattatggctaaaaagtcactagtgacaaaaataagataatttggttttttaatataaaagttggatgatcatgctatgaggtttgtctttcttggaaaattatatatagagagacaataacgtaaataaattattctatgatattaggtgaatacctactcc

SEQ ID NO: 252302 - DNA, 827 bp, Cannabis indica
agcctatatgtttgcttttgggcttagatgcatataggaagcccactttttttagataaataaatggactaacctactaaaataaaatatcacccatatgatagttttatttaggcccagttagtattgggcttatttaatgattaacaattatttaatgaaatgttaaatttctctcctttgggccttgtgtgagagttagggggccattagtagtgggtacgaaatactaaacccaaccctgcctcacatgaataaccccgattgtgaaggcccatttgccttattttaaataattgtattaggctaattatactagtttaacctaattaaaattaaattagcaacataattaattttggaataaataaaattaacttttcactagatattattttgaaattaatttagaaaaatacacttagtttaaagaaaatattttagatagtgatttgcattaactaatttatattttctaatttttaattaaatagaaaatatatttaagttgaaaattgatttatttattaattttagagcaacataaattaggatatttttcttagaacttaaatagaattaataattaaattgattttattcaagatacttaattatttgtttctattttaataaatttaattaattagaaaattatatttaagtaagaaatttgttagttttatatcaacttaaattagaataattttcaaataatttattttatttaataaatcatttccgatataaacttttgaaatgcatttattttaagtgtagatatttcgaaatttttcaattttaaaaattggattaaagttgaaaat

SEQ ID NO: 252303 - DNA, 658 bp, Cannabis indica
tcaacagatttgtcctccatcattttaaatgaatgcagaacctatttcaagtacaatctattcactaaggattttgtcatgtataatcttttaagcttcaaccagatacccgatgaactggtttaatctttcttagaaccttatcaccaaggttcaaactatgagcctttccttcttctccttttcaggccggcttgttctttggaagacatttctcccctagcaaagcttcatatataatatccttaatgaaccagtaaggctttcatgttcattccccaaagcccaaagtcatttgatccacttaacttttaaatattgtacttagcagctaccatgggtcaagattaacctatgctttgataccaatttgtacgttgtgattcaatcaataacagttgcactaaaagtccacacacacaaacacaatttcaagaatacaaactattatcatttttctcagggagttgagaagaaaaaaaaatacagaaaaagaaaaataacacgagagatttaacgagtttgagccatgtgtaatactctacatctcagttgaacaataaccattgtgtcatttttattgagttacagttagagtgtttacaatatgttcttgactagaacactaatgagtttcaacactcacctctctctctct

SEQ ID NO: 252304 - DNA, 616 bp, Cannabis indica
tgaagcggggacgttacattaaacattcctaaactgaataaaatatgaattaaatgtaagtaattttggggtttgacataaaaatatgaacttgggacaaattctcatgtctagaatgatttttaatgatctttggacgaccacactaggagcactaatctcaatgacagtctattatgttaataacgtaattacttttaggtagagcccaatacctaatatcaaagtgaaaatataattttatataattagggagtagccacatcatctttaattatataaaattatatattaaattcaccttaatggacataaattgtaattatttatataggtataataatcttaccccacagagattttattatatttatataattaattaggataatatattaaattaaattctcttaatttaccccacaaagagttatgggaatttaatttaatagtgttatcaaaaatttaattaagatagattataaactttcatttttctaaaccaattgtttaattaaatcaatcataaggttcatctaattttattaaatttaaaatttagcccacatgcaattgtaaatttagaaaaattgtaatcttcagtttatactttggt

SEQ ID NO: 252305 - DNA, 874 bp, Cannabis indica
tatattttctgatagtgtgtaaccttataagcgcttaaactttgctattataattataggtatttcaaatcaatctcgtccattgattatactaacataggatcaaagtagcttttgccacatttagcgtggctaagaccatcaatagtcatgtatatcaatataaccaagtgacatagatcaatcatagatgtgtagcatggaaattacatgcaaacgtgatcttggcatgcctattttcaactggtcctccttaattgagatcaatcatttcttaattctttctaacattatacttaaacttcaatatatagaatggatacattcagagtaccaaaatttaaattcatactttatctgcaaaatcaaaccataaatatgtgtagcttgatagaacatcccaaatacaaactcccactaaaccaacgcaatcttaaatgataccacatccatatatgagcaacaagctcctaaaatgccttaagtggtgtattcttaatgatccggatcacacaaaatatggagtttgtccttattatgttctataaacaccttattactctaaacttcattttagtaacaattagctcaaagtcaatgtgactttgaccttgtagagctcatgttgttactaaaatgcaaccagattaatttattgtcacaacatatatctttaatagttttcaataccattcctaattttgcagtcatatgtgacaaaaaaaaatctcacaactaaaatctttataagattagaatctgaaatcttaatgatttccaaaattttctattttttgatttatgataagtgaacatatagtattttgttctccttagattccttatagcttatttggatgcataccaaaagttc

SEQ ID NO: 252306 - DNA, 879 bp, Cannabis indica
acccggtgtttccccttacggatcacgggactactgactgtcacagtaaccatgatggttataataaaaatgtcacaattaaatagtcactcatatatatggaagaggatttaaccatatatatatattatattcatattccttgcaatgcatttatacttacttatatttttaatttttatttttattatatatactttaagttggataattttgtttaatattattcataaataatattttttttattaaaaatttttaatttaagcgctatttatataaaaaatatatatataataatattcaaaatttattattaattgtaattttaatttaattgtaaaacttttaattttataatatttttcattcttttaaaaatatcatatattttttcaattttttataataaaaacaatatcaattctttaaaacataagtatttattttattttattatttaaaaagaaaacaataataaaaagatttttttttagatgtgttattggattattaagatgattatagagatatatgaatgttaaaaaaaaatattatgttatacagtcattttatttaagagagatatgttgtgagtttaaatttgaattgtaatgttttttataaaaagaaataataataatttattatatagccatatttaatataatatatattttttgatccattaatttgtatttgagaattacttctcaaaacattacacgaaacgaaatatccaaatttacgtagtaaagttatcatgttactctctttggtgtaatttctcttaaacaaattgtctttgagcggtttaactgattaaagacatgaaacaaggatgtagagacattgacgggctgttatttcaaattaaag

SEQ ID NO: 252307 - DNA, 607 bp, Cannabis indica
aaagaattgcttcatcttttgttggttgtttatttcctagttctgtaacgacttataactttatgatctataatatggctaagtaaacttttacccataatcgggtatggttgtttaaatgtttcttccatacttataaatctcttttgtaatgatcgtgaggtctagtttcatctttctatgaacattttatttcaaaaaaaaaaaaaatcttcttgatgtttagaaccaatgaattcacaagataaaacatcatattaaaatacacagataaatcctttcaaaatatatatactagagaattcaacacagaaaaaccaacaaaacttaacaagatgaggtttaaactataaaagtcttaaaataaaatgaattgcctccataatattttctttgttgaagcattaataaatacaaaaaatatgtacactgaactcaaacttttgtttatggaaagttaccatacagaaatgaataaataatattacttttgttaagagttaaatgacattttagaaagataaaaggtagagaaagatgaaagagaagagaaaaaatctgagaaagaagaagactaggcaaaaaatctcatttaatgtgacacaca

SEQ ID NO: 252308 - DNA, 666 bp, Cannabis indica
gccttcgccacatttatacattacactacacaaactaataggccgatactccttgacaaacgaaggtttagctattttcggaatcaacacaacattggacttattaaacttcctgaccgattgctgaccattcaaaattgcaagacacacagctgaaacccgagggccaataatatgccaatacttgtggaagaaaatagcatgaaacccatccggccccggggcctttgttgcgccaataacacgtaccgcactcaacacatcgtcacccgtaaaaggctcctgaagcatgtcgcactcatccggagttatttgggtatcaatatgggcgattccattctccacgtgttgcactgtaggagaagccgaagaaaaaattgtaccaaaatacctctcaatctcacccacaatatcttcttccacacataattttcgtccatcctcagtcataatctccacaatagcattcttcttcttcctccccgttgccttattatgaaaatatttagtgttcctatcccccaaggccaaccaatccgcacgcgaccgcaacttccaataacactcctccctggccaaaagctcgttaagtgtagtctcaagccttttaacctcatccattcgaaccataggcgccgccacactaaggagatcatccaactgttt

SEQ ID NO: 252309 - DNA, 1304 bp, Cannabis indica
atttttttatctttttttttatcctttttcgactatttaaaggagtatattttcacactttttggcaaagcaattagagagtacgaaaatcggagaaacaaagtaactgagaaggctttttaacagagtttttcaacgatttcttcttctccattttgttcttatgttcttaattgatttgtgtcgaattgctacaatgaataggagtagctaaacaattattagggtattgatgaagattatttgatatctttttatggtttcaatatgatttgattcttttcccaattttctatgtgttctatttcattcgttcttaagtcctttaattgcctggctatcaattaaatgtttatgatttcgatataagatctgagaagtaagtgtcgattatgctataatgtgttagactatttttagcctaagtttcgggtcacattttatagttatttttcttctttattatgatttatgatctttattaattagtaaaaggaaatttttgacaaaagtcctgaaaaagttcagtttgatacagataagtccccaatctcgaaaaatagcggtaatagtcctcaaagtcatgtttttcatttgtccgttagtcctaattttacctaagccgtttactttttaaaaattgtcatatgtcgaaatattattggtctgaattattattttatttttttaaaataaaaataaataagcaaatagataaataaattatttaaaaataatttcttttttctttttctttcttttcttcttcgccttcttcttcgtcttctcactcgtcttcttcttcttcttctcactgccagcaccaccaaccccaaccctcaaccccacagacgccatcttcctccgcctcttcttccctctacattctccgagatcatcagatctccaggccaaattggttatctctggcatcgtaacacccaaacgggcaccaccagtagatgtaacacttcttgaaacgtcgatttctctctttgccgtttccggtcatacgtatgcccaatcgtctaccaccacagttcttctcttcttccttgatttctttgcaggtcaatggtgcatgagggtttggagtaggccatccattttgcctcatcggacttcaaagatcggcgagaagcatcgatcttcagattttttttttaggtctattccgctgaactctagtaagcttcccaggctcatttttaccatcatcgttgtcctcgctagaggaagccttcgatctattttcaccattcagctggtaaaaaaatagggtttttttaattttattattttat

SEQ ID NO: 252310 - DNA, 604 bp, Cannabis indica
ttaaattaaaaattttatatttaaaaattttgaaagataattaatattaaaaaatgattaaaaaactttttaaaaataaataaatagatatgcaacaaaaaaaaaaaggacagttagtagtaaattgtggaaatttatatttggatgtaattattataaattattttaaagccaccaaatttaatatttggatttatattccgttgaaaaaaatatatataaacatgctttaaataaaaaatatagatattgtttgaataattaattttaatattaaataaaaagcgactaaataaattgaacagaaaaaaaaaaaacgaaaattcacatatgacacttaattaagattttatgattatattataattataaagtacagtctacaatcactcactaattataatacaaagtgatatgaaaataagtaaagactaagaaatcaataagaggcatcttaaaaaaatgctttataacttaacaatatcattcttaactatcatagtcttgccaatatactttcattctttcaagaatgaaagtgttgtacttaaaattgcctccactccatagaagaatcatgcatttcatatgacaaaataaaaaa

SEQ ID NO: 252311 - DNA, 638 bp, Cannabis indica
aataaccataggctattaaaccggtcatgttagggtaataatcctaatcctggttactaattactcacatatattatttccaaaataagcgccaccgcgcatatctctacgtgctaactactatcttatctgatgtcccacaataaaagagattctaaatccccgggtgctcctaaccaggtgccggtaatcctagtcacaaattttaggatttatacaaatagggttaaccccctgattccacattcataaaatatattcatggcatttaaaatacagataatcacatagagctaagaataaaatttccaacgatacatagaactcccaaaacagagttcagatcacaaagttatgcattttaaaagttggtactcaaatctgccaagaaactcgagggcgggccgcggcatgcaaaagccatgccgcggcacgtgggaccaattcacagctctcatccataggggcggaccgcgacatgctaaaagccatgtcgcgacacctcggtttcaaacccttaaaccagcaagctaaaacacaaattttagcgagaaaacccaaccatttcatctcaattcacaaccaaactctcaaatcacaaagtagagttgctaacaaacattagagatttgaaattc

SEQ ID NO: 252312 - DNA, 871 bp, Cannabis indica
aattgataatgaattacacagtaatgctgtttctaccatccctaatccacaacaaccctttctcgtttcataaaatcctacaaaaaatattatgtttaattatgtatcaattatatatataaaattaaataaaaaaaaattataaatttattattacgtacgtaccattttcgataggattgttgataaggttgtacaagggttggtatatatccaacacaagcaaattcaggtcaggtaacctgttccttaacaattgtgaggtggaatttaatcttctgttaaaatagatagcatcataattgagtctatccacacattgattattatttccaaatccaaataatgtaatggctccaggcaaacaccctagaggtcccaatgaagccactccaattcttcttgctcccattgaatgcaaattctatatatataaatcataattagcacaccataattaaaaaaaaatattataatcaattataattgtgagtgtgtaatactatacaaaatcttacatacattttagtcgcaacaaaatttgtaattaaaactgaacaagttataattaattataaaaattatttatcatccggaacaaaaaaaatggtaagtaaaaaaaaacaaaattttgtaaaactaattgtgttaacttgtattaaaatattatattttagttaccagtaactttttgttgtgactacaataaatatcattaaaaatattatgttgtgtactaaaaggagtgtcttttgtatatatagtataaataaatatttaaatgtacgtacctcaatgaattgctcataatttgtgtagaagtagtgttgaaatagttgtgaatatttggataggtaacttgaagaatggg

SEQ ID NO: 252313 - DNA, 524 bp, Cannabis indica
aaatggacgaaagtcgagccactagcaaccatcacatctaaaaaagtgcaagaattcattgtgaaaaacataatattttggttcggattaccgtacaagatagtctcgaaaaatgggaaacaatttgatagtcagtccttcactaatttttgagcaaaccatgggatcataagaagtttctttgcagtggcacatccccaagcaaatggtcaagtcgaagcagtcaacatgacactcaaagataccctaaagaaacaacttgaagatgttaagggaaatttgtcggaagaacttcctgaagtattatggtcgtaccacgcaactaagaaaatagcgaccggacagactccatttaccatggcatacggttatgaagctatgttgcccgtagaatttgaaccaccgtcccacagaagattgacatataaccaaaaagttaatcatgcactcctcgcagaatcacttgaagaagttgaagaaaaatgaaccctagcaaacttgaaattgatagcccataaccacaa

SEQ ID NO: 252314 - DNA, 2377 bp, Cannabis indica
cgacatctagtaattcaaaataatatttcaaatgatattttcaacagtgagagaagagaacgatatactcatgaatatgtggcgctgttggttacctgcatacttgtagttccagacaagtgatgtctcacgaagctcgaaatgtgatcgaggtgttctttcagtgaagtactcgaaaacatgctgaaataatggaattaaaaacaagaatttatggtgataacgtagttttaatcatcaattggtgtagaaacaaacaaacaaacaaaccaaccttgacactctcaacccattccatagttaaattctcaggcattgtagtcatccattcccctgctgtaaggcgcaagaacatcccattttctgctgctagccacatgttgtagtcactaaaattctgtataaaaagaagctagtgaagagcataacttgcaagacaagtaatgcagaccgaaaaaaagtagagaagagaactacatcatctaggatatttctgtcacttccacttagaactactacagttgttttggggtcctcagatagtttcttcagtggttctttcaggtctggatgcagtttaggctccatttctttgatttgaccacctcttctccccagagccccaattggttctgttaaagtggcgttaaacccctgtagaaagaatgtttagttgtgacatgtagataatcatagttgaatccaaaaatgatgagattaacaactttagagaaatgggattaagagaaaattgaacccaagaaatacaaaaagacatttctttgttgaataaataacatagtgaggacagtatattagttaaatcccatctaaaaaaaggtaaattatacaaattcgctgtgtcaccttagaagtttcacttcacctgccaaatttgttcattacgaaacattaagaatgaaactatacacatgaagaaaaaagatatatgatatacaattcaagcctatatatagtctagcaagagaaatttgcataccagtataagcaatctgttattggattctgagtaccggccaaccgcttctttcataggaagtagaggtggaacttgcctagtcctcagttgagcttccacgatagtatcattgagttcactgaaaggaaaaaagttaacaaaacgacactatgcaaggataaattgtactctttgagtcagtacccaacttcaaaatgaaccaaagttctattacttattctatatccattaaagcaagaaaagataaatacttttacttgtttgaacagaagtaaaatatgcaatcctagaatgcatggtagctatatatgagcatacctaacaaaggttgcagcccattcttgagatgtatgagttgttacatgcatgaagttatgttggtgtctcttttctctttcatcagctggcatattcaaagcataagcaatggaagaagcaacttctgtgatattccatggatttactaaaatggcgccagcaccgagcgattgtgctgcacctgcaaactaaaatttaaaatggaataaacaagaagatgcaagcccgaaaaaactatgaagaaaatgcataaatttaatgatgaatttaagaagaaaatataaaggtgaattacctcactcagaatgagaactcctttcttggctgcttgacaagcaacaaactcatagctcacaagattcatcccatctctaagagaagtaacaagtgcaacatctaaacaaggaaaacaaataaatagatgaataaaaatagcaaagattcattttcaattatgttctctgaacaaaaatgagtaccagtaacagcatacagagcacacaatgcatgaaagtcaagagatcggtcctgcgaaaagaagagtaagttttagtgctcttgacataatcattgagcaaaatcattagaaaaataagttcaaagaatgaggggcaggaaaaaaaaaatgtatatatgtaatattatttgactcaattttagtctctaaacataaatcaatcaaatcttgttgcttgaaagacatgaattcagacgtttcattcttctataaactaaaatgtctcaagatagtcaaaacagaacaaagaagatcacttgaaaccttctcaagcaatttaccaaaagcttatgttaaatattacaagtaatatcacttaaaaatagttctaatttttaataaacaaaaaaaaaaaagacaaaccagatggtgtatgggaacagcagtaagagttccgaatctcccattaatgcgtcccacaatctcatgaacttggcttgtaagcttttgatctgtattaaataatagtaagcaactgtattatttaaaaattgatcaagatgtgataaatttaatgagagtcatatgattgaaataacatt

SEQ ID NO: 252315 - DNA, 601 bp, Cannabis indica
catctcttggaagactaagaagcaacctaccatttccaagagttctgctgaagctgaatatcgggcacttgcagccaccaccagtgagattacttggcttcaatatcttctccaagattttcaaattccacaacacaaaccagcatttatctattgtgataatcagtcggcaatccacattgcaaacaaccccacctttcacgagcgcaccaaacatatcgagctagattgtcacttcattcgcgacaaaatcaacaactcaaccattcgattaatacctgtttccagcaatctacagttagccgatgccttcaccaaacctttgccttccactactctcactactcatactaccaagatgtctgtatatgacatatacagtccaccttgagggggggatattaagagtattgttatttccttatttttcctaagtgttctgttaaaggttaattggttgttgtacccttacaggttacagttagagtttatcctcttttctctaactgttttaacggtttctttaccacagttagtgtggtacttatatcctagtctaagttgggtttagttaagtgggtttgggttagttagtctggtt

SEQ ID NO: 252316 - DNA, 748 bp, Cannabis indica
tcacaactattccatttctaaaaaaaaattagtaaacaacatattacaaatattgatttcgattatttttcatttattccgttacatttctctattaatttattccgattctgattactgtatagtaaacgtgtcattagtgtttagcattttttaaacacgtccttatataatttattaacaatattttttaaaaactattttgttaaatttaataagattcatatttaattaaaccaataataataattacagattaaaatacaaattgacctaaaaaaaataattattattattattaataattaataaattaaatatattttctcaaaacataatagcagtattgtcattaaaaagtgtattaaagtaactcactaatactaaatggtaataatataaataaaaaaatgtgtattaaatttgacatattatatgttatgataaattgggcttaacttttagcatttgtcaaatttatcacaagttttagcacattattggagaaagaatttttacaaaaatatattgcacaacttatttggtactctattggagacgtcagtgttaatgttgcagctcatacccttactaagtttattttgtctaggatcggctcaagggtggggcaacagaggcccacgcccaaggcttgtgcccaagctcaaaactctttaacaaaaagaccctaaatttattttttaaaagcgtcatattttgtattttaattatttattaaaaatataac

SEQ ID NO: 252317 - DNA, 973 bp, Cannabis indica
tttgatattatactgggaatggatttcttatccaaatattcagccagtattgactgtaagaagaagatggtaatcttccaaccaaaaggtgaagaaccgtttgtttttgtcggttcggttcggggatgccggatcccggtgatttcggccttatcagctaaagaattgttctgtgatggatgtctagggtttctggccgtggtattggataccacttggcctaaccttgttcggccagaagacattcaggtggtttaggaatttttagatgtttttcttgaagagcttccggttttaccacctcagcaggaaattgattttataattgacttggcacctggaaaagaactggtttataaagccccttatagaatggctccagctgagcttaaagaattaaaaatttaactccagtggttacttgacatagggtttatttggcttagtgtgtcaccttggggagctccggtattgtttgtcaagaagaaagattggtctctaacaatgtgcatcgactattgggagttaaataagctaacagccaagaatcaatatcctttatctaggatcgatgatctttttgatcaacttcaggagaagacggtcttttcaaagattgatctctgatcgggctatcatcagttgagaatccgagaggaggacattccaaagacggcttttcgtactaggtatggacattatgaatttctggttatgtcgtttggactaaccaatgctcctgcggcattcatggacttgatgaatagagtattcaaggatttccttgatatttgtgtaattgtgtttatcggcgatatccttgtgtattctcaatgagaagaggagcatgagctacatttccgtatggttctgcaacggcttcgaaaacacaaaccttatgcaaattcaagaaatgtgaattttggttatctcaggtgtcctttttagggcacattgttagaaaggatgggat

SEQ ID NO: 252318 - DNA, 1991 bp, Cannabis indica
tcttcaattatcaacaatttatagattcattttttaattttttttttatcttacacccatttaagtaatgtttctttaagtattgaaacatcaatttttaatttatttttggattaacttaagaacatatttaaatcatcaaactttcttaaactatattacattcgatattcacttttaattgacaacattataaactataatatttggatacacataactttttgctagtatatctaaatgtgtctatataacataattcttggtttatgagaaatttggtttatgagaaattagtaggtcaaaaaaattttctattaaaaaataacagttttttttggcttaacggggttaaatctccaatgtatttttaaatgcttattctctcttaaatgattgaggatagaagttttaggcctaaacgattgaggaggaagtttagccattcaagaaggattgaagaaagtaaactatataaatttgtgactgaatgaggaaattttgcaattgaggatggaagctttgcgattgagagaggtagtgatttgggtttagtggtgcaactgatttgggcctactggagtaagctacaggtgagtcgatttgggcatgcgattgactctcttctcattcatttatcattttgtgattcactcatcaacttttgatagaaatccataatgtttgatcttttttatgattgagtttttagttattttattttgtttcaaattgtatgtttgagaatttgtaattgtggtcttagttttaagaattatcaaagttaaagccttaagaagataaaagctgcaaaatcttcttctttcagtggcaatcttttcactatagtgttcaccattctcttctttctcgtgatactctttcatggcaatatttcatattttctgtttacagagacttttattagcactattgttgaactattgatttgttgttctgtcatcaatgtttaaagttacaagcatagcatagatgagcattaactaatacaatatctttggagtttaatgaatttaggaagattgcaaaataacctttagtcacttttgaatgtaatggggtctcacatgctttagtggagatttaattctctgcacatttatttaagttttgcttcccagtttcttttatgctttacttgatgcaatacctgagtttttctattctatcttatatttgtcattcctaggattggatttggcaagttactgagaggattaccaagataaaggatgcacataaatgcttaatttgatcttagtttcaccatcacgtttgtagtttaaattgaatttagtgatgttctcaaattcttaaaaaaagccaagaaatttgagggtgagaaagttaagaaaaagtggactcacatgcttttagttaagaattgtattttgatgtttctgagaaaaagactcctattcacatgaacgttgagattttatattttacaggtacactttccaatctttgaattggcctctcatattacaaagatatttcatggatatttttatttgtgcctaatattttggcatcttctatttatgttcctcaagactaatcattaatcaatgcatccaattcattagcatttttcttcataactttactataatcactaacatcccaccaccttaaaaatggtatagcattagcatcaaccaatcattctgaaagatatactttcttcttcgtgattttgggacaataggaaatacatgtacaaccaaattattcctttagctaacctattttgatatagtttgattcttttggtttgctctggtaacaggtaagatttttattataaaatatttgaacttttaattataaaaaattaaaatatttaataatacaatttataatatttttttaaatgtgacttgagaataaagtgagatatgttatgatatttgaatactcattagttatctagcttataagtataaaaatatactatatataattaa

SEQ ID NO: 252319 - DNA, 639 bp, Cannabis indica
tttcccatctggtgataaagaaggatctctatcttgaaactgcaaccgctgtggcatttcaggccacaacagagcaacatgcaaagcccgcatttgaggcgtagtatacttattctttgtaataacatgttttctatttcaggttcgaaactgctttaaaataatgttgaggttgaatattttttgttggaattgctttaatgccaaaattaatttataataatttgtaggtagtggaatatggttcattatgaataaaaatcatcaaagtcaagaacagtagagacttcaacatcgatctttccattattttctcaacaatttccactaggaaaccacgaagtatcatccaaaagaagagaaagtctatatatacataactgtaattttaattacacaaagtatacaatgtcaccatagttacacatataatcagctgacattttggtaaaacaaatcaacacaccaccgttcacggaacaacttgatctggccttgcgtgacattggttaatccacgtcgcatcatgagatgctccacatactcaatgcaataaacgccacaatcaccaataaatgcaacataaaaaataaagttagtacaatataaagcatattttaatactatagtactttttta

SEQ ID NO: 252320 - DNA, 586 bp, Cannabis indica
tagacccaaaaatataataaatatcgtctatcatctcaaaactctttaagatttacaagctatttttcgatgaaccaatcagaccgacgaggcgagcaattcgatcagagacattgaagccttgaagaagaaaagcaatctaggttttacctctcaacttagcttagctcctccgaggagatgagcaacgaagttcagttgaaaaaattataaaatagtaactaattactatattagtaaccaaatagtttcttttttgaaaatagcaaaaacaaaattctcacatgttgaaatgttcatattaaatagtaaatcataatgatatttttttagggttaaccaagtaatgatacgactaattttttatttaaaagttaaaaaatgagagagaaaagatgaaagacagaaatgcatgatataagatattgaaacatacgtaaacaaaggaatacgttatttatacttagctaaattatttttgacaaatgtaaaaataattaggtggcgtttagtaacatttttattttttaatattttaatcacaaaaatgaaaaaaaaaattagtgtttttaaaattttattttta

SEQ ID NO: 252321 - DNA, 593 bp, Cannabis indica
tagttaaaatagttagagaattgacttatatatattatgtacacaaacaagaaaacaactgtatagacaaaatcttcaaaagaaagtgacagtaagagaaaatgggcgccaatatttatgggtggcacatccaaaagcagagtaagcataagagactcatcttctgttttcaactcaggatattagatttctttattatgatcatgactgccaaatgatgagaattatgaattcaaaggaaagaaaagtagctgagataagattaagaaatgaaaatatgtatgtaaatgtaatgtcatcaagttaaatactttgatattgaagattttaacaatggattcacattaatcagtggtagaatcaaatggtccttcttcttccaataactttgcttcattatcagctcaagaccttaaaagtagagatcaaccgccaatgatgagaatcagaaatttaaggaaagaaaagtagttgcgaagcatgcaaatgtgcaaccgaaaatgctaaccaaagcttctttgccatccacacatctctgcagaaaaatgaaccatacaagctgtcatgttagtaaaattcagatcaacttcttg

SEQ ID NO: 252322 - DNA, 675 bp, Cannabis indica
gtgagataattgagattttcttacattagttgcctatattttgtttattcagtttgtataagaaaaaatttgattaagttcattatgttttgttgcttgagtatgagtattgtgatttggggttgttagtatgaatattgtgatgtggattcttctgtgatgtttaatttcagtgataaggtatgttttccttaataaattttaagctatttctcagtatattgtgggttctattcaaatagttaagtttgttgatgctgattgattctgtggtagcactctaggagatgactgattctgagaaaaatgctttaagttacttctattctatagaaacccttttggatctttcgattgtttgtgatacagagattgtattatcatcatttaaaaataattgctagatagctttttggtttctttagggcgaaaatattaattctaggtaatgtaaaaagaattaatcctacttaatagagtagtactatccttaattctaagaatctatcttaacaaagaactaccccataagaatatctatagataaaagaaaaactaaataaacctctgcttgctgtgaaggtcagattcaaccctattgatgatgacttcaccttgtaaagccatacttttattattttggaaaagttatagtgaagaattacccattagaag

SEQ ID NO: 252323 - DNA, 883 bp, Cannabis indica
atttttaattttaagatgaatatttcgagatagacaaagtgatgaaggtatttttgttgttttttttagtttttttgggggttttttttttcattgtttagtgttagttattttttaagagtgttttcactactttatgtcttttactcatttcaatttatttatttttcaatcctattatgtgaatcttattatatacacgatttttatattttttaacggttgtttttttattgttctggattgttttttgcatgcatttagggtaagaggaaatctttaaagatgaagcttccctttgatgattagttggaagttcctactgggaaaagagttattgaggtatatttttttaagtgattttgtttattatgttctattcatttttttttatgttgttttagttaatttttcattttattattctaagattggtatcataaatatttacgttctaagtattaccattccaaaattattattattgggaattatagggtaattagtgatatcttaaatattttgaccaagtcccaattagagttattttctaaaactatttttagtcattttctttgtatctctgagtactcaatccaccttcaactgcttcacggactattgttgagggaagttcaacaaccaaatgagatagacttttaggctagcgtttctgggaaactccttaagtttagtattaaggaatttgccttagttactggtctagattatcatattgagtcaaatatatttgaatttaggcagaagataaacaatcttgttgaacagtgtttgaagggggtgataaaataaccaaaagtgcaattcaagtttctattaatgctaagaactttggggacgatgatgatcttgtagtcaagtt

SEQ ID NO: 252324 - DNA, 671 bp, Cannabis indica
catgagagttggtcaccagaaaaaatattttgtattctcggcttttgctgcttatgtcgacgtgtaaataacttgtaacattttacaaaagtttttacgagatcttgaaacaaatgtaatcttttggaatgttagtaaagttaaattattacaagtaatgtctttattctgtaattcatttaaagtttaaatttttgctcttatttttagtaatttttggtttagcgggatcaacttatgtttagtcactgtctggcgttcctattgttaaggggttacacttatagccttgtgggatcaattggaaaggggtaagacctacaaaggccaaaaatttggcaaagtaacccctcacgggaaagtgcgctccaacagtaatatgccctatgctctaagcaccaaatctgtccacacttgtcctcactttctccccctctacaagagtcgattccaaaacaaacacgaagtgcttcggaacccgcacaaatcctccaattataataacatcttgtaattacaaaatttattaaggatgatgtccatctcccaagaagttcccactatgcgttcttctccggtaagaacaagtttgacgttcatattctaggccggatcattattatctcagacctcatcacatgcggcctcacgttcttgattgtctcctaaca

SEQ ID NO: 252325 - DNA, 318 bp, Cannabis indica
gagagagagagaaggcgactgactgtagagagaaaggtggtcgacggtggtcaaagctccaccggtgctgagaagagagaaggtgcggctgcaggtgcaggtgcgggtgcggctgcggatggctgagaagagaactggtcgcggctggttgagaagagagaagagaagtgcggctgagaagagagaagagagaagggtgtggttatatgtttagaaaattttaggggtttttgtttatgaaggaagagagagagagttaaaaaataagatatatatgaattaggttttttttttcataaatatgttatttatttattt

SEQ ID NO: 252326 - DNA, 648 bp, Cannabis indica
atgcacgtataattataaataattattaaattactcatactctgctaatttccatatctaattatgcagtctaattatcttgtgaatttataggcttcttcaatctcaatttaaatttcctctgcaaaatacctcaagcatgaatggatcactaagaaatagagaattcggaaatgattcccacatgtattttaaatggaagatgggaaaccggggataactttagtttttggcgcaaattttggaagctcaaagttccttaaaaaaattaagaatttcatatggagaggacttactcattgtttgcccacaactcacaatttgaaagctaaatttgttcctttggaagatgtctgtccaatgtgtggagaggggatggagactaccttccattgcatggttgaatgtccttttaataattattggaaaggtctcgacagtttgttgggcaatttggaaagctagaaatgatcgtgtgtgtaatgagaaagagtctgtggttgaaagggtggtcgttaatgcaattactgatctttgatggctggatttttagctcaatcaaatggaatagatctccattccagttcagttttgtcaacttaagcaaatgagcgctggtgtaaacctaaggttggatctgttgggttt

SEQ ID NO: 252327 - DNA, 746 bp, Cannabis indica
atatgaatttttatgtttactttaggagcgataatgtcgcctctaatacccataaagtcgcccctaaaaattcatctcagaaaagttgatttgtgttggaacttgttttatcaggatctagatttactaacatgtatgtttgattatatactataatctaacatcttaaacgtgatttcctaaaataatgaaataaacacatataatgttctagaaactttattttggtggcagcaaaatattatggctccttctgttcatatcactaacccttgttcttttctgtggcagagtatttccaagatctaaacatggatctcctttagtgatgaaattcttcacaatcttccacacaatgattgagtattgacttgatatgagtggacatgaactctatcactatggggcacgatttcaagagggaagaagagaagaagaattcaaatttctaaaaaggctctttgtttttcagttatctaacagaatagtctgatgttataataatgagagtcgtcttattctttatatatgatttcatctagggttaggatttaaattatataaaattaaaaaagataaaataatttcatctagagatacgatattaattgttgattgtttcaatccaaataatcaataatcctctatggatgatctacatcgaggagggataattttactgttctatccttcaatgtattttatccttaaaatacttagctccttgtaaatgatatttcagtaaa

SEQ ID NO: 252328 - DNA, 1026 bp, Cannabis indica
aaagtcaaatataatacacgatttttttcttttatttcttgatgtttactcgaaagtggaaaacccattccttcaatttttgaataattttcgctttaccaagtttgattcaacagtacacaaaagaaatctattaccacgccaaatccaataattaatttcaagaaaattatattaagtctataatattctttaggagtgctgttggtgatcatattattacaatttagagatattagaatgtcccctctccggcccttcccatgtattatgttattgtattcatgaagaagaatagaaaacgatggaatgcttccccaacatcacttgattcacttctcatgagcaatattttaagaaaattaatgttttattttttattgttttttttttaatttaatattttgatttaattatttcaatctatgaaaagtggatttgaaattttttatcacaaagagtattaaatatatatattttcttcaataggataaaaaaaatggttatattcataattaatatttgggaaagaattatgccttcaatgctttgcaaagtcaaattgacatgccttcaatgtttggaattgttgtaaaagactgcaaagttctattgtcttctttatttaatgtaactgtttctcatgttaaacgatttgttattggtccgattgtagtttttcgaagagtaccctttctagtactctcaaatcgattgtgattgcggatttgaattaataatattatccattcccattcaaaaaaatatttgggaaagaattatgttgaaacgttttctattagtaagggataactacaatatatagcccgaaataaatgttatgtttatgattttcaataaatgtgataccaaaatacattaataaatcacaccaaaaatggtgataaaaaaagtgcttgcttatgataatacaaagtcaaaaataatcaaatcacctcacaagaatagtacaagtctaaaaccaaaaaaaaaaaaaaaaactagcttttaaatctattcaatttt

SEQ ID NO: 252329 - DNA, 1513 bp, Cannabis indica
attttctttggtgccaattctggcgaggacattaaagacaaccttgcggcgttgttaggcatgaatatagctccggagggtagcttataccttggtctcccaagttccatggggcgtaataagactgcggcgttgggttatctgaaagaaaaattaagaaagcatcttcaagcttggagtacaaagtttctctctcgggtgggcaaggagatcctaataaaaactgtggctcaagctcttccaagttatgccatgagtgtgtttttgttacctactgagattactagagatatggagagtatgatggctaagtattgctggcaatcctcaaataactcatcggatgtcttggaaacggctttgtggtcataaggataagggaggaatgggatttaggaatttgcgagattttaatcttgctttgttgggtaagcaagggtggcgtcttttgattaatcctgactctcttgtggctcgtgtgtttaaagctagatacttcccccatgggtcgttcttaaatgctactattggttccaatccatgctttgtgtggagaagtattttggaagctcaattcttagtgaaaaggggttctcgatgggttgtgggagatggtacaaatatatccattttaggtgagccatggcttccggatgatgaaaatcctatgataatttctactcatccaagtctcactcatgctaaagtgtgcaatctgttgaaagtggatgattctggctgggaagaagaaatcgttgatgatttgttgctgccccgtgatagagagttggtgagatccgttgctgttcacttaaggcctttgaatgatgctctctgttggagtttggagctgtcgggtttgtaaactgttaagagtgcttacaagctattgcagcagctcaagggagagtttgatatttatgtttcggctaaggacagattttggaggaaattatggcaattaaaaattcctccaaagatgaagaacctgttgtggcgggctgcaaagaattgtctcccaactttagtgcagttgcagtcgaaaagggtgaatgtgagtgtcatttgtccggtctgccagttaaatgcagaaaccattgtgcactctttgttgtcttgtcctgttgttgcggaggttcgggatcgggtgggcataggtacaacattgcagcaagaaaccacttttcttggctggtgtatggaacaatttttggtgttggacaatgtaaagccgggcttttggtggcgctgtgttgggcagtgtggaacgcaaggaatgataaagtgtggcaatataaaattgtgggagtggaatctgcaacaaactaccttaatcaatggcgtgctgctcaaagttctaataatgagttgtcattcactggatacgttccatgggatggagctaagcaatggattgctccaaatgttaatagaattaaggtcaatgttgatgcggttgtgtttaccgaaacctctaattatggtgttgggtttgtggctagagactctagtg

SEQ ID NO: 252330 - DNA, 563 bp, Cannabis indica
cgttcgtttgtcgctatgttcttttactgttttagtttttagtttcctttagtttttcagttgttggattgctagttgtttgttctgtgtttgactttgttgtattggttgtttttttagtaatgaattggggtgctcgggcaccctcccctttataaaaaataaaaaacacccatacataatagtaatggggaaatttgaaattctatacttacatatacctaatattttttccctaaactaatacttttctacattgaaaatatatgaccacttttctaaaaccccaaaaaatgcccctctcaaaaactcttttttttttttttttcaatttttctgggattttaaggggtcgggtctgatggggcccgatgcccgtccgatgcccgttcgatgggggaattttttgggtttttaaagtcgggtccgatggacccgatgctccagccgatgggtccccgatgcatgggtccgatgggcatcttttgggagtttttgaagtcgggtccgatgggcccgatgcatgggtccgacggtctagatgcatgggtccaatgggcttt

SEQ ID NO: 252331 - DNA, 1185 bp, Cannabis indica
taagaaagtgattcaagaagtcatactgtttggattggaaaatttgattggcccttgaatcttgttgtggcttaacaagttgggggaaacttggaaatgtttgcttggtgatttaactttgccagtagtagcggttgctgtttatcacatttagtgtaataggaacaaaaatgtgtttttgaaggggtttgtaattcggttaaggctattagcatgttgattaagtttagcttaaaagctagagttactttttataatatttatgtgtaaggctagagggaaaaatataattcttatagtaaacaatttttaaattgtgcgtgggttttttgagtttttgtgtaatatagttttgtggttcttcgaataaatccttcttctttgtaaaaaaaaattcttccatctcatctcctatgttgggttggtatatatattaattgatcatggctgaaataacttcaagctctttcatggatgcctttagtctttttgtggatgatgtatgttgagaagaaacgagactagaagcgacacgtggatgtggtaccacaattttaatttaaatttatatatatatttatatttatatgttaattttatatttatattaattacgtattacgtacgtgacatgttttaggtggttatcacattcttttttgaccatttggattgcttaaaattattcatgtacgtaccattcagcacctaaaattaaattagtttataatttatattattattaattttttaattttataattatgcgtactgtgatgatctcttcaggtattaattgtctaaacaaacgctaccttacgcacttgggagagggcatgtttgagtcactttcccataaactattactattatccttgtggaaagtcaagcgtacatgattagatccatgcttttagataataacttagttttatatgtatatatattaattaaatatttaatctaaaccaacatcttctcacagtaccatttgtcttgatcgatggatccttgttttggctccaatcaaatgtgtggaattgtacactaggctgaatggttgcttattgttttgtaattctcaaatggctaaccaacatgtttgtcatggcggtgatattatattacttccatgtttaaagaaaatatgtgttacataggcaattatggaatagactccacccc

SEQ ID NO: 252332 - DNA, 758 bp, Cannabis indica
agaattatagttgaggttaaagaatcaattttattagaaaaatataattgcatgtacaaagcttgtgtcttctataatcatttctgatcacttctcattttaagtacttgtataatttttgaaaatcattttctcaatattctcacatcacattcaaggttcttattttattctcgtaaaattactaactttccttttgagtgtacttttcctccctgtggatacgacatatagcccgtttactaccgcgaccgcagtgtaactaattgggcgacatcagtacacaaaatagaactttcatatcataaatcataagatagtttttaaaaaatatatcaagtaaaagtctcaactccattagtattattggtcattaaaagtttatagatatgactaaaaatttcacttatggagttaaaaattaaaaagtgaacactcgagtggataaatcattttaagacaaataattaaataaatattaaaaagaagataggttataaattattaaggaatgttaaggaaattctcttttgcactttcttttacactctttttataattgagtggcatctgtaactttctaaagtatgttcaagtatatagttacaattatattttttttttactttcattaataattaaaatgtgttatctcatttacttgtttatttttttttttgtaattattttattaatttctcataattttttactaaataatatgcactactatgcatctttttttttcttttttcttt

SEQ ID NO: 252333 - DNA, 537 bp, Cannabis indica
tatatatatatatatttaccaaactatactataatatatatatatattacacataatactgaagccattactagaatttaactagttgggtaaaaatatatatatttatatatatacatatggtttgcgatgggcttatgtggaattattatatatatatatataccaaaatatacatactggaatttgaaacatcaagataggattatatatatatatatatataacaaaaactgactgcgagcctgcgatgatctgaagccatatattgattatgcatattcaaaactgaagcccaaaagttaattcatacgcatatatatatatatataaatatatatatatatatgcatgacgctatatatattatatgaaaccggcatttacgagattcaacaattatcaaaaaaagaagtaaaataacattaaatattcaagccaatacaatcacccatcaatataatatatatgcgcatataagaccaagaagtatatatcaatacattcaaacaaactgaagccaaaaatattgtactg

SEQ ID NO: 252334 - DNA, 963 bp, Cannabis indica
tttttttttaatagtcatggtgtagttatttaaaataatttacaaaattttgagagatttaaaataagttaagacctcattcaggttcaaatgttcttttattaacttgtgaagaaataaacttattttaaaccctatttaagatttgaattgtagaatttttcaataatatattgttgttttcttaacgaagttgcacttaagttccatctcccactacaaataaaattaaaatgaaacccagtatattataagaagatccgaaaccccaattagtacactaacgcgcacgcacatatatggatatataccttgtaagcagcatcgacgtccgagaaggcaaagcaaacctcgacaggttgtctctcaccgtgagacctggttgcggtttggaccgatcctgtcacctcatttgtttcatgctgatgtagcggagtaaaggctatggtgctctgcccactctctagctctccccataagattaaaaattctgccaataaagtatcataatatattttatgacaaaatcctgtattattaagagttgagatgaaagacaaaatacataacaaaaaggtccttactttccatgtgtattttccaagcagataagtcttgtagttgggtagacaagctctcctttggggtctctaacgaaggcctcgatagatatcagctggtataaaactagcaacagagaaaaacagagagaaacaagaagaggaaaacaatggagcttattattgatgaattgaatcaatacaattgattacaaaatgaatagaagatcaacaatatatagctgacaagaatagacttccccgattcccgctgtaattactcggcaattgatgttctgttaagcgctgtctttgttcagctctccactttcttcctcccttttttttgaaaagaaaagctaaacagtacaatcgaatttgaaggctttagaccaagctacaa

SEQ ID NO: 252335 - DNA, 653 bp, Cannabis indica
tcttggcttccgggaagcaggattgaccccttttctatgattggaaaggtaacctacttttgtaataatagttttataattaactgtaaaaagaattttattagtagggaatcctcatattatgatagaattttaaatgaaagttttattttaaatttaaccaaaggttttaattaaaccacacttttcccttaattgatagattagtgataataagattttaaaagcacacacgtggcgtccctgagtgtcagggcgttacaaaaaccatcgggaggtgttggcgactagggacgagatcattgccacggacaggagggatcttagagattccaaagaagtccaagaattcactgtcaagttacgatctttggaggagatggaccaaaatgacttaaatacgacagctagtttaattgttgaagtgaaagagctccgtgagttcaaggaacaggcccgcaaggaggcggccaaggcgaaaaaggatgccctcctgactcccatcacctgtcaacactactcaaagcactttgatgatggagtttttatgtgttggacaactaacaactttgaccttcgtcttcctttttaccccaagcctgaggaagttctagcccgtttttgggagaaaaagaagaggcttgatgcggtat

SEQ ID NO: 252336 - DNA, 1046 bp, Cannabis indica
caaaaatccccattttccctcattttctttaacttccttaaacttccttgtttcttctctttcagagaaaccaccaaaaatacttccataaattgcccagtttttcgcctttctccgtgggcttttccttgattctatagcgctgtcaagggcgaattgtgggaacaaatttatcagaaataaaaggttagttttcgaatctccactgtgtttcgctttctgtttgagtggggacaatgtcttctgggttttttcctatgcatgagagggtttaagaataaatgtttgtaggggatatgtatgaggttacgtttttaggtaaaaaactgggtaatttcagaaaaaatgacctgtaaattggcataatgacatactgtataagaaatgcttgaataggcactgcttcatgttttgaatactcacgggtattcggacgaacacttcgaatactcgcatatttgcaagacttaataacttctgattgtcgcctaaatctttaggattttgtattctgtgaatttggtcgcgagaacattaactgagtcttctaaatggtggatgtgtcacagtattctaatggtcatatatgcggttatatgtcccttgagatactatgatacacccagccatttgcgacatgcgttaatgttctaatgagcgtactctttcgctggtagatatcctcgaaacggtgggagtacctcagtagcttcaaggtcatgcttgagaacgcatgccccttgagtcactgagtttctcccagccgtttctagaggtatatcgcttagcccaagatgcgtgacttattcgcaggttgcgactttagttggactccttgaaatggtgggtgtctcctcgtcacctcagggtcatgccaaaaggcgcatgtcgttgaggttaccaggacactcctaaccatttattgggatgtttttctattcgcatacttagtattcactctactcgcatattgatggggtggtcagtatttgcgagaatgcgggccattctatcaagtgtgattttatagtttatatgcaggtgag

SEQ ID NO: 252337 - DNA, 805 bp, Cannabis indica
tttgaaatattacaagtcatttacatgcaagccaacctaagcggcaaaataggatttttatacgattctcctattggacctaatcctcgtggtctggcttggccgaaacatgtacaatttatctttaaaaccctctaactcatggttgacccggcactgctttacctttacctggacaatagagaacccgtgagccaagacccaacaagatagtaaataataaaacatgagcatacagtatacatataacatacaatacgctcgtgcatatgtaaatgtgccacaacacttaagtatcatactatcttatttatattgatgcctccgcatctattatctatttagcatagacatcacgtgtcacgctcacacgtgtactttacatatataaggccttaatagtatttatcttggtttttgtcattgagtctaacccagttatgcatcattgcataactcttattatttactaacatatattgctaatacatgcttaatcatataaaactttggatattaaccctaactcacgtttttattcaattaattatataacatataaccacgccactgcaatatattcgatgtgcttattttgttgtctaacctgaattccaatatatgaggagaattcctaattcacagataatcatgagcaagtactagtattcctagtcacaaattttgagcttatacacaatagggctaatcttaaaatcacagtcaataatattcacatttaggactccaactctaaaccaagtaatagagcttgaaacaagctttcaaacgatataaagaacgt

SEQ ID NO: 252338 - DNA, 832 bp, Cannabis indica
gacaccaagatctaaacatcattaatacacatccctttttgcaaactctattattttattgtttccaagaactatacaaccacccactttgattagaataatgaatatgaaatttcacatgagtcttatatttataagtctagattaaaatttcacttagaaatcatttgttgtatattaatctacacactcttaagaacaaaactctactgtgtcgaatctaatcaataaaaataaaagtagacataaccccattttcatcgcaacatgggggtgaactaatataaatccttagtgacaatttaatttattgcgattttattagtcaaattaattcaccgtagtcctctttatttttacgatcttagatcagttgacgaaaaactgcatcacaccatcttcatcaaatttgtgaatattaagtctcccatgggacttgtgttcatatatctcgataaaaatttcacctagaaatctattttcgtattattgtccacactcttgagaatataactttaatgtgtcgaatctcattaaacaacagtagacgtagccctattaccatcgcaacatgagagtgaactattataaatctctagtgtttatattatttataacaattttatttagtcaaataaattcatcgcaatcctcttattttgtacgatcttcttaaatcaattacaaaaaatagcatcaacacctaagttttccttttccctccttcctcatttccttccctctcaccaaacacaatgctaatctaatatgtataagccctccaaatagtctcctaccactaaaataaaacccattctatttctcaaagcag

SEQ ID NO: 252339 - DNA, 390 bp, Cannabis indica
aatccacaatcaacgacgcccgccgatgcctcagccaagaagatcagaaagccctataccataaccaagtccagagaaagctgggccgaggaagaacacgacaagttcctcgaagctcttcaactgtcagtatatatatatatataaagtatatatgtataactattttactttcagttctcaattatgttgatttgaattgaattttgtacaggtttgatcgtgactggaaaaagatcgaagattttgtgggttccaagacagtcattcaggtttgtaagctatgtcaaatacagttttttactagaacaaattacgagtttctttgtctcgtttttgtgtttgaaatttgaattgaattgatcttcttctgcagattagaagtcatgc

SEQ ID NO: 252340 - DNA, 726 bp, Cannabis indica
atccattttaagggggtgcattgtagaatcaccctttagttagtttcctattgctttctaattttgtttcattcatcaaatcttacatggtatacaaccactttaaattaaggtttgaaattcaaaatttaggccattaaaaaattacgatttgtaggtttttttttttaaaaccctatttggagtgtgtttcagttcttaccgccgacattgaaggactgtttagttgccggtcaataaaacctcaaagtctgacactagaaatgccgcgtgtgaggctcacatgttgccactaccgacaaagttcttccccacacgcgtgggaccgtgaatcttgctttgattcacttttgctccttgtttggcccatctctgtcctccttgcatttgtcttcgatggttcttcttattttgtggtttgatacttttgacttcttcgtatttgggtgttcttcctttgctgttcgcttttttatttttctttttcaattgtctttgctttcgagattatggtagagtcaaaatcagacccaaaatcagtggttgtttgtgatatgattctagtgatgtctaaaatcacgagccataaattaattggttcgaattatttggaatagagtaagacgattcaactttatttaaggagtattgacaaagatgatcacttaactgatgattctcccaaagaaaaagacgattcaaagaaaatatggctacgtgaggatg

SEQ ID NO: 252341 - DNA, 586 bp, Cannabis indica
ttgtccagattcaatgaatataaaatatttatttatcagaaaatcaattatttatttatttccttaaatagaaaatcatttccttaattagaaaataactttcatatataaaatattctaatagttaagtcttctcccaatcgattttcatgaattgcagttatgatgtgttgttttctacaaagattgttgttgaagaatcgaagttcttcaatctgttcaaaggtgacttgaattgttccttgagtttggtgctattccatggccggacactagagcaacattagccatcaatggcagaaagtcctactttgataccatgttaaagtgacaaatttgaagctagaaaagaaaagaagacaagaaaagataaaaagagagagaaagaaggagacaaagattgaaagaattggagaagaagaactcaattctgatgttcaacagtctgagtatatatagacaagagtttgatcaagagcttgatcttaagctaacttgtaactaactttacaaccaacaaactaagtgactttagtcattgtatcaatcaatgttggtattcggtcattttcaattattggacatg

SEQ ID NO: 252342 - DNA, 863 bp, Cannabis indica
tggattatatccattattatctataataatgtatgttttttctgttggatatataggagaagaaggaagcagtgtatcaaccatcaacctgttcagttcacgtgttttccaggtaaggcagctgtttattctgtattttccttacttgtttaattttagacaagttcctatgttctaattcctcaatattatgctggcttttagaggagaggagctatgggatcagctcgagtacttgttaggcacttcaattttatactggttttttacatccttattactgttggattgattattctttatattatactctcatatttatttgtgagattacctgagtcaaagtcattgtctcaattcataatttgtaagacctacatgtcttatctcttgcactatcttcgtctcctgcaggaaaatatttggaatgttgcaaagaaagcctttgatccaatatatatcctccttagctcgttagttgctaagggtttgatagctgcatcaaagacagaattgcctgctgtgattccacctgaagttcctcctcaaactcaaaagaagagccggaccgttactagcacaggctctgtcccattgtcctcagtttcagcttcccctgttttttcaactcatctctctcaaaacctgattccagtgttgccaatcaaccaacttggagattaagaattgcctctgtatcactaaaacaaccactttatacttatatttcatttttggcttggtttaatcacattacattagtcgagcttcttgagtaatggctttcttgctgcaaggtttttgggatgttgagaaaaatatgattgggacagtgatgaaatatgttttttttagtagaattg

SEQ ID NO: 252343 - DNA, 882 bp, Cannabis indica
gagacttgtctcttatgtgggaaagagaaagaatcaattacctgttctttgcttgtgattacagcaggaactgtctccaggaagtcaaaaattggctgcattggagattaaatgcagaatcggtgcaaggcataatgaagaacataaaaaacaacaagagcagttcagcaacgagaagaagcatgttgaaagttgtaatagctgggttgatttatcatatttgggaagctaggaacgatgttctatggaaccaaaaggtgaggcgcagccaggcagtagtgaagcacattcaaagggagagcaagcttaggatcatagagattatgcccaagaaaactaaagatgtagatagagaatggattgtgaatatctaattcattgctagatagattgactcggtgtaattgtttgcatagatagtctgggggtagattgaggaattcggatcattgtaagtatcaatagatgtaaagttgtgaatttgtaaatgttgtttgagcaatacaagtaccttattcataaaaaaaaaaaaagtgttaccaaacacacccttagcgtacaactacaagatcataattcaagaacctaatgtgggtttatacaactgcaaatttatttttaatatattagcttagattaatatttcatcactataaataactgggtcaagtttcttcaaaacactaaatatgcatcctaattatatatttatttaatatatgaaccttcaaaattttcaatctcatggcaaaagaaacaactacgacatcgagtcactacaaaaaaatttactttagtcacaacaaaatttgtattaaagataaaaaagttgtggctaattataaattatcattattgtgtaaaaggtccgtggctaaaagt

SEQ ID NO: 252344 - DNA, 1191 bp, Cannabis indica
cctagttgaaacactataaaaggaacatgatgctctcatctcatccaactaatcactcacctaaaatcaaacctagttttctctgtcagacaactagtagatgagagacaccttctatacaatttccaagcctccttcattgttctccatattcaaaccttagtggttgagtgtcttgcaacatatagcaagtcaagtactcaatcatagtgagtaagacggttgtaaccaaactcgaaggagagaaagagatccaggcttagatcttgataatactctgcgacagaaaggaagaagggttagtgatctgagcggaaggagtcattatattctgctgcaaccaatgtaatgttttctaaactcttatgtatttaatttcattgttttagagatattcatatttaggatgttaatcaacatacttgttagtaaatctagatcctggtaatatattcctaagacagagaagttatgatcttatgcagcaagttagtcttttccctgctctttttcatttttcccccatcctctttttacttctttcttattgtctgttttcattcctcgtatgcatctcttttttcctttgctactcaacacaggggacttcagcgagtggagatgcttgagatagaacttcgtcagaccagagtatattgtgatgtcatggctaaaaagttgaatgattcagagtttgaactctctcgggtaaaggaggaagccgagaagaaacagaggctgactagaagaaaataaaagagcttgaggatgctaacaagaccagccaagctaaggctgatagaaagcttgaggaggccaaagttgacaccaaaaataaggccaacaaaattgccaagcggtctctctatcaagcgtggttagccgattcggagatggatttcagctttctgggcaaaggagatgaagagatgctcacattctgcgagaagactaaaagggaggaggttggagatgtagatgaggttgaagaagacaaagaagagccaaccaaatcccctactatgtaggcttggtctttttatgttttcttcttctttttattatttaggaaaatgacattttggccgaggcaatggttgcccctagttgcattatttatattgtaaagaattttgcattgttggatggccaacattattttttaagcatttatctttacttttaatgcct

SEQ ID NO: 252345 - DNA, 776 bp, Cannabis indica
aaagtctttggcatgatcccccccgagtggaaggcatcctaaacttacaaaggcactcatcaaatcctataggcctacgtcgagtatactcgcggaaagaggggacatgatgaattattaaaggggacttaccagagccggacgtactggcgtcaggagctcgtgtgttggggaccgaggccagcggtttaggcctagaaggcgtccgccctggaccttcctccagacgaagagcccttccggcggcagcctgggctttgatgtaggccagctcttgttccctcctaaagaggtacttctggtaccggtcggtccatggcttggaagccggaggaaaagaagaagcggtggcggtactccttcacatacttctgataattataagggatcgggccctcatttaaagaatgggatcggagtccataaaaatcatccttaaatttgtccccctttctggggacggaaacgagtttgtaaaaatataaaatctcagccggactgggcgaaccccagctctggccagcgtacaaaataaacaagcctgaaagcaggcggtattcttggggaattaactgatacggcgcgaggccaacaaaaattataaaattaacaaagtaatcctgaagagggagcatagccccggacatgaggtgggtctggctccaagctccgaaccccccgtagttatgattggacgtctcctcatcccgaggcaggcggtggaaggtcccagaagtagatggcttgatgcctgccactgttacgatcttctcaag

SEQ ID NO: 252346 - DNA, 2326 bp, Cannabis indica
ttccatatcgatgaaccaagagatctagtgattgatcttaacaaaggtaaatcattatctctgttttgggtatccaaacgatcaacatataagacaacatctggagggaatttctttgtgtatttattgatagttgacagcattttctggttggcagcctggtcaactgcaggtactttcagacccggcgtgtcaaggattctaatcttgattccatcaactgttccaacaatctctttcaaagaagtggtggcaggtttgaaggcattgatcatggctttcttctcaccgaaaatgaagttaatggttgcactttttcccactccagattttccaagaaccaaaatgttcaaacagaagtccaagttactttggttatctgcttcaaaatccaaggccactttctttgttgattcaagggcatcaaaatgatttgtgtgtttctcaacatcaaggaataacttttctaacacttgggaaacttttgaatcttcaagagatataccaagtctgtgaacaagcctcaaaaacttcactcttaggacttgcatcttctcaatcttctttttatcctcaatgcttaggctgacctcaacttcatccccactaaggtgtaaagaagtaagagtatcgatgtgagtctgttgagaagcagcctctccagaatgcagtgatgaatcaaaagtagtgggactgaggacagtagtcgtgttcaaaatatccattgatgaggcagacttgtttccttctattgactcttgagaacaaacttttcccaaatgagatgcagcagcaaccctttcttcttcaacaatgatcttttcggttctttcagagctcccatgtgccaaatcttcagcatcgtcattagaaacatgactatgcagttttactttatccatgtcttcattacagtctgcaaccctttcttccacttcaacaatgatcttttcggctctttcagagctcccatgtgccaaatcttcagcatcgtcatcagaaacatgattatgcagttttacttcatccatgtcttcattacagtctacaaccctttcttccacttcaacaatgatcttctcggttctttcagagctcccatgtgccaaatcttcagcatcatcatcagaaacatggctatgtacttttacttcatccatgtcttcacgacagtctgcaaccctttcttccacttcaacaatgatcttttcggctctttcagagctcccatttgccaaatctttagcatcatcatcaaatacatgaccatgtttttctacttcatccatgtcttcattacagtcttctattttataatcatcaactatttctgataaaggacactcaccagaatctacaatctcttctgcttcatcagtcacgaagagttcatcgaaatcaaactctttctgattcgcctcgcaacaattatcagtagattccagcatggcagccaaggaattttccttagctttgtcaaaatcaatttcttcatccattttactctctggaatctcttcaatagttccatcataaagtcttgcaccttcaccaccgttttggttgccattttcacaaaccaagagttcttccactgcatacttcaaattattctctgctcccccattatcaacatccaacaccaacagttccgcttcttctttctctaccaaatggtttcccataagtctatcagtatcatcacaacaaccttgaatagcatcattttcttccttaaacgactccgaatcaccagaatcttcaatctgtgtatttcttgcagtatcaaactcattaaacttatgttcctcagcacaaaaatgctttacatgagaaatcaattccgaatttagctccaaaacatctcttttattaggctccaaaggctcttcatgaagagcagcaccctcaccagaagtgtccttaactaatacatcttgaacaaaaccctctacaccattcaacttctcttctttatcaatcgaaaaactattatcagcttcaacaaaaatatcagaatcaaaattctctttcaggtttacaatcaaagacttggtgtgcaccatggattcatctccctttccttcttccacctcaaaaatcttaattctaggagcaacatcaatcctacccaaagaaaattcatcttccacctcactaaacaccacatcactaccatcatcatcatcctcccatgacaactgagcaattggtctaaccaacttttctccatctgggtatgcaacaacaggcctaaaaatatcacctttaccataaatatcactttttccaacagaattctgatctgggtcagccactaatcccc

SEQ ID NO: 252347 - DNA, 666 bp, Cannabis indica
taaatgtgtcgacttgcaattggctagcgatactccataaaaattattatattaaactatatgggacccgatacttaattgcaccaatagcgatattgacacgtaggagggtgttaggcactagtggtaccctttagcatttctattaataataaataatacatgcaatgttcatgaaaacttgcctcataacccaacatctataaaggataaagtacatatagagcaattgacccttttattgtatatattgttcacatacgtacatacatatatatgtgacacaatcagggccggttctgaaggtaggcgagctaggtgtgcgcctcggcccccaactgttcaggaccccgaaattgtaaacaaaaaaatattattatataaataaaatattaaataagaaagaaatataacaaatattatatggtatagtggtaaaagattttatattttttttaaaaaaaaaatatttattgtgtagttacgaagaattaaaccttggagctcttaagatcgagatttgtaaagtttcaccattacactaaaatattacaactatcattttaatgataattaaactatatgtataagggccttgaaatttgattttgtcttaagcctagtcttggacaccaatttttatttttttaaataatttaattattt

SEQ ID NO: 252348 - DNA, 710 bp, Cannabis indica
taaaaaaaaaaattaattttgataataaatatgtgaatgagagcattcatcattttttgaatgagggcattatggatgagggcatccataaatttaatggaatgagagcattccataaatttaaatttagtggaataagagtattccatggatgagagtattcaatttttttggtggaatgagagtattccatggatgagagcatccaattttttttgtggaatgagggcattccatagataagggcatccaatttttttgtggaatgagggtattccatgaatgtggcatcttttttttaatttacagggcattccataaattagtggagaaaagaacaaatacaaagtaaaagagagagggaaatagagaaaaagagaggaatgcatgcatttcatgaattcttacccttgaagaccttgaatacttggaagaacaacaatggcagtgacttttttatctctttctctagtttttttttctttgcaaaatgcgatagtctccttcctttctcagattttttttcttcaaagtatcgatccctctttctgttcttaactaccccgtagagtctatttttcccaatataattattattatttttcaaaggacgagtaaaaataggggagtgggagttaagatcctatttttactctctatttgatttattattattattattttcaaaacctaataactgaaataataat

SEQ ID NO: 252349 - DNA, 570 bp, Cannabis indica
ataattttcacaacagggggctatagtaatagcccccacatcaatcttaagggatctgtccctgtgtatatatacacttagtatacatgtatgccatgtaatatatacaagtagcataatgaaattcttttatactttgattttgtttgtctaagcttttactcatgcttgcatagtaactaagattgtggtcgaaaacaaaaataaatcaacagctcaaaataatttcagtgtatattttgatgatcttaggttctagttcatttattttgatgatcttaggttctagttcataactagagtatttagtataaaattttgaaacacagtcctcatatccctaaattttaaactagaaagtttcaatcactaggaaatttaaacttaaaagaggtcatttttgtaaaattgtcatccataaagagtattgattagtaaatgaaaaattttatttacaccccaaaattttctaaaggcaccccattttaataatttttattttatataaaatttatatctttaattgtactaaattttttaatttttttttcctaattcatattcttaaaa

SEQ ID NO: 252350 - DNA, 818 bp, Cannabis indica
ccacaaagaggtcttcgtcaaggggatccgttatcaccttatttattcttaattttctctgaaggactttcagctttactacagcatgaggaatcgttgggacatcttaaaggcttatcaattgctcgaggtgctccagcaatatcgcatctcctttttgcagatgatagcttgttgttttgccaagcaactgaagactcttgccaagctgttcatagaactcttaattattattacaaagcgtcaaaacaacttcttaatactgagaaaactgttatgtccttctcacctaatgctactcaaggagtcaaagatcgatttaacagtgtgctaggaatgcctatttgtgctctccatgagaaatacttgggtctcccatcttatgctggtaaagataaaaaggagctttttagtggtatcaaagatcgtatttggaaacttatgaatcaatgacatgctaaactcttttctattggtggttgggaggtactactcaaagctgttgtccaatccattccaacatatgctatgagctgtttcagtcttcctaagaaattttgtaatcagctagagtctatgatggctaatttctggtggggatccaatacaaataactccaagatacattggaagaaatggaaattcatgtgttcttctaaagcagacggcggtattggttttcgttctttcattcacatcaactaggctcttttggctaaacaagcatggagaatattggatatcgttaactctcttctagcaaaggtcctcaaagctcaatattttaagaatggggatttcctttcagcacataaatg

SEQ ID NO: 252351 - DNA, 975 bp, Cannabis indica
ctacgtgactggagagcagacacaaaagaggcatgaaatgggaatattaagaaatatggagaggtgaaacgagtaggagatcacgctcggatgtggtcacactggaagtgtgggcagaggttattccatactagaaagacccaaaataacatgtataaaatgaaagatgtaaaattgaatatccattaacttatgatttttctctcattttgttaacaataaatttactttaaattacatgcaagagccgaacaaaatgtgaaaaactgagagcagatgaaattaaaggtggatgggggtctaagaccatagtctgccacatcatgagcggggtgtgatgttgtcagcatatttgtctaaaaattcatattttttgagtaatatatttttaattttttatattatataaaaataggctgatctcgagacgggagaacttcccagtattgtggacacttttgtaaagtttcagtgcaaggacaacaaatagcgcaataaacacacacaacaactacatgtaagtaattttatatctttaataaactcgttctatattttaatttctattcaactctaacagtttgttaaaatttttggtaggccaaaatggttgagatttgtgaaattcaaccagtgccgaccaatgtcccctagcagtacaatgtcgaccccacccaatttcttataaacatgcctgttatgacataggttatgggtgagcggtcacgccacttgagagggatgagccacttgccgagacttaggatgggggcaaagaaggaaattcccaaggcaggtccttctaggccacccactgtcaccaaggaggaatatgatgccctgaagcgaagggtgaaagaacaagaagcacgaaacgaatggcagcaacaaatgatgcaggctcagaatcaaatcatgatggccagcatcgttccaagattcaacatgcctccgatgcctctgattccaccattt

SEQ ID NO: 252352 - DNA, 1048 bp, Cannabis indica
gtttttaatttgtttgtatcgcaatccacaatacaaaactatgtttcggtatgttgaatctccccatacttcattgctccattagactttgttttgggaaggacatagcaacttatagccatgagatatgtgatatttgacacctgaaatctgctacaaaccaacctgtttaaattgatctttaacagccactaatctccgccagtaccaacttgcgttcaaaggtggttcataagaccaccactcttcatctttgagatatacactatgtacccaacacattccaaagattgtcttcttgttagcaattgcccaaacgtatttgactagtgctgcaacattccattcatctatcttcttaaaaccagcccctccattcgccttagattgacaaactgattcccaagcaattagcccggctccttgtagcatatattgacatttccataagaaagctcggcaaatagcttctatttctttgataattttcttaggcaagatcataatctgactccagtaagagtgtctagctagcagcactgaattaatgagcacggctttatccccaggtatttcaaaaaacactttcttaacttcctcctttgtgaaatcgaccaacaacatctcggattgagatgatgaaactaaaaacccttgccaaattacactcttaataatagctttcttattgatcattttatcaccaaacaagctttgataaaaagataggaatgagtgttgtacctgagctggatcatccactttaatgccctctctgttttcaattgagaggattctattctgcctttatcttgcccgatactattgtggaaaattgccgtgttttcatctccatctttcatccaattaagtttagctttttgttggagaaatgaattaagagctttatgtagcttcgcatatttcgttttggcagcttgctctttgttgtgaagttcaagattgagtggatctcttcggaggttctcctaacaatcaagtaaggcaacctttgcttgagcttatgctatttgaatgttggagaagc

SEQ ID NO: 252353 - DNA, 1110 bp, Cannabis indica
ttttaaaacttaaatatatacatatatcatatcaggacggccatctacttcccctgcctcccggccgcttcgtttcgactcgggtatgaatcgtttaaacacactacccgcctcccgtaccccgaaagtctatataccccttgtacctgccccattagggatgggtacccgcagatataattgttatccctaaaaatactttcatattatattttattaaaatttacctactttttttgagtaagttagtctatatactctcattctctacttaagtctagcatataatttacattaacctaaggagtctaattgggacatcatctatatatacttaaaaaatataaaaatataagtaaaaattaaaacaagtaaaataaaataggtatacaatgtaatttcttttaatataataataggtacattattttattattattattaatattatttgaaattaatgcaggtacattatttgtataaactaggaaaaatcttagctcaaatttgaacaacaataaaactaaaaaactgcatgattcttttttttttattgttgtcatgtggtggattaagtttgtgggagagagaaagaaaaaaaaaataggcgagggtgtcaactgaaaaaactccttctttttagtagatgaggaccaaagaaacatattttaattaaatgataaatagtggcataaatttaatgattttttttagtaatataagtatttaaaatttcgagtttgtaagtggtataaactcaataatattttttttttttagggaaaactcaataatatttttagtagcataatactatatttataaaattataatttttagatactatacccctatatttaatcaaaattaaaatactatatatttatattatcactttatgagtcatcacttcactaaagaaagctatttttctttacaggaaagagctatcattttgaaaacgtagaacatctaagcaactataaaaaggaagtataggctgaagatattaacatatgcgaaaataccataagagagtaagcaaagtattgtatcaccaaaaaaaaacaaaaatcaagatgaagtccttgtttcttattctgattggca

SEQ ID NO: 252354 - DNA, 679 bp, Cannabis indica
aaaattgagtgagttatgactgctttactgaagacagttcatgacccagtgcccaggttgacatccagcgcccaagttgacatcccagcgtccatgttgacatatgacgtcaacctggaggctaggttagtgtaaaaacgttcaaggggtgtactttaatatgcctaagtgatattttgacatcacttagtctatttatgtgttctggtaaagctggtcaccgattctcggagatgttgctatgttacaaaaatgagagactcaaaactcttcatttctaggtgagctgaaaatgagaaatgcaaagctgtgaagttgatttctctaacttcatagatcattgtcattgtcaaaaactagatggacgatcaaaactacatcaaattcggataagcagaacccaacgcaccagaatatttgtcaacctggacccacttactcctgagctccaaggatttccttttttatacttccaaggtttctaaacttgaagacgaggtctcctaccccattttttactattccagattcaatggttgcatcagatttgacatttgcgcaattaaaggtaacgtcccaggttgattgttaacttgggggctgggcagccctaggtcaaccttggcactgggccctgtttcgagggactcaggattgtgattttctccctcaagtttgc

SEQ ID NO: 252355 - DNA, 511 bp, Cannabis indica
aaaactgatgcaagttaaaataacaaaggtacgtaataatgttatgcaaacaattactattaaaaacccaaattttttgaaagttttacaccgtctggtaaaaaattcctgacggtctataaaatcgtcacttatatgagcatcgcgagtactaagtagaataggcatctataaaattgtcacttatacgagcatcgcgattactgggtagaataggcgatagtagaaaaatattagtataaaagaattcttgactgtttaaaaccgtcaactataatcgagactatatgccacaatttaaaatcattgctatactttaggcaacggttaaaactgttacctatagtataggcaatggttttaaaccatcgctatagcggattttctcaaaaaaaatcattgccttcatcctcctcgaaactaagatgggagtttggtttggccttaagatctccggataatcaagatctctgacaatctatgaaataaaaaaatctcaaaaatacataaa

SEQ ID NO: 252356 - DNA, 1003 bp, Cannabis indica
caagctgctcaagtcattgaagctttaaaatgtgggaaactttcaagtggaaaaggcttaaatcaagaaaataggattaagcgtccatgtgaaacacgatggggatcacattttggcactttggtaagtttcactatcatgttttcatctatccttgatgtacttgaagaaattataagtattagtttaaatagtgaccaaaaatatgaagtatctattatgttacaactagtgcaaacatttaactttatttttagcttgctatttagtgtaaaaatatacttggaatcacaaatgagttgtcgcaagtctcgtaaaagggtgatcaagatattgtgaatgccatggatttagttaaagtgtgcaaggaacaattacaagtgatgaaggacaatggatataattctttattagaagaagtttctaatttttgtgtttgagtttaatattgatgtgctaaatatggatggtatgtattgtactcaagggaaatcatgacatggagctccaaagcttacaaatttttactattttcgtattgatttttttcaatagtgtgatagatttacaactacaagagctaaataatcgttttaatgaggctaacactgagttgttactttgtttagcgtgtttgtctcccaataattatttttatgcttttgacaaggaaaagctactccgtcttagtcaactctatccacatgatttttctatagtggatttgagggtactagaattttaacttcaaacatatgttgatgatttgcgttcccatgctgaattttcaaaattgaaaggaattgttgatctttgaataagattagtggagacaagaatacatgcggtacatccattggtatatttgcttattaaattggcattaacattgtcagttgcaacaacttcaatttaaagggcattttcagctatgaacattgtgaaaaatcaaatgcgcaacaaaatgaaagatcaatgggtaaatgatagcttgactgtgtat

SEQ ID NO: 252357 - DNA, 621 bp, Cannabis indica
gggttatgcatgtcctggaatctagtgctcgtgtttgggattggctaaaatttctttggaatttgagatcgaaaggggtggatactaacaaattgtttctatatgctttgattatagttgatacgatttggaaagcccgcaaccacaaggtacacactaattctctgggtaacattcagcactgtattgattctatctctacttattacgcagattacgatgtgtttatttgcttcgacgatggctgttgtgtctcctgtttggtcccctcctccaaaggattgggtcaaaatcaattgtgacgttaaagtgggaagttgtttcatgtgtgtggtgactttagctagggatcacacatggattgttttgtgaatctaccaacatgcttaatttctctgacccgcttattggagaagctgcaacatgtcagttagctttggagatggtgattatgataaatcaccattttgttatgattaagagtgactcaaagacagttatcaatgccctgaaaggaaattgctcttattagggtattgataattatatccatcaatgtaaaaagctctctaatcttttatttagttgtaatttttcgcttatttttagacttttgaattt

SEQ ID NO: 252358 - DNA, 541 bp, Cannabis indica
attactacaatatgtattttacaggaaaaattcttagcaattgtcatacacaacacaaacttaacaaatcaataagcacaaattttaaaaaataaataaaaatgaagaaattctattgaacacttgtaaaatcaacaaatttaaggaaaatattaagactcaccctaaaaagtaattgtagcaagaatgatgatcatactcatcaaattaatgattagttgtgttccttgtagtgaaagatctttcataatgaaatttagcttctgcgaaaaaaaaatctattagaaatatatataaaagactgaagtcgtaataatgattttatatgatacaaagtaaaatttagcctctatatttaatttgtttctttttaaatgaggatatcttatatagataaaatatgagtatagatatcatgtaataatgaaaaacatatggtataatatagttattttgttattttttttcttcataaaatgaatgaatgtatatatatgatagaagtgatggttttatttttagaatgtcataggtcaatttt

SEQ ID NO: 252359 - DNA, 1523 bp, Cannabis indica
aatacaatacattacaatacggcttgccaaacgaaccctaagtgaaaaataaagaatcattaaatctcaactcattaagcatgaatgaatgaatgcattgatctcagccattaaaaactgatatgtgtaggctgattacacaaaaggaattacacagaaaactaggctgacaaattgctgaattatatactaacataattgtactgagcctagaatattcggatagacaatccccattgggagtgccagcttagactgtaaggtcacctatcatttcatggcacacctctcaaacgacagggagattccatcaactgaagtttgtctataagaaagtgaaagctggtaggtgtcaaccctttatttaagcagtttgccacttggtcatgtgatagaatatatcaaatttccaattgccttttgcataactttgtcccttatgaagtgtacatctaatttgatgtgttagtcctagcatgttgatatacatggtttgatttaaagtacttgcactcatgttatcacaccaaataatttggtgcacttggaagattgactttcatctctttcagtaaaccctgcaaccataatcgttctgcactagagccttatattctgactcagtactcgatcataccactattgtttgctttttagaggaccagtacataaaagagtctctcatgaacacacaatatcctgtaattaatttgttcttattttaacaacatgcccaatctgcattagagaatccagtattaaaatttgtgtcctaatagtaagtatttcatggataatatattatagaatatatgaaacacaattataagataaataaatacttaaattatagaaacctaattaataaatatttgaaaatttcttattagagatggtataatcttgtaaggttgtacaagagaaataagattatacaatatgaataaaacaagttgatagtgtattaaatggatctctaatatagaattatcaagtacgatttactatacactgtactttagtgtgtgtgattttaattcggatcacatatgtagatagacatgtaataaaggtattgtgtataatttgattatacatgactggactgatatgaattaacatctttcattaacatgtcctttaccatgaaagagttattcatatcacaacgatgatcattagtagatgagtctaaatcccgagtatatatgaaatcctatttgtgttcattgagtttttttattcacttgttaaagtttctcaaagaagatgattcttacaacttctgttttgagagcttaataacatgagtggctgagaacatgttacacaataatagaatccaagctttccaaaaggatcgaatataagttcccttatagtgttgagtgctaacagttgaatccaagtctataattagattatagattaactgttcacattaaactaatggtacataaggaatcaagagataattagaaagtataaaacagtaattttgactatctctaattatgaactaa

SEQ ID NO: 252360 - DNA, 1909 bp, Cannabis indica
catagtaagtgtaattttttcttaattaaattattccgaaccatctaatctttttcacattttttccaaaaataaaaaatttcactttaataaatttataaatatttaatatttaaattttattttcctaaaaaatatccataactaagccttattataatattaaaatttataaaataaaatatcccaataaatatacaggatattttaatatcaattatcaaatacttaaacataaaattaaaatattcataactaaactaataaattattaatattataatatataaaatttaaaaaatatataaatgtctaagaaataaaaaacaagagttcatttattatttaaatagttttattatttatttttttgaactaattgaaaaagaattcaaaacaaaaatttagtgtaatcacttgccatattattaaaaaattatattcaaaattattaagataaaaaattagtaatgaactaccaataccaatttttattacttctcaataatctatgtaatgtaaaatttgtaaaatttcgccgcgaaccacaggttatttactaataaaataatatagtaagaaattttcatctcttctccttttaatttttctaaattatattattttctaataattcggctatatatatattttttataaacactaatctcgtgctcatcatagttgatatatcatgcaacttttcatttagtaataatagaatcaatgcacttaatactaatagaattaaaaatcacttttgatatactataaattgcatgatcaaccatgatgatgatcacgagattagtgtttataaagaaaatgaataattggaaagaaatggcctaactgtatattctcctctctctctctttctattattcttttggtatgacttagacagtacttgctagtaacgacaacacaatcgttcttagtgaagctatagcattttttctcttctcatgccattaacatgcttcctattctatccattacctactatttatatgtgtttcaaatcctcaatctctccaagatttctcatatatatattgagtgtttgattacaatgtctagagaagatgatgagaaaaggttataccaaagtgtaaggaaatatgataaaatagtagcacaggtaggttgtaactataacaagtgtttgacataataatgtattgtatatctatatttagctttcaatattgtcatatttggaggaaaatctattcatctattttaagttcgggttattgtatttaagtttagatacaaaatgtaaatgtttttgaacattcaaaaaattatgggcaattcattcccgaacgagataaatgtaaaccatttttatttttgtatcttttcttttatataaaagagacaatgattagtttgtgttctgttgttttgttcttttcagtttgatgatctgattgatataatgaactcaaagacaaaactgccaaaacgaagaaaggcaccctctgttagatctcccaactagagtttattcacttttattctttacattttaacaattttactcttattttatttttttgtgttgtctgctttacagggttcaaaagggaatacttcaacctctgccccaccgtcctcaacggttcaaaacaccgataacaatgaggtatttgcacagaagatcacaaaattcctccatgaactgaaaactaatccccctgcagagtgatcaatcactgaataagctttccaaaggttgagaattgttcttattgagcccagataagtaatggtgtgaggaactcactttcatcaccacacatctaagtactagttcttatagcatagctataacataaatgtagggaaattgcttggaagaaatgaataaacaaatatattcaagctttaaagttgaaac

SEQ ID NO: 252361 - DNA, 801 bp, Cannabis indica
tgtctggaagaactctaacaatttttctaataggatcagaattatcaagcttttcaccaatagcaaaatattcattagctatatcggatagcctttcataaaactcagtcgggatttcattttcaaacatcctaagctcatcaaatttggtctgaagcataataaacctagaatgcttaacatcagatgttccttcaaactgagtttgaaggatctgccaagcatccttagcagattaacaagaagatataagcttaatataacatcacctactccattaaatatagcatgtaaagctttgcaattgtaagcagaaagtttatcatcttcaataaaccattcaagttcagattttattttagaattaccttcggaatctaccacaacaggaggagaccatcgtgatagaaccatcctccaagctttctcctcttgagactagatgaaagacctcattctaactttcaaataaggataattagaatcattgtgcaatggtggtcgagaaatggaactttcttctgcaaaaatgacatattgcacaaaaacacacaaaaatgtgacaagacaacactaagagtttagtgtccctctttgatccaattgaaaaactgagtttttgctaatgtacatattttaattacagaaaaatagtaaaaatttaactgtaacagtctgcagtagcagattgtaatagtgttactacagagtacagttttgcataaataaacttgaaccagagcaataaattaagtagaaataaaaataacagcagaaaataaaattacttgacacaagaga

SEQ ID NO: 252362 - DNA, 535 bp, Cannabis indica
cagctgcagatgttaattttggggttgttggtatgatcacggcagcaagttttcggccaacagtacgaaaaaactgttgcggttggacatggcgaacagtaggaagaattgtttgggaaaacaaattatttatttcagattgggatgttgtacgagaaacagggaaaatagttttgtgaaaaacaacatctctagaaatatagatatgtttggtttctatgggaaggagtgtataagatttcattccttgaagataaccaataaaaatagaagcacgacttcgaggggaaaatttgtgtcttttggagggtaatgtagacccataagcaaggcatccaaaagaacgtaagtgttcataagtgggaatcttgttatgaagtatttcataaaaagttcatcctttgaacaatttggatggtgttctattgatgagataggtggccgtttggactaaatatgaccagtaaaccagaggtaggctgaactggaaacaaagagcccgagccacatttaatatgtgttgatgtttgcgttc

SEQ ID NO: 252363 - DNA, 612 bp, Cannabis indica
aaatgataacatagttgtttacccaaatactgtatgagcattgcgtgtataatttaacattaaaataagaaaaaaattatgcacttttaaaaaattaattaatgattaagaaaattacgtaaaactaaatttaaaaaaattattttttttttcaaattaattacacatgtggcattgacatagcactaatgtggcaactggttaaacagtcatgtcatcattttatttgccacgtgtgacaaaacttgacacaagtagcaatttacaatactgtaaatagttcaggaattatttttaataataagttgaaaaattcaaagaacacaataatacacatatcataattcgaggacaaaaatcctaaatagtctttctttttactttaattaattgattaatcaaattagttttgtatgtaaatcaataccattttgttaggagtaagaataacaaagatttttactaaaatagtattttgtatgtaaatactatgttcttgcaaaaattattgattgaatcttttgttttattaaatgataaaatggtctttatactttttaaaatgacaaaaatatataggaccttaagttaaattttcgatattttcttttt

SEQ ID NO: 252364 - DNA, 833 bp, Cannabis indica
ggaaacccttgggcttttcaattcttaattgaccttattgtccaaaagaaatcaaactttgtttttgttttttgtgtgaagcttggagtaagcgtgatagagtggagagtcttaaacgacagatacattttgaagggtgttttgtagttgaatctcaaaataagaggggtggtttagcgatggtctagaaagaaaatgatgaggtttcgtttttgggtttctattcttctcatattgatatctatctctaattaaattagaaggggtcgcatttggagattgattagtttatcgttttaaaacctggaaactaattcgtgagttagctgttaatggtgtcagtccttggtgtgttatcgggaatgtgaaatttttttttattgttaacgattgtaagagtgtagaaacactcgactggtgcagagcaccaagaactaaagaaaaacagagtgaatgtgaaatgagagtaaaaaatgcagtagttacttgcaccctctcatgaacaaagtctttatttataggcacatgaaagttgttacaggataactgaaataacagaacaaacggctaactaacataacagacatacaactgaaaagctaactacagtgactgttaacatcccccctcaaacgaaaaggggtacaagccatttgaagtttggatttaagataggtaaacctatcagtagacaaagactttgttaatgcatcagcaacttgatcaaatgctggaacgtattgaactcgaagctgcttgtcaagaatctgatgacgcacgaaatgaaggtcaagttctatgtgttttgatctggcatgaaacaccgggtttgc

SEQ ID NO: 252365 - DNA, 534 bp, Cannabis indica
ttcctaaaatataaacaatacataattaatagacattatcgtttaaagttaccctctttaccttatttcagttaacatattcttaaaaaacataccttaaccaaataacccttttattctaactaataaaatttgtcaagagcataacttattaactttaaaatattattgtaccaaaattttcttatatacatccagtactggaaaacgtaaaaatttaaacaaactaccctaaaaaattagggacccaaccatataaaaggtgctaaagccttgtaaggcgcccaagcaataaataatggcgccaatagattaaaatcaatataaaacaaacctataacaaaattacattataacccattatattagatcacccaaaaacaaaatgaataacaaacaacaagatgagaacaactcaccaccttttcagccttcaacccaataccactctagccgaaactcccaggctcaaaactaaagtaaaaaattaactcaaaattcatcacactatgcaaaacttttaagcagaagttt

SEQ ID NO: 252366 - DNA, 1503 bp, Cannabis indica
atctgctccatatccatctggcctaggggatttaaatcaggaatactaaagaaagccttctttatttccttgcttgtgaaaggtcttatcaaactcaattgctgctccaagttgagtctatttcccaattccaatacaatctgacctcaggttctgagttgtgatagaactagtccccatgtacccttcgaaatgctgaatgaagtgtttaaccacttcattaaagtcatctatgatcactccttgctcatctgtataagtaacaatgctattttccatcctcctttttttcttcagaaaagcaaggaagtaagcattgttctcatctcctttacacaaccaagtgaccttgctccttcgtctcagattgctgtgatacatcttttcttgggcattaaattccatagctgcctctttctctgctagctggtaggacatgtcatcactatgttcttgagcttgcagtctagtctccctataatactccttggcctcatgatacctctttccaacatccctaattttctctctgttgaaccttttgatagtgtgtttcaaacgcatgagctctaagtacaacgcagtcattccctctctcttcatccgcctatgccaatcttcaagcaccacatctttaaatttaggatgatctgcccaaaagttgtaatacctaaacggtttgtgcccaatttcctcattaggagccatcgaaataacacacaagcaatgatcagatatagtctcccagctatagtgagctttagcaccgagggaaagttgtctgtccagtcttcattcacaagggtatgatcaatctttgagtagattctcttgtccccatcttgattgttggtccaagtaaaacccgatccagtcttaagaagcttttccatgtagctttgtgccatccaatcagtagcatctctgatgtcattcaaagttaccatattaccacccttcctatcttccaattcaaaaagagcattgaagtcccctgtcacaatccacgatttggccttgaaactaagattaagcattccatctcacatcccttttctctcatctatagtgttataaccataaacaaatgtaatgctcatagctttcgcatcaccggccatcttcacatagcaataaacaaattgagggtcctctctaacaacaataactcgagtgtaacctttcctccatatgatcaaaatacgtttctcaatggtagtactagtatagcactcccaattagcaaatttcctatccatcatttctcttatgccactagtactctttagcttggtctccaataagccacaaacccctattttattcaaacaacacaaatcaaaaactgtgttctgcttttccattttattcaaccccctcacattccaacaccctatattggttctatccataggcatcaaaaacaataatagagtcactatgttcagtagctacctgagaagctacaccatcctccttttgttcctgtagcactatgaaaga

SEQ ID NO: 252367 - DNA, 614 bp, Cannabis indica
ttgacattaacaacaactgaaacggatatatttacaaaaatttcaacttctatagtaatgaaaacacagcattgagttatcaagttaggtatctgctttacatgaaatttgcaagaaaataccaaatatgtaaatacttttgcacatttaaagtaatatttaatgaatggtagactattattctagaatcatattgaatttaccataaatgatgttggccatgtaatggacgctccaacagcatcacggattgtctttatatatctatatggtttaatcaatagttcattaggcttgataggaactttaacaataacttcagaaaaaaaaaaaaaaaaaaaaaaaagaatccaagttcttctcctccaacttttttagatggatctttgctgcaaacaataccaatagcaattgtttcaagctcattagtgacacttttaatgttgactgtttccccaacctgcataaaaaaattataaatcaatactaattattaactaacggagaagaagtagtgttaaaagtgaatgatcaggtaatgagttgaagattattggcattattgaaataaatgtgcactttaataatctcattgcatccctgcaacatgcaac

SEQ ID NO: 252368 - DNA, 1014 bp, Cannabis indica
aataaaataagtaaattaaagaagcagtgaaaagaaaaatgagaattgattggattttgttttgtaattttaattttggttcatttgtaatcacaaatctgtggaaatttgttttttttatttggggttttcttttgaatttgtttaatctctgtaaaagtaattgggttatatatgttcatattgtacagatttgaattttttttcattataataattttgtaatttttctgaattttagagtgtaaataataaatttttgtgtatgataaatcaaaaaaaataattaattattctgcccaaattaacaaattaaatttttcaaaaaaaaaaaataataaaagtaataacattgaggggtgaaacagtaaatttatccctactcggtgtaaatcatctatagaggatctttgattaatgggattagaacgatggttaaatgtttatagcgtatctatatcgtggaacatatagagcattcgatataactgagagtgcgattccaagttctatggtggatgcaacaaggaattaatatgttagggaatttacttggtaaaatttagatttttttattggaagcttggctgtataggcccatggtccccatactagttgagacaatactgcttgtaagactcagttaattgatttaaaataatcaattataattctaaagttagactatgtctaatttatgaattttcgttaatttaggtttgaatggaaattttagggttgtaaccataaaattttcaaacttaggatactttgttttatttaattattaaataaaattgataatatcctaaccaacaatttttttttcaaattgtttatttttgttatatttaattcattaaattatatgattaagaatataatattaggaatatctaaattttaaattctaagatattatattatattatattattagatattaaattaatttaaattatttaataaactaataattcgaaaattagttagatatttgaatttaagttagaa

SEQ ID NO: 252369 - DNA, 602 bp, Cannabis indica
cctaaagtacgatttataaatgaccagtacctttttagtttttcaaaagaagtaacattttgataatagtttcctatcaatccacatagtgactcaaatcactaggttgtactatctacttccataacctaaaaatagagtcacataatatccaaatattcaattaatagtatacttatgatgtgacatactctgtagaactattaatgtacgttattttcaaatattcatttaatactgtatttggaaattgattctttcattaataatctacatgtaggagattgaacattgaaagttgtattccaaataaaatttaagtttatagttagaaagacatacccaatagaacacaatttgtacataacctttagtcaacttttgctatgtatatccttggaaatgaaaaacacctcaaaataccttgtgtttccaataaactttttaaacaatgcagctgatagtgtttgtggtttttaaagaaaaccctaaagaacgattttaaataaatgaccatgacctttttgattttttataaaaaaaaatattttaataatattttcccatcaatccatatacggtcaaatcagtaggttgtacta

SEQ ID NO: 252370 - DNA, 791 bp, Cannabis indica
atatcttttagtaagataatatgtttttaatttaaaatgatataagagtaaagtgaaaacaagaaaaaggaaattagaggaaaacctagaaatttctaagtctccttccctctcttttgaacacctagggaaccagctgagaacctaaatttttcagaacaattcagtgtgattttagttgaattgtgaagcttcaatccaaggtatattgccctagctttatcttcctttgttttctttggttttatattagttttgatgcaagagttgggtttttggtgctgtggtgataaggtttgtttaattgtgaattttaaagttagtctaggtttctaaagattgttctaagctataatggtaagtattgtctggtttgttcaagattagaggtttggatactcatctttagtctccaatggtgttttcaaatttggagttgattatggtgttttattgcttgatttgagtttattaaggtataggcagatgttctggaaagtttcggaaagtttgggcttggtttgaattgaaggggatcaaatttttgttcccagctcagaaccggtcgaccggttctgagaagcctcttgcaaccggtcgaccggttggtacccaggaactggggtttcggttgggaaccggtctgccggttgggctttttcccaagcccttattttcccgtttttgcgtaatttgggtattggcatcctaattatcgatagggttaatcttagattcaattttagatccccgataagtgttttagcgtgtctctcatcgaattttgaact

SEQ ID NO: 252371 - DNA, 831 bp, Cannabis indica
tttaaaatcaattggttagatttggtagaatttcaagaagatgaaattcgattttttcgtccccgcaaggaaacggttaactgtttttgttatttttgggagaatccctattcgtattttggccataacttttcacttcggtgtccattttggacgttctatataccgtttgaagcttgcgacgagctctacaatatgatgtatgttttagagccaaaatataagtctattttagtgtatttttattatggaattcggtgggaaaccctaagctgtcctttacaactattaactagtgttttcgaataaacactaaatagtttattattattatgatatagggcccatgatcatcgatcgttctccaaaaaagtcggccaacatacctgaacaaaaattgaggtaagaaaaatataatgtaccacatggcatgatgggttccaaaattattgattttctgattaggcaatgataacgtaatgatactaatggacataatgtatgggtatcacgtgattaggtgatgcaatattcctggcaatgtatcgggcgtaggtacgggcgttagtgacatatgataagtaccgggcgtagttacgagattgtttgcatatatgatgcgatatagtgccaagttgtggcacgggctcacccgattaggtggtacaatgacattatatatgatattatattatgacacgggcttgcctaattaggcaatgcaaaatatgagcataactatttctatgcatatgactggtgacattacttaccgttgaatgttatactttaatcatttttgtgataatgaaatatataattagctattta

SEQ ID NO: 252372 - DNA, 730 bp, Cannabis indica
tttcagagtttttgaaatggcaaaggtagtgcgaaggtggttctttttttttttttatactcttgggtcaatctccgtcagatcagggagacaattgatccaactggttgaatttgaaaaagaagtagaaaagatggtcattaaatgttgatgtacctcaaaaccacaaaacagccaaaatcaaaggacatgcattttttaaaaagggattatgaccaaaataccctcagtaatcatttaaaaaagaacttttcattaaaaagaactttttaaggggcaattgttatactcgaaatttgggtggcactttagaggaggacatgtggcaaccttggggaatatgaatcaacgaatataatgacaattatattagaagatattaaaatggaataactcattaaatgtggagctgatagagtatatctataactcgttgactataaagtcttaagcgagacacggatgtacaaactattaattcacatattgacgagaaaccattttgtatatgaagacacaatcataacgacgacatcaataatacaaagcgaggtaccaacctcactacgtatgaagaaatatagatgagacattttgactgttaaaacacttagcgtataatataaaatatacaaactaagcgtaacagttgaatgaatctgaacaacaaatagagaggcatccatcttgctataagaagacatacacatggtacctttactaatcagct

SEQ ID NO: 252373 - DNA, 920 bp, Cannabis indica
acaaactagccttatggttaattttaaaattttttgattatttttttatttattttatttattttaattataagatcatatattacttattttattattaaatttgaaatgatattattttgatattaaaatattaataaaatttaaaaataatctagttaaagtttcaaatttgctaaccatatcaaattttcaaaatttattatttttgaaatatattttattaaattaaataataagattagaaaaatgttggttttaacattttatcttattagagatttattttaattaaaattttatttttggcaaaataatatgaaattttgaaaagttcgttaattttgttttgaatagatattttagggtttctaaccataaaattttcaaacttaggatattttattttatttaattattagataaaattgataatcataaccatcaaaatagtttgactccagcttttttgcccttcacctcaaactatgtcatgaacaagttgactttttacttccacaagttcaacaaccttcaaacatttgaaaatttgattggaggtccacagaaaggaggaactaaagctcctagttctggcactgctaatggtatacggtcaaagctgaggcaaaaattgcctctacttcaaaacctagcaaaaagaaaaagtggaagaatagcaagaagcctcttaaagttgttaacacaactaataagaataaaaaggttgctgattcataggcaaagcaaaaaggaaagtgcttctattgcaacaaaaagggccacttgaaaccctagtgtcctaagttttcggcaaagaaacaaggttatttctatctttgttataaactcatgtattttagagaattattatccccttggattattaattctggatctactaaccatgtttgttttct

SEQ ID NO: 252374 - DNA, 1160 bp, Cannabis indica
attgcagctgatctttcagatgacccggtaacaatactgaaatttcattttcaaacaatgatatttatcatttggcaaaccttttcttaattaatttgttagtagatcaactgatctctctctagaatagcttgaagtaagtaggaaatattatattaatcaaagttcctacttgtatatgggcagccaaggcctctcataatgtggaatccacgtctcattagtgaggatgttggagttggattcaatgttcgaaagttaaggcgctactttcttaggtatggtttgaagtatctttttctatcttgtacttatagattttatgaacctaagaacatgtcaatttgacatgacatgaggatgtcctttaggaacatttgttaactgaccgatcattcgtttgcagcacctttacaacagtgtactcaatgaggcctatggcatctggtgcagtgtttagatgttatccagggtaagagtattatagcatgatatatattttattatgaagagaaaatagaaaataacagaacttctcaggctgcttgattatgttcttgattcttttaatgcctgatcttgctagattatggaaggtgttctatgatgataaggatagaccaaacagatatcttcttgccgaagaacttgttcgacgtccagatgccgaagaccttgaggtttgttgctgctaaaattttatgtttttgattgcaatcacatctacaaaactacaaatgaaagtcggtttggtttcatgattcaaattctaatatgaaaccataatgaaacctgaatgaactagtcattggtttggttggtcttattagttttctctaatcattcaaaatgaaacaccatatgcttgactatttctaaatacagcttcacatgctggaaccacaaaccaaacataatcaatgatttcagaaatttttctattcaagataagataatgactgtgattgtatattttcagctgatatttggagatgtacaagaaaattcagagcagggtcaatctctttttgatagagctgcaggcatcttctcttcaataaatcgatttatgagggtcatttcgaaataacttcatttctgtcttcttccccatcttaataatacatgtattttgccatttatgtttgttctctcaacat

SEQ ID NO: 252375 - DNA, 585 bp, Cannabis indica
acctaaaagatctgaaagagttaggttaatttgtttaatatgtcattcacatcaagaaaaaggatagtaattagcattaacaattgggtaaataaatcaacaggattctcttccctattttatcatcttgattaaatcttttactgttaattttagtttcttgatactctttgttttgttttcaatcataaaattattggtttgccaaatagaatcataaatttaatctagtggtattcagtccaattttctgtggttcgacctcactcgtgtgcgtttattatttgaacaacgatacgtgcacttgcgtattaaattttacaacaaaaacccaaagtttgctagtcgtacgcttgtcgcagcgaagaaaatgctcgtcgtggaaacaaccgatcttgccgctgtgaggcttaatgctcgccgcggccacaagcttcttcagcaaaatttctccattgttcgctgctacgaatctctaaccttcactgcagcaccaactctcaagttttgggctccataaatttttaaaactctagaaaaatattattttggcgagtccttgatcctccaaaacatctcctaaac

SEQ ID NO: 252376 - DNA, 746 bp, Cannabis indica
agatcctggtaaaataattcccaacagtgcctccctctctatcatctctctcgaacccgttggaaaacccacgaaccaacatcataactccatcgctctgtcctccctctctcttggccagttaaccattgctccatcctccatcgaagctgcccctaatattggccatctctatcatcgcgcttccctctctcgaaccctttgcaaaacccacaaacccacatcgaaaccagccatctctgtcattgcttcgttctccatcgaagctgctctcattgctccgtcatccccaccacagtgacgttaaagcaccaccaccacctcctgccggtcttctaaggtataaattaatatttatttatttattttatttattttatttattatttaaatatatatttatatatttttatatatatgtatttgtttttaaaagttgaatgtatgtatgtatatttttttatgttaatatttaagaaaaaaattaattacttaatttaaagttagttgttattgtataaatttaatgtgtaagaatttcatgtgttttaaagtaatataatgttttatcaagttagttgttattgtaaaaaatttaatgtgtaaaaattatttggagaaaagtttttgtaataagattttggtttaggtaaaagtttaatttatttaatttgatattgtaaaattgttatgcccgaaattcggctggaggacaagtatcaagataaaggaaatgtgaatcggtg

SEQ ID NO: 252377 - DNA, 1870 bp, Cannabis indica
aaaaaaaaaaaaaaaactgtttctattttcgtcaattaaattgtagagatatattaattagctagctactgaaaaaaaacatcgagtcacttattggtttcttcttcttttttgtgtatcaattagactgctttggagggaaacttaaagatcttgattattaaagtttacgctataaggcttttatacatttaataatacatactaaaatttcattatgaaggaatgttttaaaaaaagtgcattaattagggaaactttttagttcatacattaaactactcatatatatgttcttttaattaagtttgtttataagaatttatatataatagattgaccggtatatatgtaataataaaaaataaatggcattgaagatcaatttagacttgttaatatatgaatttaaactaacacaccaaaccatgtgtttttttttttctgtgtacaatgtattaaactaacacaccttaccatgtaatattccatgtccaataaagcggaaagcacccatttgaaaagcaaaatatatttatatatatcaagtccacaataaatgaaataaaatatatattgtacgacttaatatggatttatggattgaggttgaatttacttgatttgaccctatgccgaaaccaaacagagaaactgatctaaaatgcttaacagtgataaccttttacacttttgaaattcagtgttgaagccgtgacacgtgtagagatccacagcgattacaaaagatggcggcattcttaattgacggcgtggatgaatcgtgttcgttactatttgactgtgaaaatccgcagacgtagtttgaaataaggagaattgaccagtatgggccctacagcccactcactggccttcaccttaagcccaagtaatttttttcattgttacggttttcggctgagtcatcgtcagcacacgttggcgccaacaaagcagatactcaccagtcacccccaatttaatgcgcgtgtattttaatcgccgcaataaaaagggatgcccagcacacagggatagtgactggctagcaatagtggacctaccaaaattccacctgacaaggtgagatcagatgtgttctcaccttaaattgtttactttaaactctaaaagttactattttgatttttttgggttaaataataaaattgagcttatatttttttttttgaaacagtacaaatataatattaaatttcaatttctaactatttttctttttttgtaataggtacaaatttgaaaaaaaaaattaacataacaaatatggaaagtataattaatttgttataatacttcaaaattggataagtattaaattttattcgataaaaataaatttaaagaattatttagtattattttaaaaaaaatatatagttcaatttattatttaacaaaataaaaaattcacttaacaattttttaaaaacagaaaatttaaaataatatttatctattttttatattcttgattcatataatttgtggtatttgaaagggattttttctataataggtattttagacttaaattttacatttttagcttagtaagggaaattaaacaaaaaaggaaattcaaaagttttttttttcaaaaatacctattgaatcttcttcctcctccgtcaatgtatataatgtacgtatataaattacatgatgagatccatctatcaatataattctcttttgatcttattcttcacattataaataatatatatattttatatagaaatttttttgaaggctgtgaatttatgtatgaaattttatattgggagtatatgttatatttgtttaaagatttttttttttttaaaaaaaaaagagtagtagt

SEQ ID NO: 252378 - DNA, 738 bp, Cannabis indica
aatagattaaagacaaaggaaagacttgttaaatttggaatgcaaattgagaattgttgcaggttatgcaacactcaatcggagaacacacaacacttatttttcaagtgctcgtttgttggacaatgtttataagcagtcaaatgctagctggttttgggttcttctgctactgatctacaccagatactgaggtggattaggaaagctaaaataagtagatttaggaagaatataatggctgcagtgatagctggactggtgtatagcatttgggggactcggaataagcttgagtggcaagaagaacagcccgattatggtaaattgattgagggcttgaaatggagaatcaaaacccgaattagcatgtttttgcctaagaaaatgagttgtaaagatagggattggttttatggattgtaatgatgtaaatacaatatttgtatagatttaaaatcttgaggctccctttttattttagtgttcttaggatgtaaattggtttgtggaatataattctctaattcatcaaaaaaaaaaaagcaaaaaatagagtgagtgataactattagttctggcttaaattaatttattaggcctaagcggaaaaagttatgaaggttgtctgatttgttgcacaaacacataggctcgtctctcggcaaatagacacaagatgtgttatatgggtcatagatggtacttgcctaaagatcatcctgatagacaaaagaa

SEQ ID NO: 252379 - DNA, 714 bp, Cannabis indica
ataatgtaaatctcatcgtttatgtcattgaagacacaacgctccatctgacaatcgcaatccttgacaacaaggtgaacttcaacatccaacgccatttgaatgtcagcttctatctgagagaactgactcgtcgagaatgtgaatctcattgaaatatgtctgaaactgattagtaaaagtaccaaaaatgtgccttcctatagcgagatggatgcctcgctattagttattttgggtttgcccgaatattgtacttagtttgtatactgtgtattatacgctaagtgtcttaatatcaattatatctcgcctacgtttcttcatgcgtaatgaggttgacgcctcgccttacacatccaatggcatatgatttctcgttaatgcatgagacaacagtttgtaaatatttatctcgcataagacgttatagtcagcgatttgtaaatagactctgttactttcgcattaatgattgattccattttcaaatgtaattacgttacattcattgattcatattcttctcaatttgacacgtgtcctcttttaaaacgatagccaaattttgggtataacagctaccaaattaaatttgaaaagatagttgttaatccttaattgacatatagttgggagaaaaagagtatattttttgaatagccttactggaaggataatttattacgacacaatctcgatgtgatgcatatt

SEQ ID NO: 252380 - DNA, 1515 bp, Cannabis indica
agttacaatttcagagacaaaattcgcttttgtagtagggaggcaaattttggactcggtattgatagctaatgagacggttgaaaatatagaagcaggagcaagagtggtatggtaatgagaattcttggaactagttatgttacaaaagggttttggagaaacatggaggaaatggataagaggatgtctttcatctacatcattttcttatttgtcaatggaaaaccaagaggaaagtttcttgtaagcacggtgttcctctgccacaagtgaggctctcaatcttataacggggggatgtcattctatgataagtggcctctctctttttccaaaaaaaagaggaaagttcaaaggttcttggggacttagacaaggcgatccactcttgtctttcctctttacactagtgacggatattctgggtagaatggtggatatggcagtagtttcagggtctttatctggtttcattgttggaaaagataaagttcaggttagctatttacaatttgcggatgatactaatttttgtgaatgatgaggattcacttctgaagttcgaaagggtcattgaaggattctgcgccatatctggactaaaggtcaatttaaacatgagccaattattagggctttgcatagatgaaagggtgggtagttggccgatgaagtaccttagaaagaaagaagtttgggaacttgttttggataaatgtgcaaaaagacttgatgggtggcaaagctcattcttatcaagggggaatagatacacacttattcaattagttctctcttatcttccaatttattttctccttgttcaatgtacccactttagttatcaatacctttgagaagatgattagagatttcttttgggaaggtggagacgtagcaggtagtgatcacttaattgcttgcgaaatggtgtgtagaccaagagatgagggtggcttaggcataggaagactaggtttgagaaataaaagcttgctgatgaaatggcttttgtgatttccccaagaacccgagtcgttgtggcataggatgattaagagttgttatacttgggaaatagtgtgtagaccaatagatgagggcggcttaggcataggaagattgggtttgagaagtaaaagcttgctgatgaaatgacttttgtgatttcccatagaacctgagtctttgtggcatagggtgattaagagtcgttttggcaagacagacaatttgtggaatagtgtcgtgagttggaatttcaagttcagaaggaatttgttaaaaagggaaatgccaagtcttatcagtttgttacagcagttggagcatgttaaattggtgaatgtggacgttgacatcagactttggaaaccagtttctcgtggaattttttcaagtaaatcagcctttagttggtttacttctagccggagtcaaaattgacctctttggtctaaaactttatggaaaaagtagagttccctcaaaggttaaagtctttgtttggtt

SEQ ID NO: 252381 - DNA, 766 bp, Cannabis indica
ggagcatttgtagaccgctataactaactaactcgatcacatttataatatatatatatatatatatatgaataatgtattttttttttcatgtttatttttttttcctattcttctccaagtttgtaaaattttaaaaattgcatattttgaaatagaaataatacttaaccatgttatgcaagagatccatgaaaagtttgcccctctaaaatcaaggttttttatatgccattattgttaaacattgttaatagtatcgttttcaacttttggtcttcaaaattaagtttataatatcgttaaatgtcgttgaacatcgtttaatctctaaaatcaaattttcataaaactatcgttattataacattattatgcatatatttctcacctctacatcaatctttttatttatggagcaatctttaagcaagtttgatgtattttttttttcttttctatattttgatgatttttaagatgcaagcgttttaaaatgtatagaatcttaaatttgaagatatgtccgtttgagacttattttaagtgaatttaaccctaaccatgtataataaaaaatatattttttttttcataaatatcaaaaaagataaaaaaaaaaaagttaacaataatacaaatttataatttgtcaattttttattgaatttgaagttttttagtatggttagtatgtctgtctcttaaactttttacactatctaattgtgtattatagtatatgacctataaataatactccttg

SEQ ID NO: 252382 - DNA, 850 bp, Cannabis indica
atgcattttcgagcatgaccctggagttactgggaaagacccaccgattcgagaaatctaaccaatcacaacctacgaacatatcacgcatatccaactagcggtagatctcaagaaacagctgaggaatctcctatatctcaagaggcacgcctttttcgcgtaaccattgggctaacggaaactcctcactgttttgagaaaccttactagttgaaatatacagttttatgggaaaagggaacactgacatatgtcgcaaatggctgggtgtatcgcagtacctcaagggacatgcgattatacgcatgagcattggaatacggcgacacacccaccattcaaaagacttaaccagtattcccacgcaaaaatacaaagattgtatagaaaaccctaaattctaaattatgggttggaatggccaaacctccagaattcctaaggaagtatgcatgcgagaattcaggatgttcatcctaatactcgcgagtattcacaaaagcaagtaaaaaaggtgcgaatattcaaagtgttcttcctaaagttcgcaattatataaattacaagtctattttctcctaagaattacccagttttagcagagaaataaggcccaatctgtattccctaagataacatgcaattttccactcttcaaaattcgaaatgcaaagtgtttttcaaaattagaaatcgaatacgcaagtagtttcgaatctaaccttgagttttgatgattctccctgtgatttgtttcgatcacttctgaaacttaagagatttaagaagaaaaggcagaaatctggatgaaggatttaagtttttgaaatttcagagaaaaagaaaa

SEQ ID NO: 252383 - DNA, 558 bp, Cannabis indica
agtgaatggatcatagtctaaaattggcttgaagcttcagactttattttcagtcacaaacggagcatgttgaacatccaaaacttagaaatttcaatttattttggaaagtgatcactattaactcttgatcacgaaattaagagatgacaatgcaatctttgacccatttgaggcaataggaaattactctaagctaaaagaagtttcctttcttcattagattttttcatttttgctcaaaaagacttgcagaacactaaaattacttaaattgaagatctccaaacattttttttagaaaacaaaaccaaacaaaaccaaacataaatatgcacaataaaataattaaaatactaaaacacatcctaaattagactataaaaaatacataaaaataaacctaacattgtgctcatgggatttcagatgttcttttacgcctaaaatctcggcatctataatctacatattctagctgttgaagttctaggatttgcaatacagtaaagaaggaaatttaatgtactctaatagtatactttttctgttatccag

SEQ ID NO: 252384 - DNA, 550 bp, Cannabis indica
ttaaaaaaaaaataaatgctttaaaaaggttgaattttacatgttgtgtcatttttgtgacaattttttctcttttttgggtattattatttttatatattattttcaaatatattaaagattttataatcattactttaaacccactccccaacctttcctgtgcatcttcttcttctagtttcttaggcagttacaagttgtgggtggttttttagtttttaccgagttggtcacaagcccgtcagaagcaacctcagcagaaagccactcttccagagtcatttcaaaatttttcagttgacataccattttctcaagcttccctcttaatttccccaattttccttcttatttctttataaatcctactcatcctaaatctaaatagctgttagacattcatcactatcatccggtacagctaaaaatctcccaatacaacctcagaaaacgaaacccaaaccaacaatggataagaaaagttagaaaacaatatattttaattaaaatgttttggaaaatgagaaaacaaaataagtaacttgtt

SEQ ID NO: 252385 - DNA, 618 bp, Cannabis indica
aagtttaaaggcataatttggtatatgtcaaaattcggggaaaaaaattggtaattaaccttcatttttggatagcagaataaaattggtattagcttgacagattgggcttctaggggtctgcccaaagtaggccttgtaactatatctcaaaagaagcttttatgagcggaatggactctttttcttgtttagatgtttcaccttacattctataacaaactaatcaatatctatgactaaggcaagtgtagaattagaatcaaatatattacaatattaactgtgaaaattatatctactataacaaaagatactatttaatataaatagtatataactgaagcgagcattttttttattaatatgtacacagaggtagagtttgaaaaatccttacccaaaaaaataaaaataaataaataaaaaattaaaaaaaacaaaaggaaagaaaaaattagaattaaattgactatagaataagagggaataagattaaattgacttcgttttttttttttttttttgaaaaccaaaagccaacctgaattcaagtacgaattaataccaaaacgcttcaataacaatgcttccaaaactctttgacactagagtaaa

SEQ ID NO: 252386 - DNA, 1673 bp, Cannabis indica
atctcccgttcaactgacaagtgcatcccgtttttcaacattttgaaaaaatgctagaagtttgaatggaccgaaaactgcgatgaggcgtttaagaagttgaaagaacacatggcccaaccaccagtgttgtcaaagcccgttcacgaagaagacttgtatttatatctagccatctccgagaatgcaatcaatgcagctttggtccaggaagaaggaaaggttcagcacccagtgtattacgtcagcacacgcatgataggggtagaaatttggtaccctctgatcgaaaaaactagctttttatctcttgattgcattaagaaagctgatcgaggccatacttttaggtgcactccatcaaagtatttacaaaccacccgcttcgacaagtcttacagaaccctaaagcctcagggagactccttaagtgggccatggagttaagtcaatttgacatacaatacattccccgcatctcgattaagggccatgcgcttgtagattttatgtagagtgcaatgaaattgaggctaacgccaatataccaacttgggatatgcctacatggagagtgtatgttgatggtgcgttaaatgagaatggatcgagagttgaataacaatgatatcccccgacagattaagactccaggccgccctaaggttcacatttctgacttctaataacgaggctgagtatgaagccctgaaagcaagattaaaattgcgtaaggctgtaggagccaacaaggtagaggtatacagtgattcacaactggttgtcaatcaggtattgagagaatatcaaattcgagtggaaaagatggtcgcttacgtgttagttgtaagcaaattattgcaagaattcaaggaatataagattgttcgaatcccacgagaaagaaattcccatgcaaattatctagctaagttagcctcaaacaacgaggtggaaaagctaggggtggtacctgttgaatacctcacgaagcctagcattaggtcaaaagaggaagtggccactaatgaacaagggtcaagctggatggaccccatcatcaagtacataacaacgggagaactaccttaagaaaggactatgtccaaaaaattacaacaccaagctcaccgatacttaatgatggatggtatcctctatcgaagggggcttagcatgccgtatttaaggtgcgtgtcagatcttgaagctagagggattgtacaagaagtccacgagggattctatggagaccacaccgaagggccgagcctttcaaagaaaattttaaggcaagggtatttcaggcccaccatgaagaaagactatatagactaggtcctcaaatgcgatccatgctagagatttgcaaatatcccaagatccccgcttaacaaaatcaccttaatgactagcccatggcccttcacggtgtggggaatagaactcattgggtctttgcctaagaggaaaggtagggttaagtatgcaatagtggcagtgtattactacacgaaatgggcagaggctgaatctatgaagactataactgccaagaaagccgtggactttaccacaaagaacattgaatgtcgacatggattgcctcacaagatagtctcagagaatggaaaataattcgattatgatgagttcacagacttctgcaacca

SEQ ID NO: 252387 - DNA, 2648 bp, Cannabis indica
attaactgatgaattagtagttagctaattcaatccaatccaatcttacaggtacccaatatatcaaattccgagtaggaaaaacgtgaaggacttatccgcaagcttcctcacttatcacacattgtcctcatctttcgaaggtagagaatcgctcaattatgtcggtaatgcccggctcttgtttgtaaattctttcttcttatgattcttatgctcgatcgatgcttacctacgcagatttggcaaccgaaaatgatggggtgagtaactcggaagaagtaatggcaatggagaaagctgagaaaggtagaatatctcttcctcctttcgggttagcaacatacaagatggaaggagatgtatggttgaaaccggagacatcggactacgaaagggtagtcaatctctatagtgctgcagattcatggttgaaacaacttaatgttaaacaccatgatttcaacttcttcacttgccactctttcatgttgtaaatcttcgggttttctttttcttcgaaaattattttgttttgttttgtttttttgtttttcggggtgtatgtacttttactttacccaaccgcctcgaaatgtctctctctaaaaacacttttgttctgagaacttaaggattgtagacatgaatcattagtgtcttttttccaatgttgtaggagggaattttgtggaatgagttgttaatcattagaaaaagtgtgtaaaattgtaccaaacttacaatctttttttgcttaagaatgtgtagttttttcttcttttagtagtaattattgatgtttattgatcttcttaaaaaaaagtttatttcttttgtgttaaagttatgattttgttttttagttatgattttgtttttttagtgtaagatcgcaatgaggaaaacaagaataaattgattgtgtcatgataaattaaattgacaaattattttgtaataagctaaatgaccaatatatcgagatgcacacaaataaataatgtaaattatttaagaactaaagtcgatttaattaagaacaaaatattcatctttattttgaaagtaaaattagtgtaacaaaaaaaaaatcatctaaccacttgaggctagctcaagtggccatagtgggtgtgtgtgtgttggaggtcctgagtttaagttccaagtaaaacatcgttgaaatatatgaccgtttaaataaaaaaaaaaaatcatcaaaacaacatcaaaaaatattaatttgtagctcgattttttcactcctggtcaatgccctacaatagagccacacacacactccgaatacataatcaacaaccaagaaccagaaccccaacccgactcctacctttatctctatccccatcattgactcgatgattaacaaagctttaaattaatttttttgaaatatttattttaaattatagaatttatcttttaatttcgagagtataaatttaggcagaaaataaatcatattaccaccatctaaaaggcaactcaccacaaaaaaatctaaattgtgttattttaaaaaataataataacatacaattttacattatatcaaatcaaatatttcactcttaacttccaaacacaaaataaatgtaccttaaaaaaagacaaaagaaaaggaaacaataatttgaaggtattctatgtaaattactcaattaaatacaaagcaatggatgaaagtattaaagtagctcaactaattaagttaccaagtataaagtttagtagaagtactctctactcaatactcaattaatattaattcattcattattatatatctataaactataatctttcttagcatataagttacctaaatatttatattcacaaccatccatttcagattggaatccaattccttcctaaaccacacacgtgtcactcacgtggatatcctccataatcctaaacgcgttccttttctctttggaatttcttttataaaaaaatcttcaaaaataattaagtatagagtaatttgtagtgtaaatatttaggtttagatttcatgagaataaacatatcctaaattaaattttaatgaccaacgagtttgtgttttcatagtggtaatattaatccccttcaacacttagattttatattctttcaaagcctacttcctccaattttaccatctcaaactcaaactcacacaacaaacattctattagacggtatttaattgtaaagaatgaaaacatagttagaatataaatgacattctaatactttaaatgaaactaaataatgtaatagaataaaaattatttcatttttatagtattctattttattacctccaactagctaaacgtcaccttaagtttaactttttgatggtaatattacttacggttaagttttattattcacatgtcattttttattggtacatataaattaatttttaaataaaaataaaaatttaatgatttgaacactgttatatgaacttaacatttataacaacaatttacttaccaaagttccagaaatataatttaaatattattaccatcaaaaactaaatttaaacatttaattgtaactgagagttaaacttaaatatttatataggattttttttattattatttttacacttcaaa

SEQ ID NO: 252388 - DNA, 713 bp, Cannabis indica
tttacttacattacacttttgtaaattatgtgttggaaattatttgtgtttggatttagtttttatagttatcatattcttctttatccaattcatgtgaacatgaagctagaacgctactaggacaagtgttgaggaaacaagtgagtgagagagagattgtgaccaaaattactaaggctgtgtttggaagtaagaatttgatagggaaagaaaaaagtgaggaaaaaatatagaaaggaaaaaattctaggggttatttggtttcataacttaaaaactgtttttaatttttaaaaacagaaaacaactttcaaaaactaataagaggcgtttggccaaatatttaaaaactgttttttgaaaactgagttttaaaaaactagaataataaaaaacatcaaaatgttattaactattttcaaaaatatttttttgtctaacataattttttttttatttttgctcacatacctggacctggatcttgaatccagaccctggacccaaacccgaacatggatctagaccgaacccggactcagacccgaatctggcccagacctggatccggacttggacctggaccacggacctagatggaccttgagatcccaggtgtcgtacccgaccctggccttcaacctcggactctgccctgaccctggacctcgaacacgaccccagacccagacagaccccataacctggac

SEQ ID NO: 252389 - DNA, 551 bp, Cannabis indica
tattttttttttatttttaaaaatgttgacttatagagtcatgccagggacgtttaggaaagtatatcccgacatacttagcgcgtcactatatcataattatttatttaagtattttaaataaatttaaaaatatggtatagtgacgcgccagacatgttgggaaatgtatacccaatcacattacgcgcgtcactatatgttaatgaaaaaaaaaaagtaaatatcctgataaaaaataattcgtgtgtggaccaatagataaagacattaataaataaataataaatactaaaaaaatagcaaagcaagaaacaaattaaaaaaaaattatcaataaataaaaatcagcaaaacacacacggcaacagctctaatttttttgaaaggtaaacagctgtaaaagataatgtatttcataaataaataaaaataaataaaaggtagggtttacacattattagacacaaaacacacttctctttcttctccctctcgactgcctcctcttcttctccagggaatggcgtcttcgagagcagtctcctcca

SEQ ID NO: 252390 - DNA, 796 bp, Cannabis indica
tatatcatatttttatataatactatgttgaactttaatttatactaaaatattatatatttaggtgtctataaaagtgaataccacatatagttttatgtaaaaatattgcataaaataaaatcaatataatacaatacaatacaatacgacctaatacggcgtaacaaacgagcccaaatagggctgttttgtagctaatcacatgatgaagtcattaagtaaatatttttggcagaagattattatagttctttttttaaaaaaaataaataaataaataatgataataattctctattttatagatgaaatttttaagatttcttccacgcatttcaccaatgatttcttcttcaaatatcccttaccaaatggactcgaaattggtatgaacatacaaacactataaaagatcttacttttaatcacaacaaaatttgtgattaattattaattatcattcctatgtatagtgattaaaagatccgtgactaaagatattagttccaaattaaaattacaatttgttgtgactaaatatattttttagtaaattagtgacaacttatatataaatactatatttttagtcacaaggaatttttggttgtgactaagagtcacatttagccacaaaaaatttatattgtgattaaaaattatcactaaatgtataactgtttttggtaatgaaaaatttacctttgtaataaatcgaaaatgggataatcaccatttgttgaagattgttggagaagtactgtagtcgtgaactaaagagccctaaaaattt

SEQ ID NO: 252391 - DNA, 2423 bp, Cannabis indica
aatgacttgacattttaacattaaatacttatattttaaaaatataacttaagttattatttatcgacaaaaaattaaactagcttaaataatcatttacaataattaaacttatgcaatttgtaaaagaaactctagcaaatgtggacagttagcttcatgacaaagttcaatattttcgtggaaagtgaatatagtaaagacaccaataatttattaaaaaagaaaagctacctgcaataatgaagaatcgcactgaggcaataatgaagaatcgcactaaggcaataatgatataagattatttttttaaaaaaaaaatgttatgataaaattttaataattatatcaaatactaatttttataaaaaaaaacaaattatattttttttatataattttacaatattttataaaaatatataaaaataataaaaaaaaattaagtaacaaaaacaacaatcaaaataacataaaaaatacaatacaaataacaaaaaaggaaataaacaacaaaataataaaaataacaacataaaaataatattaaaataccatttgtataagtaaaatctaaaaaaggtcaaaattataaaatttccgtacagaccgtattttataatttttttattatttttatatttttacaaattatccctttattttattttaatgttactttttttaatcatattttatttactttttaatgaacttagatgtattaatataaaattaaataaatatttagttagctcaattattcctacattattatttgtgcgcaaaaacatgttattcctacactattatttaagtaattttgctgcaaaaaaaaatgaataaatactattttgaactcagtattttgtaaaatttattaattagatcctttattttgttaaatgagaaaatagattctatattttctaaaattgtataaatagaatcctgaactgattttttttttcaaaataaaacttaataataatctgatttagaaatgttatggcaaaactggttaaattttttgtatctgttcgtattaaaaatgatcttaaagttagtatattaaaaaataaacttttgaaaattgagttcaaaatcgtatttttaccattttaaaaaatataaaatccttattgttagttatcaaaatagagaatccaattaataatatttgtaaaatacagactacaaaacattatttacccgcaaaaaattcatcaagtccatgccggttacaaacgttatactgtaaatacatgttaatcatttgttttttttttcactaagaaagaagattcattcaagaatagagaaggcaacctcaatgggggacagttctcccaaatcaaattcaccactcaccagcagtgattttagaacaatgaaaacacttagcattgctaggtcattcaaataattcttaactaaataataaacagcatattacaaacaacaaaataaattcataaccatatttatagtgatatatagacacccacacaactttttttttccttgatggaacacacccttgaggtgattaattaattaaaaagaggaaaatccagagacaataatttaaccttttaatcaagagttaagaacctatattagcaagagcaaattgaactgcattgttgactgaattattaacagatataaatgacaatggattgaatggaattggattctctcgattggtaatatcaataatggatggatagtactagattccagtattcaataagaacagtccaaggcataaagtgacctaatctttttaataaaatatagatatttcatataaaaatatgttagctaaagctactttagcattgttccaaaataaataaaaaagtgactttagtcacttcagctctgtcccggccttccctactggcttggtggggatatatgatttttaaagaattatttataccacgtgaattttttttttttttattgtgggacagaattgttttaaaaaatattgtatttttttctgtgttaagtttttactgttgttctacagttattttttagttgttccactgttgtttttatttgctatgttttgtgttacactgttgttctataaaaacacaatacttttaaaaaaaaattcatgtggtagtactttataaaaattaacctaaattttaatatttttgtaagtagtctatttttaaatgagttttgtcgtacaaagcacaactgcaaaaattattcgtattctattataattattaaattaaattaaataaaactgaatttttattttacttattttttgttaaatctcaataccattaatttaagtagcattttgtaacattttttatttgttaaaattggaaaagtaaaaatattttttaaaaaaatatattatataaaattgttttcatttttcaatt

SEQ ID NO: 252392 - DNA, 1410 bp, Cannabis indica
attcgggtccgggttcggttttaattttttgaacctaaaacccgtgaacccgaaacccgccaacccgaaacccgataaacctgccaacccgtgtacttatatgtcttcggttatttcaaataattgaagacataggtctccactaacctaacccttatcagacataacatctgtaaatatatacatatttataaatatatagaataattttattaagtgattatgtttttgttcctatactatacatacacttttttaatcattaatttatatgatttttaaaagtctagattgtgtaagatgtatttatttgtaggttattaaaattttttttaaaaaaaaaaaaaattctgacacccaattaaaaaaaaataacaaccaatcaaaattaattttatttaattttcttttaaaaactcaatttttaatcttatttatcctttccccacgagccccatttttctatttccccttttccttctaagggttctaacccgccacaaggggagaaccatttccacccaaaacagccaacaagtaagcagttgtaacgttcattctgatgaagcagagggatttcctcacaagggaggtcgtgcggctgagtttgcgatactgagagagatgactgccagttcacttggtagcttatcggagaggctgtcgttgatgaggttgaggttttggagattctagagatgacccaactctacagggattgatccattgatgtcattgtcagcggccgtgaataatttgagactggaacagttgcctaagccgctggaaacggaccgtacatctggtccgtaagttgcccaccatcagtatcggcaaacgagagtgcattcctaggtaccgtaagtttcttattggaatgcacctaatgtgagaataaatgcgcccattgctgcttatgagcatcaacatcagcaaaacatcttctattctcactttttcttggcagattatgatgcctttgtctaaaagcaaattgtcgatacaaactatatcagcagctattgatttaaatgctctaattttttaaaccaaatactaattacactctattaacaactataaagaagtaaaaatagagacccaaatatgattgctttttttttcaagaaaaaaaagaccacaaaacccaaacactatttacagtaccttataaaaataaaataaaattatgttaagtaaatgatatatataataattttttgaaatattctcatttattagctgtgttttagcaaaaatcttacttttaaatttagttataagtatctagtaactaagggcccgtttggcacaagttttggaaaaactaaaagctgcttttcaaaaatgccgtgataaaaagatatttggtaagcagttaaaaaatagcttattgaagaatttatagaa

SEQ ID NO: 252393 - DNA, 816 bp, Cannabis indica
aaaaagtaacaatattataaaaatagttccagctcaccaaataaataaatatacgaacccaaataaaaaacaatacacaaataccacttacacacaccttcaacctttcctgggcaactatcacgcaacaacctaacgcaaccaaaacgaaaattcaaccagaaagagaactaccattaattatagcgagttcacatgagaacacggccagaatcaatgaaaacaggaactgtttcgaattcataaaaaaagtgtagaaaatgactgtgaaactaaaattcaaccaaaaatccagtttaatttgcataaaactaatatcctggcttcaattttcagatctatgaaagatagatctcaaaaagttgatttggagttcccaaataatccaatcaagtataatccaaaaaattacatcaatactatagtaaaatgtttatcctaatgtatttttgttgttttccaaatttctaatggtaaatttgttcatattaaatcataaagagacatgtagatagagttacgtacgtggaaacattgttatgatctttaatgtttcataatagttgcattcaagttgcataaatattttgctgacagttatttcgtctgattgaaaccttcgtctgatgcaaccttcaaccaaccacccagcaaccaccctacaactatcctctgattgtgtaagtgatagtgtaaatggtattttagtaattaaaattacataaaagttataaatgttgtctttaccttatggaagtatttctgtaaataaagtgtcaatttatattttctatgtaataattcattttcttttct

SEQ ID NO: 252394 - DNA, 652 bp, Cannabis indica
aaagtgtgttcttcaccatttcgtttcaggggggatgttagcattactcagagttagttagtccatctgttaatacaatttattttactgttgtaacaaactctttgccacttgtttcttggctgttttctggttctctttctttctctgtaacaactccttctccatataaataacatctcttctctagacttgctcaacttttgcaagtcttgtgatttctatctttgattgagtcctgttagattgcatagataagttaacattctacataaactcattaattaatataaataaagaattgattaattaattataagtcttccttaaagaagtcttcctccatcagtctttttttatattataagtacttgagatgacttgaaattttatttactttcaaatattaattaaagcaagcagcgctatacgtggaaataattaattaacatgttctaagtttattttatatgaaattaaatgtaataatatataataaagaaggactaaatttattctcttaaatattgactaaacaaattattcaataggaatatatatttatccaattatcatgaaaaatatacacatttatatatatactaggtgattgttacgtggcaagccacgtagtgttagttttatttaatat

SEQ ID NO: 252395 - DNA, 662 bp, Cannabis indica
atattattttggatcttgtgtttgcaaaagttattaatcggaccttctattttgttaaatcacaaaatagaccctacatttttcaaaatagtaaaaataggaccctaaactcaattttcaacaattttatttttttaattataactaactttaacacatttctaacatggacagatacagaaaatttaaccaatttttgttcatatcatctctaaatgagatttattttaacaaaaaattagttcagggtcctatttgtacaattttaaaaaatataaggtccattttatcatttgacaaaacagatactctaattagtaacttttacaatatacaggatctaaaatagtattaattaccctttatttattgctaaacatgtgttatttaatttagaagtgtatattggctgaagtataaacagaaatgagtccttgctcatattactcacccttctacaatgaaatttttttttctttggataatttcaaaaaaaaatatataaaaacaacaaaacaaattataaaaatacagtctgtacggattttttgatatttttatggttttttaaattttatttacatcaaatacactcttttggtgtattcttttgttactctttttattttgttgttgactttttgttatttgtatattttttt

SEQ ID NO: 252396 - DNA, 944 bp, Cannabis indica
gaaggagaaaattttaagtagaagcaccagcaccgaatgagtgtgatctaaagttcaaattatgatgtatattggtattgtgttgtgccattccccctagataaaaaattataatttataaaggagaaatgccatgagaccaggaaaagaagcttccattaagaatcataccaaatatgttctaaaaagtactagaagaactttaaaatatagaaagttgtagaataaactttaaattatttagactaagtataggcagttctagaattatttacatagtagtagaaacttgttaatgacttaaaagttagaaaattttagaacgatttcgagatttcctctgtagtctataactataagtatggggtgtggctaaagtgcaaatatgagagaaaagtcaagtgtgtgagattgtaagtgtgttagagggtcatgttgccaaaagtgttttaagcttgtattactcttcaatgataataataataataataatagtgttgtaattttctattcatcagcttctgacatgttcaatatcattgcaggcaaatttcatatctacttaagtcaaactccagaaacctcaatatctctaagtaataagagtatgatatgataacacaagtgaaaattagtttttatgggaattatgatacaaagtgcaaacatatgatgtataataaattttgaaaacaccagccgaatggggttgaaagtacctatcagatgtcacaaatatgacagggagagtcttctcatttgcacctaaagcaataattctccatatcagactatcatgatacataggtccagacactgacgactctccatcctttagaattgcatttcgtaagacctcaatgttattgataaccagttttggctgcccaacatgatacaaacatcagacgatcaaaattccaaggaaaataggcaagcactaa

SEQ ID NO: 252397 - DNA, 519 bp, Cannabis indica
aagggaatggcatgtggtgaccggaagacgaaagtaggtcatagtataagtggggattgcctgaatgactgacttgagaagggtttccttacctcctttagaaaaaactttatgtttctagttgttgattttgatctttgattttgttcaccgtattgggatcccagttagggctactcttagcttgttcgagatctttctcaaggcgagaaatgcgccttttaaacttaaattttttttttgtggttccagtcatttaagtgagcagcacagttagtttgagtagcaaccaggcgggggatgacctcaaggttactagaagggcacttcccagtcgaattcagggtgttatcccaattggcctccgagagccaaacattttcaaaaaagaatcgcttttatcttgatcaggggaaggcctggttgtgcctttggtaacaagctcgagagcacgatgataagaaccgaagaaacccaaatgtgaggggagagcatccgggaaaaggttagaccaaatcg

SEQ ID NO: 252398 - DNA, 689 bp, Cannabis indica
aatagcgagtactcaaagaatatagtgtatgatgtatacgagtattgtaaatagtataaaatagacacagaaaagtatagtggttcagcaggagcttcgggcttggcctgcctaatccactgttgaaaagagtactctggctctgtttctttattcagatcagccccccttgaatggagggggaagcccctacttataggtagtaggcatcggttacaaataatggccataatgagaccgttacaaaataataacaataatatgcttattaatcaaattaattacaacggttataaatatatgtaacgtttgtaatgaatgctccttgaatgcttgactgttgacttccgttgattggtctatgtatttgcgccttttcctattgatactgcgagttcaccaaatatgcgatgtgtgccttccttaatatagcgaggtctctttaagttaatattgcgagatcctttctttcggtactgcgagtactataatattgcaaggcaccttcaatacagcgagttctctatagacaagtctttctcgcggggagggtaaatttatgcctataacacgttacaaactagccgtaaatacatatttttataaaataaaattctattgtgctcgtcctttctgcaaaacattacaactttatgaaacaaagacatgatttttttataaaaaaaaaa

SEQ ID NO: 252399 - DNA, 542 bp, Cannabis indica
attttttttttcttctttttctttgtctttgtctttctctttctttttcttctcgacaggtccctggccctcaaaatccatatcactatatcatatcagaagaacacattagagccaaaaatacacacgaaatgcatcatcaacaacacaacaatggtttacttagctaccattattgcaatgaaatcttcgtatcggatcttcccatcggaaccgacctcaacctctcggatccactcatcgaattaggctggctcaagcttctcgccaatgttggttaggatgtgccggagctcggtgacgaagacgtagccagtgcactccttatcgaggaccttgaaagcatcacgaagctggcgatcgaagggttcgggcttcatgtgcttaggcatgaggtcctagaatcgagggaaattgaagggcgcagtgagcttttcctcggcgataatggatttcatctgggcttgggttgggtttcctcccagagaccgcatcaaaatccctagcttcgactgtaacgccataatctatagggacgccac

SEQ ID NO: 252400 - DNA, 800 bp, Cannabis indica
acagggccagccctgaactaagacgaaagaggcggccaccccccaccactcagggtctcattcgaaaaaaaaattaaaattatagttagtaataaaataaataataatacttttaatgttaaatacgtgttgtagcttagtggtaatttaattagttaaacaactaaaaagttgagagttcaactctcaataaccttactttttcactgggcctcaatttttatttttggctaaggcccaaattaacataggaccggcctaagtgttgcttacagctcttcagaaacccttctgtgcttctaccattaacttataaagagcatatccaccgtgatggcagccgggcattttcgatgtcatatcctccaattccacctgattttagaacaaatttatgaattcataatctagatataaaaaattttgaaatccatcagttaatagtgtcttcctgcaacttaaactaaccattgagactgtatagagctgagttgactcaaagccatcttgagcactagaatacaattctttgacttcattcgagtcgagagtgcatttgatgaagaaaaatgcagctggtctaacattcaactccctgcgggatatcccaatgaaaaccggctggcactgcattaggatgcaaagttcagacttggacaagtgtttgtttcaagcatcaatttatgaaattcatttcaacaagtaaattaaacaagaagaatgtgactcgaagcatgctgtatgggacagaccatataaccattcagctggtgtgacaaaataggcactatggtttgttt

SEQ ID NO: 252401 - DNA, 565 bp, Cannabis indica
ttgtttgttcctcccaagcttaaccgatttcgtttgcttttcttttgcaatcacatggagatgtatgtaagaaacttaaattttcttttagttatgatgataaatagtttgtcattgaaaaaaaaaaataagaaagaaagaaaaaagaaagaaaagaaaagaagagagagaactaataatattaattaatttattttaataataatacaaaaagaattagttaataatttcaggtagatctcactgtgagattagctaacgattgttggctaatctcacacaacattaacataaacctctgtaacgcaaaattaagggaaatgtagaacagatgacaaatttaaccaatttttaatcttctaattgtgtgaagaattcatctccaacttttattatcgtgtgcgcagagtagagtgtcattcaatctaatccaatagtgattatcgtctctagccgtcatcttcagttgctatcccatgcttgaagttcgtcttaactactcccttgtctttcaaattttattttgttgccattgatgtttttgttaagcatagatttgaaagtt

SEQ ID NO: 252402 - DNA, 979 bp, Cannabis indica
aaatctcctaaatctaatccatttaaatccaatgacaattcttctccttctactaacaccgggagagaacttcccacctgttatagattaccacttttgcagtaggtaacaaggtaccaaatcccctggacatgatatcacatggtctactaaattttcagtgattctactagaattatatgaatatgtggcacaagaataaataaaaatagtaaacataatacaactaatagatatctcaattttaaaagtcgaaggactggcctcggcatctgcttgggtcaaagcaaatatccttgcaggacccatagggctctttttcttggtctcaggattctataactgtgggcagttatttcttaaatttcctaatactccacattaaaagaaggccttagactaacatttgcccaagtggcatttcttgcactttggaccttcggggtaagactaccaagcttcgtttctgcctcaatgaaaaccctagttaccttgaaaccttttgtttggacccataaccggttgcccatttggtttcttttttcgatcattagggttaaaacccttactcattctactactagacgatgttttccacacatccttcctatgcttactcttttaacgaatcaagcttttagccccctcagcagtgagagctaaatccacaatttgaggattggtgtaacaccccgacccaaaaggatgacacgtgtatgcttttacaacttaatttataagtaatctattagtttaggaaaagtatggtttaattaaaactttttaattaaactaaattgtaacttttatacaaaatacgaagatcccttctttataaattcttttacaactagtttcaaaactaacattacaatagaagagttacatttcaaaacatagtaaaatggttgatcctatcccatggaagtcgaaacaccgcggttgatatgtacatcaccgtgttggaaatattttacca

SEQ ID NO: 252403 - DNA, 504 bp, Cannabis indica
ttttgaagatttgaaaaaagatagggtgatcacctaccccacgcgtgcgcggatggcccattctgtcggccagatgcgtgttcggacaagtttcgtccgagcaacacgtctgaaaccccattccgcgtgtggaaatgctgctgggacttcccagcgccgaggtttctcggctatgacaccctgtggcacgcgcggatgagtatgcaacaaatataaagttataaaaaagacagtaggaaataataaaagacagttagaaaaaagtataaaacataacaaatataaagttgaacaatttagaacttaggacaattctcatttctaaaattctaagtatgttcaaacaatgtttaaactttactggaacaacagccttggtcaacatgtcaaagggattttcagcagtaggttggctttccaactaattatacaattacttaggataaaaaaacatagctagtttgtgaccttctggtgtctaaataaccattataatctgagtcg

SEQ ID NO: 252404 - DNA, 576 bp, Cannabis indica
gtttatttttttgacacattttttataaatacaatgataagtttctttattataaaatttactattaatgtaactatttatttaacgtctaaaaaaaaattgttattttaatcaagggtggagccagaatgagaagttagagggggccaaactattttataaatttatgtggcaaatattttttttaaaaaacactttattaacttcataattattttttttttaaaaaaaaaaacttactataacaaaaattaaaatgccaaatttctttttggtcatatcacgaaaattatcgataagtgaatactatttttttttttttttgtgacaatttctcttcttcaatatacaatataaggctgttcatccgatccaatccgcattttttaggtcaaacaatatttaatctgcactaagtgctgatttcatatttttgatccaatccgatccgtatagtcgtttaaatctaatcgtaagtacggattggatcggttatttttttaatgataaattatttaatatttcatagaaaaaattaaaaaaagaatattgtttcttatctccaataataatcta

SEQ ID NO: 252405 - DNA, 698 bp, Cannabis indica
gtgtgattttttatcttagttgcgtaacggaacccgttttttggtctgaaatttttaactagttgataaatataactagtttctttatactatatttgagttattgtgtgttattatttgtgtttattatggaacgagttcttttcatacttatgcctcaatatgttttggagttgatccccatttttttaaaaataattataactaattttatgaggtattatgtgttatgatatattttgttgtgaaactagttttgtttttaatttatgtttcagtattttaggaattaatttcctctttgttttttaattggaatcgacttgatcaataattgcgtcttacttgtttgtattcattatgttatataaccggttctattttagttataaccggtttgagttatttcgtgttatttatttttatttatcataacactgttatagaactggttctattttaattataactagtttaagttattttgtgttatttgtttttattcattatgctacaaaaccagttatatttcaattataaccggtttgagttatttgtttataaagataaatgcggcaaaagtctccaaaaatttagagtagtcccgaacctcaaaaacttggcagtaatagtccccaatgtgacattttctgtaagtccattggtccatctttataagtgacccgttaaactcaaat

SEQ ID NO: 252406 - DNA, 627 bp, Cannabis indica
aattattacgaccaaaatttttaatacaatgtatgttgtattatctaatacataataaatggtacgtattagctttgtattataaaatttataaaggatttagggtcaacaccaatctccaatccagactcgggcccggacccgacctggacccgacccagacccgaacccggactcggactgaactggacctggacctggacctggaccagacccgacccggacccgtagttagtgttgggatcgagtgtattaaaaatatattataactttacacaatcaattaacacaagtcaataccaaacattgtattgtattaaataatactaatataatacaatacaatacaacgcaatccaacacaatacaatacaatatattacaatacggcgtaccaaacgagccctaaaaaattataataaaaaattaacggtaacactcttcaaattattattattattattattataatttcaaaaacttgtgtgagtgaggtacaattatataaaaaaaattgaaaatgcaacttatatatacatcacatataaaaatatacattacaaatatgcatgtgtacaagcctcataaatatatttatttatgtaatgtaggaaatagagtcaatta

SEQ ID NO: 252407 - DNA, 1138 bp, Cannabis indica
aataaaaggatggttatccaaggatgccagctctggcattttataatgagtcattcataccaaagtctgcatgagcgtgttcaaaatcattgaaaaacaaagtaaattggccacattaccacacacccaaataatatgtttggatgctaaaaaaaggtagcacttggatttggagactgaatgctccatgtcacacaccatggatataagaacatcaattaggaagcaaaatacgaataggttgaattagtggaactgaaatagcacttttaccccctttgtatcaaaaatgtagaagcaatattgaactctaaaaaattgctcaaaaatatgaataagggggtaagagcacttttacccccttatagcaggaacctggctctgataccagtagggttcctgctataagctaagcatcatcaagatcaaagataacttgagcaatgttctcacaagaatcagcacgacttacgactctgcagcgtgacttacgattatgaaggatagattgcttagtatctttatacttgagtgatacctaactcataacagtaatatctattaagtatgacccataatgcacactatcactatctcagaaatctcttaaagaaaatttaaaagaacattttgagagaagaacactagaaatttatttagtagaaagttttctgatgtccttacaatgaaaaggatggctctatatatagccatttacatgaagtacaatacaaaataggaaacttcctagaaatttcctacaagcaaacaaacacacaaaaggacactctgacaacaaaaggacaaaccaacaaaatgacaagcggagaaaaagacagtctgacaacaaatggacaaactgactaactgacaaacatagaaaatgccaaacgataagaaaaaattcctacaaacatcatgactataaggaatttttccacttattgctatcttacacaaataggagatatggaattctttcgttcttcttattagcggtcgataattggctcgtgatcagcattgtagtctgagtcataattggggtcttcttgaagtgggtgccaacctgatggttcatcttcttcatcacttccagctggtggacatgcatcataatcagaatagacgatctccc

SEQ ID NO: 252408 - DNA, 638 bp, Cannabis indica
aaagaaaattaaagagacaaaatacaataaaaaccacaaaaggcaaataagcctagctgcatgattaaactggatctccaaaaggcgtatgatacaattgcgtggagcttccttgaagagatgctaactggtttgaagtttcctttgaaattcattcaactagttatgaactgtattacaactccaaaattctctttgatgttcaatggaacacttcatggtttcttcgaagccaagagggggattagacaaggtgacccgatatctcccttgctctttgtactgggcatggagtacttatctagattgatgaagaaagtgggggaacaagaggggttcaaattccatgatagatgttctactttgaagctgaatcaccttgcttttgctgatgatgtcttattattctgtcatagggatttcatgagtgtcctatacatgttgcaggctctaaaaacattctcactcacatctggattatacccaaatgccagcaaaactgccatatactgtagtaacatgcagcctggtgaagtgaaccacattatgcagattttagggttcataaggcaggagatgccattcacctgtctgggaattccaatttgtgggaaaaagatctcagggaaagaatgtga

SEQ ID NO: 252409 - DNA, 836 bp, Cannabis indica
aagttcagggggcacgatttactacatgtcaaaattcagggtgaaaaattactaattagcctaataataataataaaaaaaagaattacgtaatctaataataatttattattataggtctcgccttcgatgtgtaattaaacttccaaactgacgaacgtcaaattgtgataagagaagagaagaaaagagatcttgcagttgaaagctttagttttaagataaataccctttttcttttcttttcttctctttagcaacctcctttcctccattgtttctccttggtctttacattttagaatcgatctccgaattttcacaagtacaattgtcttgtgtatttatatatctctttcttttgttttatacataaaaatcatggcaaagagtcaacttggcggagcctttggattctggttccgtcttttcacgattttgatctatgtgaggatttccatctctctaaggtccaataaagagatcaaagagaggttctatggaaatttgttaaactccacctcaccagaatcgaacgacaccatagccaaaatgttcgatcgagttctcgagaaagagtcatttaattgaagatattagctcaattagtctattttaattgattttgtaaatattatgtgcatgtaatggactgtggaatttttatttaccttttaaaaaagtttaagaatatttaattgtgggatattggcggctaaatcacctgaactttacgttttgtaacacttaaccacaaaaacaaaaattttgggggcaaaacctactaagtccattctgtttgctctgtacccctccgtccaaaaatcacagttaag

SEQ ID NO: 252410 - DNA, 1860 bp, Cannabis indica
cactgtaaggtttcttaaactttgtatgtgtttattttcattgttatcctggtaaaatattttccaacataatcttcattggagaaatctcggttcacggttcagtaagcccgcacttgtttagtattctaaatgattactaaagcatgttagggagcatattagattataattatttattttaagtgtgtttcctttaagtccataataggggtattaagttttatgatcgctgtctaacctgcctggcttatgggttcgcagactaagtcctttaaaatggatgcccagcgaaatacaagaagtcagggtaatatggttgagaccggaggcaatcagggaaaccaaattctccagaatccccgtggacgcggccgtggccgtggtagagctcagggtggtcgccctgtaaatccaccacaagctcctccagattgggagcagaggtttgcgaaaatgcaagatcgaatccgccaacaagatgaagaaattcagagattaaggcagcaaggtcttcctactgtgcctccacagtaagctcaggtcgttgcagctccagcggtgccagtagaataacatgttgttggcaaccgtatggagccgttatatgaaaggtttcgtaagcaagcacctcaagtgtttttgggaggtcctgatgtgatgaaggctgagcagtggctcatagttattgaacggattttgaattttatgggtgtggttggaaatgatcgcgagatgtgcgccacatttcagttccaggaggatgctctcatgtggtgggagttgataaccctcacccgggacgtcactgttatgacttgggaagagttccgagagctgtttaattctaaatattataatgaagtcgtccgcagtgctaaggggaaagagttcactgagttagtgtaaaccgagggtatgtcggttactgaatatactataaagtttaaacggctggccaagctcgcaagctcgtcgtgggtattgggccaacagattttagtaagaaagaaaaggacttggcgggtttgaatgtgaagattaggcatgatttggtgatcactaccaatgaagaaacatcttatgcagaaatggttgagaaagccctacgggctgagggtgctgtgaaattcctttaggagccccgagtgactccgagtgttggtgggacccccaaccttcctactcctgtttatggtagggatggtggtgattccaccactgatcagaaaaggaaagttaatcctgcatctagtggctcgaggcagagtaagaggttccgtgggaaccaaggaagaggtggacgccagggttattcttatcctgagtgtccacgttgtaagaaacatcatccgggggagtgcaaccggaagacatgctttctgtgcggcatggtggggaatttgaagaaagattgccctcaggcaaagaaaaaagagccgaaatcagaggcaaaaccttttcctgctcgggtgtttgccattactcaagttgatgctgcaagcagtccttttgtggtgacaagtcagcttcttgtcaacaactccttgtatattgtactatttgattcaagagctacatgttcatatgtggctacacggataattgatcttatggctaggccttgtgatattcttgaaagagggtttggaaccctaatgcctagaggggagttggttatctccaataggcgcattaggtccatgacggttaggattgaggatagggagttgagtgctgaccttatataactggaattaatggagttcgacatcatacttgggatggactttctgtccaagtattcaaccagtatagattgtaagtgaaaaatggtgacttttcagccagaaggtgaag

SEQ ID NO: 252411 - DNA, 492 bp, Cannabis indica
gttattaatactatcgcagggtcgaacctctagaaattttgatgttttctttactaattattctttgcttgctattatttatttaatctaatcgatttaattaagattcactgtcgttagctaaaaacgaggttaatattttggtgcttccattaagaacaaagaaataagtttttgtcttaagtcttttacagggcacaggatgtttgtgcaaactcaaaggggagttcaaactgatccagtcgatctaatggtgatagatctaaacgtgtagccacctaaaaaagcaagagatgtaccagggacaacccttggacaagtcaatactcaaccaccaactgtaagccatggagtgacttcccctctgcctaggttcaatccaggtgtgcaagaaactgggaataccggtgcgacgatcgagcagatcactcctggcacggaaatcttgtccaccacaaacagtcaaaggccaattgaagatgatactaagct

SEQ ID NO: 252412 - DNA, 698 bp, Cannabis indica
tcaaataataaatacataaagcactgagattatgattatatattacatctatataatcatataaatgaatgcaaacacatatatactatgaatataacatagaaaaatactagctttttaagattttttagtcgtacatatatatatacacttaaccaaactatatatattttaaacgtccacactaaaaataatcacatatataactatttcattaacaaaatattataagttgtaaggaaaaaaagagatggaaaaactgacctactaaaaaatatgtattggtcgtgtatttttggtttcggccaatagtggttgagatagtagagaccttaataatattagaataaaaattagaaaaatatttatagaattatagatatatgtttatatataaaaataataaatgttaaaatagaaaacttagcggttaaaaatggaattatttcacaaaaacataaaaacaacaaaaaaattacaaaaatacagtttcaaggaattttaaacatttttacgatttttttgaaatatttacagaaaatgcggtctttttatgttgtaatcttgttgattttttgttatatgtatgttattttttgttgttattttgatgttattttcatgttacttttatttaattttcttgttaattttatgttattttcgtgttattttttggaaaactgtaaaaatgtaaa

SEQ ID NO: 252413 - DNA, 758 bp, Cannabis indica
actttattcaaaaaacaagcaagctacaaccaaataaggcacaggccaaccacaacaacatggcagccacttaacagccagcagccaccaaaaaaacaaaatgactaccaactcttaattacattaactaaatataagtttctttggctccttttaaaggtacttttactcaaacttctaagctgaataacatgtctaacttataaactaaggcttttaggagcagcacaagacaaatcgaagatacaacaatttttatttatccgaagctgatgctgtcaccatatttatgagccagttttggagatcttgcttcttgaaatcacacttgtaattgagaccaacattcgagttaggccaaatgtgaactccaagccaagagttcacttccttttgcacctatttggtaaagatgcagctgtaaaaaatatgttcgtgagtttcagcctcactttcacacactgggcacataacgttttgcagcggcaaaagcttactaaggaaatctctagtgagcaattgggagttgataatctgccagtaaacaaatctatgtttaggcagcaacaagttgtcccaaatgcctcttgaatacttgactttcgactcctctaaaagcaaattatagaatttcttcgctttgagttttgtacctgtcaccgcaagcctcaacatggcctcatccgtgtttgtcccgaagcttcaacaatttcttaaaataccagctggtatcatgattctttgggaagctccatatg

SEQ ID NO: 252414 - DNA, 614 bp, Cannabis indica
attactcatttcaaatattgacatgataactagtaactcattgtaaatagttactagttatatatgttgtaattaactaactagtttcttacaattagtaactaattatttgtgttatgcgtaatacttttcctttaatagttatacatttttagtaaaatttatcctaattctatcgaaatttcggcagcataacgactgtaattggacattccaaaaaattttaaagatgtcaaaattaataagcaaaactaaaaaaaataatacaaaacaaataaaataatattaacaatacaaaaattattcacccatccggtcgtagtacatgtattcgcagaacctacttcactacggttgaatatttaagatattaaaactcaactaacatgcaaattattatacccatctgactgcagtacaatatatcgcagaacctacttcactacaaatgaataattaagatatttaaactccacaaaacattgataattaattaataacaaaagttagtgaatgtatatacctgtagctagctaaaatatgatcaacactaaattctttagaaccttgaaaattaactcacaacctacaatataataaaatacaacaaaatt

SEQ ID NO: 252415 - DNA, 515 bp, Cannabis indica
acaccacgtatagttttgtgtcaagtttttatattttgcactatttttttagttctattattgcaaatttatattctgcagtaacaagtttccaatttgttattgcaggtcttaacagttacatttttcattactattattaaagaaatttattggcatatgtaaaaatacgatttttcaattggtatcagagcacgacactaaactcttagtgtggtcctttaatattttcttgtgtttttataatatgtttccttttgtcgaaagaagatctacagttgttctaccaatgctaaatgattctaactacctttattggaaaattaggatgaagactttcaccaaattctaaaataaaaaaagcttggaaatctattctaatgggttggtctccacttgttaaagacactaatgaaggtaataccaaggcaaaatctgaattagaatggtcaaatcaagaagatatattatctggtaataataagaaagttttgcatgatttttttaattgcgtt

SEQ ID NO: 252416 - DNA, 635 bp, Cannabis indica
agactataaattaccttagtaaacctgctattgtatagaaattgttaataggaagataatcatattaggccagaactaagagatacaattaaaatcgaaagccctaacttttattcattgttaatttgcctattaatttacttgcttcctgatttttattgttcttattgtttcctaatttaatttttctcttaaattttattagccaaatataagtaagagtttaattttaacgtacttaactacaatcctcgtggaatcaacctcaacctcactctttgtgagtaatacttgttcaaacgaacgtatacttgcgtgttgcaaaataccagacagaaattaaaattttacatcatatataacacaataagtatattctaatatttagattaatatgagtggaaaaaatacatgatttcgaatcaagcagaataatacgacgttgaaaattcaaagacaatattgttagacatttatatgtataatataaaatatatgtatgtgtatataacatgcggaatgaataaacatatacactatatgaatataagatcgaaatacctccagccattgaatcctttgagcattaatcccacataagcttgatctgcaaaagaaaccgattgatgtgggta

SEQ ID NO: 252417 - DNA, 1987 bp, Cannabis indica
aaccacttatatgcagccccttttagtgtgattgcaaagtattgacaccttaccttgcatgacacctttttcatcttcattagctcattaaaagctctgagatggtgttttggatctcttgtaccatcataaggtgtcatgtgtggctcctcaaaatctagtggaagtgtctcaacttggatctccctcgagaaaggggattcttcaccaaactcatcatcctccaaatttccctttgataagatagccatcttttgacatagatcttgcattttttcttccagctccttcattcttttgttcatcctttcttagcagctattgagtgggactcgagtttgccttgtagtgtgcattaggccactgagtaatattcctcgtgtcccatcattgtgtggcttcccaccatggttggaggataatgcctttcattttcttttctcatgaaagggggcacaggcacagtgcccccagcatgggactctttggttgaagtctttttataagatcacgatatgtttctctcattgcaatcttactacagtgggtaggttcaagtttccttgaatgacctataaggaacttgtctggcgatggactcctcccactctcatcctttgaggtgctatctatcgatgacatggagttccctccaccaacatgtgcaattgggatcatgcactcttgttggtggtttttgtataaaaggtgtgacgcttgggctttgcctttgagtatgctgctcaacaccttttgcatggcagccacggcattttcaagcatttagttccttcggtagtaattgtttattttatcttcaaagtggcgagtatggcatttaagctcacagattatgctcgcttctcttttctagggcaatgtcgcaaggtaccaagatcttgcggtgttggtggtggagggtgcatcatcggtgatgggacaatttttcttggcaaattattttcaccaacttgggtgatggatgcgttactctatcgtggcatgtgttccccatattctcatcatgatggtttctctctcccctttgcctgaggtatttggctattctggccaacttcttcaaccatggatgttggaagctttcttcagaaggcaatcaactgagtgttatctaggtgaatatcgatgtcctttagacggagggagtgtctaggaatcttgcagcaacactaagtgaggaaataacaaagctttagcatatagttctcacaaacttaaggcttgaaaattgaaactcaaatggaagacttataatggagatgaaattatgaaaatacaaaaaacttgaaaaaatgttcagagcaaaaatggaggaagacaaatgtatgtacttcttagagtgaagtgttacaataattttcctaccccttttcacattttagaatggggtatttataggctctaatggcctgtgatataattaaagtcccaagggacaagatgacattcatgagttgcaagttgcaggtgtggtcgtatgccttgtacctctctcttgtctcaggtggtctcgagtggcaagggtagtggctgtgtgcacccttagttggaatgtcgagacttgcacatgtgatgtctccacaacttctactatctaggcaccagaacatccaggaggtgtggttgtactcccgtcgcatgcaccccttgtcttttcgatcatacctatgctgcatacatcctcaatacttgggaaaactttgctaagaatacttgtgtagttgaggagataattttttagtaacattcatacaagtcttgcccgagtgacttccatactatcttggataagcgacatgcattcaggtcttggccgagtgacttgcataattatcttggtcgagtgactttcatggtgcatggccaagtgacttgcaagcttggtgcatggccgagtgacttgcatggtgcatggttgagtgacttacaagcttggtgcatggtcgagtgacttgcatggtgcatg

SEQ ID NO: 252418 - DNA, 948 bp, Cannabis indica
aaaatacataacacgaaataactcaaaccggttatataacataatgaacataaacaagtaacatccaataactcaaaccgattataatgaaaaaaaaaacaaaagaggaaatcagttcctaaaatactaagacataaattaaaaacaaaactatagctccacaacaaaatacctcataaaaccagttataattttttttttaataaaaaaagtggggatcaattttaaaatttattgaggcataaatatgaaaagaactcgtttcataacaaaataaataaatacaaataatacacacaataactcaaatataatataaaaaaatcggttatatttatcaactagttaaaaatttgagacaaaaaaattagttccgtaaaacaactaagataaaatcgcacacacaaaaacagttaaataaaataactcaaataaaaatatccattcaacatgctccaacctataaaataattaaactcatattatatctctcccaaaaatactcattcactatgatatataactggttttattttagttataaccggtttgaattatttcgtgttatttatttttattcattgtaacactgtaatataatcggttctattttaattataactggttttagttattttgtgttatttatttttattcatttatgttacagaacaagttatatttcaattataactggtttgagttattttatgttgtttatttttatttattatattatagaaccgattctatttttatttatatttgagacatcaacttctgctgacttttccagtgactttttcgatgatttttccagcgacggtgattttttcgacaaatttccggcgtcaataactttttcagtgactttttcggcaccagtgactttttcggtgctggtggctttttcggctaaacttattatggttttttttttttattttt

SEQ ID NO: 252419 - DNA, 586 bp, Cannabis indica
tcgtttcctgctgtcccaacctgaatttcattatattaaaggctaagtctacggacaagtgtgtgtagttactatacggtgtagtgaagaggtttaaattaataaaaattaaaaattttatcacatatatgtacaatgatattccagttatattattccaataccaaactaaactactataacatttaaagagaaaattacatccatttacaaaaaaaaaaaaaaaattacactatatatctcttttaaagtaatgtatttaatttttaactactatacaaaattttcaattgtgtggactgaaaataggagaatttttaaaaatatcattttcttatgttttatttgtaattttacagcttaaagttttattttcaaaaatacacttatagatttttaaaattacaaaaatatactatactcagcaaaaattaagaaaataactaaaaaaacaacaaaaaaatcaacctcgcgatacttataaatcaattacaattactataaaacaactaaaaaaataatttattatttttattgaagatgtaattttgtaaataaaaaagtttaaaatgtaaaaaaaaaaaaa

SEQ ID NO: 252420 - DNA, 1129 bp, Cannabis indica
ttttttttcatcatgactttaataaataaaaaagaaaaattaccccatttatattattcttgtaataacaacaaataaagtgaagaattaaagggaaaaaaaatactagtcaaatcatgaaatatctttatgttatattgaaaaactttcttatgaagttgaaataaataattttttataacatgtgaaacattttataattaattgattttgaaatgtgagaaaataattcattttaattaaaagtggtaattatttagaatttttaatggattcttttgaactattttcatgatcaatattcgtattttctttttccttcctcgattatgcttatgtcatatgcagggtcgaccctgaaatttagtggactgtaaaataaaattattttgggcccttatttagaaaaaaatgtggtatttttcaaaatcagtaaaaaattgtataatttttaaaggaaattttttttgggcccctgggctaggtgggccctaggtacaggcctagcccacctatacccaaggtcgggcctggtcatatgagtatgtaatagaaatgaaatctctttattttactgctattattcacatggtagaaatgccaaaagtgagtttagggtttacaaatgaggtatatatatagggcaaaaaagaggaagcccatagtagcccgaaacagaccttctagtgtcactgcaggaagcccaatcagcatctgaaaaaattttgagatgaaagtctatgtttgacataccagtttcagcataagcagataagttagttgaagatgctgagtaaaaaattagcccttggccagaggtgcccttaagatattatagtattctatgagcagcaacgaggtggggagctctcggattggataaaaattgactagtttatttacggcaaaagagatatcaagccatgtaatggttaagtaaatgagtttaccaatgaggctgcggtagatttttggattttctaatggttttccaacatcaattgagagtcgaatgtttggttccattagagtgagagcagtggaagctcctaaataacatgtgtcaatcaaaagttgcaaggtgaatggtcgtggagagacagatatcccagaggaagaacgaccaatc

SEQ ID NO: 252421 - DNA, 908 bp, Cannabis indica
ttgagttgagtatattgctcttatagaagctttaaagaggctctatggctaaaaggaatcatgacagggctgagatttgaacagaaggaagtgaattgtgactcctaaagagaaatacacttatccaagaacactatttcatgaaaggacaaaacacatcgatatcaatcttcattttctaagagacattgtcaacaaaggacttatcaaagtggtgaagattcacattgacataaacgctgctaattttttgacaaaagtgatatgagttagtaagttcaatgctgcattttacttacttggtatcaagacatgattcctagagccctaagaaagtgcctaaatcaactaagtgttacattaaagaaattaggaacttaggtggagaattgtgaagtccgattcttatttttccaagccaatcaaacacacactcggattgctgaaatgatagcaagtagttaaaacactaaggccaattgttttagttgtccgagactcaagatgacaaagttaattagctaattttgttattccctcctattcaatcaccaaccaaagcctataagtagacccctaatcaactaagggttagactaattgttgtacaagttggttgtgaactaagctaagagcgagttggtgagttgagagaattgtagagctatgcgctcgagtgagatgaaaaccagtttgtgtatctgtgtttaagtgtgcaacattgttcaaaaacataatgaaattattctcaagccttgtcgatccttggagtaggactattcacatgagatcaaatcaaaaccaagtaaattgtggtgttcattgtctttacttttctgcattcaccacaaaaaatttacttttagtcacaacaaaatttgtgactaaagataaaaaaaagttgtggc

SEQ ID NO: 252422 - DNA, 767 bp, Cannabis indica
tgaccactgttaattacatgataacggacagacttcacacatccaagagttaaaccaatccaacgatcgctaaaacccatagcgcgaagaaccgcttccaaaaatccccactcaactcgatcataggctttactcatatccaattttaaagccatataaccttgtcttccatttgttttcctttttaagtagtgcataacttcgaaagccaccataacattatcagaaatcaatctacctgatacaaaggcgctctgagtttcagagattgcaatgtcaagtattcccttcatacggttagccacaaccttggaagctatcttataaagcacattacatagggagattggccgcatatcactcatctgggtgggattcttcttcttcggaatcaagactatatgagtatcattaaggccatccgggatcaccccagtatcaaagaaatctcgaacaaattcaatcacgtcgtggcccacaatatcccaatgtttctggtaaaaacccggtgtcattccatctgggcctggagatttgtcgggatgcatttgaaacaatgcatgtctaacttcttcttcagaaataggcaccaacaattcttcattttgttcttgagtgacaacagggcgaactctattcagaattgaaccaaggtctatattagacgtttggaacaaatctcggaaataatctatgatgacagtgtccaaccccgagtcccaagcaacccaacggcctccattatctttgagttgagaaatactatt

SEQ ID NO: 252423 - DNA, 811 bp, Cannabis indica
cactcagaggctacacgcatcccccctgcttctcaacagcaactccctccttccccgtcaccgaaaactccctctcttttttttgatgcagccatcgaccaccagaatggtataactggaactggtttcatcttcaagcatggtttccagactgtgttagcttctcattaccatcagctgcctggtgctgtatctcctatttttgctgaaggccaagctcttttgcagagtctcaagtggtgcattgactcacaattttcccctcaaatagttttctccgattgtctgaatttagtttcaaaagtgaatggtgcctggcaggataattctgctctttctggtcttgtctctcggattcgattgctcttctctaacttccctggtgcttccctgcagtttctacctcaacagtttaatatggacgcccatgtccttgcaagagaagccctcgggtcaagagaagttagctagagggagtggctcttcttcctctttgctgcttgtggtttctgttttctccttcttcagcagccttcttagtctcaaaaaaaaaaaaaaacactaagagcaactgtaatgaggctgcatatatctacatatgcaatgattcaacctctaatgaaactcccttaaaggtaccattttgagatttatatatttcattcatatttttatatatttattaaattaagaatttatttttaaaaaattttacaacatatatttttaatgtacgaatatactcttacttatttcggcagtcgacatattttttttagtttattttttatacaatcgtgtatattatagt

SEQ ID NO: 252424 - DNA, 656 bp, Cannabis indica
accaactgaatacaatttctgtaaaataattatgttttttgtctggcttctctgttcatttttaccggccatgttcagcaatttaactcttcatttattagctgtttatttaattacatttcaaattaatatggactcgtactcttggtaacctcaataagatgataattatcttcttcactattcattattaattacaaatcataatatactattatgatttggcatttattttctccatcacctcatctcctgaagtttcccctgtaacggtgtagtatcttctcccaacggtttcttatactccgacatcatcctctgttgaagcgattggaaatcgatcatcaactccttcaatttcttcctcaatccgctcgttacagtgattctcgttcggtatgtttggatctgaatgctttggtatttcaattgctaatcgtttctttgccgtagttgcttggcaactttgttaagcaacggttttggaatagatattcatacatatgttcccctgtttcgtatagattcttgttagtgacagtatgttagtatctacaatgatatgttagtttgttttagttgttgtttctgagaagatttattctttttttgaattaattaggatttattgtacttggttgtaatttgaagatgat

SEQ ID NO: 252425 - DNA, 1581 bp, Cannabis indica
tatagaccacaaagaacatatctaaagcaataaaacatctcaagatgcacagaatcaagtttcaccattaaagccccaaggttgagttctaaaactcaaaagttagttaaacctacttactgccactaaaacatgctcaattcaacctatctaaacataacttaaccttcgaaaacaatagcaaacaacaacagcaagaacaacaaccaaaacctcatttcatgcaaaaattccttttcttacaattcaagaaatcaaagaggaagttggtagagactttaccttggcttggattacacttagagctgctagaaatcactgaattgaagggaaaaatctagaaccctagctcgttctaggtgggttctaaaagagagagagagtttgagagagaatgtggtttttgataaacttttctaatttttgtaaaataaataaataacataggttttattaaatcaatctcagccaaatacatttaaaaaatatgattgtatttatttaattaatttcacataaagacaaaatacaaagtgggcaaaaagaccaaaatgtcgttgcccacactaaactatcttaaaatcacttaagggtattttggcaaattctcaaatctcgactattcacgacattcccaatgtttaactatatcgccccgctatactaaaaatactagaatgtgattctaatagccaaacaccacgttccaatgtcgctgggtactgaatatgtaaaattatgaaatttctatatatgacatataaaatgcattttgaattcaaataaattatataaattaataattcaatactaatacataattttcataattaagccctaattatctgctaattttcaagttaaagctaagttgtctttacacccaccatgtaaacttggtttttatttatctatttcttttaaaaaaaaaaaatggcattttggccgagacaatggtttgccccttacgacactttttgtaaatacaaatttgcgaagttggaaggccaagtttgctttttaatacctcatacttttaagtttaaacttcaacttgtggttgtttgcttgcgtttcattcacaatttaaacaattatatccataaaatttattagacgtttccattgcttgtatttctctctaacgttaagtagttaatagtctaccttacgtgcgagcaacttatcttctgccctaccctcgatttgcgagtagtcattgattccgcctcgtgatcatcaaaagtgatcttatttcaagcaaacttaaatatatttttaatgaccttgtcacattgtttttaaaataaaaaattatagttgtttgatccctttctcgtcagaaaggtttgatcagggagttctaacgattcgacccctctctagtcaaaaagatttggccagggagttataatagtttgacccctcttttgtcaaaaaggtttgctcaaggaccttttgaaatactcaaattttttatttttgaagtgaaagtgatgggtttgcattgtattatgtatttccagattaattacgtttgatcatacatatatgcccctcaagtaattttaaagcgtttac

SEQ ID NO: 252426 - DNA, 378 bp, Cannabis indica
ggaatcaatggaacaccttttcttgtcctgtgatgtggcaatgcatttatggttcttcaccatatggggcatttatcctatctgcaattctgggattcgagtttgggactgggtcaaattcatatggaatcttaatgctagggggattcgagtggatgaagtatttttgtatgcttcgattgttgtggaaactatctggagaatgcgtaatgattatatacataacaactctcgtccggatattttgaactgtattggcatgatttgtactttttatgcagagcttcatgatgttttcttgccatgccctaccccttctttggtggggacttggaggccccctcctcatgattaaataaaattaaactgtgatgtcag

SEQ ID NO: 252427 - DNA, 1355 bp, Cannabis indica
tagggtatttccctagaatgactcaagcagcatgtagtaattaatcatagaccttatacttttatcaatatgtaatctaaaattttagggaggtaagtttggatacaatttgaagttcaacttaatgatctttaagctacataactaaatttttctctacccctattagttcgtaaaatcattaaccacttaccttaatatttttcaacattgctagaaattcatgcaatttctcaaatatttcaaatttctttgcataaggtaaatatctagagtgatcgttttaagaatttaacgataactcatatccacccctgaatgtacatccatatgttcgaatacagataatcctactttcaagtggatattggaatattttctctttgcagagactgatcttgtcaaaaccactatgaacaagatgcaaatgccatagatatattattgtggttgtggtcttttgatgattcaggtctagttacaacaaagagttcttagaataagtttagtgaattttggtcacagaatacaaaattcataatccatacattaacatacagtttggatccattattagaaaatagatattaacaacttgtgaaagttatacaatattgttcaatgtattctgaaaactaaaatttataatttatatttggaatctaaaatttataatctaaaatttattttactttaataatcattttttcaaaaaaaattcgaaatacatttatttcaaatgtagatatcttgaaatttttcataatatctaaacctttacgattttgtttttacgcaccttcccaaaggcctcataccaacagagataatgtctattcttatatgcccataatccttctcattcttaaccaatatgagatttggattgcacacctaacaatatgtgttgagaaagagtgaaggaaaagaaaaaaaaaataataaaatcatgtttagagattacagctcctattaagagtgctctaagaacaatttaaaaccttacaaaatattaataatgtattacctatgttttaatacacatgataaatgaaatacatctcacttcttacctaataaaatatcaaatatatatgtttttattagtgagaacatatatattttataaacgaatatgcattcaattttcaccataaattctaccaaaaacaaatttagccacgaatatttggttagcataaatattatgaagtaagaattacatcatggctgaatttaaatagtgtctacaattttagtgtctcacagtcattacttcaaacaaagtgataaagcaagaatagtcatttcctcttttgagcaaaagaattgtcaaatttccaaaaaaaaaaaaa

SEQ ID NO: 252428 - DNA, 1818 bp, Cannabis indica
atttttcaatattttattttattttatataaatttcgaaaatgttttatttaaaaaatacattggatttcaaattttgctatatatatttatagaaaattaaattttagttgaaaaataattttaattaatgttacaccaacttaaattaagcaattttcataatatttattgagaattattactaagatggaaaataattttatttattttcagatcattctaagtacaactttataaatattaaattaaaatttatatttagagttatctaaattcataattttaattaaataaatatatataataaatagattaaaataaatattagatgaaaatacactttaaataatgagttttattataaggatattcgatctccattgttggttctacatagttcttgttttagtgagtaatcatccctaatggatgaacgttcattagcaatttaacgccatagaatctcgaaagattagtattattgtgagtgttttattctttgtaacgtccaccccaatagtggctgctaagagtaagacttacaaggtatgaaataatggtggaagctcataagatagaatggccttgactctcgcctaaatgggacaacgctggattctcatcttgatcgaataaaaggttggtagaatgtttttcattttagatgagctgaccgctctattcagtgaatgatatctttgactctcgcctaaacaggacactgtatcagtttgttggaaaccttggaaattatttaggattgtatgtttttgtattttcacttgtcattcctacttattgatatttgtataattttgtattaaaccttgtttgatttctatttattgatatttgtagtacccaatatgactatgaacaacctcatagtgtcactgttgactgacaataatctctttggagctaactttgtcaaatggaaagagaacattaatattgctctcataaataaaaatgccctatttgtgttgactgaaaaggcttcggagcagccaggtgagaatgcgaccaaggcagtgaaggaaaagtttgagcattggcagaattctaacaacaaagcttgatactttatgctgtctagcatggtcgacaccttgaaaacaaggtttgccaatactctcatggctgcagatatcatgaaccagttaactgaactctttgggatggcatcaaatcaagctcattttgaggcgaccaagaattttatcaatgcacggatgaaacctcatcaaaacgtgcgcgatcacctgctctagatgactagttacttcgaagaggttgagaatcatggagctatagattagacaactcaagtgagtttgatcttgggtagtttgactccagcttttctgctctttacatcaaattctgtcacgaacaagttgacttttgacttccacgagttaatcaacaaccttcagacatttgaaaatttaattggaggaccacaaaaaggaggaactaaagctcctagttctggcacttgtaatggtacgactaaggttgaggcaaacattacctctatttgaaaacccaaaaagaagaagtggaagaatagcaagaagcctagatcaactgaataagttggtacatgcccacgcatagtaagttggtattccatcatagtgtgtaagattgtgaagaatccaatcaactgaaggagaattgggctcagatcttggtgatactcttctacagaaaggatacaagggttagagatctgagcaaaatgagttatttcattccgccgcaaccaatgtaaggtttcttaactttatattgttggaattattttacc

SEQ ID NO: 252429 - DNA, 867 bp, Cannabis indica
tacatctccccttatgagaagctttttcatcaaaaacctgattataacatgctcacggtgtttggttgtccttgcttccctttactaagaccatatgaacaacataaagttgcttttagatcatcaaagtgtcttttcattgggtacagcatctcctctaaaggatatagatgcttacacccttctggccgtgtctatgtttcaagaagtattaccttcaatgaggaagaatttccttacaacatcttattttctgctcccagcagtaataacacaactcccccagccattgacagcaatagttttcgtgtccctactcatacacctattccatcacctctaattcctcctacagaccctacacctcaatctccaaccccactgcactctcccaacatcacagatcacaccagcaacccacctctctcggccagtccccaaaccagtaccaatattcccacaccagaaaatattttacctgctcacactcacaaccaacaccctatggtcaccaggtcgaaaatgggaatttttaaaccaaaaacctttgctgcctacactacccaagaccaagaacctactacactcaaggctgcccttgctaatccaaaatggaatgctgcaatggggaatgaaattggtgctttaaaaagaaagaaaacatggactttggtgcctcgtacaagtgacatggttgtgattcaaaacaaatgggtgtaccgaataaaatataatgctgatggttctgtggagagactcaaggcaagattggttgctaaaggttttcaacaaacaccagggatcgatttctttgaaacttacagccccgttatcaagccatgcactatacgcattatgttcactatg

SEQ ID NO: 252430 - DNA, 497 bp, Cannabis indica
agctatttttggttgcaatttacacattttttcaattcaattttttgttgttgtgatagacattcaatacattctgtaattcactctgttttgatgacatttagttttccttggaaaggaaattgtatactctctctcttttgaggacaatttttaatatttgcaaatggctagttcactaagactaatattccggaaaacattggttctgtggaatctggaggtaaacttgttcttttgtttactgttgttcaagaaaaccttagacacgaggtgctgatggaaccactgcatgcataacatgaaattcctcatttccttatttgaatttcttttcctaaaacactgattttctttttctcaccatctatatccaatgaagtttcacaatatcaaataataactaagtcaatccatgaaatctctgttactagggacccttttagacttgaaatcattacttactatttaggtatcccttgcaggcagcagaagac

SEQ ID NO: 252431 - DNA, 567 bp, Cannabis indica
aaggaaaaaccaaagggtataagtacatcaagtttctagagaaacttgatacatagaaagtattttctaactttaaaattaaatttcatgtaccaatagcttccactcgtgagcccatcttgtttctagataagatgctttgctcatttgccactggattccttagattttaaatatcctgtaaggaattggttatgtaaattgttgaactagaatcaatccactatgtgttaagattaacattaggcatattagattcataacatactaagaaaattggaatacctttgtcgtccacccatttcttgaaatggctgcactccttttttgtatgtcccttttgtttacaaaagaaacatttggtgaaatctttctttatggcagcctggggagccatgggctttttccccttattcttcttgaatggtttgcgtttcttgggttgagtggttaggtgagaactttctcctgatcctataagagcctagcttcctcttgagcacacatggtcataaattttcattgatgctccatttatccttatgtgtgttgtaggaaattttgaaa

SEQ ID NO: 252432 - DNA, 933 bp, Cannabis indica
aaataacatagaaaaaaactagcataaaatttagtatacgtgcttagcatgtagtttttactaatatatatatataaatttgtttttggtaaatatatctaaattaattaccttgattatttctattatgtgggttttcatggtgatgaactaatcctcatttttcttataaatatattaccaaaagccattgaggatatactgctatagttagaagaagtagttctttgggttaagctctctgaagcttgaacagcgtcttcttgtttgtgtatggaagtaagggtgagttaccccagcttaccattgattcacgaatattgacaagtttttcgatacagaaggtcctaaagtttaatggcggaagcaaacttaagtgatttatttgaaaactctgtacaagtaaccactaatgaaattacgtgcgatcttcatccggggaagttgatcacagtgaggccccaaatagaatactgcttgggaaattgtactgtgtttccagactgggacggaaagcaatccagggatctttgaataatgcctggagtttgttggagggatggagctggaaggaaagagaagatggactactgcagttcacatttcaatcaagttttcgatgctgataatgtgctacttcgacgtccctggctggtttgtggttatttgctggtacttatgccccggcggaggttgtcttcgaccaaacgcctctctaggttcgtctaaaaagcatacctcctttttattggaacaaaacaaacttacaagaactagcaggtaaagtctcggctgtctatgaactaccacggcacattgaaaagaattttgaaacgaggatcatttagtatgggcactctgagattcagagtaacggtcgacattgataaacctctgttctctggattctatttgagaagaaagggaattaag

SEQ ID NO: 252433 - DNA, 762 bp, Cannabis indica
agtggtaattttttttatatttattatttattttgataccatgttaaaatttaagataaagtgagagtatcataaagtgcaaaaaatatatataaaatacgagacaaacacaatacgcaaggctctaatacaaatcaagataataaaagaatatttataaattaagctatttaatgctattactaatgagattgttactagaaaaggctatcatgatactttttaaatttttcaataatattgattgaaaacaattatttatatgataaaggttattattaaaaaaataataatatattctattcttcctttaaataatattaggagttttataatatttgatttgtatcgttaattttgatttatgtttacttttatgtttcaaatttctaataaaataatttttatttattatttgaatggaataaactttgatgtaatagttctttattttagtgttgctttgctcacataaaaaaaaatatatatactagcacatatgaggtacatgcaagctttttaagtctgctaaagaaacgttttggtagactctttatttattttggcatatatgaagttcaatattgttttataagtacatacattgtagttttttaggattacttataaattttttaaaaatttcgaatagttgacaatactaagaataaggttaaattaatgcattgcacgcatgactgttttttcttatatgtattgtaagcaattgtttgaaccttattttcagtattgtgaactatt

SEQ ID NO: 252434 - DNA, 485 bp, Cannabis indica
gtgtttttagttaatggcagtattttaaattgtagctttcatgtggtggatctgcaagctagttccctggatttactaattacgtgctgtgtgaacagacaaacctcacccaatggtctggagctagcctgcctcttcaggtttgtaattttggctcacgaaaactttgtttcttagatacatttttgattacttaatccccagactgctcacactattgagccaaacttaaagtggcagcatattattatcatcatcataatcattattattttctccaagtgtcatataagttcttaagtgtgctttgtaagaagaaaatgttaagggccttatttctattatgcaatatttacgggttgtactaagctttttctaaagtgtggataacaagagcagttttcttaacagttggttcatgttaaccgaagtacctcttatcattatcagtcgaaattttttcttcatgattaaatatcaatttg

SEQ ID NO: 252435 - DNA, 1198 bp, Cannabis indica
tgatagaattaatttgaattatgtgatagaattaatttgaattatgtgaaatatcttgtaattttattatacttttgatcaacttttcatgctataatttaccattttagagcttgtgttttgcaaaagttattaatttgaccctttattttattaaatgacaaaatggaccttgtatttttcaaaattgtacaaataagaccctgaactgattttttgtcaaaataaaacttaataataatctaatctaaagatgttatgacaaaactgattatattttttgtatctgttcgtgttaaaaattgtcgtaaagttgattatattaaaaaataaaattattgaaaattaagctcagggacttatttttactattttggaaaatatatggtctattttgtcatttaacaaaaaagagggtccaattgataacttttgtaaaatacagggtctaaaataatatttgccctctaaattttaatatttttacagattgaattatatattaaagaaattgtctgatccaatttgctcccataatgatctgaacaaaagtgttgcaccataatttaagaaagtagtcaaattttatgaaggtatgtattcgggcacacttggtattaattatttgtgctatcttaatttatttctttctgcaaaaatttttgattgtataatttctttcagctaaagatctagaagtattgaccactagtaatgaccttgtcaaaagcctcactagaaagagctgaagctagcgaaacccaccttgtcttaggtggcttcgaatccatatctctagcacaggagactgttctaggacatgatccagtcctattactgcacgccaagaccatttagcggatttcctcagacatcataatggcccaagggacggttagggaggatagatcatgtcctatatctctccccctcactggagcagcctcctctatcttggattccgcatcggagctcccaatttctgagtccacatttggctcagcctcgacagaggctaagtagtcttttcctcaactatgattcgaccccttgtggctactatggccacatgtggattgtatagaggatccctatgcaaagtctactttatccttgccatcagtacaaggagatcagaagacctacacagttgccatctccccaattcaacaccgatccctacctgcatggaagaaat

SEQ ID NO: 252436 - DNA, 1165 bp, Cannabis indica
cttatgtatggtgtaggttatattggctagtatagttctagtttggaagacatagctctaataataaaaatgcttcaaagataagcttttttcttattataataataattgcttttatcttaatttaagaattcacaacattatcattgtgtagtgtgctaacccaccttaatttatacatctatttattttgtaggtagtttttggtctaggtagttgttaacatcggatgcctcttgaaggtggatctcaagttattttgtttaaatttctgagataacttggtcttatataagtcgctttgtttgtagtgactcatattctgactctgtatatctttggctagacaattaacttgttgactgaaagttcttctgcgtcgatgattatcatagtgtcatttagatgactctctctaaaaaaaaagtgtaataatatctatagcactatcaattttacatcaaaaagcataccacttacggctatatgaccatatcctagtaatgaattcaacaagacctaaacacatttgtctcctataaagcaaatgaactacaaccatgggaatcacaaactcaaagtatcataattcaaaacatttaaaaatatttatatatatattattgatatagctatagacctctattttcaaccatgatttgctgaggtccgagatgcagggtggtccgcctcgtctgtaaatggaagattcatctcaaccggagctagccgcggtgcacgttgtggactgggttaagggaaagaaaatgagagaggaagaggggaaaccaagaaccacgagttatcatggtagtggtgtaggtttttgcgatttgtggccgcaaacggcatgggcaaggcaatgattcctctgaagagacgagagagaaaaatattggaaaatcacttctgaggcaaaaaaaaaataatataaaaccagttataattttttttaaaaaaaaataggtgaaattccgtattttaatattcctagtttaattatttaattaagagattaattaaatgcagaataatgaaactggtactgaaaacagttttttcgtagttacagaatacaactctgtaactccagagaaacccagaaacacaaacaatgcacaaaagtaaaaacatacaagatttttgtacgtggtttcaacaatcc

SEQ ID NO: 252437 - DNA, 600 bp, Cannabis indica
atattaaattacaccaataacaatattacatttcacagcgctagacactttagcatttctctaagagtattgttggacaccacccaacattcacaggtataacattgtacaattggttagcgatattttctaagaattattatcttaagttatatgtgatacgatatttaattacaccaaaaaaataatataacacgaggtggagattaggcatgcaccaataatactctttaattaatttattaatcatctttagtaatagattgttaagctcgttaaatatatgatatataattgttttaatttgttagacaagtatattatcaaatatttcgagatcaaaaattattttaataacaattcatacttcattttttttgaacaataattaatataaaaattcatactttagtacactatatatatatatcgatcatataagaatttttgactatatattgtctacacaaatattatttacatatatataatgcaaaattagaaaaagaatttgctggaaactgaaatgtattatatggttaatgtttgtatatacacaatatggttgctaattgatgaatattatttatttatttattt

SEQ ID NO: 252438 - DNA, 635 bp, Cannabis indica
aatcaaagtgctttacatctcaagaaaaatccaatgtttcatgagaggtcaaagtacattgatatcaagttagacttcataagggatattgtgtcatccaagaaggtgcaagtgaagaaaataagcacacatcataaccttatattttcactaaaaatgtaactagagacaagtttaggcactgtctaaacttgttaagaaggacatttaatgtcctcacttatatagggtttgtgttcacatttaatgtcttattttagatcacagtttaagtgcgtctaatcaggtagaattgttgggattaaactcatttaacctgtcaagtcagtatgtccatctatttgctcatcagatgaatctgaaaaaagctgctgctatttataacagttggctttaataccaacttaaaggggacccaccaacaactatatataggggttcctctattctcaaaagagggcgtattctgatctctaatctctaaagctcatacttttagattcagttatgagtgagagtccaagatcatagtcagtgtgtgtggatggatgtaaaagggagtatcactcttgaagtgatttccctcaatttgaggcatttctttgtaattacttaatgtgttgagttgtaatctt

SEQ ID NO: 252439 - DNA, 2343 bp, Cannabis indica
tccacattactagagcggtcattacaaaagaccaaagcatttccctttaaatcagcctctagaaagaaagactgagggtaatattttcctttaataattttaatccaaagagcatcctcttccttagccaatagccaagcaagtttaaccaagaagcacaagttcgtgtccctagcttttctgaaactgagaccccacacactttgggtttacacaaattcccccaagcaatcaatgagagatatctacctgttcaatatcacctttccacaaaaaccttctagtcaatctatccaattctgaatgaatggctgatgggagcttaaaaacggccatagagtacatcagggcagcctgaataagactttggatcagcaccgtgcgagttgattgagacaggagtctcactttccacccttcaaggcgattagaaaccttgtccaccacgaacttgaaatttttatcactgttgcctcggataaacaagggatttcccaaaaaattctcgtcgccactcataacctgaaatcccaattaatctgtgatttccttatgcaaaactaaacaatagttagccaagaaagtaaccttagatttgttaatgtttaggcgctaacaggaccacgagcaatatttgtccagacattccctttaagtttccaacgttttaaaatatgccttagcaaaaagaagcgtatcatcaacatacatcaaatgcgagattgaggggccttgtctcgagaccttaactccttccaataaaccaacaacctccttagtaaatagcagtctagaaaggaccttagagcacaggataaaaatgtatcggatacctcttcttggatagaaggtctttatgggacctccatttaaaagaatctaaaatttgaccgatttaatgcaggccataacaagagtgataaaagcataatcgaaaccattagccttcaaaaccgctttaataaaattccactccaagcgatcataaacttttgacatatcacacttaacaccaaaataggctttccttccctttttgttatgaagatagtttatcacttcttgagcgataatagcattttctgcagtccatcttcccttgacaaaggctgactgattaagagagatcaatctgtaaagtaccttccgaagtctataagccaaaagcttcgaaatgatcttataactgtgttgcacaagcttatgggccaatagtcataaaaaaatggcagcaacattattttttgggatgaaaactaaaaaagtgtgattaatattcaaaataaatcttcccatacaaaagaattcttccacaaaattaatcacatccatactgataatctccttatatactttatagaacttatccgaaaacccatctggtccaggtgacttgagaggaggaagctcccacaccactttcctaatttcttctgttggaggaataacagcaagaaactgattttcctcatcagtaatcgaagttggaaagagatcaaaaaattcatctggaattttcggctacgaggattcaaaaacctttccaaatttctcacaaaagtttccatctataattggtctgttctccagccagattccattatcatttttgatagcccatatgaaattgcgcttcctacgaatcaccataaaggcatgaaaaaacttaaagttcctatcacctttggatagccacaattctcttgattgtcgtctccaaatagagttttgtctagattcaatttccttaatctcaagcataatagaagctcccatttcagtattctcctgggaaggaggattcttttggatttttgccagcactttttctaacatgttcaacttgattttgcataatccaaagtactcaacattttacttttttagagctttagcagtatagttgaactttttggaaaggatataactatgataaccaaacaccgctttggcccaagcctcattgatcactttgtaacaagtatcatctcgtgaccaggcattcaaaaaacggaaaggaattcagattctctctctgtccctcatcgtatccaacacaattgcagaatgatgaaagtgacgagttgcaagcgtcttaatccctaccttcttgaattgaatcactcagtcagcagagcccaaagccctgtcaagcttttctctaataagagattgccatttatgaccattcatccaagtgaaaaaagtacctgctccttctatatctaccgctccagtatcatagatgaaatttctgaggccacgaccttcgcgataggtaactggaagactgccaaccttgttctcttgaaaaataaccgagttaagatcaccaataaccac

SEQ ID NO: 252440 - DNA, 504 bp, Cannabis indica
aatatagcacaattttttacatctcccattggagatgttctctcagataattacttatctttcatatattagaaaaaccccaaattaactctaaaaatcgtaactaaaataaccctgctcgtaaagacccgtactcatgtgtaaaagatccacactcgtgaagtccactgtatttttttactttgacctttctcatgaaaacgcacatgactttcacatatatatatatataggagtttcaaataatctaatttaagatgtgtagcaaagctgagaaagagaattaaaatattttatgtttcgactttttttaaaatttaatcaaacttgaagtttcaactttgcatttatttgtacaaattgagtgttttgagcatcccaaatttagaatttttcacctatgtcaaaatttcataataagttcatcgtgatcatctcgttcaacatgtttcttctcattttaatttatactacaaaaaatagctatatttagtgacaactttt

SEQ ID NO: 252441 - DNA, 786 bp, Cannabis indica
aatagagtattcttaaatagaggttctactgtagtattaatgattgtttattgttattattgttactttatattttttggtattttattattttttagtgtaactctatttagttataatttttcaattataatataattcgcttcgtcccaagtatattgatagaagtatatgtataaaataatatcaacaaaccttgaagtaataaattggttgtgagcatttgaataaatatatcaacagtgagcttggtgaagtctccatatttattccatattcatttgagaatgttgcaagagttgccactcttttcgatacctttgtaaatggagctatgatgaaccagtatacatcaaaatcttgaagaaatacaacaaacgaggaaaattggtagtactaaaatgaaaaaaaaaaatatactatttaggattttgtcgccgaagcatgatctatgtattattatggtcctcctaatttttcaacctattaaaattggcctttttgaactattttttttacagtgttgtaaattagttctttatataatagggttgtttagactgttgtgacatcaacgtcatgtgtaatttaaaataaaaatatatctttaaaaaaattataatggtctaatgtggtaatagtctaaataattatcattttatttgccatgtgtgatacaataatgcatagatcatagttcattcatggatcaaaaattctaaatagtaaaacaaaaattgctaatgtaaaaaaatacatctttctttacaaattaagcttgtgctt

SEQ ID NO: 252442 - DNA, 631 bp, Cannabis indica
agacaatagaataaaaataatgtaaaaataaatatatttttgatgtagctagcgtaaaataatattttttttaattaaatagtaaaattaagcacataaattctaatttttctttcattacggtacgggtcattagattaaaatctttattttttttaaaacataatatttttaaaattgatatttaattgtaattattttttaaaattttcaatgaatagataatactccatcaaaaaataatccatttatactatctacatatataagctatatacgtaatgtacatatagtatatttttggtttttctttccctttgaaagaatttgtatattatatagttataaaaaaaaaaaaaacctaatattatatagtctttatgattatatagtaatagaagactttaaataaatgataatgtgcacgcacgtctaaattccttgatggagcttggaaattaattaaaatgtcatatatatataggaagaggtttcaatggttacatttttattgtaaccattatggttacattttttttaaaccatttggattactattaaatggttgtgattatttagaaactaaataaaataaaataataaataacttgtaacctgaaagtaacctaat

SEQ ID NO: 252443 - DNA, 620 bp, Cannabis indica
cagctgtttttgggaggtgcatggaaattgtactatctttaaaatttggacagaaacaaaaatatataataaaaaactggagaaatttggattttgaaaatatatattaataaaatataattaatcttatcttataagtaagagcacactttctctttggttcttacaccttattccccaattaatcaaatttgtgatctcatttctttgactgtgtttgaaagagagctgtgtagagcaagccatggcagatgaggatcaggttgttctattggatttctggggtagtatgttcggcatgagagtgagaatatgtttagacgaaaagggtatcaagtacgagtataaagaacaagatcttcttgacaaaggtcctttacttcttcaaatgaaccccattcataagaagatccctgttctcatccacaatggaaaacccatatgtgagtctcttatcattttgcactacatcgaagaggtttggcctcacaaagctcctctcctaccatccgatccgtaccattttcaaaatccatctcaaaaagaagattgaaaatatatattaattattgtataataagattgatcattggatatatttattaattgcaggtgtatgg

SEQ ID NO: 252444 - DNA, 938 bp, Cannabis indica
atatgttgttcaactggacacccaagtgagaggaatctttcctaacactcatcaccaaactcactttagcccctatcattcagccaccggattcgaagttgtcattcgagatcatgtgtgatgctagcaattacgctgtaggggtcatccttggtcaacaagggaagggaaacccttcatcgtgtactaggcaagtagaattcttaataatgctcaaatgaactattctactactgagaaatagttgttttctgtagtatttgcactcgacaagtttcgttcctatttgattggttcccctatcgcggttttaccgaccactctacccttagatatctcctttccaaaaaggatgctaaggcacacttgattaggtggatctttttgttacaggaatttgatttgaccattaaggacaataaaagagttgaaatcgtggtagcaaaccacttttctcgtcttgagttttctaatttcgttaatggctctgccatctgagatgacttccctgatgaacatctctatcccgtcactaagttaccatgctacactcatattgtaaattacttagtgactagtgagcttccagcttcttggaatgcacaagataaacgtacatttttagtcgaagtttgtaactttgactaggatgatccatatcttttcaaatggtgaaatttttagtgtcttgaacttttgccacaacaaagcatgtggtggtcatttttcttttaaaagactgctacccaaatcttacagtgtggtctatacggacccactttgttcaaagacactaataatttgtgccagtcttgtggaaggtgccaagaattaggtacactgtcccagcgacacatgatgtcattgaacccaatgctcataatagaaattttcgactgttgggaaattgatttaatgggaccatttccaccttcttt

SEQ ID NO: 252445 - DNA, 712 bp, Cannabis indica
ataaaaattgggaaatgctataaagtactagtggtatttagcatcttcttatgtgttaatatcgttattcgtttaataaagtatcgggttatcatatagtttgatgtaataaattttaaagaatatcataatcaatcataaggcgacatgtttagaggtgttaaacgtaccactggtgcccaataacaatactcataaaatatagaatacttcacacaaactatttaaaattgaacttttttttacattttaatttttatagaattttttacttttttttctttaaaaaaatattattttcacgttattttttcgtactttttcgtaacagacaataaaaatcacattgctttataaataacataaaaataaccatccaaatttttattaaagttaaaatctataaaaaatacataaaattaaacttttgaacgactccatttaaattcaaaattaaacttttgatttatagaacatatttttcacaatgaatatacgctttatattgtttaaagaatattgctattgagcactagtgatgtccaacactttttataagtagcgccttatgattaattaaagatattccttacaaaaaattcttatgtaaataataaatttgtgattaagcttacaaatttattaacatataaaacaaaatagctttttttaacactaaaatcttcccacttgccctttgttaaatttgaat

SEQ ID NO: 252446 - DNA, 678 bp, Cannabis indica
cacattcattcattattcaaggaataccatttttttaactaaatttaaaactatgaatgaatattttaggaggaaaaaaaaaaaacgaaaattaaaaagagagttaaattaccttaaccatgattggaagatcagtgttgagagctctagtggccaagttcttcccattttccatttacccaaactagataggaaaaatagaatggagtgagtgtgagagtgagagagagagagagagagatgccattaatacattcatatatttttttttcttctcatcattcttacaaaatgctaattaattaaattggttggtggtggataaattaaaataaaatgagtaataacacgtgtacaccaaaaaaaaaatacacacacaaatgtgacacatttatgtgtaagttacttcaatcaattatttttatttaaagttggtctcagttattaaaagtaacttaacatgtaaatgtgtactatatttgtgtatgttttatgtttgattagtgtacataacattcattagtctaagtctaagcatactttttctctctggaacactctggtaggtatgagaacactcttctcgtttgatcgtgttttggtccctgatatggggattttggtccacccatactgttcatgtggtggttttccctctcaaggtttgttgattaggtg

SEQ ID NO: 252447 - DNA, 494 bp, Cannabis indica
acacatacactcatgaagccaagcttcaataacaactcatctcacaaaagttctctctatgatacactgaactattactcaataattcccaaaaacattcctcattaaaatgctgcaacagatggctatttatagccttatccttcaagactcgatcctaactgtcataactgacagttaggtaaaaccgttaggattagttgtggaaaaacttagctagttgctgtgtaattctctattagtggccaatcataacatattagaataattttcttcctcaataattttttagaaaacataatcatttatagttatattatatgttaacaagttatattttcaaaatatttaagagaataaaaaattatctaatttcaactaagcattgcagcatcaacaattccatttggcagtgttagttgacttgaaaactattctaaactttctcattagttttttttcagaaaaaataaataaataaaaacaaaacgaaa

SEQ ID NO: 252448 - DNA, 523 bp, Cannabis indica
cacgtgtacactatgtacacgtggacattccaacttggcacttaacatccaaaaataaatggaaagggctaagtgctaacagaacttgggtttaggagattttaccaccaagattttagaattgagggttagttgcaaaaacctggccacttaaggaagttatgccgccaattacctttaaaaaataagattatattaattcttcactttttagggcaaaatttttaaatgaaccttaaaaaaaaactttatacaattaattaattatatatataaataataggaactataaatattatttattaatttggatttataaatgtgtgagcttttacagtttttataaaaataaaaaaaattaaccttactgcccgtacttttcaaccgtgctttttatagtaataaaattaaataattaaaaaaaaaaagttatagtttaattttacttggagtcattgaagaagttggggatagttaatgtgtgagcttttacagtttttataaaaaaaaaaaaaaaaaaact

SEQ ID NO: 252449 - DNA, 579 bp, Cannabis indica
accccccccaaaacccaagttttttttttgggggagaagaacaaccacccaaattaagggggcatctcaacagtcatgactttactccttcttcattaatttagtcccggtatttttgtgccacgtggtgctattcttgacacgtcatcgtataatacattaatcaactaagtttctagggtaaggagactatatacatataattggtaaatcataccaaatagatcctactttgtccattactactatacctcctacaccccgacttgtattttatttgctactggaagcttgacgttttataattgtttagtcagggctctttgactcataaccccttagctacctttaagaataagttaataccttgtttaagaattttattccatgtctgagtgcaactaaattaccaatacctcccttattcttttcttcttatttccccacttccagttggatgatcttcacttgtttataaagatgtttgttaatggagtatttgaactttggaaagtccatctagaagtttcctttgctagctttccaagtcgagaaaatcttctaatatttgtcaaaatt

SEQ ID NO: 252450 - DNA, 597 bp, Cannabis indica
tagacttacgtgttacgctcacatcctctcttacatttagggccttactagggtttatcttggttatattttcgagtctaacttagttatgccttatctgcataacactactcaaatatttatttaaaaaattattgcatatttataacaatacgtacttagggtaatcaccctacgtcatgattttacaataacaattaaatgtcatatcgcgccaccgcactatattctatgtacttagttcactgtcttactagatttctaatatgtggagaaatcctaatccaccggtaattctgaccaagtgccaataatccaagtcacaattctcgagtctataaactagggtatatcctaaaattatatttcataatatatacatttaagactccaatactggaccaaatagtagagctcgaaatgagcttttcaacgatattaagaacgtccaaatcggagttcggagtcaatagttatgaccaaaataagttcctggaaatcataaatgctctctacaagatttggtcgcagctactgggtttgaaaaatccagaaatctaattttaaagctccgaaaaggcacaaactcaacccaaa

SEQ ID NO: 252451 - DNA, 1019 bp, Cannabis indica
agttgttgaaatacaaaggtttgactaaccccatagattacttagataagtttaacattatcatggaaattgaccaggtaccgtaacttgaaaagtgtcctatcctcgctgcaactttggaagataacacacattattgattcagccaatttccagaggcagcgatcttgacgtgggagacatttgtagacctgtttctaacacagttttaggcagcaactacatacaaaccgccttacacgacactagccaacattaaaccagagcaaggtgagacttgatagaactattttaaatgttttaatgatgaagtaaaaaaatttgagaaggcactcaagtctttgttggttttaatattgattacagtagtgttattgcatactgatctctagaagggaatccaagtgcgatgaccgaaaacactggtcaagttttttgctatggctgagccccggaagcaaatcaagaattcacttgtagagctcaaaaagattaaagaaaaataatgatccccagctcgaaggaaacgatcaagaagtccttgatgacatagtttgaagggacatagtccgagaagacgtaatccaacaaggtgtcacagtttgtaattagctagatcaccaacaaggaaggaaagtcccccaaagtggaaaggaggacctcaatttgtaaactatgtcgaactaagtgtcccaggtgaccatatctatgccattgaagacatgagggtgtttttagaaaaccaccacacaaaaattatgtaagtaccattgttattccatttttcgcactatggcatggcatcacatactggtgacacatggctcctatttcctacatctggctgaaaagatattccaaacagagctcagcatacacttgcacggatagagtctgcttgaccgaacatagtaagggtagatggttcgagcagcatatcaacacttagcaattccaagattagaatcgtgaagcacgaaatcaatccctacaattcagggatcgtatcaaagggatat

SEQ ID NO: 252452 - DNA, 1133 bp, Cannabis indica
tacggtttgggtttctaaagtagttttttcggtgatttctatgtgggttgctatacgatttaggttgcttcgtaatatgcgtttctatgtaaaattccgtaaaaaatacaaaacaaaaatattttaaagtgtaaaaataaaaagtcccaaatattcattattttatgggttcatatatatatatatattattatcaagtcaacaagtttgagatgtacaatatacaaaaactgctacaaaaagtagcaacacaattatattattagtaaacactatatattacatgtaattattattaatttagctgtatatatatataaactatatgattaattaacgacatatggataattatgctttgcctcttaactcttgtcacatgaaactacagtcgaaactatataatttacagcgtgacatatatatatgatcaattgtacgttcaacacacttttttttttcttacaattaataaaatcaaattgctgtgtgtaggctttcatcatgattttttatttactagaattttatattttgaccttttgacttagatcatgaactcaataatttcagattccattgcaggttaaattttttcactaatttgcaatttcatatttattaataacctaaacgatttgttcatataatagttctttttcggcaaaacaattatgaatacgatcgaaataaaataaaagagatcgaacatataaatcccattataatatgtagtttttggtatagactttccaagctcttattagctctttgatgctaatatattgaccaattaatacctatgagaccttccatatataagtctcgcacatttgagatttaattaattaggatatataatttgggtaactgaactaaataaaattggtaacaaaaataaaatattaacaatataataagaatatgagtcaatcaatcataatattgaattaatctgttagaattttcaatattacataaatattccaacatatttgtattatggtctcaaaactatttacttataataataacctctaaattttctaatattttatacactacttttatatctatttttaacggtatatatatttttacatttcttgtaaaaaatattatacttttttaaa

SEQ ID NO: 252453 - DNA, 808 bp, Cannabis indica
atatataataataagataaatttcatattttgtaccaatgcattcatagctccagctttgaagttatggtgaaattgtggccttttctctcttgccaaatatactaaagttggcagtgtacaaccaccaacatctttcccattttgttctctcccatcaattattatctgcacataaataaaatacaattaaagaaaattattatttctaagttttttttatattattattcattaaaaaaagatataaattataaaacaatgcaagagaacatgctaagaagttatcaaaatagaaaacatgctaagacactctaaccactcacttgtaattttttatggcatgatcatgcacaaatttcgaataatttattagggataagttgaggaatatatcttttgtgtatccattaattaaaaatatttttatattatatttcattaaaatgtatgcacttttatgagtgttacccaatatactcttactctctacttaagtctagcacataatttacattaatctaagaggtataatagggatatcatctataaaagtgggtatatcttaaagaatatgaaaataaaggtaaaaattataacagataaagtaaagtgagtatacaatgtaattttctcgactgggcttatggctagggcccacctagctcaagagcccaaatttgttttttccttttaaaaatacataattttttttcttatgattcattaaattttaagaccggcttacctctcctctttttttttttttttaaatatgtgttaaattatacttttgatttttttttttt

SEQ ID NO: 252454 - DNA, 599 bp, Cannabis indica
gataaaagggtttctttaccccgtttggctctggcaaaataataaaggctaaaatttgaactttttagtgagcagccaaagaaggcccttgctccaaagtgtgataaaagacatatcaggggcgtgtttggctagtaaataaaaaatcaatctttaacttttttttagtgtaatttttcttttttttagtgctaacaaacatggcccttgtgccttatacaaaagtggggtaaaaattatcaaatactttttatcccagtttttattttttcaagtaaaaaaagtgggataaaatgtccattttctagtagtgtacgcttcctggatagaggacagaagcgtatgctaaagggacttctcaaatataaaacgtgccatctggagtcaactatccgagactctcttcctccaagaaggaaaaagctcaaaatccagagaagagtcctaccatgtggacatgatagacatctaagaacgcctttcggattggtagctataattccacgagacaactaccaaatgaacaagttagacttctgagaacacactttcagaagacaactaacttccataaccagtgcaacttatgaaaatctttt

SEQ ID NO: 252455 - DNA, 730 bp, Cannabis indica
ctaaaaaggaagtatcccagagagcagacaagggaaaaagcatttctaagtagggaacttcccaaggcggggatgaagatgtagatcctcaacttggggtgtcctcgcgctatgagaccttctgtctcatccttcaactgatgacactcttccgtggtatgaccaatatctccatggtattcacatcattttattaggttccttttacgtctcgcgtgtctcataagttttggctcgctaaaaaatgacttcctgtacatgtgcaaggtagattttttcccaagtttaattaagctcggtgtagccagcataaaggggtaaatatttgtcgtgtttcttctgtttcttattcttggacaaccttttggaatcatctttcctctttgttcttgaagctcccgacttgaattcttcaacagaatcataccccgattgctttcctggttccctgacttgttgcctcctgaacttagtctccaactcgtctattcgcaaatggaataaatccctttgctttggaccaagttgttgacaaagataaagttttttcaagttcaagtgttctcataggtcccacaggtcgtgacagctatcgaatcttgctcttcctatatgctacattatgcctttttgatcatcgctgggacgagtgttctctcctcacaatgatcgattatgaggtactatatgcctcgcggtagccctcccctcttctcgttctgctcttctt

SEQ ID NO: 252456 - DNA, 535 bp, Cannabis indica
tatatatattattttgagcttagtaattgcaagtatctaatttttttttcttcaaagagttgcaacaaattaaatatcaactacaccacataatataattaactatataccatatcacaaaatcttaatcttaaatttcatctcaattaaaaaatgctttgttattttctttatatattttcaaaatttaaatttactatgtagccaaaccataattattcaactcatatcgccattcaaataagaaaatgatcaagtaataaataattgtgttgcatttataatatgggcacaatattatcataattcatcttatgcctattattcttttattttcttatataattatatatcgttaaataaaaaagaaaataagatataattatagaaattatttaaaatttgagattattgaattatttattatttttttcagtgaatcaaataaaataggatataaaattataaatttaaaattttaatttatgtaatcacttttaaattaattttttatattagtatataaattattttt

SEQ ID NO: 252457 - DNA, 976 bp, Cannabis indica
caacttcctatgagaaatctgctaatccatattcttgcgttagaatatgtgctatatattagttgtaaataattagggttaattgtatttgttgtccgggtttattcccaatatatgtggcaactttcgtgtgtgacatgtgatcaatataggctggtcacccggagatgagttggaagttggactaaagaaacaacaagtatggctcatgatactagctcccggacttgaacaaaagacctaccttctcctctgggagtcaagatatagataggcgtctccgggccagaaaggcttgagttgaatagtcactttgcatttaatgcattttgggaacgcccataagatgacgtgttagacttcataaacctgatttagagcgattacacgataatcaaaggagctagtgacgactccatcatgaagaatcacatcgatcaagatggcatgaaggccaatctcacctagcatctacgctgcctactacgtagttaatgcatgccctattttgtaccttttgggaacttgtgcttgcccatagttggcttttaaagacaagtttctccttttcttctacccacgaatctctataaatacccctaataaacaattgagaagagtaaggatcacaaaaatattctctataagaaatactctcattaataacagagactcgtggactacgactcattaatgcccgaaccacgtaaaatctcctgcattaattatccctaagctctcattattatcttttaattagttgtcgaaaatctcagtcaatattttggtgctttcattgagagttgtgggaagcattgtctgaaaaatgacaacaaaagatctcagctacaatggtggaaactcaaaaccacacacgccaaccttgtccgccctaggatccttggaacccagaggacgaagaagcagcctcacgcgtaaatgtgggttctgaggaacaagacgaatcaaacgacga

SEQ ID NO: 252458 - DNA, 924 bp, Cannabis indica
tggtaagataaattccaacaaaaagtgcatggttaatcgtttccaagtgcaactaacatagagtacattggggagaagctgaaatgtgtcgatgatgtagagttgcagcaaactggtaaagcttcatggaaagcacaccaagcaaaaattcgaattttagatggcaattttaaagcctagaaagactgccaccatgtttcagacgtatgatggctgcttggaagaggggaatctggttcttctgaggccaatttataaccacttttaaccgtataagtcccagatatagtataatgccatgaaagaacatcatcacaaggaaacaaactcaatggtattgaaagaattctatccacatcaggttgacagaagtgcgctttgagtttttgaacatcccattgtctcagatcagtgataaattcagcaactttgatattaggatcattcccaaaaaacaccaggggtttaaagtttgaggtgcctgggatccaaggttgtgaattgcagcaaacaatggcaaatgaacctattctccattttaaaccttgaagcagtagttcctttccccaaacaattgatctccaagtgagagatgcttgtgtaccaactgtggcatctattaaattaccattcaaaaaatacctgctcttcagtattctagcaaggagtgaggatggacaatcaaggattctccaagcttgtttggtcaataaagcttggttaaaatgaacaaagttacgaaaacccataccaccgtgaatcttagctttgcaaagaaatttccaatttttccaatgaatagagttaccatttgcagacgaaccccaccaaaaccttgacataagttgctctatttgagtgcaaagtttgattggcaattgaaagcaacttatagcataggttggaattgttggaatttatttt

SEQ ID NO: 252459 - DNA, 2094 bp, Cannabis indica
agagactaaattacccttaggaattgaatttaatcttaaggattttgaagggaaaaagagtcagttggtaagggaattaatctttgtcctatatggaggtgttggcttaattggggtttattttattaaataagttaataataaattaggtttttattgctaattggagaagaaaagacttagaaatatgaaagctaatttgaaacacaatctttcttcttcctttctccttgctcgagccctaggaccaactgcactcagagaaattttgctagcaatccttcagttcttgactgttttgacaagggttagggtggttcaagctacaaggtgagtttctacttctttccctttgattttttagagttgtaagttaggttttgtgtggaatttataggatttcgggtctgtattacttgctatagttcagagggtgtatttaggttctaattaggttgttaggtatgacttaataatggttaagttgaacttgaaacaaattgggtttatgaacttaatctttggttttataatggtgatttatataatttgattaaaattagttaattgatgtgaatggatagattaaatactttgtttttatgttaatacactattctggagttgttgattaggtttgtaagggtttggctcgagttcgggggagaaaacccaagagttgtggcctgccagaatcggtcgatcggttgtcctgcagggggagttcttgggttttttcctcaagtgcaatttttggctcaggattgttttcgggacctagtttagggtgcttgggagttgtatatcataatttggagctaacagaagttaggttttgtccagttttgaggattagggttagttcccagagttttgatttaaaagtatttattggattttgttgttgtgacataggaccgggattgtcaagcttcatttccactcaggttggccagcacgcctgatttttggatcgaggtaagaaaagttttatgtactgctaaatggtttaataaagaagcaattataattgttagtgcctcgattatgatcgagataaatatgtatttgttgtgactcgattatgatcgagatgatggtgagaaacgattattatcggttgtgactcaattatgattgaggtaacaattattatcgtttgtgacttgattatgatcgagggaaagatacggtcattactgttattatgaatgaataaagatacggtcatcaccgttatgagtaattactcgttgaaatcgcagataggtttcttagttattgttctctttatcgggcaacaatagtgacataaatatcttgtggataacgagtggtaggagtgctttatgaagcactgggattatgtgtttatggtgatgtatgattagagtgctttatgaagtactgagattgtatgactatgtattgagtaaatatctatttatggtaacaatgaaatgattgactatgatattcttataatgcatattatatgtgtttgtatggatgaaaacttatatatgcatgctgaatcatgagtatgtttattatgattcattgtgatgatttgcgttttacatcgcttttggttgaatagcttttcttgctgagtctttatgactcatgggtgctttgtggtgcaggtaaggaagataggttctgtgttcagtcatgagtcggaggtctcccagcaatgtacatatcagctgtggtgtcttggcttccgggaagtaggatcaaccctttttctatatttggaaatgtaaccttacttttgtaataacgattttgtaacttgttgtaaaagaattttttaagcaagggatccccgtattacagtggtattttaaatgatagttatattccattttaatcaaaagtttttaattaaaccccactttttttttccaaactaatagattagtctaagtaagtttttaaaaaaaacacacacgtggcgtccctgtgagtcggggcgttacactttcacaaaccaagaccgattggctgggctagtgtgaacatccctaggacgaccgttgtccctcgagtaagtgatccacttttagaaaaatttgcacagtcatgagt

SEQ ID NO: 252460 - DNA, 778 bp, Cannabis indica
aacattaaatgttatttctgatttgtattaataagtaaatctgattatattgaaacgagttttatttagggcataaaacccaacacatggattcagaggattttgacctccccgactgcctctggtctcaaccatgttacattgactccttgtgtttcgctgggcatccatattataggacttagcttacgaacccataagtcaggtaggtcagaaagtgatcacataaatttaaataacgcattcatggattttaggcagcacatttgaacatataatatattactagcatcccctagctcatttttcacattctactaagtccccataaggccagagcatctctctctactttctctttctagaaatttgagctctttctttagtcaattctcttataatcctcgtgagaaataaaaacttgaagtagacgtagctctattaccatcacaacatagggagtgaactattataaattctatgtgtctctttactatttacttaactcattaatgatctcgccaatctagcaagctggtattggccaattttcaacattaatattttggtactttcattgagagctacgactcgagtttccaatcatcgctcaagttctttactaggagctttgtttctaaaggaattcaaaagttcaagcaagtaatcacacatgagctcaataactgtttctaatgtcttcaaatgtgtgaagcaacactaccactcttggtaactgtgccactacttagctggcaatagacacttaggctccccg

SEQ ID NO: 252461 - DNA, 542 bp, Cannabis indica
ggtatttggagagactatctccgagttcgggctacgatcgacattgagaaaccgttaaaaaggcgtatgaagctgagtaaggattcgggtgaatggctatgggctaatttcaagtatgaacaccttcccaccttttgtttcgtgtgtggaatcattgggcatgccgagcgtttgtgtccaaaacgatttgagcaaacaattgctgaaactgcaaagccttatgggatcggtctaagagcagtgatgaagaagaaaaattatttaattggagctcaatggcttcgtactggaagggaggaggagacggcaatggagggtggtgcaatcggtcagaccagctccggtggacagggagttaatgcgtcgaagatcatggaggttgatggagagatttcaggcgtgaatggctctgttcgtatccctataattgagactccagccattaatgctaagatttccaaggaaagtgtgcaagctggtgttgaaaatttaaataaggaaactccttatatgcatgactctgattgtttattggatactaa

SEQ ID NO: 252462 - DNA, 750 bp, Cannabis indica
catctacagaagcttcccttttacaaaatccaaaacccaatcctcttttttctctttacctctcaatcatactatgcttctggtgtgttgtgtatcaaatgaagagggtggctatatttatagactgaggatatgaatcccaaaggcggaggcttccaacagctaggtagttaattcagttaatacttaactgacttaacaggcaccttatagtgagatctccatggtcatctcttggcatcaagatctctccgaacaagtatcacacttcttggacggatgtcctaaactaatgaagcacaatctggaaagacgtcctggataagcacaaagcctactgaaacagactatccagaaccttttcctagaggaaacacctacccaatcggaactcctttctggaggatgactaactctccagaccagctctccacaagacttctttcggatggtcaagctagcattccgaaacccctttccaaacgatgactggctttcttgaagactcgacttgagacctttttatttagaggaactataccaattacaaatgtgtaataatgtttttaataagtataactttgttatttctccattatatttatgtgtatagatttaaatatattttaattaggataaatattattttagactctctattttattaaaattattgacaatctgttttattaaatgattaaattggattctgacaaaagagttttgaggtgtgtggttcttttatatttt

SEQ ID NO: 252463 - DNA, 817 bp, Cannabis indica
tagataggaccactctttttttttatatagatgtatcgtaattggtgtaatttatatattttaccttttaacttaaaatatataacgctctatgttaaatttatccaacacatgttgattcatgtggtgctctgcaccatatcccacagcccaatattggagtatccatattatgataatccaaaaaggacgtgtccttttttcatttcaaaaggacatccaactctcatatcctaatccaatcaaataatgccaagtcatcaaatggtccatcctatacgtacgattatcaccacaaaacaaccccctgtggaatttaacctggtccattatcacttggtgtacagtagtcaatacaaaattataggtgtaaagacttgtgtataccagccgtgctagttgagaagactacaaagttattgctccctaatttgtagtcttccaaaccaatctcatacaaattaaaatctaaaggaaaaaaaaaagagtaagattacagtaattgtgttttcttacacaaactccaagcttttatatcagaggaatggaaaaagaaagaaaaggatggaagagtgaataaattcgagatataaagagagtaagcaatagggcaagtggagaatatgagagagaacaataggacgaaagatatgaaatctgaatctagctactagttaggtaggcctatcaaaatgaattcttccccacactcatctacgtagattaattattaaaaaaataaataatttatgaataaatacttaaatttaactctcggcaaataaatacttaattttaatttttagtaataataata

SEQ ID NO: 252464 - DNA, 1311 bp, Cannabis indica
cagcttcgaaatttcatgctcaaacacaccaaatcatgcccaaaacttaaatcaaacttgcaaaccatatatacaaattatcaacattcatacagagagttgaaacatacatttaaggcttaaatcacagcatacaagcaaaaaatcatgatatatatcttcatccaaagtaattgcacatcaacaccacaaaaacaacttcaaaactcagcatgcctttccaacaaacttaaaatcaatttcaataatcaaaaccccaaatctcaaccctagaatttatccaaaacatacaaagaatataacacaaccactcaacaattcaatcaagttccaaacaccatatcttaaaccaaattcacctacatgtatctatgaaaacaattacaaataaacataatttccatattcaattcagcaacaatttccaatgaaaaatagtaggaagagctacctcaaatcatttccaaattctagcacaaataccaccaaaatccaagctttcttccaaaggaattcctcaattttgaagttgaaaagatgaagcttaaggagagagagaggggatttgggttttgggtgtaagaaaatacaaaaaaatatttcaatttccatcaaatttcctttttgttgaaagtagtaaattaattgtgcaaaattacaaaaatgcccctagggccatataacacacaattaggcattcaagggcaattatgtcatttccatcacatatacactcaaataaatttcagaatattcacacatcaataaaatgccaacacatagtcccaaaaatgaattttggccccaaacccagtttggcccgaaattctcaattgtgactataccgtcccgacctgtcagaaaacacctaaaaaaagacaagataagtatactatataataatatagtccataagcacatcataatataaattccacagttttacccttctctgatcaaaatattactaaaacgcccctggctcactaacgaggtttaacatgtcatatatctgattaatacatataataaattatacaataatataattccataataatacacatttaactagttagggtttgctaatctattttcttaatcatagggtattacactaggagtcaaaagactttttttagaattagccattggaaaaatgccccagcatcttactaaagtaagttgcttgcactagagtaaataaattatcaagtataccacaagccagaggcttagataatctcaaacctatggtaatcgaatcaggaagtttggttaagtccattgaatagacttattatcaaaatt

SEQ ID NO: 252465 - DNA, 552 bp, Cannabis indica
tattatacgtttttctattggttttggtgaagtcaagagctttgatgcagaatttgtgatatataatagtattttttcttttattttaacaaagtatgttttgtttctattaagtttgtaggtaatttattttgcaggccttctcttggaagccgttggagacttatgaatataataaggatgagataaatcaggtagacattaagttcattctcttacactattaatttcagaggaaaaaaatgagctagatttgtgaatttttatttttaagtgatccgattccgctaattcttacacatggaatcataatcctgttcttgcagattgcttgcaacttcaagtcttctttgcttacagctgcagatgatggtggcaaggttcttaccatctatttcatagataattttctgttagtgttcattaaacaataaattttagacattctcatcagcaaaaaaagctgaaattgtagccagacattttggttgtgtttcttctattctgattctgtgctcattcaaatacatgttgcagatcatagacattagc

SEQ ID NO: 252466 - DNA, 8089 bp, Cannabis indica
aattagtaatttatatatctatcattccatgtaattgtaaaaaaaaataaaaaaaaaaaaaaaaaaaaaaaacccctcctcccccacttgactttgtatatatccattattccatgtattaaccaaaaaaaaaaaaaaaaataaataggaacttatcataaattaatttattttgcacacttgcttgtagcccaatattgaatgttttaacaatttttataattatttaattttcaataaatttgttcattgcttaaaaagaaatattaatgttttaacctaatagatattattacaagttataggaagtggcaagtagtgaatataaatatttgtatatataatagcatacttgcctctagttaggtgttatatatgtttattgggtaggtttatggtttaatatttaattaattctatacatgttgtagcatttattttattttattctctctgaaaggaatatttattaatgtagttaatattaataattattaattggttgtgactattttattttatttattttttagttaataattatgggtggaaaggcgtctgtttttcagttacattattttaatattcgattggctttattattacgtacttatattacatatagtaaactcttataatttgtatagttaactattgcatgaacagatgagcttacttggtctgtgtagaattaatatatacattcaattaataggtttgaaaatgggaattatgactattttatttgtatatatatatatatacacaatgatcacatatatattaggacattaaaatataacatgaagattaattaatatattagtgcaactaattttgatcaagttgatgagttgatcaattgtactatatatatttttttttgtagtaatggaatagcttaattatgttaaaccatggactttgttgatggaatatggaaaacgtgacaaatgaaggtacaccaacgaaatatttattatagtaatctataatataatgtttagttgataaaataaaatattatgctacaaaattatttgttactaataaaatattaatattatttaatttagttgaagaatattacattttgttcggatttgtggactcaatccctatatcaactcaatatacagattagattatatgatcttagcatcaaacaattatcaatcatgacatatataattgctcacatacacattcgaattctaacctataaatacaaactgaattgaacaaccttcgataattcattttgcatacaaacggaataggatcaacaattcaaacatgaacaaacacaataattgcaggaaaaaaagaaaaaaaaataataaaaaagtagaagagatcaaacacaaagattttccccaaagttcaccctaaaacttagagttatatccccattgagttcactataggaattgatctgctcttgcactataatcagtcttgaattacatcaatggtgttgaagattccatgtcacacagattaatgagtaatcttcttgatgtcaatcttcttctcttaatctttttttacaactttcctctattatctcaaactctcttttgtttctcccacactttgagaactcttctctctaaatgatgaagtcggttaagttggttataattgttttgttacaaacaaatacaactaacactaaataagatgtatctagcttcataagtcaacatgtgtattaagcttgtaagggaatttagtccaataattttcacctaaattctcttagaagtttaagtcatcactgcaagtttattcctatgggtcctaactcttttagcaatggtctatcctccattgcttagtcctaatagtttcaagcaatgattgaacttatttaggttcaaaatctttgtcctcatatcaacagggttctcctctattggcaccttcttgatgtgaatctcttttgtatcactttgtcccaaatgaaatgatactttatttcaacatgcttggtcctatcataaaacacatgatttttacataagtgtatgcaattttggctatctgagtagactcttggagctcgatttgatagcttcagttatgcatcatacccttgatccaaatttatttttttatggcctcaataactgcaacatattctgattcagttgttgataaagcaacaacaagttcgatttgaactctccaactagcacagtagccactaggggtgtttatcaaaccacccacactgcacaaatcgcctgcactaaactacaccgcataaaaaatacgatttgaaatcatttgcggtgcagttgtgctttgtattttagccaaaccgcacgacacagtgcagtggagtttgcgattttaaatttgataattgcaattcaaaccgcactgcactatatattacaaaattactattttttacaatatgatttttattttttctttcatataaagacaaatatgtgtaatgtatgtgtatattatattattttttagagataatttaatataataatttgataattagtatatatgttatgatattaaaattttaataataattttttatattattaaaattttattagattgatttttaaattttaattataatatttgttaatgatgatagtgtaaactgcttaaacagtaccgcaccacatcatatttttgcgatgtgatttatgtagttttaagatctcgtggtgtagttgtggtttgagaatttacaaaaattgcgtatgcgacttggtttgaaaaaaaaattacaacccgcaccacgaacacccctaattgccacctatgaggaaacagtatgatgaagtagactttatgtgatctctatcagtagcaaagtcatcatcactatatccttccacaaatgtctttttgtttctcttactaaacactaatcccacatcttgtgttcctagcaggtatacaaacacccatttcacagccttctaatattctttctctggtgttgccatgtacttggtcaatacactcatgatgtatgtaatatctggcctgatgcataccatgaggtacatcaatgaacccattgcattagaataggaacattcttcatttcttccttctctactttactcttgggcattgatccttatttgatattgataagtcatatgttgttttgttatctttgcttctgtcatagaaaacttctcaatgatctctttaatgtatccaatttgtcacaatattaattctcttttgtcttctgttttttttttatattaattctaattatcttggttgaaataccacgatccttcatctcaaattatcatttgagccatcctttcatcaattctatcttggacctctttttgcttattataagcatgtcatttacatatagcaggaggtaaatgacttcattaatatcaatgcctttaaaataaagacaataatcataaaagcttctagtgacctcttcttactcacgaatgagtgaaatttattattccattatccacagattacttatgcccatacaagaaattggcaagcttgcacaccatctcttggttgttcaacatagatatcttcttttaattcaccatgaaggaaggatgtggtcacatccatctaattaacttctagatcaaactaagttacaagtgctagcattattctaattgttttgtacttgaaaacatatgagaaaatctcagtaaaattagtgccctccttctgtgtgaatcagttggcaaccaatctagccttttatctcataggctcactaatgtcccttccttcttcactccttcaggtcttaacactagtatccaagttttattcttcaacaatgatttcatttcttcatttatggtctgcaagcatttcttgaaatcacttattgtcaatgcttcttcataagatctggttctgctttgttcccgccagcaacacatgtaagaacatatgatattatctcttcctaagtactatagttgaattcctggtttggctttggagctctcttggccttatctattatgagttgatagtttacaagatctttaggattctagtgtgtgtcttcgtttggttccacctgactagtgtcatcatttgtcactttagtgtttgcctagtcttatttttcctcagtttgttccacctgagctgaatccatacaaactggctccacttgagtagggttgggtactagtggtcatgtaccatgatctagtcttgtttgaaaattcattgtgttacctgtagtgttagtttcagaattggaacctgtactagaagtaaagttagtaacacaaaggaatatatcttcttcaaatatcacatctctataagcatagtttataaaccaggtttctcccttacccacaacatgtagcctatagttccctcatagtatcctaggaacacatacctcagagctttaggctctagcttccccatactctggtgtgcatatgttgcacacccaaacacccttaagttagatagatctggaggcttaccagactggattttttctggtgttttaaggttaatgacactacatgggcatctgctaactaggtatgctactgtgagtaatgcttctacctcagtaaggcttcttgtatttgttctttccttaattttaattcaattcaccatttgaggagttgttctttcattcttcatttcaagatccttagatttgagagctgaaatcatctcttccagggtgattggtgttctaccatatttgatagcagtcttcacttccttgtaagtttttagcaaggaattcagtatgatgatagcctagttctcatcactcaaggcttcattttcttatgtttgcaagctcaatgtgcattctcaagagctcatcataattctgtttcagggacttggacgaactcatctagaagccaaagatcgtttcctttaaatagatcttgttggtgagtgatttctattggaattgttcttccaatttcttccatattttagttggtgtttcatccttatctatcgatcgaataattgaagataatgattcttgtggctgccagagttcttctttctgaatcttggtaagatcttctagccactatattggatcttcaagcacactcgatagcctatgttgtgcaaggagagatctaatctttcttctccatatcctataatcactagttccatcaaacctatcaacatcaatctttacattactcaggttagcaaaatcaaaattagacaaagatttaagttagagttttctattagatcattcaaatgaacatccaccaaatcttcaatgtcataaactctttgctgaggatcaatttcctccagcctttgcttgattcttgatcacttcttgagttgaatcttttgctaaaagccgactctgatatcactgttggtatttttcgactcgatccctacaccaactcaacatacacattagatcatcaagattctaattgactttagcattcaattaaataattaccaatcatcacatatacaatttctcacatacacattcaaattctaatctataaacacaaattgaattgaacaatcttcgatgattcaattttcatacaaacagatcaggatcaacaattcaaacatgaacaaacacaacaattacagtaaaagagataaacaatgacagaaaagtagaagagatcaaacacaatgatttttcttgaggttcacctaaaacttagagttacatccccattgagctcgccataggaattggtctgctcttgtactataatcagtcttgaattatatcaatggttttgaagattctaagtcacatagattaactggtaatcttcttgatctcactcttcttatcttaatttgtctttataattttctctcttctctcaaactcccttctgattctctcacttgagaactcctctctctctatctctcttggagctcaatcttgctcagattgtgatctgctcaactgagttgagagactctactatatataacagtcttggtggttggttaagttagttataactgttaagttggttataactgttctgttacaaatagatgaaactaacactaaataagatgtatctaacttcataagttcacgtgtgtattaagcttgtaaggagatttgatctaacaattttatataaaataatatttaaattaaataatataagtaataaataaattaatgtagtaaataacattttgtcaaatcgtaacacaaatatgaaatgaattatggtctaaaaggtgttataaatcttttatattgaagatcatagaatttgcaacttatctctctattatctagggttgagcatcggtttggttggtttggttggtttttttctatataaaaatctagaattcgattttcgatttggattggtgcaatctgaaaaccgaccgaccaatgcaaaatctatcttaaaatcgaccgttttgaaccttggtttggtcagtttaaaccgcccaaaccgaattctttttttttctttaaaatatgatcaaatttattctataaacacattattctacattttacaactacaaacatataaattaattgttcaaaaattaattattttatttttttaactttaatattaataaaataataatatattattattaactacaatacataaagcaaaaaaaaaattaataaattaatctatatgtataacaattaatttctgttttttcggtcagtttattactcaaaaaaaaaaaaaattgaaccgttcaatggcagttttaaccgttagaagttttttcgatttttggtttcgatttcaacaatgttcggtaagtcgatttaaacgattttttaaattttttgaattttatgttcactcctactattatctctcttaattagtaaattgagttactcataattttatactagctatataattctatagtaagaaaactaaaaggaaataaggtgatcataacaataacatttgagaggatcattatttctagagacagggcacatggaatcctggccaagcttagttaatctacaacacaaagtatctttattagatattatatacactacttgtatatatatttcattaattaattaaataataacaaactcatcaacttttaataattaatacaatctctctcacacatgtacacactatacaattctaataattacatatttacataagtattgctatgcatgtaatagtctctttgggtccttgaaattttcttgtccttgaatataataattggatttgtagtgtagattatatatatagcatatttcaatgattagcatatatatattaattatttctgcacgtaagaaaatgtataaaaaaatatatttataattaatttaagaagaaaactaatattatatggcagaccagctatgtttacttgttgatttcactttcactttcacagacagtaccatatatatacatattatatatatatggctatactatataatatatataaggccaacttatatatgaacaaaagagtacagtaatacataatgtggccagcaacacactgtcgatttcatattaggtatgtgattaattaattaactaagttgagattaatattcaaaggtaaatgaatgagaatgacaatatgtagtaattagtgatataatatatgtaaaaagatcattgattcattgataatgttatatttcattgtgtatacgtatattaattttcgtcttatttgaatcattaagttgttataatgtttcttttcattttgtaaagcgatcagcaaatgtagtggttcatttctttgtgagggcctctatatctcactctgatccttgttcaacttggatattgttccaattgagttgttgcctaatttggtaacggagattttcgtttaataaaatgacttttatttttttaaaaaaaaatatagtcaaaaataaaattacaaatatgatgtagtaaccgaaacaaacaaattaaaaatggtaatttgcagcataaatatgtaagtaactttcagtttcaaataaatatgtaagttttgttataaatattaataattatgt

SEQ ID NO: 252467 - DNA, 545 bp, Cannabis indica
gttgtcttgtccttaacaaagcaacaattttttatgaaattcaagaaaaatgtcattatcttgagtgagcttagaaacactaacaagattcttggtaatggaaggcacaattaaaacagatttcatatataaaggataagatttatgagaggagggaatagagtcagaaccagtgtaagaaataaacaatttcttaccatcacctatggctagagtgtcagggccagagaagggtttggactcatcaagattgcctgaatcgaaggtgacatgagtagtggctcctgaatcaaagtaccaggagttgtcttctccaaagtcttagatcatcgtggttgtataggcctgaggatcacaatcacaatcaatctcagtaagaaaggaacgattgttacctagttttagggttgtccagtttttatcaaaacggtaatgacacacagctgtagtgtggccaatctcatgcagacttggcacacaactttctgaaggaggaaacttagagaaacctctgccctcgaccaggtggtgcagtgtgatgattg

SEQ ID NO: 252468 - DNA, 1128 bp, Cannabis indica
atataattactgaaatgaggcctcaaccatttatctcattcagccaagctcaaatgaaacatcgtttcacttctaaatacttagaaaatatagattccatatctatgattagcgctcccactcaaatgaactaccatgttcccaatatgtaaacatctgccagaaccattggttagcttccacaaaaaatttgaagaatagcttcctcttcttcaagaggaacaccggggaagggagatttagtccattgtatatctatttctataaacagttacttgtcgatgagcctaataaaatggactcgttgactaaggatagttaacgcctgaaccacgtaaaaatcttatttgttatctttctattaattttgttataactttcttatgctctaaaaatatttagtttccaaaaaatttggtaaacattttggtgctttcgttgagagctaaagaaagagacatcacgatggtccctagcgcaagcctataaaaagaagagcctgtacaaacaaaaaagaaggaaggccgcctaactgcccgtcaaggtttagctagaggtcaagaagatcttgattagaagtattattaaaatttgatggccgacatcctcaaccgcccgaagaaggcacagaagatgaacgcacacggtcttgaaacactcaccgcactgatactcacccttaaaaagtcagatctggccagcgaactccctggccagatgaccggccacgggtatcctcaagctcgtgttccttgccatccattagggcgtaactacacagacacgatgaggtgcaagagttgttggggccaggcaatgatgttaagacccgatgcagtaacgatgactgactcacgaagggttgctgatataacgaccctatccagctcacgactccagtgtcagtcctaatgcaaggactagatccatcgccaacagctagttcccctaccttttccatgcgtcacgaagctaatcaaaaaccaatgttacaagatcatgtcgtgacagcagttgagaggatatcatcaatctcattagtgcctgttgggtttccagtcaagcctgatggaatactgctggttggaaggtgtaacaccctaactaacataggcgtattacgtgatt

SEQ ID NO: 252469 - DNA, 1967 bp, Cannabis indica
gagtagtttgttgggttgttgtggaaagagaaatcttgttgcaggacttgtcctcgtgggtgattgactggtatgagattggtggtggatgggttaagtgtaggggcatttgggagggacactatggatgatgagttaaggagaaaaaggttggggagtagtccgaaagggccatgatttggacgggttgttccgcgcaggacattttcatagggaaggggtgggggttgggtagactcgtcagaggctctcatgtactcagtgcaggaggggtaagagtgtcctaggcggccacagtagtaacaatgatcaagtatatcctcatatttcagttctagccaggttggggaagctaagccaggaaacactattggtatgccacggggtaagggtttggtaacatcaaacatgatgcacactcgaaggtaagagccccaagtttcaagcaaagagggctgatgaacttcaaggagagtgccagcaatttggcccaacaacttggcaagggagatagaccttcgggagaaggggatattgtggacttggacccaaaagggaatttttttcatagtttctggggataaagtggagtcggtatcaggaatttctaacaggatagggcacttgtcaaagacccatggttggttgaggatggttctacgtctatcgccttcacagtgaaatgcagcaaggcacaggttggaattgggtgatctttctttgacactcactggaaagcgtcctttccagtgtttttccagatagtttttgagggcattgtggttaaaattttttgttgtgaagagagtggccataaggtgaaactggggtggggctggtggaagtccctcatttgggtcgacatgctcagcaagtgaatggattgtgttttcagtatcagtgaggtggagggctgcagaaaaagatctagctaagtcttccattttcagtaataaaggaatgcacggagaaagcacagatggataatgcacaaaaagggtaagcttccctaaatctagaactgggtttaaataggaagcaaaacatatagcaatcaaggacctaactaatagatcttccatatctggagatgtactcgagtgatacaggaagaataaaagacagacatttaataccggatcaggcgggggattatccaaatccatccactgaccaggtaggtagaaatagcaattaagactataacccctattagaactggaatagacagccatgattaagaagaaatagggatcattatgagatttgttcagagaggggatcaaacctgtaagggaagcattaatggagtggcacgcctgctcccaaatcgtcagcaaagttgacgattccgatcccagctgagaggaggctgatggatggctgtcaatcgccattaatgcagaaccaccacgacacggagacgggtgggaaaaaggagtttagagactcatcactattctgaaagtttgaagaggaagaagaagagatctgagttgccaacatgcttgttgagagaaggagaagacgaaggccttgttctttgtcccgactttgcctccaagaaagttaataacttattacagatagaataaatagatagaatatgcagactttgtttttatttgggactttttcatttttacacttcaaaacagttttttttttgtatatttacagaattctacatagaaactcctattgcaactgttgaaaatgttgtgaatcttttaacaaaatatataagtgttttagtgtgtgtgagttggaaagagtcccacatgtgatatgaaccctcatttacaagggtataaagagtgcaactttagcatttgggtttgggccccaaggggtacccagttttgtgcgaatgggtgaggacacacacttgacccactacacacgcgcgcgccgtccgattcgagccgggccgggttgggttggtgtggtgtgacactattattttt

SEQ ID NO: 252470 - DNA, 779 bp, Cannabis indica
caattttactatcactcatgcctttaatttttatattttatttttgataggagaaattaaactaactgaaatatcttatcatacctctctttaaaaagcttgtttcctccacaaatgatcaaattaaaacactaacttcaatcagaattcattcttctcgtaatgacacatacatgttgctaaaaagctaaaattgaaagatgtttaaaaaatatggttacttaataatgtttcttcaacatgtatgtaattgaatttactttaagactacataagaaaataaataatttattaattacaattaaaaatgataacttcaacaaaataaatattagagctaatatagcttaatactagtaagaaagaaataaaaataaaattctagaggaacaaaatttaataatcggtaaaaaaaaaggatcaaaatggcaagtaaaagaccatgaaactaaatgattacctctttttgttttaatttttgaaaaataaatttatttcttagattgaagttaaatttagaaagttaaattgagaatgttagaagaacacaaagataactatttatatggatggagaaaaaaaaatacaatttaaaagaggtaaatcttaaaaatattgagaataaatgattgaatattgatacttagaagattatgaagattgtaaatggaatttgaaagaagaatcctttaacgagtgtctcaaggtaaagtaagttgttttcttttttttttttcctctttttgcgtgtttttctttttttttggaaaatgtagtaa

SEQ ID NO: 252471 - DNA, 427 bp, Cannabis indica
atttttaataaaataaaataagtttttttaatagttttttatgtaaataataattgaaaataatagtaatttatggtattacacatatataaatttacacacaataaattaaaaagtatacaatacaccactccaaaaaaagagttaggcatgcaatagacaatttaaatcttattttttgtgtattaaattttttaaattttgcaaaatattttaaataattacaatatacacgaccatacataaagaaaaattaaacttaaaaaatctctcagataaaagtacatttcaatttacacacaataaattaaatattaattttacaaatacaaataataatacatatcttttatacataaaatgtggctatctaaccattttgttagtttaacaaaatattttaagaatataagaatattctgttaaa

SEQ ID NO: 252472 - DNA, 676 bp, Cannabis indica
agtgagtaaagatttattttttcctattttctctcattactttatttggaaaattgggaaaatgccctctctaaaacaaactcaaaccccagttttggtcatgcaatctcactctttatatatatacataaaaggttttttattagcataaatgcaaatttactagttactagttacttgttataatttgtccaaaaattaaactaccttttttcttttgaaaactaagatagtttgttaaataacaaatatataactaactttttttgtttctaaaataattagtttagtattgtgtgtatttgaagtttgttcttttaggagtgacgatttaatattggatctgtaactattaggtctttagaacttatttcaagcttagaaatatgattggtggcatttatgtttttcttttaaataaaattcaaatcatcaagaacaactcctaagaaagagaggtccatatctttcctattgaaagcttgaaaagcatgggcacagtcagattcaaattgtaaagttctaaatccagtccttttgcacaatctgatttagttaagcacaaccatagcttggtgtcatttatgtttttgaatgcctactttttgtgtttctgaaatgtcacgccattcgccttttttccctggagatcctagtttgatgcattcttctgtgt

SEQ ID NO: 252473 - DNA, 531 bp, Cannabis indica
ccagtttaccacgcgtgttcaaattaaaacttaaaacgtattttcggcacggtaaactattcgaaatttttcaaaaataccgtgatgatgttgtaagcatgcatatataacgaacaccacagtgaaaaagaataattgaaaaaaaatattcttacatgtgtttttgggcataaagattgactaagagattgtaacaaaagattaacggtaatacttctcgtaacaactaattatacattcaagttaggcacatacaataaaatattctttaattagtccaatcaaggacaaaaatagtctttaaatatttataatactcgtaaagatcatattttcttgtagcaataaaataatataagaatttaagatactattctaatcctattgttgctcctaaaatcgcccaatatacgtggaccaggcaggaagggacacgtggatcaaattacttgagaagaactgctaagtctttgtatgacaccaggaagcgttattcgcatgggtcccggaagatgcacccggagtacaagg

SEQ ID NO: 252474 - DNA, 658 bp, Cannabis indica
tttcttgtactagtattgattacatttttcaatcacttatagatcaatcaactctgagcgaataaccttgggaaagtatcatatgaattgtacatcatcgcaaattcctctaatttagcatgctattgttatcttggatgtatttttaacggtattaaattcctagttgaggatcgggatgacaatcataatacccaaaacagttgtattttggtgcctggagaaggtggtaaaattttttatggcgtactcaaagaagtctatgagttcacttacttgaaggattgtagtgttattattttaggtgcaagtggtgggacgcaaacggttgcagaacagaaagtgttagttttttcactagtgtctgcttcgcctgtcgatggtaccaaaatgaaccattcatatttgcatcccaagaaaatttgatatattacattcccaatttgaagaatggagttgaatggaagcttgtcaatattttctaccccacaatgtttggaatttcttagatgaggatgatgatgagaccacgactatacaagaaagaaactcttcgagaatccagttagtcattcaactttcacaaatggatgatgtcgaatatgtctgtgatgatgtcgacctaattgaagtgaccaacaaggactgtgagcagtgt

SEQ ID NO: 252475 - DNA, 690 bp, Cannabis indica
ggagtacaagagcaggtagcattccacgtctctttaggtggctggcccgatcaaagctctacaaagagccgaaggaaggtgttgctgccattgacaaaaccgattatggacaaaaccgaaatgaaagctggtggaatttaaagtgttatacagctgatacaattgtaaaaagagtgaagaatgatgtcaaatatagaagtagattgtttttgacaaaaaaaaagttagtaaggaggataaaaggtggattgaaatgttgtaaataaattggtttttcagaaccaatggtgaataggttgtaaaaagatatttgatgcaatacaaaattctctgatttatagaagaaaaaaaaatcagctttaataatagtgataattatttttctcaattgaattttttttaaatgaattagtgaaaataaatctatttataaatgaattacataagtaaaaaaaatggaatgaataaaaaaaatgattatcttattttaaaataataatgctaatttcttagtgttagcagttatttgaatggttttattatttaattaatctctttagttgtaatttaataaaaaaaatctcttagtgtttattttatattattaaaatataaaatttattggttgtataatattataaaccttttttatgttaatttggttatagttacatattaattagtgtttat

SEQ ID NO: 252476 - DNA, 1643 bp, Cannabis indica
tgcataaatagactccctcttattatatatcacaatgattaagccataagaagggccttcatttctgcaacaatgtactcatcctttcttgttgtgatagaggtgatgaatacatcatattcagcgagaagactgttaaagatggcttcaatatgatcctctagaatctgcttgtgatcgatagttgctatgagatcaacaagacctttgatctatgaggagttagtcgttcaaagatctagtcatctcggtgttttgcaactgagttttgtactagccgatattagcagcattgagagcaatgtagtacttactgaaagattaccaaattttaactgtggtgtttgagtcaatcatgtgatttatgattttctcaaacatagatgagagtagccacgagataagtaaattatcttgttgttttctaatcctcatatgcaaggttcaaagtattagttttttcatcttgagtgagaaattttaagggaatttgagtagaatcaaggtatttaaagagactactatctttaatggaggtaagaacttgatgtcgccatgggagaaagttgtgatcattaagtttaatggattgtgagtgaaaaagaaataggatacaattttagtagtggtacttgaggttgattcagtcttgagaaggtgccattgaaagttgatgaaggctccattcatgaatgggagaagctactgatgataccatgtaacaatttagagagagagagagacagaaataacagagaattgttgtgttttgattaagataatcccaaaatttttattataatgttaatcatatggacatttaaaaaacaccatcataccatgtcaaggtattacaacacaaatttaacagttgatggaaaagttctcaaaattcaaaagtagttatttggtagcatgaaggctggctgaagttgttaggataagcctaaccttcttcagctatctcaccaaaccaatccctaactaatgggaagtatattccaaaagcacttcacttaatccacaatcagcttgcgaaagtggggattatctctacttctttgacagtcattttaaaccatgtgttttgcgaaagttttcaactggacctctgttttgttaaataataaaatgaaccttatatttttcaaaatagtaaaaataggatcctaaactcaatttatagcagttttattttttaatataattaattttaagacaatttttagcacgaacaaatacaggaaatgtaaccaattttataataacatctctggatcaaattattattattattattattttttgagtgttagatcagattattattaagttttattttgaccaaaattagttcaaaatcctatttgtataattttgaaaaatacaatctttattttatcatttaacaaaatagatggtccaattagtaacttttgcaaaacacatggtccaattagtttaaattgttccttacaaaccataaaactcaaaacaatagcaatgtttaaaatggaaagttccactcttcagttggtgcatgacagagtgctgaaaatgcacgcagagcagaaccattccatatcttctccaaccagaaacaggagagcctgcactgcagtgtgatttgagtaatggaggaa

SEQ ID NO: 252477 - DNA, 748 bp, Cannabis indica
tcatcaacatatacaagtaaggctttgaaactagacctgaaatgtttgatgaaggagtgatatgttgtagaatggttaaaatattcttcttcaagggcagtggagaagttttcaaaccactatctagaggctcgcgtcaagccatataaagacttcttgagcttgcaaacaacattgtataacactcccttaggtgcatcttatattccggtagcccatcatgaaagaactccatagctaagcatgcttgacctggagtaatttcaggatgggtggcctcctgagaagttttcccaagaagcatgcgagtgaggacaaagcatgctggaaacactcgtgttggtttgtagggtaagttgtcattccaagaagcagccagagtgacatattcgtgtataagagccatcattatgtggatgtaagggtccaatggaggattgaagctgggaccttacacatttatacctgattaggaggcaagcttactatgatccatgtatgattagcttccaaagctgctatttctatagacataacattgtcccattcaaggataccatcatcctaactataggattgatcatgttcatgatgacttaaaatggagaaaactatagctcaaaaggtggaacatagtctggagtaattgagaacatgcaataaacaatgaagagtggaaggattagtagaaaaagatgacacaaaatcagatggatgaagcaaatagtgataatcctgcaattatgat

SEQ ID NO: 252478 - DNA, 703 bp, Cannabis indica
ttcaaattttaaatcaagtttgattatgtgcattatgtgaaaatattgacatatttggtgtcaattttttgtgaaaataattttaagaaggaaattaaatttaagagatctaaaacaagatataaaattctatcttgatgtgaaagtgtaggagtaatactccaatatgggaatttaagacatgcttggtgtcttataataaagtgtaatttagacatgtttagtgtctaaattagtgtttaattttgatatgcttggtatcaaaattagtgaaatttgagttgtgtgaaaagtagtttcttatgtttaaatttttaaagcttaagtacttaaaaaaaaaaagtgatcacaaagtgaacacaatattttggcatgcatgattcacatggaatcaatagtgaaaagttataacaagtcacttaatctgtacaagattaaagtatgaattttcgagaaatgggacctaatccttagtgttttactcattaatggtaacctatcttaacactagtaaaaatttagtcttaagttctataggtaataacaagttaatagattgaatgtggtactcaattgtcccatatatggatgagtacatgcggtgaaaattgaggattaaaatcgatttttttttaattgagcttaagcttaagaaagctcatttaagcttaagaaaactcatttaagcttaagaagtgtctaa

SEQ ID NO: 252479 - DNA, 614 bp, Cannabis indica
ataaacatataatcgcatatatgaacattagaatactgtgatacgcccaccatttgaaagacttaaccaatgttcccacaacaaaatttacagagtacaaaatcctaaagttctaaataacagttagaagttattaagtctctgtgaaacctaagatgaatagacatgcgagcattcgaagtgttcatccgaatacccgcgtgtattcaaaatataaagtggcgactattcaagcattattcctaaagttcacggttatgccaattttaggtcattttgtttgagattacccagttccatacctaaaaacatagtcccatacgtatttcttacaaacatgtattcctaaacaccctaaaaaatgtcaaaacccagaaaatagcgttttttctccaaacaaaaaacaaaaattcagtgaaatttgaaactatcctttagttttgataagttgttcctgcaattgctctcgataacacttgaggttgagaaaattccacagagaaaggcagaaatctaggcaaactatgaaaatctcttttgaagtctctgagagggatggaatagggaagttaagaaaatgagggaaaatggggaattttgattcgaatcaaagg

SEQ ID NO: 252480 - DNA, 1253 bp, Cannabis indica
ggcacttcaacaaataagtcaagagtaaaaaattattcataggagaccaggtgctccaaagagtgtttttaaacactaaagattcagcagcaggagtgttcgagcttaactaggaaggcccttatcaagttatagagatagctagtaagggagcccacaagctaggaaggtacaacgagaacatggagctcattctcctaccaagatacttgaatggagagcacctttgcaaatactattagtaaccagctaacagaactctactccaaagtagaagctttacctactcaacattagagtacaaaaagcactagcacccacgacctttttggcgtggactcccactgttcttcaatggtggcttttgcttactacgcaagcagcggtagccacttaacatctagaagctatatttatgtaatgtaagcttgcagattcaatttaagtaagtttcacagcaacaaagacaaattaatgaatcaataagaatgttgatattctgtttattgtgtctaaaaaccagttacttacaaattaacttcgtaaagttattcttttagttccatatgcatactatggcaccttcataagatagaacccaagcaaagtctgtgaaacttggtgatgagcaagtgaccaagagacttgtctgcatggtcatttgaggggcacctataatgtaccatgcatcaaactagcacaaaggacttatgcaaagaaattctaatgcttaatataagctactaaacccgcctctaagtcgtgtaggcatactttggcttggtaaagtaaatttagaccctaacttgtcaaggccataagagatagttaggattaaagaccgttggtcagtcaaacaatccatgataaaaaaaagcaatagggccaaataatagtagtgttcaaagatagagggcttatggccaaagatatgaacatgaaggtcctagggctaaaaataaagtagtgttctaaaaaggccacatgccacatagaacatgaaaataaagtagtgttctaaaaaggccacaggccacatggaacgtaaaagtaagtaatgttctaaagctaaaaggccaccgaccataacaagtcacaggcgatgcaaaacatgaaaatattttctatgttgtacaaatataatgttgaatgctactaataaaaaaaactgtctaaatgtgtgtagggatagaaggagctaaatctggagctgcgagatcgagagcctgttggaatttattttaccaggatct

SEQ ID NO: 252481 - DNA, 2459 bp, Cannabis indica
aataaaaacaatgcattttttaactttttatttctttttctctattatgccataaatactattataatttataaacaaagataaaattaatcttaaataaaatattttcaatataataatatattgcattaatttcttgaaaatattataaagaattaattttattttgtatttttacactataaaatatgtaatattttggcatttaacaaatattaaataaattctatatctatatatggtatttctttgtaatttgtgtattttattttgttttccatatgatctgctttaaactctccagctggcattcgtgatgtctaaggaaaatttataggataaattttaagttgatagaggattaacaatattgacatatcaagattttatctccacaaagaatttcgttatttaatgatttttctaaggaatatatttgatgatttctctttgtttttagacctttggagtttgtttttgagtatcatttatccttatcaatatcacataaacaagcagcaaaaggttgaactcttccactcattaatttcttatatttttagaagagagtgtttcttttgtaaatgatatttgttttgctattccttggtgagtttgtgtgtctttgtgattacttttgggtgaagtaaattccaaagtgaagaatgtgaagaacaaccttcgagagagggcttatcttaagtcttgcattgtgaggaagcaagcaccactatctccacgagactatttctacaagtgttgcatcaagagaatgcaagcactgctatcaatgggagaagatttctaaaggtccacacggtgaaataaaactttgttattgaatattgaatctgatacacggtgaccttatataggcaagttacaatgactaagctccacacttaacaatctatctaattctacttaagagtataacagaaataactaacttcagtgaaatgagaataatagactaatctaatagcccccctcaatatggagtgtagatatttatcacacccatcttggatacaatgttggagaatagaggttgtagtaagggttgagtgaagatgtcttctaagttctgctatgaagaaacgtgtagaagttggataaatccttgctgaattttctctcgaatgaagtggcagtcgatttccacgtgcttcgtgcattcatgatatacttggttttcattgatgtgtattgcattagtgttatcatggtaaagattggctggtttgctgtgggagacaccaaaatctttgagaagagcaaggagcctggttaaatcagaggtggcattagccatggcgcaatactcagcttcagtagaggaccgagaaactacttgctatttttttcccatgagacaagtgacttgcccagaaaaatgcagtagcttgagattgaacgacgagtatcttgacagctgccctagtctgcatcagcaaagaaagaaacctgaacattggcttgagataagttagtttcagcaaaggcattgaggtcggggctacattagatggggaaaaaagaccttggccaaggggttttttgaggtactgtagtattctgtttgtgcctgcatatgtggaactcaaggacatgataagaattggctaaggtgattgacagtgtatgttatatcgagtctagtgatggtgaggtaaatgagtttgccaattagactacgatagacagtgggatcaggtaggagattccctttgtctttattgagtttgaggttgtgttccataggtttggaagtaagttttgcacctatgtaacctttatctttgagcatttataaggtcaaaggcctttgagaaatggaaatgccttattttgttcgaccaatctcaaggtcgaggaagaatcaaagttgtcccaagtccttgagtttaacttagtgtgtagatttttttttgaaggtggagatagctaactcattgttgctggcaacaatcatgtcatcaacctagattaggatggccataaaaatggatgtgtccttatgataaataaggagttatctgacatggattgagtgaagccatcttcaagcaatgttgagctaagttttgcataccattgccttgaagcttgtttgaggttgtatatgcttttatttagcttgcatactgtatttgggggagcaatgtatccagggtgtatcttcatgtatacttcctccaaaagatcccgatgaaggaaggtattatttatgtctaattggtgtgcggtccaattgttgatggcaattaaggcccaaaaaacttttaaagtgttgaattttgcaacatgtgcatatgtttgtgagaaatcaattccttgtttctagttgtatcctttcgccactagacgggctttgatttgatcaacttcaccagcttagttatacatgactttgtatacccatttgtaaccaattactttgtggcctggaggtaact

SEQ ID NO: 252482 - DNA, 797 bp, Cannabis indica
tatataataaatcaaaacataaaatacgtactagtttagaatatatacctcttgaagactattagcgtatccttgaaacttctcgtatgttgtatcccttgaaacttctcgtatgttgtatcccttaatccagatcatgaggataatacaattggactcacaccaatattttctaaatcgatccaccacacacaacaaatagtgtgggctattaggataaaatgtatatatttttcttattgagttctcaacatatgagcaagaacggttaagagaaaaaactgtttttcttttctcctcttaatttctaaaattatagtgtcaaaaagtattctgatttctcaaatcaagcttctatttatagtagttaaaaatctttaattaaatcattttaattatttaaataaataaatatctacaaccgaattcagttactgatatttattaatcgatatttttggaaaaccaattgtaaataattagaactaaagaaattaaataattaaaagagaaagagtaagaaagacacaaataatttttatgtggttattgaaaaattgagttcttacaaatgtcaataatatatacgaaaaaatgaaaatgtatacgtctgaagaagcagaatgtaattctgttacggtagagaccagttttgcagcgacaaaacaaaatagacagaatataaaaataattgcataaaattaaaaacacttgacacaagagatttgtacgtggtatcagtgttctttcgaacactcctagtctacggggtcacgcccagagaatgaaatcaatta

SEQ ID NO: 252483 - DNA, 466 bp, Cannabis indica
agtttgtttttttttttttaagatgatggagtaaaaaaagaaaaataaatcaaaatagatattatttagtataaaatagttaaaaatctaaagaatgataatgagtatatttttaagtacatataatgaaatttgcctttacagagtcgtcccccatttttttaggaagtcatcaatgcctaaaattaagtcttatgcaacatgtctaccattgggaagggggtaatgaggtttttaaatttgattttgtgtttggtctatcaatgtgtatattcacattagatgcacatttttcattattatttggttaatcatcaaaccttctctttgagttgttaaatttctagttattggtgatactttgaattaacgtgaatttgtgtcaatctgatccttattatcattacacgattctctctctcactcaccctagccctttattatatatactagtttcgaatgtatg

SEQ ID NO: 252484 - DNA, 1119 bp, Cannabis indica
taatctcaataatcatgcctgagtcatgtagttgtaagagaaatgctcttatcaacttgcttgattagagtgaggactccatgagaaacatgtaagtgtaataaagattaaaaattcacgagccataattacttgaagcctagaattctagataagtagaaatgtcaaaggaaaatgtgtagaaatcttgtatatcaagtaggcaaagtttacagtgtttaagaaaccaaaacaaaatcatttgacttgtggaccaatacacattatacagtaccaatttctaaaaaaaaaaaaaacttatcataaagtagatcattttctacccaagtataaaccataatttatggacctaaactggcagcatgtacaaacaataaaataatatataactggtctaaatgtgcagagtgagctactacttaatattgtcaacaaacatgcattaaaatcccaagtacaagcagtttttaagtaatttacctcattataactttgttagctggccaagcaataacatttccaacactttcttcaatacaagttaatcctgaagtaggcctccaagtacaagcagtttttaagtaatttacctcattactgaacctagcattatagacagaatagacctaccatttcaaaattatagacacaacctagtatttttaaaattggttcattatttcagctagtctaacacggaaatgggacaacaaaaatcagcccattaatcaattctcagcgccaaaagaaacacctttttaatgctctgccaagcacaaacaatcaaaaatctacaccacaaaagtgtgtgtgtcgcgcacacacacacacacacatatatatatatgaaagttacagaaataacctagcattgtttaatcaatctaacaatagagaaaagtaaaaatattttaatttaccttggaatttatgaaagagttaatcaattgcttcataactgccactttttttttaactctttatactcattttccattctacatatatgtttttcttttttcgatgtaattgctaacttagttttggtaactcctttaccataacctttcacatagaaacccttttcaggacctattatatttgaaagaagatctcttt

SEQ ID NO: 252485 - DNA, 836 bp, Cannabis indica
atgcagtaggcaaacagtatcggttcaaaaatgcaaattatgttattaaagtttgtgcctttgtttactactgctaggtcagagtcgatatttcaaagaacacataccagtgagtacagcaatggcggattcaagaaatgttaataaaatcacgtaagcgttgaagtgtggtgggtggagttggatcagtttatgacagcgcaataataaagtgtgaaagacatagaaaatgaagaaagagtagagtgtttcaccggaaaagacggcctgggcggtgaagagaatgacttctcgttttccctgaactaatttttcattttattcatttttaattatcctttttaatactttatgtttagccatgtggaccaatgaaataataattaagggtatatatgaatgcttctatattgaccaaatcaactaaataataataattaagtgtctatcagtatatcccattttgactaattcaaattcagttttaattcaatacactacaatctacaataactttctaaaatattcctatgtggaccaattatactacaggatagtggaactattaatgagtccattttatgggtgtctattaaagaatttcccaaaactatttattaataggaaaatttcattattaatacataataaaataactcatatcaaaattgagttcttttaataatttttactaaataattcatttgattacatgaacttttccttttactcttatttataaaaaaaaaagtcaaaagctaaaaaaaaaaattctctccctcacactcggtctctttctccctctctctactttccctctcacagctctctctctc

SEQ ID NO: 252486 - DNA, 1088 bp, Cannabis indica
  modified_base (969)..(969): a, c, t, g, unknown or other
atgatggctatcttttcggacttaaaagaatcatgcatagagatctttacggatgatttctcggtctttgattcttcattcgatcattgcttggaaaatttggagaaggtgttaatcagatgtgaagagtcaaacttggtcctaaactgggaagtgtcactttatggtaacagaagggatagttctgggacacaagatctcaaaggcagacatcgaggtggataaagccaaggtgtcaacaatagagaatttaccccctccagtttctgtgaaaggagtaaggagttttttgggccatgctagtttctatcgaagatttattaaggaattctcaaagatctcaaaaccgttgtccaatctacttgttaatggggttccttttgagtttggggaagaatgtttgaaagcattccaagttcttaaggagaaattgatttcaacaccaatagtcacttcaccaaattgggagttgcccttcgagttgatgtgtgatgcaagtgactacgcaatcagagcggtcttgggtcaacgggttgacagggtgtttcacacaatctactatgctagtagaaccctgaatgatgctcaactaaactatgccacgatgcagaaagagatgctggcaattgtgtttgtgtgtgataagttccaaccctatctaattggaaataaggtgatagtttatatagaccacacagcaatcaagtacctcatgatcaagaaggatgcaaaaccgaggctgattcggtgggtacttctactccaagaatttgacatagagataaaggataagaaggagactgagaatctagtagctgatcatctttcaagactagaattagaagaaacccggaatgcaaaagaggtgcaaataaatgaagagtttcctgatgaacaactctttagtttgaggaaaagcttgatggtaccttagtatgctgacaatgtcaacttcttggactgccaatntaactcctcctgagctgtctcgtcaacattacagaaaattctttttagagtaaaagcattactattgggaagagccaaattctctacaaaacactatgctgatcagataattaggagat

SEQ ID NO: 252487 - DNA, 803 bp, Cannabis indica
aattctgggtccgtcactgctgaagaaccaagtgctctaaggattcatagccattgttacaaggtaacatagtgtttattattatcattattattattctttgattcttaaataagatgattaaatagagaatagaccgagtttaacaacatttgaatcggtaatgatgcaatacctaccttgagtgagaaagaaggcatgaatggttctaacaagcatgatagaagatagactagaccaactgaagttctcataacaatgttacaggaatctttgtcattcttgtaaagcttccagaattggctctcctataaagtattatgtcatatattataatacatttagaacaagttaaagtacagctgattactatgcaagcttaaattgtgatcttacttgtaggtatgcattgccttcactagagatgctcattccaatttttagtgcttgcttcagtttgacctgaatcaaataacaagtgtataaggtaaaagttgttgagaagaaaactaattgtatgttaagttgaacttaattgttcacataattaccttttccattgcttcaatgtattggtccacaagcttactaatcttttctgataatgtttgtgttaaggaatgggattcagctcctggtgaatccgaaatgatggatccatatcctgttcctgtagcagaacataacacggaatggaatgaatatgttagaatattttatatggactgagataattaaatatcgtctacgcattggtattattagcgtataagggttattgtatatctatatgcatggtataa

SEQ ID NO: 252488 - DNA, 833 bp, Cannabis indica
ctaatagggaattaaccaaccaaatccctaaaactaacatgaatcgacaacataaattttttagggaacccaacagcaaattcgagtaaccagttttacaggccctataaaactggctagccagtttaccctagaaaacccataacaattccaaacctaaccaaattcactcaaaactttaccaaaccttccagacctgcatattataccccaataaacatattccaagcaataaaacaactacccaagctcagaatcaaatttcaccattaaagagccaagcttcagttctaaaattcaaagcttgctcaatcaacaaaacatgcttaattcaacatttgtaatcatgaatgaacttcagaaaacaatatcaaacactaacagtagctacaatactgaaagacccaaattcatgcaaaattcttaacttgaaacttaagaaaaccaaagggatagttggtaggagcttaccttggcctagattcgaaagagagagagtttgagagtgagaaagtgcttcctttttttttcaaattcttatttttttaaaatgaaaataaaaagtttgtttaattaaaattaaactcagccactataactaataagaaaatcaacccaacaatgagttcactaaagaacggaagtcatttaggcaaaatgcccattttgcccttcccacactatgtcataaaaaggtgacttcgggatattttggtaaattccaaaatctctactattcctaacattcccaatgtctaactatactgccccgctatactaaaaatactgagatgtgatcctaatagccaaacaccgcgttccaatgttgtcgg

SEQ ID NO: 252489 - DNA, 2426 bp, Cannabis indica
gaaatacattgtataatgcaaaccaatcatttcaatttttttaaaaaaattcaaaggttctcgactaaacctctttgacgaaagtggagtcaaactattataactccctgaccaaacctttttgacgagagaggggtcgaatcgttataacacctcgattagacctttgtgacgaagaagggatcaaacaactatagtttttgatttaaaacctatccgacgggaaaggaaaatcaaaagttataactcacgtataaaactaaatactaacggttctcgcgagctaggaaagtactaaacgaggcaacacgatgccttgataaaagtacttaaacctagaaactgaatagataatacaactattcatacaagccaattgaaaacatacaaagtgatagaatcattaaggtatatttaagtttgcttaaggcagattattactgttatagccaggcagaattgacaactgcttgaaaatcaaaaagtttggtagattactaactacttaaacaggaagattacgagcaatggaaaaacccaaaagtattgtacatttgatcaaaatatagttgtttacattgtgaataaaacgcaaacaaacacaattgtattaagttcgaatgaaaatagtacaaggcatttaagatagaaaaaaaccccaagttgggttacaaacttgtctttacaaaaatgtcgctagggccaaaccactaagtcatcttccataaccaaggatgagagaaaaagaccgtctacacatagcttggagaaagatcggctacacgtaggtcgagaaagactgtctgcacgtagggagccttgatctctgcacagaccttattctcctcatcattagatcccatatcgtgaagccaagatctctttcccagtctcaggaaattcctcgataccggaaagaggatggtgcaaagatcttctgacgcaggtttaagtcctaggttggttggattctctgatagaaaccacgccaactttcatcccatgcaaggttcatctgcaaccatgtcaaccttcctctggaattctttaccagcctgaggaggacctttaagatcgctcacaagatctatcccctcagggatcacttgtgaggatcggccatggcaggctatggggttccctatagggttcccctagtttggattggtcggaagctcctcaaccttggaatccatcgtttccggctccaatttaggcttgaagtctttgggaacaaatggaaattggttggtgcgtctgggtaagatgagtttgggaggatgaacttctgaactgagaagggacattctagcaggaaagagatgatccattctgaaaatggatctcaccaaaaagccagagtttgtgaaaaataacaagcttgagtcgcccttttatacacaaagtccagtgacaagaaagctaaagattgggaaatcaaacggttggaagaagggctgaatatgaagagacgattcataatgactctcgaaatcgtacaacctccagaatcaaaggatgcattttttccaagaaaaaaatttgacgaaaataccctttataattattattactaaaaaataattttttaagaggcaattgttatacccaaaattgggctgccacctcaatgaagggcacatgtcaagataaataaaatgtaaatcgatgccattgctgttatggaataactcattaattacgtaatatcagagtatatttgtaacccgctaactgtaaggtcttaggcgaggaatcaatgtacaaactgacacttaatatattagcaagaaaccatatgttgctaaatgcgaatagcaaggcactaaagaaagcgacccatatcaatcatggagatgcttagcgtataataaacaaactaagtgtaaaattcagatcgactcaagaacaagtaagcgaggtgaccatcttgctatgggaagacttcctatagcttcatctagctaacggtaacgatgcttacaaccctggagagtcagaatggttctttgtaaataagaaccgcaatcgacaccagacatagattgtcgaccttggaaagaggaatggccccagattgctattggaatcactgtaacaaagtttctgtcaagacatctccagatactacagctaaagatgtgttagatacacaattattttgacccagtaaaagcgggaaagtcacagctatacgtttttcaaatcgtaaaccacatttacactacgtgatatataatcaaatcccacgattttagagataatagttgtaaacatattctggtcaactttgtaattaattgtccactatgtaattataaatagtgacaaacaagaccaaaacaagggatgaaaaactcatacaagagacttcctacaaaaaattagaaatctgaataagattgactcgtggactatgaagaatt

SEQ ID NO: 252490 - DNA, 760 bp, Cannabis indica
ggcgtaacaaacgaagcccaaaaagttttaaatttataagtgtcataaatttaatgtttctttttagcagcataagtactcgtaaaattataatttttctttatttcataaatacaaactctgttattgtcttaaacatgacacatataagacccagattctagatcattagatctagacaaaacaagtagtattagttacttcctgttgaatctcttcgccattgatgaacacacaagctgatacaatcaatcaagaacagaaaaaacgagagatgaagcgaaaaacaaaagagatggaaaagaaggaaagaaagagagaaagacagagaaagggaagattgtaaacaaagggcaatcttattaatgaatcaaaaatgaatattggcattatatagccaatgattacatactggagaattagttaaccgaaatcagttagaacaaacagtgaacaactaactgatttaataaacaaaacagtagtaacagtatcagtatcagtaataactaccaactaactaatactcctaacgcttctaaatattattttaataaattcaaaacggagtattgatgaaactgaaggaatattatagttttacaaacattgagtacttatgttactaaaaaaatattgaatttgtgccacttacaaacttcaaactttagatacttataccgttaattacttattaattctttttcgacaaatatctcaaacatatgtatatatgctatatatatatatcatatttcag

SEQ ID NO: 252491 - DNA, 1024 bp, Cannabis indica
aaaaaaaaaaatagaataggagcagcaaatgtagccaaaaaggatacaattagaaacattcgataaccaagcgactaaatattgagagaacattaaatattgaattctttaaattttctataagcttttacaattagaaatgttactttaatatattgctattacatttcatacattattggtttttaaaaaaattacatagcagttgctttatagttgaatgtcatcagattcaaattattatcagaaacgtacatcattagcaacaccatatttgaaacattaattagatgttaaaaaaaatttcttactacgttgactagcatgttgattattcaataatttcccaaccgttgaatcatagttacatagaaggtgttacacatagcacataattcaaaagattcaagtgatttctccaactactttcctagatataattattaaacatgttgaataaaagttttcccacaattgaatctaatattttatatatcttcataaacaagaaacttgcacaaaaatatatgcattaaaactcaaaatgaatacattgtctctaataaatatagcaatccaatattcaattcttaaacagaaagaaaaaacagtttaaaactataacatcaataaccaagtcttaataacatctagcattataacaacaaacaataaaaataaaaatatcattcaacgagctatagaaatcagtccccaatcaccaggctcttattctttccttgaacatttttcattgacttcttaggcttctcatcctcacaattaataatttcatcatttttccttttaccatatgcgaacaaaagcacagtaaacctcttgcgatagtaatcaaaatcttgcagaatatctttccatgtgtaaagaacttatcaaatgcatcaacaaaagtaccacactcactgtgtaataaaatagtaatcaaaatagttaaaacaaccatactaaagcacatcaacaactaaaatacaataacataaaaaaaattcacttattttcctga

SEQ ID NO: 252492 - DNA, 857 bp, Cannabis indica
atgtctatgtataacaatcattaaaactatctccccgttaaaaggatttcgtccctgaaatctaacctgaataactctcgatatttagtcctcatttcagactataactcccaggtggcctcttccaccttgttattcttctagagtaccttgactaaggagatagtcttgttccatagaactttgtccttcctaggatctgaattggttgttcctcataggatatatctggcgtcaactctagggtatcataactcaagacatgagttggatcagatacatacttcctcaacattgatacgtgaaaaacattgtgcactgctaacaatgctggaggtaaagctagctagtcgatacgctacttgtccaaccttctcgagtatttcaaatggccctatgaatctaggacttaacttgtccctctttccgaagtgttttacacttttcattggtgaaattcgtaggaaaacatgttctcctacctgaaactctatgtctcggcgcttttaggatcagcataactcttttgcctactttgggatgtaagcattcgtgccttgatctttttgatggcatcactggtcttttaaactaactcaagacccaaatactttctttctccagtttcatcccagtgaataagtgatcgacacttcctaccatacaacaactcatagggagccatccctattgtactctgatagttgttgttataagaaaattctattaatggtaggcacttgctccacgaatcttcaaaatctaacacacaggctcgtaagatgtccttaagaatttgaatcgtcctttcagactgaccatcttttgggggataaaagctgtactaaacttcagct

SEQ ID NO: 252493 - DNA, 707 bp, Cannabis indica
agtataatatatcacagaacctatttcatttatggatgaatatttaagatattcaaattctactaagcattgataagtaattaataacaaaaagttagtgaatgtatatatctgtatagcaagttaaaatccgatcaactctaaattatccggaacctttaaaattagctcacaatctataatataatgaaatacaataaaattaaaattttaattatttaactacttactagttatatcaattatgagtaactagttactaatgactaactagctaataatacaaatatataaaaaaagtaactagttactatttagtaaattatatatatatatacacaaatttttaaaaatattacatatacatacatatataataaattatatgtcacactaacaaaatttaaatatatcatttctaaattaattaaaactctaaatacagaatatatatacacacaatacaaaatatatatacacgcaatacataataaatacagacacaatatatatacacaatatatattgtcgaaacaatacacaattaatatatatacacacaatacaaaatatatacacacacatattcaataaaatacaaaataaatacatatatactatatgttaataaaataaaaaaatctaaaaaaaaattagaaaaataaaaataaagcaatgtacatgactaaaatgaatagaaatcatat

SEQ ID NO: 252494 - DNA, 853 bp, Cannabis indica
aagcctctaataaacttgacttttcgtgcaacttcaatggccacttcatcagaagcaaacttggccaatctgtcaaacttggtagcgtattctgtcacaatcatgctaccttgaaccaaccgtataaactcttctactttgacgacatgtatggaatcattataatatttctcataaaattaatattacttaaaacgtatcccaagtcatggtattcagatcacgaccctgagatacaatctcccaccaaattcgagcatcatctctcaacatatatacaacacatcgaactcgattattatcctcaacccacataaaattaaagatagaagtaatcatactcatccactactctgcgtgcctttagtggatgtgggccatcctcaattacaggcagattttatttcctgaactgttcctaaattagttccatacagtcgctcatattttgttgcactacctaatataaggtgccaagagttccagaacaggggcaggacgagcctgttgctctcttaggtctcgaatttgctccccttactgcctcattgtatcttgcatagcaacaaacacttgttccctgttatgaagtggtagagaattctctttctcaccacctaccctgagccccagatcgcggttcaatcgacccgatcgcagtggttgcatgatctaatacacctgcgatccataacttccaactatttataactcagctagatatcaatgctaagcatatcccacacatataatcatatcactgtcattactttattacttttttagcatgcttggtaataaataggcgtaatcaaataacaaacaattataaaacacttactataccatgagt

SEQ ID NO: 252495 - DNA, 842 bp, Cannabis indica
tttgatttaaattttcccaaatgcataatcagtttaaaaaagaaaaaaaaaatcaaatagagtcctaaaaaaatgggcagagtttcccttatttccataacattcccgaaatttttttaagggcatagcaatacaacaaatgggtagagtttttccttatatctccacacagtcaatcaaacccagaacctacttcactacggatgaatatctaagatattaaaactcctctaacataatatatgactatatgatatattcaaactccttactcttgttcggcttgtaccgtggcaaaccacattccggacaagtgtccatgtgggcatgctctttacgatataaaatgcaatcatttggacatgcatgaatcttctcatacttcaaccctatcgaacttaaagttttcttcacctcatatgtcgactctggaaagcaattttccatcggcaggatctctttaaaagcagatagaaattgactaaaacacttatcacttactccattctccgcctttatgttataaaatttcaccatagttgatagtcggcgtttttcacaaccactaaataacgacttatctgcatctctaaccatgctatcaaatttttcaggatcatgaataaactcttcttgagcatcatcaagcaattctgtaggatgatcatcacaatcattactttcaaaatgatcatcgacccctcgcctacctaacggatatgggtctcccttcatcgattccccatgccaataccatttagtataacttttatcgattccacgacaaaatacatgattctttaacatggtaatatttccttttgatatattaccacaatcga

SEQ ID NO: 252496 - DNA, 922 bp, Cannabis indica
ctttttttttttaaaaaaaaaaaaaaaagactcaaaattaggtctacgatcacttcagtgatgctaaaagatttatcgttttatagtattgatgttagaagaaaatatgttatacatattaaaagtgtaattcttgaaaaaaaaaactatataattatattaaataatttcttttagtctgattataaatacatacttaatatatattaaatattagattaatataattttaattgtatttaaaaacaattatatatatgtacatagataatgactgttatatcaatttttcttactcaaaaaattacattattttgtgaagtactaaaggttaaataatattaattatatgtctcttgatttttttttattagaattaaaaaatgggtacagtaaatttaatataattaataataataaaaatttaaaaaatatattaatttatagtatttaaattaatttatttacatgagcattttaaaaacttataaatttataatttacataaatttatgtcctatcacatttttatttctctattcttatcgatcatgcaatgtatctaatcttaactacaatattagtatgtatttaaaaatagttaagaattctacaaattattaattttacttttcataaattatcaaaataaatataaaaaatttagtgctaaagacattaagaatttaaggaatgctaaagacacatcaaaattgcattggtaagtattttttttaaaatgtattgttaagtattaacatttttaatgcttgtttatgtaaaaaaataatcaattaaaaaatatagaaaaattaataattcagtatcacatatttttatttatttgacatactctcatagaaaaaaaaaaaaaaaaaaagaatgcactataggaactgtaatagatttttatatagtgaac

SEQ ID NO: 252497 - DNA, 883 bp, Cannabis indica
gcagtatctataatataatcaatttcaatgattagtatccttgtgttggtcgtaattagttttggtcaaattagcattttaccatttttaataatttttttatcatttagtttcattaattcactagtggaagcatgattcagatcccatctaaatttgtgcgcaacttttcagtactaaaattaacacataaagagaaccaacattcgatctgttaggaaagtgatgattccataattgtagatcatgtttccagccatccacattatagttttccaaataaaagttgtaagaatcatcttctctgaaaaactttaatgagtgaatcaaagaaactaataacatgaacatgagtttatgattgctcatgatttaggccgatctattactgatcatcgctatgatatgaattaggtctttatagtaaatgtcatgttgataaagatcttagtctttatggatcatatcagagttataaaagcggaagcgaaattaataaaaataatttttatctaatatgaaccataagcccaaagatctcaacctatcatatataaattaaatccagactaatgaaataaagacaatatctcttgaggcctattagggtatccttatttctattagtacaattaacgatcatctaatcaaaaaacttatgttgaagaatccataccttaatcttttaagccagcctcaacactcaggaatagagtgggctattagatcttataggataaatcaatttaggcattacagtgtgtactcaactcatgagatactgtaattgagacaagattatttaatctcacacacaccttttatggtgtaggcatgtgagacctagagaaagagagagagtaggcgtgagagagagagagag

SEQ ID NO: 252498 - DNA, 626 bp, Cannabis indica
tttttcttttttcttttttttttcttttttttcttcttctttcttcttcttttcctatagaactcccagccctctccgactcccttgtgccccttgtgcgatgttgaccagccccggcgaccacccctgacccccttgtgtgacgtcaaccaactctggcgacctctctcgacctttaattctaccataattggaaaacaaataaaccatataattcttgagcaatcactaaccggcattggtacgacacaaccaaaaaccaaaagtaagtagatgagtaacaaaacatacatagtcgttcaactgtttaacgaagcttgagaaattgctatgcttgaagtacttgggcaaaagatccttggcgaactcaggcgggttccacaccacgaagctattgttggtagggctccacgacacgatctggtcggttgccgagtcgtccagcatgtcataagtcttgctcaagaacggtggtggtacgttcgcatttggaataggggtcggggccggagctggaacaaccggctgagaacctctgccagcctacgagggcgcctcgccaccaccagtagctccatccatttgacccaaaatcagaaaaattgaaactgaaaaataataaataa

SEQ ID NO: 252499 - DNA, 1896 bp, Cannabis indica
catagtggcaattaattacaaagttaacaaaactgtaattacagtcattatcccttaaatcgtgggatttgattataaatgtaaatgcggtacataatttttaaagccatacagctgtgactttcctgcttttactgggtcagaagtatcgtgaattaaacacgtcttttaattgtcgattctgaagatgtctcgacagaaacatgattgtagtgaccccaacggcaagctggaaccattcttataaccaagatcaacaagatatgttttatgttgattgcagatataaggaaatatgttgacttgccagggttatgagccttgctcctgttagataagtggactatagggagcttcctcgtagtgagatgaccatctcgcattcttgctcttcgagccgattcgacttttacgcttagttttcgtgttgcaagttagggtatgcgttactcttctcgggtgcctcgctattctcctttatccacatatggtgtcttgttaatactctacgtaccagttcgtacattgattcctcgcctaagactttacactcaccaggttgcaaatatactctagtaaatactcaattaatgagtaattccataaaaagatacgacaccgattcatattatctttatcttgacacttgtcctccaaccgaattttagttataataatggccccttaaaaagtttttttttagtaaaaagatctttttaataattacggagggcattttcatcaaaatcctttcttggaaaggatgtctcctttgattctagcaattgtatgattttgaagatcattatgaagcgcctactcatattcttcttgcttgaaatccatttttagagtcgattactttctttcggccatgatatctcttctgagttcagaagtttatcttcccaaactcataatacctagatgtatcaatcaatggactccaaggctgaggagcttctgaccaatccaaaccaggggaaccccatgatctgccatagccgaccctcataagtgatccaagagggtattgatcttgtgagcaatgtcaaagatcctcctcaagttgatgaataatttcaaaggatgatctgcatagtattaggtaaatctggggaggaagttggcctgatttctatgagagtaaccagccaacttaagaccctatcctgtgccaagagatctttgtgttagcctttctttagtgttgagtgatttcttgaggctgggaaatcagtctcggctttaggaaatgggatcagatgatgaggagaatagggtctatgcagagatcaaggctctctacatgaagacggtctttcttgtctatgtgtagctggtatttctccaagctatgtgtagacggtctttttctctcatcctctgcttaggagaacaaaataatggtttgcccctagtggcatttttgtaaagacaagtttgtaatcagtcttaggtttttcttatcttaaatgccttgtactgtttttattcaaacttaatacaattgtatttacttgtgttattattcacaatgtaaataattatattttgattcaaaatacatcacttttgggttttcccattgctcgtaatcttcttgttttattatttaatagtctaccaaactttatgatttttaagtggttgtccattctgcctcgtagttgcagttataatctgccttaagcaaacttaaatatactttaaggattttatctctttgtattttttattttttttgcatgaatagttatattatctatccgttttctaggtgtaagtacttcatcaaggtgttgtgatgcctcgtttagtactttcctagctcgcgagaaccgttagtattcagttttgtacgcgagttataacttttgattttccactcccgtc

SEQ ID NO: 252500 - DNA, 850 bp, Cannabis indica
tcactgatgcctgtacctatgcccgatacgttgctaggaagaaaccttacatcggtttcattctgtgccataacctcgcaatagggaaaccctacacggttccattctgtcactgacgcccatacctatgcctgatacgtcgccaagaagaaaccttacatgatttcattctgtcactgacgctcgtacctatgcatgatacatcattaggaatatcgcatcacctaatcaagtgagcatgtacattatgtccatagtattatcacattatcattacctaattagacaatcgataattttaggacctggaaaatagcggtttcgattcatagtcatgactttataatggttaccccacaggtataacctaaatgtcaatatccttatatcacattacctactcaagcaagattatttcatggtctgacattcatcatatatcgtatctttcattgccttattaggctagctaaacctatgccataactaggcactatatcacctaatcaggtgtacttatatatcatattgactaatcaggcaacccatttcacaatctaaaattcatatatcatatcacctaatgaggtgaagtcgtatgtcgaattcacattattactgtctaatcagacagtcaacgattacaaaacctatcatgccatgtagtacattatacttttcttacctttgattcagattcatgcgtgtcggccaactcaagtagagaaatattcccgatgatctcggccctatgtctcaacaacggtaaatcaataagtatttatcttaaaacactacttaacactcgagtaagacaatttaggattctacaaaaccccgcggtataaat

SEQ ID NO: 252501 - DNA, 1183 bp, Cannabis indica
tatctaatcttgtaatttaataaaattaaaataataaatagacaaattttaaattgatatggttaggcaattattattttaaaaattaaacaataaacaaataataattatccaaattatatgtcaaaatatctcaaattaagcatttttcaaaatttctacaaaaatatctaggttatttaaatatttaaaataatttttatttatatcatttttaaagttataatttataaagaataaaatatttaacaaaacaaccaattttaaatttgaatggttagaatatccataaaaagatctaggttaatttcaaatttatttattatttaatttatcatataagataattttaatataatatttcaaattaaaaggataaagttatcttataatttaaaaatatggctaatagtaaaatatctgatcttataattatgtaatatataaatattaaggagattaataaatttttaaaatctgaccataatttaaaataaaataatcaatttttaaatttaaacctcaaaatatcataaattaataatatctattaaaaattaaatattattaatttaaaaatttatatttaagtttaaatatattaaaaaaatattttattttaattttacggtttgaaaattccaaaaattcaaaattgggaaaaaatcccacaaaaattggatttttggggttgttggctgcctgggtacacgaacagccctcgaggggctgcaaatgcctcgggcgcgcgcggatttggggatttgcagggtggacgtgcaggaatcctcggcaggcgcagcatcacgacacgggtgggcgcagggtgcatcgtgtccgaagccgtgcgtgcgattcagatagggaatttgtcccctgtcacgcgcgcagaacccgtcttatctgagtgcctggtgcactcgatgcaacaactcaacccgaaacttcaaaaatccataacttttccaatttatattggaatcgagtttcgtaaaaatacaaattgcttaatttttcacaaggaatacaaataaaatattttcagatcgaaaaataaattattttcatgaaaaattatttaattcacataaattcatgatataacacataaaccaacatgaacacatccaaataaacacacaaacaattttcatcgttttaaattcatattacatgaaagtaa

SEQ ID NO: 252502 - DNA, 912 bp, Cannabis indica
agcttatttttgtaactttcttaagggtaatttgacgatgataattttagaattgcgactggagtgtgagacatgacttgatagagtgtttaaatagcttcaaaatgcaagttgaataggggtgtttataaaaattgaaaaactgaaaccaaccagactgttaaccgaattttcagttctacgtcatcaccgaattcaacagccgatttcgttttacgattttttttcacatagcggtcgattttagtttttgaaataaaaaaaaatggttaaaccaaaaaactgccaaaactgccaaaaactaccataaactaccaaaaaaaaaaaactagtccaaaatttcccaattgaaaaaccactaaaaactaccaaaaatcgtacaatcgattttatatggttataatttataaaaggtcagttacgattttcgtaaaataaaaatcgtaatcgaccagtagttataaaattgtgactgattttcacccctagttgaatcgcgtcaattggataaaaattgaatgagttatggtcattttactgaaggcagttcaggtcccagctctcaggttgacatcagtgcccaggttgacatcagacgcaacctagatgttgggtaagtgtagaaacgtccaaaggatgtccttcaagatgcctaagtgatattttgataccacttagtccatttatatgttctggcaaagctggtcaccagttcttgaagatgttactgttttgcagaaatgggatgctcgaaactctccatttttgagtgggtcttattagaaatgagaaatgcaaagttgtgaatttgacttctctgacttcatagatcattgtattgtgaaaaactagacgtatggtcaaaacagtatcagattcggataagtagaacccagcaaactaggccattta

SEQ ID NO: 252503 - DNA, 619 bp, Cannabis indica
ataatgaataaaacaaatgacacgaaataattcaaacctattataaccaagcattctttctgaaattgtcaaaaagagggtaggagaccttgtcctcaattctaagaaccttggaagtatcaaaatgacatcgcgaaagctccaaaaagagcacctaacgcctatgtgacctggtgcgctgggttctgcttattcaattctaattttgtctcaagagctcgtctattttttcatagtaactaagaactatgaagttagacaagtcaaattcacaaattggcaaagtgacttactcacaaatcgggtagtttcgagtctccaaattctacaaaacagcaacatcttcgagaattgttaacaacttcaccagaacatagaaactagctaagtgatgtcaaaatatcacttaagcataaaaaattacaagtctgagacgttttagtactcacccaacgaccaggttgatgtcagaatgtcaacttggtcactggtagggttgtacataaatttttgtaaactgtctaacccgaacaacctgcccaaaatacaccgagataacccgacaaaaaatgcaaactggaaaactcgacaaaaatataacccgcccaatctttatatt

SEQ ID NO: 252504 - DNA, 503 bp, Cannabis indica
atatatatatacttacagacgggaggattccttgacttctcaaaaacttcaaatctattctctcacgatcaagaggatatttcaagtcgtacatcaaccgtggctaacattggtcaagatgcccataaagcaggcccatcagctcctactaataatcctttagtgattgaacacactcaagtaaaatctgagtatggtaaatatttagcggcacttgttggcttggattcagcatgtttggccccacttgggccttacacatcatgatttttctcactttatgcctcgctggacaaggattttacctccttctttgagaatctttccccaatcaagaagtcactatttattcagctaagttctccttttttacccttgcttcgcttaatatttgaaatttctgagcaacactactctcttttgttggagtattggaagatactcagtcttattttcccagaacgaccttctgtgttaggaaaaattgttgaatcctattttga

SEQ ID NO: 252505 - DNA, 705 bp, Cannabis indica
tgttttcttaagttataagttagagttctatgattgatttttgagttagggttttgcaggtttttgagatgtttgattttgtattcagaggatgtgttgaggttatttgagttggtttagaacttattgagtgttgtttttgtgtttgagcaaagttagaattttgcttgatttatgcttgttaaggcctagttaggtggtctaaaagttttggatcagtttggggtcgatttgatttgttaagaagggtttttgtggaaattgcactaaatcgatcgtttggttcacgttggacctataggaatcggtccaccggttcctcccctgtcaaccccacagaactgattttccggttgggaaccgatctaccatttgtggcattttagggcaccctaaattttcttgtttatacgatatttacagtatcaccatgttaaccatcgatagacaaacttttagtttttattttaagtccccaaaaagtgatttagcatgtcgctcaccagttttacgaatattgtgacttaggggccagtaaatcatcgagcaatagttccactcaggttgatcgacacacctgaatttaaaaacgaggtaagattagtataatgatatgcatatgtgattacatgtttagtttgcatgtttataaagcctgttagattacatagatagtggtattaatatacgtagagttacattaga

SEQ ID NO: 252506 - DNA, 524 bp, Cannabis indica
attcaataataacagtataataaattatttaaatagctataaataattttcataaataatcataattaactgctaatttccaaattaaactaagcgggctttacattgatcctggggagagacaaagttcagttatggatattttgtttttctaaaaaaaaaattgaaacaaagttgaaaataaaagaaaaaaagagagggaaagcatggagtaattaataaaggtcatgtctatcacctgatgtgtttcaacacttgttctacatgtaatgtgtgtgcaaatggtataattataaataaaaaaactcgaagagtacaaaaggaagtacacacgtatgggagtatttatgtattaaaaattcttttttgtatttttggtataattataaataaaaaactacgaagtagtacaaaaggaagtacacacgtatgggagtatttatgtatgaaaaattctttttgtacttttggtgtaattacaatttcaattatttattttttgtcttaattttcttatttttttt

SEQ ID NO: 252507 - DNA, 960 bp, Cannabis indica
tctagaaaaacattatcttagtgtgtctttttatctgctaacatcacctagtcttaaaaatactaaatttattaatttttactcataaaaatcaattttttttccaaaacctgaataatttaaaaaaagataaaaaacactaaaaacatcatctaattatggagaaatcaataattttagagcctaaaagactcttatcaacaaattaacccgaacacgatccgaacacatttaaggtaaactcaaacccactaactctcgtacagtttttgaatcgtgttatcatgtctaatctactttatcggtcttactttaacaatgagggcattacttttggctttgcacaatagagttattttttttttatctttgagtgaagttaacatatatctcgctttttttaaaaaaatttaaataatataagatgttgcaaataaaatttaaattaattagttgtatataataataataaaaataataataataataaaaaacatggatacatataactgactatttgatttatattttagtattataaaatttgggatatgattttgtcccgttattgtactttcacggattgtaatccatgatgtacgacagtcgtcagatgagagagctatttgatctgacggttgagattaatgtaggggtaattaaggttaaaaagtagaaacgtaccctgatactcatttattgtaccctgagacccatctaatgtaccacggaatacattccgtgaaagtacatcacaggacaaaatcatatccctataaaatttatagaattatctaaaaaacgtgtatgcggctgcaattataatatacattatcatataagaaaatgagatacaattttttaagagtcaaaataaataaacaaataacaaacactcttagagtcaaagtaaattaaaaatttctcctgttttttcaatgtttttttcaaaaaaaaaaa

SEQ ID NO: 252508 - DNA, 1039 bp, Cannabis indica
ctcctctgttcttcttcgttttcctctctgcttctgtatttttatttttatttttttgctttttggctagcgattttgggacgagggggacgacattgcgccttatacaacttggaatttgcattgatcggtttatcttcaaggtattaattttttctttccattttattattttacagattttagggttttttttccattttgatttaagtgtttattgaagtttttttggttgttcatggagcttcttttttctttttttattttgctctttgctgattaccattttagttttttttagtttttagttgatcttcttttttaaaaaatgataacaccgaagtgaatagtgtttgttgttgtgtattttttgaaattttgatttcgaaattttgttggtttctttttcgatttaagccgacattatgggttattttgaaaatgggtttctgtgttttgatcattatgagaaaagctatgggtttctgggtttcggtttaactgtcctgtcatttaaatcaacaagagatccatgagcctgtccagtgactttgatcctttggtaaccagagggaaccttcaaatctttaacaagcactgcttataaaagcaagttagaaccgaaacatgtttatcaaactctggttatgagtgtagtgtatgagtatagtgtaatttagtgttatactaatttacattattaagaataatattgcattaatgttgtggtatctattctctttccttaggctatttttaaaatttgccttttatttggtgaaatgattgatgttttaatatttggtcaacattatgaagataatgttctaagcaatagggaaagaaaatggcaatagttaaaattgtcttgcttaatgaatctttcttcaaagaataataatcattcttcaaaaacagtttctcgagattaatttgtgttatttgtgcgttctgtgattttaaaaattgtcattggaaaacctgtttctatataaagatcacagtttctatatcaggtgttgtttgggcttatcctata

SEQ ID NO: 252509 - DNA, 757 bp, Cannabis indica
gaatttggagtcaacaccaatcttcgacccgaatccggacccgggaccccggcttggactgtgaccaaacccggacccggacccggaccttggatctcggacccagaccccggactcagactcgggactcgaacccggacccggaccctagacccaaacccggacccggttccggatcccgcacccgcacccggatccggtctcggaacacgacccgaactcggaccctggacccggactcgaactcggatccgaacccgagatcccgacccgaatcccgacttggaccccggaccttgacccggacttggaccttgaacccagacccgaacccgggaccctgacccagaccccggccccgatcccagacctggacccggacctggaccccgaaaccgaacccggacccggacctggactcagacctgggacccgaacccgaacccagaccccggacccgatcccggaccccggacccggtactcaggacccggacccgtagttggtgttgggatcgagtgtattaaaaatatattataactttacccaatcaattaatacaagtcaataccaaatattgtattgtattaaataatactaatacaatacaacaaaatccaacacaatacaatacattagaatacggcgtaccaaacaagtcctttgggtacttaattatgctgctatttaccttaattaatatgtacttaaattgtatccaaatttattttttgttggtaaaatatttaaaattaat

SEQ ID NO: 252510 - DNA, 514 bp, Cannabis indica
ctgatgtgtatgatgctctttcttccatgaaatcggatggtagcccaggtatagatggtatgtctgtcatgttttacatcaactattgggagattgttggcgatcttgtttctcgtacagttctcaaagttctaaatgatgggggagatccttcaagcttcaatcaaactgttatcaccttaattcctaaggtaaagaaaccgacttcaatgtcccagctgcgcccaattagtctttgtaacgttctatacaagttggtttcgaagtcaatagtgctacgattgaagccttttattggtgaagcaatttcagactctcaaagtgcgtttattccatctcgtctaatcactgataacgtacttattgcctttgaactgctacactctcttaaacatttaaaaagaggcaaggaaggttatgcagccatcaaattagacatgagcaaagcctttgatagggtcgaatggcattttattcagcatatgatgttagctttgggttttcatccagcagt

SEQ ID NO: 252511 - DNA, 1239 bp, Cannabis indica
aaaaaaaatcaaaaaaattataaacacaaatgagttcagattattacttagtattattaatagaaagaaaccttcgaattgcttcgagctcaagcggtggagctgacgaagaagaagaaggagcgatgtcaatggagttttccatagctatcttcaaatttgctcactgtgaaagtactcttcccgcccttttcgagagaaatgctcagagaacgaaggccaatcgattgggcttgggcttgggtttgggtttgggcttgggcttaccgtaatggtttttctattatttcataaatacataaaagaacaaaattacaaaaaaaatacggttgtacgaaattttaaatattttttatgattttatttaaaaaaaaatacggtctttatcagtattttttttgttatacttttgttaatttattgttgattttttgttatttaaataatttttttgaacatggtaaaaatataaaaaaaaaaatacaaaaaatagtattattattaattttttttaaaagaatttactattattacaatttttgaccaaaacaatacatagttatatttattaaaaaatttacattgaaaaaaaaaaaaaaaatagaaaaatgaatagttataggcatcatctactcttttttttttttttaaatgaaagtcattttattaaacgaaaatttctgttaccaagctaggcaacaacttaactagaacagtgtctaaaaaatcaattaattgtacgcatcgtctactctagtagtacttatattgtaaacatttacgaatttgtaaatatttgttacaattctatttatttttttttttgtaattaatttatattaccataattttcaatttttaaaaaatattaccatgttaccaattgtcacaacacttacatttgcaacaaagccatcttgttgtaacaagttaccaattaattccaaattaaagtaacaaaagacaacaaaacatgaagaactaaaaatcaatgataaaaggctcaaaagccatcttgacagttgaattagagcattttggtagttgctcatttgaaccaaataccaaaaaagaaatacttttgtagtccaacaatacaaaatgctaaaattttgtaacaaaaatcatcttcacttaacctatttagtctaacttatttcttagaagacataatttgttttcttcttttcttaatctaactcgaagttggaaggtaaacccgaatggtgtctcgcttct

SEQ ID NO: 252512 - DNA, 572 bp, Cannabis indica
ttaattcaacacaccaaaaatatagttcaaactgtcggttgcatgtgttaggcgtgaaaggtaaaatcatcaaatcgtaatcgaccatcaaaaaactaaaaattcagtgccatatcatcaccaaattcggtggtcgattttggttttctaaatcaaggcagtcgattttggttttacaatttagaaaatggttaaccgtaaccgaacatatgtactatataaatatacatcaagaatatttgtttagttcaatggtgggacacttcctttgtaattgtatgtaagagaacataagtttgaattccatatgctacaccttaatatattttaaaaatttacaacattaaaaatgttggtatttaagaatcaaactcaagactcaatacaatgtaaaagttaagggtgtacgtcagtcgatttatgctacatttgattcaacccaatgtaaagattgggttataaaaatctaagtgcaactcgcgcaattaaaaaaaaaagtaaatagtaacccgtccaatgaaattgatcagtttggtcaagtaaatccgttcaaaccgaccactaatattttt

SEQ ID NO: 252513 - DNA, 585 bp, Cannabis indica
ccccgctataacaaaaaatactatgtgattttaatagccaaacaccgcgttctatattgggcacaaaacatgaaaaattatgaaattccatatatgacatataaaatgcattgtgaattcaaataaatcatcataaattactaattcaaagctaataaataagttacatatataaaccctaattatctgctaatttccaaattaaagctaagtagtctttatagaagccttcataccttgaacttgatcggttgaggggatcaccattctcgacatatacaaatgccctacctataccaaagttcaagatgccagtgtggaagatgtaactcgacctctagaaggtcactagtgatgtgcgttgttgcatattcccagttactctgtcaaagacagcccaacaatggtacttcaagctcaccccggggagattcaactcctgggttgagttctcacgagaattctacacacaattcttttcctcgagactcataccatcgcagttggaagaccttgttgaagtcatacaacaacaaggggaacttctaaaagactacattaaagatttatggccaaggctaccaa

SEQ ID NO: 252514 - DNA, 895 bp, Cannabis indica
ttttctaaaaaaaaaaatgtttatttattaaaaaactcactagagagagtaacaattgggaagagggagagtactttgaaaaaaaaaatagctttttatttaattattctgtaaatcactcaaacaaacggaagttttggtaagtatccgttaaatatgtgctggcaaaatatgatgacgtggagtaatttaactggcggtaaacaaaaagggaaacgctaagtagatttcttctcattaaacttgatggtcacgaattcaaaatccaacctttaaatacaacttccctccttaccattacagcaacggctatttctctctctacatgcttcttcgttttcttacactagacctccttaccattatagctacagctctttctctctctacatacttcttcgttttcttaccctagctctctccaatggcaatagccagagcaatcactcaagtagtcatccgagaggtatggagagaaaatctccttgaagagtttcaactgatcgggaaattgattcacgaacgttatcgttacatttcattcgatactgagtttccaggctgtgtatttcgacctccaacaatccccaatcgccattacaaaattcaccccacttgatcagtaccgactgatcaaacagaatgtggatattctcaatctcatccaattgggtctcaccctcaccgattccgatggtaactttcctgacctcggcggccaaacatcggtggtttggcaatttaattttgtgattttgacataaaccgccataggtgcgcacacgattctatagatttgttgaagaaacaggggatagatttcgagagaaacctcacccacggagtcaactcggctcattttgccaatctgatgtatcactataggctcgtgttc

SEQ ID NO: 252515 - DNA, 1969 bp, Cannabis indica
aaatatgcccaattaaaaaatcattatattttctaggatattacaactatcccctccttatagaaatttcgtcctcaaaagttatctaaacaactcgggatactgttcccgctactgcaacattgattccctagtcgcctttaatcttgctgttcattcacagtatttttagctaacgatataatctttgtttcgtagtaatttcacttttcttgttcaaaaaattgaatcgactattcctcatatgacaagtctatttgaagttccatatttttgtaactcggtatacaaatcgtacctgcctcatcattctgaaacattgaaatataaattgtgaactccaggtaaggcatggagtatggctagctaataagctacctaacctcccctttctaaaaactcaaacggaccgataaatctgggacttaactttcctttcttcccaatttccgagttcccttcattggaaacacctgaagaaagataaaattcccaacttggaatttaatatctctacactttggatcagcatagctctttcgtccactctataaagcaaacatacaaactcaaatcctttctatggccttactcgttccttagaccgcatcaggttcaaggttcctccgttcactgacttcattccaatgaatgggtgaacaaaattttcgtccataaagcattttttactgtactacatcaacagtactctgataactgttattatatgaagactcaattagcgggagatgcttttttcaggaacccttaaaatctaatacatatgctcgtagcatatcctcagatatcttagtaattctctcagaatgaccatcagtctaagggtgaaaaactataccaaaatataacttagtacccactgctcattgcagactttcccagaacttggatgtaaattttaagaataattaactttggagcatcacagagttaaacttcttccttaacatatagattagcgcattcatccaccgtatacatagtccgcactattaaagaaactgtgctgacttcgtatatttaaccccaattacccagtttacccagataaaatcataaaaccctactattcttggtgatacaaccacaaagtctatgcctacttcttcccatttccactcaaatatcttcagaggttaaaatactactagtggtttctgacgctctgccttgacttgttgaaaacttggacatctgacacatactccacaatgtcatctttcatatctgcccaacaatatagggctttacatcgcgatacatcttggttgtttccagatgtacttaatatggtatactattagactcatttagaatcttctgtttgataccttcgcctgttggtatacaaaccttgcccttatattgtaattattcatctggtaaaactgaaatcctctgttggcccaacttcaggcttttctttatgctcctgtagttatggattactttgttgagctgtctcgattctttctaacaaattatactattttgtaatattggctaactttggtgaggttctcctcactgactggaaatattaacactggtgcaatcattgacctctatttcaattcttaaatgctaccttcacacttgttaatccatacaaactttcaattcttttgatttaacttccgctaagggtgtagaaattttagcatcctaccgaccccaagaatttctaacctcatttgcagacctggccaaagccaattctgaattgcttcaatcatcaccgggtctatcaagatactatctatgttcacctcatgtactaagaaacttacttggggccggtaaaactcgcgtttcttgtatttagcaaaagcttatgctcctagagacgttgcaacaccatccaaaaatatccctcatacgcttcctttatgtcagaagaaaaatgaaattctattaaatgatgataattatgaagtcatcagatacg

SEQ ID NO: 252516 - DNA, 547 bp, Cannabis indica
ttttgataattcttataattataactcggggctgaagcatcttagaatctcaaatcaacacttgaaaagcatcaagttgcttaatgtgaactccgagaatgatatgatcaagctcattacaattaagtcagtgccaaaattggtttcattttgttgtgaaggtaatatcaattgtaacagatcaatagagtcacctaatatattgaatggaaaatttgtgattagagatattcatcacaactataatttacggtaaaacaacaaattacaaatattataatttctataaataattaaatattattttatttttgtaaaagcaatcgtatctttcatatatcttttttaagtttggtgtacttagaaaaattccccattttaaattgaagatttttatactttttaatttttaagatattatcttacaaaataagatatttttaatgtattactaaaggaaaatattattagtttaaacgtggtgttaattaaaaattattatttaatttgaattaacccgaaagtatatctttttttttaaaaaaaa

SEQ ID NO: 252517 - DNA, 791 bp, Cannabis indica
gtgcaactaacattttaagcatgcatatacacataacatatacatacactcagatatccatatgacacatcatatacaattcttaccttctttccgaattcaagtgtgctggccgacctgaacggaaagtctcgtgctagatggatgccctaatcacattaatcataacataagtgagtgacacactaaatcactttccggcgacttaaacttgaaactaaaagtttccctatcgataaataacatggcaataccctaaatatctcaaaaatggaaaaaactagggttccgaaaactaccccaaccggtagaccggttcccaaccggaagtccggttcctggggaccaatcggtcgacgagttgctacaggtcccccaaaattggaattccggttctgtgctgggaacccaaaaaatgccccaataatctcaaaatcaaaccaaactttgcaaaactgtccactatacctaaacaatgcatcaacaataatttccaaccagtatttcacagaataaaccaaagaaactcaagttgtcattaaagaactaaaattgagtttcaaatctcaagcatacaaaattccctcaccatagctcaaaactaatatccagagcttaaaattaattcaaaataagcttagaaattagactacttaatctttaaaccgtaacagccatcaacttcgaaaattacatactcaaactaaagaaaaagcttcaaaacacatattcatgggttctagggttttacctttgctttagactcatcaaaccttgcttaatactcagta

SEQ ID NO: 252518 - DNA, 726 bp, Cannabis indica
tccatctcttctgctttgtaatttcccagcagaggcttcgaaattgcagctataacaaatccatcagaatctcttagtgtcgctccaataccgactttgttgtgagctttgtcaatagcggcatctatgtttaatttgagccttccttggggtggtgctgtccattttggggcatgtgtgaactctgatgaaggcctaggatcggtagcagcaactgaaattgttgttggctgtgaacgtttagctctggcactctgaaattctgccaagtaggagggggcatatgatgcaactgcctgtggtgatctaacagtattaccatgataaatggcatttctttcatgccaattacaccagcagagaaccaagaacaactcaaattcagatgtggttagagctgtcgataggtgtaatagtatatcagcaattgcactttgtctcaaggtgtgaaaatcaatatgtagagaagacaaatcccatactgttttggcccgtggacaatagaacaatgcatgagtaagtgattcctcagcagaattacaaatagtgcagtagggagaagttgctatatgccttcgaaaaagttcagcagctacaggaagtgttgagtgaaaaactttccacacaaagattctcactttaggaggaagtttcattttccaaaaagtggaccaccaatgttccattgaattactactggcagtgtcttcttgttgggttttatgc

SEQ ID NO: 252519 - DNA, 549 bp, Cannabis indica
gagaagttcttccatagattattaaatgaatcactggaaaccattgttaagtcgtatatgttgtttatgaaagctcctgatcgtagacaaaacagacaaattggtgcaaggtggcttcggaatagcatgggacagccaatggaaggaccttccgatggttcatcgctggccataatacaccagaaaagtgttcgagcagacccaagaatcatagaggttgatataggggatagcacaaatcatgggagcggtaattttggagatagaagagaaaatgggatggataaaaatcagggagagaattgtaggattgctgttactgaacctatattaggaaagaaatttgaatttcaaaaagaaaggttaattatatatgattccaaaagaaggcgtgtagaggaaatggataaggagtgtcagctggaggatttggaatcaggccaaagaggggagcaggaggtaattgttgggttttatgccctaaataaaactcatttcaatctaatcagatttacttattaatatagatcagaaataacatttaatgtt

SEQ ID NO: 252520 - DNA, 753 bp, Cannabis indica
tttgtaaccggttttgttatattagatttttgctcaattttttattgtaattgtttttttgtgttccaatcgattttttgattgttttagctatttcatgtatttgttttattttttttagttagttataataataaactggtttctgtggttaattattagttatgttgttttatgtaattgaattctaaattttagcttttgatttagtttttcaagtaattggtttttatttggttgatttttgttaccggtttctttatgttaaatttagaaattttatgtaagaaaaagagctttatattgtttcatgtaattggttatcatgtgttagttcttaatttgtttattttatgaaatgatttctttattttagatttttaattagttgtttaatgtaactagtttttacaatttatttttatgcaactgatttttaattagattttaaaaaattttgttataattttgtatgagttctacaagttttgttatggtttcacagattttgttattattttttttatattttttcatatagtcgaaacatgtttaataggttttataggtttgaacttgtttcactgggtttacaagttcagaactggtttcacaggttcgatactggtttcacatgttcaaaattggtttcataggttttaaggattatgtcatggggctgctccattttatgatgttatcgtatattttttattttaagtttcttttttttattattattttgtttctagg

SEQ ID NO: 252521 - DNA, 1294 bp, Cannabis indica
accccctctgattgccaaatgttcaggaattccctcaacatggaaaataatccgttcattgataaataccttggtgttcctcagtgtttctccagaacgaaaaattcatccttcctttttcttttgcaaaaagcgagctcaaagctctctgtttggaatcaaaatcttttctccagagcgggcgaagaaattcttttaaagtgagttattcaggctattccttcttatgctgtatcctgcttccgtctccccatttctctttgcaaacactacacccgtctgatgtctaaattctggtgggggtcccttggccacaaccataagattcattggaagaaatgggacaacctctgcacctctaaattttttggagggttgggctttcgcaatattgtgcatcataacaaagctatgcttgctaagcaagcttggcgtatcctaacttatcctgattctttggttggccagcttttaaaagctaaatatttcaagcgaaacgacttcttgcatgcagctattggtcattctccttctttctgttggcgaagtattctttggggaagggatcttctgctcaaggttcttatttggaaaattggggacgacaccttggttaacacatctgaatccaattggcttccttcccatgacaaagtcattttcaaacctggcctcctccctccttctcaaactatctcttttttcattacccaggaccggcattgggacattaacaaactatgcttttattttgacgaggggatgtgtaattccattctttctgtgcctattgatccttataataccgatgctctgatttggaactatcatccttccggttgtttcactgttaactctgcttatcatttggctaactctgccctctccgcccctggtccttccaatcctgctatctataaaagttggtgggtctcggtttggtcctcaaatatccctcctaaaataaagcattttgtgtggaaagcattcaatcatatccttccttccaacctcaacctcttccatcgtaggtctgccccctcccttttctgttctaattgtcattctcatcatgattctaacacccactatctcatacaatgttccagagcaggtaaagtttggaaaaactcatctttttctcagttctattttaataataaaaattgtgatgtcaaggaattcatgctcagaggttttgattgttttgctaaagatcaacttgctattttttgggattgctttgggaaatttggaacaaccgaaacagagctatttttagctctaacagtac

SEQ ID NO: 252522 - DNA, 575 bp, Cannabis indica
gaaaggtgtctgaagctgattaacgaaggtaccatgagcacaccttcctatagcgagatgggcgcctcgctattagttttttggatttacctgattgttatacttagtttgtataaggtgtattatacactaagtgtcttaccaatcaccgtgtctcgtctcctaatgcgtagcgaggttgatgcctcgccttgtacatctaaagtcgtatggtttctcgttaacgtacgaggcaacagttggtgtatctttatcttgcataaggcctttcagccagcaaacttctaaatatactgtgtcaagcccgtattaaagagttattccattttcaaatataattaccattacatttgttaattcgtattcttcctagtttgacacatgttctcctctaaaatggtagccgaatatcaggtataacttcttataagataattttaatataagttttcaaattaaaatgataaagctgtctttttaatgtaaaatatggctaatattataatatctgatcctataattaaataatatataaatattaaaaaaaattaacaaatttttaaaatctgaccata

SEQ ID NO: 252523 - DNA, 1019 bp, Cannabis indica
gagactatggagactagcttacaatgctgtaatcacagtgaagaatcagagatgcataatatttaaaagagtgcctctttgtgaatgcttttatggttcggctcaagatgggaagtttggctggactggaggctctttcctttgttttggtggcagttttgcgagctagaaatcaattcgtctttggaaacagggattttgacttggcctctgtttggagaaaagtgtttgaagatgaggtggtgttcactagaattcgggataaaccagggaaggttgggaccaaatctgtattcactcggactgcacaagtctcgttcattaatgtcccttggattgtatgtttctttgtttacttgattgattctaaattatttattacaaaaggagggaaagagaagtagagaacaagaagaacaaccaagagaagcacaagagcaagagcatcagcaagagctctcatgtgagatatgatgtaaaggaaacttttaattccctgtacctcaaattgttgtactgttcttgttgatttatcaataagactcgggacaaactaagtgttttctccccaaacaacacttagtttgatgagtccaaaaatagttcatgtgtgcatcaatccattcaaatggacattactcaagtgttcctttggttagttcattttggcagtaaaacttgtcaccacctacactgatgggatacttaccaaaattcatatattgtctgattattagagacctaattgataactgtcactgccaaatcagtggcagagttagttggggtatgttaagaataaaatagatagatacttgtctgttatattggataaatttaggagttgtatttgattttaaattattacaagcatccatgcagtcagtcagtagagaatgtgaagagtattttcttggaaatcattgagatggataatgtgaatttcagttttactttatacttgagtctcttaactcctatctgctaagaatgtgtgtatatgtataggtatgcttctg

SEQ ID NO: 252524 - DNA, 1203 bp, Cannabis indica
taagacctaaatcaacaaaaaaaaaaaaactataattgaattcaaataattgccaaaataaaaaacaaataaaaaaataaaaaaacagaataaagaaaataatcacctaggatgttttagcaatcctttgccaatccaagcatcaaactttgcctcaatttcaggagagacgggatcagcaaatgtatcgttaagagcgtaaaagcccttcacatacgtaaccatcttaaaatccctctcatctcctccagattgagaacctgaagatattacctccattggagtgctgctcacatcagccgacccataatcaacaaaaggtgatttcaatgccggggcaccctgtctcttatccaaaagaggagtataagtaatagtgtcatcaacttcttcatcacaagcaataacagctgccttttcaacagcaacaattggattggaatctagaacatgaaatataaaatttgaacatcagaaaaagtaaaaattaccaaactaacataaaactgtcaagcaactaaaataaaactgaaatgctaacacatcttaacaaagaatataaactacacttacattgattataccaacaacctctaaaccagcgaacacaacttgctcatcatcaatttcaagttggcttaaaccattgaaaaattcatctccctttacactagactctttggccttaacattttcaacatccttggccctctcttcactgcctgcaatagcctcagtttgaatcacatcatcagcaggaacatcacaaacaaccttatcaactccagcagcatcaccaccatctttacccaactcatcgccatcatcggaattagagtcaatattctctagatcaggtaatcccttgtcatcatcatcatcatcatcatcatcagaatcttgagtgacaaatttatcatatgacttaacctgcttcaaaaacagtattgcaactgaaataaaataggaaaaaactaataataacagcaataaaaatatgaaacaagaactgtgtaaataaatacctcatcagaaggtcgacgatgaatgacattaactttttcttgaatatccttaattacagtcatgacaaacttgaaattaaggtcaacaaaacacctcaaagaaataaaatcttccgccaaggattcttgattggaaatgaccaactccaacttagatttcaacatttctatgtcctct

SEQ ID NO: 252525 - DNA, 1555 bp, Cannabis indica
gaatcatctacagagctttaaaacttaaaaacatactcaacaagtcagacgaacacattatgctcaccgagttcgacctttcactttgcttggacacaatccaaatcgttgtcgaatcaccagaatcatcctaattttctttcttcttcaaccgtctcttttgttcgcgcctagttgagacactttatgctgctaaccagctctttgtggccaagtcggtgacgaccaggttgtcgtccattgtcggtacacacaggtacatttcgcctaagatggctaaggataattcccatgagactggtaggcatatggtgtctttatctatgaaatgatttacgttcaatacaattcgcagctcaatcccacaagacaacgatctcaaacattatcaatatgctactagtcttccccaccttgaccctgtcatgcgagcttgagcttcatgcaagggagttgactactgggttgcttgacaaggactcgaccaagcgtctcgaggccaaacgtagagctgctgatgttaagaagcatcccttcttcaagggactcaatttggccttggcagtggcgaagacctcgtcaaggctaaattgagatccttaaagaatgggtgcttcttaacctcagcagctccgcgtttggccctgagacgcttggtcaggtccttgtcaagcaatccagtattcaactccctcccgtgaaactcaagctcgcttgatagcgtcagggtggggaaggatagtggcatatttataatgtttgagataattgtcttgtgggactaagccgcaaacggtgtacgaccgtagattatttcgttgatgaagataccatatgtccactagtccatcttgttgccatgggacttatccttagccctctcaggtggattgtactcgtgtgtatcgacagtggacgacgacctgatctttaccgactcaactacaaagagccaattagcagccttaagtgtctcgacttgacacaaatagaagcgctagttggagaagcaaaaaaatgagaatgagtcaggtgatgattcaagcgattcaacaatgcttgggattgtgtacgaataaagtgaaaggtcgaagtcagtgagcataatgtgactgactgacttgatgagtgtgtttttcggttttaaatctatgtagatgattccaacatgtgaagatacttcaaggcttctagaactttagcagcgtaaaatctttaaatcaaaaaaatgcatgaaataaaataaaaataaaaattattagagtttcctagttaacattatcttgtagagttaagtaaaaaccatttttgaggttgtttatggcgaaatgagttaagatcaccatcagaacagtactccatcactatatacgagaaatatgagtcttcgaactcaacgaagagagtctaaagaaacaggtgatcaagtattttcaagattttctctctgttttcacttttttacatttccctccaatgctaaattcttcttattcacaactttcagggcttagtaataagaagtacttaaatcaagtactttgcatgtgtagac

SEQ ID NO: 252526 - DNA, 961 bp, Cannabis indica
ttttattttttatattttttcaattataagaccatctctcgaatggatagtatattttaagttaaatttgacctaaattataacacaaaattatatttgacctaatttttatatttgtgctacaatgtataaggtgcaaattaaatacaaaaattaataataccattaatactcattaaaaatatacaaacaattgactttgtttatattattttaataacttataaatataaaaatattttttattaatgaatagtattaatgagtggtaaataggtaattaaaaaaataatatttattgtgggctaaaatttgacacatgctatcttttgtgtcaaattcagcacaatttttagcttgagctaaatttgacacatattttacatcatcattaaagttaacttttagcaaaatattctaaaaaataacaatatactacatttatagctctccattagagatgctctaagtttgtaaaaatatggtattgttttttttttaaaaaaattatttaattgaaaattttcagaaaaaaaaggatataaaaatatgaaaaaacagtataattatctggttactcacttatagtaattggttactctcaagttaccatgaggataattatccttacttaatatttccatatttgtcaactttttcttcaattttctctttaaataattttttttgaaaaaaaaatcatatttttttgcacaaaaagtataaaaattaataaaatttgtaatttcctctataatttatgaagtatttatatattgtgcactcttaatcgctattactcatgaatgagtattattagaaaaattaaggttatattttaattttgttatctaattaaattaagacattaaaatataaacatatttttgatagtgtaaaaatatagacattaaggttatatgtttaatgagtattgagacattaaaaaaagttgagtttg

SEQ ID NO: 252527 - DNA, 793 bp, Cannabis indica
atgaaaaagaagcaaattcactagtttaataaaaaatgaataagaataaacatgataacagggactaatgtacaaatcaccttatgagggataagatactctatggcataatacaaaacaaaatgcaaaactatagtcagtagtaagtaagagaaaagaatcattcctcttttcccaacaccctcttgcattttaattaaaaccaattagttcttgtaaatgcaagaatcacaaggaataagcacacaaattcatgtgtttgtttctagatgagctactaattccactattgctatgaactgacagtacctctagaaagagcaaattagcaagaggaatcaagtccctgcaataacaatgaaatctcaagcagcaagactcaacagtgaaattaacatataacaataatgacatctcactgagaataagaatgaacttaggtggcatttggtcggaggtaatgaaatggaatggaatggaaaggaaacaattttcattccattcctttatttggttgcattttaaagtattggaatggcttttcaatggaatgctctttccaccattttggtggaatgactattctattttaaaaagaaaggaatgaccaaccgttccaatgtaacaagaaaaaaaaattcattatttttttatcaattttttttatgcattttaaattttattccattccattcctattcccattctcattcctattcctatattttcattcctcccaaccaaacgcctaagttattagctcagtaagacccctaatttcaagtctccctct

SEQ ID NO: 252528 - DNA, 1222 bp, Cannabis indica
tcttaaatattatttgaagtgaatttaatttatttctttttaaatatcttattataattatggactataatttaatgtacttgttagaaatttattgtacctatagataaacataaacttgattaattttttcatttatttttctcttcatgaatttaatttattatatggttgaaattttgaaaagataaaaatattattatggatgatagaacaaattaaaaaatacaaatctactaatttttgtaatactttaaaacttatttcagatttttaatatatttttttacttttatgttatgaaatgtagcatataatttttttaggttaattttttaatttatttattaaggggcccaaaattttatatcgtcttatgacccctattttttcaaaggccggccctgtttgtaagtattataattctattttataataacagttattagtaaaactattctcatattccattcaatggctcttcttctgccacattcagaccaaaataaccattttgccctcttccacatggtttctttaactcctcctcatcagccacaaccacttctgacaagttaacctgtttggtctttctctctgccaatattctttgtgttgatttgtagtatgttcagggctggccctaagcataggcgggctaggcccgtgccgagggcccactctttctaggagcccatttaaaattttaagacctcattacttaactactatatttaattaaaattaacattaaatatagtttaattggacccagcatagtggcagcctaaagagtgctaggtattatattttcttgggacttgagttcgaaaccaccaaactttattttttattataagtttttttttaaaaaaaatattatctaagaaacaactataaatgcatataaacttaataactaaagccaaaaattaatacataaatattatttaaactttttttctaaatctaacatttcataagtttatctattttttttttatcttgctttaatcagaattacatttttaatattatgaagaaaattcattaatcaagatataatatttaatttcaataataataataaataatttttttcttcaatattatttgaagtgaatttaattttttttaaaaaatatcttattataagtaatggactataatttaatgtagttgttagaaattattttagttatagataaatataaacttgata

SEQ ID NO: 252529 - DNA, 723 bp, Cannabis indica
ttatataattttatatattcaatatattttatttaaaaatatatattaattgacttaatatacatttaacacattagattaaaaaaactttaaatctaatatattaattctcatcttcctaaacgctaataaaattatcaatgtgtattcaattaattttattttttagtggttttattatgagatcatgaaaattaagttggactaaactaatgtttattatttatgtaagattactattacgtttaaaattatattttttttaataaaatcaacttaaattataactaaaatggattggatagatccaatccaatccaatagaaaactagtcaatatccagtggttggaaccgatccaatccaattcatccattggatcggatcggatgacaattcgattggattagatcggatgacaaaattcaatatccattaaataattgaattggaccaatttggaattgccatgtggcaaattacttaatacttaacagtcaagttcctacaagaatatttataacttaagtattattatcgtcaaaaattaaacttaggtatttatttacaactacaagttaagcttaaatatttatttacaactaggagttaaacttaagtatttatgccacaaattactctaaaaaaatatatttttctataggaattaataaaaataaaaaaaaaaacataattttatcaggataaaaatataaaaaaaatt

SEQ ID NO: 252530 - DNA, 715 bp, Cannabis indica
tcaaataagacactaaactaagtacatatagagtataacgtgatggcgcgattgtatgttacatggttgttagatgaaattataagttagggttattaccttaagtttaaattgtgaataaacatgcaaaaatatattacgtgaataaaagagaagagttatgcaagtaaggtataactaggttagactaggtaactaaaatcgagataaatcttattaaggccttatctgtaaaagagacgggtgatcatgtaacatgtatgtttatattatatagatattagatgcaatgacatcattatatatgagaaaatgtgatatacggtttggtagcacagttatatacgcagaggcgtaatgtgtaaaatgtgattattataattgttcatactgtattattgttctatcttgttgggccttgactcacgagtgctctattatgcggacaagggtattgcagtgtcgagttagccatgagttcgagagttttaaagacgaattgtacatattccagctaagctagaccatgagggttgggtctaacatgaaattgtgtagaaattttattttaccgcttagattggcctgaatgaaataacttataatattttgaaaataatttcacgagattccagccatgtaattttaataaaattatgtattatatatgttacgaaaattattaattactacgcaagtgcacgcaatcaagtag

SEQ ID NO: 252531 - DNA, 988 bp, Cannabis indica
atctttctgctgggtttgtgtttgggatttctgggtttctagggtttggtttcgagtttctcagagagaaactctctgctagggtttcgaagagaagactgagaaagagagaaagtgactgagaagattctcgagtctttggttttgttcaaacacaaaacgaagccgttttgagtgttcagactttgaaaagtctttgaacaagtgaaaggtcgaaattgaccttaattactgatctgtttgttttgttggtgtagggacaagatagtaaatttctatcttaaaattcctacacgatattatgagagatgcaccacaaaaaagagacggttttttttcaaataaaaaaaaaaataccgccaagtaaaaaagaatactattaatgtatattttctctcactctcttgaattttaataaaaaataaaaaataaatttcataaaattatatgccctccttgaacacagatttttttttcattacttgtaagaagaaattagtataaaccccaaataagtaaaggccaaaaaaaataaagcccaacgaaatttaaccacttactagattattacttttgaatttgtaaagacatcaacgaggaaaaaccaggtttctaacaccttttaaatattgtgttctagtgataatataaagtaataaacgaatataaacctattttttttttaagtctaattttttcaaactaggtaggcatacaactatgctagaccaaaaaaaaatggatcaaacaaagtcgtgctcacataatttacaataactggcattaataatagaaagctttacaaattactcgccagcaactaaacaattttaacaataaaagctttaacattcaacataaattaacaaacataccatacaggtccatcactccctgctttttcgagagccagaacaagacttaacagcataactcattaatcattccccctccgattcgaattcgaatccactcgatcagctctcca

SEQ ID NO: 252532 - DNA, 531 bp, Cannabis indica
ttttgaattttaataattataatttaaaattgcaccatactatatattacaaaattactaatttttacaatatgaatttttttcatgccaaaataaatatatgtaatatatgtgtatatcacattattttttagagacaactcaatatactaatttgatgattaatatatttattatgatgctaaaactctttttattattttttttatttttgttaaactattttttatgcagtaattagaatcacttatgaattaacaatgcagacatttgcaaatagactattaaatatgctcttataaatagttatcaatattattaaattaaattaaattgtgtgagatcaaatacttaattatactgatagtgatatgacatattaaatattactagacaccaatcgtgatttttcaaattaattcaataaagaatataaaaaatagataatcaatttggccgcttacaaacttaacattttaggtacttatgctgtaatatcctgatatgtctaatggtaaataattagagttt

SEQ ID NO: 252533 - DNA, 708 bp, Cannabis indica
cgttcttgatcaatggattaatgtttaatcaaaaaagacaagtgcactattagtagatgatattaacaatgttattgaacgttggaggaaatcaatgttgaataagtttggtttcgggtgtgttgctcgtgaatatgatgaccacttaatcgaagcaatttctagaaaccggtttggggcggtccaacctaaaattacagagataattggagtcaaagaagcgttgagttgaatcaaaagaaggccgtggtctaatgtagtaattgaaactgatgctttagttgtggttcaggctatcaaaagtactattgaaatgtcatcttagtttggattacttatatacgattgtcaggtttgtcttctttgacgaatgtgtctttagtttttgttaaactgcaaacaaaattgctcattgtatagttatgattatatttttttgtcagattgtacgtttagtgtggttgatgctccttttgctttgaaatctattgtacttgatgaaagtttatgaataacatcatatttgattaaaaagaaaaaaagaagaaagaattgaaagagcgatcaaatatatgaatataataacagaaaatggttaatggcttaggcaatcagattgccgccattgcaattaaattctgaaactatatacccaacatattttcccatgcaccatatgttaaataaattaacaattaacccaagatc

SEQ ID NO: 252534 - DNA, 1128 bp, Cannabis indica
tagaatctgcttaataacctgaatcgagccaaggtatcctttgcaaaatatcatcaagtcatccgcaaaactcaggttaattatttttagattcttacaaagaggatgatacctgaatttggattgattagcagctagaagaagcctcctagtcaaatactccattattaggacaaataagagcggagataaaggatcaccttgtctcagccccttcttgccttggaaactctcttgaactctcccattcatcaagattgagtaagatgtcgattttaagcaagtcatgatccaagttatgaatctgcctggcatgttaaaatcctttagaagcttctccaaaaactcccaattgactgtgtcatatgctttacttatgtccaccttgatagtgcatctaggtgaaatgttcttccttttgtagttctttaggaggtcttgaagaatcatgacattatgagctattgatctcccttgcacaaaagctcattgattctggtttaccaatcccggaagaacctgggagagtctcaaacacagtaatttagatatgcatttgtagattgtagtgcagcaagcaatcgacctgaactccacagctttagccaggttttctgtcttgggaataagagtgatcatagtggcatgaagttcccgtggcatgatacttgtcaagaaaaaattctccactgctttagtgatttcagctccaatttcagtccacattgtcttgaagaacccagctccatagccatcccgaccaggtgagttggtgtccggtatactatataaagcctcctttatctccttgttagagaactgtttgattaaagccaattgttgctctctgtttagcttgttccccatctccatacaatctttttttaagtcttgagtaggccttgtgctagtccccatatagccttgaaagtgcttaatgaagtgctcaacaacctcactgaaattgtctacaacctcaccatgatcattggtataagtaactatgctattttccatttttcttttttttttcttcaggaaagaatggaaaaacgcattgttctcatcccctttgcttaaccaggttactttgctcctctgtctcaagaagctgtggtacatcttctc

SEQ ID NO: 252535 - DNA, 553 bp, Cannabis indica
actgcagtactcaccttctatatttcagtacaatgtcactacaacatttttaccattttattacatttaacaataacactttaaaaaaaacgttaccacctcttaaaaaaattaataaatgttaaggacttacctaaattaaaaataaatggatagttggacaaaatcacagaaaccccaattttcaatctctctcttctccccatctctctcttcgattttcgtcgtacggccaagtctagacgagactctggttcattccatgccagatccgcctccaaaaatctgaatttctacgtattgaaacgacctggagttgatgaactgctcgaataccttagggaaaacgacgataaattcgaggttgttgttttcacggctggattgagagaatacgcttctcttgttctcgataaactagacggaaacagagtgatgtctcatcgtctttaccgcaattcgtgtaaggaagttgatgtgagacttgttaaggatttgtcggatttactaatgaaagataaatcatattcattgcattgcttcttgtagttag

SEQ ID NO: 252536 - DNA, 1108 bp, Cannabis indica
ttagtccttgtgcgtcaagattttttttttattcttacctcctctttctcccaaatgtgtagcgctatttattatgatggacacttaagacattcttcaatactatgacaattaagacattcttcaatactatgactgctgatttcgtttgaaatatagaaatgtgaggatgatagtaacgtaggagatgtagatgtaatacatatatactaacataccattgataactactctgagtaactctgtatgcatgggttgaagctcatcgaggataccccttcttgataggtgttactcatttgaatgaaatagaaatttgaaatatttactactagtattggaaattgtcattagtacagtccttgattcacctctttcattggtacttcacctctttcatgtatggagacttgacgacatttaagtaaatggtttcactgccttttctctaagatttttgctaatgggtgcttttttcacattttttgtaggttggtcatgcatcttcattgtcggctttcttcactcattatcatagtcatgtccaccctaagttttatggaaatgttcaaagaagtgttgtagcattctcttgccttttctgctttcccttcatcatggttaatccttcagttgttaggaattccatggctaggtgataagctgaggtcacaacattgaatcgattcagggaaggtatgcccagtatgacattgaaagcaacagagaaatctaccacaattaaaattgccattatggttgttttatgcggtttctctccccttgtgaatgctagtcctatcatgcccaacagaaggatagagtctctcgtgaagccataaatgggggtttttcttgatttcaagtgttgcaggcctagccccatcttctcaagggtctttttatacaataggtcaacagagctgccatagtctatctctgacaactagtagtctatcttgtcttcaagtcttttcatacttaacttttcccaggcaatgtgggattacacaaattacccacatcgcttgaggaaagtcaagtgttatgactatgagactatgtaggtatgggagtacacctgaagagggattaaatggattaattg

SEQ ID NO: 252537 - DNA, 543 bp, Cannabis indica
atgcaacataaaatgatttctgatcttttattaataagtaaatctgattatattaaaataagttttatttaaggcacaaaacccaacaatattgcctataacatcgcaaattttttcaacattagtcgagaaaactcttcatgtgtcgccaatttttgttcagtctcttccagttttgtggacatcttaacgaccttagggtttggttcatggtgctcatctctcttattgacatcatcatcttcttgatccataggatctaaatccttagacttgttttcttcttctccttcatcgataagtttatcgtgaatgtttgtttcatcacgttgatatgtccctttttggcgactggtcaccttagtgggatcttcgtcgagctcaattttagtatttagatcaacatcatcttggtaacgaagaccaaattttgtccgggtgagtaccataatttcaaaacgtaatctttgataataccactgctttctttagttctcaatgaaagcatcaaaatatttaccgaattttttaaaaaaccaatta

SEQ ID NO: 252538 - DNA, 993 bp, Cannabis indica
tacatgtcaaagtttgggggggggttattcccaaccactaacaacgatgtaatggcgagacattgaagaacaaaaaaaaatcaaaaacaaaatatcacataaacaagactgaaatactcaaaacaatgtcacacaaacaagattaaaatatttaaaatcatgttacagagacaaaactaaaacactaaaaagcatgtcgcagaaacaatactagaacactcaaaaatatgtcacaaaaacaataatgaaacatttcgaaagcatgttacacaaacaaaattaatcacaaaagcaaaaattaaatggcagtagtaaaatacaacccgatcaaactgtgttaaagtctagagaaggccaggggcttgtttgaaaatttaagaacgaaaaatcctaattcttttatattttaatatgaaattagtatgtaacaattctaaaattattgaacaaatttaaagattagacatttgatttttttcttttttttatatgttttatataacatgaaagatacattgtcgcatgaaattgtacatatattagtaatcaaaccattttgcatgtttatatatatatatatatggaacacttcttaatgggtattacccatgaatggttactaaacaaatttaactataaatattaattttaaaaatatcaaaccatcgaattttgatctaataacgaataatgaaatcacaaatttgaatttctatgcttaatttaactacttaattaaaaaaataatcaaaaaatatctctttttacactatatcaaaaatatgttcatacaaaaatatttaactcaaactcaactttttcttttcttatttttcttgctaaaaactttttttaatttttttttttaccgatggaacaatctcagcccatatgatcatatgatataaaaatgagagatttttttaattagatagaaaaattaagcataaaaactcaaaattttctaattttacccattcatgagtaataccc

SEQ ID NO: 252539 - DNA, 1338 bp, Cannabis indica
ttactcagaggagtatgtgagacgtcatcataaaaatcaaacccaatttaactgttcacaacggtggatgagtacatcagaataaaaccaggattaccgggattcagttgcaagcctttgattcttacatatactgtatcaccgtggatttcgaatccagcagtggaaggcgcacggagaagtatggcaatgaggaaggagatttgagtaaaaagctggtgttggaagatggtgattttatcaacaaaatttatgccacatccgacccttatcagcttcgtcgcgtaggcatatttctcgatgaaaatagatccattatcactggtcgtgggcctcgtggtgataatgaaacagaacacacgtttaacgtccccgatggttgtttcattctgggatttacgggcttctataccggtgcaatcactgagatccagatcatctatgcggcattccagccggccaaatggtcccaacttatttgaaaaccaaacacacagaattaataaaacctgccattaattgtctgtgatcatctgatttggacacacaatcaagttttaattagtttttctttctaatttaattatatatatgtttgagtatgatgagaattataagtacgagagtcatgcatgcatggtcgtattcttatgcatgcatttaaataattacgtgatgtatatgtattcatgaatgttttgataatataattgatatggtgtgatggctatttattgttaattttggtacgtaaaatatacgcctctatataccttcattactaaataattgcatgtttctcatcaagctctttaattgcgtccttggataaagtagcaatattgtctaaggataaagtataaactacttggaaaatttagatcagactcttcactcaaaaaattagagcattgctgcggtacccaacaccatactgatatggtgtgttaagattgtttaacagttttctatattattaaataaaaatgtgtgggacacgagatttacaccaataagaatatgacactaagggtatgtattactttcaagattctttgaaagggttggataataagaagaattttagagagaatattaaatgaaagaagatatatattatatctcaacttgtgtgaattttgacttggtgcaaaatgatgggattatatttctatttataggtactctatagattaatctagaaccattattaatggttagcttcttagaattgttctacataatttcctctactaacacaagtgaaaaataattctagaaaattcaagagtacttaaaaaacaagaagattaatctagataattagtaatatagaat

SEQ ID NO: 252540 - DNA, 1008 bp, Cannabis indica
taaacaactagctaatttccaaattaactaagcgggctttatagagtcagttgggactcacgagtgctttgtggtgcaggtaggaaggatagcagttgtgttcagccatgagacagaggtcttccatctatatacatattaatcgtggtgtcttggcttcctggaagtaggatcaacctattttctatgtttggaaatgtaacctcatttttataacagtgattttgtaaccaattgtaaaagaattttatatacaggggatccccgtattttggtgtatttagtatgaaatttttaattcaacttaatcgaaaggtttttaattgaaccacactttttctaaagtaatagattagtaaggaataagtttgtaaaagcacacacgtggcgtccctaagggtcagggtgttacacacacacacactgatttggatggatcttatcatgttactaggtttatacacaaataaaagatgattacaaaatttacttgttaccactcatttatttgacctatttacaattgaactattggttaaaataagatcattggatctgtcaacaagttaaccatagtaatttagatcaaacaataataggttttataaaaaaaataagttttaataataaacaatatataaacacacgcatgtcacaaacttgatagtgggatataggatttatccaatttaaattagtttcgaaaaatctaaataataaaattagatgaaaaacaattaaaccaataaatttgaaaaattaggtttttaacaaacctaaatatcaattcaaaaatgcaaactaactattcaaaatttatattattttaaaagaaaattaaattaaatgtctaattaaataaaacgataaattaatatcatttatataattttataattttatttaaataaaataacaaaaatctgaaagtgacaaaatatctcgtttgatttttagaattttctagattaaaatatatcttattttaaatttcaaataaggtcattt

SEQ ID NO: 252541 - DNA, 1185 bp, Cannabis indica
atttattataaataccgcgcaaagcgcggataatctatagtgtacacgttcatataaaaaaaatattgactaaaatatttttttgtctaaatatcaaaacgaatataaaatttactgaaacactaattaaagtagacttaccttatattaatatagtataagaatatataacatctctagatccaattattaagaaataaagttggttcaaaattttttatatctactctttttttattggatttagtagttataatatactattagtgaaaaataaaattaaataatgtataaatttctttctcaaattaatatatatataaatattttacaaaaatattaaaacaaaatatataaatttattatattacaaaatcccgcaaagcgcaataatgttacttagttaatatagaatggaagtaaccataaacttaaaaaaatactgtaaaataaaaaaaaaatataaaatattgtttcaaataaaataaaaaataactaaaaaataattttagaacgacttaacaaacaatatgaaaataattataaatcaacaaaaatataactacaaagtaacataaaaataacaaaatattgacctaattgtagtaagcaaaataatatcaactcatcaatatgtttttgtattacgattttttttttacttagttttgtcagcttgatttatctttttgtactattacattattttttttatgaaatttgttgttacagctttattttttcacttttttttttctttttttctttttgagttagtgatagttaaaataataacataaagataacaaaaaaaaaatgtacatatatacaacaaaaatattgtttggaataaactgaaaaatatacacgataaaaatacacataaactaaacaacaactaaacaaaaaaaatacataaaaataacataatacaactataaatcaactataaaacacttaaacaaaaagtctttgaccattgaatgagataatttccactaccactagcaggtcagccgggccgtgagtgcggtgggaacgagcttcccaaacaacataaaaagaaatataaaataactatacaataacaaaaagataactgtaattaacagaaaaataacaagatatcaatcttgttaaaatatgcaaattattcataaattaattctgaatagactacaaaac

SEQ ID NO: 252542 - DNA, 610 bp, Cannabis indica
tatattgtttactttagaaacttaatctgttgtaaatcaggtaagaatcgaaaaccatacaaaaattatgggaaacaatgataaatgtaagaaaagtgccagtaaatcttcctcgaaacaaaacaaccatacccgaataaacaatagaaacgacaataaatgatagaaacgacgatataatattcatatatatttagaaaatgacaatgtatcacataatggattacatatacttgtaagctattttcgggggagagggttgtctatcgttggcctctgtagtagaatcagttgtcgtgatcatgattttccttttgggaggatccttctctttttggctagttgtgggcaaggaatgattcaaaccccgacaccgtagttcgtaacaacattctctaaataatgttttttgactatgaataatagactataataatgtttttttaagatttttgaaatgtgttgtttggttagaggagtgaaaatatgattagaaatggaatagaatcaaatttaaatgcttacaaaattgataatttttgattaatttttatcctgcattagaatggtcattaaatctatttaaaaataaatagtcattccaccaaat

SEQ ID NO: 252543 - DNA, 935 bp, Cannabis indica
ttttgtaaagaaatcgacctactgtatattttgatcctccccgacctgttagtaatgaaccaattaaatatattccccaaatggcaaaaggataaggcgaggttatcattcaaagctctgttggaggtatttgaggaatatgtgagaatcgctagcattttccacacttcttcatgaactcatgagtttctttattaatgaatgaccaataatatccttgtcaaattattttattggataaactttgccttccagcatgatcctcacagaaatattcatgtatttctttaatgatgctttgggtttcttctggtgttatacccgaaattcggctgccatctcagtggaggacacgtgtcaagataaagggaatatggattgatgcaatcactttttatggaaaaactcattaatttcgtaagtatcagagtatatttgtgacctgatgactgtaaggtcttaggcgaggaatcaatatacaatctggcgcttagtatattagagacaaaccatatatcactgaatgtgaatagcgaggcatcaaggacagtacacataggaagacgaaagcgacaaatatcaattgcaaaagcccttagtgtataatgtacaaactaagtgtaacagtcggatcagctcgagaccaagtaagcgaggtgcccgtctcgctatgggaagacttcctataacttcatccagtcacgtcagcgaggcttacaaccctcgcgagccataagctatcattcaaatgagcttcaaaaaactctttgtaaataggaaccgcgatcgtcacaagacatgcatcgtcgacctcagaaggaaaaatggccccagctcgctgttgagaccactgtaaccaagcttctgtcgagacatctctagatataataattaaagacatgtttaaaaaacgatcattttgacctagtaaaagc

SEQ ID NO: 252544 - DNA, 738 bp, Cannabis indica
gcattgcaatttgagtaattttctcctcaattaaattgttggcagtggaagtggttttgtggagagattaggaataacagcagtgaatgattttttttgcaagtctagtcattaatggccatactccacctttaaagaaatcaattatgtaacgaccataaccagattcaagcagaggagaaccaaccatagaagagacatacgctaatgatggatcaatgccattgtagatttgttccaagaacttatgacaagattcaaaggaacttttatccaaaatctaatatttttgtaaaaataaaaaagaaaaaaaatagcaggtaatacactagtagacattatctacgtacaatgaaatgatttctaattagtctcgattagataattataaaatttaaatacgcattaatgcatgtaaaaaaatccgttactatttgtactatttgtgcttacctaacattactcaatttttatttttttttaaaaaatttaccaatcaattttatatggctaatacttttttagtaaatttaatcacagtgtttttttatcactagttgtaaatatacagagaggtcgttagctataaataagacaaggtgagggtacataaggagacaaagagattgtgggccggcgttttgtggcacactctccagtctcctccacttcagttgggcccactccatactccaccaattccattctacgaacaaaactagtggactcacgagtctt

SEQ ID NO: 252545 - DNA, 1207 bp, Cannabis indica
ttttattttattaataaaataataaaatattattatatataataaaataataataaaacaaatctcattaatatttgaactggtatttgaaaattaaaggaaatcgtttggttgtatcctttttttttttaatatttttaattccgaataataataaataaaaattcatagtaaccatttatagaacgattgagttgaaaaaaaaaatcaaaagaaatcaactaaatgtgtcactctgactatccaaattgaagaacgattgtcgcttttcttgcaaaattctacaaatgagattctcacaataacaatttggtatttgtaggagtaattgcgaatatatattctcacaataacgatttggtaggtgttgcgtgaaagggtctctgactatccaaattgaagaacgattgtcgcttttcttgcaaaattctacaaatgagattctcacaataacaatttagtatttgtaggagtaattgcgaatatatattctcacaataacgatttggtaggtgttgcgtgaaagggtctctgttggaactaaacgacagactgatagagcagccattgttgcttaattcatcggcagaaagagaggtcaaggattggctcaaggtcaaggattctttactgggttttgaggagtataagaaacttagggaaagttgttagtttttgaaaaataagtgtgtttagtttagattgtgtgatgtatttaattaacacaatcaaatgctcttttttacttgattctcagataagggtcaatttttattttgtgggccgctttaattttgacaggaatttctctgttagagttttcttttggttatcataaaaagcttttgagttgtgattgtgaaaacccttttctttctcattgtttttcaattttcagtattcacatcgggttttctctctattaaagtcgactaagtggtacatcgattcctctctgatgttgttccagttgcatgtcgtgcagtaactgatgccggaattcattttgtttgcatcaccaactttaggtatatgatctattttatcgtctgtagagatttcatatattcttcctccttcttgctgtaatggaaagtcattttcccttaaacattcattccctcgttatgtacgaattaagataaatctttggtaaatgagattaattgaccactagcttcaaaatgtgatcggtgccaagatttgt

SEQ ID NO: 252546 - DNA, 922 bp, Cannabis indica
ataaataataaaattgcaaattctaaccccataaaataaaatatatctattcaaaaaatttattttgacctagtaataacttactatctaatcaaattattccaagtataatcactaatcaaataaattatcaaagtgatgtctcaacccaccaagtataaatggtattgataaattttctaacagctgaaaaccaatatattttgtatttttttaatgaaggtcatcaatcttttaaaatatattattaacttaaaagaagtgtaattatttatgtgagtgtgtcaatagaacatatatgattattaaaaaaacttagtttaatttaatatttatgtgggtgtgtcaatatagatacatataattataaattttatatatatatatatatacataattgtatatatggccataaaatgtataaaatatttattactgagtagtaccaaaatgatgctaacataattttgaccaaacaaaagacaaaaagaaaataatttcactacgtaccccaaccaaattattattgaaagaaacaaaatcaattataattttcttctcataattatcaagaaacactcttaattattttcacatatattcttctatatatgtacacgaaatcataaatgattttatttttgtataagaaatatataaggatatatattaattattgcatttctgtaatctttgataatcgagaattatgtgtggtatagtataggtattaatatcatatacaatgtatttaggatatatattaattaataatacaatgggatttttcagcgtttttggcacttacggcctctaccatcgggcccgacatcgggccttcatcttctttgatgaaattacactaaatcacaccctaaaatcacacacaaaatcacagaacctaaatctatcaagaaaagca

SEQ ID NO: 252547 - DNA, 782 bp, Cannabis indica
aaaggagaaacttctcattctacagaccgtcaaatgcttgtttttttttaattctatcagtgtgacttaggggaaaatatcgtctatggtccatataacacattttgcatccatttgacaactaacgagctcgtgtattggtacaataaataggacaacttgagtagccttttgtgctcagccctgataaattactatacgcaggaaaattattaacaatccacaacagcaaaacctttaaattgaaaacttctttcttaaaaccatcctatgcatcaacaccattttctacaactctttcaagtcatcaactaacgctgccaaataaacatcaacatcgtgttctgattgtttaggccctaaaatcattagtaatagcatcataaagtttcttttcatcaccaaccaaggtggaaggttgtacataatcaggagcacatgccatgaactatgtgagatgctaagagaactatgtagatttactccatcggcagataaaccaaggcgtagatgtcttggttcagctatgagttctggattcaaataatatacttttttccaagcttgtgaatcagtaggatgtcagagtttaccatctttcacttgcctattctcgtgccaaaataagtttttagaagtttctgcacttcgatgaaagcgcttgagccgcgaaatcaaaggcaagtaccacaagactttctctagtataaatttctggatctccttactattgttgggcttatactgtggcaaaccacagtctagagaagtgtgcatgtggg

SEQ ID NO: 252548 - DNA, 630 bp, Cannabis indica
tatcagtcttagtcttgtaaaaggttcattttgttaaattttgtcacattatatgactaagagaatatataattggttattctatcgtcatcgccaaatgtatgtctcattcctttaaaaaattaaagtttttaataatagttttactatttttttccaattataaatttatttttagtttaaagatttattttttttaaaaaaaaagatttttaattatttttattttaaattcaaccactcaaattttcgatattcctttttatttctcatcaaatgaatgatatcttcttctgaaaattctagctattcttaacatattggagaatctcattgctattactcaaataaaaaaaaaaatctctcatggtagtctgttccggttcccttacgaaacttttattattgacaataatcaaaatattcacattaacatattatttgtcacgtgttaaaatttattaaaaaactactttaaaacattagtaatagtttaagaacttctttttaactgactaaaaaaattagataacacaacaatacataagttataattttagctattaacataagcttattttaaatttattaggtgaaaatagtaagagcatctccaacgtatacaccaaa

SEQ ID NO: 252549 - DNA, 1209 bp, Cannabis indica
gaatatcgctaaaaaaaatattttaacatgtaatttcagacgcataaattaactaaaagattgtaataaccacttctcaaccctctaaattaaataaatatatatagttatttcctacaaaatcattgctatcaaccaatacaaagtcgttttcattgacagctttagctttttcagaagtagtggggggaccgaaattatactatgtattagattgacaaatattaactgaaatttatgtatatatagtagtaaagatttggtgagaactaacatttcatcaagtaaattacaactttcttcaacatatagtttttataatcaaaaccatggagaaagtgtttagtatgctttatgaagctgcccaagaagggaatgtgaccactttaaggcaacttcttaaacaagataaattgattctcgatcgactcattgttatcaacaataatggttttacggagactcctcttcatgtggcggctatgctcggccatgcagatttcgtcagagaaatcatcacttacaagcctgagcttgcgaaggagattgacgcatggcactccacgccattgcacttagcagtggcaaaaggtcaccttgagaccgtcaaagtactacttatgttggttgatgatcgcgaaaacttgtgctttgcttgggatggagagggaagaaaccctatgcaccttgcagctatgagaggacgacttgatgtgttgagagagctactcaaagtggctcccgagacaggtcgaatcaatttgaaggatcgaaatgagaccattttgcatgtttgtgtgaggcataatcagttggaagctttaaagcttttggtgagtgctatggatggtgattaccaatttgtaaatgccaaagatgattatggtatgagaattttgcacttagcggtgacttataaacaaattgaggtaagtaaagactatttttaatgtttataattaggggtgttcattggatcacatccaatggatttggacccaaccgatccaatcaaattatttattggttgttgaattttatcatccaatccaatccaatcgaattatttattagatgttgaattttatcacccgatctaatctaatcgaattaagtcatcttatccaatagatgtattggattggatcggttccaaccattggatgtattgactggttttctattagattgaattggatatatccaatc

SEQ ID NO: 252550 - DNA, 589 bp, Cannabis indica
gtttccaatatctaaaagttccagctcctcacagttgaccaatgattttggcaatgatccttccaattgattttcattaacattcaaaactattaggctgttttccttggcaaaagctggaggaatgattccatgaaacttattttttctcaaatctagcacttcgagagagcttgaatttcctaggcatggaggaatgttcccactcaaattgttattggacaaatcaagtcctctaagcgaagtgagattgcaaatggatagtgatatttccccaacaaatgaattgtttgagattgaaataaaagttgtagaaggtggtaggactggaagatgaccttgaagtcggttgaaggcgagattaatgaatcctagagtcttccatggaatctgatcaatttgtgtcaaagagttgtgagaaatatctaggaatatcaatgaatccttaccacattccataaccattggggaacactgccttcaatttgattgttggagagatccaatctttctaaattttgcaagcttcttaggaagtaggggaactcacttataccacatgaagacaaatacaattcagaagagtatt

SEQ ID NO: 252551 - DNA, 1223 bp, Cannabis indica
gatacgggctggtatggttacctcctaggtttgggctttcttgaaagagaaacacggagggcttcgagagaggtaggcaaaggagaagtcaaattcggcagaggcaggtggaggagaattcgaattcgaagtcacaaaatgcagaatgaatctgaacagtagggcttcgatgcgtgggtgtattacaatttgggtctgtggaatccttttgtaattataaatgtgtcagttaaaaaatatctaatataaagtatccgactttttataagtgacgagaatagtctattacatttttaaaaattttcctatttcccgtcggttgtctctttagtgtcttaggtacaaacgacgcaaaacacatatttttagtgtcttttgaaaactgacggctcaaatgattggggcactattcacgtcggtcaaccatgtgaatagtagtgttgaccgacgaaaatacccctttttgtagtagtgctttctcgcataaccattaggctagcggaaactcctcactatttcgagaaaaccaattagttgaaacacgtggttatgcaagaaaagagaaagctggtcgtatgtcacaaatggatgggcgtatcgcagtaactcaaggagcatgcgatcacacgcatgaacactgggctacggcgacacacccaccatttgaaagacctaactagtattcccaaacaaaaacatacaaagagtacaaagaaaaccctaagttctaaacaatgggttgaggtgaccaaatgctgaaaattcctaaagatatatacatacgagtattcgagatgttcatctcaatactcgcgagtattcaaaacagcaagcaaaaaagatgcaaatactcaaaatgttcttcctaaagttcacgattatacaaatttcaggtctattttctcctgagaattacccagttttagcagaggaataaggccctatgtatattccctacaataacatgcattttctactccttaaaaattcaaaatgcagaatgtttctcaaaatcaaaagaaaaattcgcaggtaatttcgaaaactaaccttgagatttgacgattctccctgtgattagtttcaatcgcttctgaaacttagaagactcaagaagagaggatagaaatttgggagaggttttgagtctttgaaattttagagaaaaaggaaaagaggaaaattgaaatgagagggaagaatatgaaatgaggggcttaaat

SEQ ID NO: 252552 - DNA, 5853 bp, Cannabis indica
ttttaaaaggaaaatttacatggtatactaacttttgttatttttttacaaaaatactgttaggcagtattttttacttttttactgtatttttttataagtttcatactgcagtatactgtgttaagtttcactggtgttttactagtattctactgttgttttgagttatactgctttgtgttttactggtgttttataaaaacacagtattttttaaaaaaattccgtgtgatagtatttttgtaaaagttaaccaaaattccagtatttttgtaagtttcccattttaaatgatgtttggtccttcttttttttagggtaaatgatgtttggtcacactatatatttttcacatttttaatagataaaaaaaaatattataccatcacattttttatatcttctcttttttattattttatcataaattaaaaaatttaatgatttaatatatatttaaataatttttagagatattaattagtaaaatattttaaaacaaaaaaatgttaaaaataacgtaaaagataaataaaataaaataatatcttttttagtgatgtgaaattttttaacattattaaagaatgctaccattagagatattatacaagtaaaaaaaagtttgtatatatcatgtccttttttaaaaaatttaataaatgttaacatatctccatatattaaaaatgattatttaacaataattttttgatttaacgattaatttttttattattttgttaaacttaatagaagttaatcttccgataactttcaaaaatatataaataagactagacacccaaaaccctaactcatttacatcatgcgacgagaccttagtcgagaacaacgattctcaaacttaccatgacgaacttatatatgtaataagtgatatgaaaatttttttgccattaggggttgacagtattgtcattctccaaaggtatacttccatatttactgttctatagtccttaactgcattatctcatacctttggcaataacaatacgatttcaactctttcttcttataatgtttttgttctcttccttttagaattcatgtagattcgtgttcgttattttaacaaacgttgatcaaccttgataagttttgtaataaatgtgttgattattacagcgttatgattcagcttccccaatttggatcgcgtgcgtggttcactctcattgacgacacatcgactctctttgcctcatcaattggcgcaaagactgtgccaatactgaaattttttccctttttatagttgaagtcagtttttttgcccctctctttccaaatatacattttatgtatcgatatttttatcatattgtcattacttctatacaagaataattttttagactaaaaatattggtagaacttcatgtcttgttcgtattcatgagtgtttatgatgatctaattttgctttggaaagaaaaaaatattcctctttgtttgtggataatacctgtactttccaaaaattgtgtagatttttcccttttatcatttttaatataacattacaattagtcattagagcaggtatgagaagacttggattcgtgctatgttgattaaggaaaaaataaaatggattatcatgatcattttaaaatgtgtcacctttagcatttgtaagttttttttcatgtattttttttagtaaacttgtatttactattgtagatttgaagttaggaattagtgacaagggtatatttcatgaattccaagatgcagaggacttggttatgtttgtttttgttgttgcatgcagttatggatccttttttggcttattccaatcacctactgctttcagactaattcaagagcacaagtcattagaaaattaacatttgacacctcaactttccaatgccctttatcttactataattgatttttatttaattgaatgttgcattgcatgatcttcttctttaggtatgtttgagtctttcattttatattgtagttgaatttcaaatatgtgttagttttctatttctgaagcaaacctttaatgatacttttattttcatattattatactactcttcgttaccaaatacgctatttaatttatgatgttgtaggaagaaactatatgaactacaaaatttctttttgataaattcaattattataacattgcccaaaggggctatatgaactacaaaattttgaatgaaagaaaaatagatgagtcttttattttgcaatgttattgagtttcaaatttatggtagttttatatttttgaaacaagtctctaagctgctcaaacacggttttatagtgattatagatcgctggagtatgcccagccgaacgacgcgagaggcagagatacatccaacgtgaacgatcgagaggatgacccagacaaccaactcatccacgttgataatgacagatatgttgagatgaacgaagaagaggaagacaatgacaattactgtttatgccctaaataaaatctattttaatataattaaatttactaattaataaaagatcataaattattttatgttacatggttcacatgattactttaatgattttatgtttaataaataaattctattaaatcccgaatatatagttattcgtgactatagtgttgtctacacagtgaaaaataatcgtgattgtatgcttcaaacaatttagtctcacgatttatcaatgcactggatttatactaacgtgataatcaacgatatagtttactaacacttgtataagtggaatatcctttctagttcattagcaaagtaaactagtatcggatgtattggctatacattagactagtctaatattgatagtgaaaaagatatcataaacttactattaaatcttttcaaaatcaatgtcatttagttgatcttaagtcaattgatctcaatcttgagatggttaagttctagcttaactgtactatacgagttctttgagttgtttgttaccagcttaccataggactagtccatacttacatcgtgagaatttgatagtgtaattgagtgagagcattaatcatagatatggaatctataacttttattaaaagtgaaacgatagtttccttagagcttggctaaacgcatttaaattgaggtctcatttcagtaattatattagtttttcaaatatcatttacaagtagctaagtgttttaaggataaaatacattggagggtaaaatggtaaattggtcactattcaatgtaaactgtctatagaggatcattgactgtttagattttagaaatggataattcatatcgtatctatatttggtatatagatcattctatgtaatcaagagtgcaattctgaatctatagtagagtctaaacctaaccttaagtaaagcctataaaaagaaagagaagagagttttgtctgatgatgtttttctaagctagaaaaccctagaaagctcacttcttcttcaattttattttcgaaattttagaggctattttctcttggatttcttcataaaatgttgtgctccttggtattgagaatatgcctacacatatcaaagcaatactcatcatagtgaggaaaattgtgatgaccaaaattgaaggaggagaagatctaggtttagatcttgataattctctgctacacacaggaatcaagggctagagatctgtatggaaggagtcatattattttgctgctatcactgtaaggattttttaatccttaatgtatttattatcatttttatgaattttatatttaggatgctagattatagaattacaatcaacatacatggtaaacaacatacacaattgaagcagtatatcctatttggttggctgatctagttttggtcccgaagaccaatggcacatggagaatgtgcattgacttcacggaccttaacaaggcttgccctaagactgcttctctctcccgcagatagatcagatggtggacgccacctctgggtaccagttgcttataggggtgagcaaaaaatttgagaaaccgaccaaactgagtacaccgactattcgaacaccgaaaaaactgaaaactgaaaaaattgccttcggttaaaactgccttaacatggtcggttttagtgtcaatgacaaaccgaccgattaaaccgagaaccgaccgaacatatatattatatacaatacatattatttttgtacatatttaatatacaattttattaaactaattttacttatatcttttttatttaaagtctcaattattcattgctttattttattataatttgatgcatttacgtattatatacacacattcataaaataatacgagttttttaatataactcattaccatattagtagcacaaataattcgagcaaattttaaaaatattattttacattatttatttaactaagaaagttttatttttaaattatatgatatttgatacaattttctaattttttagttttcaaataattataaaaaatttaaaacggtcgtttactaaatttaaaccgaccaaaccgtggattaaaacggtcgttttttttttttacatttttataatggtcggtcggttttcggattagaaccataaaaaccaaaaactgaattttggattttgtgtgtaaaaaaccgaccaaaccgaccgttgctcacccttagttgcttagctttatggatgcttattctgggtatcatcagatcaaattgcagatagcaaatgaagaacataccagcttccaaatggataaaggtgtgtattgttacaaagtaatatcgtttagtttgaagaattctggagcaacatatcagcaactggtcaacaagatgttcaaaaatcatttgggaagaaatatggaggtttatgttgacaccatgctagtgaaatctaagacatctggagaacacagtatagacctcaagaaagctcttggttctccgaaggagcaggatgaagcttaatcctgagaaatgtacatgcggtgtctcctttgggaagtttctaggtttcatcgtcagctcctgaagaatcgaagcaagcccaaagaagatcaaagccttcgttgatatgccatctccccgaaagcacaaagatgtgtaaagtgttactagaaggatcgcatacctcaataggttcgtctcaacatctacaaacaagtacatcttgttctttaacgtgtttcgagaaaacaagaagtttgaatggactgaagagtgtgaagaagctttctagaaactaaaagagcatttgactacaactcctatttcatcaaagccagtggaagggaaagacttatacctttatttggtaatgtctgatcatgctagaagtgtcgccttagtgtgagaagaaagaagggtctaactacaggtgtactacgttactaaaagattactgagtgctgaatccaggtatcccttgattgaaaagctaactttttgcttactagtcacctcctaaatgctcagaccctactttcaagcatatgccatcaaagtattgacaaatcaccctctctaccaagtgcttcatcaagaaaccagttttttttggtgattttttctatgttttttttggcgacaatgctaattctaatgatttttcggcgccggtggcaactccaacgccttttttggcaccgacagctactccgacgacttttctggtgccgatagcaaactccggtgacttttttggcacaagtgacgactccggcgatcactgtagtttcatttgttttattattttttaaaaaataaaaatgaaggaaattttaatattttttatggtaattcaatcccatatat

SEQ ID NO: 252553 - DNA, 830 bp, Cannabis indica
atacagataatcttctataatatacctcaataactgtatattttagtcttttcacataatgataaatatgtaattaattgttttttaaaaaatagggttattattattttgttataaagtaaagttctgatccatattttccaatcttgaaaattatctgcttaattatttatttatttactctattggggggttaggtattgggattgtattgttcgaatcagaattaagtttgttctcctagctatacttgggtgcaaataaaaaacgaagtttccagcaaactgatataagcgaagaataccgatacttttggtaatttaacgaagtctttgttcaatatatatttatataaatacatacatatatatacatagtaatttgggtttgtcattattccgttgttgagaaagtagggaccaaattaaacactcaaaacaattcatatatatgctcaacaaattaattagttaccaaacgtgattctcgcatatatatatggcctttcattacatttattgctcttgcttaaactggtaaactgaaaagaagctagaggagaaaaaaaaccttgcacataaatatgtatattatatatgagtttatttctttcgttttcatacaaacaaaatttattaagaaaaggagaaaatgttggaggagtacatcaccgtcaatacatgaaaatgttaaaaacattctgcaaaataaggcatgtgtgatccaagtcttttacatgaaacacgtggcttataagtacataccacgtacaccactctccatcccactcttcgccctttattttatattattttattgtaatttatcat

SEQ ID NO: 252554 - DNA, 1772 bp, Cannabis indica
gccccaaccacgtaaaaagtcttcatcttgcttccttacagctcattattatattcatattttattagttgtcgaaaacctcggtcaacagtatacttaatataattacttaaacattataattaaaattaaaataataaaactagagttagaaaaataaaatcattatagatcttcataccatacaactcataataaaaagtgtttcagtggggttattgctctgttgcagttatttttcgtttctccctcgaagccttgtttctcatatctaatccaagttcaatatcgctcccttccaatgcatactccatgcatccaactcaagttttacttttaccaatgtcctggacaggacatagcacttatccaaggtgcaagtaaactatgttgtagattatcatatcagttaaaccctgtgcactgataaatctaggaatacatttaatcacataatcttaattactttccactgtactaacgacacaataaataagactatcaatgtgataaggatttggatgaatttataaattaaataaacatataaatgatgacatgaaccaaatgatatactaaataagtaatgaaaataattctttttctttattgataattgaatggaaaagattacattgaaatagagttttatttagggcacaaagcccaatattagtttcctcatctgagtcatagccaggtaatttcccatgttccccatcctggattttctaaacttgtcctctaactcaatgattcgcaactggatggggtccatttgttgttggttagcattaagttgatggcataagttaggtgcattctgatttagtcactcgcaaagatcgggttgtctttgatttaaatgctcacgaagatcaggttgtctttgcttataattgctcacagatctcgtatttgagtaactctcagattgataacttctcctattgctcatgatttcttgattagcataacgtagaggtctgcttccttcactgatattaagtacattctcacaattcctccctccttctctaatgccattgatagatgggtctagcactacagttgaatattcagttcaatagggatatcactttgctagttccttacagaagcatgatcattcttctagttcttcaaaccaggagacctggtggaaatatcttttgggtctgaagcttccttcaaaagtggagatctttgcttagagggtgatccaaaatactctccctattacagcctccttccgcctcttgcagtctttgctcgaatgcttaggaattgatggggtacgccatgcttagttgtaaacataccaaattgatatggaggacagctggacttgatttcaattatgagactactaatcagttgaaaaatggggattatattgttcatttatcttcggttaaatctgaatctgagactaaatagatgctttgtaccatgtagtttatttggaatgataggaacaatattattcatggaaaccaacgcaaagctcgactaaaatctgagcaaaatctactacttatgtctgtaacttccaacagcattacaatgcttaataggcttttatttctctccccactactacagctgagagattaccttggcagccacctcctgacaataagtttaagatgaatgttgatgccgcttcaggagtgtaaatgggttgggtcagatctaggggtgttcgcggtgcgggtggtgcagtttttaactattttttcaaaccaccgcacatgcggtttttccaattt

SEQ ID NO: 252555 - DNA, 819 bp, Cannabis indica
catgatatagtgcaaacccacaaaactttaaaatttcttaaattttttttaaagtttttgataaaacctttctgaggagaaagggatcaaaccatcgtaacttttgatttaaaacctgtctaacgagaaaagaaaatcaaaagctataaatgagaataactcataactcgcgtgcgaaattgaatattaacggctcgcacaatatagaaaagtattaaatgagacatcaaggtgtcttgataaaagtacttaaacctagtatatgaatagatgatttaactattcatataaacaatcaagaatgtacaaagtgataagatcattgaaagtatattcaagattgcttgaaacagattataactcttattgcgagacagaattgataactgcttgcaaatcaaaagtctggtagataataaactggtcgcgcacatagtagattactaactacttaaatgggaaaatacgaggcatttaaagataattaaaagcttagttggccaaccaacttcacaaacttgtctttacaaaaatgccgcaaggggcaaaccattaggccattttcctaaacaaaaaataaataaatataaatacaagacaaagtctacattatcataggggactttgtgggattttcttgttctgcgtcaacctcttcttcctcgctaaattcttcctcccgagtcttctcgcaataagcatgcacagtttcagccttatcactcgaaaaaaaaaactcaagttcaactcggggttggctgaccaaatctgatagatggtccttttaccgatattgttgatcctctcttttggttccag

SEQ ID NO: 252556 - DNA, 1029 bp, Cannabis indica
agaaaatgatccactactttcacataatcatcttcaacatagtcatccacagtaaaagaagtgaatctattctctaatctcctctttcccacactagcataaaaatagctcgagttctcatcattgcaattcacccaagtaattttgctgtgttgttgaagacaactaatataacacggcagcaagttcgagtaaattacctgattctgcttctcttgctgctgtaaaacaacatcagtaggatcccttgcaagagcctcttgagctttaataaactcctccttggccaacctgaaatctctaccaatatctcccacattttctttgctgaacttccgcaaagtatgctttattcgaagaagttttatattaacagcagtaaggccctccctaccagtatctgacttccaaacatccatcacagcttctgtacaaccctgatataacatccagtgattacaatacctaaaaggtttgtatcccactttacctatatcatggctcttgataatacaaaagctgtgatctgaaatactatcccatttaaagagagcttcaatttttggggaaggagttgtgccaactgttgtttgtaaacactcgatccaactttgaaaaaattctgtctccaacttcatgcttgttggaccatgtataatgggctcctgagcacttaaattcttcaacttgtgcaaacgaaagacaattttgagcatctccaatatctttagcagtgataggtttccccccagttcgatcatttaaattgaacatggcattgaagtcgccaaaaataatccaaggatccatgatctaacctaaattcttcaatttactccaaaggtctttcctttccatcatcgtattaaatccatagactacagttgcatagaaagcatcctgcgactttaactctgctgtgaatcaactacggatcctccattataacagtaaacttactttgccaaaaaaagcagcagtctgcccgaaaccgtctcactaggaaacatctcccaacttagggaaatt

SEQ ID NO: 252557 - DNA, 928 bp, Cannabis indica
agcttgtcatctttcacaaacctggcttttttggagaaatcccttatgagttcagaagttcactctcccaaactcataataccagaatgcattaaccattttccattcattcccaagaactttaagcctcatttagaacctgaaacaatggattccaagactgaggaacttccgaccaatccaaaccaagggaaccccgtagtccgctaagggagatcctcacaagtgatccttgaaggtgagtatcatcccttttgaatggtggtttgagtcgatttaatcatatcattaattttgtatgttttttgttgctccattgacccttttttcttcgtctccataggaatagacgtagatcttgtgagtgatcttaaaagtcctcctctggttgacaaggaatcctgaaagaaggttggcatggctttggatggacgcaggagagaagttggtatggtttttatcagagaatccagccaactcaaggcttgcaccagaggaccttcgtgctaacctccttctggtatcgaaaagtttcctgaggctgagaaataggtcttggtttcaggagatgggatcttctgatgatgaggagaatgaggtctatgcagagatcaaggctctctacgtccagacggtctttctagaactacatgtagtcggtctttctccaagctatgtgtagtcgatctttctcctctcatcctatgtttaggaagatgacttaatggtttgcccctagtggcatttttgtaaagacaagtttgtaatcttccggtttaagtagtttgtaatctacaaaactttttgattttcgagcagttgtcaattctacctccctatagcagttacaatttgcctcaagtaaacttaaatatactttaatgattttatcactttgtatatttttaatttgctcgtatgaatagtt

SEQ ID NO: 252558 - DNA, 616 bp, Cannabis indica
taaaccaaaaagaaacaaaaatagtaataacaactaaaagaaaacaaaatacgaaaattcaactaaaacaccaagaaaatttgggttgcctcccaatagcgctgtctttttcgtcgtacagccggacgttgactgagttcttcaaagaggcgccagaatcatggcggacttggcttggtcaaattgacctcccaagtaaagctttaaccgctgcccgttaactttaaaagtctcagggctctcacctttcagttctacagctccatagggaaacgccttgaccactgtaaatggtcctaaccaccttaactttaacttaccaggaaacaatttcaaccttgaattgaaaagtaaaacttgctgcccaggttgaaactccttcctgactaagctttggtcatgccacttctttgttcgttctttgtagatcttcgcattctcgtaagcctcatttctaaactcctccagttcattcaattgtagcaatcttttctctcctgcagctttcaagtccatgttgagggtcttcatagcccaaaaggccttatgttctaattccaccggcagatgacaagctttttcaaacaccaaccgatatggtgacatccctatcggt

SEQ ID NO: 252559 - DNA, 1205 bp, Cannabis indica
ctttattgatgttgaataaaatagattacattgaaatggagttttatttagggcataaaacccaacagcaacttatgaaaaaatgaagtctattgtatgacaattctggcggggctcgtatagtgatcaaaggaaaattatgtgggtaagaatggaaaatggtgtgtcagcctaaggcgatgggcggacttgggttttagaattttgaactttttaatcaagctcttttggctaaacaagtgcggagattacttccatacccagaatcattgcctactcaaattttaaaacataaatattttccaaattcctctatcgtagaagccacttgaagggatggttcatctcatctttggttgagtttgatttgggaattggattttcttaatgtggtcttcagagatccattggagatggaacgtatgtttggcattcaaagacccatggctccaacatttgaggtcttttcagccaatcatgaggaggataatgataattgttgggtgagtgaatttatccttccatctggtacataggatgtggggaagcttccacaagtttttttgtccatggatgtagacataattctgtctattcaattagtaaggcgagaggtagaggatggttggtgctgacactatgatcgggatgtagttcataatgttaagagtggctactcgctggcgtggtcccttcaggttgatgagggagtagtatacttatcccagttgattcattggttgaatggagtatggaatcttgctatgacaccaaaggtgaaaggttttgtttggtgtatgttcttgttgaagttaccagtagatacacagcttatctcccaaaaattaagttaactctttgtagttcacagtgtggagaagaatctaaaactctagaacatactttattttcctgctctagtttgattccaatgtggcattaattgggggtatggtcggtgctctgtcgatgtgtacatcgaccaatgccaaaaattatcctctttctccttgaaaaattatctcgtgaggcttttaaattgatgatgattaccatatggttgctttggtatgattaaaactcaatattgtttagtaatatgcagtcaagattattagaatatttctaattaaggaaataaaataatattattgattctgataaacgaatattttatattcattgaatctggacagaatcaatta

SEQ ID NO: 252560 - DNA, 582 bp, Cannabis indica
tatatgatattttagtttacatatacaaattgtataattagttaacgtttattgtatatattgatgtatagttatatgtagttattgtaatgtattattgttaaaatatatacataatagttattatttgatttgtggtttactagtttaagtttttgtgttttggtttaaagtatgtaattatttcacatttcgtgtgtgtatagtatacaataaggtgtgttgtctaaaaagatttatatttttatgtgtgatgtataaattattgtatattgtgcatatttttgtatactgaatgtgtgtttattgtataaattaatgtatattatgttctttgatttggggtgtatacttagattaggtgtaggagtgtatatttgttaaattgtatacgtaatagtttagaatatatgtatattgcaagtattatttggtttgttatttattaggttagttttttgagtgtttgtttgcattatgagactgactcgaattttgtgtatatatatagtatacagtaaggtatattgtttataccgatttaattttttatgtaaatcgtattagataatgtatattgta

SEQ ID NO: 252561 - DNA, 732 bp, Cannabis indica
gttacaattttggtatcagagccgccatgttgtctactagaccgtcaagatatgtacaatcatcatcagatataagctcgactcacggttcagtaagtctttacatattttagtaggtttttataattagaaaagcatgatggaaacatgttagtgatatattgattaattatgtccgtgtttaagatctcttgtatgcggtcttaagtttattatgttgaccactacatgattaaactaacttatgggttcataggctagtatcatatggatacccagagaaatgtatgaagtcggggtaatgtggttggaactagtggcggtcaaggccactaagaaccccctcctttgcgaggccaaggtagaggtcgtggataggctcatggtttgggtaatgttaatccaccacaagctccacaagattgggagcataggtttgctaagttgcaggctagaatacaacaacaggatgaggagattgttaggctgaggcaccaaggccctcatgttgctcctcttcctttggttggtattgctctagtaccaatgttgccaacggaatatcctgtagctggcaacgggttagtaccattatatgagagatttcggaaacagggacctctactctttctaggaggccctgatgttatgaaagctgagaaatggctaaccactatgaatcgaatactaaattttatgggagtcactcgtagcgacagagtggcctgtgcc

SEQ ID NO: 252562 - DNA, 525 bp, Cannabis indica
cattttagttttaattatttttataaataaataataagaaaaattaaaagacaattaatatccttatcccctcatgtgtagcactaagaaacatccatattgaaattcctaaaaaattttatttttaaaactatccgaaaatcaaatatttatttatttatttaatagttaattaaatatttgtacaaaactaacaaattataatttaaatctttattcaatgtattttattcatattaataacaatttattaatattaacaaaattgacctaattttgatgtattactctttctttgagactttgtaataattaagtcctcaaaaaaatttcttatttcttttcttaatgaaatatcaaatgaataatttatttccataatattttcataactaataattaaattaattattcaagagatcactagattcattttgataagagatgatacaaggattatggatccataaactcaagctccaattatcatgattttattttgaaacaaataattttattagccta

SEQ ID NO: 252563 - DNA, 566 bp, Cannabis indica
tacatttataaaatttgggatcccgtatctatatttttaattgtacataatcaaaagatgcaacacaacgacaacaaaattgtgagccctagctatcccgaagattgaaacactctaggtcgaactgtcttgatatgtacaatcttcttcaagctctaaactcactgtcgttcaataaaagctttacctttatctgcacataatatagcatatgtgagttgacagacttagtaagaaaagcataaaatataaacatataaccgacttgcgactaagcacccatacacctatcaacaagtcataaataggggtgttcatcaaaccgttcaaaccacctgcaccacaccgcactgcgaaaaaaatgcggtttaaaattctttgcggtgcggtcgcggtttgaatttttcctaaatcgtgcggggcagtgcggtttgcggttttgaattgttaatatgcagttcaaacagcaccgcaccgcgcattacaaaagtaccaatttttatatttagttaggtccaatatgtgaatgtccaacccagagcacactaattattatattattgaaa

SEQ ID NO: 252564 - DNA, 507 bp, Cannabis indica
aaaacatatatctacaacatttaatattacaataatatgtttactatatatttcttttgtatagaattataggaaaacaatattattattataattatatggatacacaatatatgatgattaaattatatgaataatatttatgttgatacttaaatatttaatataaaattgactattaaattaaatatttatttatattttattatttgataattagatctaaaaagtataatttgagagtgataaataattaaatatatattatttttctatttgtaccatatataatggtaattttataaaacaaaaattattttaaaagagtaaagaatattttggtcaaaataataaaaattcaatttgaatccacactataccgaacaccacaattcttatttaattattgatttcatagtgttaaccaaacaaaagaataaaaattctattttattctattaatcttagaaatttttacatgaaaaatcacttttgcataatttatta

SEQ ID NO: 252565 - DNA, 496 bp, Cannabis indica
taaatgttttttcttgtagtgaaagaattaggatacgatttcggtaaaggcatatgctgattgttctatgcctgagcattgttcagtcttgatgctgcaccattagacgaggtagcgatctctatcgatgaacgaaatcaagctctgataccatgtgaagatgcagacataagaagatgcaatcaagagaaaaagaagagaagtaattagaaaatgcaatctgttattcattgattgaattgaatagtacaatacacaactttatataacaatcacaaccaactataataacaaccaaaaatctgttatagtcctaactaatcattaacagaattaactaactactttgacagctggttctccttgacaattagtgtgtaaacccaataaactatacctaacaccaccaggcaccgtttcttttctaaataaaagtcttttcctcccaaaactcattgtaatgcctcatacaaatatatattgtattttctttttg

SEQ ID NO: 252566 - DNA, 609 bp, Cannabis indica
tatcaagaatctcttgtctaagtccaacattattcgaaatgcaaactcgagttttataaagtaacattccattacttaacactaagaaatctttatcttggccaactaagacctcttcttgtacccttgctaattttgaatccaccaattgatcattttaaattcttttagcaaatcagattggagtgaaaaattattaagtctgccaactacaaactcaatacctgatttgatcatgtcagctgaggagaaatcaaagatttattgagagtttgcccgagacattttctgcttagggtatccaccactacattggccttcttacgatgataaagaatttcacaatcataatttttaactaattccaactgttgcctctgtctcatattcaaatcgttatgagtaaagatatatttgaggctcttgtgatcattataagttttagggtaaatggcggcaaaacctccaaaactttcattttggtttcacttaacccccaaacccaaatttgggcggtaaaaccccatactcgtattctgttagcaatttacccttttcgtccattttaggtgttaagtgccatgttagactggacacagtgtacacgtg

SEQ ID NO: 252567 - DNA, 544 bp, Cannabis indica
gaataagaataaatgaaatatgtttatgttaaggcataattatatgcaagtatatcttgagtttgagggactttttcctattagatgtttatgacaacaccaattatctaaacaaaaaaatacaataatgaacattttcattacctactcttcccatagaaatttgctttgtcccgaggaagaagaagtcattgcattgttgcatgctagatagtagtccggtcccattgtagttcttctcaagagaattggtcagtcctttgtaataagactttgcaagctctacgctgcctccatagtcttcagatagatattcaagagtctgcaaattcataaatgaatgtaatcagctatgtataatatatatatatatatatgaatatataaaaatatgtgtgtgtaggtatgcagataataaaataataaaaagaagatgagtatatatattttatttgcgtgaattacatcaactttgactcctgttataccaacctgtgatatattatggcaatgagtgttttcaatacttgttgtttctatttat

SEQ ID NO: 252568 - DNA, 3708 bp, Cannabis indica
aacaaaatataataccaacatatatggagggaggtaaaggataagagcctaaaatataaaaatatataattcaaccaaacgtgtacatttgaccagagaaagaaattaataaccccgaaatgacttaattaaaatttaaaactgaacccactcccataattacattgaagacctatatattttctatttttttaatactaatacaataaaaaataaaagatatacagtacttcttgcacctataaatatgagtaacatttgatatggtatatctcacaactcaaaagctagtttctctccttgcaacgttaaatccctctctctctatatatatacaaaattaattactgaaaaatggccacagactcaagcattgaagcaccaaagtatggaaggctcatcacaatcctaagtcttgatggaggaggaattagaggaatcattcctgctgttcttctcgaataccttgaatctcaacttcaagtaatatatatataaatacttgcaccttttgtttaaataattaattaaattattaatatcatgtgcacaaagacgtaatattaatataattgtaattaatttaggcactggatggtccagaggcacgtcttgcagattactttgatgtaatatcaggtactagcacagggggtcttattacagcaatgttatcagcccccaattcccaaaaacgccctttgtattctgctaaagaaattgtaccattttacctcgagcactctccaaaaattttccctcaatcaaggtatataataattataacttccttcttatatattatatataagttaattttgtcaattcaattttaatatgtactaaatcatgatttttttggctgttaaaaattcttcttgaactattaagattattagatttaaggacttttagactaaattatgctcccagactttgatatataccaaattatgcccctcaaattttgatatgcactaaatcatggctcctgaacttttatctacagtagtatttttttttaactaaaattggacaaaatccttaaattccttaaattcaactatctcaatatatagttcaagaacatttttaacaacctaataaataaatgtcatgatttgatatatgtaaaagttgagggcaaaaattttaatattaaccttatatatatgttatgtattgatgaaatatttttaattaattatatatgttcaggggcatatttggttcaattattggttcggtgcaagatgctacaggaccaaaatatgatggaaaatatcttcatagcttggtccagaaactgttggggacaacaaggttgcatgaaactttgactaacgtagtcattcctgctttcgatatcaagaagctccaacctactatattttcctcttatctggtaaacttggataaagattttcattattttttcctataaatttaatcacacctaccaaccacaatatttatccaattaacaaattacaaatatataaaaaaaattacaaattaatgtatttaaataggctccagcgaattcagctctagatgctcgtctagcagacattgcgatatccacgtcagcagccccaacataccttccttctcattattttactaaccaagataaggagggaaagactgaagaatttcatctcattgatggtggtgtggctgttaataatccggtaattaattatttaattaataaataaataagccaatattgtaattattattaataacctacctactaattatttaccttaatttaatatatagattgttttgtaacacgtgtttttttgttttcttggtcagtctttcgttgcaataagtgaaataacgaaacaaatagcgcaaaacaatttgagttttgacccaaatactaagccattggattacacacgttttctagtgatatcattgggaacaggttcgaacaagactgaacaaaagtacaatgctaaactgtctgccacgtgggggcctttgtcttggatttattacaatggatccactcctattatcgatgttttctctgaagcaagtgttgatatggttaactatcacaacactgtgtttttcaatgccttgggttctgatggtaatcatctaagaattgatgtaagtttattaatccttaattaaattaattacatttttttgtcttattactaatcataataatatcatttgttttatctaattaaatatatgaaattagagttagtcagatttcgattataggctaattaaaatacagtagctgtctctatttaatgcttaatgatgatgatgatattgatatatatatattgtatatatataggatgacacattgacaggggatttatcatcggttgatatatcaacaaaatccaacttaaataatctagtggaagtggggaagaaactactcaaaaaaccactttctcgcattaatatggcgaccggtctttacgaaccaattccaaacaccacccataccaatgaagatgaactaaaaaggtttaattatatatagagatattgttattgttatactaatacatatataatttttaattaaaagtaacaacatttttattatgaattaaacgattgatatggttttgttacaggtttgcacaaatactttcggaggaaaagaggctccgaaaatctaatgcaaaaaccgcttagagttatatatagtgtacggctcatgatcaagagtaatggatcgatcagacggctcacattaataaagcttggtcaatattaatctttcgtatttaaatattaataaataccaacttaattgggaatattaatgcatcttcttgtaatgttaaagctgtttttctacccatatatacgtactagtactgctgttaaatatatttatggtttgttgatgtcactatgtactactcaattgaacgtaataaaataaataagtattgttttatttatttatttatttatttatgtctactgaatttgtgtcagctgaaaaagactaatatattttgatttctccgttaattaataagtttgagaaatcaataaaataaataaataaaagaaagagtaatactaacagcttttttaaaataggggaattttaaaatttttaaagaatcctattaaaaatacattataatatatgtcataaatatttttttattttaattttttttttaaatttactattcatatgttctatatttataaaatactatttattgttctaaatatattttattaattgttttgaattttaatatctatttttatatgagaaaatatataaatattatatatttgaaatgaatgaaatgtattaaaatattaaaaaacaaagtagtattttagtaatgtattttaaagaatagagtagaaaaattattggaaattgaaaactgtatttatgcaaatatcaatacattaattaaatttcagtaattaaaatcacaaccgttacgatctgcaataacagaatgaaaacttgttgctttaaaaacacagatttgtagtaacagaacagaattaacagtgcctaatataaaaacttgacacaagataattatacatgatatcagtatttaaacattcctaatccacgaggccacgcccagggaatgaaatcaattagtaaagtattaaagattacacaagcaattaacttaaacaaatttagactccctctaatgattt

SEQ ID NO: 252569 - DNA, 504 bp, Cannabis indica
ttgtaatggcattgtcttttttttgtatgaaacagtttgtaatgacattgccttctatgaatcaaatagtttgtaatgagattgtcttctctgaatcaaattatttgtcatggtattactttcattgaatctaagttattgttgatgtaattgaggtgtggaacattgctgttttggtcaacgtgttagtaaaaccacatttcagattttttcttattttatcagcaaagaatactaatctaacccaattgatgatataattatgcattaataacaagtatgacaagtaaatttactgcatagcataagataaaataggccaccaacatagttaaatgaaattacaatagcttaatgtttaggtgcaagaactgcccttgacatttcaataaaaaacaaccactaataacagttgcataagtacaagaacccttgcacaattcaacaaaaaaaacatgctgcatcatacaaaaaacccttgacaattcaacagattacaaaaaa

SEQ ID NO: 252570 - DNA, 1200 bp, Cannabis indica
tttaatattttttgatatttttttttggcttcataaaggaaatacaataaacaattattattaattagtttatctattatagatatgttattatactatctcatgtatattattataaattattattcaaaaattattgttatcgctttatcttacttgtaattgatactacatttaaaatagctattaccattaagatttttaaaattgttgtcattattccttcaaaaaaaaaaaattgttgtcattattgtatctcacttgaagtcgctactatgtttaaaattattgtcatcaccgtatcattactatcattctcgacaggtttaaatatacaaattattggtattaaattttgaaaaaaaaaataaaacaaaataaaaacgtcgcataattaactaatttaccaaaatatatattcttgtaactttacgtatcatatcattttttttataatatatattgtagaatttgctaatttgaaatatataaaaacaaatactacttcaattcactaaacgtagattcaaaataaaaaaaaaaatcactaaacacgtaactgataaaataataacaataaactatatgtttctaaaatatttaaatttaacttttgaattttttataactttactaaatctacactcaatatatatatatgtatattttccattagttttgttgctaaatttaaaaaaaaagattttactataaaattagtatttgtattttttttcttcctttttggattaattttgttgttgaacttagaaaaaaaaaagatcttactaagattgtactgatacttattgatatattccaataaactaaagtagaacctaattttttttttgtaaattataaataagctttttttttctcaaattggtcacatgcttaaatctaccaaaaaaaaaataaaaaaaataaaggtaagtaaatacaaaattaaaggatataatatttatagttacaatctatctatatatataatgctcttgttagggatggtgatgtggcaagtttccatgttaggaaccaaattttcttaatttttcctaatttctagctaaaaatatattatttgcgtaattactatttatttatttttttaaaaaaaactaatttattcaaaaaatctaatctccattttagcaatctctcctaacctatttgtcgcccataatgaattttgggttt

SEQ ID NO: 252571 - DNA, 877 bp, Cannabis indica
caacaatggcttcaggttagtgcttccgctcatcttttgtcatcttcttcttctttaatttaacaaaggctgtatagatttatgatttagggttttctatattaaagcacttttaggaatatgattagatctgtgatatatatttcttaagtgtttaataaaccctaacaagtggtatcagagccacatttgttgaattaattgaagatctgatgattttatttatgaaatttagggattttgaaaattagggttaattttctttactgttaccgcaatttttgggttccaaattaattgattatatcaaagtttcaatatatatatttattgattgtcgttgatgtgactgttatactttacttggcttcagcttcagttataccgcctctattatctgttagaattctggattcaggcctaacattatatagaatcggcgatatggttgattctcggttatataattttgaatatatatgattgaatataattatatatataatttgtttattcttgagttggctggtcaaaatgttattaatataacagtgcacgtttttttttattcttttcttaaagaaatcaagcagccaattttatgtatttacttttccgaagccaattttatgtataacatgttatgttatgtggcctttcagtttgaccgtaggttatatatacatttatataatttttgttttatatgctaaatgttatatacattataagatttcagttgggtttactcttatgtatgccacggtaaagttattttaattaagatattttggaaacattaaattcaaattttggtgttggttgatgactaatattttgagaaaataattgaaacaatatgtcgccaaagtgacct

SEQ ID NO: 252572 - DNA, 760 bp, Cannabis indica
catatttataagtaaattcaactaaagcccatttttgtatgtcatgtcatgcttaagtttattttttcgtgcagtattatgctaatttatagtattgtgttgtgtccaagttcatatttttttaggttgggttgtgcatcgatgttgtgccggcccgtatttacagctttagccatagactcattttctagcatatttgtgttctttaatttttttctttttctttctattctagcttttgattcatctagtacctttagatgcactgatatgtactgttatttaatagtacaaagacttaacagacacatataactataagtggactacattaaagtcagtttcaatgatatttagcctcttgtggttattatttcataactagttgaatatataacctctttcaattggtctaatatatttgacccttcagcttacaaaagagactttttttccaagttttgacataaaattttggcattgtgtgattcatctcattgacccaaatgactggggaccaataccaaaaaaaaaaaaaacctcttcagccttgccctaatatttgcagttaaaatttgccttttttcaaagtcagtcctaatatgaacaccactcaatctccatctcaaaacccgttctttgatttttagattcaaaatacaaaactgggttttactcaatttcttggaacaattttgaaattgagtgagtgaagtgaatcatataataatgtgtaaagttggattttatatttgtattg

SEQ ID NO: 252573 - DNA, 743 bp, Cannabis indica
gttgtgaataatattttgtaaagatgttaaatctagtatagtgtctgggggaagagagtttttccagttaatataatggcagcagccacgacaagtatggcgttgattgctttattgtcataataaattcactacttaccaatgtgatttttttaaggtataatgtcttacatgagtccaacatcacatcttaaacaaagttgggctaaactgctcgaaaaaccctgatttagttatggattctgtgaattcaactagttggacactttaacctacatttagtttcttagttgatgttttaataggattcaaatagctgtccttttttgtctttcatagatgacctctctctttagttaaggtttattcttaaagttgcatgccaaactaaccatttcaaatactaaaatttgtaaaataacctcacttaatttactctatggtcgcacagtgtaaatgaccataatggtcgtttatggtcacacagtgtaaacgaccataatggtcgtttatggtcgcacagtgtaattcatggtcgtttttgcgactatagaaggttattttactaataaaaatttttgtaaagttattttgctgataaagattttcataatttttacaaaacactccttgaattatatcttctaccatctagtgtcatgccaactactcctgtcattctatggatcaaattgcttcttgcctacatttagattatacagactccattatttgtaaaggat

SEQ ID NO: 252574 - DNA, 961 bp, Cannabis indica
aggatgagattgaaagaatgtaagaagccctaaaattaattggtaaatgggggatttataaattagatgagggcaattgggtcaagtgaaaaaatcattaaactaaaattgtagcttctcttaaaagctaaaatctcaaagctagggtgggccaacttttcttaaaagctataaattttacttaaatttttaaaaaaagctatttttaaattttaccaaacacatattaactcataactttttccaaaagtgattttagtttttaaaaaagctccccaaacgaggccaaagtcttatggtattttagattatgtgtaattatattagtggaaaatagttcgataattaagcttatggggtagattttcattgaagtatacatttattttgagataaacattgactgttagcatgcatgaattaatttgaatgttagtttcagatgcgatcaaaaagcctttttttcaagcatgatgagttgattgaacacacacacacacaaaaattgagtttgaaaaataataattttgagttgaaattctaatgattaaagagtttagattttcttagaattataagtggatgtacaatttttgaaactaaaattatttttcgtaaagaccaatttgtttaagcatcattcattttatcattaacttactcgaggacgagcaagagtcaagtgtgggggaatttgataagtcaatatttgtgttctaaatatgaccaatttttatattaatattcttaaattgatcctttaaattattgattagtgtgattataatttgttagggtattttaaagactaatgatgtatttagagtcatttggagagagattagcacattttggtggaaaatagtggataccggcgagctcagttttacaaggcagaacttaatttcaaattttgataaccttaaaagcagaactagacttggagctcaacattaaagtt

SEQ ID NO: 252575 - DNA, 1237 bp, Cannabis indica
gggcgatcggatgcctcgaggagcgaggcctcggcacggcggcgtggctcgggggtgggagaaagggtgtggaggaaacagtcggagaggaactgaagggtttgagggttccactccattattggcgagaatgacagagagagagattctgttagggcaatttgattttgaagtagaaaaagagagggagagaagaaaggttttgagtggggttttaaaatgggattttggggtttgggggtcggaagaagaggaatggagaagagagaaaaccttttgaaattatgaactatttcacacgtggcttcttcttattggatcatctatacaaatttttctttttctttttttgtaataacaattactacaaatttctttcaaattcacttccaaactaaaattagaattaagacacataaaatacttaagttatttactccgtttatgtttataatctatttttttttaaacaaatatattatataggggatcaatcgaaacttaaaatacgtatgtgctaaagggaagcaatattaactaatcaaaacttaaaataaaaaaaaaaaatacatatctcttatttaatggatcaatccaagatagttgtattttcctctatcaagaaaaggccactattttacacattttaaaaccattatacaaaaatagaataaaacagggtgaaattaaaatattttgaaaaaggaaaaataaatctgtgtacaaattcactaaatccacttctccttagaacacaacactaatggcatgtttttgtaattggaatagtaatagaatcaaattatctattacaatatttgctttgcttttaaaagtgatgtaatagaattacattgtaatcataattatgttaaacaaaagaatccccattacattagaaaaactatgtaatgaggattacattacaaaggactaaataaagtaaagctttcttcaaaataaagtaaagctaaaatgactctagtacctttttttatataaatataaaaactaaagtagggataattttgtcaatttatcatttattctaatattcattctaataacaaatcaaacatcttaatcaattcccattactatttttattcgattacattactattaccattacattactattacattccaccaaactaaacatcacctaacactccatatctatgagtaaaaccatacacgaatcacaccacgatattgaaaaatttagaataaaata

SEQ ID NO: 252576 - DNA, 566 bp, Cannabis indica
ttgtaacacgttgtttaatttcgttattttttaaacatgttgatttcacgttgtttgtacgttaaaattcagtaattaaaatttgtagatttcttaaattgtatatacaattatttttatatttttatatagtagctaaatattgttaatagttaaaaaaaatactaacaattattgtcttttttctcaaaaaaaagaagacgaacataattatataaatacttaatgtaaaaattaaaaatataataatagttgtttttcactgtactaaaatatataaacaaattaaataaaattataatgtttaatatcaagtgcaagatacatgtaaaattaaccagaaaaaagttttaaaatatataaagcaatgtttcttaaaaaatgttgctcttcaatgcataaccaaatccaaacacacttttcaattactaattcatgcacaatagcttgaaccttcttggaagattggaacattttattgtacactttcaatgtctgtaactcgcttcattctaccaaaggaatagaaataaatgacaagtttattctgatcaacattgaagtac

SEQ ID NO: 252577 - DNA, 715 bp, Cannabis indica
ctcatggatatttttcttgggtaatcggaacacccccatcgtataacaaggcattgcttggatgactgcaaagaacaggtgagagacccttctcttccacatccagaattagactagacagcgcctcggcatagaacagaaaaagaaaaggggataggggatccccttgtcttaggcccctcttcggagtaaaaatattcgaaggtcttccattaatcaacaccgagaaagacaccgaagaaatacactaagaaattttcctaacccactggctatcaaatcccaattgcaacatgactgcctccacaaaaggccattccactcgatcatacgctttcgacatatccaacttgaaagccacttttgaaccattcccaaatcggttacgcttcatacaatgaatcccttcaaagccgacaattgcattatcttggattattctacttcccacaaaggcactttgaaactccgaaattacctcattcaaacacatcttcattctattggctaggcacttggagataatcttatatataacattacacaggctgatcggtcgaaattcctccatctttgacggtttgtccactttgggaattagcgcaataagagtgtcattgaggtgatccattggtgcattgttgttgagtatgttaaggcaaacccgaattatatcacctttagtaatctctcaatacttctggaaaaagaggcc

SEQ ID NO: 252578 - DNA, 748 bp, Cannabis indica
gccacgtgatctaccatctcattggtttcctttttttgtccacaataaatacttatttatatattattaatacatgtatatatacgtatataaatacttattggactgagtacatattcttacaatgcacagtcgccgagccacgacacttttaggattggagtggagttgaagtaaaataagaaaaacaatggtttaatataatgaaagtgatgattcatcttttataatagggacaagatgagaatcaagtaattttacatgtactaaagaaaatttagtggtcatgtaaaaaaaaaaaaaaaaagaaagaaaatttagtggggtcgctgtggcatccggttgccctctttcatctcttactaattagtaattatgctaatgagacttttaatctctttaagggcacatatacaataaaaatgtgtggagctaaattgattaaaaaatatatatcagtctgactaaattttgcgtataaggtttaaagttttttatttgaggcattttataatattgctaggttgtcttaaattagctcttatagtgatacatctttctgagcatttccaataactgaaagagctcgtgaaattacacttctaatagttgaatgaatagtggtgaattaaacatattatatagggtaaatactattttagaccttctgttttacaaaagttaccaattggatcctgtgttttgttaaatgataaaatagaccctgtattttctaaaatagtacaaa

SEQ ID NO: 252579 - DNA, 575 bp, Cannabis indica
aacttagagctgtggaaacttgcagacttgaagacaaaatcaaaccctagctgtaactagggatttctaaaaagagagagaattgagagtgaaatgtgatttttcctttgctttgctttttctataaaaatgagataaacacaccatatttgatcaattaaaccaacttaaaatcaaattaattaacctaactaaagtcacaaaaagaaaactaaagattggcaaaatgaccattttccccttccatactattagccactaaaggtcagtaagggtattttgggaaattctaaaatccagacatatcctggcattcccaatgtctaactaaactgccccgctatacttaaaatactaggatgtgattctaatagccaaacttcgggttcgaatgttgtcgggcactgaaaaggcaaaatcatgaaatttttatatgtgacaccaaaatgcgttatgaattcaaataaaccatcataaattaataatttagaattaataaataatttccataattaaaccctaattatctgctaatttccaaatttaagctaagcactctttacaactatcccccc

SEQ ID NO: 252580 - DNA, 500 bp, Cannabis indica
aagtaacgaggattaggttattattgaactacttggggcagaacctctataaaattcttgagcccttatattgctttataatatatcacttactaaattggactggttgtcgttggctaaaagcgacgtcaacatttctgctcctcgatccgatcctcaagtggacggatcgccgcgctcaacagattcatttcaaaatcaacagataagcgtgtcccattattcaacgtcctgcgaggaaacaagcagttcgagtggacgaaggggtgttaaaaagctttctaagagttagaaccacaacttgcaaaacctcccgtactctcaaaacctctagacgaagaagaacttggaatatacttagctgtcatggaacatgttgtgagtgtcgtgatgatcagagaagagaacagcatacaacacccagtctatgacatcactaaaagactcattgaggccgagggccaatacccattaatagagaaactcgcttactgccttat

SEQ ID NO: 252581 - DNA, 855 bp, Cannabis indica
gtggtaattattaattggagggacaggattgggatagggattgggacagaagatttttttccaatcaatggggacagtctttatgtatttaagttaattaaaatatatatagtaatttagtattatagtacttaagctattctatacgtactgaaataaggtcataagttcaaatatattaagagattgttgtattggtgttaaatattctgttaaagattataactcacgagttttgtaaataaaattttatgtttgaagtttatgaatatataaattaaattttttgtttataataataagatcccatgttctgtttatttttttttataaatgagtttaatatttttatcgtagataattttaaacgaactatcgagcgaaatgtcttaaaaaattgaggcgttacaaaagtccgcttccctcgaacttaaattttgggtttctcattcattgtaagggtgttataacatccaagccccgccttgagcatagcaggttgggcctatgcctagggcctacttagcctagcaacccaaataatttttattaaaattaaacattttttaatggtttcaaaaaaatacacattttattataaataagagtctaaaaatattttttttagattattttataaatacataaaaacaacaaaaaaattacaaaaatatgatttcacaaaattttaaatatttttataatttttttaattttatttacagaaaatacagtttttttatgttgtactcttattaattattgttaattttttgttacgtttacgatattttttgttattattttgatgttacttttatgttttttttttttggttgttttcgtgttgtttat

SEQ ID NO: 252582 - DNA, 1181 bp, Cannabis indica
tctgaggaacaaactctgtggaccctcctgccttgaaagtcactaagtccaaaagttcatgaggagggagttcagatgcacctgagcaagtgaaggctggatccgagttggttagaagtggatctgaataaattaaggctcccgctccacctttggtactgtgcacggagaccaagagaggcagagacatgctcaaccattatgtgggccggtcgatcccagaggtgaacgaacaactgactggtgcggacaatgacttatccttggagttggtcttgggaggagtcatgaaggagctttcgtgggtaagtcctttctcatttcctttcattcttctttaactagttcagattttaatgtatttttccgtacagactggtttgaagatggcctacgcctattcttgagctaagtcggctgttgtcaagaatcttgccacttccaacacaatgtaaagggatgcggacttggacaaaaaggaggctgaagatgcgcggactcaacttgagaatgtgcaagcaaaactgggagaagtcaacaagaaacttctagctgctgagactaaagttgtcgagctaaccagggacttgcaggagatgtcatcaaccgagcagctcgaggcaaacaatgcttctttgtctcgggacattgccagtcttaggacgaaagagagggtctttggagtcttcttcgcaggttggaggatgagaagaaggctaaggaggaggaacttgaggctaaggttaagaaccagaagtccgaggtggtgaggctcggggaaaaggtgaatgccttagagacagctggtctcgagatttcttatgacttttggaaggccaatcccaatgcaaactttgaatatcttggcgcttccaaagacatgtttcttgactactgcgctacccaggcggcctacaagaatcccaaggcgaccacttccacctttcttaccgatcacactgttgaggctccttccgcctagaatgatgatcctcagatcccctcagaccaagttgacccgtacaaagagcctgggactcctgctgtttaattgccttatttttactattttttttaatgtttgttcgaccagtaggccttttttcgagacaaagtgaccggccaagcagtctttaaacttggaatatatttttcatttttttgaacaactggctgaccgg

SEQ ID NO: 252583 - DNA, 1365 bp, Cannabis indica
gtttggtttagagcaataaaattcttattcaataaaaaaaaataacaaatttaaaggaaagaaaaaaaatgtatgtataaagaaatgtttaattttaatttaaattgtatgtagaaaaaattatatataaaaatgaaatatacatttgatctattaaattttgatatataattgtaatatatgtattagacttttaaatgactataatctttccattaaaatgttaattgtatatataattttttaatttttttatgtggattggattagatcagttatttttacaagtgaatcaacatctaattggcacaagtgcggattttgaatttttcaatccaatccgcactttttggattgaattggatcgactattttatgaacacccctattagatagtttaagtgctcaatactatatcaattatgtggtactttgtgagtagttagtaattttttatatatttattaaattaaaatatttggaagcgaatattaaattatatcaacaacaatatattactttttgtgctgtttcatatcttaaaatttagtacatgtcatgtatcaaaatacatattatgtccttctcgttttttcttttctaaaaaaaaagtaacagcaataataaaacatgacatataatattgtggttcttgacatgattttgtttattttacacattaatgcattatttttaaaaaagtataaaccaaacaacttataattgatgttttactaaaaaaattaggtgtctgaatcaatcgagggtaacaactcttttttaaaatctccaaattaagtaaacctaataaaaagaacgttaggaaagatgattgatcaactaataattttgtgtaaattacgtaagtttgttatacggctcaatcgatcttttagatttttttacataagtttgttatatccagacttaaggttttgtttctcttaattttggagtactttgctaaagaaattttttcaatgagaaaaaataaattttataattttataagatgcattattttttaggaagtataaagcaaacacgttataattgatgttttccatcagtaaaaagaacgttaggaaagaaaagagtgtgattgatcaactaatggcaacaactgcatttggttttgtgtgttacgtaagtttattatacggctcaagtttcctacatatcatttgattataacgtgttatgattagcaaataatctaattaattaattatataatatatatatatatatatatatatctttacagctgacctagtacccgatatatatattttaggaaaattttataatgcaccatttataagggatgcatcaatatatggcagtgacgaagtcagaaattta

SEQ ID NO: 252584 - DNA, 626 bp, Cannabis indica
acaagatcattgatatatatcgtaaaaaagtcgttaaacatagacagagaattattattcttcttgttgccatgccgataatgtcatcgatatatatcgagagatgtcgttaaacaaccacatatagtgcttcgttactcttgctgtgggcacatgtcgatagtcatccatatatatcgaaaaatatcgaaaatttgagaaaaatgtcgttaaaacatacacagaactacaaaatagatttcataaaccatactaataatgcatgcaattaaaaaacaaaaatgatgcttaaaccctagccttgcatgtagattttttgtgtcccaatgcgccacagtttgaacatttgcgatgttccttcactttttgaccgttcgatggaaatcggttagtccgtattcttcatgcattgctctttcttggacgacctacacatttcttctccaccggtacgctgattctcatgttctgcatatgttctggaagcacccattcatcctcctccccgacaagattaatcgttgcatcgtaagtattattccacgtctcttttatgtaatagggggaggaccgagcgtacagactgacattctgagtaagtgtcgcggcacatgcatggggacaag

SEQ ID NO: 252585 - DNA, 1066 bp, Cannabis indica
tatttctcaccattaagattctttttatgaattttggtatataaatctgaattttgttagtgtattttgttttattttgctgagtaatgaaattttggattctggtttggtgtttgttcctggggtgtggctttcctggggtgtgcgactggagattgtttcctggggtccgtttggtttcggggttgtcattgtgtttggtgtgcgattagcccaggaagataacgctggagtatatttatcataaatatattgttcctggggtcattggtttgtcttactggtctgtttttctggtaaatatattcattgtttgtttttggggttgtcattgattatacaggagtgatttatttttcctattacgggtttgtcattggtttgttggtgtgggataagtgctgggttgtggtagtaaaaaaaaaaatatgtttaatttaatttagtttttatatatttttatttttaatatttttttacaaataatttttaataaatttcaaataaaaatataaattaaataatttggaccaatcaaaccgtgacacctggacagtgacatggcacttaacagtaggtacctacagaacttctaaaagtgtgacagaaggtatttttaccgttaaaattttaacttaggtattaaactgcaactggaagataaacttgggtatttatgccgcaaattactctactgtgtaaaaccccttatgaaatgtgttgagtaataaaagaaatttttttaataataaataaaatccttcaaagtaaaaattttggatccgtcactgagtatatgatagactttgattatgtttttttttccaaggagaaatatcttgtatcttagtttgcaaagaagcaacaagttgttgtataatacagcacaaaacgtgagtctaaggccttagcaaatgctgccactaaactaaaatagttggtctccttactcacttaattaaaggtcacattgtctcattgtccagtaatttgggtagataactaaagtgctgtaatattggctactaactccatattttatgctcgttcgaagtatattgaaatc

SEQ ID NO: 252586 - DNA, 699 bp, Cannabis indica
cctatatgatctccccagaaccccccatggacctctagcataatttgcttagctttagggtctaatacacaccttaggtacggcatgttgagtcctcttcggtagagaatgttatccatcatcacatatcggtgcgcttggtattgtatccttctggattgtgctctttcttgaggcaactcgcctttggttatgtattcaaggatggggatcatccaggtggactctgtctcaactactgccacaatatttttggctttaatgcttgggtccgtgaggcgttcaatgggcaccacccccagtttatcaatctggctatctgacgctaacttagccaaataatttgcgtgggcattcttttctcttaggattctttccactttataatccgtgaactcatggagtagctcccggaaaattgctacaaacgcgaccattttatctccacgcgtttgatattctccgacacttcgtttaccaccaactgtgaatcactaaagacttctactctcgtggcccccacagcttttgctaatctcagtcctgcaatcagggcttcgtactcaacctcattattggaagccgtgaattcaaaacccagggcctcctggagttggagttcgttcggagatatcatcgctaccccagccccagatccgtttttgttggacgctgttggatattattttaccaggatct

SEQ ID NO: 252587 - DNA, 657 bp, Cannabis indica
accaagacttgaacactttttactagaccacaataccttaaacacttactcttttattttatcactagacacctttactacacacttgtgtataagtcacacttttgggacactttgtttttagacacttattaagaactcacacacttgaaatctcttgctcaaacttgcatcctaagcacacacctcacttcttttatagcctacaaatgatgtatctaaatatttctagatttttctaatttactaactatttaattacttcttactattttctaaacaactctagaactatctaatcttagttctagtgattccaagttttctttaaaactttcttgagtgttcttggtttctctaacaaatttcttagaatattttaaaaattctaacatattctagatttgataatgacttttaacattttttgtgtttttggaagtggtctagggtttattaccctggagtgtatcttataagtatgtagttggtgtttcaaattagggatttcttaagttatcaaaaaattagggatttcttaattaaagttaagacccatggtggggattcataatcatgtttttgattttgaattatttacactgaactgagaatctaattcatatctcaaagttttttttcccctccatattaata

SEQ ID NO: 252588 - DNA, 560 bp, Cannabis indica
aggaaaagaagaatgcaaaaggcgagatggagagatatatagtaagattggtggcaaaaggatatagtcaaagggaaggcgtcaactataatgaggtatttgctccagttgcttgtcctaaaattgttagactaataatttctttagaagcccaaaatatatgaaagatccaccaaatagatgtaaagtctgctttcttaaatggtttccctgaggaagaagtctacatcgagcaaccatcaggctatgaagtaaaagggcatgaaggaaaagttttgaattgaagaaggctaaaatggcctaaagcaagcgccgagacttggaatgctcaaattgacatgcacttccaagacaagaatttcaccaattgtccatatgagcatgcactctatatctaaattgagaatgaagcactactacaatttggccttttagtgacactatatagtgacccattgaaaagtacgggtcactaaagagttgggagtgatttttagtgacatgcacaattagactctaaaaatacgatgttagtcccttataatatgggtcactaaaaa

SEQ ID NO: 252589 - DNA, 841 bp, Cannabis indica
tgcacacatgggttggattatggtttcttcgaaccctagaggttggcacatgtatacagtctcattgagagggccatttaaaaatgcattacttacatctaactgagaaacatcccagttgtgagatacgaccaaggagagtactgttcgaactgtagtaggttttaccacaagactaaaagtctcttgaaaatcaattcctggttcttggagatatcctttagctactaaccttgacttgtacctattgagagacccatctttgttgagtttgactctatgaatccatttgcacccaatgacattcatggatgaatcatagggaacaagagtccatgtgtgagctttcttaagagcatagagttcactgcccatagcgccattccacttcagattagagagagcatcttttaatgacttaggctcagtaggtaaaagtgactcaggtaagggatgctttgtagctatatatgacttgggttttaatattccactttgggatctagtgcacataatatgggaccgagatggacaagtggtattgataggtggaattggttggtcatttgtgggtgcatgagggataggcatattggtttgactggtagttgttggtgttgtgtcagggagatgtgatggatcaatagtggggagagtgggtgggtgtaccgggtctagagtaggaggtggctgttgtgtatggtcattatcaggggtggccatagtgctatttgaggaaggcacgggtacagtaggaaaatgaaagtgtgcagtaggaaaaggacgtggtgaggagggttgtacctgtgtagtagtgttgtgaacagtagcaggaaaaagg

SEQ ID NO: 252590 - DNA, 525 bp, Cannabis indica
atcaagtaaatcttaagatcaaggaggaactatatgttagtctataagggtgatgtatttcgaaaccctttaggctgcactgactcatatttctaaatttgcattaatactaaaaagtctatatttgggatggtgattactttaggggcagagcagtaatttttggagaagtgtaaaatcgtatctaaagtctctaactctaccagtgagactgaatgtcaaagtggcccagaaggctagtaataattattcagcctatgaaaagttctatacagattttgacattattctagtcatagattaactactagtgttaccacctgataacacacatatagtttccaaacagtaaaaatccaataccctaagagaactaaacatatagaaagaaatttcacaatatcaaggattttgtgattaaggagatgtaatggtagagaaggttaaaattgaatacaacctgttagattatattacaatgataatattacataccacaattaatttggacatcaagaagacaat

SEQ ID NO: 252591 - DNA, 787 bp, Cannabis indica
taaggggaccaacggtggtaacccaaatcataaatggaaggctgaggctttcaaaacatcggggattaatagaaagtttcaaggaagcataggtggctgatagggccgcgagtcctcattcagatcatatccatagtgtctgaaatgtaagaaacaccatgagggtgagtgccgggccaagaattgtttttagtgtggcatggtgggccactttatcagagattgtccagaacccgggacgtctattcactatgactcaggctgacgctgatgctagtccatcagtggtgacaggtcagttatctataaatggttgttcgtatactatgttatttgattcggaagctacccactcttatatgtcgagtagagtaattgaaagtttccataaaccatgtgatgtgtatgctttggggtttagaaccctattacctttgagagacttaattgtatccactcggtggattcggtccttgtctttttggattgccagttatgagttaactgccaatctaattgagttacaagtgtttgattttgacattaggggtgagcataaaatccagagaaccgaaaaacccgttcaaatcgacctatcgaacaccgttggagccaaaactgatgaaactgaatactaaaaaaactgctaacggttaaaactaccattgaatggtcgggttttttttggtaataaactgaccaaaaaaaccgaaaccgaccattatacatatatatatatgttaatttattaagtttttttgcatgtattatagttactaataatata

SEQ ID NO: 252592 - DNA, 744 bp, Cannabis indica
tagggcataaaacccaatagggatgtgtgcctagtcgggtgctcatgctaaacaaggggctctactgcctttgcacccgtactttaggaaggtggcagacttcttccgtctctgtccgacccaattcactcccatgggcatcaagtatctatctgccctgttcattctgtacgccacccagaagtgggatatgccttctcctcatgaggttagttggttcttcgacttaaagtctactcccaaataaggtaggtcgggatacttctacttttctcaaccagacttcaagtggttgacggacaccgcgaacaagggtgttagcaaaattgggcattttgctgacgaagactatatggtggaaggtatgggcaccacctatactcagttccagcagattcctgtatataaccctccacccctcacgcttgctctcagggatagagctcaaaagctcactcagctaccgagtgatgctcgcaacatcattttggttacctctgaggacaactttatggagtacgggctttaccagaaggatttcattccctggcctatgaaggagaagaagaggaaatccaatgctggacgagctgatagagctcatcaggaggatgagcttattcaacttaagcgtgaagctaagttgaagggaggtgcgagggcccaacaatatgctgatgagcctttggatcctgaagatgatgctgaggaagagcaggtgactccgctcaaaaggaggaagaa

SEQ ID NO: 252593 - DNA, 551 bp, Cannabis indica
gattcccaattacgtattgtgacaacttcttttttttagctggggtttcatttcataggctttagttagtggttattaccgtgttaggaagggcgtcgccacctaccatgcaagattgaaatggatgatttacgcctaactaatatgcaagattggatcattttacttttttattatttatcgtgtgattttaatttaattcaatgaagatattacaaagagaaatactaaagaactatttaggtgtcgtttggttggaagtaatgaaaacagtggaataagaataggaatggtaatagaatggaataaaaataggaataggattaggttgtttggttagatttacggaatcaataattgaatacatattcttatgtttggttgactatataatgtaatgaaatggaataaattaattttgaacaaaatactattatttttaaaatatgattaataaattaaattaaaatattcaacttatatatattttgtttaaaaaaaaaaattgatatgtattgaaaaaattaatatttatttaaaaaaaattgata

SEQ ID NO: 252594 - DNA, 761 bp, Cannabis indica
gtactaaaccatgctccccaaactttgatatctaccaaatcatacccctcaaactttgatatgtatcaaatcatgccccttgaattttcaaccatgttagattttttttactaaaattagacaaaagtccttaaatccaacagtctcaatatttcaagggatatttttaacgaacttaaaagttcaaggggcatgatttggtaaatgtcgaattttgggaggaaaaatcctaattaacctttaataaatactaggttaatattacgtgtagtgcacgtattcttagttatatacttagtttttactctagctatgtacatttttagttatataattagtgatttattatgtgaatgatattcaataaataaaattattttaatttttttttaatttaagtgttatttataaaaagaaaatacaataatattcaaaatttgttgttaattatagatttattttaattaccacaatacttttaattttataatacttttcattatttttgaaatgtcatacgctttttctattttaataataataataataataattataaaatatcactataaaaaatcttactttttgtcacaacttaaaagtgaaaattttgttcctaattataaaacaataattaatcgctacaaaaaatcttacttttagtcacaacaaaatttatgactaaaagtaaaaaaattgtgactaattataaattatcattcttatgttatgacaaaaagtctgtggctaaatgtattagt

SEQ ID NO: 252595 - DNA, 998 bp, Cannabis indica
ctattaaacaaagttcaaccgaccaaatcaaagttcaaccaaccaaacaaaagttcaacaaccagaaccaaagttcaaccgacaaaatcaatcctcacacattaatactcacctaactaaatcaacgacttgatctaacttctctgagaactcttgtcacaaaagcctctcgaatttctccatctattgacttgaaggttgccacatattctggcttcttcaacatgtacgtcaatacatcaagttgatcatcaaccgaaagtcccattgatttcaactccttagccaactccttatcattagtagtcccttgcaccatcaacctcatttgctcgattgaatgttcaaacattgttttgaacgttgaagcaatctccttcataccatcatcatctgatctagatctctttcttcgacctctaggtgaagaaagattctgattcactgacctacaaccaataatacctataaataattcttcattgacaagaaagaacaaaactttattttataaacctatataaaataaacacatatacaataatcccagagcagacagataatatcacaaaaaactccgactatcacaacaaacatacaagaacaatgaagtactgcaagagataaagcattaacattatgcagaaaattccaacagcattccagataagataacagttatatataccttatttcttcttttcttcttgtaataggatgtaaagccttcagttataaactaagaaaaatggtctctctcgctcctgaatgaacattagaattacaatcacaaaatcatcagtaaaaggcttaaatattcatagatgcccaaaatcacaatataaacacacatgatgaccaaaagtaacatcaaaatgcacaaaacaacaagaagcaaaacaaaacccaatttccttcaaatcattctcatgatcatcaacattctttttcattttcttgatctgggctctttagctttgttcttaaaattcagcttt

SEQ ID NO: 252596 - DNA, 551 bp, Cannabis indica
ttcgtgtcttctccacgcacacctcacatgcaggctgcacaccaccttttacgttatttaaaagggactcctggacagggccttctgtattctgcttcttcttcactacacctgagagccttttctgactcagactgggcatcctgccctttcacacgacgatctaccactggattctgcacttttattggtgattgcttaatatcctggcgtaccaagaagcaaccaaccatttctcgaagctctgctgaagcagaatacagagctctagcagccacgggcagtgaactgacatggctccaatacctccttcatgacttgcaaattcctcaagatcaacctgctttcatctactgtgataaccaatccgctattcacatcgccaacaatcccacctttcatgaacgaaccaaacatatcgaacttgattgccacttcattcgtgacaaaatcaagaaatcaacactcagactaagtccggtcactaccaacaatcaactcgcagatgtgtttactaaacctttagcatccactatcctcaactctcacat

SEQ ID NO: 252597 - DNA, 1105 bp, Cannabis indica
acaaagaataaacagatatggtgataaaagatccccttggtgcaaccctctttgagcaataatgggccccaactccttcccaccatgtgaaatggtataagaaactaaacatacacattgcataactaaattaatccagcgaccatcaaagcccattcctaccatcatagcccggagataaccccactcaagcttatcataggctttgctaatatctagcttgagtgccatataaccatccctccctcttcgttccctctttaagtgatgcataatctcgtaagcaataaagatgttatccgagattaatcggccttgcaaaaacgcactttgagtatcagatgatagacaatataacactcttaagtctattagcaaccactttggacacaatcttgtacatcacattgcataatgcaatgggtcttaaatcccccatatccattggctgcttcttcttaggagtaagacccaaatggttttgttaaggtctgtaggaagagaaccattatgaaaaaactgattaaccatattgatgacatcatccttaacaatcggcaaacacttttaaaaaaaacttggggtcattccatcagaccctgaggatttatccggatgcatttggaacaaagctttccgaacttcttcatctaaagcaggtaacaatagctcagcattctgctgagatgatacacgagtttgcacgctgtttgtcacttctctccagttggtttgggaagaggaaaaaagctcgtggaaataagaagccataagatcattcaaaccactatcccagtcaacccatgcacccgaatgatctttaagttttacaacaaaattattccttcgtctcgtagttgcagaagcatgaaaatacttgctattattatctccctcttgcaaccacaattgcttcgatctttgatgccaaaaaacttcttgttgcacataacattcgaccaagtgcttcttttcttatttgcaactagctacagagacctcatcccgagccaatttctacttctgcacttcatttttatactttttcaacctttctttaaagtttccattattctccttaccctagacagccaacttgtcccca

SEQ ID NO: 252598 - DNA, 520 bp, Cannabis indica
tgatttttggacggaggtgtgcagagcaaaacggaaccaagatttaggtagtttagccgccaaaaatttggtttttgtggttaagtgttacaaaccgtaaagttcaggtggtttagccgccaatcttccttattttaataaaattgatactatataaatttaatatatactactaagtatatatagtatataaataaactttaatgtatactaaaaatatttacttttatatataaatatattttttatttttcttcatttagtataaatatttatttatatataaaagattttgtctataaaaataaatattacttagaaatatattaaaatttatatagtagtatgatactaattggtatataaataattatataaaaaaaaaaaaaaacattggtatataaataaaatttacactaattattttaattttacatgatatacgtacctttttctcaaagaaatttatattatattctaactgaataaatttatatgtaatattcattttatatatata

SEQ ID NO: 252599 - DNA, 847 bp, Cannabis indica
taccttggtctccttttccttgccagtttcattatcttcttcagtttgcatcacctggttatcctgatcatcatcagccaaggcagaacttccttcaccttgagtcgactttcgttgttgtccatcatcctgaaacattaatcgagcaagatatgtaatcaagtcaaagtctactactggcattaagtacaatcaattaaaaaaagttactagggagatcacaaacctcaaccatgtcttcatcaaatttaagtggattgcttggggggacttcaacaggctccataaagtcatcaacagacttaaggcttccaatgaatgaagattctccattgtaaacttcttcaacactaaacactttaccaagttctgtaacaattttagcttcagtaggttcgtcttggctcctaaccgggggcatagtgtaatatggaatcttgcctgaaagaaaaaaagagaaaaggattcatacacctagctcagctgcgtgtttataattattagcatattaattatatcaaaagaatgcagaaagatgcataccctcattccagtcatgcagaacaattcttgcggcagattcaatatctacaataccacccttttttagtttacccctgacagtggccaccttctgtagaaagtcatctactgtctcgaagcttggtattttgtatagagttaccagcagtttggctggacaaagcttgagaatttccttcactgttttcatccacaaacaaggaaagtgagtatgttggttaaagtttggctacagaagttaaaataatgataagccgaacaaatttaaagactctttcctggaattgaaaaaaaaaaaaagaaa

SEQ ID NO: 252600 - DNA, 1282 bp, Cannabis indica
agactatctattgtttgctttcgctttttgttttagtgtaattgtgttcatgcaattataggcaagagccattttaatgatttatataaatcatatgctttattttggtttttaattttaagtaaagtaactaggcgcaattataagatgctcatatatattttgtttacatgttgtttctgtataactatgatactcggtattagccttttgaaggcatacgatgatcattcgtttaagttgagctgtgcgaaactcttttagaaacattgacatcaacttcaaattatgaaatatgaaatgcaataatgtggagtggatgcacaattatatataacttacctatatggtagttgaagttcattgtttacggcttacctcatgttttaatgtttttttctcagcggtcagtgcaagaaatgccaatattacctagccccacttcggtataaatcaacataacttggctccactttggtaactccttcgtgtaagtttataatttctctttcctttgttctctccatactatcatgtctttcatgaagtggtacgtatatacttactgttcttgatacgagaatctgactgccatctcctccttgagagaatcaagcttgtaggaaaaaggaaaaaaaagaaagaggagcatgtttgaaacaaggaaaacaagaagaaagtacatagatatttaaaaaaaattagaataacctttattatattcagttattgctaatgcattaatttgaattactttaatgctatttttggcattaacaaaatttagattgatataaaatttgttattttttgaaaaattattaaataaaaataattttggactcagatcaattaatcacatattttgttttggtatgctttcagattgtcaatcaatcacgtatttaaattgttaaaacttaaaaatgggagaaaaatctggttcgaagggatggtgcggttggttactcgcttttctgattcttgctctggttgtgggtggcattgtattcacaatcatgaagaagaaatccggcaactctgatgggattgcaccagttcctggaccccctggtgccatttctaaggactatgccgacgccctcaaaatcgctatgcaattctttgacatacaaaaatgtactttcttttccttttttttttgtaactttttatttggcattataaaatagtttgtgtaattaaatagaacgctattgtttcagaatatggtatttcgttcatgagctgagtgttttttttgtctgtctgtaatttgatt

SEQ ID NO: 252601 - DNA, 894 bp, Cannabis indica
tgttgtatgaaaattctactcatgtaatatctgaattgcctttcggaccgcccatctatctgaggatggaatgctgtactgaactttagttttgtacccattgcccgttgcaaactctgccaaaacttggaggtgaacttcggatctctatccgaaactatagacttcggtaccccgtgaagccttactatcgctttaacgtacaattctgccaattggtccactgaataggttgttctaacaggcagaaagtgagcagacttcgtgaatcgatccaccataacccagatggaatcgaacaaacctgtggttctaggtaacccaaccacgaagtccatcgtgatatcctcccacttccattcaggtagggttaaaggctgtaacaaccctgctggtctctgatgttcagccttaatctgctgacaggtgaggcacctcgatacgaattctaccaaattcttcttcataccgctccaccagaagtacggtttaagatcctggtacatcttggtggtgccgggatgcagggaataaggggtagaatgagcctcttcaaagatttcattcctgagttccacactatttggaacacaaaccctagctttatacaacagcatcccgttgtctgacactgaaaaatccctggcttgaccagttaaaacctcatctctgatttttactaactttggatcaatcatctgagcgactttaattctttctaacagatcagattgtagcgtcaagttatgaagtcggcctactacaaactcaatgctggatctgaccatgtcctctgctaactgaggtgagatctgaatcatgctagccacctgtccgagacccttcctgctcagggcatcggccactacatggtcggtatagatttcacacctt

SEQ ID NO: 252602 - DNA, 604 bp, Cannabis indica
tttttaaaaattttgcaggatgtcttaaataagtataatttacatgaccatgagaaaaaatttgactaaaaaattatttcggatactaaaacagatagagatgtatcggtgtatcccttttaagggggtgtattatagaatttccctaaactttatataaataaaaattattaaaatggggtatctttaaaaatttttggggtgtaaataaaatagcattaaaataggaaaagactaaaatacccttatgagcttataataataactctaacaacaaggtggttaataaagatcatatagtggctttggacgtggctacccaaattcatgaaaatggaggatgagatctaaagttatggagctttcttcttaggccaaatgccttggcataaaatcaatgaaagtaatattggggtttcatagctatggttggtatttaggtcaggcctcgtgagtttatctttgattgttattctaaattcttagatcttgtctgtttaaagtttgtaaactgagattttggaagcttgtatagtgcggttctaacttctacgctctagaatttcattttcaaggaactgtgacttatagagaagtctctaca

SEQ ID NO: 252603 - DNA, 732 bp, Cannabis indica
aaagaaaccatgtaaagatccatcaaaataaagacagaagcgagaagttcagatacataccattaccaattgcacgaagcttactgggaagttcagagctattagcatctcttctatgaaatccttctagtgtattgtaggcttatcaaagatccagtttgatcatataatttggcctttactcttccgcccataatgtcgcaccaagttttggtacaccataacactataagcaatgaatctaccttgaacaaaactactttaattttgtgccaccaattcaggtaaaacctgtcttaagcatgtacatatcattttagttgctgctttgtagataacattacagcaagttatgggtcagaaatcactaaccatatttggacattcggtcttgagaataagagaaagtgtagtagtatccagctctttaagtaactttcctgaatgtagaaagatggtatggattcacatgttgggaatattttaccagaatctaggtttactaacaagtatgttgattaacttcctaaagatgaatatctctaaaataatgaaattaaacacgtaagagtttagaaaaccttacattggctgtagcagaatatgatgacttattccactcaaatctctaacctttgttcctttctgtcgtagaatattatcaagatctgagcctagatctctttctctccttcgagtttagttacgaccgtcttactcactatgattgag

SEQ ID NO: 252604 - DNA, 427 bp, Cannabis indica
atgcccgtgtaataaaaattaggttttgatccctgagggtcgtgtgtgaggagaagtagagggatgattttttggaagggtttacttgttgtcccgtagcttttacattaaggtagagaacttccttgatagcattgtaagaattaatagtggcatgacaaaagaagatgctatcatccgcaaaaaagagataagttatagcgagggcggtcctagcaacactattacaaaatgcacaatttgcgtcggtcaaggcatctaaccaaaatggttgaccgaggcaaaaaataggtagagattttatgctttagtggataaccgaagctaaaagaaaataattagcgtcagctactatagtgaggctgaaaaaggaaccgaggaaaaaagtgaaaaaattaaaaattgtctttttgttgggttttatgcc

SEQ ID NO: 252605 - DNA, 1313 bp, Cannabis indica
tttatatttttttttaataatagggtgtacttatcattttgtgaagtgtaaatagaactcccctttctataaataacctctaaagtctaaacaattccacaaactcagaaagtcatcaaacaacacaataacactactcttttcttctctctctcagagcatttttgcaagactcagtttctctctctaaactctcaatttttctctctctaaaaatggctcgtgtaagctttgctttggttgcagcaatggcagcaatgctagtagtctccaccttcgcacaatccccggctccttctccctcagtacaaacaccaaggaagatttctcctgctccggctcaatcgccgaccacaatggccgctcctgctccatctgtgaccgccacaactccagcgactgctcctactccatccacccgatcgctacatctccaccatctccttcaccggtagccgctgatgtcccagcctcatctccatcatcgatctctgattctccttcaggctctccttcggcgatctctgattctcctgctgatgctccttcaccagctcaaaacggcgccgcttcggcttcgttcactgtggttggatccatggccgttgtcgttctggcctcagttttcgtcatgtagagagcttaattaaggaatttcttttcttttcacgagattcgttgatgtttatagatttttttttacaattgatttttttatattattatgtatccatttatttgatttaccatttattatcattaatataattatatcatctgaaggcaccatttgccattttggtttacatgattatgtattatctttcgtaaatgtttaatgctagtaactttattcccatttattcgaaaaagaaaaaaatatcgtattttccttttaaaaaaatatatatatttgccccaaaaaacttattttatattttcttcgtgatttaaaaaaactacgtgtattaaaattgaaattaaaataaacagctaattagtattgtataataaataagaaaaattctacacccgatatattgatacactcatatctgttttagcattcttatggtcatgtacgttgtagttatttaagacatcctgtaaaattttaagaattttaagaaatttggaaaaatttaacatgccgaaaattatgttcaaacagtatgttgcacgcgtaactattttatttaatacgcgtataaaatagactgtttaaagactgtttaaacattattttctatattgtaaattattccgaatttttcaaaattttgtaggatatcttaaatagttataacgtacat

SEQ ID NO: 252606 - DNA, 765 bp, Cannabis indica
gataatcaaatagagctcggaacgagctttccaacgatataaagaacgtccaaaacggagtcccgagtcaaaagttatggccaaaacaaaatcaggaaaaagatggctctctgccaggttttatggccgcggcgaccataaatctggccgcggccactgggttcgaaaaacccagaaaaccagattttaaggtctaaaaatgcccacttttccataatttcgaacctcaaccaaaacagagggtaaaaacacaaaattcatgcattaatccacaaccaaaatcagatttaaacaatatacaatataggctccaaacttgacctaaaaattccatacaacatctattcaagctcttgaatctcacaaccaaattctcaagcttgaaactaactaaaacagaaccaataatccaaaatcaagcatacatacaacctaagaatcacatccacaacatatcaagagcaatccacaccattttactacaaaatcaagcatacacaatcactaatcatcaactctttactaacatgcatccaagagaaattcatcaacacattatgcttttctttcaatttcaaaattagtgaaataacttcagcaagaaagcctagaagcttaccacaacttcaagcttctatccacaagaaattcaacttcacaacacctccaatttcaagaacaatccacaaaaatctaaacttttagaaaataagtgaagaggagaggaggggttcggttttagggctgaaggaaaaccagaaaaat

SEQ ID NO: 252607 - DNA, 592 bp, Cannabis indica
actttgtgatggaccacattctggacaagaagctccctgttcgttatgttccttgtgtcgatcaagtagctgatatgcttactaaaccattgtgcaaagattaatttacctaccttaaatctaaacttaaaatggttaaaaccccttttcgttttggaggatgtaaacattattaatacttagatagttttctgttaaccataggattagtaaattgtgttcaattagtaaaggtagttattacatcttctttattttcagttttgtaatttatatcaaaacttgtatataaataacaatgtttatactgattaggattagcaattgctaagttgattctttccgtctttactttttttctcgtgctctatttctctacagtattatttacatctagaggttatactttacaatttgttatcgaataatctaaaaaattattatatgagattcgctatttaaatatatcaataaggatatgacatattgaaagacgctaagcaaagacatttaattaatagagtaaatcataatcaaacggtaagaaaaaaaaaaagaccattctttggaaaaaaaaagaagaacaaaagaa

SEQ ID NO: 252608 - DNA, 623 bp, Cannabis indica
atgaacggaagcagcttgtggagtaggcgattgaatatgaatggctcccatcgaagtgttcagcttgtgcaaatcttggatatacagttgccaactgcaataaggagaggaaagtggtctggaaaaagaagcaacctgttgagaaagaggctaagcaggatagggagggtgaagatcgaagaaagaaggaagactcagagattggcacgacatgagcaagacctgatattgaacgatgagcagcataaccaggttgtccagaaatccgataaggggaaaaaagagtggattactcctaagagaagagggctgaagcagaatgaagaaatcaaaaacaaggaagctccaaacatggcaagttgtaataatggatacgctgttttacaagccaatttcggttgatgagatgatggttcctagctctattcttactcatgatggatgcttgtaacatgataagttggaatgtgagaggtatgaataaaaagaaaagcaaattgctattcttgatgtttgtaggatgaacaaattaagttttggagccttatttgaaaccaggtaaaacatgagaaacaaaagatatcatggagaaaaattttccaaattggaatttttactctagt

SEQ ID NO: 252609 - DNA, 1036 bp, Cannabis indica
aattcaatggctcatgattcagattgaaaaaaaaaatcaaataatgaaagttatgagagttattggtacaatgaagaagggtcattagttgaatacacagacgataatgagcctacaatttgttatacccaaaagtcggttgccacctcaatgaaagacacgtgtcagaatgaagggaatatgaatcaatgcaatttcccttatgcaataactcattaattacataagagtcagagtatattctaacctgctgactgtaaggtcttaggcgaggaatcaatgtacaaactgacacttagtgtattagcgagaaaccatacatagctaaatgcaaatagcgaggcaccggagaaagcgatacgtattaaccgtgaaataccttagcgtgcaatgatcatactaagtgaaaaagacggatcgactcaaagaacaaataagcgaggtagccatctcgctaagacttcttatagcttcatccagctaacaggagcgaggcttacaaccctagcgagtcagaagaattctttgtaaataaccacaatcgacacaagacatacatcgttgacctcagaaggaagaatggccctagctcgctattggatcactgtaagcaagtttctgtcgagacatctctagagacaataatcaaagacgtgtttaatacacgatatttttgattcagtagaagcgggaaaatcacagcagtatgattttcaagtcataaaccgcatttacactacgtgatatgtgatcaaatctcacaattttagagatgattattgtaaacacctttcggtcaactttataattcattgtctattatgtaattataaatagtgacaaagaagatcaaaaaagggacgaaaattcttatatgaaagaggccctaaaaaatactctgaaatttgaataagattgactcgtggattatgcagaattttaactgcaaaactacgtaaaacccctgtgttcatattctttattttgatagctttaattttttctgtgtgaaatcaatattgtgaggctcaaattt

SEQ ID NO: 252610 - DNA, 568 bp, Cannabis indica
aattactctaagttttggaagcagttgtgggcattgcgcatccctccaaaggttaagaatttgatttggcgtgctggtacgcaatgtcttcctactatgtgccagttgttaactaagagagtggcagtaacaactgtttgtcctgtgtgtggactggaggaggagtctatcatacattgtttggttacttgccatgtggtacacctgtgttaggacagggttgggacaataatttcttatcttggattgcttctcattctgaaaggatagaggttgataaaaggggatcggtagctactctttgttgggctatttggaatgccaggaatgaccttgtttgaaaaaataaaagggtgagtgccttagatattgttgtgtttgctacaaattatcttgattaatggagaaatgctcaaaaatctcagattgaggtattatggcctggttttagggcgggtgatggagctgagcatttgatttgtccacctgagaatagtgttaagattaatgtagatgcagctttatttgaggatggggctcgggcaggtgttggagttgtagccaggga

SEQ ID NO: 252611 - DNA, 635 bp, Cannabis indica
atgaaatctctatcattctaccaaagcttgttaatccttgggcaactgacttatggtcttaccaaaaagaggattggagggattttcctcttactctcgagccattagcacaatgaaggattgagactatcccccattatattcctccagctgctagtttgttcaaagcaaatacgaatgcttcttctatcgacaccattaatggcttatggaattgacaaggcggttcgagattccaatggaaaagtctttgtctctgttgcttggtgttagagtattagctgtatattagttgtaaaagaattagatatttagtagtttcctattttattggtagtttcctattttagtctcctagctttgtatataaatatgtactattctatgaaatacatacacaattcgattcactattttctacatggtatcagagcattttcattcgaaattaggtttcataataataaaaaaaaaagattagggtttgagtttagggttctttttcgaaaatattttttggagtgcgaatttattctcaccgcccactcagccgtgttgcccagccgccgatctacgaaaccccaaagttcggtcgccggattcctgcgcgtggggctcacgcgccgcctgaagtt

SEQ ID NO: 252612 - DNA, 776 bp, Cannabis indica
aatagtttaattagcataattttcttttttgaaagcagtttaattagcataattttgatgattttgttctctcaagaaatgaaattcttccactacttttagtattgttgaggtaacatatataatagattttgtggagatctttattccttagactaacaaaattttatttataaaggagtcaattttactgtcattgagctgagtttattcattcatatgttattttttctgttttctctatatttaaacttggtatcagagccttatttacacgagcggtgcctctttcgctcaagctccatggaagattaaactccaactcgtttaggtgaacaaagtgcctcaagtgcagtggctcagttttcaatttcatcaataagtgttgttggatctcatgttgcaagtaagttgaaccaaccttttgcactcaaactcgacatgaacaattacacgttgtggaagacaatggtcttagccattgttcgtggtcattggttagatggattggatggatacctaagaggtactaattaaggttaaaccgatcaagtttctccttgaagattcgtcaacaagagaagaaggtgtgactgtgaatccataatttaaggctggctcggaagaccttagtgtgaaatcttctacaagttcttctgtattggatgttcgattgtgttatacgaaaagatggcaaggaaatcttgatagacaacaagaggtcaaaatctctaaactaataattaggtttgtgttatgtataattgtgttgagat

SEQ ID NO: 252613 - DNA, 549 bp, Cannabis indica
cctttatataatttagggcttacaaaatatcattatataaataggataatattcctctaaaatagaaaaaataacttatttatctggtatattaaatcataaaaaagataactaatattcctaaagaatatgtaaataatttaagggagaattcctatctttttggatggttggagttgtctagtagctgaaatcaagttgtaacctgtctgccttattcttagagcctggcggccgacacataggttccattggccagccagggtatggtccgtccagaacctcttgcctgggcatttccttcaattttggtcttgcccaattatttggaactcttgttaattgacgtgttatgcagggtaactttgctcacctatcggtaggttgtattccacattgtctcacttttacctatgtgaatatgctacgttaaatggacaaaaaaatgaaataacaatatatatatatatatataaattacatgcttattttttttctaaataaaccaattttttggttcaagatgcaaaatagtcctaaatctaacaa

SEQ ID NO: 252614 - DNA, 704 bp, Cannabis indica
tataataatcttttgttttttgaaaacattatataaaaataaaacaaaatgcaaattgagtcagctcatggcctttaagagtagggatgtacatttttctcatgagcatagggctatgtggggacctgcccttaatgagacaaggattctccgtctaaatgaggaatagggccgggataggaattattttttgtccccaaatgttaaacagaaacggggatgtgatcacactccccgctccgacatggacccgtttagtattttattttatatttttagtaatattttatattttataatttatgtttgtattttttagtatattagtatactttttttatgaattttaagttgtgttttgaataataattagtttattaaataataattaatgtataatattttaattttatgtagtttaatttttttattataaactttatatttttcttagaggattctccgccacgtccccgcccctattaggggattccctaccccattcccaatagtaaataaacggagatagaaattaaaattcttaacagggatggggacagaagagcacttcccactaattcctagcctcgtgtgcatccctaattatatgataagttcttcttaaccccttgtaaattgtaattacacaataggatagctaagagcatgtttggtattgttttctgttttttgttttaaaaaat

SEQ ID NO: 252615 - DNA, 509 bp, Cannabis indica
gaactggtccgccagggggttagacgaactattggtactggttcttcaactagtattttgcaccatccttggctccctgatcctggtaatccttacataacttcttcccctgtgggtcttattggtcatgatgttagctcccttttttcggttgatgaaagaagttgggatgttgagttggatcgggatatgttcaatgatagagattccaacttaatcttaagtatccctttaagtttctcggcatcttcagatttctggtcctggtctaatgaaagctccagtcacttctctgtcaaaagtgcttaccgtattcttcaggcttctaaagatccttgaactggtagcaacaattcaggcttttggcaaaatttatggcaattaaagatcccaccgaaggtttgtaattttctctggcgtgctgcctctgggactctgccgacttgtgttaatctcaggacaaagcatgttgacgtcccctctctctgccctgtctgccgagccgctcc

SEQ ID NO: 252616 - DNA, 538 bp, Cannabis indica
atttgcttaaatgtgatccatttttattgtcagctcacttgttctacagctaaatcaatctatttttcatgtgttgttgaatcccttttgatttttcttatgttacttcagtttccattctatttaaaataatatgagaagtataaacaagcacacaaaataatattatatattattatattcaaaatggcagcaatgacaataatgatcaaccatttaaaaaaaaaactacaaaataagaatgtaaaatattaaacaaacatggtaacaatttaaaaagaaaatatataaatataaaacacttcaataatagagagattttaattatcattgtgaaagaaagaatatatgacaagagataattatacaattttacatgtttatttgagggcgtaattacaatataactatgtaatagaagataattgaagatttcaattacagttttcaattctcaaatataactatatacttagaaataattgagtactactacaaatatcagaattcgtgaaggtcctaaaaatgatttttttcg

SEQ ID NO: 252617 - DNA, 938 bp, Cannabis indica
agggagagagagaacttttgagttttgattttagtttttcaaataggagcggtatttgtgggaaattagtaatgtggtcaattatgaccaattttaatgactatggatttaggaaaaattttttagggtattgtaagcatgcaatttcaaatttccctatatatgtgtgtgattgtgtgaacagagaatatattaagttaggtgggcttttgtaattgacaataatatgtataaattcacaaatttaatatttattatagacaagaagtatgtaaaactgatcacctctaagctaattaaacgagtagactactaattttacattatagattgttacataattcttggtgtgaccgctcaccaagcatctgtgtcataacaggcatgactttctcctaagtttattcatgacactcagttatggccgagcaaaatcgtggttacatacttgatagacactagcaaaggacataatgataaagaaaacatcaaagtaacaaggaaaaactgacacgagcattgcttgttttgtgttgtggaagctacctctttactgctttcctaaaagacctctctgcattagagttaaattaaaggtgacaaacacgatttggcagaagatatcaaccattaagtaattaattaggaaaaaattaaacttattctcaactctgatcccatgctccgaattaccaagattccatacttggtttagactcaaaatgtaattgatccaatctaatccaattcaatcaactatacattttttgagagaattacactaccaaacctctcaaaagactgactttatatagaaattgtaggagtagagagatgcagggacaactaaccaactaactaactaactgattaactgactgacttcttagagctctgattggctcagctatagaaattcataacacctgtgttgtaac

SEQ ID NO: 252618 - DNA, 2135 bp, Cannabis indica
tattttaaatttattctatttcattcctattctaatttccattctcaatcctatttctatatttttattcctcccaaccaaacgccagtttagttagatattataatacacgccagatgtggactcctcataagtaaatatacttattcaaaccaaaattgtagagattgattaatttggactttattaaaactattgtaattttccaactgcgagcatgattcatagtgttaacccggatgtggttactttgatggtgtgacctgctcttccgttggtgcttctagaggtgtggctctgttttggaaggcaggtgggatgttcaaattaatattgtgagtattgataaaattattgtaaggtttggtgaggaccgtaacttcaaaccttggatggggtgcttcatctatgtcccacccaaacgaagcaaaagaaatgaattttgggagacaatgacaacgattgttaacgagtcgtggatgcttatgggtgacacgaatgctattcttaatcagcaggagaagattgggagcaggtcggtttgtgaaagcgaaggtcgtggccttcgaaactttatgtttgactgtggggcattggatattgaaggattaggggctttctatacttggacgaatgggtagaactggaaccacttggttcgtgaaaagcttgaccgtgttatttgctctgtgggatgggtggcacaattctctaaaactggctccaagaactaccctattcgtcactctgacaactcagctattgtgttgaatactatgatggatagtgctcaaatcaaggcaccttttcagtacctcgatgcttggaatatggacgaaaattgccataaggttatccatgaggcttggcaacagatattccatggctatcatagtttcgtgctatgctctaaactccgttgtgcggctgcgacactgagtaaatggaacaaagaatgctttgggatatgtaggaaaaaattggatctcttggagtctctgttaaccgaggtccaaaattggaccacgtccctggaaaatacctagcttgaaagcgctcttcttctggaaattgatgaaattgaggctcggtaagaggccatatggaagcaaaagtcccgcgaattgtggctcaaagaaggggatcgcaattcccggtttttccatgcctccatcattgttagaagaaaaataattttatttgggccgtttctgaggatggaaaccattggctggaggacagggatcttgtggtggactacttcagatcaaagttcattgaatcatagtcctcttcggatcccgttttcagtgatgaattattcactatgaactccccatcaccccatgcatcactgatcttgagaactctgctttggtcgatatccctttgggagaggagatcaagagaactgtttgggctatgcctctgctgaagttgcctggtccggatggattcccgactaaattttacaaaaatcactgggatattgtggggaaacaaactgtggacttcgtccaggagttctttagctcgggtaaattcacgagggaagttaactgaacattcattgttctgatccccaaccggagtaatgcgaggaagtttgatgactaccggccaattagcctatgtaatgtgtgctataagattgtagccactatcttgacatctagactcagaccagttctggagaagatcatttcccctttctaattggctgttgtcaaaggtagatggattgctgaaaattctgttattgcccaggagatagttcatgatatgggaaggaaaagtgggagacatgcgtttgtggggataaaatgcgacatgtctaaagcttgtgataggcttgaatggagttttgtgagaaatgtcctaagggcctctggcttctgtaccaaattctgtgatttaatcatggaatgcatcaccacagttagtttccaagttctgataaataaaggtcttaccaaatcgtttcgacctcaccgtggtctgagacaaggcgacccgttatcccccttcatattcatcctttgctctgaagttctgtctagattaattctggacaaggaacaaaaaggggagatctcgggctacagggtctcagctaatggaccttctattttgag

SEQ ID NO: 252619 - DNA, 651 bp, Cannabis indica
tttaattaattgatacaaaaaaagaagtatttctcaatttatctctcaaaattaagatcactttgatttacccatatttatttctctaccttttagaatcattatactttcataatttatgaaaaattgtaagaattcacctagttagtttcagtcgaaaagttttgttctgtactatttacttcgaagtatgatcatatttaatttatttggatatatattcctcataattcacatatacaatttttctagaaaaattgagagattgtgagtgtgtgataaaattcaatctgccaacttttataaatgaataaagtaaaaatggtaaccttggaagtgcactacatttagagatgcagtatacaggctacagtttttgaaaataaaaagaaatgctaaaagacacatgaaatttagtataattaaaatccaatcccatatattttaatttaataattattataaaaattacagactcaaataaatttacaatgaatacttgcatgaatctgattaaatatcagaggaatatccccatataacagcagtaactatattaataatatttgggctaaataatacacacttcctctgatatttcccttactgctgtttatatatccagctatatatataaacagcagtaactat

SEQ ID NO: 252620 - DNA, 561 bp, Cannabis indica
aaacgataggcttacttatcaaaataatttaattgcagcttgtttgatgtcacatgggacttgagcaataattattaacgtttaattatcttgcatttacttaccaaatatctcttgtctcttgtggagatatgtagatccggataggttgttcactgcctcttccttgtttgcaactctactgaaatatatattcgtatatataatcctttgcaaaattttaaataaataagactaaccgtgtaaagattctagttgtctatgaaatataaatattggtttaattaaaattcacatgcttgatgcaatggaacttacaatgctgtcttatttagaggagaccaatggaatcctcagcaagctttctcaccaatttaaaagtatttgaaaacacaaccagctctatcataatatctcttgtctcattcggagctctattgatccagatagaatggtcatcgcttcattctgaaaaaggttgtgttcaatgcactcgtgcaatacagatatacattaattatataaactaagtatttggtaacaagggcattgcatatgtgc

SEQ ID NO: 252621 - DNA, 1229 bp, Cannabis indica
atactttgtgaacacccctactccattcttatcattgtgctttatcagcagttactacatataattggtttatttaagagataatttattataatagtatttccccctaacgataactacaatgtcaatcaaccaaaatcatagctttgtccccatggagcatgcgtaaatgggcttgtttctctttttaattgcttgtagtaaaagcatgaaattaagtcttacacaattaacggtttcagtacctataatgtcaagcaaatgacaactaccaatttgtgctttttatcaaaataaataaataaataaaatactccatatgtaaacattaccctaccagaaatgagcaaatgtaaatgcaatcttcacttgtgcatgtaggttcatccataaggaaggacagcaaagcaatatgaaatctgaaaataatcttgcatcataccctcttacacaaaattacatacgggggtatattaaatcgaatagcagaatctaataagtttaattggtgagccctatttttcatgatacaatacttggtacaagactacaagtatatggtgaatctcacctgcatgaacattggtagcttgtgttagacaacaaatgtcaactgaattaaaaatggtagttatcgaaatcggaatgcatttagttaaataattgttgcttttttaccaaggcctccctttccctccaagtcgacgtgccaattcgaaatccttcttcactgaggcaacaaaaatgtcgaaacaacttgttagaatcagtaggaaagacaatggccatcttaaacaaatgcaataccaacttaacacagactgcttaatcaaccaatacaaaaacagcagcaacatattgaggacttttccagttttatccattgaatttaacttttcataactatctagtttcagaaaaaggcgataaaatgtaatggtgatgattgatgagcccacattatgcttggatggtttcagcatttgcatataagaaacaaaatatggctcatatttatttaatcatgtttagagtgaaagtacgaaaaatacagaacacattacgttgaaaattatatacacttttgtaagaaaaggaaaagaaaaagtaaagactaatggttccaaattccaataatacattgagaaggcctcataatgtaatactcctcaacagaaatagcaagtggcaattaaaataaagctaaatacaataagaaaaaaattgaa

SEQ ID NO: 252622 - DNA, 1146 bp, Cannabis indica
cttgctttggaaaatgttttcaacttccactcgtggagttttgaaactaggttatccaaaataatttaaaatctacatccttttggcaagacctaaacaatgggagacccatataattaatgttttccatcgatttgttgagtccaagctcccgcattatgcctcttttcataccctcactagtcttatcgctgaagaaaatgaaggtttttagtttatttatcctctgtccccaccaataacaaaatttctctagacactggcaaaagcctctagcttctgctaaagtcgccctacccacaaggatcagatcgtctgtaaagaaagatgagaaagcctaggaccatctttactcaacttgattcctctaatagttccaatatccagagcgttctcaagaatatgtgagaggatatcagtaacccagataaagaggtaaggggatagaggttccccctatctgatgccacacatagggactaaactactaaccttgctaccattgaggcaaaatctaaaataaatcgttgagatacactgttgtacccaatgacagaacttatcaggcacttcgaagctacagagcacatgatcaatgaatttccagcttaacttatcataggctttaaccaggtcaattttgatagcaaacaaaccctctttcccttttttatgtttaaacgagtggatgatctcttggactaaaatattgttatcctgaatgttccaacctagaacaaaagctacctaagtaggacaaattagctgggggagaatcggtctaattttatttgcaatgatttttgagattaccttgtagatcacattgcaaagaaaaataggtctgaactaggacactttttttttggggattgggcaccttaggtataagagtcacattcgttgtattgagtcccctatgcatagtcccagattggaaaagtccacaattgtgtcacagaaatccacaccagctgagttccagtaatgtttaaagaaaataacagacataccatcaggacttggagccttcaaacttcccataggaagagtttttgtctaatttactcatgctctgagataatctctaattcagtctgttcaagggggaaaagaatgattcgaaatcagatggtgcatattctt

SEQ ID NO: 252623 - DNA, 1900 bp, Cannabis indica
cggtgacatagtcttcccccttgaccaagacatcaccctccacggaaatcggctccccgacctcattataccctccaaaattttgaggttcggccactccttcctcctcagctttggaagggcaatcaggacggacatcatcctgttcctctatctcttggacctcaatgtccccctcgtgatcctcctcttccacggcgggtagatcctgctcgacacttggcaatgtggcaagctgggccacgtgagggtcagacatattgactttctgcatcgtctgctttgtgcgggccatcatccttctcctagacagatgctgatgtgtgtgccgtgcaacagtaatgggagggatagctattgggatgccaaagttaccagaacttggacggccaacaggaaaggtattagcaacacctggccggacaatatacgtccggttggatgaaagataacgcctccaacccttcttcaattcgcaaatgaagcaaccgtacccttctcctacgatttgcttggagtaaaagtggtgttgcacttcgggttctggagttggagaatgatcactactcacttctgaatcttcaaagctcgagttagaaagtccatcactcgaagaggacagactggcacgaagatgaggttgatcctcgtacaaaagttgaagcaaatctaggtcaattcggtgtttgcctccccaaaactcaccagaattcatctacaaaagacaacacacgagatgagtgtttggttgggatatcgaataataaacaggcaaatacattgaccaggaccacccaacagattaaaaagatggaaaatgcacaaatattaagctagaacccaagagtttgaaattttttgggttaaaggctaaaattcacgaagcttggaataagcaaggtgagaatcgagcattgcgagattaaaggcaaaatgttgtaaaccacgaagttgtatgaactattgtggagacaactacaaagttttgagtctagattttctatgtatcttctacaacaagtcaagaacaaaggtattttctacaatggaaacctagaaattaaaaatgcaaagttaaaagaggagaagattgaaaacttactgtttgaagcctaaattagtctagacgaagttgctcggatgcctctgatagaaatctcacgacaaacttgaagaaaattccttttcgggtttgctttgtggagaaaatggtgaaagtgatttctaaagaagtttcagccttatttataggcaatttggtgaaaagaggtaatcatttcaaaaatccctcagacgcttcgatttcccccaaaaaataaatattgggaaataaaaaagcaatcaagtgcctcaaataatcatcaaagcgtgcaaaggaaactgtgtttcgaggtaataattaagtcagagcattaattagccaaaaatcgaagagatgcctagtcagactcacatcgaatcacgaacagacacacacaacacgtgtaacccattcaagtataaaagcaggtcggatgaagtctacacgtaactctggaagtcctatacagacttgggggaaaattttatcctaatttttgcactctgatgtggcatcacacgctggtgacacgtggaattaactccacatatctgcctgaaagagatgttttgagaattcctcctagccgagcagtggacaatccaaatagcatgccaatacttagcaacttcagcatttacatcgtgaagcacaaaagtaatccctataaatctaggattgtatcacagagatatggcaagctgtccaaatccctcaatcagtgtattctatatatgtaatgtataatcttaccaattatagacattataaacaaaagggaaaccttccctcaagcacatagctctataaatagtgatc

SEQ ID NO: 252624 - DNA, 679 bp, Cannabis indica
gaactggcttctcaactttgggaattagagcaataatggtttcatttaagcaatccaaatcagcatcttcattcagcactttcaaacagaccgcgaccacttcagcttggagtttacccgaaattttttgataaaacagtgctggcaatccatctactccaggggctttaactggattcataaaattcacagcttcaatcacctcttcttctacaaacggacgcaacaagtcctcattcatttcagcagtaactttcggccaaaccctccgtaacacctcatcaacttgctccatattgagatccgaagccgagaatagacttccaaagtaatcctccaccaatgttttgatcattccaatgtcagtttgccatatccccatactatccatgagccctttaatttcatttttctttctcctagccgaagctttcctatggaagtacttagtattcaaatcaccccacttaagccacaatgcccgacttctttggcgccaatatttttcatccttctcaagtacaacatttaattgtttctctaatgttttcaactccccccaagtacttgaatcttgtctacttgagaattccgaaattgccttcttcaacttttcgttctctccttcaatattttcttctttttttttattccaaacatgtaaggccgcacctatctt

SEQ ID NO: 252625 - DNA, 1168 bp, Cannabis indica
aattcaccataaagatctgaaatttccttccaaggatctcttagagatagcctatgacctgatttagtatcccaacaattttctgctctcccataacggcttttgatcactttatgccaaagtgaatttgattgtaatgaatattgccaaagccatttcataagcaaccctttatttttcatatctaacctaccaatagcgagacctccctcatgtttaggtctacacacctcctcccaggccaccaaatgatccccacccattaaatctcctccttcgcatagaaaatctctcatcattttttctaacgacaataaaaccaattttggagctttgaacatagagagatagtaaataggaagagatgaaaatatcgattaaaccagggtaagtctaccacccctagataaaaatgatgctttccacccattaggctttttagcacatttttccaagacaggtgcccaaaacaactttttcctaggcgagccacctaaagggattccaagatatgacataggccaattccccacttcacaaccaatctgactagcgcacaaagcaaccacactctcatacatagagatccccaacacttggcttttattcatgtttacttttaatcctaagacagcacaaaatgcccctacaattcttgtcagtatttggagtgaggcctcatcatttgcaaaaagaagcgtatcattcgcgaattgtagatggttgacgtgaaccttatctttgcccactaaaaactccaagaaaaatgcttgaaattcacagcttggtcaatcatccttccaagtacatctaccactagcgtaaagagaaatggtgaaactggatcaccttgtctaaggccccgagatcctttgaagtttccccttgttcttccattcacgaataaagagaatgatgttgaggaaatacatcatctaatccatttcctccaagtttccccaaaccccttttttgtcctaactaggtctaagaaatcccattctactcggtcataagctttctcgaaatcaatcttgaatccaacccactcttatcgcgacatcgataatcttccactgcctcattagccaccagaacagaatccaaaatttaccgcccttctacaaaggtcgattgtgtcaccaaaatcgtttcccccaatacacct

SEQ ID NO: 252626 - DNA, 740 bp, Cannabis indica
atgccaaggggcaaagccaactgggtgtaggcgggatcgaactgtcctagactacagcattgacccagcctcgaaaaggatggccgaccatggccttattgggctggtcagccatagaatcaacaacctagcccaccactacctccacaggctggtcagccatagcctcatcaaactcgcaagacgatgctccttcaacatggccagccacctagtctgtaacctggtcggcctcacctgccaatagtctactctcatactttttgtctattatgaccaagaagtaaaccacatattgctagcaaaatcccttgataaaaaggaagaaagaagagaccaagctaacttaaagtggcatgtcttccagcaaaaagttgcaaggtacttgaacaaacaagtcaaggagatgaaattcttcgtaagatacatagtgctttgaagaatattacgtagggcaatcagaataccactaccccaaaatctatcagaaattgtcgtcccagaatggtgttgtaaaaagtagggaaatcaactattacgtatgtattgtacttgaaagaagacattgtattacttttggaaacttccccatttattatcatcagaagttatatttttcccatggggatcagcgtgtctccattgaagccttggatttgaattggacatggcagcagattggcttccaccagaccaatggctttgaaggctcctttgaaaatgatattcacagagcttcc

SEQ ID NO: 252627 - DNA, 882 bp, Cannabis indica
ttgaagatattaaaaaaattcttactaaaacccaattaaaaatgttttcaaaaactgtgtttggtcattttcttcgaatgtcagactatagtatccattaccaattgattcatggtttgttgttaagggaggttcaacaaccaaatgagttagaatttgggtttgtttgcaaggaaaatatcttaagtttagtgctgaggagttttctttaattactaggttggattgtcatattgattctgatatttttcagttcaagcaagatgataatatacatgtaaaacactgtttaaagggctacaaaaaattaccaagagtgttatccaaactgtttttattgctgacaatcttaagagtaatgatgatcttgcagtcaagttggatgtgttatattctgttcagtattatttgttgggtggttcctctgggaaagttgtttcaattgaggaaataaatgttgttgatagtggtcgttacaatgaatacggtttgggtaaggagtgttttgatatgaattcaatctttgaagggtaagattgattctggtcttaggaaggttatgcagaaagaagaagagtgtgggtactataggttattaggttttccattggcgttgcaattatggttttttgagtgttatccatatgttattgggaaattgtcattgtattcaaatattggcattccaaggcttttgaattggcctaatgttaggatatttttagtatttaatttaggttaattttagcacatttttcggtttaatttaaattatggttggagcatttttacgcttttatcttttagttttgcagatttaaaatagatgaagagttagaaaatatcagaagaaaaaggataaaatatcgaatgaaaatatcc

SEQ ID NO: 252628 - DNA, 2217 bp, Cannabis indica
aaagcgttcctgtgcaccaggaacccagagagagaggaaggaggaaccagaaataccctcctgtcgatctaagatatcagatcaacgaaaaacatggtgacctacgggatcacctggaccaaaagaaacatacaccgacggtctccacgggaacgctgaacgagggaattatggctgagcttgccatactacgcaaagacattgctcgagtctcccggagataaaagggtgatgactcagactctgactgtgaggaccaggaatcgtgcgccagacacattctggaggcggagatcccagaaaattttaagatgcccaaaatggtagcttataccggggactcagctcctagcgattacctgtctaggttcaaccgagtaatgatggtcatgagagtcagcaatgacgctaaatgtttatgcttctcgctaacgttgagtgggtccgcggaggaatggttcaagaagttggacccaggatcagtggactgttggaacaagctgcaagttagtttccagagacagtttgtcgccgcaagaaaggttaatctcgaagtcagtgccctgactaacatcaagcaacttcccacagaaacattaaaaaatttcatatagaggttcaaggaagaagcctcgaagactaagaaagttgatgacggacaacagcttgcacttcttcaagtagggatccgtatagggactctattctggaacgaattacaggaaggagcctcgaaccttcaagatttctagaagagagtccaaaagtacatcaacttagaggaggcccaaatagtggcttatggaggatactacccgaccggagtagcgggatatgtgctcgaagtccaactcctgccatcggctactccaccaatgagcggtatacaattctctgctaccccatgctataatcaaagccaagcattcgctcccgcatcttctcactatgggaatccttcttggatgaagggacaagtcccatctcactccgctcctgctgtaagcctagctggaccttctcaaggctctcgaagcaagaggtcctcgaaaggtagcaaccggacagaggacaagcgacagaaaagcgggtacactccccaatacacccagtacacggagctgacagactcccaagaacgtatgtattttgccaccaggaaaaatacgcactaccggagactgcctcctctgtacagagatagctcccgaaagaatcccaacaaaagatgcgaatgccataacgacattggacacaacaccaatgaatgcaaaaaccttaaagatgagatcgaaaacttgattcgattgggtcatctctacgagtggattgagaatcagctgcctcatctcaacccggttcccgtagcgggacctttgccttagggaacgccaggggtgagccgagagcgtttgcaccagttgctcccctaggggaacctcagcagactcccggcctcccaccaagacccaatggaagagttgctatgatctctggagggccccatatcagagggactactcgaaaggaattgaagcgctacgccgagggcgtaaaacacagcgaggtttaggaagctactcagctcccagctcagaggccctgacttatggaccaacccattacgttcacagaagaagacgcaaagacggtgcgttttcctcaccatgaccccttggtcatagagactcccatcgcaaacaagattgtgggtagaatactaattgacaatgggagttctgtgaattaattatttaaagaagccttcatggcgataggcctcacggaccgggatctttcgccaagtggttcccaactcacgggattcaatgggacaacacttatctcaatgggaaaagtgaggttgccactaaccctgtgcccagacacaccccaaagcacttttaaatactgcacatttgtggtagtagactgcccgactccttaaaacacaatcctcggtcgaccggccctggtggactttggcgcggttacatcgatccggtacttgtgtctcaagttccctactcaggaagctagagtagggaccgtgaggggtgaccagggagaggctaggcaatgttataatgttgccgcccacctaccgatattgatggtctgtgaagttattgagcctgtaacgacagaagaagatgagctgaatccccgagtgggatccgaaaaaatcgtagaacctatggaagacgtcgaggaagt

SEQ ID NO: 252629 - DNA, 788 bp, Cannabis indica
ctgaaaatatatgttgtaatattttttaattattgttttatagcaatttttgtcatatttaaaacatattatttttatagaattttaaaaaatattgaataatttactgtgtcgaaaacaagtttgaatttttttaagtatgcttaataaattagaatattaggaactatatttttgaaaacaaatttgaaattttttaagaaaatctggtaaattatttagaatttttcaaaactactgtaactatatataacgaatattgttatataattttttttttgaaaaaatatatatttcaacatgtttttttaaacacagaaattgaaaaaaaaggttataattaacactccacttttacttattaatttcaaagatcagatttaatatttatagattttggatatgatacacactcttaaacatcactagtgttatttaacaattttctttttttctctttttaagaaagaaaaatcataatttcaatgacatacacataatatatatatatatatatatatattcatgttttgaatataaatactactcaattttataatatatatatttgttacaatgtgataaattgaattataattatttatttaaataattttatacatattattcaataaaaataaaaattaatggcagatttttcttaactttgtttttgttattagatctattatatatatatatatttggtctttgtatattacaataaaataattgtaaaaaaaaaaattagaatatgcatttgtctatctatttcaaataaaaaataa

SEQ ID NO: 252630 - DNA, 855 bp, Cannabis indica
ccgaaagaactacccgcttctctatctgatcttcatatcacttattgtccattgataagaccacgagtggagagggagacaggggaggactggccaattattgctcacatcccaaatatcattgtcaatggcgagaatatataggctgtgactgactgtgactgtggtctcttgttttaaatcaactattaattagtgtttaatagtagcatttggagtcatcagctaatttgatgcgtacatatttaatttaagcatgtgaagtttagttgatgaagcaggtagaacataactacatatatcatgattataatattagttggtgacattgaaaataaaggtttaattttgtattatttgagtgaaattacacgtgaatatgtaattagtctgttttagcagggtaatcaaattatatatgagtagtgatatggaagactgagttgaaggatggaagaagtcagttaccaccaaataaacacatgactatgatgagacttaacctctcttaatttgcttacttttagtttgactctgattgtgattgtgtataattgtaacaagaattactgaagttgttattgcagattgagtatattagtgtatacagaggttgagaagagcaagtatttagattgatgataaacagaggttgtgtaccatggtttgattaaggggtttttgagattgaaaagagcaagtgaagttactcaagtatttagattaatgttttaaagagaggattagaggtgcctaatttggttattgtaatttattcattggaacttaaaaaactatctacaacattgcaattttccaaaacatattttgtttttaaatattataataaattta

SEQ ID NO: 252631 - DNA, 906 bp, Cannabis indica
tgtaagatattttaaataactattaacgtatacgaatatgaaaaaatttgactaaaaaaattcttctaaatgccgaaacaaataaatggtgcatcagtgtgtattgtagaattacccaatactatttataattatatttctttccttattttttttcttcccataaaatgtaattgttatttttttaaaaaaaatttattattatttagttattttaattttataattatttaatgattattttttattaaaaatatgagtaatatgtgttctcttaatatattttgataggatttaacagaattgtggtgatgaaggtaacataaattggagtgtcaattatttttttcattatcttgatgcccaagaaattattcagccttatagtgttttagctcaggctccaagcagggtctcggatggtgcttctagatcttctttgcaggtttatattgatgctgccattgatgttcgtggtcaaaagcatagctatggcattgtggtggctgatgattctggctttgtgaaagctggtgtagctaagttcttttttttttttttttttttgaagaggtgtagctaagtcttgtattggaggtatccctgcaatcatagctgaagcaaaaagcaatttatcatgctattcaatgggttcagctgcttcatcttccagtgaatattttaaggacagattgtaaaactacagtggataaacttgattcttgtaatattttagtggatattaagaacttgttatctttcagccttaattttaaagttgagcatgtatatagggattctaatcaattagctcattgggttgcaaaattaggattaggactagatgatgagttagtttagaatggttctttgccatccttttaacttgttggctttgtattttct

SEQ ID NO: 252632 - DNA, 683 bp, Cannabis indica
gtatgttctttacgttttcttttacctctgaacaagcccagtcccgaatactatcaaagatgcgatggtatttatctaatgggggtattgatattggggaaaatagtgaacactagtgaatcttggagtacaaaccgattatcttactgaaaagaataccttgagattggcttctatggcagggaaggtaatcaccatacagaattcggatgtctcaaaaatggtgatgaacggattctacaaatttcaaatttggtgtctattaccaaacctgtttggcctggttatgtattaccttgtgggggttcaaaggtgtcgatagccttcaaatacgatgagctcccgttcatgtgcttccgatgtgggagaatcaggcatagtcaaaaggactgctcttcagagtttaaagaaattacaggggctgatggaaaacaagctaaggcgtatgggacatggctgaaagtggataatgaaattagggatggatttcatgagggagggaaagatcccaggaaggaaactcaaatagaggaaatggaaaaaagtagggggcaattcaaccgaaacaggggtctgagaacttctaattcatttgcactacttgtcaacaacaatggtaaggagatgattggtcgggaagagatccaagtggagaaggatcaagcaagaagtagcatggagga

SEQ ID NO: 252633 - DNA, 526 bp, Cannabis indica
attttctctaaaataatacatttatccctttaatattattaataataacattatatttaactaattaatataattttatctaataaaattaaatagttaaatactattaattatacaattcataattaacatcattaatcaaaacaacattcacaaattactattttgcccttaagaatttatttcccataaaaattaattctcactcgaaatttattcatcaaataaaatcttcccctgtatattgttgtatagaggtgactcagagaccatagacctatatttcgaagcttcaataaacccttgattattatcgatctagaataagctgatttattaattctattattactccattataaatatgaaattacactatttgacaatatagaattatatttacagaattcttacatgtagttcattgatataatcaatataagtagttcgccatctaattattagttcataattagagtttaattagagttggttaaaataccgtttacccttctaattatctctt

SEQ ID NO: 252634 - DNA, 1044 bp, Cannabis indica
  modified_base (1012)..(1012): a, c, t, g, unknown or other
ttgaaacacctgaacaaaatgctattgcagaaagaaagcaccaacatcttctaaacgtagctcgagctctctattttcaagccaaaattcctatacagttttggagtgattgtgttatgacagcggcttatctcatcaaccgcacacctacaccacaacttgcaaacaagtgtccttatgaaataatgttcaatgaacagcccaagtatgagaatttgaggaactttggttgccttgcctttgcaagcacccttactgctcataggaacaaattcaccccaagggctcgtacctgtgtctttatgggatatccacaaggtatcaaagggtataggctttatgatgttaacagcaaggagtttttcatctcaagaaatgtaatctttcatgaaaatatatacccttttcataagcttaacaccactagagatttagttgatcccttctctaacatggttttaccatctaaacatgtttttgacactattattaatgactttcctactgtatcttctactccttctagcactaatattactccccaggataatcactcacaccaggagacaagtatgcaagatgatcctcctctcaccgaagatgccaatacagatgacaactccacaaactccacagatgcaacacaacctgctattagacgcaccagcagaatatcaagacctcctccatagctccgtgattatgagtgcaattctgtgttgcaagacagaacttctactccacataatctacataaatttctatcttatgacaaattttctaagtctcacaaagcttttatttctgtcattacagccttatatgaaccagccacttacaaccaagcatctcaatacaaaatatggaaccaagcaatgaacaacgaattattggccttgctcaaaacaaaacttggacctatgtaaaattactagccaacaaaaaagctattggatgtcgatgggtaatataaaaattaaaactcaaacagcgatggatctatgaaagaacncaaagccagactcgttgctcaaggctacactc

SEQ ID NO: 252635 - DNA, 1366 bp, Cannabis indica
agtaataaatttcaattagattggaaaaaaaaataagaaacaacaaaatatgaggttggatggtttttcgcaagtaaattgatagttgaggggattttgccgcaaattactcattaataattattattgatttattcaccatcttaaaaagacatttcgatacacccttataagacatctattcagcattcataaaaaaaatttgtaacttttttttatgatcgtatatattgtaactatataagataactataaatttttaaatttttttaaatagttaacaataccgaaaataaaatttaaatattttgttataagcatgattgatttttatatatgcgtgaaaagtaattatttgaaccttattttgagcattgtatattaattagaactttttgaatgtgttcctaactatattaattataaaatagtcaatccaatctaatcaaatccacaaagtgtggatatccacacttgtgcggattggattgaaaaattcaaaatctgcacttgtgcatattaaatgtcgattgaaatgtaaaagtaaccaatccaatttaattcacacatatttatataaaatttaaaaattatatacaattactatttcagtgtaaaaaaaaaataataatgtaaaactttaatacatataatacaaatatattttaaaatttaatagattaaatgttaattatttgaacaattttttaataaatattaaataaattaatattaagaagtaactaatctaatatagtcgattctgtacttttgtagattagattagatttaaattattgtgcagattagataagatccaaaaatataaaaaccacacaatgcgaattaaatgcactatgaacaaaatattgcaaattgaattgaataaacacctctaaactaaaacaaaaaaaaacaatgaaaaaattaaattaaaaaatctcacataggagggaggtgtactacagattttctgttagcattttaaggatttgttataactaatattttggctaatttaattagcaattttttcccccgaacatgtactaaatcatgctctctgaatttttttgaccgttaaaaattccccctgaactattaaaattgttaaatttaaggacttatatctaatttcatttaattttactccctgaactttcatccatgttagaatttttttactaaaattagataaaagtccttaaatttaacaatcttaatatttcaggggaaatttttaacagccaaaaaagttcaaagggcattatttgatatataccaaaatttgggaagaaaaattactaattagccaatattttttaaaagaaaaacacataatttttgagtcactattcactatttc

SEQ ID NO: 252636 - DNA, 884 bp, Cannabis indica
ttgatgagacacatcctcgaatccatttttgccactgctccccaaaaccttttttcctcaagtccatgctaagaaactccactcaacacgatcatatgctttctcaaaattgatcttgagcacgaacccttttttaccacgactcctatagtcctcaactgcttcatttgccattagaaccgaatccaggatctgtcgcccttccatgaaagctgattgggtttcagaaatagtctctcccaagaccccgcgaagtctagtggcaagagtcttggcaatgattttatacacgcttgtgatgaggctgataggtctgaaatctttgaatttgcagctgtttaatcttttagggatcagacatataaaagtatcgttgatactgccttcaattcttccctctctatgaaaatcccgaagcacttccataagatcattcttgatcgtctcccaattattttggaagatcgccatgctgaagccgtctaaccccggacgtgtatttcctccacaactaaagacgatgtttctgacctcttcttcttcaaaaggacattctaattttctggctgaggattccataatctgttgtcactcaataccttcaaccccggtccccaatctcacctccgaagtatagagatttgagaaaaaagctattagctcctcaacaatttccttctcgttatcaataatagccccattatctctttcaattctcgagatggttttcctagcctttcttccattcaataaattatggaagaatcttgagtttgcatctccttcttttgcccatttgcatttagatttcagcgaaatacctctttcttcttcaaaatttaaccgctgccattcctcttttaatttccttctttcatcatgca

SEQ ID NO: 252637 - DNA, 966 bp, Cannabis indica
taattggtatataaaatatctaatgatctataagcgagtaatgtcatcgtcgttgtttctctaagtcttgggaggatgcgatgacgatctagcaccaggagtaggcgacttacatgagcaggtctacatggttcctcctcctggtgctcctcataagcaaagagtggtttgcaagctagaaaaggctttgtatggtcttaaacaggcccccaagcatagttttaaaagttctctactgttatttttgtttcttggttttgtgtcaagttattatgattcaactttatttgtaaagttcacatctgcaagtcatattcagctttctttctatgtcgatgatatgattattataggagatgattgacaaggaattagagtgttaaagtcagacttagcttctcaatttgagatgaaggatttgggttctctgtgctatttttttggtattaaaattgtccattctccaaaaggttatcttctttctcaatctaattacactactgacattattaagcgtgctcatcttactgatactagagttgtggacaatccctctaagttgaatgttcagtattctccttctgatggctctcctttggaagatcctactttgtatcgcaccatcgttggcaatttggtttatctcactattactcatccagacattgcatatgctgttcatattgttagtcagtttgttgcttctcctactactgttcactgggctgatgttcttcgcattctaaagtatcttcggggtgccatctttcagagcctactactaccttccacctctcctcttaagttgcgagcttattgtgatgttgatcatggtcgtgatcccacagtctgaaaatctacagcaattttctgtatcttcttaggagattttcttatttcttagaagagcaagatatagtttgttgtttctcaatcttctacggaagttcagtatcgtgccatggc

SEQ ID NO: 252638 - DNA, 1259 bp, Cannabis indica
ggatcaacatgggaggttgggttcacaaaaagtagtgatggaaatgtatggatagacaagggctggaaagcctttgtacaacattattctttaagccgtggaaacctcttagtgtttcggtatgaagggaactctctgttcaatgtaatcatattcaacaaaaccatggttgagatagattatccttttgatcctaaccataatgttgatactaaagatgatatttctgttgaagtatggggcaagtctccattaccatgttctcagccccacaagagaacgaaaacaagtgcatatggtaaatctgaagaaggtattgatcatcccagaactgattaagcaatgtagtgtttgtaatgtgttgaatctgttttcagtgaattttgatttgtcagataacagagcctgcggagaatttcctgtacctgaaaaatttataagaaatcagaagttgagtaggaaagaaaaggctgaagctttcaagagagcaaaagattttgaatctgaagacccttttttcatagttcccatgcacccatcatatgttggatccaaatccagttataatatggtaattaataagcttcttaatcacaactttatcttttcaaatatgtttctcacattgattttactcttgtgccaaggttataccatctttctttgcaaaagagtaccttttcaggattagtagtagttctcaagatatgatccttaaggttcaggatgggagaacttggtctgttaaatactatattagaccggatagagtaacttcgaaaaccaggatcgaacgtggttggaaggcgtttgtccaagacaatgacttgaaagtaggtgatgtttgtgcctttgttttgagaaagagcattggaatagtattatttgaagtggttatttttcatgaaaatggtgtagcaaattcccctatgttaccaataccaggtaaaacaaaaaccctgttctataatgctcctaaccaatatggctacagagttaatatatacaattgttgttttcagctgcatatatgagaagttcaactacaccatccaagccaaagataaccccttgtgtgaaaattgaaccttcttttaccaacaataataatgataaagaaagtatggtttcgcatgacttaattgcaaagaaagaaatagttgaaccttcaggtaattttaagtctatatgaatcaagaatataatgtcaaacattcccctagaaaacttagcttatatacatattttgcttataaatt

SEQ ID NO: 252639 - DNA, 952 bp, Cannabis indica
agtcacacgtagcaacctgctgcaaatcctctccagataacgtgatctgggtacgcggtgctatgaatcctcggggtacaggaattgtgattatatcacgtttatctttgaggttcaggaattcaacaaccatccattttagcgatttagggatcaagtccatcttctttttcgagaataattcatcttcccgtgcaccaccgccttgtggagaaagcatcggagctttccccttcgacgcatcacgtcttgaaggcggttgagcgagtggaccctaaacaaaacagaacataatatatcaaattttatccaaattctaccaaaatttcggcagcataacggctgtaattgaatgcccccaaaaattttaaacatgcctgtataacgacaaataacacatatataacagtagtttgttcatccatcccaccgcagcacatatattcacagaacctacttcactatggttgaatattgaagatattcaaactccactaatcattaataattaatttataagagaagttacctcagatgttacaattaagtgtttaggccaaggaaggaacatgtgtggtgcgtccctaacatatcagcacccttcaattgggattgggattttagcgtcctcttgcagcatttttgaaatcagagcccgggcatgtgaatcatcgtatggcgtgcagtgaacagtgatgtcaccctcatgctcgtacagatatggtcgggccacaatgttgtcgatgttgtcagagtagagatatacttgctgatcatctctcgcatggtcatcaaaattgtaccggagcgctggctcgttgagggaaataaactcctcagcatataattgaccctcatcctcaccagtgtatggttgtggaacatacgcctcaccagccacctctcgttcttcctcttgttcgacagtgtttctcttctgtttaagggattg

SEQ ID NO: 252640 - DNA, 697 bp, Cannabis indica
tatatgaatatttaaatggggatagaaacctatatacctggcgtcatcagcagaggtaaggaagtagctaccagcaccaccaccaatggatagcatgaccttgataccctggctttggcaagctttgatttcattacttaagaaagtgcaaccattactggtggggtcacagtggccagcaaggttgagcacagggctctggttattgccaaaggccactagaaaaccaatgttaactattccatagttgcctgtggaacaagtgtccgccaagctaccttcgttcccgtcctggccccagtagaccacaattgtaccagcataagagaagttgatcaaaacagagagcacaaggaatacaagtgctaatgaggttgacaacttgcatgccatggtgtaacaatattgtatactatattgttaataattgttgcttagttatggctgatataaatataataaacaagtttcatagacaaccccttttatagaaatattttttttaagaaattttctccaccccaattcagacgtttaagttgtaaatagtatataatgtaaatgcctattcatttccattaaaatcaaagtgaaaacatgatagagaaggaagaatgttaattattgtaatgtgaatcagtgtgataatcaagactaccgaaaatgtagggaagtaatttacacgcctctagtggaa

SEQ ID NO: 252641 - DNA, 539 bp, Cannabis indica
tggagggagaatgtcaactttggctatatagaaatagcagagaattaatgataacatgggaatagagaaggtgatagattcagagacgcccttgcatcacaaatttatgcatgtaattaattgtcctttgaattgtgggtatctcattagcttgttccttttaattattctttatttatttcttttgaaaaaattaataaatgcatgggcgttcaacaaaatttacaaaccgcccaatccgaataaatcgcctaaactaaactgaatgaaccgataaaaaatacaacccgaaataatacaatgaaaatgcaagccacccaatgaatatattgggtggtttacaaattattctaaaccgcccaattaacccgatttatatatttttatagaagtgtatatattatatcacataaattacatttattaagttaaactattttgtatttaaagtttagacattttagtgtttaacttaaaacttagactttatagttaataatttttattgttttgaatattgaagttaaagtttaaaatct

SEQ ID NO: 252642 - DNA, 941 bp, Cannabis indica
gtttgttaatggcaaacttcctcctccggacgaagatgatgaagatttcgagctatggaatcactgcaacagtattgttatctcatggattctccatgcaatttccaacgagatagctgaaagtgttatgtacatggatgatgccactcagatctggttgaatcttgaagaacgattcaatcagaagaatgctcctagggtttttgaagctattcgtacgaagcagtctcttgcacaaggatccaatagcgttacaagttactttactagactcaaatctctttgggatttgattcaagagtatcgaccacaaccgatttgcacctgtggagctatgaaaatgattcaaggttaccaggaagaagatagagtccttgagttcttggttggcttgaatgaatcttacgccagtactcaatctcagatcttgatgcaagatccattgccaaacatcaaaggcgtatgcctctgtcattcaagaagagagccaaaggtgtttgtctattgttccagctgaaaatgataagaacggatctagcaatggatcaggaacaagctccaactcaggtcagtttgctggaagtattgagcctcatcattctaaaatggtctgtactcattgtggcatcacaggccatactatggctaagtgttttcggattcacggatatcctcctggacataagttgcacgggaaatttcctaacaagaatgacaatcgcaataccagtaatagttcgggaaaaccttctgctgcaaactttacaaccagttctgaaagcagtgaaggaaataatggagacaatgttgttagagatcagaacctgattgctagcctaactgctgtgtagtgtcaaagacttatggcattgctatctcagagaacttcagaagcaacaagcagtgcacctgttgagtctcctatggtgtcacatttttca

SEQ ID NO: 252643 - DNA, 625 bp, Cannabis indica
gtcctttgagttgaagaagccgcgcacgagactgacttgtgaatctttgttccaaggctttccaaacagagtaagaacttgtgtaatcagcaacagaggacagaaccccttcggtcatggaggagcggagccaagaaagaagcagctgatcacgcttcttccattgttggtgctgaacatttggttcaccattgatgagatgttagggaggaggaacaccagtgaagagaatgtcatctaggtcgtgtccgatgacagtagggacgacctgcgatttccaagcaaggaaattcgttcgatctagtttgacagtgagagaggcagagagggagttcgagaagggattccagtttgttgaaggaagagcagcagtagccatgattgtacgatcggagtgaacgccggaggtgttttcagtggaggccattagagacagtcgtcaatggcatctgataccatgtagaaactttatcgaggcaaaaaccagaaaagaaagaaacagagcaaatgcagagtaagaaaataacattgccaagaaaagcttaacccaaaatggttagctttgatgtttatttatatgcctttacaattagttacaagctgaagaaaaaacaaactaatgcta

SEQ ID NO: 252644 - DNA, 592 bp, Cannabis indica
cctttgtgaaatgtggccccggtccatctcagaataatttttgtcagtagtcacaaggaattcgtactactaaaacgtgaatatgaagattggtttcgcgttaaattttattaaaatgcctgcctaattcaaaattgaaattattcatttttccatggtaaattttaaaaagcttttttccttactcttacactcgttagtgttcagttaaaatctcaccctacacatctcgaaaaaattgtgcaattttgtatggacaaaacaaagactattgtggatcacttttctgtttaacacgttgagagagaaagtagttttcatgcactaacaatcattttaataaaaataatgaaaatctcacattttcgatagtgatacccctttgtgaaatgtggccctaagccatcttggaattttttttgacactagtcacaataaattagtactactaagaagtgaatataaagatttgtttcgcgttaaagtagttaaaaaggcccccttattcaaaaattgaaaatattattcttttcagggtaaatttgaacaagttttttccttactcttaaactcattagtgttctcttaaaat

SEQ ID NO: 252645 - DNA, 1620 bp, Cannabis indica
gtctaaaacttgctcgggaactataggctgaacacattgagatttgtagtgactcacagctggtagtaaatcatgtgtctagggagtacgaagctctgggagaaaaatgatagcctatctaagaaaaatacatggcctgcttgcacaattcaagagctatgtcctcaagcgaattccgagagaataaaatacaactgctgatgcttagcccgacttgcaagcagtaatataactgataaggctaatctaatcccaattcaatttcttaaagaacccagcatcacttgtgcggaagaaattgagatgattgacatatatctgaactttatgacaccaatagcagcctacctcaacactaaggaactcccaagtaacagaaacgaagctcgaaagatgaggagaaaggctgcacgctacatcatcgtagaaggagtcatgtatagaggaggattctccatgccactacttagatttctttctgttcttcctagcaacagcttctgcataagtggtaggttcacctttttcaatttctgctgcaagtgcaaaggcaatgcagtcagcatatcctagcctttcaggtggtctcacatctctcctaactctatctctgacaagttggtaatcctgtagccttgttggcatttgttattgtccttgttcctcatctgaattatgctcaatgtgtgttccagatgtatccacctgatctgtaatttctacatcctccttgtctgtttgaatctcaacactttgtttcccatgattggtatctgtatttgtaggtttcattgccatttcatgctccttaaacaccacatccctattgatgatacatttcttgtatccatcttctaaacaccacagtttataacccttgacaccatcagagtatcccaaaaacaggcatttagagctctagactccaacttatcttgtctaatgtgagcaaaggctgtgcagccaaaaactttaagatgatcataccttggcacttcacgtatcaaaaacttttgaggagtttttaatttgagttcttttgatagacatttattgatgagatagcatgcagtttgcaaagcttctccccaaaatttcttatctaaaccaacaccccttagcatgcatctcaccctttcaagtaatgtcctattcattctctctacaatcccattctgttgtggtgtcttgattacagtcttatgtcttgcaatcccattgtcttggcaaaacattgtgaactgatatgagtaatactctagtccattatctattcttagcttcttaattttcctacctctctgattttctatcaactttttccagataaaaaaagttttgaatgcttcatccttagtcttgagtaaaaatacccaaactcttctggtgtagtcatcaataatgctcatgtaataactagcacctccaatggtcttagttcttgatgcaccacagagatgagagtgcacatagtctaacttgcccttggttgtgtgtaatcctggagtgaatttcactctgctgcatttaccatacacacacactcttcacataacctcaatttctttccaagtttgcctttgagaatgccatgtttctccaattcatagagacctctct

SEQ ID NO: 252646 - DNA, 652 bp, Cannabis indica
ttcaaaagcttcctttatatatatatatatatactagcataaagttacgtataatgtacgtatatatctagttatacactcagtttttcttttaggttgagtttagaattttgaatattagaataaaattacaaatttcgaaaaacttattaatttcaaggacttttagcaaaaaattttaaataagcagaattgaagtattgagtcttgctatatattcagttcatattccaaaataaagcaaaaaattatttataaaataaaataaatatcattaaataatgttaaaattaaaatcatgacatactttatgataatttggttcacaaattcattattacataatatatatacaattttgataatatatatttttttacagtcaaatctttgattaaaatcattcagcgtattagtttgaataatttagtttctttactcattagttttgccatttgtgtaattcttaataatatttagctgctatgcaacaatataaaagatatatactaatactttaattaacaatcaatgcaaagttaactcatgtggtccttttgactctgaaaataacatgaaataaagccttaagccatgttacatagttataccttgccaccaagcccaagttaagaagactatctccttaaaa

SEQ ID NO: 252647 - DNA, 596 bp, Cannabis indica
aaaaagtcttcatctcgctttcttacagctcattattatattcacattttattagttgccgaaaacctcggtcaacagcgatgactattgactagtggtattttagtcataactctctcgatattgctcagaatgagacgattcaagatgtttaaaaaagataaatgaacgacctagaatttttattcacaatatttttcctgaaagtacacgaactattgtcgaaaattatcttgaatctttaaatctaattttcgatcacaaacagagtgtgttgaacacccaaaacttagaatttttctccccatatatgaacgatctataacttttattcacaacatttttcctgaaaatacatgaattatgtcgaaaattaccttgaatctttaaatttaattttcgattacaaagagagtgtgttgaacattcaaaacttagaatttttcacctagtatatcttaggatgacaaattccattataaaatcatcatattcatctcatttaacatggtttttttttttttttttttttcaattcttcctctagagataaaaatgggaaacagataggatgtgtgacgtggtgtaagccaata

SEQ ID NO: 252648 - DNA, 1144 bp, Cannabis indica
atggccttcctttccataactcacatgctgactgagatgttccagtacaaagatgaactcgattgcaaatgtagcaggcagtattgactgcttctacccagaaactcttagacatgtccttggcttgcagcatcacccgagccatctcttgtagtgttttgtttttcctctcaaccactccattttgttgaggattttttagggcaaaaactcatgatgtattcccattccattatgaaaataagaaaatatagagttttcgaattccttcccatgatcattccttaatcgatacacttttccaattttggagtctttctcaatataaagtttcaatatcaaagttgagaacactccaaatgtttctgatttttcttttagaaattcaacccaagtgtaacgagaataatcatctaccacgaccattacatatctcttcccactcaaattttcattttgcatgagtcccatcaagtccacatgcattagttccaacactcaagaagttaaaagtatattgatttaaggatgaggtgccttggtctatttacctagctgacatggtccacaaatcctatccctggataatttcatctctggaattgcttttactacttgaagtttcattagtctttgtagttctttataattcaagtgccccggcctatagtgccacaagtcaggtttatccaagaaagtccgattgcacacaattgtattgcataaagcatagcattgatctccagtcatgttccctattaagactacatatccactagttgaaactagacactaagttttagaaaaacttacaaagaagtttttgtcacacaactgtccaatgctgatgagatttgccttaagccattttacgtatagaacatcagttagaggagccaaaccatttaggtatacatctccttctccaacaatctttcccttattttcatcaccaaatgctacagaaccctctttttcctttttatagttaaccaacaactttttgttcatagtcatgtgttgatcagaacatccactatcgaagcaccactgtccctccacaaaaacagacagagataccttagctaccaatccaacatttagttcaaggtcagattttgttctccattcccggtgagttttg

SEQ ID NO: 252649 - DNA, 571 bp, Cannabis indica
aatcatttaattaaataatcaaactaggaatattaaaatacggaatttcattttatgttgtattttgtatcgacccttcctaggttaggttccgaggatccccactccttacggtttcttttgtgaaaccttcactgtttttgattagacaggatccaatgttcttctcttctaacaaaccagatttaaatttttgtcaatgttcagagcatggtagatcacgtggggccctaatcccagtcatgtcagaatggttccacgctaatacatcataattatttttttgtccgtggattagttttttttctttagtggcaagaggtaaatttcttcctactttaataactttggtaggatcttcttcattgatgcaaacttcttctacctcttccatgggctcaattattatttctacccccactctaggacccaattcatcttcttcccaaattacccccagtgcttgccggatgggtgttctgggacgttcttgattttcttcttggatggtgaatattgatttgaccgagacattatagcattttcttgcacttgtctgatcacccttcac

SEQ ID NO: 252650 - DNA, 823 bp, Cannabis indica
ataacagactcaagcaacaacaaatgtaagttatgatcctaacagattaggaacagttactaacagaattaagactaactgaattaactaactccttggattgttgatattccttgacagttcccctcaaactcagtgtagctgtagaaacaacactgagtttggatcgaatactactgaacaaggagctagagatgggtttagttaagcagtcagcaaattgagcatgagaaggcacatgtttgacttgaatctgatgttgtaaaaccttgtctcgaacaaagtataaatccaactcaatatgctttgtgcgagcatgaagaattagattggctgtaagaagtactgtactttgattgtcacaccagatggaagggacaccaggagatgaaacatgtaattcctgaagtaatgattgcagccaagtaacttcagtgactacacttgccaagcttcgaaactcagcctcagtagaggactgactgatggttgtttgtttctgagatttccagtgcactaagttctttccaaaataaatgcaataccctgttgtggacctccgatcatcgggatccgaagcccaatcagcatcacaaaaggcttcaatggaaaaatcaggagctgtcttgatgagaaggccataatcaagagtacctgcaagatacctgagaatcctcttgactgccatccaatgtgacagaagtggttgatgcataaattgacatactttgttgacagagtatgcaatttcaggccttgtcacagttgcatattgaagagctccaacaatggatcgatagagagtggcatccttgactggttt

SEQ ID NO: 252651 - DNA, 579 bp, Cannabis indica
agtcactttgattgttatgtttcgtgtacggtttctaatgtgtttttccaccttacgtgtttttatggctctccggttgactctcttaaacctcacacttggaatattctgaatcggattggtaggagtaatcctcgggatccgtggcttatcattggggattttaatgcttttctcttttccatgataaataagggggaaatcctgacaggggcccctcctctgctttcagacaattcctcgattcttttaacctctccccgcttgacccgtctggcccactgctcacgtggaacaataatgtcgcatcctcaagaaacattcaagaacgattaggctggggtattgttaataactcttggaccgataacttccctgacgccgctcttactcatttgggttttttcggttctgatcaccgagcccttgagcttgtcacttccaatcctccgggcactcgttccaataataagagtaaacgttttcacttcgagaatgtttggcttaaggacccaaattggaatcatgttttcgaccagtcttggaatagccacccgacccagcatgagcccatcctta

SEQ ID NO: 252652 - DNA, 617 bp, Cannabis indica
gcttgctgctatcaacggcgatgaatctccgcctaggcgagataaagagcaagagagagagcgcgggagaatattgaggccgagtggggcaatcgtgagagggagaagggttctcgagggtttgtgtaaagaccgcgtaactttcatttggaaaatagcagataattagggattaattatgaaacttgtatattagttatgaattatcagtttacgaaaatttatttgaattcagaatgcattttatatgtcatatatggaattttatattttagcatgttttgtgccccgcaatattggaacgcggcgtttggctattagaatcacaccttagtatttttagtatagcggggcagtatagttagacattgggaatgtcaggaatagtcgagattttagaatagacaaaaatacccctaggtggttttatgacttttggcttaagtgggggcaaaattatctttttgcccttagctagttttgtcctttagtggactctatttgagattagtatgctgatgttaaattaatcataattacataaggtcaatattaactatccttttattttacaaaataagaattagacaaaaattcacattttctctctctctctc

SEQ ID NO: 252653 - DNA, 920 bp, Cannabis indica
atgttaatgcaactattgaagaacaagttgaagtgcctagtccagaagttgagattgtgggtgatgacaatgttcgattccaagaatttctcgcttgacatagaaaaattatagataaagacgctcacattgaacttcgaaatacattaattgagcacatatgggacgaatatactaattcttaaaattcgtataatttagttaatatctttaatgtgtgttattttatggaattaattaaatgtagtttattttgtaagagtaaaaatgaaatggaatatttattgcaaatgaagtaatattaatatttttactaatttaaatatttggctataataaattattattattcaataaatgatttattaattaattgatttttgaaatgtattaattgaacacttcaaagataaaatttaattaatatttttaaggtgttttaatttttagagtaaattaaataccattttttaagagtaaaaaaaataatgtaatgtttattgtaaattaaaaaatttaatatttactaatataatttatttgatttaacaaatatttaaaatattcttattatattaataaaataacagaataataaagaatgtaatatttggtgtaattttttggtcttgtggttggaattgaaaaaaaatatagtgttgaaatattagttttttggtgttgatttaacaccaaatttgagtttctccattggagatgccctaataattaatacttttattcattaaaaaaaaattagcacttttgccttttaaattttttatttacatttttttttctaaaatattcaagttacatatttatgtcccattttttagggtctacttttttaccattaataattagtatatttacctttgtaactttgtaacgataccaattttttttttttattattt

SEQ ID NO: 252654 - DNA, 1626 bp, Cannabis indica
gttatgtgtagtttggttggtctatcttatgttgctactttggttttttttcagtttttttttctgtattttctcaaatatttatcttggctcaacccttcctgagattcaaccaatctaataatcaactgggcaaagtggatttttttcacagttgttcaccgtttttatgtggattacattttgttcttgggatctcatttgcatttcacattttctctgcagatctcattgaattcaagaaaactcagtaaatggtaatagggattttttatcaattattctttagttaatttgaataatgtgttttgttaattgcttatttgaatttgcttgtacttggtgtttcagtctgcgcttttcaattttcattcatttttgacggtggtgctcttggtaatctgcacttgcactttcttgaagatgcagtttcctagccattctcgagcaaaaaactgggttagttcttaactcgttctttcgtaaaatgggacttcgtcattatctttgaatcatgttttcgcttttgggtatgattgcttgtgatttgtttggccagttcccaccacgtaatatggtgcttatggaaagtttcgataactttaggaaaatgcagttcagagatgagcagggtgttaacatttacatatttacatatttattgattacattgcaaggaattggtcacgttcatgcatattataaagaaaaaatttgtactaattgacaacataatgtccaattcaatatattgtgtattgttgccaaatttatgcttcgagttcgagaccagctctgagcaagacaattctccccatatataatatcgtagtttgcattaatcatgatatgtgtaaggtttggagtttggaatgtagggatgagatgtgtagtattgatttgtgttttcaccatgtaaaagtttatatgggctgagaatttctcctttgccattgtaatcacaataagtacattatatagggtactacggattattttatgttaggctcttctatatataatatataattttttttgtgattggggaaataggagatgaggaagcgatgattatatgcttaatttcattgtgaaaaaaagaagtgaataattaggcttgtgctttgtttgcttcattgaatatttgattcaattattcagagttagtttcctaatcctacctagttaactacaaatatgccgggagccgggggccctaggccaattatattttgcactacaagtgtttgcttgcattattagatcttggtttgacctagctaattttctgatttatgtctttatgtctttttggcaggtttcggggattcttttggaaggcagcaagaataggttggtaataaagtattttgtttcaaaattttcttcatattgcatatcacacctaatacttgactcaaaataatgcttggaagaacggggaagcttttgtgagtagaaagatagaaagctttattttctacgttataacttacaatcgcaaaatgctgtcaaataagcttggcctaacaaactctgtgtggaggctgcttgataaagttttgtagtttgaaagttggttccttttcggttttccaaatgaagtactaatagctgagattattt

SEQ ID NO: 252655 - DNA, 821 bp, Cannabis indica
aatgtaacattttgggtaggacatccaaagttgcacccctttaaaaataaaatggcccatgtttttgtttaattgagccatgaccacaacatggtcaaagccatatagactttggaatgactgggcccaagatggagtaagtaaatcaaattgaccaattgggttaattttactcttgtgggccaaagctgaagtaagtcttaagaaattgggcttgggccttacttggtagggtttgagtgcaaagaagctcctcccctccatcattttctttgccagccgaccctcacgtgcgactgctcctcgggaagttgtcttcaacctctgaatctccggcgaagcttccagcgtccacgcctccgtcttctccgactccggcgacgacttccgttgtggattcggctccgtcactgcccacaacttgatcggccttggcaccagcagcagttcgtctctcttctccggcgacgtcttcagctgctggtttttctccgtcgcttcaggacatggtggtgctgccgttcgttgccgaggtgcgagcgaaccccgtggagcaacttccagatctggtgccggggctaatatattcttctgctcagaaaactcctccagcagtagccacgcctcttccttcctcatctcggcgatgttctctgcaacttcgaatagctcggccgatgctacagacggcagagactcttcatttacgagctccgattgtatagctgcccgccgtttgtgttttctgaagctgtcgagtctagcaaaggcttgtttgtgttctaatattgctatttccatctttccatcaccttcaccct

SEQ ID NO: 252656 - DNA, 1007 bp, Cannabis indica
attacaatcacaacactgccattgccaatgactcagaattagaaattttaaaggtaaagaaaagtaagctaagctgataagagaagagaacacagtcacaaacagaagctgcgaatcgatttgtaccttaattccatatatgattgttcttctatttatttagtactgcaaccaattaatcaatctgaatttccaattccaaaaaagtatctgaagcaaccaaagtgattgaagttattgttgaatataaaggatgaaactctgaatgaaatcttaattttaaaatataaattgattgtgtcaaacaaacatattaatatcatctcacaaccattaaatattctaccaaaatatataactagataataatttacagcagaaatttgcaaaatataaaatagaaaatataaaagaagaagaagaggagtcaaactatcatacctggattctcagtctttaaactcgtggtcttagcaatggacaatcccaaatgtgaagattagaaagagaagtgggtagttctcttggcaagcattggaggttttcaaaagaataattttccaactcctcaagggaggtgaggtgctgaaaggcctcctcgtctaagtgcgtcaagttgggacaattcacaaattcaatcttctttaaagtgatcaaagggggttgaggtcttgggagtaatactggtattagttcctcacaatttcttattttaagctctgtcaatgatggagaataatctcctaacaatgtcactttgagtttatgacaatactcaaaatgaagagtcttaagtcgaggaaaaacttcaccttccataaatgaccactcttcccgctcatccaaatgctcaaatgtcaaagtctgaataagtgctttgttgggtattgcaacagaagaaaaagaacaataaaactctgaatctattctcaccacacccttcaatccactaaaactctggaagcttatgatttttcacacattccaaaccaagatttttattgtct

SEQ ID NO: 252657 - DNA, 532 bp, Cannabis indica
ataagtgtagattaaaatgtggtaatatatattattatgtgaataatatatattaagtgtttggtaaataaattgacctaatttgaatgtccagtcctatcaaaggtagtgtcgtactgactagtgatcccaaaataagaactattacagctcaattggacgtgatgttcagggtaccaattatcaaacctataagagataaggtatgcacagttcctgatacaaaaattatatcgactatctttaaattgaactaaggctgttcgctcagctctaagaacagttggggaccattcacaaacactaaagttattacctcaggaggcattatctttaacttcctgaggggtcacattcttcaaatagtggctgcgagccacatatctctatcctcatcattggccagaactggaacttgttgctagtttggaaattttggggttttaaaatcattcgtagacttttttttgccaagaagggggtaaaccttcaagttgtcctcgtgtaataacaagaagtcagttgctcacaa

SEQ ID NO: 252658 - DNA, 797 bp, Cannabis indica
ctagtttgatcacatgggtaagtttagaaccttattatttagtgggaaatattttagagaaaataaattaccacgattagttaaggttatggaatttgaccattttacccctagactttattttaataataggcaacaagggtactttagtcctttgttatggggggggttaggtggctggattacaaggtggcagctcgtcacttattcattttcagccaaaatgaagtaaccttctcattttagaaaaataagaaaaattgaagaaaataccaagaaattcagaaaagctctcttcccttcctctctcttcgaaccagcccagaacaagggggtttttgctgatccttggggtgttttcagcaaggatttagagggaatcaagccaaggtaaaccctagatactttctatctttgttttctttagattttaattggtttcaagttatgattttctgaattgatggctgttaaggttagaaatgtttagggttcaaattttaaggttcatttaagttagtttaagcttcttgctagttgggtttaagggaagggggttggatttatgcaaattggagttttgaactcaaagctttggtctttaatggcaagttgagtttcattgggttttttctgttgatttttctggttggtaatatgttgtgtatacatttttttaggtactctggaaagtttggttgaaattggagaagttttgagcaaattggtgaatttttggggaggttggtataaaaaccagtttaccagttttaccagtacctgtcaaaccggtaaac

SEQ ID NO: 252659 - DNA, 790 bp, Cannabis indica
aaatgacaaaagttagtatatcatgtaaatttcccgtttttaaatccgtaacgacaagccccctaccataacacatcttataataataataatagggaaatttaattttttataattatatttggataaaaaaatttccctaaactcataataactaacatttgtaagatatcataatttttatgatatctttaaattaccttccatttacatcactctcatctctcttcttctctttttcactcttactgccgagctcccctactctctcatcggaccacacatcggacactatcggaccccatattggatcccggccccatcggacctacgtgtcctacctcgcaaactcatcacattttcattcgatcccatcagacttacatcgagtcccatcgggcctcatcggaccttgctcaaatcacagatttgagattctaaaaacacgaactcacttttgacattgtgtctgatttggttgggggtacgctgtgggtcgatggggcacactgtgggtcggtgggggagcatcgtgggttggtgggagtgcgccgtgaatcagtgggggtctatggggtggttcgccaggagttgggatgttgaagggcctattgaacgagagagaacatgggtgtagagagagaagtgggatttcaaaaatgaaaggagtattttgggatttaatgtaaagtgaacctattttttaaattttctaaatgataatccttactattcaaaaagaaagtaataataatggattgttaacagaaaaagaatctaatatttgatc

SEQ ID NO: 252660 - DNA, 557 bp, Cannabis indica
ctttaatatgtttctgactgaatattttattcatagttaagtggtcttagttctctgtacagctacaagccacaacctcatatatgaataagaaatttttcgatatttaatataaattatttataataaatattaataatttaacaatcaagcatatataaaaatgttcaactctttattaataataaaaaatgtctttataggcttttcaaggcataaacccaacaatctcccatttgctctaaaagcaaactgggtatctcccttagtttatatgacccataaaagattttacttgtagcgactttgtgaatggatttgctaggttatgttctgacacaatctccaagatcgtcacatcacctccctctactatatcttttagtagatgatactttctcttaatatgtttgcctctcttgtggctccttggagttagccaccacgccactatttgtcacaataaagcactagtggttttttttacttttggaactacttccagagcaatgtagaatttcttcaaccaaactgatgttgggttttgtaccctaaat

SEQ ID NO: 252661 - DNA, 576 bp, Cannabis indica
aggaatagtgatagaatcaagagaagaaataaaagagcaagaagaagaggagagatgattataagaaacaaaagaagaaataggaaaagtacattggcatttacctttatgtagtctaatgggaaaatcatctttgatttccgaatctgatgacaaatatgcacgtacaggacatgaaactggaggtggaggagggggtgcctggtgtacactataggaggccgagggagtcgtggaggtggtggaggtgtatacattgtgggaggtatggccaaggcaggtgaaggaacaagagaatcgtcagaacatgtatcaagcacataggatgtgacagaatataccaataaatcatcatcctccccctaacgagtaggagtagctgaagataaaaaataaagtgtattctctacaaaggaatcatcaataaaaccaagatatttgttgagatcaatacaataacacctataccctttctcaagacgagaataaccgagaaagacacaccttaaggtctactttggtgatagatggacgggtatcgcgagcaaaacaaacactgccaaatacccgaggagc

SEQ ID NO: 252662 - DNA, 1650 bp, Cannabis indica
atctgttggaggacagatgcatgaagtctaggctgatggctcggatggctgacacgcgggtgtgttattgatttgcatatgctatgctaataatttgcaagttagtcgagcatggcctaggcggttggggatgtcaaccgcaacctattgttgggtcatatagtaggctttgtacgcttgagtcatcagagtgtgatgtccagcgtgaacattgtgtatttcttgataatgtgtgaataacaaggttgggaaaggggtttcttatatgttgtgtggtcttatgcttgtgtgcatttacttgataacgagagtgtgttgttgagtgacgcttgccaaaactaaactgtgagtgtgtgtgcatactaacaggttgttgggttggctgactagattggggtgaatctaggccatcgcagggaaaatttgagtgtgaaaaattagccttgtgacaactggtaggtaaatcaattaccgcttgcctccttaattcagcctatgcccgtggttgtaaacccgataagaagttgaacatcttgtcctcctcagacatgttctttatatcaagcaacaaagaactgtattctttcacatactctcgcaccgaaccagtgtgcttgagtttctttagagactcacaagcgatccatgtcatgttgcatggaaggaactgatctttcaactccttcttcaacacatcccaagtctcaatattaggcctcctcgaagtgtatcctcttccatccgagtgcgccaccatcgtttggcatcaccctgaagatacatgcttgtgatggtcactctatctgcgtatggaattctcgctgccttgaagtactgctcgacatcccaaaggaaatcctccaaccccttcgagtttctactgccattaaaggctttcggtttagggactttcttttttgaggaatgggctgaaagatgactcgattccttgggacagatttgctatcgcccttttaattactgctacatccgcatcgagagtcatgaatctctctttcacaaaattagacaaattcgatagtttgtctaacgcccccttcatcttctcatcgaattccctctgcatatccatcatggccctgccataacccgcaacttgatctgatgattccttcaaaaagtctcgagccagcgcctcaagggactccagttgttcaaagtgttgttcaccaagaacaaacaaactgacatcatcatcttcgttgggagaaccaaccaactctttgagtctttcaacccaagtagatagttcagcattcgtcaccatgatttctgctgttttcccaacacgattcccgttgtgataccagttgtcacaaggctaatttctcacactcaacttttccgtgcgatggcctagatacaccctaatctagtcacccaacccaacaacctgttagtatgcacacacactcacggtttagtttgcccagcgtcactcaaaaacacactcttgttatcaagtaaatgcacacaagcataagaacacactgttaggctttatgccctaaataaaactctatttcaatgtaatctctatcatttaaatatcaataaagagacagaagtattttcatcacttatttaatgtgtcatttggtgcatgttgtcatttatatgtttatttga

SEQ ID NO: 252663 - DNA, 589 bp, Cannabis indica
atattctgtgtactctcgatcggaagcagaacatgagcagcatcttcgatggtgttagcaacggcttagagatcataaactctatgacaaattgaaaagtgtgagtttttgtgtcacagatgtcttttctgggacacattgtcgcaaaagaagggattatagtagacccagggaagattgaagtagtgaagaaatggcctagaccgaaaatggttactgaggtacgaagtttcctcagtttagcgggctactatcaacgattcgtagaaggattctccaagattgcaatgtcattgtatgagttaaccataaagaatcagcagtttgtgtggtcagataaatgtgagaaaagcttccaagagttgaaacaatggttgattacaactccagttttaacccttccatctgatcaagagaagtttgtgatgtattgtattcatccagacaaggtttgggctatgtgttaatgcaagtagacaaggtcatagcctatgcctcatggcaactgaaagattacgagcagcgctatcaaacacatgacttggaacatgcagcagtggtgtttcccttgaagatttggcgacactac

SEQ ID NO: 252664 - DNA, 2127 bp, Cannabis indica
ccttttccatattagttgcatgcgccatagatttgggaagtgaaagaataactttcaatttgttcgaatgaatgccaaagtagaagaaaaataaatgtaacaccattaaaattcttctagtgtcgagcagcaagttaaatatgattagttgataatgctaaaatgtgtgtgaaatgcttgactgcaccatagcacaggcattacctagctacatttttttttcttaaaaccatggccatctgtaaggaaccatttttcaatttcttttgatgatagttgttctttcccattcatattatagattaggtgatgatctctgttatccgaatctctttttcatctatagataaaagatgtattgcacattaacaaatatctgtgtccttgtttgtgttggttattagattatttggcttgtagattctgcttaccaccactggtgttgctcgcaatatttgcttagcttgtagactagacattttaaagttcattcagttgtactggggatatgttactgttagttgttttttttttggattttatgatacttcataattgtagaatcttgacgtgttttcgatgatattttcaacatcttcaacacaataacaaagtaatgtggtatatacataacttcgtgtcttttaaaccataagcttttaggactaactgatataagggctcacatttttggccaagataccttatatcttggttgaattgttttgccacataagcacaagttaagtttgtttataatttgaatatgacagtatgcacatatcattacttgagaaactccctattctctcaacaaatccaaaaaacaaaaggtttgaaaaatttcacctataaactgcaacctagaattttatgttaggcctgctgtatgcctaacatattccagtcgtaatagggccaaccatcaaaaataagagagagactagccgggttttatttactgacttatattcttagttaattcttgtcatcatagtcaacaaagatggtcagcaacttactgccctagtcgattagtgagatgtctgaatattccttgtgaagatctacaagtgtctcgaagacttgaaaattctgtaagcagttttgatatcagtaaagattcgatcctagcttttctttgaatactcaggtatatcattttatccattcccaacctaaccacttaactaccgtcactctacagttacaaagtcttttcgggaaaaaaaaaaaaattgaccactgggacaaagcaaatttacaatggatctcagaatcctttttgtatctcattgcctttttacaattcaattagtttctcaactcctaggttatagtttcacctattatattccgggaatctttgctaatgaaatgttacaaacatattctctgtcaaaagcctaaaaattgatctctcttttacacagagtgtgacaatgtcaaattcatcatattggtggttatttagtgaaagaataatctctattcttttcagttgactgtggatttgtttgagaaattactttgaagcagagggaattttttaacatttttcatttctttagctttttaaagctctaatgttttgaatttaatcttacaatattgtcatgctaatttaggcattggaaaaaaaaaagagagagagggagaaagaatgatcacctggggcagcataaggggttctcctttaattgtagtttcgatatattgattttgaatctatgttctttcttgtataggggatgtttacctttaccatatatattttgctgggattcattttgctcaaattgttgagttatatctactttgagtgcctgcgcctgtgtgtttttatcctgataactttccattgaagatctttgtggtattaattggagttattttcacaaatactttttactttgaatatctctgctatattcaagtatttgcataatcttaaagagttttgtttgttttctgtgttgtacaggagaagcaccgagaaaaaaagcataagaaggataaaaaggacaaagagaagagagaaggtaaggataaaaaagagaaggatagaagtgatggaaagcatcgggataagaaagacaaaaaggaaaaacacaaagacaaagacaa

SEQ ID NO: 252665 - DNA, 838 bp, Cannabis indica
attaatcccgaaaatatattttaagtcccgaacccgattcagcctaaaatactcgattgtgactatactgcactgacttattagaaaacacatgtagatagacaaaataaacatactatgtaataatataatccataagcacgatatatcataaaattatgattttacccttctcggatttaaattacaaaaatactactaacacaccaacgaggtcttaaaatacaacatatccatatagtttcacatattaaattatataataatataattcatcaataaaacataattaacatatttagggttcctaatccgatctactaacccgaaggtattacaatttcgaaactatttcaatgctctatcaagctattgacaccgaatttcacctctgagggagttatgaaaataagcatcaagttaccctgagcaagtcccgccatgctccaaaaaaatgaatatcaccatcagaagctaatttttaccattagatcattatctacggccaaaaacatctaatttgtattttctcctattttagtgggccttcttcacctataaaagaagagctttcttagctcatttgacacattcaaaaaactacccagaaggtcagagcttctctctttagtttcccttataaaattagagtttctgacacttggcctttttctgtaataccatctcgttagaaataaaaactcaaagtagacgtagctccattactgtcgcgatacagggagtgaactatgaatttatgtatttctcttataattacttaacaaattttttattctcgccaactccttgtcggatgattttctttaacaagttgggt

SEQ ID NO: 252666 - DNA, 746 bp, Cannabis indica
aaaagcatctatggcctcaaacaagcctctcgacaatggtatgccaaacttagttctactttggtaagtgaaggattcaaacaatcctcttccgatcactctctttttattagatcttctaacaacgattttcttgttgttttaatttacattgatgacatcttaattgctagcaataattctagtgatgctgaattattcaaaagacagcttgactctaaatttaaactcaaagatcttggtcctttgcggttctttcttggactggaggttgggcgatccaccaatggtatttcggtctcccaaagaccattcattttacaacttttaaatgatacaggttacattggtgcaaaaccagtctccaccccaatggaaccaaacacacagcttagcaaggacataggggagttactttctaaacctaccacctatagaagtttgattggaaaactcatttacttaacaataactagacctgatatttcttttgctgttaataggttaagttaattcctttctgccccacggcaacctcatgtccatgccgctcaacacatcctccaaaatatttgaagggctccccgggccaaggattgttttttccactccactccttctacacaactcaaggcttatatcgagagtaacttgtctgataatgaggtacaacttaaatttttttttctgatgctgactggggtgcttgccccgatactagacgttctatcacaggttattgcatc

SEQ ID NO: 252667 - DNA, 356 bp, Cannabis indica
aaaagtacaaggaatttacaaaagagatatttaagagaagtataagaagaaggggaaatgtgtgcgttggcgcagtctccaatccaacgtcctagaataatgaacatacccatcaccttcatgagagataatgctaagaatgtacgattcccccataatgatcccttggtaatagaagctcaaattgccaataaaatagtatcccgagtcctagtgtataatggaagctcagtaaatattctcttcaagtttacgttctaggcgattggactcacgaaacctgatctaactacaaagtttcaacagagatgccttaatgtctatgggaaaaatccaactgtcaatcaccatcaaag

SEQ ID NO: 252668 - DNA, 680 bp, Cannabis indica
ttgacgagaggcataggctatgacgctgttaagattgttggatttgaagacttttgtcaaattttacgtaaagaaagtctgacgttgataaaaatttagagggcacaattgggtacaagttaaaattggggcacgattttgtaaatatcaaaattcgaatggcacgatttagaatatgggcaattgtcatattagcaaaattgaatggaattagacaaaagtttttaaattcaacaatctcaatagttcacagaaaattttcaacgacatgaaaagttcaaaaagcataatttggtacatgtcaaagttcaaagaacaaaaatcttaattaacctatttattaatagtagtttcaccatcaaaagagttagagcatctctaataataaaaatacaaataactgatggaaatgcaaatataactcactttgttaaaaatctaatccagtaatctactaaattatggcaaatatatcacataacaaaaaataatcaaaatttagataacaataaatgttattcttttatatttattattatctcatttttaatattttattattatattttaaataacatgctcatttacttgtattattattaaatttatattttttttattattattattttatatttttttaataaattaatgagtattagatgacaacaatagcaaaa

SEQ ID NO: 252669 - DNA, 621 bp, Cannabis indica
aagttctagttttaagtttaagttcctaaaaatattttagcgagacacttaccagtttgacgttaatgtgacttagggcctctgatcgtcgagcaattttttcactcaggttgcacgcatgattacataatttaggtaagattagtataacggatatacatatgtacatgtttcaaaaagtacgaaccaatgctactaacactactacgcttagagtactgagtgcatgtggtattatggttggttatgctttcagcgaatgcgaacttgtgctaccaacactagtacttttagaacactgagtgcatgtagtattattgttagttttacttatagtataaattgatgctaccaacactaatattttagagtactgaatgcatgtgatattatggtcactcgtactatagtaaagaaagttcgagactcatacgcgttggacgcatgttttagatttggtaattatctttgtgcaccttgttgcaagtaaagttatatgtttatgttttatgtttttcttactcagtctatcgactcacatgtacattttctttgtgtaggtaaaggcaaggaaaaagctgaacatcactttggaacgtagtgaagattgtacatatctag

SEQ ID NO: 252670 - DNA, 775 bp, Cannabis indica
atactttgtagtgtttataattttcgtaacagtcttgctcctccctcaaggagcctttactcccacatcaaggtagctttgctcctcgctcaaggaggctttgtttcctctatgaacaaagtcttgacgccaatggcttaggcataaagtcttaacgccaatgtcttaggcacaaagtcctaatgccaatggcttatgcactttggaaatagtcaatgcctccaggcttggcgtaattctctccaagtcttaatgccaatggcttaggcaccttgagaatagctaatgcctgggcttggcataattctctctaagtcctaatgtcaatggcttaggcacaaagtcctaatgccaatagcttaagcacaaagtcctaatgtcaatggcgtaggcatcttgagaatagccaacgcctccaggcttggcgcaattatctccaagtcctaatgccaatggcttaggcaccttgagaatagccaacgcctccaagcttggcgcaattctttccaagtcctaatgccaccaatgacttaggtacaaagtcctaatgccaatggcttaagtacaaagtcgtaataccaatgtcttaggcaccttaagaatagtcaatgcctctaggcttgacgcaaatctctccaagtcctaatgccaatggtttaggcaccttgagaatagccaatgtctatgtgcttggtgcaattctctgcaagtcctaatggcaatgccttaggcaccttgagaatagtcaacgcctccgggcttgatgcaattctct

SEQ ID NO: 252671 - DNA, 653 bp, Cannabis indica
gggaagaaggtcatgattgacccagctgtcaaggcccgcgattatgtgactctgcagggtaagttcgtgagcgacgagttcgtgtcgaaggtggaagcgatccctaccgaggaaatgatgtcgctaggggcagagctagccacgcaattcatgaccgtgttttcgagggcatttgtcacaggttctaaagaagttgatcttctaaagaaacaggtcatctagcttcaggaaagcaacaagaagctgaagcaagacgtgatcgccaaggataacgaactcgagaacctccggaagtccgaagagcaggtggaacttggagccaaactttctcaaactaaggtcgaggagttgtctcgcgatttggaggctgagaaggaaaatggaaagaagaagtacgaccaagtagtctccgactacatatacacgactctatccaaggtgccagactttgacttctcaatccttggagcagaggcgactgagatggcagaagcttttcgtgctatgtcgcctactcaaacccaagggtgtgggggaaatctttttcctgaggacgctgaggctgcgaatactgaagaggtcgctgatgaggctgctagcaaggtcacagatgggtctactactccaattgctccaaatacttaacttattta

SEQ ID NO: 252672 - DNA, 655 bp, Cannabis indica
ccctatgatgacccctttcttgagcgaaggggtaaaattatacagtattatcgatagatagtgatatttcataatagttattaaattaaattatatgaggctcgatactttaattgtactattaacaatatgatactttaaatagtactagctagacactactaatgttttttaatatttctcttttaaaatatgtttgattagtagcgcaatttttttttatgatacgaaagaaactatctttcattgatttgaggaatgagaaatggatgtagagggagttcattggaaagtgtggttgtaactttgagaaatttgttctttgagataaattattaacgtgataggaaagtctatataaaacatgtttatttgtgctgcagaggttttctcgagacttttggaagaggctcttgggcagggcaacatccatggaataaaactttgtaggggtgatccgattattacccatcttttctttgcagatgaccttatcctagtgggtagggccaatctaaatgaagctaattgtgtctggaattgcatggagaggtgttggtcttggtctggccagaaagtgaataaactaacaacttctatcttcttcagtaaaaataccccttttggtatgaggagagtgttggaaattatttta

SEQ ID NO: 252673 - DNA, 1200 bp, Cannabis indica
gatatttaaaagtacaatataataatttcaaaaataaatactctttattctttcaccactacattatttctaccaaacaatttaaaatgattattactttactcttattttctcttattctacatctttcattaactctacattccttctaccaaacataacctaagaccaaaattaattagcaaagagatgagagaccaaacctaacaaacaaattcaacaaaataaccttattaattaataggaggttgtagaattggactgaaaaaagattaataaatttatttgtttattattattgttattgtaaaatagaatgcattaaacatgttcatatagaataaaagcgtggagagtaggggttgaaacttctgttaagaatatttatttaagaaatagaatagaaaatgtcaagtctctctttagttcacgaatcttacacatgaaaaaagaacacttttttggtagaagtgtatataatttgtttataactttagcatttggaatgtgactaaaggggtatcacatagatataaggttatcaaaaaaaaaaactttagcatttggaatgtgactaaaggggtttcaacttttgtggaagaggtagaatacacaccattggttacctcatctaaccatcacactcacaccccaacgtgttgttaccatttgattgaattgttgctgtgacgtttattttttaaagaaaatttattcaataaaataatttttgaaaattatataatataaagtaaacgctattttcgacaatgtattttataaaaattataaatttgactctctctgttttaataaataacaattcaaattctatgttttttaaaataatacaaaataagtcctgaatttaattttttgttaaattaaaacttgataaaaacatgacatagatgtgttatgacaaggctagttacatttttttttgcatttgttcgtggtagaagctcatttcaaactaattatttaaaaaaaatgataaaaaaagataaaactgatgaaaatggtgaatatgcctagaagacttctcaagagaagcatttgaaaatggccgttgacatatgtcaacttaggtgctgggtcccagttttgtctctcaggtagctctgtttatttcgtaaaaacacccatatctcaattgttggtgaaaataaagaatatgcccggaagactttgtctgaa

SEQ ID NO: 252674 - DNA, 1305 bp, Cannabis indica
cccagacttggcaagtcaatcgaacttttttttgtgtaatctgtcactgacatggcttacctcctgaacaaatttagtgaaactctttcctttttaagcgttgcaaacaacctcatattatacttagcattaataatcccaaaattcttttcaagtcagtgtagtgacatcccgagtgagggataccatctcccaccacacgagtgcgtcttcttggaactaaaaggtagcacaagtcacttggtcattcccgacaacccccataaaattcagaattctctcaattactgtgagccaccattcagctttcataacgtctggacctcctagaaaaacttgaggcgcctacttccaaaatctttcatacaaaggttccatacggttgccaacaacaagttgttatgcttgcaccgttggaaacaaagcagcatgcatttgtggtggaggcactgcagaaggaccctgctgtctcagcctctaaatgtcttcgtcttgttggtggattcaggcttttatttctgcaaacctttgctcccaatcctgaggagcttatggtggattttcatgaccacctccttgaaatctttcaaggcctctaccgcatccacagggattcgaaggattttgacctccctgattgcctcctgtctcaaccatattaccacgacttctcgtgtttctttgggcattcatattataggactaaggcctggaaacccataagtcaagtaggtcagacaacgatcatatatgctgtaaataccgtacttatgggttttaaggcaatgcattcaaataaataatcataaaactattatgcttcctaacatgctttactaatcacaaaacttactaaataagtaaggacttactgaacagtaagtcgagcttatctcttatgatgattgtacatgtcttgacggtcttcggtaaacaacctggtggttccaaaattgtaatgccctaataaataggcacgctagtgatcttttaactattgtgcacttctttgctcagaatgttttctcaaaattcatgacaaattaaaacttttgaataacattaaactttaataactataaatatataattatacaaaaaggtcgaaatctcgcttttgaacttgtttacatgttcaaaataaactttacaactttatcgcacagtgactacaaaatatgcctaagttatcccgagaccgaactctccagatcttaccatcttgacatgtacaatcatcttcgagctccgaactcattgctgctcaacttttgccttttctttacctacacatgcaagtaataa

SEQ ID NO: 252675 - DNA, 751 bp, Cannabis indica
gagatatctagctggtacttctcacattggtcgtcacattccaagctcttcaagacttgatcttcagggtttttacagacgctgattgggcagggtgttatgacgacagaaaatccacttcaggttattgcatattctttggaggcaatttggttagttggtgctccaaaaagcaaactgttgtggctcggtctagttacagaatccgagtatcgtgccttagctttggccacttcagaactgatttggcttgaatctcttctcactgaactctccatcaaactacctcaatgccccattctctggtgtgacaacctaggggcaggatctcttgcatccaatcccgtgttccacgctcgcacaaaacatatagaagttgacttacattttgtccgagacagagttttggctcaacaattggatgtaagatatgttgaaaccgaacaacaaattgcggacttgttcacaaaacctctcccaacaaccacatttcattatctatttgacaagttaacacttggccaaccaagtgtaacttgagggggggatgttggaatataacaatcagttagttactatgttagcagttagtttcgattaagtcagttagaggtagttaggattaagttagttgtaatcttgattcaatgtattttactgaaaccaatataaataaaggcacactcaatctgttttccagattgagctttcattttccattcaatccacttccatcttttctcttctgttt

SEQ ID NO: 252676 - DNA, 1034 bp, Cannabis indica
tgatgactctcaagcaatccgactcaatcaccacattgtccatccattagttttgatccaactcaaagcttcctttattccaatagcctcaaccacatgtggcttcaaagtacccactttgctaaatcttttggcttgtatagctaaaccagtagaagaccttgccaccaaaccaattccaaagcgcctttcatttgtgaaaattgcaccatcaacattaacttttattgtaagaaaattgggaggggtccaatgctccaagtcaccatcaaccgaaccattatcttcatgagtaggttggttatttttttgggcattataccattcaataaagttgagtttagctaatgtgacaacatcactaacagtcggcatcgtggaattccaaaccagctcgtttctatgcttccaaacggaccagcataccatcgaagcttctagtctctcagccatcgtccaattgtccaagccctcttcgaaccacgcagtgaaagtcattgctgccccagtaacagcaggcacccgagataaggcccagcagtcctgagcaaaccgacaacgcaccagaacatgcaaagatgtttccggagcagcattacaaaaggggcagctggtgttaataggtacatgtcgaactctaagctgaaaacgagtgggtagacaattagttgagactcgccataagaaattaagaactttcggaggcaatttcaattgccaaagttgtttccaaaagccagaatttaccgccatttcgttattgcctttgatttcttgctgaagcttataggcgctcttgacggtgaagagaccattatcttctttcgtccaataccacgtatcgctgctgttaccattatagtaaatgatcttaaaattataggactatactagtaaatgtctcaatttcaaaacttgtagcaaaataactatttttttagattatttattatttatgttgtcttttaccacataaaaaattaatattttttaaggtttatttatttaatattatcatttattatttattaatt

SEQ ID NO: 252677 - DNA, 627 bp, Cannabis indica
tgatcgttcacattagatatatcgctacttctcgtatccctcgactgcgcgcgctcaggtaaaagggggtttacgacctccatgactgtcttgaggccaccttgtagagtcttcttcagaaatgtctttcgtgtgaataccatgacagtagcagtgctttacgtctttcttcagttcttaatgaaagtaccaaaatgtttaccatattttttgaaaactatatatttaggagctaatgaaataataacttagaaaagtaaagagatgatgaatttttacgtggttgaggtgttaataaaccttaatccacgagtcagtctattatcctctaagggcgatatagatttgcttacagtatttaagtaggaaaccctatctatctactttaacattctcttgaagaagaagaagaccaaacacaatatttgtagatttttagctattgaggttttgatgcccgcttcgtatgagaagttaggggtatttataggctatgtggcaggtatggataggcacatgacccgcctaaggtatctgatctaatcccactaatggggtaaattacatgcaatgttagagctaactgaaggatctgtggagaacattatgtatgtgcgtgtaggagct

SEQ ID NO: 252678 - DNA, 844 bp, Cannabis indica
taataagccacatgtcgctggttttgcatcaaaacaaccccaacgccgtatcttgacgcatcaatttccactacaaagcgttggtcaaaatcgggcaaagccagcacatgcaccatggtcatagtttgcttaagtgctaccaaagcgatagttgtagcctcattccatccaactttgtccttcttcgattgctccctcaatggccaagccatttcactataccctttaacaaatttgcaataacctattaagcccaagaaacctcgtaactccctgatgttcttgggttcaggccactctaacataacttgaatcttggattggtccaccgctactccttccctcaaaattatgtgacccaagtaatccaatttttgatgagcaaatgaacattttttgagatgagcgtaaagcttgtgttaggacaagagttgaagaactttggaaaggtgtcgcacatgattgcttaagctgctactatacaccaaaatgtcatcaaaaaacactaagacaaattgacagaaatgggaacgaaatacctcattcatcaatgactggaaggtaaggctgaacattaggagtgtttaccgggttttgggttcgtaggtttcgtgctcacgggtttcgggtgcaaaaaaatgaaaccgaacccagacccgaatagggcacaagttggcgggttagcgggttggcgggtttcggttgattgggttgatcgggttggcgggttgacccggtcaactcggtcaactctttaaaaaattaatttttattcaaataattatttctttatttcttttattttttatttatgaaattaaacatatataatataacaacaaaa

SEQ ID NO: 252679 - DNA, 757 bp, Cannabis indica
gaggtgagcagaagacctacacaactgtcacctccctaattcaacactaagcactacctgcgtggaagaaatgaggggaggtgagcaacctgacaaagccacaaatatattcaagtcaacgacactcaacgacatcttccaggtaaaaaaaaagagtgcaaggttgaccaacgaccaagtatcgtcttaggtacaattaccaagacacatagtaagtcctaagttgtacaattaaccataatggactcattatctagccgtatacaaagtatccaagagaaaccacacataaggccacagttgtatatgcctccaaggccatcacaagaccctaactatggtctaaagagggagaaaactggctatgcttggagccttgaccttggccggccagggttccaggtctgagaggcccgccagaccccaagacccagcttagaggtcggtcaggaaccctagttccaggtataggctagccagcctagggacacaagccccatggtggggcaaccccatgaaagccacccatggctaaccaggcttcaaacaaagcctccttggccgactagcatgtgcatgaattaaaacacgtgatttttcaagaactcaaatattttcttcgtgttcttcatgacttaaagaaccaagaatcacaaagagggtgagatttagttctttttcatctagaaaatcatacattgtttatcctaagctaccatgcatatcaaaataccaaatggactacaatctaacgtaa

SEQ ID NO: 252680 - DNA, 757 bp, Cannabis indica
ttcaattgctctggcctatccaagctacctcctcaagaatccttgaacttagtcattctagaggtaggagggtccacaacaatttgttcctcggagagatcaatgaccgcctcagctagtatcttctccctggacagggttgtctcaccgcccctgggctttttagccagaggagataaggccgagcttcctcccactctcttctttagagcttcgagcattttctgacacatgtctgcatgaaataaaagcaacatggttaggaaaaagcatgagaaatatgaaaacataataatcaagaaggttaaaagtaagatggagtatcctgaactttggcagaagcatctgtccgagctagacctgatgtggcatcatcatccgacgagtcttcttgctcctccaagatggctttcccctttcctactataggagtggatggctaagcaggtaaactgggctccctgatctgaatcgtatgttcgatgggcctgtgcgtggctagaagttttccttttcagtggtgtctcctactcttcctcagcctcatcctcccgctcagaatgctccaaagcatactgcctggctcctgcacctcccttcaacttagcctcacacttcagttgaatgggttcattctcctgatgagctctctcagcccggccagcactagacctcctcttcttctccctcacaagctgaggaacaaaatctgatagataaagcaagtactccacaaagttggcctccgaggtcaaca

SEQ ID NO: 252681 - DNA, 1035 bp, Cannabis indica
gttgctaccaaatcagggtggttaatcaaatctagtccaaggctttctccagcaagcccgtaattgtagttgctgcaatgcacgttaagtagtaattaataaaccagttggccatggattcaatccctcacttttttttttctagaccggtacggtactcacaatatatattgaatataataatatataaaataataatatatgatgtggtcctttgtttttatattaataaaataattatatattaaataaaaataaatgtattatttagtactactagacatagctagtaccttaattaaaatattgctctaaatatttatattatttaatgagtggagaatttaataaaatcataaattttgtgttggaccaaaaatataaacttaatataattcatttatttagtaaagtcagacttttagaactgagtacttatatgtatatggagcaattaatatatttataagtaataatttatatcaaaagtaaaccatttggggctggggctagctcaagtggccataagtggatgtgtgagtgttagaggtcctgggttcgagtccaggtaaaacatgttttaatatataaacgcttaaataaaaaaaaaatttatatcaaaagtaaatattatatatccacgtgctaatactttatagttaagtttgacgatcatcttattatatactatcactataacaaaatttatcaatagctataatattattagcgacgggcaaaattcgcccttaataatagtagcattagcggcggaatcagaattcgctgttaattctaattatttattttttttttaagaaaaatattagcagtagaccctattgctattatccgccgttattgtccatcgttaatagtattagcggcatgtcccactgctaataataaaaaaataaaaaaaaataactgttagaattattagcggagggcattaccggcggccctgccactaataattgtatatatacccaatcccgactttcagtacgtattttagtactttatttttgctcg

SEQ ID NO: 252682 - DNA, 724 bp, Cannabis indica
ttgttgttgttgttgttgtatgtgttatgttgtgttgtgctgaggagagttagttgaaaaacagttaaaaaattgttacactttttagtttgtgttgtgacaagttgttggagtcttgaatgctgttatttaattttttttgtgttgtaaagaactatagctgagagctataagattttagcctatgaaaactgactattccaaaagttataatggtctgttgagtcttgtaaaaaaaatcttgctttatattctttgtaatttattgaatgtatttcattatgagacagttagtatagagatttatccaacaatctatgtacgttttatgctaatatatttttgggaaattctttaatagacacccataaaatagactcattaatagttccactatcctgtaatataattggtccacatacgaaaattttagaaagttattgtagattgtagtgtattgaattaaaattggatttgaatcagtcaaagtgggatatactgatagacactaaattattattatttaattgatttggtcaatatagaagcattcatatatacccttaattattatttcattggtccacctagctaaacataaagtattaaaaaggataattataaatgattaaaatggaaaattagttcaggaaaaacgagaagtcattctcttcaccgctcagaccgtcttctccagtgaaggtgaagattagtgcattttttt

SEQ ID NO: 252683 - DNA, 2172 bp, Cannabis indica
tatttaggattgatataacaacagaaaatttcctatcattttccaaacaagtattgtcaagggtttcgcctcaagaaataattcatgcaaattttatattcaatcaatcttactacaaaccaaaataaaacaattatgatacaatctaactattgataatttgcatcaatacaaaattttcacaagcattaatccaaaaagttaaagaattaagcacacagttcacaaatttcagtccatttcacaaacaataacagcaaaactgacattcgaacaccacacataaagagttaaagttagacctccaggaacgccattttaaatgatatctaacttttcataaagatggatgaacaatttttggagatctttgtatttggaagaacaataccacacatacctttaacggaaatgatatgatatatattttagttctcttcaacattattatgtgtctctgcatcaagcatcagttgatcttcttcaagctcttcaacgtcttcattgtagaccattcgaattccacattgttctattctacttgactcacaactcccacattgctggttctcctctgcgaactcaaagataaatgaagcactcaatgcatgataaaatctatcatgaatatctcttttgataagataacatatgaacacatgatgtgtatcatagtcactatattcttgtatcttcaaaagcgatgaatcaatatagtatggttcatcctcaatgattaaaccatacattttacaataaatgctccactcattgtcattgaaaatgcacccatcatcgaaattcacaacaatgcatatgacaatgcctaagaagtttcttctaccactccaagtgataagagagtctacatgtgttgaagatcccatagatgtgtgagtacaccaatcaggaattttatttcctggataggaaaatcccattctaggaccatataaagcctgtaatacaacaaaacaaaccacaataactatactaattattatggtgaaaaaattatcaaatttattgtatgcatggtattgatcaaaaaaagagaccaacctttcctctatcagctacttctgatccccattcaggctttattttgaaaatttcatcttgttgagttttgcacattaaaataatgagcattgtgttgaacaacaaacactcacaacaagtgatatatatctttccaaaagctatacacttgatgctcagaattcaactttaggatagagattagatttgtatttgaacaaaaacctctacattcagattgttgaagcgctacggagatgtactcatcgagcgataacaaaacaaccaaatcttgttgtgttggattttcatcaatgaagatagtagaaatgttacacatttcatagatgttagacattggaagagacttgagatttttgcattcgctcaaatctaaacgttcaagattaacaagatgttcaatcgacagtggaaccacatcaatcgatgtacaatgtaagagaattttttttagattctccataggctccaagatttcgggaaagctttttagctgtgagcaatgtgcaagagctagtacctcaagagacttcaacttacaaacagtggttgggagactttcaagctttgagcaactcatgtctaatgactttagataaggcatgcattcaaaggatgatgaattgacttgtcgtattgatgttccactcaaatctaatcgtttaatatttaagggaagctttggaaacttgtcaatggactgacaaccatgcataactagaagttccaatgattagaataacaaatactactaggaagatcttgagattttcacaatcagagaggtcgagcacaagagattcttaagatatccaattgaagggtgtaattcttctatttttgtcccttgcaaatatatgaatttgatatcaccaaacatctctgaaatagttctcagattgtagcagtctttgagattaagtacacagtcatcaaaactagactcgtaagcttcaagctccttaagcatgaaattgttatgaagggctattacttttgattgtctacgtggatcgtcatgaacattctgaaaccttaaagaagaaacctcaaccaaactcttacaaccacgttatcgaagcaattgtccatctctacttgttatgataa

SEQ ID NO: 252684 - DNA, 719 bp, Cannabis indica
aataataactttccagcacaatgaataagatggtattgatactgaaattaaataaaaccacaatatatatatatgtttttttgaaaccatattttggtttctcttaaaaagaaattaaaaccatacttcacagttttgataacattttattccaatatatagcttttttttttctttccgtcaggccaatatgttcaaagttgtaagcgcatatcaaacatatatgcctggctcttgtcataccttgttaatatagtaaggatgtttgaatatttgatattcatactttggcctaagtaaatctgctccttaaattatttttcctttttaataaataatagaatttcattaatgacaatcaactaaaataatatcctgcaatctaaacgagatatcttttccttgaagactcaatcagaattaaaattagaaaaacgagttaaataatcagtcgtctaatttttagatcgttaatttgtcaaaaaaaaaattaaaataaatcacatgaaaaagattttagcatcacaattaaccttcagaatacctatattctgtttcatccaccgcttagaaaatacaatagtagaatacttgagcactcaactattgtataaagtacgtaaagtacactactaacaactcatttagtcgcagagaatacttggcgaatcatcgaatcgaagaacaaagaagaattaacaacaaaacaaaacaaaaaa

SEQ ID NO: 252685 - DNA, 655 bp, Cannabis indica
cataacttatcaaaattaaagttcctataatgtgcataatgggaatatataacctaaaattaggtaaaaattaaagaataataaaataaaagtaacaattaaaatacaaaatgaaatgtaaatagactgtaatttctttttattattattattattatcattcatttgattaaaattttatttttaaaaattaatattttaaaaaataatatttaattattattatcttttaaaaatgtcaaggtattactcattaaaaaataggtaatttgtggtataaatacttaagtttaactctgaattgtaaataaatatctaagtttaatttttggtagtaataatacctaaattataattatgaaacttctataggtacttgactattaagtgttaagtaaatttccacttggcaattgatttgtccaaattattaaattttttttttttaaactaaaattagtttaaatatactaataaaaaaatgacacatagataatgacttaacattaaatggttacgtactttcagataggggtaggcatccgatccaatctaaccttttttttttctcattcaatccaatccaatcaggatttagaaaatcatcatccgatccaatctaagacttcaaaatccaatccaatttaatccaatt

SEQ ID NO: 252686 - DNA, 3362 bp, Cannabis indica
aagatcttggtgtgagttttcaacgattgtcatacgaaaagataataatgagaaaggacttcaggtttaatttctttcttctctctcattatgttcaatgtataaacatatatatgtagaaggagagctgacttattagaaattttttcactgcgtatttctttgatttgatcgctaaacacaaacatatacctcatgttttcttatctccactaatctttttgaaaggacagatgacaaaaattcttagggagatgatagaactaatctcgatggagataaagtaggaagctctcgagctcctcgcaatatcctagatataattggtggatcacacatcggaggcgagttaaagaaggcacaagatcactacgccaaagaaccaagagataaaccattgacaaatgccaacaatctaagtgatagatcattgaagttgttcaagaaagagtaagatgacattgtattcatagaaagtgatgcaagatgggtccaccattcacatgtcgtttgcaagctaaacaaaagtctatatggtttgaaacaagccactagataatggtatactaaactttgtcaatacctcttagctaatggttttaaacaatctcctaatgaccatactttgtttatcaagagtactaacaatattttcttagctattcttgtgtatgttgatgatattgtcattgcttctaacaatgatgttgctgtccagaattttaagaagcaattacatttaacttttcagttaaaagaccttggtcctttccgattttttttttttgggtttgaaaatagatcgttcctcggttggaatttcaatttctcagcggtcttttacacttcaacttcttcatgacacaggtttcttgggagaaaaagttgcctccacccccatggaaccaaatatcaaattaagcaaagatgttggcactcctctttcggacccaaccatttatagaagacttattggtaagctcatttatttgtccattactcggccaaacatctcctatgttgtcaacactttaagtcagtttttacatgagccacacacccctcatttacatgttgcacatatgattcttcaatatctcaaaggcacaccaggccaaggcctgattttttatgctaattctaatcctcatttgtgttcttttgttgaatctaactttaaaaatgcaaaaccacaacttaaaattttttagatgcagattggggctcttgtgttgacacccgtaggtccatcacagggtattgtgtcttccttggtcattccttggtgtcatgaaagtccaaaaaacagccaactgtttcgaaatcttccgctgaagctgagtatcgtgctatggctcaagctacttgcgaaatcacttggatccttgctctcttatcagactttggcattcattacaccagcccacctgtcttatattgtgataatacaacagctatacacatctcgaaaaacctaattttccacgagcgtacgaaacacattgatattgactgtcatattgtgagggaaaagcttcaacaaggtcgtctcaaactcctacatgtctctacaaaggataacatcgctgacatcttaacaaacctttatttcccaatcaatttcactctcttgtatccaagatgaaagttcacaatttgtacacttcatcctgaggaggagtgtattaggattgggcttattttctgattttatcttttagacttcttatttggattttttcccactttctataaataccatatttttcccattattgggtaatgtgaattttaccacttttccctaatagatcacaataaatgtagttcttgggatccacgcttaatacttcaaaagtatcatccctaaggtttgtgcgtgtcatcatgagacttcaataggttgaggaagtaaagagtatacaacgacacttaaaaagtctccttatatatactcaggggaaattgttaacgggagaatctacgtgagagagatcctccattatctatccaaatttggaaggaagggattaacatgaattcgaaggaaggtgaggtccaaggacctgcgaggagggacatgtgggaacccccttgtgaggacctcctagagtggccccactacacgaatccttcatgttggggacaccctgacaacgaccttttactgaggcctcaatcatttgatgatttggagttctttcattgcctcccttttcctggtgatgctcaaatgattcgactaccatgaacatagtttacttagtccatgacaaagaaatatgcgaggcaagacctccaacttacataaggatgatggtacaaggaatttgggacatgtgagaaggggtctttgtgaggaccctaagacttgggagaaagggtccctctgaggaccctaggacctgcgaggaggggtccctacaaggaccacgagacatacgagaaggggtccctacgagaaccctaagacctacaagaaagggtccttgcgaggaccccacgacctgcaaagaggggtcctcgcggagttaattcgtcgttgattcctcaagaagctcaaccatttggagacctgtcattgactcttttgtcttggcaatgctcaaacaattcaactaccatgagtatagcttaaacacttagtccatggtaaaagaatatgtgagacaaggagtcgaacttggataagggtggcagtacaaatgtccaaagccctggaccaccaagcatggatcacaatgtcaaactacgcgcggaggtaaggcctaggtgagtagtggcgttgccaccactctacagcacctggtacacccgaccaataacaccttgcaaccactactttgaccacgcagccactactctgagtcctaccatctgaccagcgtactgtgtactagtttgtccttctcggggaccactagaggatcaacatgtaaatgggagccataagagctccctatacatagaaattcatctctcattcaaaagggttggaaacttggtgcaaccctagctaacaagttgataatacaatacactcacttttctccattgttgttctgcaagttttctttaagattgaaaaaattcacatatattcttagttttcaatattcacacatagaattttccgccattaacatcgttgacgagttcttaccgtcaataggtgtgtgtaaggtaaggtgcatggagttcaacctcaaaaaaaaattgacaataagagtagctcatgcatcttatatattgtattattttttcacacacaatgtgagactctttaacatctcccctcaagatgatagctattttcactcatcaatcctagacaactcggtcataagtgatacttttggctc

SEQ ID NO: 252687 - DNA, 724 bp, Cannabis indica
ttatttatttttctgcaaatattttatattctgcctgttttgttttgctgtagcagaattactttctgcttttgcaaacgcatacaattttatattttcttatatataactgacatttgcaaaaacacggtttttcacactttgtcttcaccttgtgatggagatctttcccctttattagctgaagcaaaggcactactttgggcgctcagatggtgtataactgttgagtttcctttggatcgaattgaaactgacagccagcttcttgtgagaaaggtttggcatcattggaaggataaatctcccttgtttgatttggtgaaccagatcaaggcctgtctctcttcttttccttctgcagtggtttcctatgttccaagaacttacaatgttatatctcataatctggccaaagccgcaataaggcatgagagagaggtgttttggaacggaaagagtccaaggttgatttgaatatagggtaaatggcggcaaaacccccaatactttcgttttagtttcattaaaccccaaaaacccaaatttctgcgggtaaacccccaaaactaggaaactgttagcaatttaccctttccatccaaatttagctgttaagtgtcatgttggcttgtccacgtggacacaatatacacgtggcaccattttattggtccacgtaaaaaaattatttaaaaaaaaattaaaataaaattaatttaaa

SEQ ID NO: 252688 - DNA, 1406 bp, Cannabis indica
tatggaaagctgctatagtcagttgcaataggtgtcatcaattggattcttagatccatatcagtctctatactctgactaattggagaaaaaacaacactaggaagtaggtagtagtacttacatgtcctaataggttgagcttgtgtttggggtggcgaaatcctctgtttttccttccactcactatctcaagaaccaacacgccgaaactaaagacatcagatttcaaagagaagatgccgtcgattgtgtactctggcgacatgtaaccactgtagaaaattaagatcaaagcatttgagaaaattggtaatagtaggtgctctacaatatgagttgtttagagatacttactatgttccaactactctttttgtatttgcttcagtttcatctccaccaaatcctcttgccatgccaaaatctgaaattttgggattcatttcatggtcgagtaagacattactcgctttgagatctctatgaacaatcctcaatctagaatcttcatgaagataaagtaaaccccgagcaataccattgatgatgtggaaacgttttgcccaatctagaagtgtactttgtttttcatctaccaagatatttacacataacacaagtatgttagttggtctttagatgtccatgtaaatcagaaaagtaatattgaaagttgtatttttctttagaatgataaattgacataaacagttgtgtatgagcattaattataattaaaacaagtgtactaaccaaatatgaagcaattcaagcttttattgtgcatgtattcatatatcaacatcaaatcctcagcttcaatgcaacatcctaatagcctcacgaggttgcggtgttgaagtttggcaatgcagaaaacttcattcttcagctcatccaatccttgtcttgaactttttgagagtctcttcacagcaatttcttgcccatctttcaatgttccctaagtgtcattaccatcttatcaatcataaatatttttcttagtagaatggtatgcttgtacatatttactttttcgtttatctattatgtagagattaagaaggaaaaacttagtaataattgcttagtgtaataccttgtagactggtccgaaaccaccttgtccaagcttattgtcaatagaaaaatcgttagtagcttctgctattacatcaaaactaaaaaatggtagatctaactctccatctgggttttcatcaatgaagtcctgttctcggttatgcattgaaattgaagtgccttaaatacaaataatcaacaacgagataagaagctaataattttaatggactacacacatgactaagctacttatgtatggtgaactctgactaaatagggtgaaaaagaagccaaggacaataataataataata

SEQ ID NO: 252689 - DNA, 1107 bp, Cannabis indica
ggcccttatcaagccccccaccgccccatgaagtgcctttcatggaattgtcggggcctcgcaagagacccgacatcccaagccttgaaggtttgggtgaagaaatacaatccggattgtagttttttaatggaaacaaaagttcaagaagttaagatgaaagttttggccaggaatttgggatttgttaatgcggtctgtattagttctaaagggctatctggaggctcttgttttttctggaacaacaatataaatcttgttctcaattatgcgacagatggtttttttgaagccttagtgtgggattttcaatctcatatgcaatggaaattatatgcaatctatggcactccctatgctaaattaaaggagtgcttttggagtagtttggagaaggaggtgaatctcagtcaagtgccttgggtcttgattggtgatctcaactgtattggtaatcaagaggaaaagataggaggttccaaagttactttagctgacacgagatggttgagaaattttacaaacaatacgggttgcgtggatcttcggtttatcggaagtaaatttacatggcaaaatcaacgttacaatagtggcttgattagagaaagacttgacagagctctttgctctgtgaattggcttactgaatatgctagttcgggtgtcctcaatcttcccatttcaatctctgatcatgctccaatcattttggacacacacctgttcgcagcaaggggttatgtcccattccgatttttcgaagcttggtcttgggagtcttcgtgccgtgtggaagtttcaaaggcctggaggttttcaagcaataatgcatcagcctctctattgcgcaatattagcagcactagaaaggcccttcaagcttggaaaagaacgttgcataaggacaatggtaatgatattaagtccctggagagtagattagagtggaattcaaaatgcaacctatttcgacagctcttaaggaggaagagtctaaaattcaagctgatctgctagtctcttggtcgaaattgaaagcatgtggaggcaaaaatctagagagacttggcttgccttaggagatcgcaacactagattctt

SEQ ID NO: 252690 - DNA, 1045 bp, Cannabis indica
tggtcttcgacctgaagtctacccccaagcaaggcaggtcggggtatttctacttctctcaactaggcttcaaatggttgagcgggacagacgacaaggccatcagcaaaatagggcgttttgttgatgagtacttcattgtgaaggatccaagcatcacccggacttggtttcaacaattccgacatatcactgtcctcccctcacccttgctcttagggatagagctcaaaaacttgcccagttttcggaggaagacaggaatatcatccagttgacctttgatgataatctggtgaagtacgggctttacccagaggacttttctcctaagtccgtggcggggaagtctgatgctggccagtctgaacgaactcatctaaagaatgagttgattcgactgaagcgtgaagataagttgaaaggaggtgccagggccaagcattacgctcaggagcccttgaatcctaaagatgaagccgaggctgaggctgaggctgagcaggtgacccctttgaagaggaagaagaaactcccggccacgcccaggcctgttgaacatgcaattcgcataagggagcccacttcatctgttccgccatcttatccctttgccggaaaagggaagggtgtcatgtctgagataaactcgatgtcaggtgatgatggacttctgattttctgggcgggcggtcattctccgttttacttcttttttgagcttcttgactttcatgccttgtattttttgatgactgttttctaatcacactgtttttgttctgtgcagacatgtctcggcagatacttgatgctctacggaagaggatgggcggaagctctagcgcctcttctccggccaagaagcttaagggcggagaggggtcctcggagaagagaccttctagagaggttattgacctttccaaggagtctggaccaccaacgaccgggtttgaactagtcaggagcgttcctaagcgggtgcaggcaccaactccaccagtgtccgtgctgccagaggccaaaaagggcaaggagatgc

SEQ ID NO: 252691 - DNA, 1045 bp, Cannabis indica
ctctataattctggagaagacgcgggttcgattcccgctatccgccctggataatggggttattaaattaaaaagtattgttactgtacaccactgttccaacacctttcataggtgataccttataattggttagcgatattccataaaactattttgttaagttatatagaatgtgatacttaattacactaataataagatgacactgaagagaattttaggcacctgtgacactttttaacatttttctaaattaaaataagtgaaatctgatatttttttgaaaataagcgtagatttatattaaataaaactagttacataaaatgttttccggaacagtaattgattgggatcgatccatacacctggtgggcaaaagcccacttagcgacattgtgtgccgcatagttacagttcctactaacatgagaaaaattacaacacattaaaaaaggagaagacttagaactaaaggagacatagttctctagagcccaatgggacgccttcccattgagggcattaattactagtctcgagtcactttccaaaaaaatttggaccatttctcgatttgtgcgtgtcatccttgcgcagggccatgctaatcttctctgtattgttccaattttatcggatgtcccggaaaggacaagtgaaatctgatattgaattacattaatacggatactacacatcataatccaacggtcaaactttcccatccccacattttgatccaacggtccaaaatcttccaactaatctatatataaaaagtaccatatttcaaggattaagacccaaatcccccattttctgcaacaaccaaaaaaaaactcaaagctttctctctctaaaacctccccaaaaccatggcttccaatccaaaaccccaccaagctctgatctttcttctccttcaactctttttcttcttagtctctacaaccaccggtacctcatcttcttcttcacctccggcaccgacggtcttcgacatcctcccccaattcgggcttccgagtgggctcttacc

SEQ ID NO: 252692 - DNA, 1171 bp, Cannabis indica
caagcaattagacacctaatatctaaatgacaaagtgggcatcagggaaagcctcccctataatttcttggaaaggtccccgccagacccataattcctaaaagcttgtctacgccaggcaactcaaagtaacttgtgaggaacccagggaaatataccaaaacaaaatttaaagcaaataccaaaaaattaagtccattcggagtcctaaaaaatctaaataggcgcacaaaagatgaacatgcatagtactcactcaaaagttcatcctgcctgatctaaaccctaattctagaatcataaaaacatgcaagtgcctacgaagttcagacgtccatgtcctaacatccagacgatatcagcactctcctagataagaaatttcaaaaggaccttatcctagcactgaaaattctacatacaccattttaccattcacacatatcaaagtttcgagacctagcttgaactaagcatttctatcatggatacaaaataacaaggttcaacatagcgtcagaatacttacttaatatatgagtggggaatgaaaggttgttgtggaaatttacctaggagttgttaacctaaccaatcatgcgatcaaagccagcttaaacgtcgaaaccttcgtctggcttggggtggagtagttcgggtttattgactctgtgtttagaaatcaggctacacgaagattcaggaattattaaatcaagcaatcaaaaatctcttgcattcaccactgaaggatggcaaggttaaagttttttcttaaaaatggggtttttgtttgaagtttgaagtttaaaggcaaatgatgtcaaaagtctaagatggtgaaaaaagaaaaaaaaatgggttttatgaacctatacttctacccaaaatcctaacaatttgaaatggatggtccagattctctttccaaaagtacaatttgatcctacgaatgagaagttaagaagatggcttttaaaacttgctcagtgtgtttatttatcatcattgcctgcctcgagtattgtacgcattaaagagggatcatttcaatcgacctactatcagtgcaacttttttcaagaaatttgcccctacatgcgcgtgttatcacaaatgcattataggcaccgcatatgtgccacactcgtggtaccttcaatttttagtc

SEQ ID NO: 252693 - DNA, 503 bp, Cannabis indica
aacatattataataaaataattataaaaacacacaaaaacatataaaattacaataaagctaataaattcaaaaataattaaaaacttactaaattaattaaaaacttactaaattaattaaaaacttaagaactaaaccaatttttagttaaaaaaatatgaaaaataactctaatttctagagttatcagaccctcatgttgccaaggtggcaacaatgggcagagttagaattgtagaggaggccacacaaccccgtgatgatttagattcgaaggttggccggggaaaggtgcctgatgttgactagggggctgagagttctaaaacttagtttgaggtggaggagtttgcgcctattaggaggaggacttacagaacttatgatgtccttccctactgccctttgggtgcatatgacatcgatgggaagccattgaatagactatgccagcctttagtgatatgtacggaccatgtcttgatacagtcttcagagcct

SEQ ID NO: 252694 - DNA, 943 bp, Cannabis indica
  modified_base (836)..(836): a, c, t, g, unknown or other
atttagacaaccaatccataccaagaattatatcaaattgctccataggcaacactaataagtttccagacaacttgtgtccctcgaacacaatacaaactgacctacatatggtggatacctcactgtgtcctcccataagtacactcaaatgcaacgcaggactaaaagtttcccaactcaaacccaacatactagcaaacattaaagatataaaggaatgtgatgccccagttacaaacaacatatgagcccaagagtgtgagataagaaccatatcatcaacaactccctggtcagcccaagagctccaattgtttagtccaatcttagatattactctctcctgagcagtgcacattaattatcggtgacggtaaaaattggtgtaccagaaacgtcattgaaaatagggataatgtatatcaaaacaaccaccttgacgagtagatcacactcatgccaaccgtttatcaaaacggtacacgatatcgccagaaaggggtggagctacaaaaatgtcaccggaaaaagtagcgagttgggcaagatagcttagtgtaggttgttcttcttgacgagctgagtctattggtgaagacggctcgttaaacggacatcggaggtggccaaaaaatctgttcaaagtttgagccgtcaaactttgacttacgatcctgagctaacagcggcgaaagaagcggcgccgcttggggggtgaggtcgccggcacctggggtttcgattggtctaccacgtgggctatacggtggccggagatgggtcaccggagagtggtggtgatggtggtttatgggttaattttttttttttgngtttttcaagagagagagagagagagagagagaatagtgaaggggtctgtttaaatttgtatttgtattttttatatatatattattatactatttattatttatta

SEQ ID NO: 252695 - DNA, 555 bp, Cannabis indica
gttctttgacttgttcattattagcttaaccttaaagtctagctcatacttacatctggggaacttgatagttcaattgaatgggagtgttaatattatatgtattactggataagtgacatgtgtgctttcaaagtcccaaatcaactcacaagcccattcaccaagctcaaaccaactagtgggtcagcccacaaccagagtcgaactacaattccattcttagctgtaaccatgcctcggaaaagccaaaccttttggttctagaagcatgactctcgcttagagaaatgaagactcaaagaaatgcagttggatatcctcagggatgatctcgggagagtagtcgaagatgcatccaagagtagtcctacgtgtcaccccacggataccaaatcccaccgaatcaagaggggcaagggaaaggtgcacaacaaaaaagaaacccacctttcgtataacgtccactactttgacatttactgtacacgatcagtggcacatgaccacctgccaacatcaaactgtacatacaacaaaaaaccctccaatttg

SEQ ID NO: 252696 - DNA, 575 bp, Cannabis indica
actttataatattttattagttgccgaaaacctcggtcaacaataaaattatcactgtaaatttttgcatataataatgccgaaaataaatttaattttttcttaacaccactattaaattggaatatcaagaactgtaattataaatactgaacaagagttagaaaaaaaaaaatattctaacatatgatttcagatatagaaattgattaagaaatttttaaaaaaaaaattaaaaagactttggataccttaatttttgagcgtactgattttttcacatttttgaaccactcagatacaaaatatgtatatattttgttcaataaacttactcttttaaaataaggcactcaaaaacgtctatatggtatattttttttggccaatattaatgagtaattggagctatgatgttgagagaggcctagtgcattatatcacaaacatagagcaaattgtagtgtttgttaggctagttttagttatgtttttagggttgtttaaatgtttagttctcgtaggtgagtgaagaatttagtatgatcaaccacaacatattttcattcttatta

SEQ ID NO: 252697 - DNA, 1226 bp, Cannabis indica
caaagtcaatgtatttcttcacatcaggtagacagtcattatgaaccacttcgtttcttgtcctccaaatggtgtcgactacaattgaagcataaagaaagacctctttagctcgtatacccttgtccttgagactccaaataaacttaacccagtctcacatgcaaatgccattatcacaaactgggtaaataccccaaggcaaagatctccaaacatgaaacgccaaatcccaagtaagaaacaggtgttcaatagattccccccttaaccacatagtgggcaattcatattttcaatctgaaacctgcttccgattatagttataacggggagcgcattggacaggatgctccaccacaaaatcttatgtcgctccaaaattttgctactccatagtttgttccaaagtgatggagccaccttacaatgaggcgctctttccaaagcttgagttaaataagccgatttgcaagagaattgcccattactctctaatgttcaaatccatatgtcctctccttgacccgaaggattgccacattttaaaatagcagagacagtgtcatgatcgaaaaggctttttaacttgttaacatcccatctgccacatgttaacaagagatcggccacatagatcttccaaacaaggaatcaaaagtcttataattatagttgagaaaatcctttcctttaagatacttggcttccaaaatctgacagcaaagagattgacaaccatttaaaagtttccacccacattttgccaggaaagcctgattcatttctctaaatttccgaaaccctaggccaccccgagatttagcaagacatagtttgtcccacgctctgagatgaagaccaagattaactttctcaaaaccccaccaaaaatccctcaccaaaccatctattctattgacaagtcgattagagagtttggtagtttgcatagtatatgtaggcaaagacaaacccacagatttaatgagtgtagcatggcccgccttggataacgtctttgccttccatccctggagtttagaggtgaggttgtctaggataaagttgaagtcaggatccttctgtcttgatctaaagagtggtagtcccaaatatttgatgataccctccggagactcaatccctagagcctccttgatacctcttcttacaccattgggagtatttttgctgaaaaagattgacgttttgagcttattaac

SEQ ID NO: 252698 - DNA, 1036 bp, Cannabis indica
tttttgctgcactacaatgtgttatggtaggagactatagaaattgacttaacttactgacaacaaaggataaatcttgtctagtatgtgtcaagcattgcaggccatctatgatgctttgatattctatggggtttgctagaagttcattatttgattttgacagagttttacttactgtcataggagtggtgcaaggtttgagatgcatcattcctattttaacaagtagctctttaacatattttccttgattcaaataaagacctgtttcatctctatgcacctcaattctaaggaaaaagtggagtggtcctaaattctttagagcaaacatgtcattcagcttatcaatgaagtgatttagtttagcgacattgttccctgttaattatgtcatcgacataaattagaaccataataagattcccaagtactttgtagaagaacaaagaggaatctgcctttgattttgtaaagttttagctttgtaaggttgctcttagcctctcataccaggcccttggagtctactttaaatagtagagagacttagttagtttcacactacttcaggttgattttggtcttcaaaactctgaggttgtagcatgtaaacatcttcttgtaagttgccatttaagaatgcattattgatatccaactatctgattttccaattctttgaaacaacaatagaaagaatgattcccattgtggaagcttttataactggactataggtctctccaaaattgattccaggtctttgattaaagcccttggcaaccaatcatgccttgagtctctgaaaagtgccatctaagtttcttattttccttgaaaatccatttgtttccaattagaggtgtacgtcggtcgatttggtcagtttatgttacattttatttaatgaattggtcagtttagtcgggttaacccgtccaaaccgagcactaatgtttatttatatatttttacattcaattgttatattttagttattgtgataatgagataaatataaagattgaat

SEQ ID NO: 252699 - DNA, 754 bp, Cannabis indica
tttctttttttttctttttcttcctttttttttcctatctctaaaccgagagcccatcatcacccaccaccaacacccacatcactcaccaccataaccccatctcttcctcgtactctctcacttaacagtaggtatgaacattcatttaacctaaagactaaaacaccataaatgaacataatcacgtttggaaaaaattagaaacccatagccgttcaaatgggaatctcacaccattcattccgaccaccaccatacataatcgtgaatgagattcaaacggcaagatccaatgcccagatctcttcgcatgacaccaccacctccttcccagacctccctcgaacataccacgctgattctcccattctagatctctctcactcctcttcttcttagtgggcgtcgaggacaacgagatctataggcttttgggctgagaaaggacaacctaggctcctcttcttcttggttgggttttgattattattggatctgattgggttttgagtagtgtttggatgggtggttgtgcgataatgaacagagggagagagaggtgcattattctcagcgattgtttggtctttttgaggtcgctgtggacatctccgactactatgaggcggttagctgcggggtacctggtctggagaggagcagaaagggtttcggggttggggtctagtaagagagagagagtgaaagatatgtgttttaggtttaggttagggttttttttagcagagaa

SEQ ID NO: 252700 - DNA, 661 bp, Cannabis indica
tctgcttgagggtataccccttagattgtgcgagtaggtcgtggaccttactaagataggccaccattctttctccacgagctatatattctcccagaatatgatttaccaccaactatgagtcaatatagatttctagatattctgcatgaacctcccgagcaagttttaatccggtgatgagtgcttcatattctgcctcattgttggatgctttgaatccgaacttgattgctccgtgcaagggtttcccccaggtgtgatgagagcaatcctagctccggacaattggtctgtggcggatccatccacatgcaactttcaaattggcttgtctggacagttttcttctggtggagtttttttcttgctctctttttggctcgggattatcttttgaactgcttgcctccttgcatgtgcattcagctataaaatctaccaaaacttgttcttttactgttgtgtgaggttggtaagttatttcatgttgccctagcttaatcacccatttgagtagctgtccagatgcatcgacctttagcataacttggcataaatgttcgtcaatatacacctgaactagatgagcttagaagtagggccttagctttcttggggctaagatcaaacagtaagttaattttgttggaaatatttt

SEQ ID NO: 252701 - DNA, 3839 bp, Cannabis indica
aagcctgttagattacattaaaaatgtatgttggttaaagaactatttggcaatatcacatttgtacgactagagtacgactattgtaccgattataggctgatattacagttgatattaactgtactacttgatagtatcacatcattatgactagagtacgactagtgtattgagtataggctgatattatggtcaacaatactgtcgtacgaatgttctagactcagcattgtgttggacacggggatagggttatgattgggggtatgggcgcctgattataatctgagttattgctatgttattgtttatgcttttcttattgagtccgtcgactcacatttattatttccatgtgtaggtaagggcaaagctaaggttgagcaaccgtgagagcgagcagatggagattgtacatgttggggcggttaggcctggagcgtacggtctttggaacatcagggcttattttgtatagtcgctaggcgacaaacttttgtttatgcacagtgatacttttgtaaatacttttgtgaacgggataccgattttatataagtatgttattttaatttttatagttaattaagaagaaattttattactcacgatttgtaataaactcgttgattagcagcaagctgcaaagttagttaaaaatcacgttaacatgcctaaactagttgggtgttatagtcccaattttgggtagtttgcaaggaaagggagcacgcactatatattagttcatggaaacagctcaaaaatacatcaatagggaagaggtaaggttggccaataacctccctcttccttctggacaaatagaagatattccaacttcaaaaaacaatacccctccaacgcgaacagttccaacaagagaaaaaataaccatggtgggggccactaaaataatatgaaatggaggactaaccaacctctatacaccatcttcacaaaattgactgaactgttagaaactattttcctcaccaatgagaaaactttgaattttagagttccagagctaatgaagggaatcagaaaaaattgagatacctcaaagtattgtcgataccacaatgacgttggccacacaactaacgagtgcagagccatgaaaatagaaattgaagatctcatccaagccggaccactttctggttatgtacacaacaagcagggaaaatgcctaagcacaagggaaagcccaaaacaatgccgaagtcgcaccaaacaataagcaagccctgccacaaggctaaaatgtagatatggtgccaccattaaaaggagatgaagtcttagtaatttttggagctccacactttgctggaacgagtaatggggcccaaaagcactacattaatgaactgaaaagtaataacaatgcacaagaggcaccacctcaacgtcccgcaaaacgaccacgtataaaaaatccattttctttaatgatgaagatgaagaccacgtacagatgccacataatgatcccttcgtgataactacccaaattgccaacaagagagtgaggaaaatacttgttgataatggaagtggggtcaacttattatacaagtccgcccatgacatgataggacatgagacttgcgattcgcaaccatgccccatatatctatatggatttactggcgaaggcatagcaagtattggagaaaataactctctccctcacaacgggagatgccccacaaactgtgacaaaaatgatagaatttgttgttgtggacattccatcgatttaaattgtgataataggaagaccaacatttatcgcaatgggggcagaaacatcagtgagacatttggttgtgaagtttctaacaaactatgggaatggcatagtacgtggggaccagatggcggtaagagaatgcaatagtgtggcaatgaaaggacaaccccaacctaggactcaacgtttccaagccacatctattgaacacacttgccaagataataaaagtggctaggagaagccatgtggagtcaccctctttagcttttatttattttctcaagattaaacaattttatagttttatagttgttaagtgccatttcaaaagtaaaacatttaaatttcctttttagacaattgattgtttatttttcaattagtgtttgcactttttgcaaaaaatatttttttgtaacgttacgtcctcacccaaacaagttacataagtagccaaatacttatataacttgggggcatatagggagctatactccaccactccacaaaataaatctcaaagtcattgccaacacatcactttacgagcatgagattttaaaaatttttgccatgaatattttttcaaattgttcatcttggacaggccgcaaagtcggtatatcaacgagatcaaaataaatctcaatgtcattactaacacgtcactttaagagcatgggattttttaaaataatcaatgaatatttttttgaaaattttatctcggatagagggcaaagtttgcacactgacgagataaaagacaaatgagggcgttctgatgagccataactcaaatatttctacttaccaaagacatctcgaatggccaagattggagactttgataaatgggtcgcgtgctaaaattgagcatcgaaagacttaagactatgtcgaaaactcgctcaaactagcaaaaatgcaaaccaccattggcaatcaaattaatgctatctttaaaacctcgaattactaagaaataagcatcagaataaaataagaagaaaagatatattcaacttaaaattccaaagtcgccaagatatggaatgaactaagttatatatgcttaaaaagttccaaagatgtgaaaaagacttgttaagttttaactagcgagtactccacaccaagaggacaatgagtgaacccacccatgtgggcccaaatgtcaatacataaaaccactcctcagcctccgtcgcagtcacctccatggtggttacggccacgtgggccttgcaacaatgctcttcgaattcaccaaaagcttgcccataaagttgaagtccatgtcctatttttggcaccaacacaagaaagatattcgaaaaacattcttctcggcacattcttcaatgaaagcaacttctgtcttgtgatctactttattctgctcaatggtccttgcgttctccgactccagcttgtccatggctacggtgtggctaacactcataacctttgactcaacctccaatttaataaacatggcattcaacgaaccaagctcatcattcttggttgtagcctcttcctcatcaacttcttatttggcactcccttcctctaacttcctctcagaagaagcaagcttattctcaagctccttaattgtcaaggtagcttccgcattgcatttctggaggtccttacacttttctgtatatatgttatgggaggtagtggtcctctggtaaaggctgaagtcatcaaagaggaacaataaagacatagcaaaatagtcagctacatcataagtgtctacataagaaaaatgatagatatatgtgtgcatacatatacataagctaaagttgtaaagctcaattaccatagcaagggagccaaggtgtctttgcaccagatcattgattgggacctattattcgtgtttctagcattggacacgtggactctaattagcattcaagacccataagtggggcccttatcaattgtaaagcagaccagacccacctggatatgtgccttcgggaaccatcaagttgctggaaattttttaccaggatctagatttactaccaagtatgtttcattaaca

SEQ ID NO: 252702 - DNA, 794 bp, Cannabis indica
ttatttatatttattgcgaattctgattattaatgcatttattattgtgatttttgtttaaatctcatttattacgactccacgtcggttggctaaaaatccaattaacacttgacttgtcaacaaatcaagactgaacatcaaagacctacggggttattacaacctttaacacttcccgagtggaaatagggggatgtcactatggattttgtagttggcttacctagaaccacgagtgtgtatggttctatttgggtaattgtggatcaatttactaaattaggtcactttccaccagtgaagacaacatatacagtagatcggtatgcaaaattgtatgtagaggaaaaattatgtctccatggggctctaaaatctgttgtttcatatagagatttgaagtttacttctaagttttgggaaagtctccaaagggccatgggtacaaaactgaagttcaatacaacttgccacccccagacagatggtgagtcctaaaggataattcagatactagaggatatgttgcgggcttgtgtgatggatttcgaaggtttgtggagtaagtatttgactttgatagaattttcctataatagttatcatagtaccatagggatggctccctatgagatgttgtatggtaagaagtgtcgttctccaattttcttggatgagaccggagaaagaaaatatttaggtctagagtcagttcagcagactagtgaggctatagagaagatcaaggcaagaatgcttgcttctcagagcaggtagaaaagttatgcaga

SEQ ID NO: 252703 - DNA, 532 bp, Cannabis indica
gaatctattaaacataacatgtgaaagtattaaaaaaaattagtcaaactcccaaatatgcaaatacacatatacatttacacaaatgcatcacctgttttggtggatgctctgccagttcttcctctacgagggtaagggaattcactattccctcccaagattttacgaacaaagtttgaacctttgtccggttcgcccaaatcattgtacacatcgtaatcatagactctgtcccactcttttcgctctccttttccatctcctctcaagttctgaagctcttcccttctgtacttaagcaagggtgctggtgttgcacttggaagatatgactataccaaaaaagtaaagcacaactaatcaataaagtgatctttaactttataatgttactgtaaaaacaacttaaaatgttcaaatcctcaaaaaaaattgagaaaactctaagtccttatatttctaatcttttcatcattttgggtatatatgaaaatatcccaaaaattaaataaacacaataaaaaataaa

SEQ ID NO: 252704 - DNA, 950 bp, Cannabis indica
tagttttggaatttgacgttgtttacctcaaattaggccaaccaatagcagagttgaatataatactgatgattgccacgtgttacacaattaaaatagaaaagtaaataaacacaagattttatagaggtttgaccctcttagttagcgggtaatgacctactccccttttagttgtattgataccagagataatacaacttagatcactatagtaataggacctgaagtgcctctcttaagaatacaatgtgagaatcagagttgccaaatctcaagtgagaatagagtaatgggcaagtaagagagagagagagagagatgagatgaattattagacttagagctttaaggcttaggatttttgacttagggttttagggtttgactagtgttgtttatatagtagagcttacatccctaatattccttaaaaataggtaaataaagctattatttacataataaattaataaaatacaaatgaccaaatttcccctcgaaaatagggaagttgctgatatttccctctattttttgtgggttgttaaggccaaatttgtagtttaacttgcggtccacgaatgaaagctgcacaccaaaaacatgcctaggctaaaggcttgctggccatgcacctgcagagtgtatgttggttggccatatggtgtccaaaagttggtcatagggtcggccagggggtgggcacccatatggtgtctaaaagtttctcagcctatggaggccataaagctggacaagggtggctagcaaatccccttgaggtggttggtttgtcattttgtcgtccctcctaagtactcagaccccttgttggttgaagtgctaagtagatgtcttagccatcttattgacaagttatactcccacgcattgatgttcggccacgtggacatgccacgtcaggtgggaaaaaattgggataaaaa

SEQ ID NO: 252705 - DNA, 627 bp, Cannabis indica
taaataatatttaattatttttttacaactagatgaattatgtatgagaaacgtgacataaaaaaaagaagtcaaagctattatgatagatagagtgaacgttggactaccttgccagccatggctaataagactactgagatttgtagtgttgttgagaaatcgaagacagcgaatcagggaaagcgatggggagaaagagagcaacgaggataggtttctctgttttgatgtttgatttttgtttccttgaaattaaaaattgctcttagatttttctagaacaaatggtaaaagagggtcctctccgccaaaatcagccaaactagctcctgtttgtcttagagttgatcctttgctaagaaagaagaaagaaaatgccaatttaaggtctcttagtccgcctactgtgaaagaacgttcttaaaagaactcaaatgagaagaaggtgtcccatgaaagtactccaagtgagagaaagaagacggagacaaaagaaattactgtgactgagaatacaagcagtgcagaacatcacaatgatgaagcttgacttggtttatttactctagtttggtttttttaagtaaataactccttatttaaaaaaaaaggaggacttagtcc

SEQ ID NO: 252706 - DNA, 4145 bp, Cannabis indica
tttgggtttgggctttggtggcccccatggccccatccttaacagcacggcacatgtggatagaacatagaaggatctctttccacctctgcaactagattttttacatcaaacttcatggtttttttcttgagggatcaaattctcacttctacaattttatttcatacttttattattattattattttgtatatagtgatcatgatcacgttaatacaatataaagaatacattagcaatctgcgcaagaatctttttaaactagtataattcattattgcaatattattattgcgagacacatgtggatacatgaaaaaaaggggcctttgaaactctagataacgaagttataaatatcacacctaacttattagcgtactccttttactgttttttcttttcttataaacgcatcctttttcactttcaagcaaatgacttttacatatttcatcaatagttacgcaacacttgaaaaaaaaaatcattattaaattatgtcactagcttagtctcttgcaactcttgcatatatggctcttaactcatttatgcacaccatatgtgtaccacagatcaaaaacactctcaatttaacatactgaaaacaattaaatatacatgtctttattatgataccttctagatttcgtagagatatttggggagccaagagagccaactgaaaatgaaaacaaatagccaaatgggtggttatgctttaaccatatattatatattagtgtaaatcagattgtgatgccaaggaaaatggaaaaataacaaactagctatttgggtcacttcaaaataggggtgtttaatttatccaatttatattgttttccgttttctaaccaaattacataaattcagctcatgtaaaaggaacaaaacaagtacactatatttgttggtgaatttttaagataaaagaatatatgtgaaatattattatcattatccagtaattttaagatatttaacaccatatatctttaattaatattatatgaggtggaattttcgctgcaatattctttttttaatagtagaaaatattctttcctattaaattgtaaataaatgtgtttcaaaaaaagaagaccaatttaagttcaacttcgtcgcctgtgcctcatcatctttttgtgaaatttttattagtcaatagcttcattttttttatttttgttttgactcagtacaaatatttttcatattccctcaaaaaaataaaaaatatttattatgtatattaggttaaaaaaagaatcacataaaatgcagccgtcttgagaaagcgcgtgtcctcgacatcttcgtctgttttatacaaaattaattacaatgtttatgttccattgagacataggaaatgcaataatcctttcccattatttatgctgtatgtacaatacatatgatataaatatatttatattaattaattaatttaagcccaccactcgctgcgcactcttcattaattttatttaataattaactattacgttgttacgcttgttccatttgaattttaaactctttattaccgcttatctctctctcattatttggttctctggtgagattcctgcgacttctggtggatttgtcatctcaagggttagtttttggatctgggatttgcattcttctcctttcgattttatgtttagattctttctactgttgtttcctccatgtttatcttctaatcctgataatttccgatgcatgttatgagcttcaagatgggtttgttttatgatcttctttcttgatctgttaggaaatcgttgtatgagaaagagttaattacttttgtctaagatacccttaaagtttatttctttttcttaatcatgatattatttgaggttgtagcacttcttctgatttcagtcttttcccatttctaatttcttttgcatatggcaacgtttgaatctttgaattaaggctgttgtgaattcttggtgctttgtttactgacatatataattcatatttaatcagggaaactatggcagaaccaaaaccatatacccctttgctccaaccatcttcaacccgtaatctccctgactttaagaaatctattaaactcaaatatgtgaagcttggctaccattaccttattactcatgggatgtacctcttcctttcccctcttctggtggtaattgccgctcagatgtccactttttctatacaggacctttatgatatctgggagaatcttcaattcaacctgatttcagtgattatatgctcgaccctgctagtttttctgtgcaccctttattttgttacccgtcctcgccctgtttatcttgtcaacttctcctgctacaagccggatgagtccaggaagtgcacaaagaagattttcatggatcactctaggttggccggtacattcacagaacagagtttggaatttcagcgcaagatccttgaaagatcaggtcttggggaatctacttaccttcctgcggctgtgttccacattcctccaaaccccacaatggcagaagctaggaaagaagctgaagctgtgatgtttggtgcaattgatgagctgtttgctaaaactgcagtgaaacctaaagatattggaatcttggtggtgaattgcagcctgtttaatccaactccatctctttcagcaatgattgtcaaccactacaagcttagagggaatataactagctataatttaggcgggatgggttgcagtgcaggtcttctctcaattgatcttgctaaagatcttcttcaggttcatcctaactcttatgctttggttatcagcatggagaacattacattgaactggtacactggtaatgatcgatcaaagcttgtttcaaattgcttgtttcggatgggaggtgctgctatacttctttccaacaaaaggtctgacagaagaagatcaaaataccagttggtacatactgttcgcactcacaagggtgctgatgacaagtgctttgcttgtgttacccaagaagaagacgccaacggtaaggttggtgtttctctatcaaaggatctcatggcagtggcaggtgatgctttgaagaccaacatcacaacattagggcctattgttttgccaatgtccgagcagctgcttttctttgctactttagttgggaggaagcttctgaagatgaagatcaaaccttatatcccagattttaaactagcttttgagcacttctgcattcatgctggaggaagagctgtgttggacgaattggagaagaacttgcagctatccgattggcatatggaaccatcaaggatgacattgtatcgattcggaaacacttcaagcagctctctttggtatgaactggcttacactgaagccaagggaagaatcaagagaggagatagaacatggcagatagcttttggatcaggattcaagtgtaacagtgctgtatggaaggctttaaggacaataaatccagcaaaggaaaagagcccatggattgatgaaattcatcagttcccagttgaagttccaaaggtttcagccatataaacttaagtagaaaatgttacaaaatcggtggcactcgccttctatttagacgatatgaagtatcattttttatttgagatgttgaaaaggttctaattgattttcatagtggtgatggtgagagcaggatgctttattttttattcatttgggttgtgggtattggttttggtctttcaccatgagatcttcagagaccatgtgtttggctgtgtagtctttagtgggcaacatttgttcaatataattagaaccattgacgattaattatgtatggctgtgtattctttactgaccaagtattttacatcactagcttttttatccttttgttgctttttatcgtttaattgttttgatatcactcgacaaatcgtggttgtttgttgtagtttttcaagcatgaaaaccaattgaatttttggacttcgagtttgattgatttataagacaaaattttagtttttcaagcatggaaactaggggtgttcatccgctccaatccgcacttttttggtcaaacaacgttcaatccgcactaagtgcggatttcatattttggatccaatccgat

SEQ ID NO: 252707 - DNA, 1454 bp, Cannabis indica
atccgggtcgccacaagccgctcttctagcctcctcctttgtttctagggctccaaatctgaatgaatctcaattttcatgaactccatctatttaaaccaagtctcatctttaaaattcatgaaatgatgaaattatcaaaaaatcccgtcactggagcttcgtcgaggcgaaggtttttccccgtcgcgacgaaggcttaaacaaaattttccaaaactttctgccaatccctgttgcgacaaaggtttttcctcgtcgcaacgcgattaggcagcaaaatgtcttgtttgtttttcttctcaattctttcaccacttctcctcaatccttgtaaatactttctttaaacacccgaggacgtgaaacaaaagaatcaagcgtaaaatagccctaaaactagaaacaaagagtgaaaactaaccgaaaatacgacccaaaacatagactaattttagcataacacttgcgaacccacaaggcatgtaggttagacagttgtcaaagtattctcaagaccgcatttagggtttatcaacaatttactcatatatgttatatatcttaaacagtttacaaaagtaaagattacgaaaccgtgagttgaactcgacactgggcttgattgtacatatcttgacggccttcagtgaacaacctggtggctctgataccaaactgtaacgcctgtatttgaaatactaaatttgtaaactaactttaatatattataattacttaactataaagatcgggatcccgagttataaaacatagtttaaaactatatttgttattacaaaacaccttgaagatttttttttttaacaagtaataggcaacacaaaatacaactcaaaatattgaaagaccaaaaccctccaagttgcattgccgcaatatgtacaatcactgccgagctccatctcactattcatccagctttgcttttcctttacctacaaaaggtagcaaactaatgagtcatcagactcagtaagatatgcataacatatatataaacaatgcgatatcgactttatgtttaagccgctctgagctctacaactgagcccaccgaatgattaagaacgttattaaaggaagtacgaccactgtaccaaatgcactaaagtgccaaccctgtactcgtgttggtagaaccattattgtacccccaaaagttactaagtgttgtaccacatgcacgacgtactccctgatactcgtgttggtaacactgtaactattctaaaacctacactatactaacacccttaaaaccatacaaacaattagtgttagtagtgtaaacatttaacacaagcatacattcacatatatgtattatttatgctatcttacctcgtttcgtgctcaagtgtaccggtcagcctgagtggaaacgcagcttgacgctttatagggccgtaaaccataatattcaaaactcg

SEQ ID NO: 252708 - DNA, 657 bp, Cannabis indica
attcaacaagtttaatttacttgttgttgttcgaagaggtaagtttcttgcttctaggctctataatgggctaattaaacatgatgctcacacgtactacaaagctatttggtgtaatatttctttgcccaagcataaatttattctttggcagctggttcatggccatcttcttacaagagataagttcactagattccatatagagcttggtactcccagctgccctgtttgtagtgaagaagaggagagtcatcatcatttcttcttcagctatattgtttttaaggtagttgtgaaggaggcgtttgattgggtgggttgtcctgcttgaccgatggaattcaacagctggttatattagatacaacagggaagatttctggtgtgataactttgatcttggctgctaatgtttatatgctttggaaaaataaaaacaatagtgagcataatagtagttgttttactatattgaaaaatgtaaatgatataaaatatatggttaagcacaggttgtatagcttaaaaaataagaagattatacaagctaaaagaggcatgttttttcgcctagttcagtaggggctgtttggtgtgtggttgggccggttggttgtggctttagtgtttacttgctttgtctttgattaatga

SEQ ID NO: 252709 - DNA, 741 bp, Cannabis indica
cctggaattgatgttatgcacaataatattagtcggagttagagtgtttttatgaattgtataattcctcaggttccatattctttccataattatagctgctccttcaagaagagtgtcaaaagtgagattcggaggtcttttatccttttgcttgaacttgtttatccattgactccaatctgtgacctggttctcggttggcttgatgtgctagttgcttccaaaccatacggctctagcaacatgacaatcctagaagaggtggagagagtcttctactgccattgtacagagtgggcaatagggatcctgtaagctgcagattttgaggagtttgcttcttgtgagaaggcagtctgataaaattctccaccacatcatttttgatctgctatgtattttggcgccccagaccagtcgccatttctcattgtccttggaatttggctcgagattcttggtaattctataggtggatttgatgctgaattgtccatttgcttccggtagctagagccacgagtctttcacaggagagtttggcaaggttatatttagtattcgtttggcatcgtcctgttgaaaccaatgtcgaaccagatcttccttccacctattgtccccaatgaagttacttaccatgctaatcccctatgttgcctctctcagaggttttagttgaagttctcctcccgggacccaagggtggaaccaaatggacgtaccattcccgtttcc

SEQ ID NO: 252710 - DNA, 698 bp, Cannabis indica
atatggatgtctaaagcatccaaatataaaaattaccattaatgtttaattgtatttttctttattatattatttaatttttcattttcttaatcttatttttgtataatcccattagaataaactactaaaaaaatctcattcattctttcattctcttcttctctttgtcttctctcttttcttatttctttttttattgtatattattttataataaatttaatatattagtaaacagatatttttttaaaaaacctatgtttttttttttaataatttgtttatattaattaatttgtaaacagatacaatacaaccaccagtaccactttttagttaatctccaatattctttatatattttcttcttcttcttcataacgatgcctatagttataaaatattaatagtggttagtatcatttagagattgggtcttgcgattagttagtgatagagtattgttattagatactagcagtgcattaacatcacgtaggtgacaccttacaattagttaattctgttccttaaaagttattaaattaaattatatagaatctgatacttaattacactaataacaatatgattgctaagatggtgttaggctgggcaacattggtacctcttagcatttctcattagcgatattctataaaacttattacattaaattataataagaattgtac

SEQ ID NO: 252711 - DNA, 1457 bp, Cannabis indica
attgaaaaagcactgtagtgtgccttagcattagggcgttacagaaaggttgctcataaagaaaacaagattccaacactgatatgaacttgtccatttgttgctcgcttcgtaaagccccaccaaggttgttttggttagatagaatttcattaaaatcaccaatcactagccaaggcatcaaaggtgcaacatccttacatctctcaagaagtttccaagtatgaattcgtttgtgagtttcaggagcaccataaaaggcaaagaaatgccaagattgcccattatcaaacttcatgtagcagtcgaaaatatttatattataattaagaagagttacatcaatattgtcttgccataacaaaagcaaacccccacttaacccgaccctaggtacttctaaaccattagtaaaacgtaaagcttgacgataacgagtaactacattacaatctaatctagtttccacaataaataatacatgaggagttcattagtagacaaatctgaaattgaggaagtaagtttgtgacccttacaacgctttagagcctttcgcattgatatgttttcaggaagtctctttgaaactcgattaggggactggttttctttaccatatagagcaacagtagtcatgcaagtggtggaattggacatgataggagcataagttggctgactagccatgttggatgcaatgatgaaaaggttagttttgtttgcatcatgcagatatgtagcaatatatcccagtggttgtccaatgtttggcatgaatattttagacaggtcactctcatttggagatgatggtaaagtattgggagatggtggaatggtgccaaccttattttttccttgaattagtgaaggtgaggcttcagtagttgtggcagacgatgcaagaataggcaactcaagactttgagaacttccctgaattccaagagaaatgttatgttgattttttgaactagtaaaatcagaattattcccagtaataggctaatccatgcctacttttgccttattttttactgcagcatcattaacagttagtgtcacagccattgtgacattattatgaaccagagatgcagtgttcaaggttgctggtgcaaaggaaaaatgggcactattatggtgttaaaagttgtccgagcgtgattgatggtcaccaacaaaatctgttggtttgatgattccccataaagcagtgttttcggttgtggttgagcacgaagagagagagcagggattgtactcatgatggtttttcttgctaatcgggtaactaaaggccaagcattgcctttggagaagtctgttctataccgatcataacccgatgttggcaaggcagcccccttaatagcaggtccataagcgagttctggttctataccattatcaataagttcaaggaaagtaaaacatttctggtaaggatggcc

SEQ ID NO: 252712 - DNA, 652 bp, Cannabis indica
ttatcgtgaaataagttacgtagtaggtgaaagtatgcccaacgaaaatatttttaaaaatacttaattatatgaatatatttttgacatttttaataaatgctaacataaaacagaatgtcatacaatgacatttttaatatcttttcttttttattttttttaattattttgtcttaaagtgaaaatttaattatttaatatatattaaataataatataatattattttaataatttttagagttgcttatcattaaaatattttaaaacaaaaagcgctaaaaataatgcaaaaaaagacataaaataaaatattatattttaggtcatacattaaaaatacttaaagtagatgcaaaataaattcctttttactttaatgattaaaaaataaaatataaatataaattattataaaaaaaaaagacttttacttctattgttcattaatatagaagggatgaagggtatttactttgtattaatttatcaataatcattcaccactttacttattcataataaaattaaataaaatgtgatggaaaaactatattactgtaaaaagttatattttgatggatattattaacaagacgtatactatatgagcacaacttagtagtgtaaaaaattaaaaaaattaaaa

SEQ ID NO: 252713 - DNA, 578 bp, Cannabis indica
aaaatatatattaaaatatatcataaaagttatattatgttcataaaaaagaatgtgttagtaggtataatttataacattttgctaaattaaaatttatatctaaataagaaaaagtgtataaattcgagtaaattaaacttaatcttgtacatgaaaggaagttgtctagcatagataaaattgttcttaaaaatataaaaaagttgtaagtttctattttgaaaagagatcccttgtggatgtaattgactcggttagattaataaaaattatctttcttgataaaaaaaattaacaatgtaaattaatttaaaaagtaattatggtagaattatgtatctaaacaaaatggtggcgaaaatatttttcttaagatcatgaaatatatcaacttcattgaaatttagcattccgagtacaaaataacgacttgaagattagctgaggcattatgatcatgaatgctacgtatacaattagagaaaaactgagaatgtctagctacataatgagctacttgattcgtctaataaaatgtaatctagtagaatgtagagaagataacagattcttac

SEQ ID NO: 252714 - DNA, 1181 bp, Cannabis indica
gtaatttttgttaataaatattagataattcaatattaaaaaataaacgattcaaaatattaatccaattcacacttttgtctagattgaatttgatttattatgcagatttgattggatctaaaatataaattttgtacttagtgtgaatcaaatataatatgagcaaaataatatggattgaatcgggtgaagacccttactttcaaccattgtttgagagaacaaagttcaatcactcaagtacttttgttgttgtttcttgttgtatctgcaacaaaaatagtgttttgtttgaaaagtgtgcatttttatataaacattaattataaatctaacagtgctaatgtaatttagctttataattagaatttttgtctcccgaactttgacatgtattaaattatgttcctgaattttcaagatcgttaaaaatcctccttaaattattgagatcgttggatttaaggacttttgtccaattttagtaaggaaagtttgatatggatgaaattcagggggcatgatttagtacatgtcaaagttcgaagggcatgatttggtagatatcaaaatctgaggagcataatttagtacataaacaatcattgaattagtaaaaatgaatgcaattggactaaaatcattaattctaacaattttaatagttcatgggaaatttttaacgatcaacaatattcaaggggcatgatttgatacatgtcaaagtttagaaaataaaattcctaattagtcttacataaattagttttaaaaagggttactacattaataatttttaaagattttctattagtttcaaagccattcatctccatcacgaaatcatgaattttggtaaaaaaacatttttggtccctccaaattccaattacctcctaaaattcaaatttttgcttgggaaattatgcatgatactttgccggtagctacaaaattagtcaaaacaaaatttatcacaactgctacttatttcttatgctcacatgtttgggagtctattagacacgtactgtttggttgtaagtatgcgaaagctgtttggagacacttgtatttttgttttgactttcacatggccaattctatggttcaagtagactacttagtccatatgtcatctatgttttctaaagatgaaatggaatcaattctttgcg

SEQ ID NO: 252715 - DNA, 2267 bp, Cannabis indica
acctgtgaatttctctaaacttacgaattttctaacattaatgaaataataatattatttaataccagttatacaattaattaaatctaataaatatattataaaaaccctaatagattttcatatcgggctttaattaaacgactatctacttataaaaatatcataatattttactttcatagttaatacaactttaactctctttagaaaattggtacaactactctaagcaataatctctactcactaacaacacaaataaatgagataattatcctcgcactattaatatcccaagaaaaaattaaatactattttaatttagatattacacagacagaacttaagggcgccagagaagaaagttattgtcatccagtttgatggagactttgtgagaaaaggccacaggattgaaggtttgagctaaccatggaagctagagagagagagaagagcaacgaatagagaagatgaaagcataagcaaagagaagaagaaaaaaaaggttactctaataccatgttaagagtgaagaaagagaatgagaaagtattatttcattacattaagaaggagcaacaactcgagatatataaacagagtacaatacaattagaaacgcaaaagtttttgataaatacagctgtacagtaataatagaatcctaactaacatgtacagtaagcctaactaatattccaaacccaaaaatcatcataatccaagcaacaaatctttgcacaacatataagaaaatacccttttggcatccacattttacataaaaattcaagaaagaactgttcacaactacatatccctcaagtccaagcttaatgacccacccataaatgtcgagaacaatggaaagagctttaacaaaatatataaatacataatgtattaactatttattagaccattgttggacaatttttatcaagatcttgatttactaacatgtatgtttaattataaatctataatctaacattctaaatataaattctctcaaataataaattaaacacatacaaagttatagaaaatcttacattattagcagcagaataatatgactcctttcattcagatctctaacccttgattctttctatcgcaaagtatgatcatgatctgaacctagtttctccttcaggtgacaagaacactacacaatattctacactatcttgaatatagacttgaattgtgtgggcaatcactcatacactatagggttcgaaaatttgagaaaaaggagaagaggaatttaaaattagaaggagctctctttattttctatttatttgacagaaagtcaattaagttataaaaataagagctataattttctatttatatgatagctattagggttaggtttagaatttaaatggaattaaagaaaaaagataaaattggctttatttaaacccttgtggctgaattcctcatgggcctattgggtttcaattttgccattttatttgaaacttatctttcttttctcaaatgctattttttaattctaactctataaatatcaattctttttatttattaattataattaattatcaaataaaatttctattcaacttatttattaattagacctttcaaagtctcttaattaattaataaatcctaaaatctcttttcttctcaaatagtcccttacttagtgaaaactcataaataagacatggtcttatttaaaattctaattgattaataaaatcatttaactgagtgtacaagataatattatctcaactagtgtggggaccatgagcctatataatcaagctcccagtatgtatttttagaatttaccaagtaaattctctatcttattaattctttctgactctactatagatttggaattacactcctaatcatatagaacgctatacaccaagtacagatacactataaattatctattgttgcaatccaaataatcaatgatcctctattaatgatctacattgagtatggataattttaccgttctacccttcaatgtattttatccttaaaatacttagctacttgtaaatgatatttcagtaaactaatataattattgaaatgagtactctaccatttaaacgtgtttagccaagctcgaagaaaattatcgtttcaattctatatatttatagaagctatagattatgtatttatgattagcgctcccactcaactacactatcgtgtttccaagatgtaagtgttgagctaatctaatt

SEQ ID NO: 252716 - DNA, 853 bp, Cannabis indica
tattacaaagtttaaattctgcgctattttgattagtaatcccatttaggggattaggatttcataaagaaattgggtagcgtgcctatttatttagggcgttacatcaataggtggtggagtgatttgatgaattttctcacttatcataagatcatcgccattatgctcttagttagcatagtcttttgcttgcgttgtcatgacaactgaccaacgtgcatctaatgggtcactcatgtaaaacacctgagtggcttgagacgccattacaaacctatcagacttgtggcctattcgattcaagtccactaatttgaatcctagttcatcttctttaatcccattatcactcctaacccaatcacaaagaaaaataggaatttgaaaactactgtaatctaattctcaaatttcttgaataaaaagacatattacattcaattgagtttttatcttttgaactagatatttggaaagctctagcaactatcatgacaccgctattttgtgtttttctagatttatcaagatctttggtacaaaatttagtactatttatatagtacgattggtacttgagtacatcacacgaaggacctcgtgatatgcaaagcattgtgttggatacattgcttggggattcacaattttcagcatatacctaatatgcaccaatgaatagtgagcacatgtgtatatataagatatgtaacaaaacaataatgttaatatatagtacctttttttttaacctatgtactgaaatttcgataatattcatcttgtacccatttttgattccttgccttagtcggattattattcttaatccaattaaaatgttcccttc

SEQ ID NO: 252717 - DNA, 1367 bp, Cannabis indica
ggcaaaatgcatcaatttacttttaagtctaatgtaaataaaattgttgatccatttgaaattattcatactaatgtttggggtccatctttctatacttcaagggtggttataaatattacttttgttgtgttgatgactacactaggcttgtttggatctatcccatacaatctaaatatgaagttacaggtctctttactcacttaaaaacttggttgagagaacgtttgaaacaaaattaaaaagtgtgcagacagatcttagcaagaaatatttgcctctgtacaaacactttcaagatcttggcataacccttaggcaatcttgtgcacacacaccaacaacagggtcgtgtggagagaaagcataaacatgttgatatgggcctaaccttgttgggtcaggctaaaatgcctcttagcttctagtgggaagcctatgcttctgcagcctacttaattaacaggcttcctacctttatacttcaaaatgtgtcaccttttgagaagctttacaaacaaaaacctgactataatcatctcaaagtctttggatgttcttgttttcctttcctaactccttacaatactcacaaagttgccttcaggtctagtaaatgtctgttcttaggctataacaacactcaaaaaggatactggtgccttcatcctagtggaagagtctatgttgcttgaagtgtcacattcagtgagtctaagttcccttacaatgacctattctctaacccaacacaatcttaacttgtccctaatattgtccatactcatagttttcctattccagagaataactatgtctcacatactaccaatcaaagtagcacccccaccaactctcaatcttctcaagattccaatgaatctgttcagattcctcaatctctacacatcaactactctcccaataatagtcttcacactactcagttaaagctcgagtcactcaccatccacagattcctccctaccctatcctctaccacaagagtcttctcaatctacaaaatctgtgtcaactccacccccacttgcccccagagtcaataatcattctatggtcacaaggtctaagctggagtgtttaaaccaaaaacttttttgatacacaaataaataatactttagaaccaacaaatggaaaaaaagatcttgctaacagtcaatggaataaagccatgaatcaggagtttcaagctctcaaaaagaagaacacttaggttcttgttccccttacacaggacatgaaaatcataactaacaaatgactgtatagaataaaatacaatgtagatgggactatcaacaagtttaaagctcgactagttgcaaggggttttcaacaaa

SEQ ID NO: 252718 - DNA, 857 bp, Cannabis indica
tttaggtgtgtcggtcaacctgagtggaacaactgctcggcaactaatagaattctaaatcacatcgataacaacacgaataagtgactcactaaatcacaactgggacttaggttttaaaccaaaaccttatctattgcaacttaatatggcaatgccctaaactattagggaattaaccaaccagaaacctaaaactaacacaaatcgcaaagttgaaatttttgagagccctactgcagagaccggttacccggttttccaggtacctgtaaagccggttacccggttttccaggtacctgtaaagccggttacccggttttctgcagaaaacccaaaaaaattcaaagcttcaccaaaacgattccaaactcaaccaaaccttccatgcctacatattataccccaataaactatttccaagcaataaaacaacaatcaaggctcaaaatcgaaaatcaccatcaaagagccaagcttgagttctaaaactcaaagcttggtcaaataacaaatcaaccatcaaaacatgctcaaataaactactagaaaaaatacattttgcaacacttatttggcaacatttttaaaaaaaaaaaaaaagtgatgcaaatatgttaggtttttaaattaggaacacttaataattaagtgttgcaatagatttatcctcctttaaattatttattcaaataataaataaaatatcatacaacaacacttttaataaatgtgttattgactcttacttcaatattttaaaaggcaacattttcttaaaaagggttgttagttaattttcttttattataaatgaataaataaaataagattataaaattaattaaccgtaaa

SEQ ID NO: 252719 - DNA, 892 bp, Cannabis indica
gcggtgtgggattgcacagcttacccggtatttccccttacggatcacgagactactgactgtcacatcaacccaccagatttaccaatacatccatctctccctccttccaactcatctcaatcactcccatctattcctaatcgaaacacaacacccagaatccacccaatgaccaccagatcccaaagtggcatttataaacccaaagcatatttagccaccaaacaccctcttcctgagtcattactacccaaagaacccaagtccttgaaagatgctcttcaacaccctcactggtttgcttcaatgaatgttgagtttactgccttaaagaaacaagggacatggactcttgttccttatgaacctcatatgaatgttattacaaacaagtgggttcatcgggtcaaactcaacagggatggctccttagatcgatataaatcttgcttggtagccaagggatttcttcaaactcctggcattgactatgaggacactttcagccccgtggttaaacctgcaactgttagaattgtgctaagtattgctgttactcaccaatggtcggtcaagcaacttgatgtgagtaatgcttttcttaatggcactctccaagagactatttacatgcaacaacctccagggtttgttgacaaagacaaaccacaacatgtgtgtctcttacataaagccatttatgggcttaagcaagcaccaagggcatggaatgacaagctgaaacaaacactttacaaatggggttttcatgcatccaaatcagatacatccttattcatccatggctctcatgacacacttcgttatcctctagtctatgtggatgacaatttaataactagtccgtaattcttctcttatggactct

SEQ ID NO: 252720 - DNA, 727 bp, Cannabis indica
acctctttctccaaggcttctgctttcactgggtcgagggggcgtcacttctgcttaaccggtggcatgtacgggttaacattaaggatgtgggttatgacgtggggacttatgccggtcatgtccccttggcaccacgcgaaaacatctgttgttgcccttagtgctttaattattttttctttttcctccggctctagacttttccccagcttgaggactttggcggggtcacatactgatatttcctcgatgtcgtccattggttctacgattttttcggatcccacacggggatccaactcatcttcatccgccattcctggctcaataacttcaaggaaaatcaatattggtaggtgggcggcaacattataatactgtctctcctctccttggtttcccctcacggtccctatcccagcttcttgagtagggaactttagacacaagtgcttgatcgacttaaccacatcgaagtccatcaggcccggtcgactgaggattgcgttgtaagccgtcgggcagtctaccaccaaaaatgtgcagtatttaaaagtgctttggggtgtatctgggcattaggtgactggtaacctcacttttcccattgggataagtgttgtcccattgaatcccgtgagttgggagccagtcggtgagagatcccggtccgtgagtcctattgccgtgaaggcttctttaaataacaaattcacagaactcc

SEQ ID NO: 252721 - DNA, 554 bp, Cannabis indica
aaataaactaatattacgaagaacaaatgcacaaattatattttaataaagaaaacttatctgaaaaattctacacgatttcttaagagtgagagaagtcaacaaacaatgttactgaaagaaaaattcaatataatttttgcgcaacttaaaaaaagcacgtaatctcattaaaatctacatataaaataagttattaaaatagaaaaaggcaaaaaaataatatagacaagtcaaaacaaagacactaactctaattaatataaataaaaataatagtaataaaacaaataaaagtttgtaaaaaagttaaccttttcatattgtaaaaaataatttataaaaagaaaaatcacaatctaaaacgtaaccaatcaaaagacatttactaatcttaaaaacaatcaaataataaattacaatacctttaaaataataaagacaatttgactcttaaaaattaaaaaagagcaactacaatagaaaactttctgtaatgtaaataaaaggaaagaaaatcatataattaagataataaaaaatcataaataatc

SEQ ID NO: 252722 - DNA, 566 bp, Cannabis indica
gtaaaatatgttttattttagtttctttgacagttttatgtttttttttgcaacttttgctttttctgatttttgacttttatttttcaggttccagaatccaatccaagtgtttctgttgaaaaggtagctgccattccttctgatgaagaagttgatgacaccgttacttatactcctcttttggataagagaaagcgtgcaccagcattgaaatcgccttttgttgattttgggtcggctgttgtgagcagcactccaatggaggtaatgtcatgaggttctcaatctggaggagatgagaggaattttaagatggttacttatgtgaagggcctttacgctcttaacgatacatttgctaatctcgtctctcctaaaattgaggtaaaatttgatgcttagattggcgaaggtttactaaaatattctaggtgattattttctttattctgttttgtatttttttatttgtttgaattctattttatttttgtaattatttaaattcaatatttttttgtcgttttttttgttgatttagggcttacaattgttatgaggat

SEQ ID NO: 252723 - DNA, 697 bp, Cannabis indica
gcgtacgatcatcgggacagcaaggctatttttgtaattagtcgctacgcgacaagtattttaaacagacagtaaacttttgtaaatggttttgtaatctgcacagtatgtttaaaaatcatcgtaatacgcctatgctagttagggtgttacacagccgccctggaagtcttctatgaattatggaggccaacccagatggaaactttgattacctcaatgaaaacaaagaggcatatctttgtttttgtgtggcccagaaagacaaggaagaatcctaggcaaccaaccccaaagctccaaccgaccaaagccttgatgctccgaccactgacaacccgactgacttgtacagagagccagagactccagccgtataagaccttctcgttcttctttttttagtttagtctatgggcctttgttcagtataatacgactgactaagcgaccttgaaactcggttatacttcattttgttttaagacaactagctagtcgggcagcctttaatcccgaacttatcgtgcttttgttatctttttattttaaaatgagtatttcccgtgttttggtaattgcactgctatgttctttttttttggagcttgttatttacctttgttttgtacgagtatagttgcccccccaagtgaccgagcagacttttgactcttggtcacttgtattgcacaag

SEQ ID NO: 252724 - DNA, 720 bp, Cannabis indica
atagatcaaaatacacagtgattgtcaactggtggtgaatcaaatttctagtgagtaccaaacaaagggcaaaaaaatggctacatacgccatgatgtcctaagagttgttgcaagaattcaaaagttacagcgtcttccatgtttcgagagaacaaaatttgcttgtgtacatgttagcgaaacttgcaacgaatcataagatcatcaaacactgagtagtcctaatttgtcacctatagaagccaagccttgaagtgtaggggtaaatgccatagttgacaactctcactcatggatggcatgcatttacaatttcttgaattcaggagagcttcccatggataaggctgcttccagataggttcagtattaagctccatgttatgtgatcatggatggaaaaccttatcgccggggactatcaatgccatacttgagttacatcgttggattagaaattagcaccgtgatccatgagattcatggtggcttttgcagagtccataattcttgaccaagtttatccaagaaaatcctttgccaggagaatttttagcccacaatgaggaatgattgcatagagtatgtaaagaagtgcgagcaatcccagagatatgctaaggttttgcgtgcaccccctactgagatctcactcataagtagcccatggccttttacagtttggggaatttatatggtaggatctctccccacagga

SEQ ID NO: 252725 - DNA, 1108 bp, Cannabis indica
atggatacactgtcaaagcctcgattcgtaacccaagttagtctatatattgtttttttttcttttatatattctttcactaatagattatataatatagttttttatttgtagtttataattctataacatatacatatattgggtgaagtagatgattcaaagaagatagaacacttggtttcattagatggagctaaagaaagacttcatctaattaaagcaaatttaatagaagatggatcttttgatgaagtggttgatggatgtgaaggtgtttttcacacagcttcacctgttttgttttcatctactgacccaaaggtaaatatatatacgagcattgttattaggtatcttaaagtataatattatactgatgtgatacgttatggataattagcggtttttcatattgttcatcaaatcaaaatgtgcgaagagaagttctactgttaacctcctactacaatctttgagtcaacctctgtgctcgaaaacacatactggaatgttttttttcaactttttttttatagaggtgttcgttatactcacaacattatctctgtaaatttttcaaaaatttcaaatagtttacagtgttgaaaataagtttgaagttttttgaacacgtgtggtaaactggaatatcaagaactttattttcggtaccccgtaatatatttggattgtttcaaaaatttatagagagatattataactataacgaatacaccaccataaaaaaatttgaaaaaaatattccaatatgtgatttcgaacgtaaaggtcgactaagaagttataataggtggttatatataattagcactcctcaatgtgcaaaatctaatattattgaattacagacctcttatatatactccatatgtgtgtgctcagaaagaactacttgatccagcagtgaagggaacacttaacattctgagatcatgtgtgaaatttagatgtgtgaagagggtggttctaacatcttccatggctgcagttatgtataatggaaaatctttgaataaccctaatgtagttcttgatgaaacatggttttcagatcctctctattgtgaggagttgaaggtatgta

SEQ ID NO: 252726 - DNA, 586 bp, Cannabis indica
aaaataatttttagaaaatatcaataaccaactgtatggtactacttaaaaagtgttgaacactatcaatgcccaataacaatactctattataaagcgggccatttaacactattggtgtctaataatttgaatatttttattagagaattgctaaaaggcattactggtgcctaacacattttttggtgtcataccactattggtgtaattatgtatcaagtcctatataattttaaaaaacaaattttagacaatattgctaaccaatcataggacgccacttataaaaagtgttcgacaccactgatatccaataacaatcatcttttattattatcgaatgaaaggtcctactttgttgagataggtttttatccgttaggaatagtcaaagatgaaatgtgagtccattttgttgagtagtgagtacaaatattcaaaactgaaaattacatgcttcaatgcaaaatagacaaaatattagactagaggcaacttgggcataatacattatacatcatgtaccatcaatcaatattaagagtttagaagacacaaacattaccttttcaaaaaaaaaaaa

SEQ ID NO: 252727 - DNA, 537 bp, Cannabis indica
agaatatatacatgtatataaggcgtggaggacgtgctgaaggcatgtaacccttgtcaaaacatgtaggttataattatgtatctaactttcatcaattatgtttaaacaattgtcaaaagaaaaattatatttaaacaagaatttgattgttgaagtttagatcatcaatcaatctgtttatatgtaagtgcatataatttttttctattattatttactaattagcaaaatttctaacaaacttctaactatttaagggaagagtcacttggactcctaacatcccccttcaaactaagtgtggcataggaaagcacacttagtgtgttcctaagataggaaaaatgagtactaaaaattggcttagttattaaatagtcagcaacttgatctaaggcaagaacatgttgaacatttataagaccttgaaacactttgtttttaacaaaatacagatcgatttcattatgtttggtacgagtaggaaaaacaagattagcgtagccataatcattgtactttgattgtgatacc

SEQ ID NO: 252728 - DNA, 561 bp, Cannabis indica
ggccgaagctgcctcacgttctaactcaatgtttcgatgctgcgcttcttttagatggcgtctcaagcggtggctttccatttcataagttctttctcccaaagattgggaacctccacgattgagctcttcattcctcgccctggggttttgtctattcccacgctgagttctcctcgagcacattgtctgcatactaggaccaacgtcgggttgagttctctgggcacttgtggtctgagcactggggccaccctcaggttgagccctcctagaacgggtggtccttctggactacagattggtaaatcttctagagcccatgggctcttttctagaacaatggttagtttcctcatgtggggtgttaatattctctagattttcagccataaaggggaaggtttttccttaaaagagggagggtttttcctgagctttttcactgaggctctcaatgaaaataccaaattgttaatgcagatttttgttaaccaaatttgagcctcacgatgataattcaacacagaaaaaataaaagctatagaaaaataatatatg

SEQ ID NO: 252729 - DNA, 555 bp, Cannabis indica
tatatatgtttatttataaatatcttcctttaaaaaaatgaaataaatatttgaaagaaaataaataaaataaaatacataaaatgtgaagagcaatttgttgggtctttatgttttgtatgtgtgccacattagaaaattatgagccaatttcacacaattgtgttatgagaaaaacagttgtactgggaaaaaagataaagatagatgtagtagatttgtggaaaaaaaaattgagttgagtatttagtaaattatgattataaatataatgaactaaattacaacattatatcattatatcttaacaactcataatcataacatgacagaagataagagcgatataatgatataatgagtttcgccaaacgtgagtttcgctaaaagattacaagacttctgaacgaaatttatatgtatgtcaaaaagatatacaattccctcctgacattccattctctcatgcataaataaggtaatttctgtcactttgttgaatactaaccacatctaatgtcaattaacatctaattgagtctccctcttgtataa

SEQ ID NO: 252730 - DNA, 975 bp, Cannabis indica
tgccttggaacatattctttagtccgtccagctgtgcctgcacagttggactaacctgttctgcattttggctgatctgagtcacgtcagtatctttttgaacaggaatttgagcgcgggttccaggctacatgatcagcgtgtcaagctgatcatctactcctctccttctattcagatcatttatgagatcatgagtcatccccaacctatcgaatacgaaagcgcccgactctctcagtgattggttggtttggctaatgtgctgacagacaccattagcctggttggaattgccgggtatgacttctcctgatgaattaatagacaaggtctgcccacctacaacttggcccacaggcggaacctgtgaccggagatttggtagctgaccatttatagtctgagaagtattcatcgctggatcttcgtctgtttcacctagtgggatgacattttagggttgctgcccgacaaattgataggcttttcgtatcagcacagtggcttgccaactatgattgtcaatctctgcatgatgagcccttaacgcttctatctctttgtccctccattcggcaaacatgcgcctctgctctttgaacgcgagatttaccacagcgcggagttcttcttgatcatgatgtggggtgttggtatgaccctgcatgagtccaagagcggcacggaggttttggatctcagtgtcatctccaatggttgtttgaacattggtagcgggcagaacggctgtgttatgaatgccctggttggctgctgaactggtattcccagtctcttgcacaccagacgtgatttcatccacaggagtagtcacaccgtgacccacatttgacggctgttcgggatttacagctggcagaacccgtttactgggttttgcaatgcaggatccaccgcctgtgggtttactggatcaactacgcccctatgagtctgtaccaccatcgtact

SEQ ID NO: 252731 - DNA, 544 bp, Cannabis indica
gacaaacgcgagtgaggggacaacaaacatcataaagaaatgacgaaaatttaaacgaacaaccatctaactagcctttgcatttccctccactgtggcggacggccggtcaggtatatcaggttccctaatctttatggcatgctccacatgttcttggtcactagggagagccttcttcttctccttcacaggctttggcacaaagtcctctgggaagagcttgtactaaacataaatggcctcagtggccagtagggtgatgtttcgagcagcatctagcagctgaagaattctttgtgccctctccctgagccccaatatgtgaagggagggcggaagtataaaggaatttgctagaaccgagtgtggacggtatccatgccctggacgaagtagtactcgtccataaaatatcctatatgcccgtcagccacttctccttgagctgagaataatagaaatacccagacttgctatgcttgggagttgactttaaatcaaagagccagttcgtgtcttgcggggatggctcaccccatcc

SEQ ID NO: 252732 - DNA, 675 bp, Cannabis indica
aatatttacaaagaattcggggttatctggattcgggactcggactaggattgggatctggacccacgacccagacccagaatgggacccgcgacctagactcagaacgggacccgcaacccaaacccggaacaggaccgggacccagaccctagacccggaccccaactcgggacttggactcaaacccgataccggcgacccagacccggaacgggacccgtgaccccgacctaggactcaggacctggacttagacccagactgggactaggaccacgaactcggactctggacccgggacccagaccgagagttgaacccggaccgggacctagactgggacccggatccgaacccagacctagaccccggacccggactcggacccgaaactggactcgtacctaaatccatacctcgacctggacccggacctgaacccggaccctaaaactggacccgaaccccaaacccggactcaggacccgaattcggacccagattaaataatactaatacaatacaacacaatctattaatacaagtcaataccaaacatagtattgtattaaataatactaatacaatataatccaacacaatccaacacaatacaatacagtgtaccaaacgagtcctaaaagttttgtttaattagttgaactattttgt

SEQ ID NO: 252733 - DNA, 1077 bp, Cannabis indica
aaataaattttaaataattatgtaaaccatgcgtataaaaaaaataatcaggtgtaaaatacaatatttactttatttttagcattgtaaattattttaaaaaaaaaatttaactggtgacgctaaataactacaatgtacacattcattaaaaataaataaactaaaacattctcctaaatatcaaatcaaataaagaggtctaccaaaacactattttaaaagaacataatactattcatcccttcagatgcatcccgacaaatcacccgggccagatggtatgacgctagatttttatcaaaaattctagccagttgttggataggatgttgtatctcaatttagagacttctttgatcaatgcactcttccttttggtttaaatcacactaatattgtgctcgtaccgaaaaagaagcagcccactgttatgagtgatttaagaccaatctcgctttgtaacgtgctctataaagtgatctctaaagtgctcgctaaccttttaaaatcagtattgtcccaagttattttggaaacccagtcgactttcattctcggttgcctaaactcataatatcatggtagcttttgaagtcatgcactaccttaaacgtaagcgtaaaaggagagatgtctatatggctttgaaacttgatttaagtaaagcatatgaccgtatagaatggagctttcttcgcgaaatgatgtcaagaatggggtttcatgctcgtttcataaatctgattcttgccacagtttctacaataagatatatggtggttcatgcaggtaaagagttgtgtcccattacccttgagagggggatacgccaaggggaccccattttccctacttatttttgctttgtactgaggggttttcttcatagacggtttgagactgctagtgcattgagaggctgtaaagttgtgaatggggctccggtcatatcacatatcctatttgttgatgatagctatgtctattatcgggctacagagcgggaggtctctaatgttctgagactgcttcaggatagaggttaatttgtaagtcctctatcttttttagtgt

SEQ ID NO: 252734 - DNA, 4991 bp, Cannabis indica
  modified_base (4976)..(4976): a, c, t, g, unknown or other
attacatcacgaatatcaggagtgaaatcattactcctaaaaacacgatcagcgacataagatgaagctctagcaacagcatgagcaacaccattagcagattgtttataaacgtattttatttaaacatatcaaccaataacatttttataatctatttataacatgttaaaatagataattaacacgtgagtttcgtgttaatcgtattaatcaacacgacatatttattaaacggattataaataaattaatccaaacacaagcaaatccatttaagaaaaacctcaacccacttatgtaaatttcaaattatgtattcgtgtctaacctattttaccgcccaacaaaacaccttaattacctcttaccatttttgataaataaatgaaaaacactaaaatttgcgctaactgctctctctctctctctctctttgatggagtcaaaatataaaataaactaaatcaaagcaagcaaatcacaatcacatacatacatctatctctttcatattataatatacgtaatacataactgatcacacacatatataaatatatatatatatatatactatacattcatgcacagatactgtctccccttgttgcgcgtgaactcatcaagtaattaaatttaaaaccctctcccaatattctattcacattcacagagagagatagatatgggggtggtgatggtgtggcagtgtgtgatctgctgcaccaaaaaaaaaaaaaaacagagcaagagagaggctgcaaagtccgatgatacgaaaagggtttggaatttgaggcaaatgtcttccatgccgaactcgaggcaaaccttcttcttcttctttctcactcttcttcttcactctccttttactacttccattgctgtaacaaacaatgaagcttctctcttattctcatggcttcaatcttcttcttctttttcttctttctttaattggaatattcatgatcaaaccccatgtaattggacagccataacatgttcttcacaaggtttagtcactgagattaatataaactctgtacctcttcaccttccattgttatcgaatctttcttcttttaaatctttacaaagactcgtcatttcagatgccaacatcaccggaatgttaccggaggatattggtgactgtacggaacttaaagtcatcgactttagctccaacagtctcgtgggttcgattccaaggagtttggggaaacttaggtaccttgaagatttaattcttgactctaatcaactcactgggaaaatcccagttgagattggtgactgttttgggttaaagaatcttcttttatttgataatcggttaagtgggacgattccgacacaactcggaaaacttaccggactggaagttattcgtgtcggagggaatgaagacattatcggaaaaatcccagatgagcttggaaactgtggtaacttgacggttttggggcttgcagataccaagatttcggggactttaccggtttcactaggccggttaaaaaagcttcaaactttatctatttacaccaccatgatctccggcgaaatcccacctgagataggtaactgttctgagttagtgagtttgtttttgtatgaaaatagtttgtctggttcgataccttccgagattggtaaccttaagaagcttgagcaattgtttctatggcagaacaatcttgttggggcaataccagaagagattggaaattgtattagcttgacaaatattgatctttctttgaattcaatctctggtactattccattatcattaggaaaactttctgagcttgttgagtttatgattagtaacaacaatatttctggttcaatacctttaaatcttttcaatgctactaaattagaacagttgcagcttgatactaatcaaatttcgggtttgattccacctgagattggaaaattgtctaagcttaatgtgttctttgcttggcaaaatcagttagagggaagtattccttcatctttggctagttgtacaagtcttcaagctttggacttgtctcataatttcctcactggtaccatacctcctggcttgtttcagcttcggaatcttaccaagtttctcttgattgacaatgacatttcgggttctataccgcctgatatcggtaactgcagctctcttgttagactcaggcttggtaacaaccgtatttcgggtggcatacctgcaacaattggtggtttaaaaaagcttaaactttcttgatctctcagctaatcgcctttcgggtttggtacctgatgagattggaagctgcacagagttacagatgattgatcttagtagcaatacattggaaggtcccttgcctcatacactgtcttctttatcaggtcttcaggtgttggattgttcatccaatcgattttcgggtcagattcctgctagctttggtcgtttggtttcattgaacaaactcattttaagtaagaattcattctctggtacaatacctttgtctcttggcctttgtttgagtctacaattgcttgatcttagcagtaatgagctcactggctccataccgatcgaattgggtcgaattgaagctcttgaaatagctcttaatttgagctggaatggactttcaggaccaatcccatctcagatatctgctctcaccaagctttctatacttgatctctcacataacaagcttgaaggtgatttgaatccattaggagggcttgataatcttgtctctcttaatgtttctcataacaacttcacaggctatcttcctgacaacaagctcttcaggcagttatctccaactgatttagaaggaaacaaagggctttgctcttcgatttcgataagggaatcttgttttctaactgatgtaggcaaggctggaatggctaaaaccgaaaatgaagtacagaggtcaaggagacttaagcttgcactagctctgctgatcactcttaccatagcaatggtagtaatgggagtaattgcgatgataagagctcgaaaaacactcagagatggcgatgatgattctgaattgggagactcatggccttggcaattcactccattccaaaaactccatttctcagttgatgaaatactaaagtgtttagttgacaccaatgtaataggcaaaggttgttctggtgttgtttacaaggccgatatgcaaaacggcgatgtcatagcagtgaagaagctatggccagcagctgcagccacaacaagaggttttgttgatgaaaagtctggtgttcgggattcattctcagctgaggtgaaaactcttggctcaattcgacataagaacattgttcggtttcttggttgttgttggaatcgaaacacaaggcttctcatgtatgattacatgcctaatgggagcttaggaagcattctacatgagagaacaggaagtaatgggttggagtgggagctaaggtaccaaattttgcttggtgcagctcaaggacttgcttatcttcaccatgattgtgttcctccaattgttcatagagacatcaaagctaataacattcttattggtcttgagtttgagccttacattgctgatttcggattagctaagcttgttgatgatggcgattttgctcgatcctccaacactgttgctggttcatatggatacattgcaccaggcaagttttcttttcccttcaataactttactcaaatagtagctatgaaatatatagttcaggaagaatatttaacatcgataatagctaatagtagctcttgttttttttctttctttcagaatatggctacatgatgaagataactgaaaagagcgatgtttatagctatggagtggtggtgttagaagtgttaacaggcaaacaaccgatcgatccaacgataccagatggactacatgtagtggattgggttagacaaaagagaggagggattgaagtgttggatgaaagcttactttcaagatcagaatcagagatagaggaaatgatgcaagcattaggcatagcattgttatgtgttaactcaacaccagatgaaaggccaacaatgaaagatgtgtcagcaatgctcaaagagattaaacatgaaagagaagagtatgctaaagttgatatgcttctcaaagcctctcctccttctcataatgctaatgataatggagctttgggaacttcatcttcatcaatggcaatgcaaaaaatgttcccaaaaagcaataacacaagcttctctgcttcttcatttctttactcatcatcatcatcttcatctaatgccaaaatgggattgaagtaattatgttattgtataagtcatgatcaagtttcctcatttagtttttgttctttttctttgttctagtttttgttttattgatgtaaagattaaaaaaaaagaagtttatatgtgtaataaattggatgcaatgcaaggaaaaaaaaaataagagctaatagaagtgtaaggttttttttttttttttttttgccttgtctctttattatcactattaaagaaaaaaagggttttttttaaagcataaatgcaatatgagtttcttaccatttcataattcaatccctttttcaaatttcaatattggaaaatactaatttttgttctctaagaacttaaaatgtcaaacaaacctaaaagtgcattatatttagagaaatgtgaaggttaataattgtgtctagtacgtgtttttttaactgatctaatttattttatcttacttaaataagaaaaatgctaaaagaatataatatcattaaataatcgtaaacatcacctctaaataatattagacactactgatacttaataataatggtccctaaatataaataatgatcataaaaaactattaattatttttaaagtgttatcttataataatgtgtgtatcgtagtggtcctaagagtatcnctaaatggtgtaatc

SEQ ID NO: 252735 - DNA, 1077 bp, Cannabis indica
ggcatgaccgaagcttagtcaggaaggagtttaaacctgggcaacaagttctacttttcaattcaaggttgaagttgtttcctggtaagctaaagtcaaggtgatcaaggcaatttacagtgatcaaagtgtttccttatggagcggtgcagctgaaaggagaaagccccgatactttcaaagttagcgggcagcggttaaagctctacttgggaggtccatttgatcaagccaagtccgccataattctagcgccactatgaagaactcggtcaacgtctagctgtgcaacgataaagacagcgctaattgggaggcaacccaagttttctttatgttttagttgaactcttttatgttttagttgttattttctttttctgttctttgtagttttgtttagaaaactggtaaaacaatttttgattttcttattatttttgtactgtatagaaaaaaaaagttttttttcggggttcggcccagtggccgcggccagagatagcttggctgcggccatataagaattacagagaggcatttttgggtgcctatctggccgcgacgagggatagtgctgccgcggccatataagaattacagagagcacattttttcgtgctatctggccgcggcgagatgagtcacacgggatttaaaaggcaaaaattcaaaacatttcaaaacccaaccttttctcaaccctaaccacctccacgccgaaaacacctcctccacaccacttttcttcttgaaatcccatcctaaacccttttccttcaattctaaccataaatcttcatcccaaatcattctaaaccactattcccctcatcaatcactcttttcctctcaaaatgaaccccaaatccctaaaacctcacccaaatttcaaaaaccactattcatcttcttccttctcaagaacttgaagctttcctttaatggaggttgaataaaggtggattctcattgaggtaataattcaaagactctctatacaatttttgctggataattttaggattgttggagaattatggaatttttgttggatttttgggatttttgctcaat

SEQ ID NO: 252736 - DNA, 904 bp, Cannabis indica
aaaatctgcattaacagtttggtgctttcattgagagcctctgtgaaaaatctcagaaaaagccttcccttctttttaaagaaaaaccttctccaatatggtggaaaatcgagataatattaacaccccacatgaggaaactaaccgtcattctgggaaagagcccatgggctctagaagatctaccgatatgcactccagaaggaccacccgttccaggagagctcaacctgaggatggccccagtgctcagaccacacgtcctcggagaactcaaaccgatgttggttcgagtatgcggacacacgctcgaggagaactcagcgtgggaatggtcagaatcccaggacaaggaatgaaaagttcaactgtggaggtgcccaatttgtggggagagaacttaagaaacggaaagtcgcagcctgagacgccgtctggaagaggcgcaacgtcaaaacgttgagttagaccgagaggcagcttcggccagagcgacgcaggggacgaacactcaaaatcaacctgaacctggagtgacccgaccgtgaggcagacttcatggctcacgaaccaggagacaggaaaaggcccaggaagaacaactcggggaaaatgagacaccctctgagaatcaagatgaacaaccagaaaggagacaaccggaaactgatgaacgagaaatccctcatgaaaatgaggaggatcatggaactcagtcgggagaatggagatcactttctaggaatcaccagcgttcttcccaaacccatagagtcagaactcgtacgtaccttgatgggggaaatacaacaagccgctctcgggaggaaagaacagagcgtgaagaggcaagggtgactttgaggcgatccagaactcatagccgatcaactcgaagaggaga

SEQ ID NO: 252737 - DNA, 593 bp, Cannabis indica
ctcatatatttacaaaaatacttgaaaagtgcaatctccctttattctttaaaatctattttattattattttatatatatatagatatattatatttttcaaactgaaatcttatctatatatatactaagcatcaaaattctataagtaacaaaatacaaaccttataaataagtcacaatactttttgtcatattcatgtccatgtatagtatattaattaggccttacaagccatacttaatgcaaatgaagaaaaaattgaccgaattgtataaataacttaggaaatttatgtgttagattcttttattgttgttttttgtagattttttatttgtttttgatatttttaaaaaaacatagtctaattttttttatgatcatatatattataaatatataaaattacttgtaaatttttaaaaaaatactaaataatgtacagtgctaaaagaaagatttaaaccgttacttgtcactcgtacaaaaaaataatcgtgcgtataacaaaagataaatcttagtattcgatagtgtgaactactcaaaatttttaaaaaatttacaaataattttaaataactataat

SEQ ID NO: 252738 - DNA, 773 bp, Cannabis indica
aatttggagctgataaattcaaaatttcgattggagtgtgagatatgacttgttagagcattgaaatagtttcgaaaggtaagttgagtgtcgtcaatcaaattaatattgattgagttatgactattttactgaaggttgttttgcgcccaacacccaggttgacatccagcgcgcaagttgacatgtgacgtcaacctgtacactggatgagttggaaaacatgttgggatgaatattttgatacctaaatgatattttaacaccacatagctagtttttgcgctatggtgaagttggtcaccagttcttggagatattgttattttgcgggaacgggagactcgaaactcccaatttctgagtaagtcactttatcttaaaagtgaaaatatgaagttataaatttgactcttctgacttcatgcttttcagttattttgaaaaacttgacgaacaatcgagacaaaatcaaaatcagatgagcaaaatccaacacactaagccatatgttaactcaggcgttgagtgcttattttgaagcttccaagatgtcgttttgatatttttaaggttcttgaacttgagaacgaggtctcttatcttatttttgaccattttggagagaatgcttagagtagaatttgcatttgagtgattgaaactagcacaccaggttgattgtcaacctgggcgctgggcttagcttcgatgtccctagaactcttgttttctccccaattttacttgtatcttctttatttttgatgatg

SEQ ID NO: 252739 - DNA, 596 bp, Cannabis indica
aaatttagtgtttcaatgtaatgcataattgaaaatttttcagttttcatattctaacatcttaatattattattacttttttccccaaaatataagatattgtcggatgtttatgtggtgtgggagacattgagattgttggcgcaagttggaaaaaaagagacttgaaagttataacagattagtaagtttaattaattgaaccacaactatatcaatttttttttgttacagttcgttatttatagaaataatgtttatattttatcttggttgaagtatgtcaatgaaattttaccttttcttttttcagttcagtcacatcaaaaattacactgtgggggtaagatggcagtgatgtttgatacaaatgtgtataaaaaagatgagggttttttttattgtgatagtaacttctaccacaataaaaaaatttcaaggtgattatatatgttgatcttaatattacaatattatttcgtttactacgtgtttttaataaaatttagataatttttcaattactataaataggtgaaatcagtttttcttctacaagtgctaccaaattatacataaatctagaaatagatta

SEQ ID NO: 252740 - DNA, 555 bp, Cannabis indica
gtattgatccattcatcaccaattagttttgagatggaactccataattctcaatatagtatcactgtcatatcttttgcaggcaagtgatcctatccgatttgtcccacatggaataaatggtaagatattgagcttatggaatataatcatatattttactttcatcaatatggtaaaatattgagcttatggaatatagtcatatattttactttcatcaattatgtttataaaaatattaaaaaaaattatatttaaacaagcacaaagtgtagaattggttcacttactgaaaataaattcatcagtccttaaatataagcttatatgattttctctactattatctattaataagcaaattttatatgaaaaacaaaataataattaacaaaacgttataaaaagtaaaaaacaacacaaaaaaattaatatcatatgtatacttgtataattttctacaatattatatatttattaataaattaatatgaaaaaaaaaacaattaagaaaaaagaagtaaaaaaaattgaaaaaaaaaaaaagaacaa

SEQ ID NO: 252741 - DNA, 712 bp, Cannabis indica
aaggttcttaccatctatttcacagataattctctgttagtgttcattaaacaataaattatagacattctcatcagcaaaaaaaaagctgaaatggtagctattcaatagatttctagccagggaagtggtgtatcatcttactgaggctattaaggtcaattggtagtactactcggttgaaagttttccttttacttttatctggtcatatatttagaatggaaatttaactaggtgcaccgaatttaaaggctgattggactttggatgtgttttctaatcattgtcatgctagttagaaaatacaatttgtctttgtaatctctctctctctctctctcttcaattctgaaattatttggagattatagacagccagacaatttggtagtgtttcttctattgtgattctgtgctcattaaaatacctgttgcagatcatagacattagccagaaatgtctctataaaacattgagagctggccatacaagtgtatccttctagtagatgtaaactcattatctttaacttcatcaaatatcatacaataccacacaagtacacagggccagattgtttaattaacaaaacattatgctgcatagaaattactttattttttcattgaggatttcttctttcctatgcacgtgtacttttgaatggctattttcaatctttacacatacctctcaccttaactatag

SEQ ID NO: 252742 - DNA, 522 bp, Cannabis indica
tgtacaaagcttgtgatgtagattatatcatgtaaataactgaaggggaaaaaaacaattgaaggtcaacaatatttttgtcaacaatatactagacaaagtatggccaggcaataatgataataataccaataggaaactcaaaaaccaaaactcaagtcaaggcaatatcttatgcaaataaaaaacaaaaaagattgtacaaaggagtccgattcactgaaagtagttcattatgaactctattccagatagccaactaaagcaaaggatatttagggaagtcgggcaaaatgtatttctgtagtcatgcagatgtagtcgaacagttctatttcaagtaaacatattaaaatgtacataatttgtttccatgcagatgcaccatcaaacgaatagcctcagacatcagagaaaaagtaatcaatgaatcataaaagagacagtatggtggagaaagatacttccctacagcatgtgatgaagagcaggccacagacaactacatagatcattttattt

SEQ ID NO: 252743 - DNA, 1213 bp, Cannabis indica
taccctcttttttaaaatctattatgtttacttcttttttcactcattctaccaattttactcctatcacttcacgatagtttttcacttttctctaatcaaaattttgcccaaaatttctcacaaacctacacatctatctacaaagaatacaaattaattatattttcaataatgtcttagttatgtaactgtgtgaggataatttagatacaatactcgtaagagatatatttgaattaaaatttatttggaggtaaatttagttattgtatataaaaaagagggtattcttcaatttttttccttaatattttgtcacaaatgagtcgtaaaaataatgttgaacacaaagggggactaattggtagtggttgatggatggattggcgaggggatagataataatctcttcgagacaggacaaatctcctaaaatgcactcttcaagtcaatatcaaactccaattgaaccaaagttatattttctcattttatatatcacaatagctgtacaattacatatttataggtcttcacatcctttacaatttactaataaacacatacactatttcatagtgtaacactttccgactcttcaaaatcactttcttctcaaaatataaaaatattaagaaaaaaaaaataaagcacaaagttataaagtaaacactaaacactaattactacccatttcagtccatttgttggcccaataagcttccaatcttagtccaatggtaaaaaaaaacccctattgttaattaggatatttataaaatatggtaatatgaaacctagtttacataaataaggtaagtaaatttaataggaaaaaatatggtatttaaaataaaaaacttaatatatatatgggatatgtcatttatattaccataaaaaatattaaaattccgttcattttttttaaaaaaaaaaaaataaaacaaatgaaactacagtgatttccggagttgttactggtgccagaaaagtcgtcggagtctgtcgtcggtgccaaaaaagtcatcgaagtagctgccgatgtccaaaaattcgttggagttgcttccggtgccagaaaagtcatcggaattgacattgttgccaaaaaaatcaccaagaaaactggtttctttatcaagaaactggttttgaatatataaaagtaaaatttataataataaaaaaaaacctataaatccagttt

SEQ ID NO: 252744 - DNA, 669 bp, Cannabis indica
ttcttgagtgaattggaaaagaattcgcttgagcttttagattgtttgaataaaaattgcttgagcattttggtttcttcaattgaattatgtatgtatgaagggaaaaaagaaaaagaaaaaaatctcaaaggactttgtgtatttgagatcttgagtatgagcagtgttttttttttttaattatgaaaaattattggaacagaataaaagtttactttttgtgcaattcatgttctttctaattatcatatttgcccatatattccaatagagtaatgatatgtccacacataaatttgacacacttataccaagagaaatgttaaaagacactactagtagtgcctaacacttttcttggtacatatcgatattggtgtaattaaatatcgatcgagtcacaataacttaagaactataaaaagtgtatactcaaaaagctcttatatgacaaataatgtaaacccaatcattttttttagggttatttgcggcaaaacctcctaaagtgggcaagtttttgcaactaacctcctaatctaaaattttggtggtaaaactacctaaaccactagtccgttagcagttagccctttccatccatttttggctgttaactgccatggtggaatgtccacgtgtaacacagtgtacatgtggcacaat

SEQ ID NO: 252745 - DNA, 903 bp, Cannabis indica
cgggttttacaacaaaacactccgatcccggcttaagtcaagaaaagaaaaagcctcaaaatgtttggttttaaaaatccatgtggctgtccaaaattttatcctctcccagacaaagtttgctgatctctcttgcccttcaaaaattctgctatttctctcattccacaccgcccataacagtgctaacgttgtagttctccaaagcttaacttttcttttacttcccaccggtttacttattagggtctgtgtcaccaaacaaggcataacccagtccagactaagttctttataaagtaatgaccaaattttttgagtgtatgtgcaatggaagaacagatgctcggtcgtttcattactagacttgcaacaaatacaccatcccggagatatgtccatgtaaggccttctcttttgtattacctcgtgcacatttactttccttagagccactaaccatccaaaaacttttacttttaccggagcgctacatttccatagagttttggtccattcgaagtcccttgatccgtgacttgaggtgaaccaaagaaaggcagatttgcaggagaaagagcctccgtactctggtttccaacccctactatcaatcgaggaatgggctatgttcacatgttccaatcgctgcaccagctccattaaacttgggacttccctgtctaacagattccttctgaaattaaagtcccaattagacaccctgaaaccaccttcctcaattattgccatgtctttgatgcacttattcttagatctagccaaaatggctaaatccgggtaggaggtcaacagagaattctgtccaatccacacatcttcccaaaatcgaattttctccccattccctaattgaaatgaaaccaaactcaaatattcacc

SEQ ID NO: 252746 - DNA, 577 bp, Cannabis indica
aaagaaaaaaaaatattgaattattatatagtttttctaaaaaaaaataattattatggtaagaaaaaaaaaactgtcacactgcattccaatgtcaaccaaacacggtaatgttgctttcctagctcacttcatcactctccaaacaatgttaaacctattcttatgaaatgaaacctgcataccaaactgcccctaaattattactatctaataaaaataaataaaaacataagtaaattaatatacatgcgtaggtcgacataacatcaagactcgtaattttattaattaccttgaaattaagaattaatataagattattatctccaacaatatttcattattgtgattgtgtatacatattcatttttttggtaagaatttcttatagatatatagaagttatgtttccaaattaaaatgatgtaaaatgaaaaataaataaatgctagctgtatcttataatattaatttggttgtgatcaggccggccctgagcataggcgggctaggtctgtgcctagggcccacctaccccaagggccaaaaaaaatatttaccttttaaaattata

SEQ ID NO: 252747 - DNA, 526 bp, Cannabis indica
caaagaatcttcatttggccactttctcgatatttctgactactatagaccttttaaccaagtgatgtggctattactcgttcgagaagcagattgttacagagattcagagatgtggtttgttgtgaatgggataccaatctgattcttattaatgaagtatgcattaatatctggactgaaatgctcaaattgtaccctaaaggttgggaatctcaagctgagtcaaaatcattcaaagatagacactttaatgaaagaccttcatgcatcaccattggcaacttaaagatcaaattaaaatagtctgaccaaaaccaaaagaaaaaatcacggaagaagaatgaagctaacaatgaaatattaaagatggcttcactcttgttcatctatggagtcttaatgcatggagacaaaaaaacaagctaacattgatccaaaattattgggattggtttatgatttggaaatattcaaccaattcccttgggggactcattcttatgagtacacgtcaaagcaactc

SEQ ID NO: 252748 - DNA, 1429 bp, Cannabis indica
tagatctaagatcctggtaaataatttccaacaatactcaacaacaaggtgttgactatttcgaaacttatgctcccgtagcaaaattcaacacactcaaattacttctctctctctcgctgccactaaccaatggcaccttcaccatatggacataaacaacgcatttcttcatggtgacctccatgaagaaatctatatgaaattaccccaaggttacaaaccgaaagtccctctccctccaaatgttgtctgcaaattgcagaagagcatatatgggctcaaacaatcatctagacaatggtatgccaagctcagtacagccttaatcaaacaaggttttactcaatcacaaaatgacaactccctgttcataaacgctcccatgacacatttcttggcttacttatatacgttgacgacatcatagtcgccaccaacaacactacaacccttaattccttcatatcaactctcgacagtcacttcaaattgaaagatcttggccctcttcaatttttcttaggccttgaaatagctcgttgcaaaaatggaatctctgtaagtcaaagatcctttaccttacaattattacaagacagtggcaagcttggtaccaaaccggttttaactccaatggaacccaatacaaaactcaacaataaaaccggcaacctactcaccaatcctacacaatacagaagtctcatagggaagctaatatatctcacaattacaagacctgacatttcttttacagtcaataaacttagccaatatcttcaagcaccacgggaccctcatttacaagcagccaacacttaaaaggcactctaggtcaaggacttttcttccatacaacatcacctttaccactcaaacttcaagcctttgcagatgcggattggggagcatgtttagatacaagaagatccatctctggctactgcattttcctaggaaattctctcatatcctggaaatcgaaaaagcaataaatggtgtcaaggtcatctgctgaagccgagtacagagccatggccaacactgcatgtgaactcacctggcttcattccatcatcaatgaactcggcatcaacatccaacttccctccaccctgttctgtgacaaccaagcagcacttcacatatcaaaaaatccagtctaccacgagcgcaccaaacacgttgagatagactgccaccttatccgtgaaaagatcaacattggtacaatcaaaacaaatcatgttccaccaaaatccaacatcgcagacatcatgatgaagcatctgcttctagcacacttctctgctcttatttccaagatgagtgtgaaaaatttttacactccatcttgaagggggctcttagaccgttattctgttatcttccgttattttctgttacttgatgtactgcactatat

SEQ ID NO: 252749 - DNA, 1750 bp, Cannabis indica
agatacttgacagacaagtggtaaaatctgaatttgcaactattaaggtatttatccattcacatgatatgaactccgtgtggattcctttatctatcttgtcgtaattgaataccagttacagtagttttagattgtcatttgaagtaagtgggaggtaggggatgggattagtcatactgttattttatataagttcctgggcaggattgcaggctaccctggcagacatagaaaagtttgaaaagatttatagtttgtgcgaaccatttgataaatgtgtgccaatcgatttgaacagaaaagcaaacttgcgtgatgtttcttcgtaggatgtagtataggtccatgagatcagagtagttgcttggttggaacttagccagtcctaaaaaatatctttcccatcctttgtggttaatcatcgaaggaaattttggattctgttatggcaagttgcttgttttttttttttttagttttaagaacttgcagaaagtaagcttttattctcttagcattagaggaaaacataagatagtttttctttttggcttcagtgtgcactgggcaagccacttttcttgcttagtcacggatattgtagagaagtaaattttgattctctcagagcgtaagagtttttgcatcccatgaaaagtgggcatttttttctatgtgctcttgtttgtgtttatggtactgcaattctttttgtagtttataatgtattgctgtcgtaaaaggagttagaattttgggttaattcctaatctcttttcgaaatatatgttttatcatttcaatgtttaaacagtttccttgagtgccatcatagtgtatttgatttattagtgagcttcttgttttggttttgtcaaatgcagatccctgaaatagaatttgagattcctccggaggctcaacgaggaagtttgtccacggtacaatattagaatatgtgctcggtttattttcttttagatcttattatgtcctttctaatggtctttcaagtggcttttccccgcttagtgagtatcacccaataatcgttttcgttccccctattatgaatacaacccatgtatagtctcctgtgaatgattttacttaagattttatagtctggactggttattataccagtgctcacatttggcagccacttcactcgaaaggatctcatgtgtaccagtgttccctatgcaagtgttttttttttggaggactatacaaatgcatgatatgttatttatatgcgaaaggaaattgtttcgatataattataaccattcaaatggttactcatattaatgtatttgatggaagatgaaagcacatgtactaacttttcactttttgcttgtgttttttatactcattttttcggtatgtatatttctaattttatataagttttgtaaacattattttaactttttttgtattaggtatttattatgatataaaattattttaaaatttaataatgcaggtgggaaaaattgtatgaaaaattgtattttttccttattatgcttcatttgataaccgacgtaataggtgaaaaaaaaatatttcagcaatttatgtgtcatttttgaaccgacagtataagtttttcgtgacggtttcgaaatgccacaaataattttgcgtcatttctaaactgacgcacaagattaaaaagaagagtgtatattttgtgtcggtttttaaatgaagataattattttttgcgtcattt

SEQ ID NO: 252750 - DNA, 833 bp, Cannabis indica
  modified_base (797)..(797): a, c, t, g, unknown or other
attataaactataatatttaaatacacataataataatctcacctaataactaataataattttttcttttaatttttaattcgtatcactttcaaataacatagaaaaaacctagcataaaatttagtatacgtgcctcgcacgtaactttttactagtataaagatacatatttattttacaaatcaaatatctataactttaaaaacatcactaccatagggacaaaatcaatatccctgctatagacatatttaattcttaatatatatatatatatataaatatataaattgattaattttgtttgaaacaatagaaagaactgaacaaaacttatatgatagatataataatgaaaaaagtttagaaaaaagttggccgcaataaagagcttcttctaaatatttagcatataagagcatcaccaatagaagaattcacaacattgtctattaaaatggataagcttatataaattctcacctagcttttatggtaaagaaggcaaggtttgttgtcattgcttggcaatattgctggtgaggtttttttcccttagtcatatttgaatattagcgataggatctgataagcaaccttacttgtttcatgtgttggtgaagctctcaaaatgggaattgttggtaatttttttttaatatggcaattggtcttcaaatttatccccaaaatttattttttaataaatttgattaccaagttcttaattcgttatcgttcataatattaagtaattttttttatatattatttttcattcattattaattanctttttgtgttatgtttgatttttttattgttttat

SEQ ID NO: 252751 - DNA, 1153 bp, Cannabis indica
aaagggaaactatcaagtgtaggaaaaggaaagttggaaaagaggcaagccttgttccacattaaccagtgttgctctggtgcgtgaggaagaaggggtacaacatcatgtctactacatcagcaagcgtctcattggggccgaatcaaggtatccccccattgagaagctagcctacttcttggtcttggcctccagaaagctaaggccatacttccaagctcacacagttaaggtgttaactgaacaaccacttaggcaagttctgatgaagctagaagcatcagggaacctactcaagtgggcagttgaactaggtaagtttgagatcacctaccagcctcaaataataatcaaaggataggcattagcagacttcattactgaatgtaatggcctcaaagaacatgatcccatgatttgtgaagaccaggtccacacgcttgagactgcagctcaggaaaacaatagaccttcctggaaactatatgtagatggccactctagcgagcatggttctggtgctagaatcatcttagttactccagaggaatttcgaactcacaatgcattgcagtttgagtccaccgcaaccaacaacaaagcagagtatgaggcactcctaacaagattacgattaacactagcaatcaaagctgaatcactcgagatctatagtgattcacaactagttgttaattagattctcggtgagtatcaagctcgagggtcaaacatgattgcatacttaagcaaaactaaagatctataagcccaactctagcattactccctccaacaaatgctacatgaatagtgcgccaatgcagactcactagctaaacaagctagcacaataaattctaacactctcaatgtaatcttggtctaatacctcaccaagtggagcattaataaagactcggagcctatcctaatgatcgacaacagtccatcatggatgaccccgattgcgcaatacttagaacaaggtattcttccaactaactagaacgaagctaagagactgatgagaaaagtagctcacttcatcatcatggacgaagtaatgtacagaggaagctactcaatgcctcttctgaggtgtgtcacaaaagaaaaagccaaattcctcatggtcgaggtacatgag

SEQ ID NO: 252752 - DNA, 628 bp, Cannabis indica
tggatagctgtaaagcacattctcaagtatcctcagagaaggagagatctcatgcttctacattccggtggagagttgaaacctactagatattctaattctgattttcagtcagacaaatatagtcgaaagtcaacatctaggtcagtatttactcttagtagaggagttgtagtctagagattcattacgcaaaacagtattgcatattcaaccatgtaagccgactatatagcaccttgtgaagcaactaaggaagtggtttagttgaaaaaattctacactactctagaagtagttccagaagtagaaaaaccactggtgctctactgtgacaacaatggagcggtggctaactccaagaaaccaagcagccacaaaagaggcaagcacattgagaggaagtacaatctactgagaaatatagtagagagaggtgatgtgacggtcttaaagatcatgtccgaacattacctggcagatccattcacaaagatactatctgcaaatcttttatggatcatataactaatatgggattaaaggagatgcctaatttacttttacgacaagtgggagattgttagggtttatgccttgaaaagcctataaagacatttttgattat

SEQ ID NO: 252753 - DNA, 511 bp, Cannabis indica
tgcaattcagggggaatatagcagggtttaagtgattctattaaacggtaaactttcctctctttgttcttttgatttttcaagcttttaaggatagatgttctaatatgaaaagagggaatgggggttccctaaccgctggaaagaggccccctccggatgtctgccagaaacaaaaatccagagattctcctaggcaaacatagggtccaaatgtcccaaaggtagcgaaagaaaaaagagagaagaagaaaagggacataagtatgcaaaccattccacactctgagcagtccctaagcaacgaaacggttcgcaaaacgaaaaagaaagaaagcagcagaacacaaatgaaaaactatgtcgtgcgatggtctctgctaaattcatctcaccatagattcaaatactttgcaaaaaaaaaaaactctaccctaacatgcaagtgaacaacaaaagtaaaaggtaacccagaaaactcacgaaagggttgtgaactggaaattgatga

SEQ ID NO: 252754 - DNA, 547 bp, Cannabis indica
attgttgttgttgtgaggttgatgagagaagagtagagggagatgatgagtttcgagatccttgactcttggatgagccaatgcctccaagtctctcaagcttgttgtcaaagcttaacagtgtttcttgaagttcttgccatgtcacaggtgtgaggttgttttttgcttcaatgagagcaacaatggtgatgtattcaacatcaagaccactgaggacatttgacacaagatgtgccccagggtagggatctcctacaagagccaactaatcagaccaagatctcttctgcctcagatattcagccatggtggtagatccctttctggttgtttgtagcatggttctgaggtcatatattttagctcgagagtgagctccatataggttttccaaatatgtccacagggatctagcagtgatacatcccattacttcagtggctatggcttccgtcatggagccatagagccatcccatgagtagctgatcatagatcacccattgttcatactctgggtttacttgaaccccaaaactaggttt

SEQ ID NO: 252755 - DNA, 659 bp, Cannabis indica
tagtaacccccaaacagaatccatttctcattatataataattattattattattattattatattgaggttatctattattttttaatatgcacaagtaccttggagtatagtctaggcatattataattccgtgatagtcctacaaccttcatgtcttttgttggattgcatcgtttttatgacccacttttggataaagactgctctataactggttagtagtagtagtaattactagttggacaattttgtattgtaaccgtatgaaaaggattctataaatgatttcttttctttgtttattaaaagaaaaaaaaaaacactaaaatatctaagcttgagatggcataatcgggctttcataacaatttgagcatggaaacagcgaatggacggccgatgaaaagactgtagtgagcgtgaatattcaggagggatccacttctccgatttttggtgtcccaaaggatgaaatggacggtagatttgggtcgttcatgggattgtacgatagttaattaaatgggtaaataacggcataagcattcaaagttttacgtttgtaagcggcataaacttaatgtttatttttagcggcacaagtactcaatgtttgtaaactgtaatttttttttctaattttgtcagtagagact

SEQ ID NO: 252756 - DNA, 649 bp, Cannabis indica
gaggatttggttatgttgttggaaagtaaaaggaggcgtactgggcgggctgggattgctattggtgaggaggggatttcggttaaaatggttagtggggttgttagtgttgttgggtcaaaaaacgattcacaggtgggccttggtgtgcaggcccacccatcatcatgagtgttatatcctggaattgccatgggcttgggaacccatgggctcaacaattcttgaaagaccttgtggtccaaaagaagcccagttatttatttttgtgtgaaactcttgctaagaaggagatagttgaacgggtacgtgtggcgattgggtttgaaggtgcacttgcgattgactgtcaagggaagagtgggggtgtcgcttttttgtggaaggaggaggaggatgttcaagtgttggagtatggggtgtcttatattgatgtagtggtttgtggaagtgagcaaggacattggcggttgacgggattatatggtgagccgaatagaactctacgaaaaagaacttgggatcttataagggagctgaaaaataagtcaagtttgccttggtgtattataggtgatcttaataatgttcttcccaagaggacaagaaaggtggtaatccttatccgaggtggttagtggatggtttc

SEQ ID NO: 252757 - DNA, 723 bp, Cannabis indica
tcaagttcatgaaccttagaagtttcaaaacgacaacccagaagctctgaaatgagcacccaacacccaggttgatagttggcctagtacgttgggttctacttatccgattctaattctatttcagttgtttgtctagtttttcacaataattaaaatccatgaagttagagaagttaaattcacaacttcacaattctcatttccaacatgggaaactcactttaaaatgaagagttcgaatctctcatttctgcagaacaacaacatctctgagaactggtgaccggcttcaccagaatacagaaatagactaagtgatgttaaaataccacatacgaatcttaagttacatcccttggatgtttttcaactcacccagcatctagcttgacgtcatatgtcaacctgggtgctgggatgtcaacttgggcactggatgtcaacctgggcgctacgtcatgaacaaccttcagtaaaacatccatccctcacttaatattgatctgattgaaacaatttaacttgatttttaagctatttcaatgctctatgaagacatgtctcacacttcaatcacaattctgaagttatctacctcaaatttcatccccaaagaagttacaaaaataagctctaggttacccgcagcaagtcccgcctggcttcgaaaaagactatcaccttcaagttgatttttatcattacatcatcatatagagt

SEQ ID NO: 252758 - DNA, 729 bp, Cannabis indica
aatcacgtaatacgcctatgctagttagggtgttacaagaattttcttcctccttttgagcggagtcacctactcttcctcagcctcatcttcaggaatcaagggctcctcaacatactacttggcccttgcacctcccttcaacttagcatcacgcttaagttgaatcaactcattctccggatgagctcgttcagcccgtctagcatcaaatttcctcttcctccccttcactggcttgggaatgaaatcctttggatagagcctgtaccttacaaagttatcctcagaggtcaactggatgatattttggtcttccccggcattcaagcaagccttagagctctatcccagagagtaagagtgaggggagggcggtgatatgttggaatctgctggaaccgagtacgcgtgatgcccgcgccatccaccacgaagtacccatgaacaaaacgcccaattttgatggtgaccgaatcatcggagcctatcaaccacttgaagtctggttgaaagaaatagaagtaccctgacctgccttgcttatgggtggacttcaaatcaaagagcaagctaactttatggggagaaggcataccccacttctgggaagcgtaaagaaccaagagggcagacagatatttaatgcccttgggagtgaactgggctgggcagaggccgaagaagtccgccaaatcttaaagtattgatgcaaaggcatcaatgccc

SEQ ID NO: 252759 - DNA, 1179 bp, Cannabis indica
gactagcaagaaaatggatgaagagggcagctgatcgcggtcatgctaaagctcaatttgaacacggactcgcactcttttcagtatgtcatagcttataatatgcacctgaacacatttttaataaataattagcaatagtagcttctgcttttttggttaatgtattgtgagagatcaaccactgtggctgcttgtttcaaaacttaaaacatatttgatgttttgttgacaaaagaggccaactttaagattacttaaaaacttatcttctgttgggttgtcaaatgacagttggttaaaaccttaacagagacaagttgtttactctttttgatgtgtaattcttggacaggagggagatttgtttaaagctgtagtgtatctggagcttgcgacccgagctggtgaaacagcagcagcccatgtcaaaaatgtgattcttcaacgactgtcagagaaatctcgtgatagagtcctggttcttgcagacaattggcaagctttgccgtcagggtcatgagttttatagcacaggttcactgtcaatatacattttcttgtctttcttctgaggctacaatatcgtcttattgtggttgtggatgaccttatttgataagaaaaggggacatgggttaactgttggctcaatcagctgtttgtatttgtataaaggctcctagatgtgagtgggataactttgtcagtttgcagacctgaatctgaggtttcctccctttgaagtttgggccattatttaatgatatattcgacaatatcttgcaagttgggcttaaactatgtgttgtttagcaaagttcaaccatgaaaatctatcaggctctcattataagttctactttgattaaaatcttaagacctccatttggagctttgttagcactttaacggtttggctgttttgtttgtatctcaattctcaaggaactttagcattattagatttggttggatttttcttcatccgtctgaatttgttttatttttctttttttggtaacaaaatcatgattggttcttttgggaagaaaaacaaaatgaagatgagattgaagtggtgtgggaaactagccaggtgtatgagtcggatgcatttggggcagctcaactttccagcaagcaaatgaaatcataagattgccaaccagattacta

SEQ ID NO: 252760 - DNA, 1259 bp, Cannabis indica
agtaaggacaagtgaaaattagaacaaccatgagacaatggtcttttctgacatatgtacatatcaacttatcttgtttgtacggttgagttgtttgtgaacatcaattcttctattgatattatagatatatataaaagataagctttaaaaaaacaaaaaaatcacagctacgacgatcacattttgggtagatgaagcgtctggtggttcgatgtatcggctctgaaaccaagttgaagctatgaaaacatttgaatttgcaaagtaaaacaaagaaaaagaaaagagagattgcaattgaaagtgtaaaaaattgctcaaactctcaaaatgagctgaggctttcttttatatatgaaagaattcagctgtcatacaatgaaaatagaataacagaattctgttatggattacgacaaatacaacatgttttaactaatccaaactaactgtattagtgtattactaacaaacaaactccaaaaaagtcaaagtcaagtttgcaatgatcaaatccactatattattgagtcaatcttgtggattattcttcagttgagtgtcagatatttatattaataagttaataagatacaaattatttcttgcggcgacgaacgatgaagatgacataaaatatagtgagatagaatgctgcgaaggcataattttcaggaacactgaaagacaaagcaccatttttagtctcaaaaagaagactactcagctcttttttctcgtgcaacaatgcctctgtacccgtggtaaaggcaaacacaaaataagaaatggaaatagagatgaatgatatggtgaccatagtagggtacctaaatttcctttcataaatcatagagagcattgcaaacatgaagtggattaaaagagcccgcggaaaacccgaaaaccaaagaatccactgccatgaaggctttgaaagcttcaaggccttttgagttttgtatggtgcagcgaaaggcattgttatggctgcttgaaatgtgatacctgctataagtgtggacaccactaagttcatgttttgcatgtgttgtacatcttgaccattattattattattatcttgtttaatatttgttccaccagattgggtcctcatttgtattggggtactttctcgagttgtttcttcctcaatagtactgcttttcaccattccaaatccagtgtcttgcaaacttagaagagggtctttattcttggccaaccacaattttaatccaaccataaactgc

SEQ ID NO: 252761 - DNA, 1064 bp, Cannabis indica
caatttacaaaaaaaaaaaaaaaaacctgaaagcaacttagaaagagctgagacattatttcactttacatatggtcaatcggtatttggccttaattaatgctgaggttatttttaaatagttttaatattacgtataaattaaaatttcccaaaaatctaagcgggcttggaatatagaagccaacatttggggcccatttttaggagaggttcttcttctcacgaactaaaacccccagtaagtagcagacaaagcttgcttaccaaaccagcaatgacacttctcactctcatacgacactcccaactccgtcgtttttatcgatccttttcaccactcttcccatcatcatattcttcttctttaaaaccagtcactgatcaacacactcttctaacccaagatgaactcactgagatcaacctcctcctccctcgtctctgcctctcgaaccaactcaacactgcgacccacctcgccatcaccgccctccttacaaatccacctctcgatgccatctctctttctgccctcctcgactcccttgcctcccagtcggacatcgccatgcccatgtccctcctcacccgccttagacgcagcccaatgtcccaacaccatgtggcgcccatcaacaacacgctcgtcgctgcctacttcagaaagggcaagcccaaagaggccatcaaggtttttaattggatggtgaggtcgggttccccattcaagcttgtggaaaagttttgtgggattttggttgatgggttttgcaggagtgggatggttcttaaggctttgaaggtcttgagagccatggtggctgctgatatttgtccgcatggcgagttgaggaaggttgtctatagaggtttgctgagggaagcgaggattagggaagcaatggagttaaataaggctttgtattgtgattgcgaaggaatgaagaaggcgttggacctcttagataccatgattgagaaccggattgagtagaacttgtaagtttgttttttctctcgtaaaaatatgaatggctgtttaacaagtgttctgataacaa

SEQ ID NO: 252762 - DNA, 588 bp, Cannabis indica
cctccactgaaaacacctccggcgttcactccgatcgtacaatcatggctactgctgctcttccttcaacaaactggaatcccttctcgaactccctctctgcctctctcactgtcaaactagatcgaacgaatttccttgcttggaaatcgcaggtcgtccctaccgtcatcggacacgacctagatcacattctcttcactagtgttcctcctccccaacatctcatcactggagaaccaaatgttcagcatcaacaatggaagaagcgtgaccaactgcttctttcttggctccgctcctccatgaccgaaggggttctggcctctgtcgcgaattacacaagttcttactctgtgtggaaagccttagaacaaagattcacaagtcagtctcgagcgcgacttcttcaactcaaaggacaattttctcacatcaagaaaggcccttttgtcaatctctgactatgtggaaaagattcaaacactttctgatgcaatcaccattcctggttctgcagtaggcattcaagatcttattttgcaattgttaaacgggttaggtcctgagtatgatcctgtagtttca

SEQ ID NO: 252763 - DNA, 501 bp, Cannabis indica
aaaaaataatatcagtttttttcaatgaattaatgttatttttaaaatattagtaattaacataaaaaaaaaaagaatcgatcaaaaataaccttaattggatttgaactgttatgtggattggatcggatccaaaatatgaaatccacacttagtgcggatcagatgttgtttgaccaaaataatacggattggatcggatgaacaaccctagttgcatgcattatattttcctgtaagataaatggtagacacattgagtattgaataattgataaatgataaaaaaaaaaaaaaaagtaaatagagggaaaatatgagtaatataataacgactttctcatcaataaaaatcatatcaagacttatcaattctccattcttcttaatattaagagactctcacattttataaattcctatctttatgctccaattatcgtatttaagtcggtaagaaaagaatactccaaaaagggaaggtaagtagtaaactgaatt

SEQ ID NO: 252764 - DNA, 534 bp, Cannabis indica
atgtcattgtttcaattagtagcgtccgattagatcggttttacataggttacaaaaaagaaaaaaaaataaaaaatctcttgaaataattttaatgagatgagtatatatatgtacttagtacatcatgaactcgagataacttaagagctttaacaaacaatatttactttagatagagactggtgctgataaataattataaaattattatgaatatactacaataaagaaatagaaaaaagtagaagaatatgaagagagaaagagatgaaatgagattttttcattaatttattcgaatggggtgaaccgttatttatttaaaaataaaaaataagaaattaaattaattaaataaaagaaaacgcaatactatgaataataatttattgtgatttgaatattatatagggagaattgcggcaaaagtccccaaaaacttaggcttgatgcagattactccccaacctcaaaaattgccggtaatagtctcccaaggtcacatttctgagtccgttggtccctaagata

SEQ ID NO: 252765 - DNA, 1433 bp, Cannabis indica
tgccagcaccaatggacagcccagctgcagatttgcagaacagaactttggaatttggtggtcggaatcgtcacgcttgagctacatgtgccccctgaagctttgccgatgttagaatattagttgtaaaaaattagggtaacttgtatttaatagtttcctatttgtatttagtagttttctatttagtctcctaactttgtatataaatatatactattccatggaatacaacataaaattctattcactattctctataggcgacaacacatgcactggcgtgtgagcgcgcatgagggtttttttcgcagccgtttctctgtcggtggttgcctttttcgatgtttttaaccttttggtgcatctatttcgaccattgttttcttcttttgtgatcgttgaggtttgttcatcatcctttggtgtgattctttatcctttatctccaaggctcttctctgtttgtggttttgattaggctttcctattttggttgtgagattttgattgtcgatttgttgtctcattttgtttgctcatttatcgaatttgttggttggtttgttgtttgagttagtttggtgggacgaacataatatttgtaatggcttctaaaagaccagttcttgttctgcaattgatatgccgaattcttacattatctgagtctctcttaagcattcatattcttctatcactactatagttgattcaggtaaatcaaattcgtgtctttctttcctcgtcttccaaatgatcattaattctggtgctacagaccatatgacaggtaattctagattcttttttaatcttcaagctcatgcttcctcttctactattaccttagtcgatgggtcacctaattttcttttaatttcatctttgtcgatcaacttactcgtgatcttaactgttgtatctctttttttcctgatcattgcttgtttatggatcttatgaagaagcaaattattggtaaaggatatgaatctggaagcatctacattcttgatacaccgatacctaaatcagttgcttgtctagtgtacaatcccccttcgatgcacattgtaggttggatcacccatctcttcctctgcttaaaacattttgtccacaatatagtaagttgtcttggttagattgtattacactattgagaacaattaataggttgggccaagttttgaattcacccttggattgcactcattcgagacaagagatgagtaagaccacaatatagtaagttgtcttcattagattgtattacactatgataagttttccacaatgtagaaataaaatacacttaagatgtattattactattggaaaaagcctttaaataggctgagtacaaactttagacattaattacacttcaactaacagctactaacacctcaactaatctaataaatatc

SEQ ID NO: 252766 - DNA, 965 bp, Cannabis indica
tatcaaaaaaacagttttcataaaattaaaaattccatttgcgatattaaattttctgggtgtattcgactgtgctctacagtgcagtggggttccgatacagtgtaacgactgggctgttttatcctggggacgaccgacaatttctgactacttgcacactcctaggcagtgtcgcgaacgtcttaaagagagcgacatagtccgcgacttaacctagaattcttcattcggtaatatcgttcctcttttattttgctagcagtttactcaacagttctgtaggtaccacttaaatgataaatcaactatctggtttagttcttgagttactgatgagaatagagataagctggctgctatctctatctctatctcggggtggtgaatgtgatttcttgtcatgagaaatatatatcttggtctttcttgttatgcgtcccaaagtaagacgggactttttcaattaattcttgactagattagaaataaactatatgattggaaggctcgttctttttgtcggtggaagggaaattcttattcagtaagtcattcaaactatccttacttattttatgtatctctttaggttttctgcatatttgattctggagtcatagattgtgcgcacatttttggcggggtggaaatatgagtaaaaagaagctcccttagtgtacctgagagaaactgtattgctacaagtctgatggcagtatggacttttaaaatttatccggccatcttcaatcaagttatgttggctaagcaagctgtaggagattgtgttgtgctccagacactttggttgttagagttctgaaggctatctattatcctaattctacccttttaaaggatgatgcatccaagaaaacatctttcatttggagatctattttatggggtaaggaagtttttaaagttggtggacgatgactcattagtgatgaatcccaagt

SEQ ID NO: 252767 - DNA, 927 bp, Cannabis indica
agagagaagagagaatagaatttcagacttagagtggtttggaggctagaattaggcttagtgacttaggttttctaggttagagttaaggcatttatataggaagcctaaaaccctaatttacaatgaaacccttagatatttacatattaaattgattaaatacaaaagactaaatttccccttaaaagtagatattttctatcagtttgttgggctgcgaaggacccaattcacaagtagcttacagtccatgtatcagaccgtgcagagaatcctgccaggccaatcctgactacccatacactgtaggatatggtctggccgaccatgcaaggtctacaggttgaggtctagtcggccatgcccctgctaggtcctagcaggtcatgtacctgctaggatcctgcagatcactgtcagctttaccaagaggaggccatcttttaaatgtggagaccagcttttggcaagtggaggataactttgtacactattttcttagagaggacaggttcccttggtcaaactgaagctccttcagtctggaagtcaccttctggcccgccagcttgtgcccagatcctggccggccatacaaactcactctgaccagcctatatgcttctcttagttggccagacatgttggtcatcctcttgatggctcacttcactccttttgattgctacttgatggttttgccatatcttgtatggaaaccctatcttactactggcaaggttatattccacatgcactctgtcttggattacgtggacattccacattaggtagataaaattttccccccaagtccttgttcgaacatttggtcggatatggaatttctatctttgtcttgtttgtagtagtctcagtcgagcagcctcgtctagccaattgttggctttttgcatggcatgc

SEQ ID NO: 252768 - DNA, 1081 bp, Cannabis indica
ggaatatggataagttgtttatcaaatttctttgtggtgacataggacccgggatcgcttagcttattttccactcaggtcggcccgtacgtttgagttctgaactaaaataaggaaagtggtaagcaccatatgtggttaattgttgacggttgaatgattatattttgattagtatcaagatcctgattaaaagtatgttaagcctaggttatgacctagggattgggaacgattactaccgttacgagtaattactcttgaaaccgcggttaggtttcttacttattgtttgctttatcgggcaacaatagtgacatattcagctcgtgattaacgagtggtaagggggtactttataaagtactagaattgtgtttataatattgtgtaaatgtgtatgcaagttaatttgagattaaattgctgaatattactggttattgttttattgacttttcttgctgagtctctgtgattcacaggtgctttatggtgcaggtaaagggaaagcaaaggttgagcaaccatgagttcgaggtcatagcagcaatgtacatatcagccgcagtgactcggtccagtgaacaggatgctctgttttgatagtatttttggattgcaaagtttatgttgtaaaaaaaaacactaataaactagtttgtaatattttgaaaacagggggtccccatagttctcattacttatcttttactataaagaagtttttatatgtttgattttaattatcaagaatttaattacccacacttttggtataattatatagtatttaaataagaattttataaaaacacacaagtggcgtccctgttggacagggcgttacacttaacaaatcttgaatctagctcaagtaggctatcatctttttgccttggactgtgtattcacctagaacatgatttatgacttagtaagtcgttgtgtatgtccaggtaatcagcccgtatctcgtgtgctagcctgaggccaacaataagagcttcacatttagccgcattggttgaaactgaactttatagcctcgtgcagctatttccccctaagtgccccatgc

SEQ ID NO: 252769 - DNA, 711 bp, Cannabis indica
ccttacaccctactggtttcttcgctactatacaggtgccattcttcctcaaggataccatttattgctgcgttgctgagttccattctaacttctaaatggacaccatagcttcttcataggagctatgttcctcatcatcaagttctgatatattcaaagcatagaagattaaatcagtatatccaaacctattttgtggtatgatatttctccttttcctatctctggcaaactggtaatcctgatgctcatcatcattcccagattcttcaccagtttgttcttcaactttctgttcagcttcttgctcaacagtgtcatctaccatctgaaccttctcagtttgctcgacctcaatctgaactctctctttgatcttattaccagctatgtgtgaatccttttctttcgaaagatccttgtacatggtgttttcataaaatacaacatctctactgaaattccttttatgatttccttcctctatgctccacatcttatacccttttactccttcaaggtatcctacaaaaatgcatttcctatctctaggatcaagttttccctgtttgatgtgagcataagccacacatccaaagatcttcaaatggtcatagttggtaacatggccaaaccacatttcagttggagttttgcaatttattgcagatgaaaggcatctattgattagatagcatgttctgacag

SEQ ID NO: 252770 - DNA, 528 bp, Cannabis indica
gccagatgcataatgaagatagacttaagaaaagcctaagatactgttgactggaccttagtttctgattttctaaaaggtttatgctttccatctagattaatcaattgggtgttagtctgcctaaagggtacttcctacaacctaatgatgaatggaagactccaaggttcttttaaaggtgaaaaaggtcgttgccaaggagacccaatttctccgctaatttttgttcttgttatggtttacttgaccagaatcctgaactttcatcctggaaaagttagcttcagttttcatcctctctgcaaacagcttaagcttgtcaacttatgttttgcggatgaccttgtgatcttttgtaagggcaatgaaaaatctgtgagatttattcatgaagctttctcattattttgtgacacaacaggtctaaaagctaatatgaataagtctactatctactttggaggagtcaatgaagctactaaaagggccattttgaacttggtgaatatggaagaaggctctttc

SEQ ID NO: 252771 - DNA, 940 bp, Cannabis indica
ctagctttccaaatggaccaagccaccatagaaccttcctcaaccattcctgcccgtcctctgtgcagcagggattcgaaccagagagaaaaatctgatccaacagcagcagcagcagtgcacacagcagcccgattccagcacctttgtgcgaattggcactcgagaagaacatggctgatggactcagcactagattgacagaaaacacaagaagcagggacatccacatgcttcgtttggagctgcattcgagtaggcaaacattgggtgagagccttccacataaagtgcatcactttaggtggaatcttgattttccaaagccttttccacactaaatcctccatttcatgaccccaattacctttatcaatttgaataaccttgtatgcgctcttcactatgtaaaatcctgagtgctcatgtttccaataataattatcactccttccaacactaataggagtattcataataacagaagcatctctttggttaaacaagtcactcaccaactcaacatcccaacactgaccatttgggctcattaattggcgcgctctgctttgtgcaagagctgggtgagaagatgtaacaaacggattgatatcatcagctaaccatggaatattcagcaactcaatatctcccactcccactctgattttcgcaccagcaagaattaaactctgagattcatgaatgctacgccatatgtaactcgggttggcaccaagaggagcacttaacattgagccatgaggatagtagcgagccttatacacacgactgaccagcgtatcagccccttgtagcagccgcaagcatgttttccaagaagtgacagattgtaatcccggagattgcgaaatccaaggcctccaatgctcttatgacgactcaaacggctccatttcatccaagttataccacgcga

SEQ ID NO: 252772 - DNA, 858 bp, Cannabis indica
ttttttgcggtgcaatttttgcattttttaagttcgcagtgcgggtgcggtttgggaaattaaaaaaactacatgtgcggattaatttaaaaaaaatagtcaaaaactgcaccacccgcaccgcgaacacccctacttatttatacctatatttctatttttttctccttttttccattctcttacgctattctctttctctccttcttctttctctctcttctttcaaactttaaaaataatttatgatctcgttactcggatgaaattaaaaaagtatcattgcgatctatttacgtgaacatttcaagatgtggaaaacatatattttttcgttagaaaagaaaccattttgttagtaatacggtgattagttactattttataatttgttttaaatcttaattaacattcattttaaaattttgttaattgaataatattatattatacgaagctttcaaaataacaaaaatgtatataaaataatcggtatataaaaattgtaacttgttatattacatagcaactcattagttttgaaattttttttaaggttatcaaaatttatttcaaattataatctaccgtaatataacttaaaaatattaattagttactaagatgtatacaaataagtttttagagagtctaaccaaaatgtatcacaaattatatgatataaaaataaaaccttttatattaaagtaactaattagtttcttatcaacactattagtagccaaaaaagttctttaaaaaatggaggaaataaaataaaataaaagactgaaaacaatcataaatgtcagatttggcacgtcagtaatagtattaattttattattgtaaattaag

SEQ ID NO: 252773 - DNA, 841 bp, Cannabis indica
ggacatagtctatacaatctttttttattgttggccagaagtatccttgtctctatattttctttgagagactcggacctcctgtatccgcagaacccctcatggacctctagcataatttgcttagcttcagggtccgatacacactttaggtacgacatggtgagtcctcttcggtagagaatattatccatcatcacatattggtgtgcttggtactgtatccttctagacagcgccctttcttgaggcaactcgcctttggttatgtacttgatgatggggttcatccagtttgtctctggctcaattgcaaccataatatctttaactttaacgcttggttccgtgaggcgttcaacgggcaccaccctcagttcctcaaccttgctatatgatgctaacttagtcaaactgtctacgtgggtattcttttctctggggattctttcaactttataattcgtgaactcatggagtagctcccgggaaattgctacatacacatccattttttctccacgcatttgatattctcctgatacttggtttacaaccaattttgcgaatcgctgaagacttttactctcgtggctcccacgatttttggtaatttcatccctacaatcaatgcttcatatccaacttcattgttggaagccaggaattcgaaacgcagagccgcctggagtcgaagtccatttggagatatgataactatcccagctccagatccgttttcatttgaccctccatccacgaataatttccatgctagggtttgtggtacaggtatgtttgcgctagcttcttcttcgttgcactctgttatgaagtcagc

SEQ ID NO: 252774 - DNA, 2550 bp, Cannabis indica
aacgtacatgaacataaaaataaattaaaccaaaaaaattttctaaatgccaaaacaagtaggggtgatttttttaagtaggtgcattgtagaatcactcaatattttttaattatatttacattattatttgataaataaatgtaaattaaatatcttttaacttttccattttgaaagactgaaaaattaaaataaaatataagttatgaaaaaaaggattttttattttgttaatataaaaattcactcatttcaagattgaattgaataaaatgtaataaaagaattaaattattacaaaaattatattttgaatgttattattaacaaatcttaatgtacaaaagttgacaatcaaaaatactaattattgtattaattgttagtttaatacacttattacatgtgtatttaccataaataaattaataaataaaagtacaacccaaaagagttaaatttgagatgggcatttatgtttttattttctttgtttgaaaataggtaggcatttattgtgataattgaaaatggtaaatttaccccacacctcattaatattaacaagaaaatagtccaagtcaaatatatattatgagatttgccaggattaattaattagcccacaactaccacctgtttttattattatttattatagcagaaagaagctattttttcaaggtaaaaaaaataaataaataaagagaaaaaaaaaattaccaggctatatttttacttttatttatagttaaaaatataagatttactgtttaaataactgttatataatttttcttttaatataaaatatcattaaagaaaaaaaaatcttttgtgagtaaattattttaattttaaaaatagtttctaaaaattcttttgggagaaactacaaattgtaatatttttttataagacttaattaaaaaaataatttttttattttttatccaaacgcacttaaaaagaccattttaattttaaaagttaaaaaaaacttataaaagttaaactaaacgaatatatgcccattatttaaattgtaatgtatattgattttgaaagggaaatttaaatttatatgcatacatttggttagtgtatattaaattttttgagcacaaatctaccaattttttttttaaaaaaatggcactttatattaatactcataatatctttctcctttctcttctcttctaacttcatcatatactccctattcccatccataccgatggtggcccgatgttacctatttttttaattttttttttcttatgtttttgtatataaaaaatggtagcatcaagccaccatcgaaccatattctacatttatatatgttaacttccattcattaagctcgtcaggaagatatcaggccactatcggaccatatcctacatttataggtggtattggaccaccatcagactcccattttcaatctttactcattttaataataggagagcatcgggccaccatcaggcctggcaaaaaaaacaaattttctatcaaaaattcagatccgaccgttttgactctaaatctaacatcaatttacagataacaaacattaatcatacaatttattccttaatcaatgaacccataaataaaatcatatatttcaaccccaaatcacatagaataaaacaaaacaaaatagaaaacttacattcatagcacagtggttgtggtttggagatcttgggtcttgggttggtagtcgtcggtggattggtggtcttcagttggaggtgcggtgtttggcaatcatgggttgctagggtcttcgtgtgcgtgagaagaagagagcgagagagacagagagaatagaggaagagagagaagaggagtgattatgagagagatatttttgaatttaataaaaaattatctatctaactaattttaatatacttaagcttaggtttagtgtactaatttcacccatgaatattaattcaaattttcattttgaaatgtattagtcgaactctatccttaattcttttatgctttatttttattttttcacatcatggaagtttgtgaataacactaaactaaacaactctagagcttgataaaagaggaaattataaattttgtgggtttttataatttttgtgcataaatatgatttttttttctttttcaggatggttattttataaaaaaaaattaaagaaatagttaaaaaaataaaaaatttggtaaaggtaaccatgtaccattatggtaaccgaaggggtaacaaattactataaagaggtatctagaaacctttgctgttttttcatattttttaaacttttttataatttttttccataaaataacttttatgagaaaaatttatatttttgtaaacttgtacttaaaaaaccatcaaaatgaaaattcacctttaataaaatcttcggggcaaaaaaacaacaacaatgtctattatattaatgtttttgtaaataaataaaatagggcaaaaaatcttgggaataatgtgttgatggaatttattttaccaggatc

SEQ ID NO: 252775 - DNA, 551 bp, Cannabis indica
tataaattactagcactcacaatgtggaagtatataggaaaaaatctcctcactttggactttccttctaagtccatcaaacttaattatctttctaaaatacacctttatcttcctttaatactaaataaattatgattatctttgtaataattagattccataactttattacccatatatcaatgtatagcgaaatcctaaatatcattaaagtatacttatagatacttatcctacaataaaatcaaaaactatctgtcctttcatacttacatcgtttgttaccatttaaaattattatattaaagaataattttaaaatatcacattgcctaaattttcatatcctcacttattttccttcaaacttaaagaaatcttttgaatattaagaaaaattaacctcattttaattatataagatttttaatactaataattatatacctcttccattctaatttattttagcagactaaaagtaatgacctttgttccaccaatcacgttaaccataagtataattgtagaaataagtttcaataata

SEQ ID NO: 252776 - DNA, 632 bp, Cannabis indica
accctaccacattcaattcatctccttcattactcttgaacagctgaaccagccgaagcctccttcacccaaatcgcatctccaccaccagcattcacccgtgaacaccatagcctccgttcaagccaagctcgacccagccgcatccaagctcaccattcgactcaacccatacctcacaacactcatctcaacaaacatcccattcacagcccgtgaacccaaccttcgaaccaccaaatcaacccagttcaagtcaagctcaaaccaacaccacgagcaaaccccccaactcgacccaatctttacctttgttcaccattttcgccctgcaccgaaccagctccagtcgacaccattccacctgacttcgaagcacccaagcaccagcctagaaattcccattcgaaccacactacacccacttccaattcaaaccagagcccacactcgattctcccaaacacgaaccgatgaccgaagcagcaaactccacacagccaggctccctccactaacccagttgtcgagcacaagaagagaaggaaattcatagccaacacatattgccgtactcgaatcaatagctcggttgcacagaaaaaaaaattgagccagagaatcaacactag

SEQ ID NO: 252777 - DNA, 1143 bp, Cannabis indica
ggggttggggtaaaattgtttttattaaccctatggcgtcggttatttggtattaatcgacgccataggtgcagtctttagtcgacatgtggcacctatggcgtcagttaataccaaataaccgacgccatagggttatgtattagaacccttatgcttcgtcttcctatttcaccatcttcttcaccacgaagaatagccacccatagtagccccaaatccaacaaaaaaaaaaaaaaaaaaaaaccacgccaacaaccactaaaatagtcttaatctccctcatttcttcaccattttgccccatttttgtcttaaaatcttttattttcaatacctaaacctacactgtaaaaaagtttggttttatccctctatctatcaaacacaacctattacaaaaaaggtggtggtataactccgaccaccgattttagcaaaaaaacgttgaatctcaacgtcaattaaggtataaatatgattttgttatacccgaaattcggctgccatctcagtggaggtcacgtgtcaagataaaggaaatatggatcgatgcaatcgctttttatggaataactcattaattacgtaagcatcaaagtatatttgtaacctactgattgtaaggtcttaggcgaggaatcaatatacaaactggtgctttgtatattagcgagaaactatatgtcactgaatgcaaatagcgaggcattaaggacagtacacataggaagacgaaagcgacacatatcaactgtgaaagtccttagtgaataatgtacaaactaagtgtaacagtcggatcggctcgagaccaagtaagagagattcctgtctcgctatgagaaggcatcctgtaacttcatcacgttaacgtcagtgaggcttacaaccctgacgagtcagaagttagcattcaaatgagctttgaagaactctttgtaaataagaaccgcaatcgtcacaagacatgcatcgtcgacctcaaaaggaaaaattaccctagtttgcaattatgatataaactttcactatcatatcatagataaatcataagagatacaaatatgtatatgtatatgaattcaataataaacacataaaaacatatacatgaatatgtaaatataaaaagaaaaaaaa

SEQ ID NO: 252778 - DNA, 1116 bp, Cannabis indica
ggtttatcgatactatctcgatgatattgactaaaatttgtcaattttattagcatcacgattagtttattgactatttatcgattattttgttaagaaaatattattttcgtccctaccacgattggttttcgattgttgttgttttgtcgactgtcacctagttaaatgcgctagtatatcataaattaaaaaatactaaacaaagtaaaaacttcaaagcataaataaagacaaaacgatcaggataacaatcaatagcacctaaacataaaatttaaaagtctcgagatagttagggtgatccatatgcaatacatgcacaatgacccatgtgtcactagttcgtctctaactacaatcattttgcaacgatagcactcttcggggaatcctggagagaaaagagaacaccatcccttcgattgcgttccacctctcgttcaccacctttcatattcaaattgttcctcacgttccctttgctatctttcctgaatgtgacagtattctcacatacgttttgctctcaaatggataaaatgacattcaacatcgacaagaacacgaaggggatgttatgtccttcgtcaacaataatattttgcagccactcttcgtagtgaaccgttcaccgccgacttagctcgacaacaacatattattctacaaactgtctcgtcatggcttggtcttacaataagttaaaatgcgaagacatttttaagatcggtctcttacattaggatcaaattcatccatagtggtggaaaaagggaatggagaacgaatttctatacataaataacttaaagaagaaaaatcctcagcgttaaagaagaggaaatatatataacttaaaaaatagaaatttgctttctagttcagaaaaattgttgggagagtggaataataaatgcctaacattaatgagcattaaattaatgtctaacaaaaaactattcttggcatgcgaaatgttgttctcgacagtatgttgatagtttgtcgatgctttgtcgattaattaggaactctgtgagatgttgcttgttattatattgatagtttgtcattagtttcgaaatagattcttgataatttccatgtttatgg

SEQ ID NO: 252779 - DNA, 772 bp, Cannabis indica
tttttgcactatttttgatggttttgatgccttttacggcttttgtgccttgtatggcatttgtgcatttattatggcttatttctatttgtttagagtagttttgtgatatggccaatagaagagaagtgatttattttgggctttttcaattttaagagataagtattttaagtctttttaagtcctgaatagtttaccattgtttctttcacattatcttttttattatattgtctcttaatagagttttatttttgttattttgaaggttgttttgtggagggcctacaattacagagaatttttcgataagtttaattttaaatataatacgtttgatattgattttcaacagttttaaattagggtgctagtttgttgttactagccaaaaggtaatacctttggctttggctagttatacttagaaattttgttattttttagtttgttagtaatgttgagcgtgtgatttgggttatgtgttaaattttaagtttgtattttgatttttattttgaagattatcattctaatataaatgtattttttagtttggtgttattatgttttttcagttttcgctacccctgatgacaattattataatgggaaggtattttttcaatgtgacggggatttgtttcaaggcgttatagttttattgtctaaatttttgggggcagttttgtcccatgtgacttgcaaatagaattctgcagcttatggttttgaaaaaaatatgccattcggttagacgatgagctat

SEQ ID NO: 252780 - DNA, 828 bp, Cannabis indica
tttgtgtttttaaaacgatctgcaaataagttggctcattgcttggcaagagactcttgtctctcttcgtgtgcttcagttggaggactgttcttctgaagtgcgttctattattttgatcgaatttattaattaatagatcttatgatttttatagagttccgctaaccaatcacaagcaatcacttctaagtgatgctaagcactactaaatactaatatctaataccaatgctctcataaagcaagagttttcacatgtacatctcttccccaggtatatatgtttctagagttctctaaaaacttaaatattcataacatatattctttatggtaattagaatatatattgcaattaatataatagtcctatattattctagtattaattgtccatattttaccatctgaagaagttaaaaaacacactcaatatttataaaatacattagttaattagctaaaagcaatttaatgatcaactaattaatttatataccatgcatgatattttataataaaagtatatatatatatgtgtattatatatactgtgtacctagacacattgaattaggtttgggttatttccaggggaggaatagtgtgttgattgaagtgtgggatttatgacagagtttgtagggatagttagatgaacaatcacaatcacaatcacaactcagaaaagggtcgctgtgatgagttataacaaagtaatctctagtcttctgccaacaaaaattgtaatataaaacggtccagatgaagatgtatacatgctagctaattcaatatatcaccatctatattataataatattc

SEQ ID NO: 252781 - DNA, 1090 bp, Cannabis indica
tggattttatactgtgaaaagtgcctactggttgttatagcaggctactggtgcgaatgttgctgttaatgatcagactttgttcaagtttttgtggcagctggacatacccccgaaagttcagcattttctgtggcgtgttctagtgggttgccttcctaccaaggctcaacttagcactaaaaatgtgaatgttgatttgtattgtcccttctgtaactcggcattggaaaccatcagtcatgtattgctttagtgttgatttgcaaggtcctactggtgtgtatatattgttcctgctggtgtcaatagtgtggacttcaacacctggttttttgatctcaccatgacagtgtctaccggtattgtcaaggaggcagcagtaatcaattggaggttgtggactgctcgcaacgaattgctatggaataaaaaaacttgttctgctatggatgtagtccgatcgacaagaatgttgcttgaccaatatatttctgctcaatctcaaaagacgggtgcattgttaattgataatattaataatgtggacgagcagtggaggaaaccagtatctcatatggtcaagattaatgttgatggggctatttttcaggatcaaaacaagtttggctttgggtgtgtggcccgtgacacgaatggactccttcttgaagctatttctgcatctcgacttggggtggtaagccagtaatagccgagacgattggaataaaggaggccttaagttgaatagagaggaaacaatggtccaatgtagtgattgaaactgatgctttggttgtggttgaagctattaatagctcaatttaatgccttctcagtttggattgcttgttggagattgtaggactttaatctcttctttaaataatgactttttaattttgttaaacgatctgcaaatagggctgctcattgccttgctagattgtcttattttttcgtcagattgtatttttagtcagcataatgtttttgctgacttgaagtctattgtaatggctgaaagtgtttgaataaaactttacactttaactcaaaaaaataataagtttaaaaaaaattatgg

SEQ ID NO: 252782 - DNA, 684 bp, Cannabis indica
gagtttggtggaatttgtgacctaaataaactcttttttttttggtaaatcagagaaatgcattacctcaacagaatttttacaaactattagcaccttcaaaatagaagacctataaattctatgtgtgaatcccttgtatgaatcaccatctaattacaattacatcccaaaattacaatgacccttctatttcccaattcactattgctgtacaattcctataaaccattgagcatcatattctgagacttttttaggccatacataagtaaatctgctcttaatttcttctttgatattcctagtcacctcagtgactctcggctcctttgactcccacaacattaaattccgagccctccagatttggtacactgctgaagcaataacagcataccaaaaactctttcgaaacctgcccttgtttgatctttcaatccacctcaatattacatcaaggtccaccgattcaatcctccaatgcaaccaagatttaatctgcaataaacactgagttgcaactatacaagagaaaaataagtggttttttgtctcggaatggctactgcagaagaggcagcagtcatctgagatgaccttcatgtgtttcaatcttgatctagttcgaaggcgatcttgaacagccgtccacaatataaagctttgtcttggaatgttttg

SEQ ID NO: 252783 - DNA, 3837 bp, Cannabis indica
ttttaaaatcgtaaaaaatctgtttttaaaatttacataaatttgattttaaattaaaacaacaaaaaacaaaaatattttaccgaacaacattttatttttcattgctgaattttttattagaaaaacagaaaaccatttttaaaatggttaccgaacaagccctttactattaatacggtaaactattcaaaaattttaaaaatttacaaaaataatattgtaattatataaaatttcgctataaaaaaattagaaaaaaattatatttggacatttgtttttaaacatggaaattaaaaaaatagattgtaatagaagattgtaaataacacttttctttacagttttgaattttattgtgtaagagataaaaataagcctcaaggtaattaagtaatttttagaaagtataaataaaaataaaaagatgatcctataatgtggcagacttaatgtaaaatgtatcatttcattaaatagagacagagctagaaactcaaaaacggaagagcataactctacgaaaagagaaatgcagagcagagctagaaaaaggaagagaaggagtgatgaacaacaaaagaaaattagcgcacgtggagaaatcaagaaaggaaagaagaatgaattacgcatttcttcccgcctataaataccagatcctatcattcaaaaaggggacgacgacgaattcttgaccacaccaaactagccaaaactctgtcggaatacactctcaaattcatatttgaattcagagaatcgataacctagacccgaccaattgaattgagagaaaaattatttaaactgattaagtgtgtaaatcgactagatcaaacatggtgtaaagaattcaaagtcttaatagcaatttgttgttgagctaattttcagcatcaacaactgtcttcttctctggaaacctcttgaatgaaaagataaagctaaggatacgaactaagatgggattaaagaaggtatcagagaaagcaacagttatgagtgaaggtgatacctttaatccatggctgcagatccaactattgtattggcattagagatgagataaatgaattagagaatgactgcaagagacaagctcaacaaaaagatgtcccgacttgtagatgaaagattccaccaggagcaaagaaaagcatcaataggatcaagatgaaattaggcagcatcaagaggattttcatcgcactatgcagaagttcattgctcaaatgattgatatgggagccaaaatagatagaactcaaattcattaggagcttgggcaaacgagtgggtcagatcctcaacagacaacagatcaaatgtagcctggcaataacacagaactactaaaaaagaaattataaatcagtcagtgaaagtattcaaaggaaaataaattttagttaaagaaaggaggaaaaaaaaactaaatgaaaattgtaattccatgctggaatcagctaaatttgcaattgtagaacatacattccataagtactttaatgagcatgttagaattgagcaaagaaggatggagtgtaatctagctccacccataacactacagagaatgccaactatcaatgcacaaatgtagcctataaaatatgaattgagaaattataactctaatgcccatttctagaaatgggacccacaatatagtaaattcataaacatttatagaaatatcaataattaacgctaattgcctttactaatccatattctaaaatgcggtcattataattatccccccgttaaaaggatttcgtcctcaaataacatgaatagctttggaattgagtcatttcgacatacaataccaacccagagtttcgattataggttaggctttaactgacttcgcagtagaatgcactagaataaatgataaccctaaaactttgaccccgaaaagagaagtttggagggtatacattgatggagcatcaaacgaaaaaggtgtcggtgctagaatcatactaatattcctgcaacacctctagcttcagagtgtacttcgatttgaattcgaggcatccaacaatgaaattgagcacgcagccatgattgctggtttacaactggcaaaggaagttggtgcttagtacatcaaactctacaatgactcacagctggtggtcaatcaagtgtcttgagaatatcagacaaaaggtgaaaagatagccaattatgtagctaaaactcgagagctattgcagcatttcaaacattattctgtaaagcgaatctctagagataagaatgtttttgctgagatgctggcaaaattagcaacatatccaaaaatagaaaaatacgaactagtccccattacacatttgataactccaagcacacaaggaatgagggtctctgccatcgaccactcaacttcttggatggcaccaatactctagtacttaaaaaaaggtacgcttgcgaaagatagagctacctcaaggaaagtccagtactaggcccccaggtatgtaatcatggatggaaggtgatactgaagaggtttatcgatgttgtaccttcggtgcatagccaaaacaaaaataagcgttgtcattcacgaaatccatgagggattttgtggaaatcacacatccgaacccaatctttccaagaagatcattcgtcaaggttacttttggcctaccatgaagaaggattgcattgaatatgtccgcaagtgtgaacaatgctaatgttatttaaaagttcctagggctctgccaatagaaataaccctcattggtagtccttggccttttgcaatctagggaatagatttagtgtgatcactgccaactggaaagggaggagtcaaatttgccattgtcgatgttgactactttaccaagtgggtggaagtcgaacccatgaatatagtaacttccaaaaaggcccagggcttcgtaatcaaaaatatagtgcgtagatgtggacttccacacaaaatagagtttgacaacataaaataatttgatagtgatcagttcaccgatttttatgccaagcacaaaataatgaaaagcttttctgttgtggccagacctcaagcaaacagacatgtggaagttgtcaataaaatcttaaagactacttcgaagaagaagctttaggcttgtaaatcgcaccggccggaagaacttcccagagttctttgtgcctacaaaacaactgagagaacttttataggccacactccatattccatgacctatggatgcgaggccgtaatcctagtcaaatccactgtgtctacacgtaggagagatacctatgacccaactcataatcatgctctactccaagaatccttagatttaattgaggaactctgggaacaatcataggtgcaactccacatgtatcaaaataaattaccaagaattttaactcaaaggtcaagagcaacaaaattcaaaatcggtgatcttgttttgagaagggttttccctgcttctcaagagcccgaagtgggggtcttaggtccaaagcgggaaggcccgtatgaaataactaacaagattggtgatggaattcaccatatgaagagaatagatggaacaagaattctaagagcctaaaacactaaccacctgcgccaatactattagttaactggggtggtcaagttccttttaattttactttgccttttttaattttcatgtacgccttagggcaagaaccatttgaataaaaagaagattttcatttcatatttggtctttaaaagttctatcatgtgacaagtgatcactctctatttatagaaagcccggggcctttttggaagttactata

SEQ ID NO: 252784 - DNA, 1064 bp, Cannabis indica
ttggaccattgttcgatatattgctaatgatggttccttcacggcgaattcccctttgacttgttgaataacaagtttagagtcccctctaatcgtaactctgctaacttccatgcttagtgcgaccgtcattcccaaaataagtgcttcatactcagcttcattattagtacaatcaaatgataatttataagcctgaatatgattcttacctgttggattggtcaacactattcctgcacctccccctttagcggtcgatgacccatcaaatgttattgtccatctttcttgtgtttcttcatcgcaaatcatggcttcaggtaatcctccagggatctcctctatgattgattcttcatggttgtctggtgaacatgccagtagatcagacaaggcttgacttttttgcgctttaggatacatgacagttatatcaaactcgctaagcatcaatatccaacgagctattctactggaaggtatgggtttactcaacatgaatcttatgggatccgctttagtcattaccaccaccttatgcgccactaggtagtgtcttaatcgttgtgctgtgtacaccaaagccaagcattgtttttcaacatagggataattagtctcagctcctttcatttgtctactgagatagtacacgggtttttcttttccttcaacctcttgcgctaacaatatcccgatggatgtttcagtaacagccaaatataacagtagtggcactcctggtactggtgatatcataacttgggaggaagacaatacatttttaatcttgtcaaacgatttttgctgtttttctccccaattaaaagacataccttttctcattaatgattggagcgggcctgtgagttctgccaaagctggtataaaacgtcgtagatatgaaacttttccgagaaagcttttcaattctttggctgattgcggtaccttcatggctagtatagccttagtcttatctttgtctatgcttataccatttttgtgtacacaaatcccaaaaatttcccagtgcttacaccaaaggtacatttaagagg

SEQ ID NO: 252785 - DNA, 1076 bp, Cannabis indica
taaaataagaatccaacgttatttcggtaggtaagagtcaaggttatccttattttataagcttctaccattatttcaaactttataaatttatttctaagaagccaccgtagaggagagtctaatagaaacaaaaaaattacaaaaaacttatcatacgagatcttacggtgttaatgcttcaatggataaccatccataagggggatgaagtctaacgtctcgaggttacattgaaaaattaaccatgtaagaccaacaatgaagatcgaatgtccttttgattaaagctcattattaaaataatgtattttttaattaatgatttgttttaatctatatattttaataataaaaattacttaatttaagttggtatttcaaaaatctttatatataacatataatttcaaaatttatttaaaatataataaaataaataccagaaaatatctaatttaagtttttctaaaataactaaattttcaacttaaataattttcaaaatttaattaagtaaaaaattgattatcttgaactaatcactttaatttgaaaaatatctcaatttaagttaatctaaaattaacaaattttcaacttaaatatattttttttaaaagaatatctaaataactaatttcttagaaattctacttaattattaatttcaaaaaaatattttaatttaagttgatccaaaatcaatttgaaaaaattaatttttaatttaaatatatgaaaactcaaataattaagtatctagaaaaatctaattagttataacttctttatttaattaaatatagaaaaatacatatagtttatcttgaattaatttcattaaactaagtgtgtttttcttaaagtaatttcaaaataatctgatgaaaaacaaatttcatatattttgaaaattaattatgttgctaatcaattctattaggttaaactagtgtaattaacatattacaattatttaaataaggtaaatgggcattcacaattggaattgttcatgtaatggagggttgggctcaatatgttgtacctactactaatggctccctaactct

SEQ ID NO: 252786 - DNA, 584 bp, Cannabis indica
aaaaaaaatttactaaaactaataagcaacaaaccacactacagagaaatttttttccttaacaatatttttcataaaatatacaatcaatacagatttaaacctcaaataatcaatacaacacacgaattggtcaaccaccaatagcgacgaactaccttcgacaaccgtgagtcattatcaatgatcacaaacaatgaccacaaagctttgtccaccatgaaaaaccatgaacccatcgaccacgaaccttcgcacctgaggaaagagagaaggagagagagttgatcagtgttttaaaaaaaataaaaaataagtagaaccaaattagaggacgtggagcacagatctcttcagaacaaaaaagaaaaagaagacaaatggtacctggaagttttagaggggatggagctcggatctgaactccgttgactcatcctttgccagaaaaaggtcgctgacctgagataatgcacaaaaatagaagaatagggaaggactgaagctgagagatacgccatggcagaacccatttgatcttcatgtgggcagccacttagagagagataggagagagagagaga

SEQ ID NO: 252787 - DNA, 1379 bp, Cannabis indica
gagttatgggaccctttggaggagcaagtgaggatctctcctttgctgcagaatgtgggaactccctacaggttcgtgactatgactgatgcctcctggtcagatggtgtagctggtctaggggtagtgcttatcgatacagtcacaagcaaatggtttctttcatcttcaaaaagtaagtcagggtcgattttagaagcagaaacggttgcaattttgacggccttgcaaagagctagtcaatgctattagaatgagatacatgttctatctgatgtaaaagtggtggtcgatgcctttgcagcaggcaattgtccactagattaaaagttcttaaatatctcgttggaggttattgagtctgttaagtgttttagttgctgtaattttttctttattagttgtaatcggtttgttgatgcactagcaagagtgttagattgtctagtcaggatgctagcattgtgcaaggggagggaatcccccctgtgattcccaattatctttccattgcttaatgaacaagttgttcttttttaaaaaaagccatattgaaataggcatttgtgaaataatttatcaattatgaaaattttattgtattctaagtgtgtgccatgcaagttaataatgaatttcgataatgtttcatattttatgctggtgatagtggaatgcgattgtaacaccctaactagcataggcgtgttaacgtgattttaaacatactgtgcagctctttgcttatcaacgaagttattaaaaatcgtgattaattaaagtttgcttatttaatcaaaaacttaaagtattacatatataatattttgggatcccgtttacaaaatactttacaaaagtttgctatacatataatcaaaagtttgtcgcctagcgactatacagcaaaagcctcgatgtcccaaagatcgtacgctccaggcctaaccgccccgacatgtacaatcttcacatgctcgtactcacggctcttcaactttagccttgcccttacctacacataaatatagcactgtgagtcgacagactcagtaagaaaagcataacatataacatacaaataacccgagttataacctggcgcccatacacctaatcataatcctaatccccgtgtcgcacacggtactgagtctagaacgttcaaacgacaatactatcgaccataatgtcagcctatactcaatatgctagtcatactctggccatattgatgtgacaacatcgatcaatatgttagccaacatacatttatcagttttcagtacaactctatgtatactattactgctatcagtgtaatctaacaggcataaaaaacatgcacgctaaacatgtaataacatatgcatgatatt

SEQ ID NO: 252788 - DNA, 995 bp, Cannabis indica
caaaagcggaggcagagttgactctaggtcccttggcagattggcctcaaactgtaggactcttagaggataggctgcgatccgattaggacgttgtgtagaattagttttccatttgtcaccataaccaggggaagtctatggagtatatagtattttttttgtcaagttccctggcttctcacagtgagcgcaaaatgggagtatttgcttgttacagggaggttttgacaaggtacggatcttgcattgcctttcatgttgaatgatggtggcaaagaccttcgaaagagaaggaaatgactcaaggatgagtacttgagcatggacatcatggtataattctttgagacctatcaagaattaaaggaccttctcttgattctgaaattttaggttgtctgcagaagcttgacaagtgcaaggaatatgaggtcgttactcgttgatctcatcccaaatggcccaaattttggtaaagtaagtcttgacggagtcatctccttggcatagatcactgagggattcattgagttcaaagaggcgaggttcattgccttggctgaatctattagtgagctcagccctcataatcgcaatgatatcgagaaacatgacactgttcttgatgtcaagggaaacacagtggatgatcaaagacatcaccatttggttacatcgaatccaagaatgaaacagaggactcgtaggcactagttgcggaagagtaccgtcattgaattcaattttgtttttggcaccaagagcaaggtaaaatctctacgccattactaaaaattgttgtctgaaagtggtggagtgaaaagtatgagactaggatgatctcatgagccaacgaagtaggggttgtctttgttgggagagtagttttgatgatccattggctgagaagtgtgggatgataaaggatgatgtcccgcctcatggattagaggaacacaaacagtaaattcttggttggcttgctcagttac

SEQ ID NO: 252789 - DNA, 1134 bp, Cannabis indica
cgagcagggcacaacatacacatgcacgaatgatgtctttccagctgagcagtggataattcgagcagcgcatcaacacttagcaattcaaaaatttgcattgtgaagcacaagagtaatctctatcgatctgggatcgtgtcacaaagatatagcaagctgtccaaatcccacaatctgtgtattctaaatagtaatatatgttcttaccaattatagacattgtaagcaaaagggaaaccttccctcaagcatgtagccctataaatagtgatccattctcactagtaaaagggtggagaaaattacactagagaaatctaagagagcatactcggagatttcattgtgagagcttcaagagaggaaacattgtgttctttgctcttaagttaatacaaatcaaggggagtaggctattaccgaactgaatggggctaaacctctttaaaaaccttgtgttctttatttatttttttatattatacataaaatcatatttcttatcgcttattactagtctcattgtcgtttgctaaaagcgaggtcaacattttggtgctttcattgagagcaataatatttacttgctctttacttcaagtttgatcataaacacgatggtggtacaaactcatagaggcatggtcgatcacgtggatctattagcagtagatctcgaactacagactccagggaatgcaagggtcccacaagccactaatcttgtacacccaatcacgcaaccacccaccacgggtcaaggtgtgacgtctcctttggctggaatcacacccgatgtgcaagagactagaaacaccaatttagcagccgatctgagtactcccagcactaggatcccttcagcaacaaatgtccagacagccattggagatgataccgagatccagaacttccgcagtggtcttgggctcatgcaaggtcataataatactttgcatcatgatcaggaagagctccttgctgcaatgaaccatgtgttcgaagagaaaaggtgcaagttcgccgaatggggagataaagaaatggaaacgttgaaggctcatcaagcagccatcgacgaccgaacaagacaggctaccgtactgatacgaagagcctaccaagttgcta

SEQ ID NO: 252790 - DNA, 629 bp, Cannabis indica
tacgaggatcaaccttgtcttcgtgccagtccaacctcttcgagtgatggactttctaattcaagctttgaagattgggagatgagtagtgatcgttctcctactccagaacccgtagtgcaacaccattactattccgagcagattgccagagaggggtacgaccacttcatttgggaattgaagaaaggttggaggtgttatctcccgtccaattggacatatattgttcggtcggaagttgctagcactcttcttattggtcgtccaagttcgggtaactttggcatcccaattgctattcttgctgttgcagttgcccgacagtcacaccagtgtccgtctagaaggaggatgatggcccgaacaaagcagacgatgtgaaagggcaacacatctgatcctcatgtggcctagctcgccacattaccaagtgccgaacaagatctgcccgtcatggaggagggagatcacgaggggggacattgaggtccaggaaattgaggagcaggacgacatccgtcctggcgacccttccaaggccggaaggaagaagtggcaaaacttccaaactttggagggtataatgaggctggggagccagtgtctacggagggtgaagtctggtt

SEQ ID NO: 252791 - DNA, 572 bp, Cannabis indica
ctttgttagaaaaagatagaaagaaagatcttgtaaaacacatatggtgagtagaccactatcaattatccaagagtgagtataaagaaaagactttttaccagccatgttagaagcggcagcagctgtattagggtcctcacgggtctgtccttggcttaattgttggctaaggagagatatgagttgttggcattgagtggaaaggtcaatggagttgttgttggtttcggatgtgttgacagtagcattattggcagcactctttcctttttcagacttctttttatcgccatatcccggaggaaaaccatgaaggaaatagcatttgtcaacatagtgtcccggtttaccacaatttgtacaagaaggtcttggtttctttgaacgattgggatttgtaggtgatgaagggcgagcggatgcagccatggaggacaaattcgaggatgatgaaccaaggattctttgtctctcttcttgaacaatcataacaaaaacccgagagaggttgggaattggttcatagagaataatttgagccctaactgaggaataagactcatttagac

SEQ ID NO: 252792 - DNA, 1634 bp, Cannabis indica
ttctccctcaattcttttatcttagaatatggctcgtaccaagaagacaacgcgtatggtcaatgcgtctaaccctcaggtggctcaacacgccactttgcccagcgccgaacaggaaccaaccgtcctggaggagggggatcatgaaggggacgatgaggtccaggagattgaggagcaggacgacgttcgtcctagtagtccctccgaggcggaggaagaggaggaggttgaacccccaaactacgtggaatacaatgaggctggggagcaagtcgatgccgatggagacgtcctggttgagggtgaggactatgtctgtgagcagcttactgctgcggttcctcacagaaggcaaggtgccttgggtgccagggggtgagtcctttgtccagggttactgaggcacgcctgcggactctcgacgagggtggatacctaggcgaattggattgctacattcctgcccacaataatcgtgccacaaaccctgaaaaggggatgtgcgcttggtcgggtgctcaagcccagcaaggggcattgatgcctttgcatcaatactttaagaatgtggcggacttcttcggcctttgcccggcccagttcactcccaggggcattaagtatctgtctgccctcttcgtcctttatgcctcgcagaagtggggtatgccttctccccacgaagttagctggttcttttatttgaagtcgacccctaagcaaggcaggtcggggtacttctatttctctcaaccagacttcaagtggttggcaagcaccgatgatttggccatcagcgaaattgggcgttttgttgatgagtacttcatggtggatggcgcgggtatcacccgtactcggttccagtagattccaacatatcactgccctccctttactcttactctcagggatagagctcaaaagcttgctccactatcgggggaagaccggaacatcatccagttgacatccgaggataacgtcgtgaagtacgggctctatctgaaggatttcattcctaagccactgaagttgaggaagaggaaatctgatgctggatgggctaaacgagctcatcaggagaatgaactcattcaacttaagcgtgaagctaagttgaaaggaggtgcaagggcaaagcagtatgctcaggagcccttgaatcctgaagatgaagccaaggagagcaggtgactccgctcaagaggaagaagcttccgacccagcccaggcctattgaacatgcaattcgcattagggagcgcatctcgcctgctcggccgccttatcccatgctcggaaaagggaaagcaattatgtctgaaataagaggcatgtcaggtgatgatggagtttcgagtcttgctcgggcaatcatcttgcatattactctgtcttgcctttaagcttcttgactattatattttatgtttttgatgtctgttttctctaaccatgttgtttttattccgcgcagatatgtctcagaagatgcttgacgctctgaagaagagaattggtggaagctctagcgcatctcctccagccaagaagtctagaggcgatgaggggtcctcttctaaggagaagatgcctgccggggaggtcattgatctttctgaagagct

SEQ ID NO: 252793 - DNA, 1344 bp, Cannabis indica
acatccggcagccatcttcctttttttggattagtttaatagcttccaaacagtccgattcaatgctaaacctcagtatacgcctctgcaatcccgcttgtatcccccacaaaatagccaagagctcaaggtgcaatggagactgctccctgggcaaaaccgtggccgaggcatagagagcgtggcccgtctcatcgcgcatcacacatcccagaccagaacagcccgcaccagtcttcacaccagcatctacgttcactgtcaccacaccagaagtcggcatcttccagcagctgtgttcccttcttgctgcactgctactgctgcatttttcaccttgaaaatcagcaagcaacttgtggctccactccaccatttcaaccggttgtggtacaaaaccatcatgaataaccgcattccgactattccacatattccaagtaataacaagaaacaattcaaacgtttccttactcagaatagtgcccagccgcattaaaaaagcaagcacatcctcatttccttggcgtttgatttcttgatgaaaatcacaaagtttccaacaaattctactcatcttgcattcccatagagcatggaataaagtttcaggcagctgttgagagcatctcacacaccgatcactattggagacatgacgttgggataaaacagcagaagtgggcagccaagcatgagccaatttccacacaaacaccttaatttttggtggaattttcaaacgccacagtttccgccaccattggacagcaaggtgatcatctgattgttgccgttcttgtttcaaatcacttgccattcgataaccactcttgactgagtactcaccatttttagtatagtgccataggattttgtcatccgtgtcccatcccatattaggaagtgtaagaatcatttccgcatcctcttgattaaacacagctttaatgaaatcttcatcccaagtaccatcccccaatttcaaatctaccaccctaagttgctctggtaagggcggcttatcatatatcttgaaggtgaccggcctaggcagccatggatcctccaaaatgcgaatgttactcccatcgccaaccctccatctataaccctttaggattaattttttgccccatactaaacttcgccaaacaaatgaagcatgtgtgccacatttagcctccaaaaccgaactattaggaaaatacgaagctttaaggacacgactacaaagagcgttaggataccgaatacagcgccatatttgctttgccaacaacgcttgattgaacattcccaaatctcgaaaacccattcctcctttgtccttaggcttgcata

SEQ ID NO: 252794 - DNA, 929 bp, Cannabis indica
actagtactgcttcataattcaaatttgacttgttatatgtactgttgtacactaaaataattaacctggaatcctctgattttgtcgaattatatatagtattatatattaaattgtattattgtgcctttattcaaaaaaaaaaaaaaaaattgaattattgtgagaccactctctcacataaaataaatagtaaaatattgaagtcattataaaaatatagactacttcactttataaacaattaattttaaaatgaaaccttatgattcttccctcgtaagaaaatattcatgagcataataaaaaaaaatgaaaattactatattacatgtacatttataaagtcgattttctacgacttgagattttatatccacttgatatatgttataaaattaaaatagtcatctagtaggttcatttaaaagttcatgataagtccaagatccaaaaataaaaaaaataaaaatatttttatattgaaataagtacatattagagcaatatgtattacagcctattatgcaaaagttctctattgcaaattgttaaagagtatttttataaaaaagtgctaactacactatgatgattattttttttatattggggtagaagaatttgaatttagaaccttttctttgtgacgaaaaatatgaaatcattagaaatgctctaaataataataatttttaaaatttgttgaagtatagctttgtcacaatatccttaattttagtttttatttttactccaaaaaaacaaactataaataacatttagtagcgattttcacgaagtgaatttcataataaacatctgaaaatgataacaaattatgaaataaaatgacctcatagtcactatccacttattcgtttatctacaacaacttattattatttcatatcaagctagctattat

SEQ ID NO: 252795 - DNA, 526 bp, Cannabis indica
ccaaaattccatgctttctccagccacttctcaacgcacactggggtcaaagctcgagaagttggggtgagcaaaacattcaatctttgtgtgcagaaaaactatcagatgtgtgcacgccacactaatccaggtgatcaaattgatttgtatttgaatttcaattcttaaattaattcaattttactttgattaggtttgtgtgacattgtgggatggcacttccgctacagctccaattttataatcaacaacaaccacagacacagactataaaatgagcagagttagttaattaatctcttctaattccaaaacttttattcattcttatcatcattatatcatctaatctcatttctcttaatctatactatagattgctaagaatctcaacaactacattggtcatgcattgatttacaaagtaagtaataatttctttgcatttttttaatttactactccttgctgctcctgattttgtttattttatttttaggatccaactaaccagtaatgtatc

SEQ ID NO: 252796 - DNA, 1042 bp, Cannabis indica
ttaggtccttgtcctggtcctagtcctagtcctagtttggttccagttgtagttgcgattatatgtttgagttagggtttgagttcaggtcggggttcgagtccttgtacgagtttgggtttgagtctgaattttagtctaggttcggatgaggctttgggtgtgggttcgggtcctgggtttgggtctacgtcaaggttcgagtcccaagttctgatcctaatctgagtccaggtttagttccgggtctaagtctttagtttcgatctcggtctgggttcgagtttgggtctgggtctaggtcaaggtttgggtctgatgctaggtttgggtttgagtttgggtcccaggttcaggtcagattttgggttcgggtctgggtttgggtttggtccatgtccgtgtccaggttcctgtcctagtttgggtttgggccaggttttgggttcgggtatgggtctgacttcagattctttggtccagctcaggtcttggtttgggtttgagtactgaattttgatcttggtcttggttccgtggcctaggtccctggtctaggtcccccatctaagtctggttcctaagtcctggtcttggccgaggtttcggtttaggtatagagtcttggtttgagtctaggtcccgactctgggttcgactctaggtcttggtccgttgtcttggtctgggttcgagttcgggtccctgttatggtctagatccttgtttgggtcctgtcgaaggtttaggaccaggtcaggtctaggtcccggtccacgttcggatcccagtcctagtcaaggtctcggtccaagttctggtctgagtttgggttatggtttgggttcggttctagtctcaggtctgggtcctagtcacaattctagttctaattttgggttcgggtttcattctgggtcaaggtcttggtccagattggggtcgaggttcgagtcttagtccgagtctgggtacaggtttttcggatctcgggctgcgtccaggtctgtgtttgggtcccatgttcgggtttgggtccaag

SEQ ID NO: 252797 - DNA, 679 bp, Cannabis indica
aagctatcatccgcaaaaagcaagtgggagatagcaggggcccgcctggcaacttttatacccggaagggacttgtttctttctttcttgcggaggagagaggagaagccttcagcacaaaggagaaagaggtagggtgaaaggggatcaccctgccggatacctctcgatggggtaacactgccagaagctctgccgtttagattgaatttaaatgtggtcgtggagatgcaggaaaacaccaggtgaacaaaccggggcgggaagtggaatttccgaagaatggcgacgatgaaagtccattccactctgtcgaaagctttggccatatcgagcttgactgccatccaaccttttttgcccctcgtcttatgtttgatggagtgcgctacttcctgggcaatgattatgttgtccgagatgagtctatcggggaggaaagcactttgattgggggagatcaaattattgagaacgagtttaagccgatttgcaatagccttagagataactttgtagatgatattgcaaagtctgatgggccggtaatcagagagggaagtaggttgtttgactttgggaataagagtgataagggtggtatttagaggagcgatgtccccattttcgttgagaaagctcgcagctgctttgagaacgtcgtttctgacagaggtcc

SEQ ID NO: 252798 - DNA, 696 bp, Cannabis indica
taaactcttatgtgtttatttcattgttttagaattcatattaggatattaatgaaacatacatggtagtaaatctagatcctggtaaaatatttccaacatcaacaccaccaaaataaatctgagatttttcctaatttatatgtaaaccggaggagctactaaaatcatccaatactctttttagcacctgaattgagtggcttgtccctttgctaaaaatcattagatcatcagcaaagcaaaggttaattatttttaagcttttacacaaaagatgaaatctgaacctggaattctcagaaccttggagcaggttcctagtcaagtactccatgattaagacaaataacagaggggaaatcggatccccttgcctaaggcctttttctcctttgaagctaccttgaaccctaccattcaactattggaaattattttaccaggatctatttactatcatgtatgttggattaacaacctaatatgaattctaaaacaatgaaaataaacacaaataaagttagaaaaccttacagtgggtgcagcggaataatatgactcctttcgttcagattttctccttctttgatgcagaatttccatagtcttacatactatgattgaggtaccacttgatgtgtgtgggcactactctttcacaaggatgttgaaatttttctctctttttctctc

SEQ ID NO: 252799 - DNA, 834 bp, Cannabis indica
taattccacatgtttaatcatgtgttaaatgtgtcaattttttatttgtgtcatgacgtacatttataaaatgtattattgtgtcgtgtgatctgctaagaaattgtattgtattcgtgtttgaaatcttgatataattaataatcgtgtaaacgtgtcaacacgaacacaatacgataacatgaattttcatccctaattgtagttttaatacatatattagcaaaatataattgaagaaaaaaaaaagaaattgtacattctgcgttccagtataattttttcagtgttaaatgtcaaaatattacatatttaatgtaaaaaatacaaagttaattaaattttaaataatatttttataaaattaaagttatatatttgtatattcaaaatattttatttagaattaattttatctttgtttatagttaataattattttttttttttttgcataatagagagaaataaataaaaaaaaaataagaaatgcattgtttttattaagagaattacaaattaattagattttaaaataaatattttcattgatttaatatgatatattttatattaaaaatattttgtttgtgtttgattgagaaaatagtatttgtgaaaagagtaaaaaagaaatagaaagatgataaaagtgtggcccaacacaagagaaaaatagtatttttgaagaccaaattgactccaagaagaaccaggcccatctggcccattttcttctccaccaaacatgctcgccatgtggcgagctcgggttccttctgcagtcgtcgggcccagcagaatcaggagacccccagcccgactcacgcacaa

SEQ ID NO: 252800 - DNA, 698 bp, Cannabis indica
gagcaatcgaaatcagtgaaaaaactcaacgacataaaaggccatcttctggagctaattgaaaaccgtaacagatctgccagtgaggaccattgatttcttttctttcttcgtttatttatttgttttcttacaatagaattgcactatggaccaattatatatgtttggtatctaactcataaaatcttgtctgattcagaaaacaaaaaaggcagtactgctaacagatatcaagagttgttggaaactttattaagatcatcatcaaacactacagataactcaaagaccttgaacattttgtttgacaaaccaggacttcatgactgctactacaagaaaaaggtgcaattactatttcaatattctttgaactctggtttgattattgcactatgatgaaattaagaagcatattgtaacattacccatcactggtgttttaccaaaacaggtctctaataaagatttgactaacaaagttgtagcattgttcatctcgggtttggaaaatgatctcacaactggggctgaatgtgcaatcattcaacaaatgtacatggaaaaatggcacaatccatcacgtatatcaagtaattttgaggttgtttgggtgccaattaacctggattctaataacaattggagtgaagagaatatggaattgtttatgaggctaagggaccagatggaat

SEQ ID NO: 252801 - DNA, 966 bp, Cannabis indica
gtccattggtggaggcatcaattttttcttattattgtctctctagatggccctttgatctttatcagccttgacatacttctgtaagtgtgggttattctttcaaattaaaaactcaatctcccactttaaattattacattcgtttatgtcgtggctgtagtccacatgaaagcgacaaaacattgttgtgtctctttagctttatatcatctttcatgggagatggtttcttgtacgtcaccatagactgagtgatcacatggattgtttctatgttgtctattaggactgagaaatcagtgaatttagaggcattttttctagggtgctaggcgacattgccagtgaatttgcctttcttttcgttaccctacctattgctgctgctagacctcttcccatttgacttcaaattgttggaatattgtggattctggacgaaaacccctcccgttgttgtgtgttgttgatttttcttttgcctgacataatttatgcattgtactgcttcttcaagctttatgaatcaatctacacgatctagaaattcagccattgatcccacagttagtcatttaatgtctttccacaactctcctagaggctcaatgccccccactattgtggctagtcttccttcttaaatcaacccctttaccttagtagctttggtcataaatctactaagataggctctgagaggtcctcctagcgtttgctttacttctaccaagacttccaggtatgagggaagctaccaagaggatgaaaattatgcacagaacttgggtgagaaagcattcaatgagttaaaccttcctggaggtagtttgaagtacaactgctaggcagccattatggatttgtcccatcaaaaaaccacaagtcaagttagaccaacaatgaagattcgaaattaaactacaattaataacagaaaaaaacatagttcaatataaattc

SEQ ID NO: 252802 - DNA, 588 bp, Cannabis indica
ccttgacatacttctgtaagtgtgggttattctttcaaattaaaaactcaatctcccgctttaaattattacattggtttatgtcgtggtcgtagtccaaatgaaagcgacaaaactattgttgtgtctctttagctttatatcatttttcatgggagatggtttcttgtacgtcaccatagactgagtgatcacatggattgtttctatgttgtctattaggactgagaaatcagtgaatttagaggcattttctctggggtgctgggcgtacattgtcagtgaatttgtttttcttttcgttaccctacctattgctgctgctagacctcttcccatttgacttgaaactgttggaatattgtggattctggacgaaaacccctcccgttgttgtgtgttgttgtatttttcttttgcctgactataatttatgcatcgtactgcttcttcgagtctttatgaatccatctactcgatctagaaatttcagccattcatccccacagttagtcatttaatgtcttttcacaactctcctagaggctcaatgccccccactattgtagctagtcttccttctaaatc

SEQ ID NO: 252803 - DNA, 598 bp, Cannabis indica
atttttctagaaaagaaaactccatgttctatttgtactcgccaggcttgtatgcacctttattgttatcttgttacttgatgcagaccttttatgtttagtccaaacatgcttgttgcaggatcttcattgtcaaggagtgttctttagagcgctaagtcttttacaaacaatttcctctctttgacttgtttgttgaagcacttggaaactttttattggcagacatgccactttaagttggattagtctcctctttcttcccttttgtcaagggattctactagtaagatttggtttacttcttgatcattttagaccaaaagtatgagagcatactattggcggactgggccagcaagggtatagaccaggtggccaaccacgttggagcattgcctgtccatttggatgaggatatggccagccaacctctagaggtagtggccggctagattggttgttctttggccagctagattgttgattctatggccgaccagcctgctgtggccatggttggccagccctttggatgccaggtggatgctgtagtttgatcctttttacactcaattggctttggcccctgatatta

SEQ ID NO: 252804 - DNA, 1090 bp, Cannabis indica
tttttacttttttttctttttcttttccttttcttttctttttttctcttcttctttcttcctcctctcgtagaacaaacacccacacccacacccacacccacacccacccactccttcttcttcttcctttcttcatttcttcctcttcttgcaaaattaacacaagacacgatcacatcaccctctttccttgcttctctgtgtgtgaaccagtgattattcagatttggagagaaggactaatggagagagaccatcgagatgggaaaggcgtttgttctcggtggaggacgacgctttattgacggcgttcttgggcttgaaggattctgggacttggggaaccatggggaagtcgacggggtcttcgcctaggccaatgacggccgacggtggtctgttcgtggatccgaggatgggggtttcaggaagtttagatctcttctttttatttatttattttttttttttttgagatattaatttgggttttttgtggcaaattgggtttgatacagagatttttttttagttttattttttgttttgtgttataacagatggacatattgatttctattttttagtgttagatttggatttgagatataggttatggtgatgggtggtgacaatggtgatggaggtagtagctgtggtgaagatggtgggtgattatagctttatttgatgttatgtgtggttgtacagattgtgatggagttgctagtgggatttgggtgttgacaaggtgaatggaggtaatggtggtgttgaaggtggagggaggtggttcgattgttgttggtgactcgcgtgatgatcagagttttgttgatctggggctgggcggagatggagggtcgggttagggggggtcagagagggctgggggttctgtagaaaaatgaagaagaaaaaagaagaaaaaaaaagaaaagaaaacgaaaaagaaaaaaaagtaaaaaaaaaatatttttcatttttttttattttttaatttttttttaatatttataattatttttaaaaaattaatattaggtggaccactaaagatttgccacgtgtacaagtgtgtacacgt

SEQ ID NO: 252805 - DNA, 784 bp, Cannabis indica
cctctcgaattctcagctgatgatagcttgagcgaagatcgatcttggagaagaccgtcttccccttcagttgatcttgttcaactcccggtaatcaatacacattcgcatgcaaccgtctttcttcttcacaaacaatatcggagcaccccaaggtgagtaactcggtttgatgaatccaagatttagtaattcttgtaattgtatctttaattccttcaacttagctggagccattcggtacggtgccttagatactggatccactctcggaactaattcaataacaaattcaatttcccgagtaggtggcaatcctggcaagtcttctggaaagacatcgaggaactcgcataccaatctcgtattctcaggccctgatgtcacaggttggctggtgtccactgtagtgactatgaaccccagacaacctatgcccatcaggtccttagctttcaataatgttattctcggtatgcgtgccccctgaatcttacccacgaacaccgctgggttaacactatcaggctcaaatacccccatcttctgcttgcagtcaattatcgctccatatttagacaggaaatccattcccaggattataacaaagtcagataattgcaactaaatcagattggcggttaattcacaaccatcaatctagaaagacaaccgaatccacctagtggatacaataaggtctcccgaggtagcagggttccgaattccgaagcataaaatatcacatggcttgtgaaaaactttcaataactctactcgacac

SEQ ID NO: 252806 - DNA, 1028 bp, Cannabis indica
gttaatattactattagtcaaattaagtatcaggtcctacatagtttaatgtaataatttttagataatattactaagaaattataataggaaggtgttacacaccattaatactcaaagaatgcttctttttttcataaatatgtttgagaagaataagaacacgtgtagctctctcgaatatacacataaggaagatatagtttattatagagcactagggaataatatatatatatatatatatatatattaatattttttttttaaagggactgggaattaatattagtactattagttttagttataagctaaaaagttattgtagttaaaaattaggatatatattaaataataatgtgtgagattataattatagcatttttaaaaattattatacattggagtgtttttagaactaagagtgcacaaaaaggtactatagtctggtcctttcacctcgcgtatgctctgttttgctgtcaaaccctaaagtgttttcttgtcttttcgttttgttcttcaaggtagctcttcatggctgatcatgagacgatggacttagagaatgatagtgattatgtgactctaacaggtggagagaatgatgatggtgggctgttatatgatactggtgaaaaggaactgtaacaccctaactaatttaggcatgttagcgtgatttttaacttaccgtgtagcccgttgctaatcaatgaggttatcgaaaaccgtgattaattaaaattttgtttatttaattaaaaacataaagtgacatacatataaaattctgggatcccgcttacaaaaatatttacagaagtttaatattcatatacacaagtttgtcgcctcgcgactacacaacaaaagtcctgatgtcccaaagatcgtacactccaagcctaaccgcgccgacatgtacaatcttcatctgctcgctctcacagctgctcagccttagccttgcccttacctacacatgaaaaatgcactgtgagtcgacagactcagttagaaaa

SEQ ID NO: 252807 - DNA, 506 bp, Cannabis indica
aaagaacatgatgacgtattggatccggccgagatggtctttgattatgctccattttggatctaaattcataaggtggcaatgtgttgtatgaataagtcgtggggtttttagttggggaagacgattggtgaggtgttggaggtgttatgtggtccgaatggaatgtgccatggtgtgttcatgaaggtttgcgtgagtgttgatatttggaaacctctagcacgtgtgattaaaaattatttggcgccaaataagcctttgattcagaagtcaattcggtatgagaggctcctagatttatgttatttttgtggaatcttaggccacccgatcaagaactgcctattgaagtcgaagtctatcggtagcaaagatcaattaaggtatggggattggattcgggttctgtatctcgaaaagataactggcccaatttttaaaaagtctcgtggatgcgattttagagtggcttcgtctggcgatgtggtgcatgtgaggaagtc

SEQ ID NO: 252808 - DNA, 528 bp, Cannabis indica
ctatatcgaaatctatgtctattacactatagcataaaataacactcacttctcagatttcacattgaaatcattaaataattaattagtaattaggcaattaaaagaaaataagtatgaatgaaatagatacacatacaaaattaaaaaaagaagaactaaatcatattaaaaccaaaataaagtgtcaaataatctccattaacaatctaataaaaagtctaactattcataatcattataaatattttataacaactaaataagaacataagaaaagagttgaagaaaagatctcgtcgaaaaatattgataaaagtctccagagctgctttttgcttcaattttcatccctaatgattgtctgctgaaaagtgttgaaaaaggacctttatatagctaaaaaaaaagataaaaaaacaatttttttgcagtttagaataggcggattgcgacagtaccttgtagttttgcagcgcttgaagctcaatttttggcagcaagattcttggtgcaatgactgataat

SEQ ID NO: 252809 - DNA, 733 bp, Cannabis indica
taaaataattccaacaaaagtttctttaaaattcaatgggtgaagatcaactttaatcgtatagcaccatcgttcaatcgccaaggctcaaaacctacaataggtgattcatgattgatatcacaggagtctgggtacatacggcttaaggatttagtttacatatattttaaagttaaggggaggatcaatttctgttaagtttaatagaataaaaaaattaaaacaccgttaaaccaagaattgacgttacatagtcatttttaatgtataaagatataataataatactatatatattttagaattatatatttagatgtcacatatatatcccaagtgtttttttaacactatatatatactgagtatttaagaattaagtgtaaatattttttaattaattaatatttattaataatactaataaaaaataaatactcaataatactaattaaatacttatttttaaatagatattttagagttattatttattaaagtaataaaaaattgataaaaaaaaagagaatcaaggagagaacaaataatgctaattagagaaatattagaataacatgtcaccacttcctatctttcctttacatatatatatagataggtagatatatagattttaagattttttaaaattaaaaaacttaattttttagaattaaaaagaaactataattttaaaaattgataaaaatatctttatttgttaataaaa

SEQ ID NO: 252810 - DNA, 621 bp, Cannabis indica
tgaattttcactaagctagggattgtgaagaaaaaagattctaggatttatttgttaattaagagagtttattaagtctaattaataaatatattaaatgaaaattctatttgataataattttaattattaaataaatagtttttgcatttatgtgcttgaattagaaaatatgacatttgtgaaagaataggataaatagttgaaaaatggcaaaattgcaagtggtgggcccacatcctatggccggccactaatgctcatttttaccatttattgatcaattttcaaatgccaaataattcaaacctaaacctagaaggattcctataaatagatagtgatggactcaaaactgacggcttaagctttcacttgccttcaatcaaatttgagccttctatctctctctccaaattcgaatccttctctctctctttctcttcaatatttcgaacccttatagtgatagagtacatgctcacacatagcaaattggtactcaatcatagtgtgtaagtctgcgaagaatccaatcaatgaagagaatgctcatatcttggtgatactctactatagaaaaggatacaagggttagagatctgagtgaaggagtcattt

SEQ ID NO: 252811 - DNA, 999 bp, Cannabis indica
caatcatcatcagagaaaagcttagctcgcgatttagtaagcttttacttgtttagtattgtatgtgattattaaagcatgttagcaagcataataaattataattatttattttcatgcattgccttaattccataagtgcagaagtaaaattacaatgtggaccgttggatgatcaggctaacttacgaatcaatagattaatttgttttatagaatggacagttggtgcaatatggagagtcaaaccaatgtggtcaaggctagtaatggttggagaaaatggaatctaagttgtcctcgtagccaaggtgaaagtcattggagggcttttggcgggagtgatgattatccgccacaggctccattagatttggagcaaaggttcgcagagatgaaagctatgattcaacgacatgatgaggaaattcagaggttaaaacaacaaaggtctcatgtagtacctttacctcatatgccaatcattttcaatccggcattaccagcagaccaaaatatgcctggtaattaagtggaaccattgcatgggggaaatcagatgcaagagtcaccagctcttcagggagattcagatgtgaaggatgctctttggactgggagccctaaagaatttattctaaaacctcatgaggacatgacagaaggtcgggtcactactccccttactttcaattatgggagaggtggtaggggttccttagttgagcagaagagggaacatgcattgaaatttgtgggttcacgacgaaacaagcagttttgaaggaaccaaggtaaaagtgaacgtcagggttattcttatcatgagtgcccccgttgtaagaatcatcatattggagaatgcaagcagaaaacatgcttccagtgtggcatggttgtgcattttaagaaaaattgccctcaagcaaagaaagataagaagaagctagaagcaaagcctgtacctactcggatgtttgctatcacttaagctgatgc

SEQ ID NO: 252812 - DNA, 541 bp, Cannabis indica
caaatacgcccattttgcgctcattgtgagaagccagagaaacttgaacgaaaaaataatatatactccaaagatttccccctggttatggtgacaaatggaaaactaattctacacaacgtcctaactggatcacagcccagtcctctaagagtcctacagtttgaggccaacctgccaagggacctacaatcaactctgcctccgcttttccctctccttcagtctccaacaagctggcctctctccaagacatgataacggaactcactccgcaaattcatcaaactcaagctgctactgatgtcaacactccaatggcatcaaaccttactggtaaatctgtatcattgatagttgataatggagctacctacccaccattgtttgttttgatataacattgtttttcttctttggtgtacaatcctggctgcttctcatatttcactgcctaatagaacttaaaatactcgtgcataagtttggaactgtgcaattaaatgatctatttatttctttctaacatactttatgttcc

SEQ ID NO: 252813 - DNA, 505 bp, Cannabis indica
tcagattagccttcaagccttgaccaaacagatcatctgttaagggaaacttgcctgccagcttcagatctccgtaacccataatcttccctcgattaccatctccaaatgtcactgacccttcttattgtctttgaagtttcttagtgaatcacgagagcccgtcatgttcattgagcacccactatcaaagtaccagtgattttcttccatagcagacagagacgtatgagcaacaagagccacatcttttgccttagcagtcattttcctacctgttgcaccacctgaggagttagatgatttaccctttgtagactgttgtttaattaggtttctcatataggtgttaagtttgtagcacttaggtctgatatgccctctcctgttgcagaaatggcatacagggacaaatctttcttgagatggggcagatttcttccctccagatcttcgattattgtcgacctttttcaaagactcacttgacgagttctctttctga

SEQ ID NO: 252814 - DNA, 889 bp, Cannabis indica
aattgatttttaagattaaatatcatttaactaagagaacaaaactagaatttttgaaatcgaataaacgagtagaaagttatgcacattttagagcctaaaaaggtagctttttgccactaccttattttcagtctaccctttttaaatggcaggccgtttttcatagaaacagcagacagtttttcccagtatttctttttgaaaagcatgttaacggctataaacgactagtttttgttcctacactatataaactcgtttttcactcaaaaattaaggttggttgagcatttattcaacataccaaacatttcaagtgattttaagagctcacaagtttaaaatccaacaaagctattttcacacactttgagccaaaatttatatttatttcttataagtgtgcttgctaatcactctaagttcttcattgtatcattatacttctagagtgagtttgcttgtaattctaagcacatttccaaactgtaattgaggtgaggtaggcaccggtatgtacaactcggttagagtgagattgacactacaacaatccgagaaagaggttgatagtcatcggcggtggaaaactattggaagaggtttggaaacaccttggtgtaaaattcccaattgtaaagattagtcaatcccgttaacttggctcgataatggaactcaaagctaggtccatagtgtaacaccccgatattttgccttactttacaaaaataccatttaaatgcataatttgaaaagattaaaaaatccttaaaatacaacaatgagttttagaaatcaaaatgcaatagagaaggatccttcatttgtaaaacaaaatacgataagtaaatgattttaaataatacatttccattgtgtttag

SEQ ID NO: 252815 - DNA, 746 bp, Cannabis indica
tttttgcccaagtatatctctctcctttataatgcaatgggtgtagtgcgcacaattctaaagtactacgaaaatcttcaatttgtgtttcatttctatatccgcttttatttttatcattctgacttaaaatctcattgaaatctccaatcactaaccatggtccttcatacactatccgtaaatgttccaacatatcccatgttagtcgtctcttagaaacattaggctccccataaaacccacagaaatgccaatttattggtatattctctaacttcataaaacaactaatataattaggggtagaagtaattcccgagaccacaactctttccttccacaatagcattaatccccctcccatacctactctaggcacttcatagacgttttcaaaagataattgtctttttatttctaggctcttacctttgactaatcttgtttccatcaaaaaaagaacatctggcttgaactctcgaagaagtagcttaacatgtcgtattgcatccttaccattcaaacctctaacattccaactaacgatagtcattcctcatatagacttactagcactcgcaatagactatatagcttttatgatatcttgatgatactcctttataaacttactagcactcacaatataatattatatagaataaagtctcttcacattggactttccttctaaatccatcaaacttaattatcttgttatgatactcctttatcttccttaa

SEQ ID NO: 252816 - DNA, 875 bp, Cannabis indica
aagatattgctcgagtctcccggagacaaaaaagggatgactcagactctgattgtgaggaccgagaaccgtgagccagacacattttggaggcgaaacttcccaaaaactttaagatgcccgaaatggcagtttataccggggactcgaaccccaacaatcacttatctcggttcaaccgagtaatgacggtcatgagagtcagcaatgacgccaaatgtttatgcttcccactaacattaagtggatccgcagaggaatggttcaagaagttggatccaggatcagtggactgctggaacaagttacaagttagtttctggagacagtttgtcgccacgagaaagattaatctcgaagtcagtgccctgactaacatcaagcaactacccacagagacattgaaaattttcataaagaggtttaaggaagaagcctcgaagactaagaaagttgatgacggacaactgcttgcacttcttcaagcagggatccgtacagggactccattctagaacgaattacagcaagaaggagcttcgaacctccaagatttccagaagagagtccaaaagtacatcaacttagaagaggcccaaatagtggcttatgagaaaaactatccgaccggagtagcgggatatgtgcccggggtccaactcccgtgaaccctaccttcagctactccaccaatgagcggtatacaattctccactaccccaggatataatcagagacagcattggctcccgcatcttctcactatgggaatcctttagggatgagcgaacaggtcccgtctcactccgctcctgctgcaagcctagccggaccttctaaaggcgcccggagcaagaggtcctcgaaaggtagca

SEQ ID NO: 252817 - DNA, 554 bp, Cannabis indica
cgcctacgcgtcccccatcgcccacacgccctcgcgccccgtgccgcccgagcgaacccgccctcgctgcttgtgcgctctgcgccctcgtgtcacttgtgtccgtgccatgcccgctccctgcgcctggtctcctacaccccgtcaatcttcttttccctcctgacactaacagtctacacaaggaagtatcagatgagataacgacaacacaatgagtatagataatgaggacaaaatttatttcacctgaggttcaaaatgaaagggacatttttagtgtaacttaggatgtcaggtgcatcagaccacctaggatacaacgttatcaggtgtgaaagtaacttcacatcctatggattggggatctggtaaaattataaagtgtcaagggctcactataaataggacccttgagctcatgtaaaggagggttttttggagaacaaaacagtaacttctttggataggaaagcttatgagatttctatctcaaatattcttccattaaatttttcttttaaagataattttaaattctaattatttggttg

SEQ ID NO: 252818 - DNA, 1252 bp, Cannabis indica
ctactcagaagaattacttcaaggcccactacaacgtctcttggaggtttaggtcatgtaccgtgcaagcggcatactggtaagccaatgaaaatgtacccgctaacctctggcagcgttcttagacacattactgggtcgacccgatagtgtacatgagtattccaactcatggagacatatgagtcccttagtggtcctcatatgcccgccctactagtcgcactaattagtagtagctcacttagcaccaaggtgtcaggagatggtggagagccggcaccaagtactccttctttaaactaagagcattctaagcttatacgccttactaccataaacatatacgattttttgctctatagacatatggtcataaccatataccaaatcattgaatttctcaaattcgattgcgctattgtatttgtagacccaaataaatggcgaataccatgtcctgtccaaatcaagacaatattgaagatatttacaaaaaaaaatgtcactactgtacaaactaagcatcaacatgtcaccaacatgcacaccaacatgcgtcaccacttgacccacacttggccaacttatgggcatcacctagcttgtaacgtgccatcttggcatgcacgttacacactgcgcggtttgacaaaaatacaaatcgcaatcgcaccgcaaaagatttcaaaccgcattttttatgcgatgtggtgcggtgcgggcagtttgtgcggtttgatgaacactcctaaccctagccgttatatacacgatcaaaacgctataagttttaattattaattatcgtatttattatattaacaaataatagtatatatgaactaatataaatatttacttctttttacagtttaggaaaaaaagaagacatatgatttaaaaattgaattgttaccattacagcgacaggggatagaacgattgctggcggtgattcacgaaggcttgaacgattgatgctgaaatgtataagaatttttcttccctagcttattattaaggttaacttgtaattagatttattaatttgttaacacttggactaattttaaaatatttgtgtaatataaattaatttttttaattgcttctatgaaattagtttaagtatattggctaatcataaaattaatttaaataatatttaatttaacttttaaaaaataaatattgaatttaaattaaataatatttattataaattaataaatgtataatttaaataaat

SEQ ID NO: 252819 - DNA, 688 bp, Cannabis indica
tgggcatgctctggtgagaggaggtttacctcctccatgatcgtctcgagcccgccttgaagagtcttcttaggaactatcttccacgtgaaaaccatggcaataacactataggtttacgcctttcttcaactctcaagcaccaaaatatttacagaaatttttggaaactaaatatttaagaactaaataaataataaaacgcagaaagaaagagatggagatttttacgtggttcaggtgataatcaatcttagtccacgtatgagtcagtctatcagcctcttaatgcatttttgatgtgtttacaatatttttacaggaaactctaattctatactctcaatttctcttgaagaagaagaagacgaagagtaatattggcagagtatcagctatatctgttatcctcccccttcatatggaatagaagggtatttataggctaagtggcgggtatggacatatccatgacccacctaggattcctgctccaagcccactaatggggtagattacatgcaaagtaaaagctgaatattgggtcccttagaaaccattgtgcccgtgtgtctacaactggacaattggggaccatttgtacaaagttgacacgtgtcatccaaaggtttaacctttaaaagtacaggccacacgtcgccaaattttttctcctttaaaagtaggg

SEQ ID NO: 252820 - DNA, 581 bp, Cannabis indica
atcactttttaataacgtaaaaaaaaactagcataaaatttaatatacgtgtttcgtaagtaattttttgctagtatatatatatatttcttgaatgttttatgaatagaaacatttacaagaatttatattacataaagtctctcaacttttttttttttttttttgccaaagatatacatataaatatatatttatatatttatattttaattatttgagtagaacacgcgtgtttataaaatgaaaggtgatgggtttgtaagtagtggcttattttgttaatgaaaacgaaataaagaaaaaggtaagtagtacgtagtggtaacaatccacgcaccaattgaacatcttgtttctctctctagtctctatcataccaattgaatgttgggaaatattaaaagatacctccggctaatattttctttacatataaatattattattagtctaattaaatattatgttatatgtagtttaatataataatttttaaaaaatatcgctaaccaatcgcacgataacgtatttagagatgctaattactactgaagtccaataacaatactcttaaattt

SEQ ID NO: 252821 - DNA, 1154 bp, Cannabis indica
atctaaaaataaacacataagtttcaaagtaataaaaatgtatataaaataattggtaaacaaaaatagtagtttattatatcatatgacaacccattagttttaaaaataaactttaagattacccaaatgtattttaaataataagataacacaatatagtttaaaaatagctacttgattattaagatgtttatagataagattttagaggtaaccaaattatataattttaaaatgaattttttttacgtaaaagtaactaattaattttttatcagcatcataagtaaccaaaatgttacttttaaaaactcaggaaaataataaaaaacggaatttggaattaattttgtttctggcatattattttagaattaaggtattttttaatgatgtggcaaggtattattgtaattgagatttattaaggtatttttataaataatttatattttaagtatataattgaaaaaatcccttgtttatatatactttaattatgtatgagtttaaattttatggaaaagtaatagtcgtattatgcaattctttgatgcaatatagtatatagatcatataaattattacatatagaacataacttttgggagtcgaaatttttgtattaatttcgcctgtattttttttttttttgaaaagttaaagataataaataaaatataatcttatttcttaaagtgaaaaactgtaaccattttagttttattttaattcgatattctactattgttaataatattctactattacagttagaagcataattctataataaatgctaaatatgagtgtgattgaaatttatataaataaaatatatattctctcatacttttttttttaaaaaaaaattgaatatattgtaactagaaaaatataagagatgagtacatgttacaatattatatgtcaagatttggaacattaccattctattaacctctctcaagtgctaaagctgttttagctaattatgggaacaatattaaattgcctagaaacatgatgaacagtagtaacagtaggaaaattgaatatatattctctcatacttacacaggcaatagataattttttttagggtccatctctctctttttgtgttattttttttttttgttatttagtag

SEQ ID NO: 252822 - DNA, 1415 bp, Cannabis indica
ttggtggctaaccatttatagtctgaaaagtatttatcgttagatcttcgtctatttcaccagggacatttgggggttgccgcccaacagattgataggcttttcgtgttaccacagtggcttccaactacgattgtcaatctctgcatgatgaacccttaacgcttcaatctctttgtccctccatttgggaaacatgcacctctgctcatcaaacgcaagattcactacagcgcggagttcctcctgatcatgatgtaaggtgttggtatgaccttgcatgattccaagagcagcacgaaagttttagatctcaatgtcatctccaatggtcgtttgaaaattagtagcgggcggaacgactgtgttatgaatgccctagttggctgttgaactggtattcccagtatcttgcacaccaggcacaatctcatccacaggagtcgtcacaccttgacccgcaattgtaaattgtccaggatttagtgtcggcggaacccttgtgtttcctggaatctgcaatgcaggatccaccgcctatggatttgctagatcaaccacgtccctacgagtttgtactaccatcgtacttgtgattaaattcagaatgaagagccattcttgattctgctctcaatgaaagcaccaaaatcttgaccttgcttttttccaacaatagtgagtctattttagtaagcgacaagtagtttataatgactaaaatatagtaaagcaatataaggacacatgaattttatagaggttcagccccgagtagttcagtaataacctaatccttgttatttgtattaactcaagaacaaggaaaagggttccttttcttatagctcttacaacagtatctctgaatatgaattcttagataatatctctcaactaaaatgtttgcgaccttttgcccagtgagtttgcatcactatttatagggttatgtgcttggagaggaaatatttcccttctcgtgacaattgatataagcagaaagattacataataaatacagaatacactgatcgtgggatttggacagcttgccatatctttgttatctgatccccaagtaatagggacagtttgtcgttctatgcgggttactgactgcttcgtctcgaccatgcatatgaggtatcctgttcggactgtatcttgcgagcagatactcggagtcgattccacgtgtcaccatcgtgtgatgccacgtcagagtgcaaaaattgggataacaagggagattgtgagattacatggtaggtccattgtattagacagagatgctaagttcttaagttacttttgaaaaacattgtggagaaaacttggaacaaaactattgttttctactacttgttatcctcaaaccaatggtcaaataaaagtagttaatagaactttat

SEQ ID NO: 252823 - DNA, 968 bp, Cannabis indica
caaaggtagacattcgtgacactcctaggaggtcgacatccacattaggctcgttaagtacctatccaggtatcaactgggcaagcttacatgtttgaaccctttcaggttcgggagaggcaacactccttcctcgttctaaaagctaaggtaggaccaagtggactttcgcataaccttcaatattgacttattttcggttcttatgaggcttctccgtgacaagattgtatcaattaaggaattattaagctaatccctttctttaaatgccacgtgtcatacgtctagaaatacgaataattcctataaatagagacagaactcacaaaacaaagaacgactaatttgaaaaagaaaagaagataattcataaagatatcttgtatcttgtactttgtatacacttcatgaaaatatcataaagaagataaactcgtgaaatatgaagaattaacttcaaaacaatgttaaaaatcttcttgttatttatataaattattaccattattattatttattaatatcctagaatttatttattacttaaaaaatttattgggatttaccccatatacttgttttttattttttttcttcaaattgacggtttgggtttttaaggtggttgcaacgctagttacataagagtttctatacgattttttgttgcaatttaggttgcagcgttacttgcaatagatgtttttatgtagagttccgtaaacataccaaaaaaatctgttttaaagtccaaaaataaaaaacctaatacttatttattagttaataaaatatgcgttaatcagagttgtctttaatgtctaagttggctagtgtattttttttttttttgggagtttatgataatagaaatggttatttttttttagataaataaggagtaaaaattgtaagttaagttattatacttcgtttcccgtcctgccttgacaagcttacgcgaa

SEQ ID NO: 252824 - DNA, 536 bp, Cannabis indica
accatctctttttctcctggacatgtacaaatagagaatatcctgctgcaatatgatatgtttcagtttcaaaacgagcaatatctacaagggtgcatacctgattttttagtgctacaatccttctcccataccaacttccatgtattggaataggatagcaccaccaattttcctacttgatgtacaccgaatgaacccatttaacctataagttttcttctttctttgctacagcccatatatacttgaccatggcagccatgttccattccttgactcttctaaatccaattccccctgctgattttttctgacaaactgtgtcccaagcaatgcctcccccccccccccttggaaagcatgttgccctttccaaaggaaggccctgcatatagcttcaatctctttaatcaccttgttaggcaatagcatgacttgactccagtaagaatgaatggaaagaaggaccgaattgatcaataccacccttccagcaaaagagaggtgtcttgtactccatgttctaattctac

SEQ ID NO: 252825 - DNA, 911 bp, Cannabis indica
aaaaattaataatcataatgaaagaaaagaagagaaaacactctattggagaatgtatgtttatgtaatattattatgagtaaattgcagcaaaactccaatagtcacttcgctagcaattaatttctaaaatctaaattttgacggtaaaaaatcctaaaccgaaatattgttagaaaaatccaacttctgtttatctcagtgccttatttgcctatgaccaagtgcaaggtcaactcctattactatgtcactcaaaatgtaattaaatggcaattccacgtgtgcactattgtacacgtggtccacctacattggtctacatactatattaatttaaaaattattttaaattgaaaaataaattattagttttacaaataaaaactaattataaaattaattataaaatctcactcactcaaatcgtccctaccatgaaacccaacagaagacagtcgcgagccaaggttggaatcaaatcgccctttgacggaaatgtgattgatctagtcttcttggaggatttaggtagaaaatgttgaatattcttgacgcctccgcatctccgtctcactccgtatttcaatttctctggaccatgacagccactccattcgtctcctgctccgacaagcttccgactgtcgttctccccagtgaaagactccaagcagtcgagttctgcaactgaatgcagatttgaaccattgttttttccagtcggcacccacgacattcattcctcaccattgaactctcctcaatttcttctacccaaatttcagttcactatataaaacaaaaaaattttacttttagtcacaacaaaatttgtgactaaagataaaaaaaaattgtgactaattataaattatcattattgtgttgtgactaaaaggtctgtggct

SEQ ID NO: 252826 - DNA, 869 bp, Cannabis indica
aaaaagttgaaaatcttgaaaccaaagattgcccattaccttaggctaacacactgtctcccactttacccaaaggagtttccttttacccccattcgagccccaccaaaatttcctcacaatggatttcaatttttcacaagtttccataagaagcttaatgaaactcatcttataagttagaatatcttgaaggatagatttaattacatctgttctaccagcagaaaagaaactacgcttccatccccaaacacgcttcttgaccttctcacaaatcccctcaaatgttcgactgtaggcaatcaaggatacttgtcatgagtagctacagatgtcagacccaatagtcgtagaacctcatctctatcacttgttgcacgttcatactaaaagtgatagaagactttttgaaattaatcttctgactagatgcaacctaataagttagtaggatatgcttagtagtttcaatatcacctctattagcccataatattgtcatgtatggagtgccttgatacaaatgctctttgaaaagaagagatgagcgggccaagagtattcttcatccttaatgacatagctttagcaaaaatcttatacattacattacacaaagcaataggttgatactctttaacaatttttggtttttgaactttgggtatcaacgccatgtttgatggtcgacatagctcttaagatggaatttacacagctcttaagagaatcaagtagtcccaacgattttgtcacatccaaattacaactctaccaaccctcaaaaacaattgatcgacaatcatcatctttaagccaatgaggcttgaatctaactttcatttagtcatgctcatgactccatg

SEQ ID NO: 252827 - DNA, 690 bp, Cannabis indica
aaatcagattcagtgggcaaaagcagggcatagtggtcacgacagtttatggtagtaacacaatggaaactcgtaaagagctttgggacagtctagcaagcatcggtcagctaaatcagccttgggttattcttggagacttcaacgcaatgtttagttttcaagattgaagtggtggaaagcctattcagaataaagatattgtggatgctcagaattggcttgctttgagttaggttgaggagcttaaaagctcgggatcgtttttcacctggacgaataagcatgaagtggggggtagaatttattctaagctagatagagttttcataaataatatctagctgaatgagtttcctaattctgatgcctgctttaaatgggaggtcatttcagatcactgttactacttaatctgttgccatgttcagaataatgtaggtgtaaaaccttttcggtttgggaacattggccttcctacccttgttatcatcaactggtgatggattgctggaatataaaggatgctggtaccggtcttgatagcttaatgaagaggttgtttcgtgtcaagcatgctctaaaagtctttcgtaggtatgaagtgggagatgttgcaacggagtacagggaagctaaggaagcttactgtggtagtcttgaggaagcagctttgaaccctacagatca

SEQ ID NO: 252828 - DNA, 669 bp, Cannabis indica
tctccacagtgatgccattttatattgcatagcttggaaatcaaaagatctatctgtaagaaaccttcccagtagacaccacctattatcaaaattctctacatcaaccgccccttcctcatacatcaaaatgaataacagatcaccaggcacaaagacttacaaacgaatacaaaactcaaaccacgtcgatatagacaagacttggttgaaagttttgaccaacaagacttagaaatacaatttaatacatatataatcgtggtattaataaaattgaatgaaagtgataagaacaaaatactaattattacactgcattacaaaaattacttcaaatatcaagaaaaacgtctaaaaaagtaataaatactatatctaaaattaaataaatcaacagagaaaataatttaaattaacctaatttattattattaaaaataaatataaaatttaatactgaaatagtaatcacgcatgaagctcggctcagccaaccctccagactttagctatcttcgttgaaaatcgatgcctgccttcctcaagcgacaccaacaagctataattgatcatttgccgaaagaccgcttaagttcaatatagatttattattttacggaaatttgtataaaaaattgagggtttgtaaatcaaaagcaatatata

SEQ ID NO: 252829 - DNA, 3281 bp, Cannabis indica
ctctacacattatcagttatattttgtcagagaaaccaacattagtttacaatgcttgtacattttaaaaatgagaatgaatatcagatacataagaaaaaaagtattaaagcattacaaaagaaataacatttcttacaaaaaactttggaactaaccagaaagatggtcacgaaaagtcccatttggtacaaattcagatacaaggtagaccttgttcagattgtaatctccttggccaccactatctagacagtggcctaaatggcgtaccaaatgtgggtgctgcagcttataaagaagatccaacctgagtctcacatttcgaatcgaaaatttctttgataattgcaggcaccttatagcaacttctgccccattcattagccttcctttgtatagctgcatgaaaaaagaactattaactaaagatccttggggatatcaatgtttttcatatcatacatcctatatgaaagcattacctgcccataagatccttctcccaaaaaggaagagttgtcaaagttgttagtagcttctattaactcttctaaggaaaaggactgacatacttggtgaccttgtctggctaaatttgcagcttgagatataaaacctgtaagacaaaaaagattggcatcattattggttgatcatcatccttgttgaatctgtgttacaattttgttattggacaacctacttgcatttgtcgaaagctcgaaggagtatcctgaaaccgagctatcttgtacagctttgtgcagtaagtgttgttcagacattcctcgatgacagaaatgttttaacaaaataagcaaacctataatcaaaagcacagaaagcacaactattcccataataacaccaactagaattgctgtattgcctcgagattgtttattactcttctggtttttcacttcttcacaatgtgattgttcatgctgattctgcatatctattgatagacaattcccatcaaactcaacaagtcttttatctgatttagagcttaaacaagtaggcaatccacctgtgaacttgttattcgatatatctacgaactctagcttactcccacaacttagatggttcgaaagtgaacctcttagcatgtttgatgctaaatccaagtaactgatattaggcaaagagaaaagtttagctggaggcatgcctgttagataattggatgataagtcaaggttttgaaggccttgtaattggccatattgctgtggaatctcacctgagaatgagttgttgaaaagaaacagcatgaccaacccttttggcattggagatagtgatgaggtaattttgttcccactcaaatctagcacataaaggcttcttaaggcactaagatctggtaatttccctgatatatcattgttagctatagtaagattggtgagagtggttattttctgaattgaagatggcattggacctgtcaatttgttgttgctcaagcttaaaatactcagatcaattaatgaatcaaaccaacttggaacagttccattcaagaaattgttgtccattataagagtttgaagcttcaccatttctgagattttaggtggaattgaaccaaagaaaaaatttgaactcaagtctagatattcaagggaatagagtctatgaattttgtctggaattggaccccagatgcccaaagacacaaggctaagaactctcagattattaagccttgccagtgtggtaaagaaagaatcaattgaaaatctctctgacaaagtttgatttggaatagcaaagccattaaaatcactcaccttaattgacttatctccaataattctgagctcagtgacaacattgtcctgacatgtgaggttaacttgtgtacttgaagaaatgaagcaataatctcttccatgatcttgccaaatttctaactctgttgggtactccaaatgctttcttagctgtagaagaacttgggtttgagaggactgaagttggtaagtacccagaaaagaaaaactccaggtaaataagaaaaacaagagcatattactacaccccattaaaggatctcactttttcttgttatgacccaagaacttaataaagacctgtcatttaatagaaacgcaaacgagaccaatataatatcagtggaatattgacaaactcttcaggaatatggtggcaagttcaggctcaatgattgaatcttcttcgttttagaaaaaaagcagcagagtaagaacgaccagttttaccccacaagctcaaaaaccaagcttttccagcaatttactcagaataaaggcagagacttttttactctttcacagagcttacaaagcacatgtcacatttgatttaagtaacagagacaaaacccacaaggaagaaggtaagttccaaagattttgtttagtagtagttgaagatgataagtggggtacctggatttaatgcagtattgcatttagtgctctcacatggtgcttttttgaagccagtgaagcattaatggcttagacttttgctcttcagaagagaagataggaagagagagacagagagagagagaggagtctactttgaatactcttcagtcttttgagcaaagaaaaaatctagagagaactcaattaagatgtcaacaagaaaatgatattataacatttgttttggttcaaaaacaaaaagaagaaaatgaaaaagataactttctttctttagtggctagttgaagcatgaatgactgtcttactgtctttttcatttgttgttgttgtctttttttttttttttttagtttgagaaataatgatcataataggataagttcacaatgtctttctctaaacaatagtatcaaacaaatcaaaatgtgctggctaccacagtagcatgtgtgggaaatatcaaattgggcaaagagatcatgaatatggagacaataatactactgacactgtctatacttctgtttcttgggatagagagaagaagagaggtcatggatccgtttccaatggttttcatagttggtgtattcaatacaaatacaatatacattataacatgtcagttgtttggtatttttaaatgagaaaatgctaacctttcaaaatgtaatataaccattagtataattaagaattaaatttcatataattttaaaaaaaaaatctaaaaatatattattggtgtttaatatttttttagtatgtctatattattattagtataattaaatattaagtatcgtataacttagaaaaaataac

SEQ ID NO: 252830 - DNA, 816 bp, Cannabis indica
tttaagcatattcttattatttcatcaaatacattatttaaacaaatactaaatgtgcttccttgcaactttagttggttgaagctataatctgttcttttttattattccaaaaatatgcaccatatattgtcatttcatgaatactgtaaaaagaaaaaaaaaagttaatacaataaaaacatcaattaaaatatcaatattttgattaattagtacgtagcagtggaaaagaaaaattatgtatcataaaatttatgaatcatcatatatgtataatcctgaaaaaagcttactagttaaggtagagctctgatgcaataacttgaatgtatttctgcaaaaaaaaaaaactaatagcagatgacatttatcatcattatccaaacataaaaaaatatatacattaaataaataataattgtacatatataaatataaacttatataaataggttcaaacttatattttagagtatagaaggtacgaaccaacaatcagtatatgtgaattcttggaatggtcatccataactagtggctttctaatgaagaaacacagtttctctcatcttcttttttgtcttactcgtgctacatgaatggatagaagtagttttggagaagttacaatccactaaagtagtccatataagttatttcaattggaactatttataaaagaaaaaaaattaataatctaattagagttgtacatctagcaacatttatttaaaatgtgttacaattccttaattatccataattattaacaacacttattttgaagtgttgctattgcttatttatttttat

SEQ ID NO: 252831 - DNA, 748 bp, Cannabis indica
tgcacccaatgtaaggtttcctagactttgtacgtgtttatttcatcgttttagacagttcatatttagggtgttaataaacatacttgtgagtagatctaagatcctggtaaaataattccaacagatcctttgtctccttatttatttttaatttgctttgaaggtctctctcggcttttgcaacatgaggaggctattggaatgctccaaggtctgtctatctctcgaagtgcaccatccatcactcacctattttttgctgaccatagtttacttttttgccgagctaatgatcgatcttgtggtgctattaagagagcattagacatttatgatcgagcctctggtcaacttttaaatgaagataagtcagtaatgtctttttcaccaaatagaccagctgttatgaagagttcctttagccaaatattgtatgcctgttggtgagtgtcatgaaaaaaatatttgggctttcctgcatattctgagcatgataaaaagcatctttttgctgacattaaagaaagaatttggaagcttctgcatgcttagaatgacaaattgttctcaattggtggaaaagaaattcttctgaaagcggtagtccaatcaattcccacttatgctatgagttgttttaaactttcgaagagcttttgtaaccagttggatacaatgatggcacaattctggtggggttcaactgaagacaagaaaaagactcattgaaaaaagtggaaatttc

SEQ ID NO: 252832 - DNA, 597 bp, Cannabis indica
aatctccagaattgagaaattataactctaatgctcatttctaataatgaggcccacagataattaaattcataaataattctaagaaaataacagaaattcgtgctaattgcctttactaatccaaatttttaaagcgatcattacaaatattcccccgttaaaaggatttcgtcctcgaaatctaacctgaatagctctggatgctgagtcctcatgtcagactctaattcccaggtggcttcctccaccttgctattcctccggagcaccttgattaaagcaatggtcttgttccgaagaactttctcctttctatcaaggatctgaacaagttgctcttcaaaggacaagtcttactgtagttcaagggcttcataactcaagatatgggttaggtctgaaacatatttcctcaacattgaaatatggaatacatcatggacagacgacaatgctggtggtaaggctagctgatacgctacctgcccaaccttctcatgtatctgaaatggcccaatgaaccttgggctcaacttacccttcttcccgaagtgcctaatacccttcattggtgaaacccgcaggaaaacatgt

SEQ ID NO: 252833 - DNA, 1229 bp, Cannabis indica
tatagctaagccataagtgaaattaatcacagttgtcagatatgagaagttaatgacaaacttaattcatttttaaaatcaaatgaaagaaagttttctctttttctttttcttcttctatttgtagactagacttaatttagagggttaagcttattaatcactaagagacaccataactgaatcaactacacagagaatgtcttaaaaggcatttatgaaatatgtgaatgagattttatcagccaaaaagggtatatagagaaatctagtcaaatgttctataatgtttcataccatggtaaagttttcaactctgacaagagaaaactgtttcaagaaaatgaaactcttatcaattaatgtatcaaaataaattcaacatgagaagaaaaaagttctgatctttgaaaaattgataagtgtacaacaattgcaatagaagaaacttaattagctgcaatttcattatattattaagtcttcttttagagtaatgtaaacaaaaagaacaagtactcaaaattagttaggtaaccaaacttagaacatgtctctacatcaagaaaaatgctactaatatttctctaccacaaataaacagcaattatcaacaagtgggggtaaaatgaagaactaaaagaaaaaaaaataaaagaagaagcaaacatcacagtttttttttttacatacagttcaacaaatcatcttcatgtgtttctatatccagctttttttgtcatttcaagaccttactttctttgtattggtcttccctattaaggtctagcaaaaacaccccaaatcttgccacgaccaaggctctccaaaagcctcttagacccctctacttccatctcaacaatcttgtgcaagtactcacaagcaccagcagcaaccatttgttttcgacattttttcgaatgcgaaagtgaggccaatacagaaacaggatacttcttatccaaattctgaatagaaggatccaaaagctgaattgcactaacaattcccttctcatctttcttaaacatctttctatttcctgtatataacaatagattagacaaagcttttgcagcagcttctttctctgcaacagccttaccatccaacattttgatcaaaagattaatgcatccacattcccccatttctttcctggttttcgagcaaaaaccaagctcgaaaacagctcgagctgccgcgattcttacacctaaaacacc

SEQ ID NO: 252834 - DNA, 2360 bp, Cannabis indica
gttatgatatcatgaatcatatttgatttatataccaatccacactgtgtcaagaaaaaaagaaattaagccgcaagaaatatatactatagtacaaaaagatagtatgtatcccacatatagaagttgatgagatatatcaaaatttatagtatcccacatagaagtttaaacaagtataagaatattaatcaccatttataagaaatttgaataattctactcatcatcaattaattttaggataacctaatgagtttttcactaaagtttaatatttttttttcttgaattgagatatctatttaaaatttttcttcttaaataaatttacaattaaaattcaatttttaaaaaatataaaaaatattttatctattttataatcacactaaattaagtaaaattagttagatgttaaataactatgtcttaatttgagttgtgaaatgcaatttataaattaatttaaaaccaatcactttatataaattaagacaaaacaatatcatataattgtattggaaatactaaaaaatgttgtttagtacgtgtaaatatcgttattagtatacaattttgtgtaataatttttaaaaaatatcactaatcaattataatcaattataaaaggacacgtgttagacacacaactagtatccaataataatataatattttatcgtgatcttaattggctgaaaaccaaaactaagaccccacaagcaactacgtaccaacgtaccaacgttgcatgcatgcacttgcaccgaaactaaattaactaggccatgatagttggatttagtgaagcaaacgacaacaattcatggtctcgttcaaatatggccataacttttggatccaaagaaacccaaacttgaattccttcaccacacttagtatcctccataactatcaagttcagcgacgacacaaatccactactcacccaaaccgggttgccccacccgaaatccatctcataaatcggaaaacgacaccaactagaacagaaatacgtgtccacgtcaccgacactctccataatctcttttttctctttagccgacttaaaaaccaatccaatcccttcttcgtcgcctttgattttcctaaccgtttcgtccaaaaacgacgtcgtttccctcctcatctcgttaattatctcatgaaactcaatattcttcttctcttcttcctttatcatcaccggaagcaaccagaagaggttccccatcgcattttccggcaatggcggctcagtcctcttccgtaagttcaccgcttggaatagcaaagatttcgtgagatctgctccttccaattttttaatcgatgaagacgatcgagccgcggagattgccgatttcagaattagagcaagaaccacttcgactcgagagattttcttgttctgatcggagatctctgtgaaatatctcgatttcagatctgagatttttgcaggttcgaagaccagcctcgttgtgtttcgattctcaaatggattattattgtggtatggtggtagaggaggcatgtcttgcggcggaagaaaatccgatccgacaaaatcagggagcacgatttttccatcgccgcctctggatctggcgctccagctgttgaggaaaaccataacggaggagaaatcgcagaatcggtgttcaaggcagaaactgatcgaaactccaccgcaattgaatacagtgatttgagcgatcaacatacatttggaagctaattccatggtttccgaatccaaagtgggaatcaatttccccaaaagtgtgtgaatatcttttgtctgattaaccctagtgagaaaatcagtgaggttggagttgattttggcttcaacgacacaagctccattgtcgttgcaatcgattgttgacgtgtctttaaatcgccctgcgattgggtaaaaatccgttaaggtgtcggataacgattttttgagaatacgacaatagtttttgttgtcgttttgatcagatttaagaaaatgggaattggaagagtaaaagaaggtgattccgccgtgagtttcaggtatgaattgatctaaaaaacagagtttgtaatctttaaggtgtgaaggagttggatttgatggttttactaattctcttgacaaaatctcaacttttatcatattatccatgttaataaataaccacctaaaaaagtactttatttggttattgtcgttttttaagtgtaattagctcaaagtttatgttgttatttatagagcttactaagtaacaacatgcatgaattagatttgactaaagtgattaattattttatcccaactacttaggagagtgattgattgtttcgagtttgta

SEQ ID NO: 252835 - DNA, 1192 bp, Cannabis indica
cattgaacggtcagtttttctttgggtaataaaccggccgaaaaaatcgaaatcgaccgttatacatatatattaatttattaaatttttttacatgtattatatttactaataatatattattttttaattattaatattaaagttaaaagaataagataattagtttttgaacaattaatttgtatatttgtagttgtaaaatgtagaataatgtatttatagaataaattggatctttttttttaaaaaaaaaatcagttttacgggtttaaaccgaccaaaccgaggttcaaaatggtcgattttaagatagattctggattgatcggtcggtttttagattgcaccaatctagactaaaaactgaattttggatttttatatagaaaagaaccgaccaaaccgaccgatgctcttagaatcagaactagtataattctcgggttgttgtgtctggaagctatctagatgcatctatgtttatctttatggtttaatacgtgtttgctaattttgattcttgatttgaatgttttgatttaatatttatctgtatgatattgaagttggaattacacaagataattcctattatattagagttaaattttctaccagatgctatattaatattcgtaaaaatatatataaaaagaattactttgaaatataaaattgaaaaatctttttcattttcacaaaaatttacatattaattaaatttttacacagtatttattgtaagttttttatggattcaaattatttgcttaatattatgtctaaaagtaaaattgtaaacgatatacttcctaactaattaatattttacattataataaaaaaaaaaatttgacattggggagggagattcaaatttagaacctcctctttataaaaagaagtctggaacactaaactaagggctacacttggtcctaaataattaataatcaaataagaatggaattaaaaaaaagggtaatttgcggcataacctctttaagtggccaggtttttacaattaacccccaattctaaaattttggtggtaaaatctcctaaactcaagttctgttagcacttagctctttccatccatttttgggtgttaagtgccaggttggaatgtccacgtgtacacagtgtacaggtggtacaattttattagtacacgtaaataaatatt

SEQ ID NO: 252836 - DNA, 538 bp, Cannabis indica
ataaatttaatctaaaataaatactcaaaataacctaacactcatctagcttagctcaacataatagaaatctacattgttccttatataaatcctcataagggttcatgcctacactagctcagtatttgttgttataagtggatttccattaatgacaagtgttctccccaacaatttccaaaatccaaaacataagaacaaagcatgtcttccaaagtctctaaggtcttctcagactatccatctttttgcaaatgattgaaaaaaaaaatgcttaagggaactccatgtagtcaaactatattgtccacacaaagttgagctagtttggcaagcttataattctttcgaattggtataaaataagaaaacttactcaaatgatcaataatcaccagacaatgacatatcctaagggtttgtcaatggtaacccagttacaaagtccatagtgatactatcccatttcaactcttgtataggcaaaggcagaagcaaagctgaagatctttggtgctcagcaataccctgctga

SEQ ID NO: 252837 - DNA, 856 bp, Cannabis indica
cccagacccaaacttggacctaggacccaccacgggacctaggatctgggactcgatgcttggacccgacccgtagtcggtgtctagatctaggacttagactagaatgcgaacccaaactcaaactcaaaccaggacccggatacatacccagacctagacccacactcgggaaccaaaaccgaaacttgaaatgaaactggacctggatcttggaacgggacagggacctggacccgaaactatacccagaactggaacaaaccttggaccctaattgagaccgaaacccgtacctgaacctcgcctcggacccaaatcgagacctgaacccagactcggaccaaaacttaataagaacccgtaccccgtgacttaaaattggaaccgaaaccagaagcggatcaggaccccagaccaggacctcgacccagacccaaaactgtaaccgaaccagggctcggacacagacacaaacccaccgcgggattgggtcccaaacttgaatccaaacccgaatcgtgactcaggacccgaacccacacctaaactcagacctgaacatggaataggactcgggacctataacagggatcgagacccagaagtgcaccctagtgtcggtcttggacctagaccgagacccagactgagacttgggacatgaaccgagacaagactaagacccgtgattgggatccaaatcttgttctgggatccgagaattagtgcttggaaaagacccatagtccgtgtcttgatttgggagtttgacaaggacccgaagttggaccaggacctggacccagacccagacatgggaccccaaactaaaacttgaactagaacgtgacca

SEQ ID NO: 252838 - DNA, 661 bp, Cannabis indica
gttgtaacacatgaacaaaccagaggggtacttgctgcctattattttgaaacctttgatggttctaattttcattgttattattagtcagaggttgactattgcagtaggaattgctttgcgattttgattcttaaaatcttttccattgggtttcagaacagtagtgtatcatatgttagtgttgttgttatttccaacaacaagcacctcttctttctggtcttgcttttgagcttcctcctccatgcgaaggcgactgatcaaactttcttatgattttttttttgttttgtgcctgagagtatttttaaaatctttccacgaagggagtaatttatcaattataataacaacttgaaattgttcatcaatagtcataccttcagataaaaattcatgagctattttctgaagctcgtgagactaggcttcgactgatttatcatcgatcatttaaaactttaggtagcggctcactacatttttctttgttcatgcctcctcggtatcatattttttctgtaatacttcacatatttccttagtatatttatcaatattatagtaatcatacaaatataagacaaaccattcaaaataaaattcttacacaaaaaaatcattctctactcaaaagtccctttccttaacctgcaat

SEQ ID NO: 252839 - DNA, 2506 bp, Cannabis indica
tttgtcttaggaatctctttatgcttattattgtccaattaaacataatacagaaaataaaattctaacttacttctatttgtattatgggtaactaagatgtcaaaaacatggaacgtcaaaaagcttgcaaaattctatggcagtgatcataatcctttattgtaagaggagacgttacaattatgaaatttcttttaaaatccttcctaggaaaatctatttgtgagcaatctggtcaaaaagatgtgatccacattccctattgtcaaatggaattataaaatccatggatgaacacttgacttgagaagtgagtgacctagttagattatgtttacctcaagaaaatcatggttggagacgtattgactctcaaccaggcatctaaatcctcccacatccacaagaacagaactttcttggtcttgcggtttgttctctatttctgtgcctgcatattttgacaaggaaaagcttctttgaagtcaggcttcagttaaatgtgttgggacagttaatagcacactgcttgatcatttaagagtttctcgataaaagatagaaaagcatgctgtaattcaaggtgttataccaactatgcaagcgacatggtagccagttcccacaagtccctcctcccacttcccaagcctcagacgcaaaaagaatccaccaacaggtgagagtgagctatgtgaattcatccacctatatattaaaataacaaaatgtcaagaatacaagtaaagaacagtggagtaacaatgacttttagatgctaaaaccattgttgttttcccttagataactccattcatttctagccgcttagtttttgtaaagaaagtaaatatcaatgataaaactccacccaaacaaacaggttattggaatttgatggtaagtaaatatttcctaaaaaaactctactgatcagtggatatattccatttctaagaaccatatgaatcattaagcaaaatagaaaataaatatacggaaatatctttagttggtcaaaacttccacaactcatctacttgtctgaactcaagcttttctgtttcagttccatttctttatctcattcaatagcaaaacataattaatcagtatgcgtaccatcaagatagtaaaagaaatagtatgcaagtattgtaaatgttgtaatatagttagtactgtaaatatgtcagtttaaatagttacttacttcaagatattagtacgggacaaacgaagtcttcttacagcatcaaagagtcctttcggcacatctgagttcagctgacatgagaaaggaattatctgtttttcattcaacaagtcacccccagagcttgtagcaatatgtttcttagataactgtttctcaacatcaccttcaaattgggtgtctttacaagttttgaaggtcaagttttctttgtttacgatatcaagctgtaattcgccaaaagaagcattagattctgctggtagacattttgttgaggatgtgtttgggcatgcaacagcccaatgattacgttggaaacatcttatgcacaaacaagaggattcatctatcccaccatatgtattaacattccttgagagttcctcaagctcgatttcagtgatatctgaacaatcttgtaaatgatggtcgtttaagccacagaataaacatttcacgctggcacgagcagaattactcgtttctcttgacagattaatgtgcttaagagcatccaatcttcttgcaaacacagaagccattgcacccgaaagtttcaatttagttgaaggtaagataggatttaagctgtacatcgaattttgatcatcaaaactttcaaccttattagcactattctccaattctttacccgagagcagctgtaaatcttctgaggactgatccttaatctccaaaagctttaggcattcggtggagtgcttaggacttacaccagcattccagttgagatgatccatgttcggtgaggaactcaaagtttttggagcaaaccgagttacccaggagcttcctagaggatcatttctatgacaaaacttagaagaagtttttgctgtagatggcagctgctcagcagaaataactttttcagcactgattgtgttttgtctatcgagagaggaattcgagcttgttttctctttctctttactaaacgacaagtgccatttactattgttatcttcagagtttgtattgtctttttcttgactacctgcaactttatccaatagcatcataggctgcattgctgagtcctcatttacagatgtggattcattgaaccgtctactcatgagatgaaatggtctgcttatgttactattctctctgtgacaggctataggtgttgcattaacatcacacattttacttgatgattcaaattccttagatctttctccaacttgatactcgacattctgcattctatgttcttgaaccccagcctttgaataatacaaggactgaaagattgaa

SEQ ID NO: 252840 - DNA, 2348 bp, Cannabis indica
aagttttgaatattatctttgtagattgtgaacaagtgcatatatagacttgactatatagctatattcatgtatataatcacatgatacgaaaattcttctggtgtagtgtatagaattcaataattaattatagtgtttttatgatatatcatatcaatctacatgatgagaaaacagtatcagtgtatgatcaaatgaagacaatgtgaaaagacaaatgttaaggtttttggtagtgactagctttgatggtgatcagtgtgccctatgccctacatatctttatcctgctctatcaactttctgagagaattctagtcctcctattaatttattcaatactaattataaaatcaaatgaaaaattttagatataaaaagacaagctatctattatgcaacttggtctgtgtcggatatatttttaattatcatcatcatcacaatatatatatgacttaattttactacaaatattttctctagctagctactcaattaattattattattattactagttacaaaatgttatgtggaattaataattaattgtgttattgttcaaattcaacttttcattattattagagaagagagttgagtatatatataatttaatgttgaaaaatcttggatatatataattaagaatttttataatacaaaaaaaaaaaaaagttggttctttgtatatagaaccctcttgtttagctaggttcatgactttacaagattctaaccaccaaataattaaaaggggtagtttggatatgcaataaatttcttttttctttttattagtaatactatatatacttttcatgaaataatacatgaaaaaaatcactctttcccatccattattattataaatttctgattgaaacccactctagcttcttgaaaaagctcaagatgattacctttttgcccccacacgcaattatatatataatcttgaaaaaaatacaagaattgatcaagagtgtgcattattgaagctatatagacatatatgtatatatatatatataatatatcgctttacgatttgttgacagattaactgtttttgagtaatgtttgaaatagtttgctgacaaaccaagctataaatatatcttttgagaggaacactattcattatagtgactggtatcccttaataaaaaaaatgttgataataataataatcactaattgtattattattattattattgagctgaattatggagatatggacacatagtatatatagtacgttgtgggttgtaataccactataccagtcttattagtagtagtaatagtaataataatagggaaaagttaagaggttgaatacaagtgaatacagctatatatataatatatatgtgtgtgagtgtatatatgtcgtgttccccaagtgaattacttgctttttgttctgattcatttgcctttctatccacatcaaaggttccaaacttgactctctcatatgcactttgcgtcaggtttgactattaacccaccatcatcactatatacttactagctagtactctctcctatgctctacttacatatatgactttcaaacttagtattatataacttttcttgaaacatatattgaataattctatagcaactccattctagtatatatagatctttatttgtttccctatataggaaaacgttttagtttattcttttttatgattgtggatatatgttgttagtctaaaatagataagatatacatgattatatataataaaaaaaaaatatacttaaaaaactataattgaaatagatagagatgtacaatggtggagtgtgtactataaattcttttcaaattatataatatatagagaaaagttaattatttttctaatattttgggcacatgtgtaagtttcaatctaatttatttcattttagaggattatgtataaatgtagtatagtgatctataattttctaaaaaatttaatataatttcacattgaacgggttgagtaaatattgttgtatagtgagatgagggggcttcatatctttgcttgttacaagggatcttttcatggtgttcatgttgttggagcatgtatatgttgttaggatttatgtaataaacattttgattataaataaaattaagttgagcaactaaaatataatgttgaataatttatatataaatataaaaaaaaattattcgtacatgatattataatcttataattaatcttattaaggtaacatattaaattataaaattatttatcaaaaaaacaattataaattttttaattaatagttgcttgtaacgttctcgcttcaag

SEQ ID NO: 252841 - DNA, 1494 bp, Cannabis indica
gagcttttcgtgctatgtcgcctacccaaactcaatatattacctgatgttggtcttgatgtttatttggatagacgcttgtctattctttccttttgtttcttagaaggctccttgtatactggctcccgctgaaggctggcattctcaagaattagcttgtgttcttgtagtttggtagtcgtacacagcaatcaccaatcgtgatcttgaacagacaagctactgagaacctcggtaatttctctgcgagcagggtccagaacaggtcgagccggcctatctgtgatcaatgaaagataaacattagcgactttacaaggtaataaaaatatactaagtgttgagatacgcgacgtaataggtcgacgattgaaatcagtcctatatcttggtactttaaacgcgtaaaaccacttagatttccaatctcccatattggaaaccatgccttctaccccattaatttcagaatttgcccatttactaaagtagtaaaagccgttgttgtggcaaacgttctttatatcgtaaaaatagctagtcttccatcgatggttccccttggacatattccatgtacatcacatagaatcccagaactatgcgataattgtttggggttagttggaagggagagacatcgtagtgtctgaggacgactttaacgaagtaatgaaaaggtaaagataccccacatcgaagaataaggatagaaacaaccacgtcttgcgtggggatgatcacgtggttggtaaaagggagatgaggtctttgagatgcttaaggacacatggtcccaagtcgcaacaaattcaactgtgcaaatgtatgcaggtcagatttggtaactcgcgagaccaagtgctttcatgaaaagggttcattctattgagcatcgtcaactgaatctatttcactaccctcaactttctcctcctcctccaactcgcgatcaggaacctcgaagtcctctcccatttattcaaattcaatattaggcgcatgcctcgagtgagtgaggtactcttggggagacaccatagattcactgtcgcaaatctcaatcgttcctggttcagcgagttcctgaaccatcctatctatctcatcagtagatagtgagcctagatgcatagccctatcgacacgaacctcctcctcaaaaattgaggtaggtataaagatatcgctcttatccagttcatcagtaaaggccccgcctccagagtcgagcatttggctattcgacaggtcactcatatgacagataaaagatcttttcagtgtggtgaaagtgcaagaattacaccggtgacctcacccgcataaaagaaattcagaaaatatggaggattaaccaaacatctccagaaaatggctaggtgtatctcaataacctaatgctcatgttgctacatgagtattaaggtattgaggcacaaccactatttcgagaatatagctaatcctctcaaggtgtaagtcacacat

SEQ ID NO: 252842 - DNA, 1361 bp, Cannabis indica
ggggctggtcggccacccctgatcggcgccttatggccagtataggtcggccagcttatggacaccatatggccgactagcttatggacaccatatggtcggccaacttgcactagcaggtgcatggccagccagtcactggcatggcaggtttttggtgcacacctttcatctgtggatagcaagtcaaaccatgaatttggcgttagcagcccagaaaaatagagagaaaatatcagtaacttccccatttttgagagctaatttagtcatttaaactgtattaatctagtatgtaaataatagctttatttacctattcttaagggatattaaggatgtaagctctacaatattaagagcattagtcaaaccctaaaaccctaagtctcaatccctaagccttaagctctaagtctgataactcaactcatatgatctttctctttctcgcacgcataggcaatctctctcacttgagatattgccaaaactattctcgcattgtaatcttaagagagctacttcagatcccactactatagtgatctaagtggtattatctctagtatcaatacaactaaaagggtagtaggtcgttacctgctaactaagggagtcgaacttctataaaatctcatgcctatttacttttctgttctaattgtgtaacaggtggcaagcatcagtattaaatttgactccgctatcagttggccaaatctgaagtcgacagtttagtacttttattgagagcgagttattggtttatctgatcaaatgtcatggttaacacaaagagaactttggctacgacatttacctcctcgggtcttcctaaagatcctatggaagttgatcatgatgtttgtgttccagtcatgactggaatctccatgaactcgatagatgtggccactcctattacctcagtaggcacaacaaatctggccaccacagctggccaggtcaacacaaccattcctgttagtctgaacaatcgacccatgcctcctagggagaaccctccaccagcacctcccactgaaggaaggacccacgtggagcagcccccaagcacaacaactagatctggtgcccagaattatgctagagagacagggccaggaattagcgagccagctattggcgagccccatgtagacttggataaagatctcgagttagccagacttaaagaagtcatttgtcaagttggccaaactgaagaaccacacactattggttgcgatgtattcaagcaatagagatgcaaatctttaagatggatagatgaccaagaatacatcttttgatttcaccagatggagttgtactgccgtaatagagaaactagtgac

SEQ ID NO: 252843 - DNA, 779 bp, Cannabis indica
tgatttgggggtcttttgtttttttttatttgtagtgaaaaacgacaaactatttctgtagaagcagcctactgtttttcctagtgcaggacctagaaaaaaggtctgccattttttcaggtaggttccccatttcatagtttttcttgtgttttctcgatgcttaggactttgccttgctagttattgatagggaaatatttagttttgagtttaaagtccccaaaaagtgatttagcgtgtcacttataagttttacgaatattgtgacttaggggcttgtaaagcgtcgagcaatagttccactcaggttgaccgacacacctcaattcaaaatcaaggtaagactagtataatgatatgcatatgtaaatacatgttcagtatgcatatttatgatttcgtgttagattaaatttaaatagcaaatcagtatatatagagataatggataccgataaatgtatgtttggcttaagtactgagatcagtacgagtaaagtactgagtataggctgatattatagttaataatactatcgtacgaacgttctagactcagtatcgcgtgggacgcaaggatagggttatgattgggtgtatgggcgcctaattttaattcgagttatatttatgttatgattatgcttttcttacagagtctgtcgacatacagttactgtttgcaaatgtaggtaagggcaaagctaaggctgaacagtagtgagtgcgagcggatgaagattgtatatatggaggcagttaggcctagagcatac

SEQ ID NO: 252844 - DNA, 993 bp, Cannabis indica
aatagttgaaaacgcctcaattattcgaccatcacagccgcgggctacaaacccagtaccaatctcattggtgtcttcaaaaattgccccatccacattaatttttaactgcccagcagccggtttggaccagtggtctcttgtgtaagcgcgattggaagccagggagaccgagtccagccgcttagactgagcacactgccattgtcgaagagtggttcgagccagccaaacaacctcagaaacactacaacttttaccattccaaagcatatcatttcgagccttccaaattgcccaaccaaccatgacaacttcttcaaccaatcccatattgccaacacttccataaaccaatcaaaaaaattggttgctgcataatgaccaacacctaacgcagatctgagccaacacgaatgagcaaaggagcattgaaccaagacatggaatattgattcttccccacagttacacaacacacaatgtaaatccacagggacatgtttactatgaagttgagtacgtgtacgcaaacaacctgaaaagggctttccaagcaaaatataaaaccttaggaggggctttaatcttccacagcatcttccaaacatcatcctccatggaggagtgccaactaccattgaccgactgtaagtgattataggaacttttgacaatgaaaaaaccagttggatccttattccaaaaccaactatcactcgcaagattaacactcaaaggcacctgttagatgagctcaacatcacggggatcaaacaagtcctcaataagttctaagtcccattgtctactatctggcttcatgagttgggacactttacaattgaccagtgcctgatgagtagataccacacaagggttggcctcagacaaaagccaaggtgtattaagcactgcagtagatgaaccgaatcctattctaaaaaaaaaaaataaagccttaattttgtgttttctcattttttttttttt

SEQ ID NO: 252845 - DNA, 693 bp, Cannabis indica
gtaaaaaaatagggtaatagacagttcatgcatttgtattaatttcacatgcatcaactttgtttgtggccatgtgggaagaaaagtaggtatgtttttcttctctttctttccatctaatctaatggtaaaaggattgttttgttggtgatcaaagttatggtattggaaaacacgaagatatataggggttgttaggccgaaaataactgaggcgattgaagttagagaagttttaagttggatcaagaatcaagagtaaattaagtcacacttgagatggattgtttagttgttgtgcaagctttatcgagtctatttgaaatgttttctaatttatttggtttgattattaaagaatgtaaaactttgcttaggaagttagaaattattttattttattttgttaaacgttcaacaaacataatagcatttatttgtaaaatcttttagtttttatcttgaatgtaatttcagtatgaggaacattctaactaagctactattatgcttggtagttgagtttgaaatttaataaagctgatcattatctattcaaaaaaatggtaaaaggatttttactttatgtggtgtttggtttgatgtaatgtaatggtaatggtaatgtaatggaataagaatggtaataggaattgatttcaatgtttgatttgtagttagaatgaacattgt

SEQ ID NO: 252846 - DNA, 516 bp, Cannabis indica
caatccaatctaatccacacaagtacaaatatccgtactttacgaattggattagattaaatcgtgcaaatcgaattgaaccgaatattttatgaacacccctactgatcaggtagaaaattaaaagaataagtgcaaaagcttactcgagttgagtttggccctttaagttccccaggcttttaggtatgtatccactaaaatcattacgtgaaagatccctgaaatgttcgtacaccaaataaaaattgagtattattattgggcactagtggtatccaacaccttttataagtgtcaccttatgattggttagcgatatttcttaaaatttattttcttaagttatatgagactgctatttaattacacttaaaacggtatgacactaaaaaaggtattaagtaccaatagtatcttttagccattctcataaaaattacatactataatcatcataccaaggctatgaattaataattaacggcacaccaattaataaaattttaaaaaaaa

SEQ ID NO: 252847 - DNA, 1435 bp, Cannabis indica
ttgtttgactcgggagctactcagtcctacgtgttgagtagagtattaaaatttttcataaaccatgtgatatatatacgcttcaggatttggtacactattacctttgggagaccttatagtatccactaggtggattcggtccttgtccttttggattgacggttgtgaattaactgccaatctaatagagttacaactgtctgattttgacataatcttgggaatggattttctgtcaaagtatggggcaacgattgactgcaagcgaaagatggttgtgtttgagcctgatagtgctaacccagtagtgtttgtgggtaaagtttaggggacacgcataccaaggataacacttttgaaagctaaagatctgatgagcagaggttgtctaggattcatagtcacttcggtggtaactagccaacctgtgacatctggacatgagaatacaagattggtgtgtgagttccttgacgtttttctagaagatctaccggcattgccacctacccgagagattgaatttgaaattgagttagttctgagagcagaatctgtatcaaaagcaccgtatcgaatggctccagcagaattgaaagagttaaagatccaattataggagttactgaatctgggattcattagacagagttactctccttgtggtgctccgatattatttgtgaagaagaaagaaaagtctatgcgaatatgtattgattaccagaagttgaacaagcttaccattaagaataagtatcctttacctcaaattgacgatctttttgatcaactgaaggggaagacggtcttctctaagatcgatctttgctcaggttatcataaactgagaattcgagaggaagacatcccaaaaattgcatttagtactcggtatggacattatgaatttctagtgatgtcttttggactcaccaatgccccagcaatgttcatggacctcatgaatcgagtattcaaggattacctttatagatgtgtgatcgtgtttatcgatgacatcttggtttattctgaatcaaaagaggaacatgagttacatctcagattggtgttgcaacggttacgagaccacaagctgtacgctaggttcagaaagtgtgagttctggttatctcatgtctctttcttggggcatatagttgataaagatgggatcatagttgatccagccaagattgaagctgttcgggattggccaacatcaaaattgactactgaagttagaagcttttggtttagctaagtattatcgttggttcgttgagggtttctcaaagattgttgtacccttaacggagctaacccgaaagataaagttttttggactgatcaatgtgagaaaagttttctggagttaaagcagcgcttgattaccgttccagtattaactcttccatcagataaggac

SEQ ID NO: 252848 - DNA, 909 bp, Cannabis indica
aaaagagaaaaaaaaaattttgggcccctgggctgggtgggccctaggcacaggcctagcctgcctatgcccagggccgggcctgtatagcccatttaataaaagttaaaaataaaagagatatgtatagtgagtttaaatttaaattttaatgtttagaaaaggaacaacactttaggtaatatagccacatttaatataacatatatgtgcaatggatttaaatttgaaatgcaatgtaaaaaaaaatatattatgttacatagcctatttaatataggctaattaggatttttatcttatgaattttgacatgtactaaatcatgtcccctgaacttttaaggttgttaaaaatacatcctgaactattaagactgttgaatttaaggacttttatccaattttagtaaaaaaaagtctaacatgaatgaaaattcagcggacatgatttagtacatgtcaaagtttaaggggcataatttggtagatctcaaagtctgaggagcatgatttagtacataaataattattgaaatagtaaaattaaatgaaattagataaaagtccttaaatctaacaatctcaatagtttagggagaatttttaacgaccagaaaagttcagggggcatgatttggtacatgtcaaaatttgaggggtaaaaatcttaattaacctttaatataagataaacaataagatatatatatacatagtaagtttaaatttgaattgtaatatttaaaaaaggaacaacaagttatatagtcataaatatattttgaagaaatatatatatgaataaaaatagtgtttaaaatgtaacatcattttcaatttttcataacatacctattagaattatgagttaaatatatatagacgtatatatatatgtgtgtgacta

SEQ ID NO: 252849 - DNA, 675 bp, Cannabis indica
gtgatttatcttgtttattttattaggaaatgtaatcggaatgcttacattgactaaattaccataaattgtaatatatggtagttattttgtaaaaaatatattaaaaggataaaattatcataataaatttaatattaaaaaataaaataaaaataaacaaaaactattacctttagaattctttagaaaattagtaggggaagtaccttctctcttatttaatcaagtttttttttactcttatttaatcaagttctctcttttctaaatttaataaattaaataaacatatgtaattctcttaccattgattcctattgcttaatagtaaacatgctataataaaaatattaaaattgtaaaaaagaagaaaatataatggtaaatacaatcagaaaaatctataaattagaaaacataaattattataaaaaaagaaaaagaaaatgtcacatgccctcataatttttattagggatattggcggctaaaccacctgaactttacggtttgtaacactcaaccacaaaaactgaatttttggcggctaaacaacctaaaccctagttccgttttactctgcacacctatgtccaaaaatcaccgttaagtgccacggtggactgtccacatgtacacacttgtacacgtggcaaatttttagtggtccac

SEQ ID NO: 252850 - DNA, 682 bp, Cannabis indica
cgatgcagtcactccacacctcttgagttactccgtcaggaggtaacatgtcgaccctctcctgtccaagctcctcaatgttttgtatccactttttcttacagtctgccctccagtcacgtaaaccctttgacatctcgtactcaccgtagtctacgaatgtagggttatctcgtgggaggacaaacttggtctgcaaaaagttacacattaatacattaattacaatttaataagaatatagtaatttaaaaattaaaaaatttattacaacatacctcaagtctatcccacagtgcattgatgtcagctctactgacatcttcccatttgaatttattgatggggatagacatccgagtcatccatttagccatgttgttgaatttttttccgtttttgccgacgggggtgccagtctctgcatgcaactcaatctgtaacttggcagattgtgttttggagagctcctcttcaacattcttgcctttgtatttacctctgacccctttctttttcgaactgctgccacctggtgtagacatactacatatacaacacatattttttatttaaaataaacaaccatattcaaaacatattaaacaagaagggttttaatttttattttatttaaaacactatttcaattacaattcatcatcctcatcatcagttacat

SEQ ID NO: 252851 - DNA, 646 bp, Cannabis indica
ttacaaagatcatcctcacctctgtgcaagttgatcttcatccagtgacaacctttcaaattctagcttggaagattgggaagtgagtaccgagaacacaccatctctggaacctgaggtgtaacatcaccagtaccctaaccaaatacgtggagaagggtatgggcgcttcatctaggagttaaagaaaggttggaggcattattaacctgcttctttgatgtacaaggtccagcttggggttgctgacactctacaagaagcccgcccaactctgtctactaagggagctactattgctgagttttctataaatgttgtaaggcacactactgaatttaaacctctacccaagcatagaatgatggcataaacaaagaagacaatgagtagagcttcagagatcaatccacacttggcttgattgtttgctacaattggtgcaaagtaagctagacctacaattggggaaggaaagattgttgatgggcactttgaagtcaaagaggtgtatcactaaggtgaggttattcctgctacccctcttgatgctaaggaagaaggaaatgaagaagaggaagaagttaggtgcttcctttggagcttcagtggggatggagagcctatctctgaggatggtgaagtc

SEQ ID NO: 252852 - DNA, 719 bp, Cannabis indica
tcgatttgatagtttacatgttcatacacgagtgttagcgtgatagagtaggcattattgggcagactgatgattataagccggttgaactgccaatgcatgttactttttctaggcacagtagcttggtaatttcttgtctgtgtagatgagttttgaatttggttagattctagatcttctctaagagctattagggcgtcgaatgaggttgtgttcaagttcattattttttagtaattctttgtgggttcccgactcagtacttggaggtattgttctgtgagggtcatgcttctgggtaatgggtccgcaggaggggacctctccaagaaatttttagggagaccttccccaatagcctcgttgtccttaagatctagtgtatttaattgcttaggttgttctcttcttttccaatggccaacctcgacgatgaattccacctcgaggtcatgaacctcgaggagaccaaggttagggcttcggctgaggagccccaaaaagatactttgtcgaaagttgcttcgaactgaaagtaagagaaggcagaggctccacctctagctcatgtagtatacaactcatccatttaggagatggaccaaaacgtcaactagtttcgagcatacgacatgctagagaatctgtcttctgctggaggagtccgcaatatcccaggattggtctggaacagactgtcgttcgcagggcaatat

SEQ ID NO: 252853 - DNA, 1151 bp, Cannabis indica
tgacttcattgctttgaacttccagagccccttaagtttccaaatctgactgagaatggcttttagcctagatttagagacccccttgccatcaagaaagctaactagaacccctgtactaacaatctcggcagtatgttcaaaatcaagttctaagtcctgagtcatggattcaagaaagttgtttcgtaatacttcgagatcctcttttgggtcaacatccgaatctttatattgggaatccacttctccctccccatttactgcatcatttgtttccttcatgttgtcaagagggtgaggtggttgagaataattactattcgtattaatttcaggagcccctgtaccagaataagttctcatattcctttgttcacgtgaatcctccactttgtcccccataactaccacaccaaaaactaatgatcagtagcctttagagaaagccaagttgaccagaaaaaattttaaaaaggagaaatttcttaaccagagacaccactaaaaacttgtctagagaaagtttaaagaagagacattccgtcaagttggataaccaacactctcaggtgagagaaaagaaaaggactcaatattctcttatagtcttataattaactactgattgtataaatttgttagtattgttatttttattatggtagacaattgcatatgcttctgaagtttatactaacacacacacaaaagagtgatggggttgttacggactttactactttaaaatattatctaatataaaaagaaatttataatgtacagtagatatactgatgtatctttatttattttaatattttaaataatttttaagttaaatttttttatatagtcatgtatattataattatttaatacatcctataaaattttgaaaaattttgaaaaatttaacttgttgaaaataggggttcaaattgtgtgttgcacgcgtgactatattttattttatacacacgtgaaataaattatttgaacactactttctatattgtaaattattctgaatttgtgaaaattttataagatatatttcttatataattataacgtatatgaatatgaaaaaaatagattgaaaaattcttctagatattaaaatagatagagagtgcatcagtacatct

SEQ ID NO: 252854 - DNA, 728 bp, Cannabis indica
agacaagaggttcagcctcggtccatttagtgaagaaatcaattgttaccactgcgtacttggctctccctcaccctgtgggaagtgcccaaattagatcaatcccacatatagaaaatgggtaaggcgaggtcatcatcctcagttccgttggtggtacgcgagatatatgtgaaaatctctgatacttatcacattttttgaaaaactcttgggtgtccttgttgattgttggccagttttatccttgtctaatgatcttttttaatagactctaccaacctgcatgatccccacaaaagccttcatgaatttctctgataatctcgttcgcttctgtaggaagtacacactgaagtagagtcattgaataacctcttctatatagtttgccttcaactattgtgtagcgagacactgaatacaagagtttttgcgcctcgtttttttcagttggaagttttccgtcgagtaaataattgatcataggagtcatccatgtaggtgagatatctatcatctcgatgtcttccttttcacgtatacttggctcgtttagcatctccgctgaaatcaagattagttcatccaaatcgttctgcgaggccagttttgctaaggcgtcagcattaaagttctattctcttcggatttgtttgattttaaaataatcaaatcattccaagttcttccgaatacttagctatttttcaggcccttagcctggt

SEQ ID NO: 252855 - DNA, 805 bp, Cannabis indica
gacaggaaagtgttgaggaatctctcaatcgactctttatacttgttatgttctgaaatgtaaccaattccattcacttgtctccatatttgatctaggtgagcttttgtttcctcagaccttagtgagtatggcataactatatatttctcgtgtgccattaataacacacgctctctcctcataattaccccatgcattgattaattttatccatatcctctactattctcttaagtttacttctctcgttagatgtcggcaaacgtctcaagcccttaattgccttaacagcgtttggattcattattaactctgcacaacttaaaataaatactagattgaaattaaccaaacttaacatataagacataacacaaataaagcatacttacttgatgacaagttgatcctttgcagcgatggtgtgtatgtcgtgtgaatttaagatcaatataactgtggctctggtaccatttgtaatgccttcatttatttaaaataaaataccataaatgaactggcatcaaagtactaatgttgcctttattttttaaaaataataattttcaaaatatgggtacccagttgaaatcaaagtgttactatttaagtaaatgcaatagaaaactaaaagacaacatccacaataagttttatgaatttaaaagtgacttttaccggaagatggccaagttcacatgtagttacatgatctcacgagatacacctcatgctgtccagacccaatttgccaccgaaagtttataggcttacttatgtacacatggggagtaaataaggg

SEQ ID NO: 252856 - DNA, 494 bp, Cannabis indica
tttttttaggaataatttaaattttttaagtaaacttaatatttttattaggttttttaatatatatattttttaaaattaatagaacattataatttttaaaagtaatggttttaataaagtgggggcaaaattttgtattgatcaaagttcatgagataagaatactaatttttaacggtaaaaaaaatagaatcgaatagaaccggcataattatgtaactgttatattttaggagagatttttaataagttgcacattttagggggcaagatcaggtaatgtcgaaagtttaggagcaaaaattctaattattctaaaatttagatacctacattaaaatatgtgtattatatgaacaaaattatataccactattatatatagtaagaaaaaatatcatttaagaataataatataccatacaacaaaacagaaaatatactgtacaataaattatatatactaacaatccacaacaacttatgaaaaa

SEQ ID NO: 252857 - DNA, 800 bp, Cannabis indica
cctccaacagggttccccacaataataatcgaccgctcccggccgatgaacaagttctacccgaacatcatataggacttgatgactcccataatgtccgtctaaggcagagtgatggaggaaactctaagaacaacaatggtgaccgtagcagaaatggtggaaggatgccccaacgtagggaatgtcaaccctgcgaccaacgcggccaaccacgagatggcgatgatcccccaagaaatagtaggtccaggggggagaagagaagaccctgaggtcaacagtgactaccatccaaactaccctgacggtcatggtaatgatgaagctgaaagtcgggctaacaaccaaccaaatcctaagctaggggttatcaagctagatggctgtatgcccctaataggcaacatcaacctgaaaatccaccccaaagggataggaatgacccagtaccacccccaactaatgatagggctgacagtcagaacgccagaggaaagccaacaaccgggttaatttttgaacgggtaggccaccgaggggtagagacctacgagacgctctcaacagaaatagggaaaatcgtggttctaacatagtaaatccacctgagtcggttcaaagagaccaaacgaatgcttgaattaatattgctcaacctcaaacaactgcagatccggtgatccaagctcggttggacgaattaacctgattggtcaaggaccttatcgcaccaaaacccactgacttggatctggaaaggaggagagggtcttccttctcccaaatgatcaatgacc

SEQ ID NO: 252858 - DNA, 664 bp, Cannabis indica
ttctatttttctattttctcaattttatagtgttctctaatctttttctattgagtattaaaaaaaagtaacatctctattcttaatttctaatcgtctattggtattctcatttaaatatatgtttttattacacaaaaaataatgtggtatatgcatagtaattttgtaagtgtatataattgattaatctttaacaaattaatttatcacaatatatatataattcttttgggaagatgagtctatttctatatgagtttattttgtgaatctatcttctctaattttttttaatctaattaacattttattctatttctttcaatatttaattgtgtttattattattattttgtattttatttaatcattacaaatacaactcaattattccacatcaaatcataatgataataacattataatttctttcaataaaattaaatcgttaatgacaataactattatactaatatatatatagggcaagactatggtaggacctagcaaaagtttcctaccggtagggaacttttctttgaccattgattttagatcatgtggttattatgatgtaaggtgtatactcttacgataggactgcttgcatacgattaaaactttatatatattataataatatttaatgatatttattttt

SEQ ID NO: 252859 - DNA, 619 bp, Cannabis indica
ctccatgaggtgctaattgccttccaaaaaggatctggccacaccatcagtacaccgccagagaaggaaagtttgactcaccttgtaagaatgttccacgggtaatctcacaagaaagacaagccttgaggaaggcgcggccgagtgaccaacatgccagccagaaggaacgatgctaagagtgtcgagccagtctatcaaagaatataggagcttcaattaatccttactgcactctagaatatatggatatttactctttgatcactccttttacggagcctatcattacaacatcccctataaatagtgaatgcatacgcaaagggaagggacttgaaaatatactcatgcatctaagagcactttgctaaaagttattctctgtaaacacttcgagagtcgtagctagaatttactttgtcttccttagtgatatgcacgatattatctaacaatcaacataactaaaaggggagtaggtcattacccacatataagggggtcaaacctctataattatatgtgttcttatttattattcttaactccttattggtgattaatcagtgtctatttgactccgagtcagccgactatttttccaatcaacatcttt

SEQ ID NO: 252860 - DNA, 641 bp, Cannabis indica
atctttaagatttaaaaaatgaagataagattgtacacactataaattatggacctcatatttgaaaaaaatataatacaaattagtttccataaaaaatgaattctgatattggtagttcatcttatttatcatcttcttcatcatcttcagataatgattattacgatgaactagaaaagcaagtggtatgtcaagttaccgctaacaataattttttcatcactgaaaatcaaaataaccaaggatcacatcgaggctcaattcctggtcatatagttatcaaccgtgatcgggaaaatgctgatcgcaatctcttcagtgactattttgcagagaatcctcgatttccagagtcgatgtttcgacgacgatttcggatggttcattttttattccttcgtattttcgatgcaataacaatgcatgacgactactttgaccaatgaagggatggtattggtaaactcggattatcgagtttacaaaaagtaacagctgtatttcgaatgttggcatatggtgtaccagcagatgctattgatgagtacattaaaataggcgaatctacagttttagaaagtttgaaatgattttgtcgtggtgttgtggaggtgtttggatgtaacgccctaatgcta

SEQ ID NO: 252861 - DNA, 600 bp, Cannabis indica
tatatatttagattataaataaaataaataaataaataataatttataccttagaagaccggcaggtggtggtggggtgctccgacgttgccgtggtggggaggacggagcaatgggggcggcttcaatggaggacggagtaatggaggagcaatggctactcggtcgtgagagagggaggacagatcgatggaggcgcgatgtgggttcatgggttttgcaacgggttatagagagatgatagagagggaggagcgatgtgggggtttgtgggtttcgcaaagggtttgagggttcgtgggttttgcaaagggttcgacggaagagagatgatagaaagggaggcgcgaggttcgtgggtttcggtctgtgtatatgtgggttagggatgatggggtactagtattagggatttgtgtgtatacttattatttatttatctttttttaaaaaagggtactatacccaacggtttaaaaccgtcaggtataagggtgtattaattttctcgttttacgtaaaaatcatcgccttctattatagtggctgttataaacagtcgggaatacgtgtttttcctaacagttttaaacagtttct

SEQ ID NO: 252862 - DNA, 1120 bp, Cannabis indica
tttttggtaggcttcggattccgattgtcgttttaactgtggtataatgtcaaatgcggattgtccaggtgtctctccttcggtttctgattctctttcctcgagtattgctcttggattcgtcgagtcgtttttagtctctgatactcctcctatggagactgagaatgttgaagtccccgacagccccatctgagggggttacactagcgattcccccgttgaagaaggccaaaaagaaaaaacatgccctggatagttcctatttggatgttaggtcgagttgtccgtcggtactcacccagcgtgaactcgattccttggttctgtcgtgttgttttccgtcgggggtcgaagttaggcttcctaaacagcatgagagggcggattcctctcagaatgagtgggtatgcctacactcatactggtttgagtcgaagattaggctgaggttacccattcctagactcattaaggaatttcttatacattattcgcttgctcctgcccagttactccctaatgtgtgggctattcttttgggtctgattgtattaggggataaggcgggcgttcagtgggaagtatccgacgtcatccacttttattttctgatggaaaaagagccggggcgttaccatcttcgtcctaggaaaagtcgttccttgctgactgacttagagacttcccataaagggtggaaggaaaagttctttctcgcccgaggccctattgagtttgtttctgacgaccctacgaccccgtttattaaccggagctggggggctcccggtaatctccttacctctattactggggctttttattattcaacctctttccctcccccttttcttttacctttggggcattcgggtgtactactttctgttgtcgtatatataatatttttcatgttttcccactaagggcatattgatgttgattcctaatgggggtgtttttgtgcagatgttgctgataacgaggagactgtcattggtgacattttactgagaaggttcagaaggtcacagccttagacccctaatcgaatcctccgcctggccccgcgaactcagaactcccttaggtgtccccactccttatcctccttact

SEQ ID NO: 252863 - DNA, 587 bp, Cannabis indica
agcattttacaagataattattagtaagctgtaatataatgcagatatcaatgctataatattcaattacaagactaaccaaaaagaaaagaaaccggaacaaaatccctacttgggtgattcaaaaattagtaatgaaactttatggcattatagatttggccatgctttttgtgtaaagaaccattcattgaataaagctttgcaatttcagtattccgattgttctgattttcactgctccatatgtcatttttccaaacaaagaaagttgccttttgttagcaatcataatattttcaaatattgttttgatttacttcatgttgatatttggagaccttaccatactcaaactgttgaagattttaggtatttcattaccattgttgatgatttctctagatacacttggattcatctcattaaaaataaatttgatgcacaaacaaccattccaacctttctgcaacttgtccaaacccaatacaatgcacaagttaaaggaattaggtctgataatgctaaagaacttcagtttcctgcagtattctcttctttagacattatccactatcattcttgtg

SEQ ID NO: 252864 - DNA, 695 bp, Cannabis indica
atcccagcgtgaagaaggtcaagtctttggtcccaaagttaggggcaactgatatactgtcaactaactctccattgccacaacaacaacaacaaccacaacagcaacaacaacaatcgcaaccacaacaacaacaacaacaaaatctaccaccatcatagtctaggcgagtgcctttgccacacaacagcggtctctatctcctcatcaactacagattgtggcatctcagcctattccacacccatcttagtttttatttctccacaacttcccgagtacaccacttctgggtcagcctttgctgacccatgataactctataccagttattttttatgctttaaaattgaaattattgtgaggagagtagtggaaatgtgtttgattgcttaattttaagtagttttagtttaatttctatttagtaagctaacttttgagtcttgtaaaaattattgtgtttttttattaaatgttgcttatttgttgtggaaaagaagaattaacttgctaggaaaaaggaagtgatacaaaggaaaagttggaacaaaagctaaaaattggatagaaatactgaagcaatgctatagcattctgggcaatttgggaagtgacgtggaaaaagtttaaaaaacgactttcacttatccacatcagcaattttttctgagtcactcagagtacgccagctg

SEQ ID NO: 252865 - DNA, 966 bp, Cannabis indica
cttgaaattatcacattatgacaacatctcgcatttgtctccctcaacatcacaaaagaacgcgagaagtacttcctaagataagagtttgcaacttatcagcctacatactcataagtatgttgaaagactaagagatatattcacaatgtaattcatcttgaaattatcacattatgacagcatctcgcatttgtctccccttaacatcacaaaagaacgcgagaagtacttctcaagattatacttagacacaataagctatcttcaaagtaaagcttcataagatggaacatatgtgttgcgaggagaagaggcgtagtcagcacaattgctcttatagataaagacgagcagttatgacagttacttatttttatcccatatgttataaatataaaacgcggggattataaaaattttcatgaatggttattataaaaagatcccaatagaataattgttatcctaaaattcttataaatagagacagaacttagagaaaaaaagacgaccaattttaaaaagaaagagtataattcataaattatatcttgttttatgtatatacttgataaaattccaaaaataatatgtacttgtggagtatgaagagttaacttcagaaccacattaaaaatcttcgtcttatttatatttattattattatcaattattataattctagagtttatttattatattaaggctcatttattggttaataaaattctgcattaacagtttgatattttcattgagagtcttgtaaataaaaaactcaaaaaaatacattccttaaaaatatccaaaattttcatccatggcacacgacacccctcaaaacgaagatacttaaccgggagagacaactcaatgtcctgggaaagaacatcagaattcccataggacaagtgcgaaagaaactcctcgtttgggaagaggaaatggtgaagaagtatttg

SEQ ID NO: 252866 - DNA, 1245 bp, Cannabis indica
agggggaatgttgtggacattgtcccacatagaataaatagtataaatagtagagaattgagtcagaacatgagctgctccactcattgccaattggttttgagatggaacccataattctcaacagaaacaaattcaatggaaggctgtgctgtatgcaacagttgtgttaaaccttttcaataccaatctagattaagtctgtatgcaacagttgtgttaaaccttttcaataccaatctagattaagtctaaggtgcttgtgttgtcgaataccaccatgagataacgttatataaatgatttgtaattttttataataattattaaatttaagtatgtaagatttaatatttaataaccattacagtttaagatggtgatggtggtgtgttaactttaactttctcaaaagtaaaacattaactgagagccaagacggtcaataatgagaaaaatatgaccgagctttgactagctattgctgattgctaagtataattaaaaaagaaagaacagtagtaatcattaaagggtgtgcaattcaagttaataaaaagccaactaatcaaaacaagatatccaattatatgtaatttactagatgcaattggctaagcttaatgcctttagtgtctgtaatgatgtttgcatactatgctgctggtgtgcctaatgatttaagctccttccttaactccactcacatggcaactgtcaagcatcgatccccacaccccaacattgctcatctctattatatatacatattatacatatatcaatatttataatccacttttggcttttgggtccactcttaatccttcatcctccatcgctgtacgtgaaacccttttaagaatccccgcaatctgcgcagaaagagaggaagagcagatgccaggcttgtgaagaggtccattatcggcgccatcaatgacttcaagcaaaaaaaaaaaatattgaaaaaagaagaaaactttgtgaaggtaaaagcacaagggcgtggtccatattgtgagagagagctaacatttaatacttaaaaggttaaaaggttaaccttggcatgcatctagttcggcgctttatttgcttttggcctggttaataataatatatataacagaatctttcttgatatgtagtgagggatgatatatatacatgattgatatggttttacgttttaataataataaatgttgtaaatcattacattttagaagtcattatatatat

SEQ ID NO: 252867 - DNA, 4368 bp, Cannabis indica
gtaactaatactccatggggtgagagggtgacatttgtttttaatccaaattctgatgtagtggcaaaaccgttgcatgtcagtccttttatggtatgttttagtagtaacttttctcttctatatcaacatcccgctcatacatagcattatgctaatgttcatagctcgttaccgtattttcatttcaaatatgcttactggaaatataactaattcacaaattctgtaaactattttggtctatgttacatgcttagatgatttgcactgtggaattagtcattttctgtaagttgcatttgctctctagtaaattacaggaatttaaagaccccatatcataattcttgatgagatctgtgaaagatgagaaattctctctattcttattgcatgatcttttgaaggaagaattatgtccatcttgagcattatactgctatttttctctgataagttttcatatggttggtttctatcatgggagatatctaaaaaaagaaaaccgctgtaaagttttccaaaaagaaaagaaaatactaggatctttggctatatagaagtaatataggatcttccagggacacagaatatgatgaggtacgaataggaagaaatttaagatttttgtagctgcttgcaactttaagcaaaggacttaagaccttttttttgtattcttagatggaccagaagttgatatcctactggcttttgtaaacctgtttcgatatggcgggatacttttctttctccaaccgaagagagaaaaccttttcgtgtgtactaaaacaatgtgtttattaaagacttttcaattgctgattcagataattcatgagatgtgcattaatgcaatgcagtgtgttgtctcgaatttgttcagtataaaagtgggtgtaaggttgttcttagtggccctggtccatgccaattatggtgaatgaccaaagttaactaatcaaaatctgtacatctgaagtggtagagaggcaataaattgtaactatattgtaattctacatggaaaaatctcaagtattcatgaaaataactgcaggatatgtttgggaattggaatatcaaagcaagtgttccgggggataatctatctgtggcgatttcagttcagcatccaactcttggcaactatttcactgctactttgagagccaagaaagttcccttatcgtccgtctctgacgaatcactttacttctggttgatgcctcataaagttgcagtatggatatattggcatgtaagtggtacttcaaaactcccatggcttttttcttgcacaatcaacaaaacttaaaacaactcaataactgagaatactttccatcgacggcatagctaatgaacttctgacatgattttgttttgtaccgcatgttcttccaggccgtcaagctatggtggaaaaatgtttcatttattcaacatccaaagtattccaatccgacatacagggaagaagcgactcttcgcgatcaaaaacttcgatgctgtagtgtgccaggattgaatgatcatagtcagcatgtgcaagctgaaccgagtgaagattgtatcggtgacacaaactctggagctcgacgtttcacatggacagatgctaagtggccttggtcttaattcttatagatttgttctcccgaactatgacccttgtagagtttcgcaccctattttaatttttttttggttacaaaaatttgcctctgaactaaacaaatcattagaaatatctccttcagttccatttttcttatttctttaagctatttgtggatgtaatactaataaaatataacattaatttagttgcagttcataaataacagtaataattaatgagaatatgtatatacatttttagagttaatatttgtatgtttagttttaataaatttgacataaattagattgaatccaaatatgaaatccgtatttaatgcggattggatgttatttgtattttagtgtcaataaatttgacttcagttaaattagattaaattcaaatatgaaattcgtacttagtgcagattaaattgtacttagtgcaaattaaatgttatttaactaaaatagtgcaaaattgattaaatgaaaatggtaagaaaataactagaatgtaattgaaggtgatatttgcaataatttttatagtttaaaggaaatttttgcaataaaaaaaaagtttatgcggcaaaactctgcaaatgtcaaagatcttcagaatgttatttattataatttttaagaccaaacttaaaagccttgcaatttgtttgtgtaaagaggtttaatttcataagcccttccttacttaaatgtttggtcataagagttggaaggtcatattgccttactatttacataattaaagtttttgttagaaaaacaagtggaaagaaaatacctaacccaaaagtactcattatgaagtgcaatttttccttgtgttcttcatcaaagatcatcactttcaatttttacaaagcttaaaatacataactagtaatgatcaagacaagaggaattgtgtttaatattatagttttgtatttcttatgaactaaaagaatggacaaaatcttattgaatttgtgtactcttttggcagtgcataatttagttcctcaaaattaaaaatcccactttagaaaaatttacattgaaagttagaagatgccaattcaaggtaaagaaaaataacaaatagaatttgaaacaaatgatcaaacacaaaagcaacacatcaaatgtaactactaaaatcgtagttacaacaagaaatgaaacttcgtttaagactctttttataatagaactcttttacaaaattttgttcacgacataaaactatccctcattttccgtatataattatctagtggtgtgtttatttacaagtaattaaaatgactaataataagattcactacaaattgaattcatcctcaatcatattaataaattaaaatcaaaatgagttgttcacttgacttataggaatcaaaataagaatcaaattaaattacaaaaatactttttattaaaattttatttggattgtttttaaattttttaattgaaaaaataattaaaaagggataaaaataacattttataatttcatgggacccatatatttcattcttattccttcacaaaattagaaaagtaaacaagaagatgatgatgattttctattccataacacaccttttaaactaataccaaaaacaaagtcgaaattcccattgaatataataaagaaagctaactactttaaatggtattataaaacttacaactctacaaaaaatatattttattaaaaaaaaaaagacttaatttagaaagaagaaaaatgacaactttatgttttgtttttttctcactattagtgaatcagcatgctcatcaataatatcatataatttttttgtttttgttgtcttgtgtacattatttttgacttttgaatttaaggtattcaccaagtttagaagaaaacaaaagaaaaacatatgaatgttatttacttattggccaagtacttttcttatatgaaatataaagcatgggtgttatttcctgtaccacatatcaaaaacacacatgtttatcttattttatatgtaactttattcttcttcctttttgtctcaacttgagtgtaggataagaaaaaattacactagtaaagactaatttcaattttaattttgttttgttactttttttttccaagagaaatttcaattttgtttacaaaaaaaagtatcatcaactgtctaacttagaaatggcaatagtatagattgaggacgatttttagattaccactctcattcagtcaattaattatataactatatattaatcagtaaattattagagaaaaattatgagtatttgtaacagtttacaatagctattatctaaaaattaattagtattttttttactctttgaactttcgacaatacttgatcatggttgttaaaaatttattttaaaatataacaattatataattatgtccattctattagattttgttattttaccattaaaaataagtatttttacccccctgaactttgatcaatataaaattttgctcttttttattaaaaatattaattttaaaaaatatattgttctattaattctaaagaaaaattaataaaaattataaaaacctatgaaaatattaaattaattaaaaaatattaaaaaaaaatcaaactacaattattaaaaattcaataaataatttaaataaactaagattttttgaaaaaaaaaaaaaaactaaaacttgtttatatttataaactcata

SEQ ID NO: 252868 - DNA, 497 bp, Cannabis indica
acttactttaaaataattctacctctcatgagcctactgtctcatattttatcaaggaagatggtctttgggacattaataaactcaaaaaaaaatttgatgaggaccttgatcccgatttaaccccaccaccaaggactgtctacatttgaggacatagtccttctagaactctcactgtgatctacttaccatcttgcaaactaaaacaaccccaaccctagctcctataatcctgatgcctttaaataatggtagaaatttgtttggtctttaaatatccctcataaaataagacattttatttggagagcttttaatcacctttttccatctaaaacttaacattttctcaaagaaaagatccttgacgaccctcatttcccctgttgtttaaactgtattgattctaactcccattcccttttagagtgttctagggcatgtaaaatattggaagtacactagtttctcaaaattttttttccataataaag

SEQ ID NO: 252869 - DNA, 985 bp, Cannabis indica
ggctttctcacattgaattactcatatacccttttagaatatatattattttataatacaaacaaattagatacaaatcataatattttaaaatgtgtgggcttttagatattgaattacacatatacatttttagaatatatattacaccacaataacctaaataaaagtgttaattttttgagcttttttgatattgaattacacatatattacttcacaatacaaataaattacatgcaaataataatatttaaggttttatttttgtattttttttctattacacatatactcttttaaattagtataacttgtaaatatattcttatcctaacatttttttctctatcattttcaaaaataattatatagtaaatttacaaagtattatttagtataaccaatgattaaaatcaaatggagattaaaaacaaagtaaactttaaataattaagaatgaatttataattttaatattaaaaatatattatgataactaactttaattttttattttcaaggaagaataatatagatttttttaaagaaaaataacatagaaaatttaaacacacaaaattataaaaattttaaacttatgtaagagagaaaaattaactaagttgaaaggaaaattatttacccataaaaaataaatacatatacattatatttttgaaaaaaaaaatattaatttaattaattacgtcttaagttttgtgaaaaatactcataaaatcagtaaaatatttaaaaataaatttaattaatataatatataatttatatactaaacaacttactagtatagctaatagtatgcatatagagcaataatagagttgaaaactttggcaccaactataaatttgataaacatgatgtgatatgcatatgactaattattactagcttattggtattagagaaattaattttattgagcaactcattttcctgtcaaagttgggtggccttaaaa

SEQ ID NO: 252870 - DNA, 767 bp, Cannabis indica
ttgatttggctgacatgatttgggagcagattgtttctcttagaaagggcaaaaaacctagactcaatcttattttttctcatttgatttataagattttgtctaatcaagaggagttgattcttgagaatgaaaccatagaaatgactactgttggaaccacttttaaagttccagagaaacctcctcaaggaaaatctgctaagaaaaaggctcggtctgcttcccctagtgatatgatgaacctgctgctgcatctgcctccacttctgtttctacagaaatggctgaattcaacttgcgtttgggaagaatggagacaagtcaagccttacttctcaggagaatgtacagcatcatgaaattcttccgatccagtgatgatgaataggtggtccattttttttatcttttgccttttatttatgtgttttgaactattatgactttattcgtgttttttgttatctttggctccttgatagacaaaaagggggagtagtaatattatttttttggattgtgtgttacaactctggacccttgttttagggggagttgtcttgtttgtggtttgtaagcttttccgtatataaaaaaaaaagttattttgttttatgtgttagagtgcttttatgcaaggggagtattctctatactcttttgtttttgtttctaacacttgatgtaggttttctccaaataaaatattttgtcaatcaaagtgccaaagggagattgttaattccatttttggcatatttaat

SEQ ID NO: 252871 - DNA, 1169 bp, Cannabis indica
attcatatttagttttaaaaaatttctagaaattgtgtaaatacgaacaacagattacttgtacgtaatgtactatataactttattatgatcaattaatagaaagaaaattcattatcaatttctcaacttcaacatatatgacttccacgttatttttggaaaaatatttagctatgatctattagattatctccatactatatgtgcttcaaatgtggaacggtgtatacctgttaatacttgtgtgtcgtgctaattttaaattcgtattttgaaaagtcttgtaaaattattataaataggattagtattattttggactctgtattttgtaaaagttattgaatattgaaccttttatttttgttaaatgacaaaatggatcatgtattttttaaaatagtataaataagacccttaagttcaattttcgacaattttttaatctataactaacttaaaaataatttttaacatgaacaaatgctagtaaccagtttttgttaataagacctttagatcggattatattaaatttattttagtataaaaaatcaattactatatacaaaatctaatttgtcatttatatcaaaacagatggttcaatcagtaacttttgccaaacacaatctaaaatgacatttatccttataaatatcatgtcttcccatgccataaaaaaaatatagattgtattgtgtggtgccgccaataattttattaggataaacccaacaccaaccactatgactcaatatttttatgttgacccatttttcttaaataaattaactcgttttttatatatatatacattaatattaattcatgctccactttttgatatttttttacaattaatgagcgtactattaaattatatgtatttttttttatatagtttaaatacttttatatgacttttcaacaatagttccacataattataattactagataaatttgaatatttactaataattaacatactaacatttttaattttataaaagttaataattaaataaatacctaagagtgttgtgttatcattaatacgtaaattaatcaactttagagttataaaatgagacacattgattgatatgctaactatttcttcttctaatctgttcacttaggttgtaacccaaaataaaatt

SEQ ID NO: 252872 - DNA, 1459 bp, Cannabis indica
taactaataaagcaaatcacgggtatatattggggttattaaagtcttaacatattaaattattaattctcttttaaaaaaaaagtcttaacatattaattagcagatcacaaaatctttgaatagccacgaggctaatggcttgataattaattaaaataattactctattacgactgttggaccatattttctcatcataagaaataaataggaaatttacaataaatcttaattttttcttaaattttacatttatactttaacaagtttattttttatttatatttttcatacttagtttttttttattattttttacttattaaagttttttttttttttaaaaaaaaattctcttctttataatttttttaactattctttttattattattattttaagttaattgctaatttttttttctttctttctctcctctatctctccctatttttttcttcgaacttatttgttttatctctaatataaatatatataataaatgtatatttttatatctcatttttttaatactcattctctttcttacaaaaaaactaaaataaaaactaagtaacactccctatatttttttatcttttacatgattaatgaaagtagtatattttttagatattttgtagtgtattcaaagttaatttatgaatgatttgcatatattaacaagattgatgtcttgttattttttctgttgatttatagttatctttttgttattttatagttatttcataattgtttttatgttgttgtttaggtgtttaattatagttgtttaattttatgttgttctttaggtggtttataattgtttttacgtgttttttttttttttgtaaagttgttgtttagtttatgtgtattttttattgtgtatatttttcagtttattccaaacaatatttttgttgtatatatgtgtatttgttttgtaatttttatgttatttttagttgtttttagttgttttttatttaatagttatattttaactatcactaactcaaaaagaaataaaaagaaaaattaattgaaagaataaagttgtaacaataaattctataaaaaaaaaataatgtatagtctaaagataaattaagtaatcaaaattaagtaaattaggatatcaaaactaagttgtaacaaaatcataatgaggagttgatattattttgtcaattaggataatgttttgtttttttttttttttttagtttactttgtcagttatatttttattatggctaattaggatttttgtcctcctaaactttgtacatataccaaacttatgcccctcgaacttttaacggttgttaaaaaatgccccctaaacctattgagattgttgaatttaggtactctttctaatttcgtaaaaatctaacatggatgaaagttcatgggcataatttagtacatgtcaaagttcga

SEQ ID NO: 252873 - DNA, 917 bp, Cannabis indica
aaaattttagtttttgtggttaactgttacaaaccgtaaagtttaggtgatttagccgtcaatatccctaacaaaaaatatgtatcttacaatagaaatatatatataataacaacaaataaaaataaaaatatatagaatgttaataaaattatatatcatgtcacaaaagtacaataaaaaataaaacttaaatgttatttaaaaatataatataccgtataacaaaaaatacatatatcattcaccaaaatatatcctaacgtgtataatatactaactaaattatataaaataattaatatatatatatactatgacaataaaattatataccaccattgtatataataaaatagaaactaattaaatattatttagaataaataatatattatacaattaaaatacataaaaataataattaatatatgtagcatgccaaaattatatacatacattaaaatttttgtattatactaacaaaattactataccactattatacgtagcaacataaataaaatatcatctaagaataataatataccattcaacaaaacagaaatatattgtacagcaatccacaacaactcataaaaaaataaaaaaaatctacataactttcaaataattttttaataaaactaatatagatataccataagtaatttgctttaattctaaaaagataggaaaaaatagtattttttatgtgacaaaagataatataaataataaatagtctaaaagtcatttctctacaagttttgaaatgagaatatttactaatatagtcttataatttgggatcatttcttataatttccttataatatatcataattttaatcttaaatattgtattatttaataaataatagagtaatttaaggcaaaatcccctcaactatcaa

SEQ ID NO: 252874 - DNA, 573 bp, Cannabis indica
gagcgagttttgaagagagcttctagtttggagagagaattgaagtcaacctgagaccaaaaaagggaaggtcaaacccaactgtctcaatctcaacagaaactcaagcaagctcaggatcatgtgctagcggtcaagtagtcatttattcaaaaagagactgatttgccaaagtccaatttagaggtagagaatcttagacaaaagctggaaaagattgaagaattgcacaatgctgatctaaagactgtcacacctatgtcagttttattaaaagggctttgaagcctctgggatgtcaatcaattggttgacaacatcactgccaagaaacatgctccaggcctaacacttgtcacgtgtcaacactgcgtaaaatgctatgaggacagggtgttcatgccttggaagtcaaaccattttgaaccgcgcctcacctttttgaaggatcctgaggaggttttgaaatgcttctcaaagaacaacaaaaagttaaaagctactctggtgcagaagatgggcggtcacaggttgcctcatctggcttctctaagaaaatgatcatgttcttac

SEQ ID NO: 252875 - DNA, 1020 bp, Cannabis indica
tgaataatgatcaaaaatcacgagcttcccttttaaatgacccaagttttctctttaaatttgtgaaattacgaaactgcccatgtagtcgtcaggaaggcttcgccacgaccacagatttccccagtcacgatagctggagcattctcgacttggaaaaatttttgccaagtctcgtcgcggcgaaggatactgggcttaggcagaaaagaactttgtatagttctttacctcaacttttttatctcttgtcctttatttttgtaaatacttcctttgaacattcggggacctaaaacaaaagaatcaagcattaaacagccttaaaactaaaaacaaagatcaaaaactatccgaaaacacgatccaaaacttagactaaaatcagcctacaacctcaaatatcataacctttttgccaataataaattagtatgtagcatactatatatatacacatttatttacatataccctaccttattttataaaatttataaacatgtttgtattgaattttgaaagtgagcttcgggaggtgacaccatgcatgggccatgagcagttgctattaattgtttagttgagaattaattattataactttcaaccacaaaatgaattaaattataagactgagagtagataaatatttaattttatcattaattgtgaaagtgacaaccttaactccagaaacttagaaaagaaaattctacttttacaaagtgaatttagatatatcagtaagagtatatatacatatgagaaatgctaaagggcagtggtgcctagcactttcctatgtatcaatatcactattgttgcaactaagtaatcgggtcccatataatatttttattataatagattttagtagagtatcgctaaccaatcgcaacgcgacatatcgcaaaggtgctaggcaccactaatacctaatagcaatgctctatatatatatatagatatggtgaagagatccacatgtaatttttctttcttttttctttaaatcgt

SEQ ID NO: 252876 - DNA, 2063 bp, Cannabis indica
ggccaaaaaatagtcaataaatattaccaacaggtttgtctgttggtaatataacgggtaatggtccccatttgcatcgtatcttttcactcttgtatccccatcaccaagagcaaaaatttacagaaaaaaaggttttgatgcaaattggaagatcataccaataaagatcattacaaagtcgattctatggactccggtacgcttccgctattccttaattttattgtttgattctcttgaattaattagggctatatacagatttacagtatttctaatacggagagctttgaattcttgaaagagaaatgctaaaaggcacctgtggttcctaatactgtatcaatatcgctattggttcaactagttatcgggtctcatataatttaatataatagtttttagggagtattcctaacaaatcgcaacgcgacatgtcaaaaaggtgcctaatagcaatgttctttttgaaaacatatttttctcccttttcgaacagccactataaactatattttgatttgttgttttcagatttatgattgcataaaaaaaattatttttttaaaagttaccgaacagtatcattatttgccacattttaatactatattaatttgtgcaactgatcacctaagtttagtttaaaatctatgccaaacttttcttttcttttcttttttttcttttgaaattggaggtattaggcaaacaaaaaaaaggaggggcttgaggagttgttaaatgtgtatgacgtaagtgcatgcgttgtgagtttgtttaattaattttgttgtatatatacgaatatatatgtataaaagtgaataaataaacacaggtacaggtaatgagatgagattcctaaatgctacgggctactgcatgcatgcatatatcatattcatatatatcttagtccatttgtaaactgatttgataaattcatttctatatataggcccgtatgattaatcattctcatcctcaaagtcatttcaaagagtatacaaaagttttaaattttgttcgaagttcttcttcaaaagtaattattccctcccaatttcggtgctatcatgaaaattaatatatatattcataaaaaaaatatatatatttatataaatatatgtacatcagaaaaggtgttttagatcattaacgttaaaatacatgtatataaatatatgtatatcatttgtatatataggagtgaaagtctaaccgtaaagcttgaccaatacagggagatttaactttaacccaatcaaaaatacactatccactttaaaaatatacgtacgcgtacatagcattagcatgtagaaaactgattaggaagtacgaattacgaattatgttttagttggagataaagaaataaaaaataaaataatttttattttatttttttatttagttgtattataaagtattggaatattattctaacgaagtaaatatatttttattattttagttgaatgactattatatttttattattttagttgaatgactattatatatataacttaggtattattacttttaaaaattaaatttaagtatttctttgcagctggaagttaaacttaagcatttatgtcacaaattactcattttgaaatggaaagaaatatccttctaatgtaaaataagaaaaattttaataaattttttactattttttttaatacgtttaaaacttgattcaatttcattcctattctcattctcatattcaattctattctattattatgttttcattccctttattccaatatgtttacaaaatgagcttgttattaggtactagtgttgcctagcacctctagacatgtcgcgtcgcgattagctagcgatactccctaaaaattatattgacacataaaaatgtatcaggcactattagtgtcctttagcatttttattacaaaattgtataagaataataaaaacttcagtatttatgagattaatatgtttccgtctgttgatgagatcacaattcatattaaaaaaaaggaaatttacatggtatactgattttt

SEQ ID NO: 252877 - DNA, 850 bp, Cannabis indica
tataatactttatgccaaggtaaaagtaaaccaaaatcaaccagaagcaactagtatattaacaatcatacacaactaatgttactgttcaaatgaaattgtggctaaactaagcatgaatattgaatagctctacttattggcttcttcattaaaatgaattaagagtttttcgatatttggtatgcatgttgtctaaattgtcatgaagcactcccaatagctctttcaaaataaagatacctcaaaatttaaaagaacaatggagcaaatacacatttcaacgtatggtgtaaatttcttctctatttgaaaacatctctattattttcaaatgcttctctacatgtactattctttttaaaaattattttattcgtgctataaaatttttcaaaaatatagtcttgtcttgtcttttgacatggtatgtttgtattgagtttggttttgtgttttaatccctgaacgttgtttactttgtttcttgtctggtatagcttcttagcaataccaatactgagtttgctaatatgtcattggaggaggaagaagatattggattggccattgaagataatggggatacggaagttgttgagtttgttttccattcaaaattatgtttggtagggcatttcattatcaatggagttgttgattttccttccatgcaacaaactttagctgctccgtggaagctaggaagaagggtatacatctgaaaaaatcaagtttttgcaaacgtcaataataaatatgagaatataaaactgtatacgtcagcagaagcagaatgtaattctgttactgtagaaaccagttttgcagcgacaaaatagaacagaca

SEQ ID NO: 252878 - DNA, 630 bp, Cannabis indica
attattaaaaagcactttttattaaaaaaaacttttttaagggggcaaattttacacccgaaattcagctagcacatcagaggaggacacgtgttaagctgggaaaaaatataaacccaggcacataactataattacatttgaggagaaataactcgtaaaaaacataattgacagagtatgtttaccactcggatgactaaatagtcttctgcgagatacagatatacaaactgttgccttgtgcattaacaagaaaccatgtaacttcaggtgtacaagaagagacactaacctcgtcacgtggatgggatataatgactatgaaaacacttagcttataatctacattatacaaactaagtatagcagacgggtgaatcaaagcaagtgatagcgaggcgtccacctcgccataggaagacatgctcacgttaaagatcaccttgtcaccaaaaactgcgattgttagatagggtgttatgtttctagattaaaaggcacgagatttgtattatccaccttggaaagaaataggaaaagatccagctcgctatcaaggttgtcgctgctctattcccagcgagacattccaaaacgatataatttataacgtatttaatacacatt

SEQ ID NO: 252879 - DNA, 651 bp, Cannabis indica
gacctcaaaaccaaaatcaaaccccaaagacatcttaactctatcaatagcatgagaagacattctggtttccatcaaaaaaagaaccaaaggtcgatgctccttcaccaatagggagagtcttctgaatgcacaagtgctccctagaccttgtgcattccagctaataagagtcatttttctgggcggatcactcacctgttcaaaggaataggaaaatgaagaggagacaccatctctttcaccagcttaagcccttttaagctacaacctaagagagcctccaacagtagtctgatgatagtgaaacgaagcacgtttcacactagaggcagaagtcagacctttgccacgcacagaagagtcaggctatcaaataggattcgtagcaaccttggtaacaacagctacaaccacttgagaagtatcttcaccatcagcgggaagagattgagcactcaataaattgttagaattatttgagcatgcatgatgcgcaacaagaacagaatatgtgggataggagacgcaattagagggattcatagtggaggcaaagttatcattgttaatagaaggagccatagtttgaaggttaggatttataggtgtgggaatcataacacctgtgggagagtgaaagagtgtagg

SEQ ID NO: 252880 - DNA, 808 bp, Cannabis indica
ctattatgctttaaaatttcaacaattatcactatgttaaacattattaattttaaaattatgatataaaaaatacatacatctttagttattatgaaataactgaagacataggtcccccgtatgtcttattttcaggagttacgactttgccttaatactcttcagtagtgtgatttattttaaccgaacatagaccagcgaaaaacccaaagataaaggccctttttgtagtagtgatatgtatatttttaagttacattgcattgccttattgtgatttatgccctaaaagcaagtaattaatagataagatattagagaatatatgaaatacaataagataaaagatatattaattataagattataattattaaatatctaaagattccttattcatatggagaaggtataatcttctaaggatgtaagagaattaagattataagatatgaataaaacaattctgtaatgtattaaagtattgagaatctttaatatggaactgctaagtacggtttactatacactatacttctagtgtgtgtgattttaattaggatccactactacaaaaatggtttttttgacgtttttaaacagtcgtttaaagtattctcgtcggtttctaaaaccgtctcctatactaccgtcgtaaaacaggaaaaataggcgacggtcaaaaactgtcgctaatgtggacttcccgacggttcaaaaccgtcgcctataacagggtataggcgacggttttaaactgtgccctatactataggtgacggttccaagatcagtttgagtatct

SEQ ID NO: 252881 - DNA, 582 bp, Cannabis indica
agggcacaaaacccaacagggttatctttgttggtggggcccttggaactcatgaatagcgctggtattgctcacatttatgggcgtactcagtacaatccttgttcctagtaggctagaaatggccttgacaaatgattttcttagaaagactgggtcttgatgtgtgatctccgtaaaaaccttcatgtatttcatgcatggctgcagttatctttttttcctagctatgcactttagatactacattgataatcctctcctgtatagttttccatccatgatcacatatctgggggcttgatactggatcttcctcgaagcagctctatctttagggagtgtacctatttctgtgcttggagttatcagatgtgcaatggggactagtctgtatttctctatttatggatttgttactaattttgccaacatatctgcaaaagcattttatctttagggatttgctttatagattatgcttaaaatgttgcaacaacttctgactttttgctacataactagccattttctctcatttttgcccggtactctctggtacactgttaaactcaaagctgt

SEQ ID NO: 252882 - DNA, 1771 bp, Cannabis indica
taataatatgtaatatattatttatgtaattaaatttgttactacacaaacaatctcattacaactataaataaatcaattaaataattaaaaaataattattaaagatgtagtttgataaataaataattccaaagagttaaaaataaatcttgttacatatccatatattagttttttaatttttaaaatttttccatccattatataaaattttctaaatattaaaaccactaaagtaaatatttacataatatatatggtaaggaaaataataaagtggataagaaagaagagaagaggtattggctataaaaaaatcgatagaaacatgctattggaatgataaaacttggtgtgttctcaaacaaaagcgcccatagatgatgatgttttcttttttcccaatcctaggagagtacttcaatcacattattacattacaatacaaaaactcattaattaattaaaatgaaaccgggacacatggttgcgccacgtgtcaaccgaaaaagactgatgaatacgtaacaatcattcgtagatttatagacacgtcagcttcttcgtactacaaattgtaggctgtgggtcccatcccccttagttgatgatggaagggctgaagagagaagagaaggtagagatttggagagattacatgctgcacgttaagaattattccaattggatattcgaatatccatttctaacatatcccaaatttcaaaacatttacatatataatactttctttttagcttattaaaacgcacgcactgaatctcaaagctcaaccaacagaacacaacgacaatcctgccacagattatttataggtacgtttatttctttctttttctttttctttttgtctatctgtaattatcatgttgattagcaaacgtctaatttcttgtttttggtttggttagcggataattattttctaagcaagaatatttgagttctggtgtaattttgactttttttatggatgactctgtttaaattttttgatgagatatttatatggacaattatggattttgtatttgtactttctataaatattgatcgagtcgtgccgttcagtattatggtggaaaatttctcgtttccttgacttcgtgtaccatgtaaatctttattattattattattgttaaatgttttgtatatatatatgcctggccggttcggttgttttccgagttgggttttgtcaaaatttcctttttctggtcgttagggatgtgctgataacttatctatcttcctggtgtttggtacaaatttaataaaattatttcatggtcttataactaatataatttctgttcatgacttttatttatttttgggaaataatcctttaagacgattttaaattaacagttttttttttcttcactttctcggaagtagaaaaacaaattgatgatgaatttactcgtaataactacgtaaataaactgctatcatttttcagaaaaataaaaatgataatagctaacctgcattttacaaatgaaacatgccataactgtagtttttttttcctctttccctcctatttacaggttgaagattttgaacttggtgtatagtattagagggaatcaaagtaaagcatgagttcattgactgagaatgcacctgaagaaacttgcaataacaagcccccaggaattaagtttgtggagtacataaaaaggtctccagtttcctttaaaacccaccaagcaattgttctgattgtgacattttt

SEQ ID NO: 252883 - DNA, 1219 bp, Cannabis indica
gggtcccaagtcccagtttgtttgattcaagtttgggacccaatcatagggagggtctgtgtccgagtccgggtcctggtctggttgcagttttctgtatgggttcaggtcctagtactactcttgtttcttggtcccgatctccttttggtttcggttgtagttcaagtcacgggttacgagttcgggtcgattttgggtctctgtttgggttctagtcttgatttgggttaggggagaggtttaggtccgtgtttcggtcggttagggtttgaggttgggtccgggtttggctgccgatccgggtggaaggcccagtctctttctaagatcctagtccagttctagttcaagttttcattttggttcccgaatgtgggtctgggtctgggtatgtgtccaggtcttggtttgagttcgagttagggttcgggttctggtctgattcccaaatcaaaaaaatgactatgtgtcaggtccaagcatcgagtcccggatcccaagtcccgaggtgggtcctaggtcatgatttgggtctcgggcgggtcccggatcttgatccaagtttcgaggcccaagttttggtccaagtttggggtcccaattttggggtttgggtcccgcatctatgtccaggtcctaagtgttgatccgggtccaagtttgtgtttcgattcgtgttcgggtcttgagtcctggtttgagtctaggtcttggtttgcgtttgggtcccactcctagtgtgggtctgagtttcagatccctggtccgagtctggttcttaggtcctgggtccagccccagtttttgggtctgggtctgggtctggctctgggtcccggtctgggtccaggccccggtctttgtttaggtcccgatccgggaccaagtctcagtatgggttctagtctgagtttttgtttaggtttgggtcctgctacttcccaggtctgcgttctagtccttgacctggtccgattcctattctgattttgagatcgggtttggatcccggtctaggtctaggtccgggtctggatacggatccgggtccggatcctggattcaaacacttactacggattccagtttatgtcccaggtcttgggttgcgtcctatgaatgtgtttgtgtccaagttcggggttgtgtccctgtagtcaggtcttgggcttcgggtacaaggttgtgtcccatgtctcaagtatggggtcgagtt

SEQ ID NO: 252884 - DNA, 1367 bp, Cannabis indica
tctatccacaacctgggccaaataagctgatttgcaagagaaacgaccattactttccaaagtccagaaccaactgtcatttccgaggccagcgggagtaccccctgccagaatggctgaaatagtttacttgattcaaagagcctgttaagcgtttggagattccatccaccattttccagaaggagctcagctacctttacctccctattcaaatcccgaccaaatggttgagggataaaaccctttaagtgagcaacccaagggtccacccagatattagtatccctaccatcagccactttcttgcaggcacctttgcagattaaagcttttgatttcactacattcttccagaaccaggagtccgaggctttcggctcacagtcaaggaaagacttacccttaaggtatttggcttcaagtatacgacaacataaggacttatgtcctgtcagaagattccaaccccacttggcaaggaaagcctggttcatctctttagatttccggaagcccaagcctcccaaagacttggggaggcacattttgtcccaggctttaagataaattccgtgatttcctttctccgaaccccaccagaagtcacgcactaaaccatcaatcttagaagcaagcttattggatagtttcgtagtttgcatagcatacagaggaagagataagcccacagacttaataagagtagctcgccccgctttagagagagtcttcaccttccaaccatgcaatttcgtagttaggttatccaaaataaagttaaaatcagcatccttttgtcgagatctgaacagaggaagccccagataattaacattaccctctggcgctcttaaccctagcagctccctgatcctttgcttaatttccctgggcgtgttcttactaaagaaaatagaggatttcattttatttaccctttgtcccgaccaagagcagaacttctcaagacactcccaaaaccccttagcctcctccacattggcttttccaacaagaatgaggtcgtcggcaaagaaaatatgagaaataatagggcctcccctactcagtctgatcccgtttatggtccccgagagttgggcctcttcgagaatccgtgacaacatttccgcagcccaaataaaaacgatagggggacaggggatcaccttgacggaggccgcacgaggggaaaatcttacccaccgggacccccacttaaggcaaatattaagggtaagtagtagaaatgcactgggagtacccaattccggaactcatggggaacgaccaaaacaagtcagaacatggtcaatgaaagtccagctcatcttatcataagctttctattagatcgatcttta

SEQ ID NO: 252885 - DNA, 495 bp, Cannabis indica
gtgagtgagtgtatatatatattattctcttgttatatatatacatagtttatattacatcatgtgttcttatctttttttacatttcttatatataatatatagtgtatatatatatattgtatattatgttgttgtaacatttatttaatctttttgttggtccttgtattgtattacaatagagttgtaatatcttgattttcttctattgtaataaaatctctaacaacaaccacctcataaagagtaggggtgtatctctataagatcacccacttcatcagcaacaaacggcaaactgaggtgatttattcccaaaaggaatgtgatggacttgcatctaaagaggaacatatctaacctgatcaacagctaaagtatccaaatcctcaaggttggcaaacaacataagacaatgatcaaagtgtcaaggttgaccttccaacacccttctacaatcaccgtcacaccaaacctagcgaagaacatacc

SEQ ID NO: 252886 - DNA, 631 bp, Cannabis indica
aataaaactatagcgatgccgaagttattcatacaaaaaaaatatagtaaaaaatatcttaaaatataaaatacaatttttttaatataattttataatttaattattattaaataagatacagccgcacgcaaagcgtggattgtttcctagtttatgaataagagaaaatcacaatacaaatatatatatgtatgcccatgatttaaaaaaaatgaatgaattaatctgatgaaaaaaacgaagtcaagaagtctgattcatgcgtatctaaatcgtgtgccgtttgaagaatgagcatgtattatatatatatttcaattatcaaatatacatatatatatatatataatatgttcaataatgacattttgatatatatatatatatatatataatatgttcaataatgacattaaattgtgtgtgatctatagacacatttctcacatgggtggtgaagaggtgagaaatatgtgacttacacttgtgaatcaaattcgaagacggtctcactgaagagtcaaattaatcttcttgtacattaagtaaaataaaaaacgaagcctgttcacaaagaaaggagcacttcgattgagattaattgctaaatatacatatgactctcaac

SEQ ID NO: 252887 - DNA, 618 bp, Cannabis indica
ttcaaaaccaagacaagacgaacactcatcatcatgaaagcactcaaaacttttcaaatcaaaacaaatatcaacttatattcttctcctcctcatttgttcagtaaaatcagttcatggacaaatttctagtttatgtacattcaaccaatcctttaatattaccaacaacattccagtaattttgatatgctacagttcagtctttcaataaccaaaaagaaataatgaagaagattttaacaatcaagtcataggctcgaaattttgaattaaacagaagaggaaacatgtattatttatcccgtcaattttactctgttttattctttttgaatttatttgcaatataaatcataacccttttttttttacgtttcctcttctaatttagtaaaagcttcaggaatttataaagcatatttttcattgatctttaacaaaaacccagttcagaaaacaattcgaagaacttactgttagactttttatttgggcttacattaaattttattggttttattaaacttgggttgattggatagttctttgctgtattagcccatgttgttggtgatcaattgttaatgggcttagcatctctgagtaaagtctagg

SEQ ID NO: 252888 - DNA, 628 bp, Cannabis indica
cctttttgtcatctttggcttcttattttttttataaccttttagaacagttaatggattcattgaataataataataataataataataataataatttgggcccttgaactttgaaattggcgccatcaactcctaaattaaaattttagagttatactactccatttaccattcattcattttaatctcttaagcgttaaaatagattattactatgtacaaaggtatacacatttcatcattgattcacctacttataattaattaaaataaactatttaaaatatgaaaataattaaaaaatcatctttttttaaaaaaaataaaatatgcatactttattgaatatcactctgaattacatctataagcgtagcagggacattagattccatgtacgtacaatcagcatatgaaacggaagctctagctaggtagtgagctacacgattcgcagattgtttgataaaacataaatcgacatcacttaaacttgaaagcaaagtttaggattatgtaacacaaaaactgttaactcaaacttttatatctccttgttttgatgattaacaaatatttgattattatttgttattaatgatttattgattttgtagcaaaatta

SEQ ID NO: 252889 - DNA, 1064 bp, Cannabis indica
ttggtcatgatatggtgaggatggttcgagatttttttgatcgtggtgttctctcggaggttaatgaaactaatgtggttctcattcccaagaagaagcacccttttgtgttggggaacttgtgatctatttctttgtgtaatgtgttggtcaaagtaattactaaggtgattgctaatagaatgaaagggttgttggatgttgttgtgtctgatactcaaattgcgtttattctgggtcgcctaatctctgacaatatcacggtctcttttgaagtcatgcactacttgaaaagagaaaggagaggtcgagagggtagtatggctcttaagttggatatgagtaaggcatataacatgatggaatggggtcatcttcatgcaattttgcttcaaatgggattcacagagagatgggttgatttgattcttacttgtgtcacttcagtgtcttatactattgtacacggtggtagagagatgggacctatctttccaactcatggcattcgagaaagagatccattttctctatatttatttataatatgtgtcgaggatcttttctcatttattcgagtctatgaatcttggaagtggattataggaatcaaagtttgcaggtaagctcctgttatctctcatatgttttttttttactgatgacagttatatcttttgctaaagctttcccgaaagatgctacaagtagtttgcgagttgcttcgataagttggaggaggctatctaagtcagtcaagttaatttggaaaaatctaatgtcttttttagtgccaatgtggcggggccaactcaattggatctttgcaatattttacaaatggcagaagcttttgaacacattacttatcttggtttacctaataccctgggtcggtctaagtctgtgagtctgggtttcttgaaggatataattcggaaaaaggttcaagattaggatggaaagcttctttcttatgctgagtgttaggttattttaagtattaattttagattaagtttagtatatttttaatttagttttaatcgtgtttggagcatttt

SEQ ID NO: 252890 - DNA, 950 bp, Cannabis indica
ttgtgatgatgagattatgaaaactacaagagctgagagaatagtgatgaggaaatatgatgatgagtatgccatattgctcttattatatttttcttagtacttactattggtattggtgttgtatttatagtttaaggaatcaagatgttttttgataaagaaaaacacgtgctcattaagttttttaattaattaaatctcaccaaacaaaaatcacacatcaacaatattaaaataagatatgagtggtagctaattaatactttcttatattgttattggtttcttcacatcgcttgaaaagctatctcggggtgtctcccaactcgtacccaattgcgtacaaaatatgttactgttgattctcgctgcgcgttttataattctgatgaagaaaccatttttcatattttggttggctgccattttgctcaatcatgttggcataggtcgggtgtggggttacatttttctgcagaatctaccttcgctgattggtttaaagcatttctgtcaggaggtagagtgactttggtggatgagctcttgatgatagcatggggtatttggaaagctcgaaatgagcttctttggcagggtcgttcttcttaggctacggatgtggttcaagtggcaagattgtgtcattctagttggctgttggctcaagagaacaggtttgaaccgctgttgtttgatgctactgttgttggtagcagtgtttgttgggtaaagccgcttgctgggaagctaaagatcaacacggttggggcgatttttgaggcaacacctcaatatggtacgggcttggtcattagggattgtcatggagagttaatcgaagctagttcctctttgcattctagggcttgtcagccggctgtggctaaagtattgagcgtcaaggaggcccttagttggttgaagtcgaagaatttgtccaatgt

SEQ ID NO: 252891 - DNA, 644 bp, Cannabis indica
aagaagtccagtgcagtaagctggcatacagaaagataaaaccatttcataacatacacagaaagatacaaccgtttcatacagaaagggccaatgaaaaaacaataaaatacataattaacaaagaattacctgcagcgtagttggtaagacctacttcaagcccataatgagggagctcatgggcatatgctgcagccaaaacatggtcaccagcaatgctggcagacacaacctgggcaatgatgtccttgttggtctaatatcagagtaaaggataaaaacatatacatagacaaatttaactgttacatcagtatgtcataaaaaaacattacacggcaatgtgtaagccagagctgattcagctttataaacattagatccacctatgcctactaaataggatcatagaaaacttcataaagcttaagatacaataataagaaaaacaagtacgagatggcaatcattttaatttagtgattttactgtatagaaatagaaatgcacatcacagttttttaatgcaatcacatggttgtaaagcttacacaagttaaaacaataacaactgcaaatagtaagaaatccaaagatgaaaaaaaaaacaataggctgcaaataaaggatacgaatcggac

SEQ ID NO: 252892 - DNA, 543 bp, Cannabis indica
tgctgattttttatccaaccgtctgaatcttaaagtattactcatgcaattttctactgaatggtattctcttcagctggagcaatttgcaaccatcctttggagtatttggaatgagggaaacaaagaaaggcatggtaccaaaccaaaaccagcatatgtgcttctctactttgctctttgttattttgatgaataccatgttgctgggaaattcacgaacaaagcaagttccaataacctttcggtagatttgtctaatgcacaaactggttcatgattgaaccccccttcaggccgtctgaaactatactgatgctgcagttgacacaatgaatcaaaaaatatggttttggtgtaatcctaagaaattgtgcgagaaatatagttgctgccatgtcgattccgtttcaaggatgctttaaacttgaagttatgaaagctttgacacttatgaatagtttgtaatggctccaagagcttcaactacatgttcactatattgagatagattctcttttgatagtcaaaggattgcattct

SEQ ID NO: 252893 - DNA, 1579 bp, Cannabis indica
ttattaaactctagggggtgttttatgaattgtatatgaaatatgttattgttgtaatttttgctcagtgacaacggaaaatgacgatgaatggatagcttgatcacgatgggtaagtttagaaccttatttcttagcgagaaaatggattggagaaaataaaataccaagtttagacggggttatagaatttgaccatgttacccctagtttttcaaaaatacctaagttgtaggctaaggggcatttttgtaattttccaagtgcgtgacttggtggctgcctagggtgtggacacctggccattttaattcagaaagagatcaaattagtttatctcttttcatttgaagaaaatagagaaaaataaggaaaaagcaaaaacttcaagattaatttctttatttcccttctctctcttcgaaccagccaaaaacaaggggagttgctgctgacctttggtgttttcagcaagaaattcaagtgggattcaagctaaggtaaccctagaatccatagacttgtgtttttgaagcttttactttggtttgattaggtgattttggaaattaggggctattagggtttagtttttgtgtggttcgaattatagggttcatttgagttgaatttagtttctagcagttggttttgatgtttggtttaggttttgtgcaagtttgagcatagaaaccttaactttgatctttaatggcatgtttgtttatattgagtttttctgggaaataatggttggattatgttgtatatgcattgtataggtgttctggaaagtatggttgcatttggttggggattgagcaagaaatagaaatttttgggtgaactggtgtgaatcggctagccggttttggcaaggttcctgaatgctccattttctcaattctcatccatttcaatgtcgtagttgggtgtttccctatttcctgagttagagtaatccatagagagtataacagaacctagggttgtgggtttgagtttcccggattagggctttaatcatgtgatttactcagtttcattatgtgattagggcatcgatctagcacgagactctccgttcaagtcggccatcacacttgaatctggaaagaaggtaagaatagtgtataatgtgtaatatgaatattaacttgtatatatatgttaagtgtatatgcatgcttatgtgttagttacactaccaacacttgtacagttatggtacagagtgcattggtataatgaatattgttagagattacattacagtgataccgacagaagtacgggaaagtacagggtgtttgtgatatatcacgcagtggtactcagggtacgaaacaaaccctaccaacacttatatagcaaggtacgtagtgtatgtggtattgtggttgtaccctagtatgaaacgttcttactcatctattaagccttgtaaataggtgtatgggcacctagatacaagtcggtattatatgatatgttatatgcttttcttactgagtttatcgactcacagttgtgcttccatgtgtaggtaatggaaatgcaaaagctgaacaggagtgag

SEQ ID NO: 252894 - DNA, 798 bp, Cannabis indica
gcataaaacccaacaatttgttcttgggtacttttccaaaagatctcataccaatgaagatattgtccattattatatacccataatatttctcatttttagccaatgtaggactttggttgcacacccaacattcatctcttcaaacaaaggaccaccttgcctcccgtcaaatgatcttccattcatccactctccaccaactagtgtatacttccttccaatgtgttggaccacaccccttacatggatcacaaccactacctcaagagttcttactctttctcatgccaactcatctatccagaacgactgtctgtgtaaagaccgcttagttttaatataaaaattagcatataattaggacttaattatgaaattggattattaattatgatttatgaatttatggtgatttatttgaattctaggtgtgttatttatgctatacataaaattctatgtttttcatgttttatgtccggcaacataggaatgcagcgtttggccaatagaatcacattgtagtatttaatattagcagggcgacttagttagacattgaaaatgtcaggaatattacaaggtttttgaatgaccaaaatacccttaggtggtaatgttaccttttgacttaggcaaggataaaatggtatttttgccttttatctcttttgtcttttagtaagactatattaagtagtgtgtgcttattagaaaaaaataattcattttattcaaaattagaaacaattaaagaaaatacataaacaccttcttcttattctctctctctct

SEQ ID NO: 252895 - DNA, 921 bp, Cannabis indica
aagttactcaagtccttatatggactcaaatgaagagcctggtttgacaaattaaaaggcactctgctaacatggaattttagaatctcgaaagttgttacacccttgttcttctacatcagcaatgacattgtcatcattgttttgatctatggtgataacattatagtcacagggaacaacaaggcaaatctggacaggtttattggaaaacttaaaaagttttttactttcaaagatcttggggcactttatttctttcttggtattgatgttgctagaactaaaactggtctttatctcactcaaactaaatacattgaagatctgtgggagaagaacaatttgcagcatctgaaaccatgtcacactcctatagctactggtaaatctttgtctctctctgatggcaagctaatggaaaatccaaccacctagagaagtcttattggagctttacagtatttgaatcacaccagacctgacatcagctctgcagttaactctctaagtcagtctcttaaagctccaacaacttcacattggagtgcagctaaaagaatcttaattaagatacctcaaaggtaccagcactcaaggcctacatatcagctgcagtgggagattcaatcttactggctactctgatgcatattaggccagcaatgttgatgacagaagatctgttggtggatactgtgtctatcttggagagtcacttgtgtcttggtcctctaagaaacaaggagttgtatcaagatccaacacaaagtctaaatacagagcacttgctcatgttagtgttgaaataacctagattgagtctttgctcaaagaaatcaagtttcctctgcctgtttttccaagcacttggtgtgataatatgagtgcaagtgctttggcctcaaatccagtttatca

SEQ ID NO: 252896 - DNA, 2162 bp, Cannabis indica
acgtaaattttttcctctcatatatttttgagaaatatactcccaccattataccttctcctttaactgtcgtacataatacagaaacaaaacgtttctctttttgactctcgaaccaaaactttctctttcttttccataaacaaaaaaaaaacaaaattcattctctccctttggatctagagagattttggctatggaatatcgtcaagaatttgcttaccgactcagtagcctacaaaggaagaaagaattattcaaaatagatagagaggaagaagcagagtcttccaatgtcgtaactgatgaagatcaccgccagatactaaccaaactggaaaatttgaaggttttgaagcgactaagtttggaactgagtttgttcaaagagagaatcaaaattaaagaagtaaaggtcttcaagcatactttacttgatgatttagatactgccaaatctaggtcaaaggtcttttacggcttcaacaatgttgatttccacaagagattgtacgagtacatgaagccatggacagaaaagatcatcaaagaaaaaggctcagggaagaagatgactttattggattcggcttcacttcttaatccattcgaggaagaagataggtcagctttcgattcgttaaaatggacaatacacgtcgactttggatgcaagatctctacattcattgtctcttatttcttgatgtttttggattggaaggatgaaccgaaagagatgaggggaagggcgaacatgctcgaagaaacgattcgttgcgaaagcttggatgaagatggaggcattttgatcaccagtaagctcctttctttgattacgtactttaaggaagaagatatattcatgggcaagaaagggaagagtgttgacaatgtttgtttcgatcaaagagatcatgttttctttggttcattcttcaacactgttcactttctggtgattgttacaagttttcctttcttttctgtgaagttgggtaatgaggatttaatggagcttaaagaatttcttatagatcattttgttgagaagatgaaggatgtgtgtattatgatcaagaatgatatcgctgagttaatggagagtgatcgagtctacagagatcaaattatggagaggaggaggacattcatggagtttttacgccacaagaatagggaattgtggaaatgattattagctagcttttctctataattaattttactatattaattcttcttcttcttctttttttcaagtgtttctgatggtcatctactagacttgttagattgatcaatagtcgaaagcttcaagttttttcatgtatatgatcctaacttctaataaaaaaattacgtatcattaacatttttatttatttactttttttcttgattattaaaaatgtgtaaattatttaggctctttccttcatttccaagaattaatacataattgaagtgattttattttttaaaaaaaaattgattcttaattaaaaaattaaaaagtgaaaacaatttaataaaacatgactttgaaaaatattttacttttataattttaaaaataaaaaactcattaaaaaagtgttactaaaccccacctatattactatatattgatgaatttttcctctctctccgatgaatttccaccaaaaccctaaccctaatatgactcatatattccaatttaattagcgtaggaaattggtaaaatctcggccagaagttcatcgaagggtaaggagaagtagaaatcatcgactcgtctctaagataacaatctcttggaagtattaaatttctgcaaattttagataagtttctttccctttaatttttctacatgttactttattttgttaataaggttttcaactttttaaagaacataattattatatcagttgttatttgttaaaaattatatcagtttttggtcttgagctagataatattttttcctcctattttagcccttctttttctgggaattgacacctagattcatgttttgatttatgtcactcattcttgttgaaaagaactcagaaaaatgtcattatattgtgcagttattgtaaagtccttttttggcaagttagttgacaaaatattttttcttttatggtaagattcttgtgcattca

SEQ ID NO: 252897 - DNA, 881 bp, Cannabis indica
gggacccgagagtgtgatccagatctggactcggggcttggaactgacccgtaatcactgtttggatttgggacccacacctagactcggacccaaacccaaacctatacctagacccgtaccccagacctgggtccaagtctgagtctgggtttgagttggggaactagaatcagactaggaccttagacccagacacagatcgagacgcgaagcaaaatcaaaactcaaatcgggactcgggacgcgaacttgaacccagacacggacatggaccaagacccagacttagaacttggacagagattggagcctcaaacctggacgtaggaccagacctagattggggacccaaactaaaaattagaacctgaatcgagacccaggattgggattcagacccaagacccgaccccgctctcggtcctagacccagacccaaacacggactgggacgcaggatccgaatcgaaacgagaccgagacccaagattgggatgcggatcttgacccacgacctaggtttggacccaacccgtagtcggtgtctaggtcttggaatcgtaccaggaccctaacctagaaaaatttctagactaggacccaaacccacactcggacccgagacccaaaattgaaacaagaacctgaataaggaccttggaacaggaattagacctgcacccaaaactagctctagacgcgaacccagaccaaacttgcgccaggacctgcgacccaggacccgtgactcgagacctggaccagattccaaacccgtacaagaacccaaacccaaacccagacccaaactcaaaccaagacccgaacccaaacactgactgaaacctggaccatgaccctgttgggttttatgccct

SEQ ID NO: 252898 - DNA, 1182 bp, Cannabis indica
ctttgtcaaaatatctcgtgattcgatgttgataagctgcattggttatttgcgaatcattacgtttttcttcaaaagtaagtccaaggacaaattcaaaagttcttggttttcttcttgattaaagaattttacgcctgtgggtcgcaatgttaacttctactggtaacattgcttctgagccgaatgccaacgaaaatggtgtgtgtcacgccgctattttctctacagttctttgggcccaaagaacctatggtagctcgtctacccatcttcctttagcagcgtctaccttcttcttgatagtatcttttaaggttttattaacagcttctacttgtctgtttgcttgaggtctcgatactaatgagaagcttttaataattttattcctctcacaaactcagtgaacaattcaccatcaaattgagttctattatcagatactattttgattaggattccaaacctgcaaatgatgcttttgataacgaagtcgaggacttttttgcaagttatggaaactagaggttcagcttctgtccactttgtgaagaagtcgactgccaccactacatatttcactcctcctcgccctgtgggtaatgccccaatcagatcaatgccccatattgtaaatgggtatggcgaggtcatcattctcaaatatgttggtggtacgcgaggtatatgtgaaaacctttggcatttgtcgcatctcttaacaaattcacgtgtgtctttgttgattgttggctagtagtatctttgacgaatgattttctttgataggctttgccaacttgcatggtctccacagaagccttcatgaatttctttaattatttcattggcttatacgggtaacacacaccgtaagagaggcatggaataactcctcctgtataatttgccttcaactattatatagcgaggtattgaatacaagaatttacgtgccttagttttttctgcaggaagttctccgctgagtagatacttgactataggtgtcatccatgttgatgaagtatttatcattttgacttcttccttttcacatttacttgggtcgctcaagacttcaactggtatcaaattcaatctgtcgagatcatactgggatgctagttttgctaatgcattgatattagagttttgttgtaataccctaagattaag

SEQ ID NO: 252899 - DNA, 538 bp, Cannabis indica
ttatgtaattataaatagagaaagttacactgagaaatagacgaaaaaattattagagaaaaatgcttgagagttgtatcagaaatctaataagattgactcgtgtactatgccgaattttaactgcaaaaccacgtaaaaacctttgtgttctaatcttttctttaccagtttttattttctgtgcaagtttatcactactttagctcaaatatagttaacgaaaatctgcgttaacaacatgtctcaaaaacactatctaactactttggttgaatatttaaaaataaatgtaaataggcgttaatttatgaagaatgataaacatagtatatgagactcacaactaattatacataaatatctttcatcaattaacacactactcaaaaaaaagctttaatcattgttgagaatcatggggttccagctcaaaaccaattggcaatgagtggagtagtccatgttcttatatatggctcaatacttttacatttaatccatgtgggacaatgttctccaatatccccctcaagat

SEQ ID NO: 252900 - DNA, 520 bp, Cannabis indica
ttatattctgtttaagaatattttgcttgcttattacatatatatatagcggatataataagtatagttcatattatattagtgcaatgttataaatggggaaacaaaatatccaaatggaactgtatgtattctaaaatcgtaaccatacacgtttcacaactaaaaaataggaaccaatcaagaactgccacgtcaaataaaccaacatggttagtataagccagtcactaccggccacgtacgtatttatatacttaaaatggttagttgcttgatagctccacaaaggtattaactttgccttaaaagccaaaaacaacactgttttaattgtgaaaatgtaaaagtttcatgcatattaaaataccaaaagcacacgtacatacacgtacccctccaattttttttctttttcccttgatcatattaatgaaacaaagaccacaaatatatataagttattacaataaaaattaataataaatgcatgatgaataattagttaattaattaatta

SEQ ID NO: 252901 - DNA, 1443 bp, Cannabis indica
gggtatactaattattaggtaataatctagtaaataatattacattatatttaaattaattatagtaattataaaaaaaaaataatagaaaaataatatagtttgataattaatttttgaaatgaaatttttagtaattatgtaatgtaattattacacttcattctcatgtaaaattgttgggaaacaatcgattctactgatgctgcataccatgcatgattgcacactcgaactgaatacagttctttgaaccagaaagaaaatgagagagagagagggagttgggaaaaatagtagtgtttctattgtattgattattatcaattaatgaatacaagttacatcattaaagggtaaaggttcagtatatatagcttgtccaaaaataggaaaaagctaacggaaactaactaacttctactaacatgctaactaaataaaccgaccatttattaacaatttccaccttggttgatttattcagtgtatacaaaagaatgtatttgagattaaaacaacagtaaacagaaaattacagatcacaagtggcaatgatcctaagtaaattcagacaatgtctgaatttgacagtggtgagtggcttggtgagtatgtatgaggcattgtcctctgttgaaactttcttgagcttcacttttccctctgctatgacatctctgatgaagtggagccgcacatcaatgtgcttggttctctcatgatacatctggtttttagataagtgcagagcactttgactgtcacagagtatttcgatgcacctttattctagactaagttctctgataattcctttaagccatatggcttctttcactgcttcagtacaaacaatatattttgcctcagtagtggatagggcaacaatgttttgaagattttctttccaactaactgtgcagttacccaattgaaaaacccagcccgattgtgatcttcttgtgtccatatcacctgcataatcagaatctacatagcctttgacctctggtgcctaagagtttgaaccatacatcagtcccatgtcatatgtgcctttcaaataccttaacacccacttagctgccttctagtgctctatccctggatttcccataaacttgcttatgacacttactgcttggctcaaatcaggtctagtgcacaccatgatgtacatcaggctgtctaccaagttggagtaggatatgttcttcatgtagttaaggtcagagtctgtagtaggtgcttgtgagtgagataactttgtcatgtgtgtcataggtgtgctgactgatttaacctctaagaattcaaacttctgcagcactcttgaaatgtagtccttttgagatagcatcagcctctttccctgcctatctatgagtatctcaatgcctaaaatcttcttggcatgcccgagatccttcatttcaaatt

SEQ ID NO: 252902 - DNA, 1021 bp, Cannabis indica
ggtggctaataatgagcgtcttacaacaccatttactcacgaggatatttaccagtctgttatggaaattggcggcactaaagctccgggaccacatggatatcatgcttcatttttttttttatagagattttaggatattgtgggtcaaagggtcaaccaagtatgtcttgcaattttaaatgacggtacttcggtgcagcagtttaataagtcaaatgtggtgttgatacctcgttgctattcatgatgcggagaagaatttgaaacttatgagcattctcttttttcctactctgatttgattcctgtgtggcagtggttggaggtgtggttggtcatccgtcgttgtgtacatggaccaatgcaggaaattctcatatttctctttgataagctatcttgtgaggcttttgaattgatgatgacaactctttggttgctttggtacgatcgaaactcagtattgtttggtaataaaaatgagattagatgttattccagatttagcccatagtaacctgtcagagtttaaggagtatggtcaacagggtcttcttttgggactcggccttgccaacccagttgtaaacggacctactttatggataccacctcttcctaattcctttgctctaatgattgatgcttcagtggtttcagggaagggctttgttggatttgggggagtggttccagggaagggctttgttggatttgggggagtggttccagggaagggctttgttggattgggggactgatgcttcggtggttgcaggtgtggtttggttggcgtggtcctatggaatggtaggtgatttttctatcaatgtggcggagctgcttgctatttgtctggacctaactctcgcgcatcattatagttttagtatctccattattaataatgattctacagtagcaattggttggattaataaacttcatttgaattttagtttgtaagtcaattttattagatattttttttattagttgttgttggtggtagttcttg

SEQ ID NO: 252903 - DNA, 546 bp, Cannabis indica
ccagcagtttcgtgtgtggcagccgatgcaagaactgtgaaatgggttcctcctactgaatcaaatctaaaaatgaatgtcgatgcaacacttgattcttcgaggaatgaaataggtattggtgtgattatacgggattcctctggtcgagttatagcagcaatgtccaagcctgttgttggcaattttaaatcgcaagaaatggaagccaaagctatgttttggggtcttcaatgggctaaacaattgcagctacaacctcactgtgtggaaactgattgcttgatgttagttcatgctcttcaaggaaaacagtcacaactctctagctttcatgatttagttgaagatatttcatatcatttatcctctttctctaacgcttgtatatctcatgttagacgggatgctaaccaagccgctcacggcctggcaaaacaagctttacagttggataatgattgtatatggatagaagaaattccttctaccattttctctcttgttgtaaatgacactctttgatttataataacagctttttct

SEQ ID NO: 252904 - DNA, 1817 bp, Cannabis indica
tcgcatgcctcatcggttctagtctgcgaaatgcgactcgattttcattggtgaggtagatgtttttgcgagtctcatttaatacagtatacactgaataaataggtacatacttctcatgcttcttttgtttcttcttatccttggatgagtctcttgagtcatccttccacttcgtatttgatccattgggattttctaccttcgtagtcacagtggtcgctgttgttgtgctagtgctcggtttatctcccgagcctgactttaatagctttattttattccgtgcttcttctttttacacaaaatttatgctctttcattaaattcattgatattccttataggatgcccttccaaatcatcccataattctccccctacagtggataaactagttgtaattctagcctgaagggttattaattgaatgctatcattcaaatttctaactttaactgcacttgtactgaagcaactcaagtatgctttaagggattctcctggttgttgcttgatgttagtcaatgaggatgcttctagttgatgatctctcgcagcttgaaactgctttttgaaatccttcgacaattgcttgtggaatttgtcaaaccaactacttgtggctcatgtcaatgaagtcaaaaacaatatgcatcgcaagttttttgaaacatttcttgctcgcattatggtgttaaaattgtttaagtgggcgacaagatcagtggttccgtcatattgcgagacatgcagatttttaaatccttgaggaatttgtgaattaaggatatcagggtaaaacggttcagtttcttcatctgagtcatatcctggtagttttttatattccccatcttgatatttcctaaatttttcctccaatttgttactcgcaactgaatgggatccacaggttgttgatttgtgttttgatgaagttgattaggcaaatcagatgcattttgattcaagtgctcacaggtctggctacctttgatttaatcgctcatggagatcaggttcacgatgcctctgttaataattatttacggatcttgtccctgattaactttcaaactggtaacaacgcgagttactcatactttcttggtcagtaaaataacgtcgagatctattcccatctcgcatttgtctgttagtttcagtcgacctactatgcccgtaggatcgtgactatcctgtactcaaacttgcttcacgtgtctcctcttgcattggtcttcttctctaatagagatttgaaacacgtcccctacttaggtaagtgtgtgtattctctctgtccatgcgagaaggcctttgtggatgccttggggatcgaccgaatccaggttgatttctaggatttctcccaccattacgagggatttcctagtttcctggtcgtggttgtcttgcatctacattcatgcgagatgactctggtatatgagtttgttcatttccttggtttgtaaacccatgggaagttcttggagcatcacgtcgatgctcttgatttcttgtattaattgggttgggtggattttccctttccattgggatatctctcgcattccaaggttgttcttcctgagcatttatgggattccctttgttattctcttgcctcctagtcctggaacctcgaggtcttccttgtggtctccttacagatggatcaggttgagtttgaggaatggttccctgtgctgccctagccaccgcgacttctcgctctaactcagcgttttgtcagtttgattaagccaggcattgtcgaagtttcttgttttgtagttccactattggga

SEQ ID NO: 252905 - DNA, 894 bp, Cannabis indica
ttaagtttacttaaaaaatctaaattattcttaaaaatatattctgaaaatttattttagttataaacacgtaatttaaaaaatcaaaccaaaattattgaaaattcaataaattatttaaataaaataagatttttttaaagaaaaattaaacttatttatatttataaacttatatcttaaaaaataattaaaaattcaataaaattatcaaattattttgaaataaagttagaaattaaactaaaaaaaaatattatgtttacttaaaaaaatttagatttttagagaaaaaaaatagagtcaacttgttcccctaaaatttatttttacaaaaattaaaattttaatatatttttttctaataatttttaaaattgcttgattagttttaaaattttaatttttttctctaatttctttaattattcaaaatgatttttttaaagatctaaattaatattttaagttttaccaaaaaaatgttaaatctttctcatttttattttgagggggtaaaatttgatagttgtcaaagtttatgcggtaaaattactaatttacaaaaataggtcagcatttaaacgaaataatgagacgaaacctaacataaggactaaaaatctataagtgtaaaagttcaaagataatttttaacaaactgcttattttaaaagataaaatcaatattgtcgaaagttcatgaagcacaattactaattattctaaaatataatataagggagcaccaaattataaaaaggagtatttgtttattaaaatggtaaaggatattcccttgtacatgtcaaattttgcaatagattgataaaatgaagttttaacttttgttactatattagttaacaaaaaaaaaaaaaaaactttagttac

SEQ ID NO: 252906 - DNA, 611 bp, Cannabis indica
catatatatattaaaaaaaaagcttagtatgggataactactagtcaactatcggtatgactctatgaaatactttatggtaaaaaatgtagatcacatatctattgggatgaaatatctaatgaccgcatacttagaatatttgatgattatactttattatatatgttgtggaccctatttttaagaaataagcattagggttataatttcttaattttggagattttattaaactctagaggtattatatatgtcatatgtgaaatttatcttttttataatttttgctcggtaacgatgaaaaatgcgacggatggccgatagagtcacataggttagtttagaaccttttatcaagtgtgtccgtcattatttatatttagaatattgggtttaggcgggattatttttttgagccattttactcctaagtcttagggtttcttaacctttaagtaagagacaattttggaattacccaagaggttttaaatttgtcttatagtgggattgtaaataaatttatttagtttatttaagctcaagttaatgaattaggataaacattaagaaaataaagcatacacatatagctctctctctctctc

SEQ ID NO: 252907 - DNA, 937 bp, Cannabis indica
aaaaccagtggtactttttctgtcatttggatcggatgcccaattagcatcacagtaagcaaccatatcatgtgaaaaaagttttgtgagatgaagaccaaactcaagtgccacttatgtatatgagcattcgtttgatagccatccaatgtgttctcagtggtatttacataaactggtagaccttgttcacattgaaggacaactctggtcttgtgatggtgaggtattgtaatgctccaaaaattacttgatacatctaaacattttctagtgacagatcctccttatgagttgacaaacgaagctcacttgtcataagaattggggcaggtttagctccagttatctgtgctttttcaagtaggtctccaccatatattggcttgacacagatgaagatcatttattttcttaacttcaattcccaaaaaatagttgagaggtcccaaatctttaagagagaattgacagttaaggttaagaatgagagttaggatcactccctgttattaatatgtcgtctacataaactaagacaagtattgtagatttcggagagtgattaataaacggtgagtgatagattttgataatgtgaatccaatagaaaacaaactatgttgtagccttttaaataatgccctaggagattgcttaagcccatagagagtcttgtttaacttgcatacaagatgagtttgtgcaggaacttcaaaacctagtagttgtgtcatatacacttcctcctgcaattctccattgagaaatacattattgacatcatgttgcctcattatccacccttttgataaggcaaggacccataccactcaaatagttactatttcaaccaatagactgaatgtctcattcaagtcaaaccaggctactgatggaaacccttagcaacaaatcttccttgtactgtgaactg

SEQ ID NO: 252908 - DNA, 528 bp, Cannabis indica
gtgatagatagttaataattcgcctttaacatctatgcctgtaaccgcgacataacggctatataagaaagcagataaggcctcgatacgagtaatccgtcgcggcggacactttgatttttcctcgtatttggctctgagtgcctccaccttacgagcatcgaacgcgaaaaactttgctaagtttgtgttcttctttggtagagcgaaagttggatcgtaattaccaatattcttaggtgggaaaagtgatgaagagatgaaagtaggttttattaccttattctcttcaccacgagaaatggccatccagctttttgtaaactctaagcatgataaagcgtctgcgattcgatgcgaaatgcagacgccaatggcgattccgccacaaggaaagatgttgagttggacaccaaaaggtagctctgcgcattcgtccaggggaaatggaagaagatcattgagttcaacaggaatagggttgttaagaacgtccgagagttgcgtctttagtactcgagcttcgaa

SEQ ID NO: 252909 - DNA, 501 bp, Cannabis indica
caggaatccctatagaagccgccggaggggcttccttggccgccgccgccatcactactgcttccttctccgagctccgaccggattcctactgctcgaaatccaagaacaggccatccggattcctttcaccttctccagtggctcctcaccatcaccaaaaatatctccaactccattggctcctcaccatcaccatctaacttttctaaatccccaactcaacagaataataagccccaaaatctaaaccccaggcgacatccacagcagccctccgttatcgaaatcaagcatgctatcggcgctggaagattctgcgatgccaatcccaagcatgtgattttttaggtgagtttatgttgtggattttttaagtgaagaaaatgaaattcaatgtgacgaggatgaattttccatgggtgtttgaacatccattacagaagaagattcgagagagtgctaagagcattagtgatcaaatcgaaagaaaatttcgtt

SEQ ID NO: 252910 - DNA, 664 bp, Cannabis indica
aaaaaataaataaatagattttaagagatttataaactaaaataaaaaattaaaaaatgagagaattaaggagagagcaaatatgactatttaggagggattttagagttttatgtcaccgcctcatacttctcatttatatatatatatatagataaattgatatattgatacactacgctacaataaaaataatacttttttaacaaaataaaattcaataaaataataatttattttacaagtactttgtatttgatttattcatcagactaatcagaaagttattaaagtcctctaagaaaatagtgttataaggcacaagtaatatttagtatcatttaaaggtaacgtcttgcgataattaacaatattttataaaaaatattatattaaattatatgagatgtaatatttaattataccaataataatattacatgttctagaatattaggacttttagcttttcttaagagaatactagtttttacgaagataaaaagtagttgaaatgataagtaacacaattaaaaaaccatacatttttagccaatattacaaatgaagtattggtcttgttctaaccaaaacaagacaatatcatattaatttctttaatgagtactaacaatttttctacttcatattttaacaagtaatt

SEQ ID NO: 252911 - DNA, 745 bp, Cannabis indica
tccggataatatgggggtagtaggaactgagcgggtcaactgtgccactttcatgtttcaagagcatgcccgtacctagtgggatttagtaggtcagtcttaagacctcagtacggtaacctgggaaaaatttaagaatttatttgaagaaaagttctacaacattgccatccgtataactcaaatggaggatttcctgaaattagttcaagggtgataagtcagtggctaatatacactggagtctgattgcttgtctaagtttgctggcaaaatggtaccagcagatttcacccaaaaacaaaattatataactgggttggatgccaggattagtcgggatttaaagattaccattgatcatgacactttgtataagaaagtggtagagagagcactgattgccaaagagggtaaacaacaaattaagaagcagactactatggatgttggtacgacatcaattccaagtgctagtggtaacttcaataaggggactggtggtggtattccttatcaaaagagaaagactgagactttcagatcatccagatcgaacaagagattttggggtaataaaggtggccggtcaaggtggtggtgatacattcatgtcatacccaaagtgtcccaaatgtaagaaacactatcagggtgaatgtatggtgggccactttatcagagactgtcctaaagctaagaaggaggaacccaagaaaaacaataaccaaaatccaagatgtct

SEQ ID NO: 252912 - DNA, 559 bp, Cannabis indica
aactctcaagcaaaatcacaaatatagagataggtttagagagaaagagaggggtcggtttgggtagagcaaaccaaaaaattaatcccttattttgcaaataattctattttactacaaatgatacaaataggccaaattactataatgtccctagagccatataacatacatatgagcattcaagggaaattatatcatttccacacacaaaaatatgctcaaataaatttcagattaatcatatataaataaaataccaataaactatccaaaactgtatttcggccctaacccggttcaacccaaaatacccagttgtgactatacagcgccaacttgtcagaacacacctgaaaaagaactaaacaagcataatatataataatatagttcaatagcacatcataatataaatttctcagttttatcattctcgggttaaaattactaaaatgcatctgactcaccaacgaggtcttaagttcatgaatcgtagaggtctgtcccaaccctctacagttctaagccaccattctcatggctcctgtggaggagg

SEQ ID NO: 252913 - DNA, 778 bp, Cannabis indica
acccattatgtctcttatactataaaaaattactacttttagtgacaattttttagtcacaataaaatgttacttgtgaccaaaatataaactttaaatacaagttgttactaatttagttttagtcacaataagtattgtgattaaaaatacatttagtcacaacaaattgtaatttttgtgactaatactttttgccacggatttttagtcacaatataagaataataatttataattagtctcaattttttttacttttaatcacaagttttgttgactaaaagtaaaaaaattttgttgtgtaattaaatattctctctaaataggagcaccaatggtagaatagtaccttgttaatgccacggaattcagactcgcgttcgattctcaagtggtgcaaaaagatattatttttaaattactgagattgttgcatttaaaaacttatattcaattccgttcaattctattaatatgatgagtataaaatcatactaccaaatagtactctatcaactttcatccacatgttgattagtaaaattagaaggtaatttttgaattaactatctcaactgcatgaaaagtttagaacacaacaaatcttaattaaatcactaattggtcttaaaatatataagtaggtatgagagttgatataattgcaaaagtaaaggtacaagttataatcctcagtgttgtccttgtcaatataaatatatagagaaggtaatgtataaatatttatataaataattatatatatttataataa

SEQ ID NO: 252914 - DNA, 1321 bp, Cannabis indica
tcattaatggacgggaagcaaatcgttgcttgcaaaaggaaataaatgttaatgatgactatcataaatgcagctcacatgcccaaagcacgtgccatgaaatcgatgagtcaaccagaggcatcaaacaagcctcatttactctacaccaaacaaggcttgggggtaaatattgcccgtaattttgcccaaaatacatggaccggtataaagacgacacgtggagctgagaggctcagctcctaaggaaatcatccaagtcttgaacaatagaagagtgtctctgggatgatgactcccggagaagatatgagaatgacctctatgcttccggaggccaaggctgtattaaggcagctccgggaggtactgaaccctattgagcaatcacctcgcatttaatgtcgcatggggaaaacgtattggaaccaccataaacaatatgactgacggcgtaacccctctgttgcagctattacgctgtgattaatgaggctagtgacggctactttatgagggatcacatcaatcaagaagggataaaagattatatccacctaacccctaagatacctacggtataggtcatgtatttcttattttgtatctactaggaatatgtgcccctattgaacctgcacggaaagacaagtgattcaattctagggatcccccagaaaaacactataaataccccacaaacacactgagacaggggtcgagaattctgggttcaaaggaataaaagagagaaaataggagagatatccaccaagaatattctctgtaataaatactctcataaataacaaggactcgtggactaaggctcgttaatgccccaaccacgtaaaaattccatgcattaaactccttacagctttcttatacatattatttaattggttgccgaaaacctcggtcaataatttctattattatattaaaactatttgtattctttaaactaaaaaaaaaactatttacattatttatgtggcgcttatcatttatgtttatattaatgtcctattattataataaaattatttgtattctttaactaaaaaaaagcctatttgtattcttatataagtcttatcatttatatgtatattaatattctattattatattaaaactatttgtattttctaattgaaaaaaaattattgtattcttccattataaaaaacttatatatagtgtttaaatccaaattaaactttataggatttttgttatgttaatttcttttccttctaatttttgatgttgatctatttttattactttggcaatatatatttacttttttgaa

SEQ ID NO: 252915 - DNA, 541 bp, Cannabis indica
tattatcacttttttttattattttattcaattattatatgtttacttcattatatttatcttatattaaagttcttaaaattaatttaaactataaccttttttagcttgaaatataaataatatattttatttttttaaatttaattacttaaattctagaaactaacaataacaattatataaaaaaaaaaagaacggtttggacgggttaacccgaccaaaccgacaaaatcattgggcgggttgaactttttctaaattttcattgggcgggttacgattaaatatttgcaacccgatatttatattgggttaataaaaatatgctataacccgaccaaaccgactgacgtacacccctagttatggtattgaatttgtgatgcatgttcttggtttttggggttgtcttgagcatgcttacaactttaaattcataaatttgtatgggttaggtttggacagaaaattagaggatttaattaatgtaattttctgttgttgagctccgaaatttattgtttgaagttggagttca

SEQ ID NO: 252916 - DNA, 669 bp, Cannabis indica
ggttcggggcccaaaatacatttctttagtaaatcccagtttagcgggattaacatatgtttagtcgcagttcgtggcattcccattgttagggcattacaatttagtatcagagcgctaaggtttttaaatttcttgtagactgactgaacatgtacaatcatctttaaagacaagcttgactcgtggtgcagtaagtattgagagtaaatgcttaactacttttatgatttaatgtttactgcttttcgttataggcagcatatgaacatctagaaaatgaaatgttatatgaaaatcatgattagtaaggggaccggcggtggtaactcagaccacaaggggaaggctgaggcttttgaaacaccgagagagtaatagaaagttttgtggaaatagaggtggttgtcaaggtcgcatgtcttcatttaaaacttacctggagtgttccaaatgtaaaaagcaccatcagggtgagtgccaagccaaaacgtgtttctagtgcggtatggtgggccattttattagagactattcacaatccaagaaggaagaatcgaagaagaacaacaatcagaacccagggtgtttgttcactatgacccaggctgatgctgatactagtccatcaatggtaacatgtcacttgtctataaacggttgttctta

SEQ ID NO: 252917 - DNA, 785 bp, Cannabis indica
gatagagatacaattccatgcacggagcttgagaatcaccaaatttggttaaaatgaaaggtgaaaagataaatgttttgtacgttctctaaggggagactgtcccaactgaagaagcaagtatggtgaaagggctaaaatcagatatgcaactgtgccatcatagacggacatatcagtgaataaggtctcaaaaaactgcacaaaaagggtataattgaaaaattaaattcttgtgctttaccatttcgtgaagcttatgttttaaggaaaaaacataaactgaactttactccggcaaggcacacaactaaaaagatacttgaatatgtgcacgctaatctttgggggccatacaaggtgcctactcactccgatatcaatattttctttcaatagtacttaatgactatagtaggtgtgtttggacctatttgctagcaactaaggatgagtgcctggaatagtttagaatttggaaaaatcaagtggaaaactaatcagatcttaaaattaagaacattaggacggataatggattggagtttattaactctaaatttgacaggttgtgtcaagaatttagaatcactaggcatagagccgtagtgaagaccccagagcaaaatagtgttgctgaaaggatgaaccgaaccctattaaacaaagatagatgtttactgttcagttctagattagacaaacctatttgggggaggctctagcaacaacaacctatcttataaatgaaagcccaaatagtgtgatagacttaaaaacacctt

SEQ ID NO: 252918 - DNA, 516 bp, Cannabis indica
aattatacttggtttcccttttccatctaatggggagtttacatgaaaaatacacaagttagggttgtattcgtgaggcccaacccatgaagtgataggtgtgctgactaggaaaattaaacacgatcaggctatcattactatgtcttataattgtgggtaattaattgtgaattaattacttgatatttattttgggtcggttccttttttaacttaatatgatcttctggctaagaaataaggaaatttaattccttattttgtgcaatttgataaaaaaaaaggaaattgtgttggccttctaggaacacgttgtttgctctttcagaaacacgatactgggactgcttctggcttcgagtggtccttggcggaagctctcttgagagaggagggtagataccttcctagaaggtcttgccaaacttaggcttggcccaagttatcttctctgggcccactggtgggctttggatactgataacatttaaccccaagctttcagaatgttgc

SEQ ID NO: 252919 - DNA, 1097 bp, Cannabis indica
taaaaacatgactttgaggactattgccgcttatttttgggaggttggagactttatctgtaataaaacttaaactttttagagattttttgctgcaaatttctcaaaaatttacagtgagaggttgacttgacttgacttgatttttatatatgaaaaatttgaccaaaattttgaaaatttttacttgacttaaaaagatttacgtagggtagctcacacactaacaaattttattactaattttttaggggaagaaatttaaaaagatgcttgtcctcgtttcttatgtgttcttggaacagataatcaattaaaaaaaaattgaagataattctttccaaactagccgattttgttatggtgacttatgccaatattaattaatcaatagatttataaaagaataaaaaaatattaattactaattattacttgttttataattagctagttttatctttacagcacaaagtccatttaatgggtacaccttttttgtttttttgtaaatcaataatgataggaaaatttatttattcaattatttgtaaatgaaataagatataagaagaagattcaaaattattaattttgtggtacacaacttctgctgagaggatcgagcaataataaaacaaaatttcgaatattagaagacccaatcaaagtcttttaagtagaacaaattacaactcaattttatttaacttatattttgggttggagaataattattttgtaaacattaataattttatataaatttaagtaaaattgatatactatttttctagtctatgatcagtttagatttttgaattattatgcttaaaaacaaaaaaatttagagactgagagcttgacttgacttgacactacaaaatcagctgcttttacgaacaatttttagtcttaacataaattttttgtgactaaatattacttttagtcacaacaaaaaatttctgtgactaaaacataatatttagatacaagttctcactaatttaattttagtcacaataagtattgtgattaaaaacacatttagtcacaacaaaattgtaaatttttgtaactaatatttttagtca

SEQ ID NO: 252920 - DNA, 823 bp, Cannabis indica
aggtcctagtctgggtcgaggtttgggtttagatcctaagtcttggtattagtccaggtcccgctctaggtttgggtccaagtctcagtccaagtcttggttcgagtttaggtttgggtccttgtcagggtttggatcttggtctggctcgcgggtcttaggtcccatcgagggtttaggatcaggtcccacttcgggtctcggtctaggttcaagtcccaggtctcaggtcctagtcctagtcaaggtctcggtacaggttctggtccgagttttggttattgtttgggttcggttctggtctcaagtccaggtcctagtcacagttccagttctgattctatgtccaggttttgttccgggtccgtgtatgggtccaggctggggtaagggtcttattcttagtccgagtccgggtatgggttttttggatcccggtctgggtctaagtttgagtctgagtccaggttcgggtcctgggtttgggtcccaagttcgggtttgggtctgtgtctgggtttgggtccaggtctcgtgtttcgatcctggtctaggtctgggtcggtattcaggtccaggtctgggttcatgtccatctccacgtcagaatcccagtttaggtcaggggcttagtctaggtctgagatcgagtcccgagttttggttcaagtttaggttcgagtctcagtcctagtctgggttcgggactgggttgaggaacaggttagagccctagttctggggcttggttctggtctgttttgggtcttagtccaggtccaggtcctagtcacaatcccggtcctgttccagggtcctggtc

SEQ ID NO: 252921 - DNA, 803 bp, Cannabis indica
atttttgtactctgacgtggcatcacacgatggtgacacgtggaatcaactttatgtacctgctcggaagagatatgccggacagaacaccacatatattcgctcggacgaagccttcctaaccgggcagtgatcagtccgaataacatgccaacacttagcaatttcaactttcacatcgtgagtcatcaaagaaatccctataattttgggattagattcacagggatatggcaagctctctgaatcccatgattagtgtattttgtatttaatatgcaatctttccacttatatcaattgtactcagaagggaaattcttccctcccaagcttatagccctataaatagtgattcacattcactgggcaaagggtcgaaaaacttatctaagaattcatatttagaaatactattgtaagagctctaagaaaagggattattttccttgttcttaagtcaatacaaaccaagaggattaggctattactgaactgctcggggctgaacctctataaaattctcatgtctttatttactttattgtattacatacacatattatactacttgtcgcttactatttagactcattgtcgttggctaaaagcgaggtcaacaatagtagtagtagtagtaataataataataataataataataataataataataataataaactaaacaattaatttgctataatatatttacacatattgttattattaatatacctataataatattgacaaataattaaatattaaattatctctaataattaattatttatctagca

SEQ ID NO: 252922 - DNA, 667 bp, Cannabis indica
tattgaatgtgacatgtctttttatggtgtaattcaagaaatttgggaattagattacagttttcgaatccctatttatctttgtgattgggttaggagtgataatggggttgaaaacgatgaatttggattcaagctggtggacttgaatcgaatcagacacaagttcgataagtttataatggcgtcccaagccagtcaagtgtttcacatgagcgatacattagatgcacgacgcaaccaaaagattatgataatcaagagtttaatggcaatgatctcatatttagtgatcaaattcatcaaatcaccccaccacctgttgatgtcaccattgggaacgatatcatatcatctcgtgatgatggtgaaagattatggttaaatgaatctatcaacacatgatccatatataaaacacgtattggtatttagtctttttgatatatggttgaatgaatctatcaacacatacattgttcaccatgtataaccaaatgataggatgacctaatcgacctacccagtggatgactactatatgtcctcaacaacccggcgacaaacagtgtggatactacgtcatgaaattaattgaaatcttcatgatcgtagaagatccaataaaactgttgaaccgacatgataggttctccactccgtacac

SEQ ID NO: 252923 - DNA, 942 bp, Cannabis indica
atccttttgggtattgaacaaaaagcaaaacaccctttcaagtggggaggaagatagtagtagctcacttctaaagcagttggaataatcttgctcctttcatgtgtcagctcccaaatattattctttgctatttgttcccatctcttagcatccatagttgatctcaagaggcctcctagaactttagcagctaaaggtaaaccattacattttctagcgatttctctgccgatactttttaacttagggttctcaataaactttctagagttgccaccggtagagtgcttctcaaacagtgcccaacactcatcctctgataattctctaagatggtgtgtatcaacagttcgaatgatgtctgcaacttttccatttcttgttgttactattattttgctgcctcttgccccaccgttgaaaggcttcatcacttctgtccattgaacataatcatcttcccaaacatcgtctagaacaatcaagaacttctttcccattaattttttcgacaaattaacttgaagtgaattcaaattcatgtcattgcaaggatcacacggagctacttcttgaaatatagtttttgtgagggccatggcatcaaatttatctgaaacatacgcccaggctctagattcaaacatattttttactctttcattattgaaaagagtttgagcaagagtagtttttccaatcccacccattcccactataggaatgacacatatcttcccaccactaacttcatctgacatcaacaactccattaaagcatccatatcagtatctctaccgtagatttcaggttcatctggcagaggtcttaccgcgtgaaccttctgatggtttcacctcaacaacattatttccaagattcaagtttccaatctgattggctaagtactccaacctcttaagaatctcttccatatt

SEQ ID NO: 252924 - DNA, 840 bp, Cannabis indica
aaaaccatccaaaaaactttaaggttggatggttttttgcaagtaaattgatagttgggggagttttgccgcaaattactcttaaattttttatttttattttaatttttattttgtaaaatatggccacgtaggataattttttagtgacctgtcattgccacgtgggcaaaattaagacttaacgaggctgaatagacggcaccttaaaaatgtaaacgaaacagtactttggagggttttcccaccaaaatatgaggttggatggttttttgcaagtaaattgatagttgaaggggttttgccgcaaattactcttattattttagtgtaaacataattgttcctattcctaataacaaaaactctcatataaaatatggaaattaattttttttgataaaatagaaatttgatgcctccttcccacacactatcaaaatttcgatctgatgattcctaaaagtgatacaatcacaataaactacattcaacaacataggaaagcaaaaagaaccaccagcagaaacaaattgtctcgacaaaaatataatattacttttcatcaaaatgagaaacatctaattttttctcacggatggccctgtgccaatcctcctttaatggggtgaaaattttccatctaaatgagcaatagaaagtagggttggagagcattttttatctgttaaacaagactgacaaaaatatcacttcttactctaacaggaatcatttaatattttattttattttttgtctagtgtttttatattatttatactatttcttttagtatatttggtaaccttttttaatatgtatatttttaagcttgta

SEQ ID NO: 252925 - DNA, 1000 bp, Cannabis indica
catctgcattcagacatctcaagttgctcgtcaaacagctgaagcctaatttactttttatcatggaatcaaaattatcttgtaattcaatcaatcgagttcgttcttctcttagatttagtaatggtttggaagttcctacacaggggttgaaagggggattaatgttgttatggttggatgatgttgatgtaactttaaattcttattcaatgaaccactttgatgttgatgtttcatcggattgctgtccaaagtttcattttactgctttttatggtgcaccggaatctcatttaagacaccatacttggaatatgctaaggaatttggtacaccagccaccaatgaccattgaattggttgatcatgcgggcctttaatgaacttctttctaatgatgacaaggagggggtctgttaagatgagagagtctaatggaggattctaggaaaatattggactatcgcaacatgtcagctgttcctttcaaaggagataaattcacatggactaataaaaactacaatggtgtgctcattaaggagaggcttgacagaggttttgttaatagagtttggggggatgtgtttgttgaatcccacatctctcacttagatttttatagctcagaccatcgagctattgaatatgtagtttctcttccaactcagtcaaatcgtgaggttcatcaccaaagtcgatttagattcgcacagttttggctcaaggaccccgattgtcaagagataatagctacaaactgggctcaatctcaagccgaaaatccaatctcttttttgctgcaaaatattgcagattgtaccaatgctctccaaagttggcattcaaataagtatggtaaaatgaaaagaaatattactgctacccagaaacattcagcagctttgcataacagtcgagatttatctccttcacatgttgctaatatgattgatgctgaaatttttttggatgacttgtttgaaaaagaggaatt

SEQ ID NO: 252926 - DNA, 1239 bp, Cannabis indica
gtacaaaagaaataaaatggaaaaaattagtatagggtgtaaatttccctatatgtattatattagacaactacacaaaatatttgagcccactcaagttaatttgaagatacttataaaaaaataaaagttaatttgaagatgccatcatcacttcaacatttatttcaagttttttattggcccagttgatatcaagtccaaattagctacaataaatctttattttcattcaaccagtagtaacgtgcaagaggaccaccaccttacttcttccttcagcatcgcacggtccccactccacctgacgccccataacaccatttcatctgcttttaagtcatttctccactactcacactacgcaaatatcagatttgagaagaaatttcgcactataaaaaagagccaaatacaatacaaaagacgtcagattttagaataaagaaaatacactttatcattttatatttttctcttattactattttatttatacttattttagtaacaaaaatgcgtgtattagaatagtaatattagtgaagttagagtatagctattgtacttctaatttttaatattaatattaattctttatgcttcatcttcatatcatttattaaattgtttatatcttttaatttttcttctaaatttaatggtaccttttatataagttgagtcatgcttcttcttctttttcttttttttttttttttttttttttttatgtaagtttggctattaattattttggtatatttattatattgtatgtcgtttactacattctactaatagtgatattttatcgatttatgatatataatatgatatgctcataagtaagaaaagatcttcaatttatccaagattaattcatttgtgattttaatatatatcttccgtttgtaaatggtgtagaattgcaaccgtatgttgaattaacatcggtattagaataagatttgcataactatatttctaccttatcgagctctttatttgatcaactttctcatctcttcatttctattatttttagttcattccaatttctactagtttctacctatttatactaatatttagttgcgatttacttccctgagaatacgataaagcacgtttactaccgtgaccgatgtgtaactaattgggcgacatcagtaagtcactcccggagtaagacaagtaggaagaaccaaagtcagagtgaagctttgaagaaacaaa

SEQ ID NO: 252927 - DNA, 864 bp, Cannabis indica
tgtggcaactagaaatatcttcccggtgggttgtcactgtgtgttacctagccctagcatcgtttagctctaatttggagatgcgttttgagggattgtgtttatattggatgaccgattctgtaggaaactcaaactctaaagcttctggatgataaactcttgaaccagagtgggacattgctaccagcaaaaagcagtcccaatccctggagagaattttatcaaactagaaggtaatgagttggaggtcttaaaacaacctacatattctctaaaccctaatatgaacagtttttaccctaaaaaactacaaaaattagatgagatgataacgatacaagcgagtcaagcaactgatccacattatgtaataaacatgaggaagaagaaaataacttactgtttgaagttagggcttggggcaatgcctaagaaatctttctgcgaaccttcgaacgaagcaaggatcgccttgaaaaaatgaagtcggaagaaactcgcaggaaaaaggtcaaagacaaggatggcatgcaaatcttcagaagggtttaatggtgatccttaacgaagaagttaagggtatttcttaacctttctgaaatggtgcaaaggttgttccttttccttattttatactcaaaaagggctttttatcccagtttttaggggcattttatcccagttttcggtaaaataaaaaccgggacatatgccagtgggataaaaagtcttataaaaactgggataaaaggcctctttttatcccagtttttatgtaaaaactggataaaaggaggttttttatcccggtttttaagtaaaaatttggattaaatgtcaaaaaataatcagacctaaaat

SEQ ID NO: 252928 - DNA, 509 bp, Cannabis indica
ccgatccacctgaacacgacacctgaaaagccggtccctcacacaggcgttttggcacctataaaaattattaaaatagagtgtatttataaaattttggagtgcaaataaaactattctaatagaaaacatgaagaagaatttttttaatgatttttgaatggctagctaatcttgaaagataaataataaaataatattagttgttaattatattattaaataaaatagaaattaattagttagttgttattttttatatttttgaataaagtgtgtaataaaatttaaataatagaatatacacgtgtaaaatatatgaaataaacccctctctctttctctctcgtctgtatataaaagcgaagaaagaaagaaacccaaacaaagcaagcggaagagaagagaagagaatcagagatcagcagcaatttctccatttttcgcttcaaggtaaaaaggttaacttcttcttttttctttcaatttctccaattttagtttgattg

SEQ ID NO: 252929 - DNA, 1736 bp, Cannabis indica
attatactacaataaaatatatgtagcatgcgaataaaattatatacctacattaaaatgtatatattatgcttataaaaaatttccacactatacataaaataaataaataaataaatatcatataagaataataatatatatcatataacaaaaaagaaatatattgtacaaaaaaatttatatacaaacaacccaaaataattaacccacaaaaaaggtacattaaatttaaattgaataaagagcatctatcgttatgtgctctgaggcagttatagtcctttaatggttatttcctctatttgtcaaaatcgcctaaaaacttcccattaactactcccttcaattcaaaaattgctagttcttttcacctgaatcatgaatcttctcattagcaaaatgaaaggcacaataactcttactgaagaagatgaatcaacgcttatctttgatgatgatgattatgatgatgaatgaaatgttggtttggacaatgtgttagtcgctagagtgctcactaccaaatctgtttttctgtctacactatagaggcagataaaggatcattggaatggcatgtaccacacgatgattactaagaaaccaccgaatatgtttgttcttacttttggatgtgaaggagacaagcaaagggtacttctcgaggagccttttcactttcaaaataaacatattgtgctatacacgccaaatgctctacaaaatgttttacctgaagatcttatattctattctccttgggtccaatgttatagacttcatttttttagtaattctaaagcattagccaaagctttaggagatatcattagagaatttttgaaagtccatgaagactcgatggaagaggttggtgttcttttctacaatttttgagttaattagatgtgactaagcttttattgaagggtcacaacataagacagattcatgacaaattatgggtggaatttcgttatgaaaggcttccaaagggtgtatggagtgtggaaggcttggaaaaccatttcagaaatgctggagtcgatggaaaaaattgataatggtattgaacctgaattaccatatggacctgaattaaaagaggttgtaatccctacttctggttatgataggtacagaacaaatttctctaaaggaaatgcctggtcacttctcacgcacttggctcgaaattcgttaacctcagcagttcaagccctttcaaataggaaagcaccacatccatgaccacttttgccaggagaatcataagagaaacaagaaaatgccaatactaaggctattattctaagatccactcaatccataaatgaaacttcttctttgatcaaaaatgttgtgtctagttagctgaacgtttcggttcaaagtgtagtaatgttgaatgcaaattaagaatgccactactaataaataatttgccaccactatcctctttaaactgacccttttggccaatatcatggaccataattctagtgcaaagaccaaagcctcaagtcctttctcttcaacaactacagtaaataaacccatagtaaaggctctggatgtagatgatctatttgatctttaaatcccagatattggcaccattgccacttatcctcctattccctttaggatacatgctcctcattatggatttggtttcaagcctttgcaaatgatcaccattgcagtaaaagatgttgtcataagttcaacta

SEQ ID NO: 252930 - DNA, 825 bp, Cannabis indica
gaccaggacctaaacccaaattaaaaccccgacaaacccgaaacaagactaggtctcaaaactaaacctagactgggacccaaacccacacaataaccgggacctggaccaagaatcaggatagggacctgggaaacagaactaggaccgggacctagttaccgaccaagacccgaacttgaacctaggacccagctcgtgaccctacaccagaaatggaaccagactgggacccgagatcgggatctggatatggacccagggctcggacaaaaccctaagagtgtgtggatttgggacccagccctggaaccgaaccctgacaaggacccgaacccacacctggacgtgattgggacccagtcccaaaccaaaaagctgacccgaacatgtaccatgtgacccaaaattgaaaacaaaataagaagatgacctggagtggaactaggacttcgacttggaatcataactgaaattggacctagatcaaaaaccgtaaccggacaaggacccgcactccgaatcagacctagactcaggacctgaacccgaaccttagctaagacccaaacatgaaaccggactagggacacagaactagggtcgagacctagaaccgcaccccagtctcgatcccgaacccaaactgagaaatgggaccaggtacctgaaccaaaacaagaccgagacccgtgacattgatccagatcttgactcaggattcgagtaacggagcttagaacagtccagtagtcgctgtctagatctgggactcagactaggaccagaacccagacgaagaaccaaacccaaacccagacctag

SEQ ID NO: 252931 - DNA, 853 bp, Cannabis indica
accaagggcgtcattattttgtggtacatttatgctttactgatttttctgagtgagctatttaagttccattgattccatgcccgtttcttatttttgttctttgctataacatcaagctggtttttcagttttctaataactttgctgttcaagtatgttcatgaagcattggtcaactctacacatgttttacaaatgctattagttaagaactaaattacgttaacttttaaacccaaagaaagatgttacatttatctaatactgcttttctttaatggaagtgattcgaattttagaactttcacatttccttccacgagattatgtatctaagttgtctttgatgaatactctcttccccattaacaaaaactaatagttaaatgacgtgttagactttgagcgatatggactttataaagcttacgaagctgtgattttcatcgaaagtctaaactctcaattgatgacagccttgcagagcccgttgatgagttgcaaaaatcttatgagcaattcctttgtcgcctgaagagacacaacaacaaaataaccaaggtagttctttagcgttacatgttgcgagtttggtttgtgttcttttgttagagagagtaacctgtcatcttactatatctgtaatctgaatgtctggaaatgtctggcagcgcaaggaaaaatctacaaaagagtacttgtctgggaggggtgccccgtctcagtggcaatgagactgaagtaaagaatcaaatgcctcacgagatgatggtagacaaagaaaataacagagggaagttctcagcaactgaagacattaactgatactgatgtaaatgatctccatgga

SEQ ID NO: 252932 - DNA, 803 bp, Cannabis indica
tcggtgcaggtggtggtggtggtagagaatgtgcgagtagtttacttctcgtacttccagcaaagtttctttcatcgaaagatgcaggcttggttggattaggcgaaggtggtttattaccacctctttgtaaagacaaaatcaataagttatttaaatctcttctctcattcaaaactcgaccaccttcaactgaatcaacacacaataaattgataatcaccagagtgaccaaaaccactatcacttttctcatcattatcaataactgtatattaactaaaaaatgtattgtattatgtatatatatatacttttggtacttgatatattatgcttatatgtatggttgatatagaaaataattaataatatatgttgatgagtttataaggatggagctaatgaggggtttttatagcatatgtttgtgtgcgcgtatatattatagcttttttgtaagacttggtttggggtttctttctaatactataattggtcaatattaagtttggtttgaccgttgactagtttataaactatgtgaattagtcatacacgatttaaccaagacttaaaactttatacatgatcacactgggttttgtaacatattaaatcaactatactcatttttttttagtaatttgtacttatattaagtttaattttcgatttcccttgttaataaatatttaagtttcataataataactaaattatatatatttttgaaacattggtagttcattaaatattaagttaatgactacctctagttatacttttttaaaatattattt

SEQ ID NO: 252933 - DNA, 635 bp, Cannabis indica
cgtgctgattgatgatttgctcgacaaaagagtacactatcatcagcaaaaaagagatgggacaccgaaggagcagttctagagacttttaacccgtgcaatgatccattttgttctgaaatttgcagcagccttgagagtccttcagcacaaattaaaaaaagataaggtgagagtggatcaccttgtctaataccacgtgtaggtactaactcacccaacacttagccatttaaaaggaaggaatatgtaactgattgcaggcagcggagtatcaagtcaatgacaacagatccaaatcccatctttaacattacttgagcaagatagggccactcaacacgatcgaaagctttcgacatatccaatttaattgccgcataaccttgtgtgcctcttttacgattcttaagagaatggagcaattcaaaagcaacaaggacattgtcagtgatcaacctttgagacagaaaagcactttgatactcagagataaccaaaggtaagaatggctgaatacgcagaacaattgatttagatattagcttgtaaagaacggtgcacaaactgatcggcctatattgagtgataagttgtggcttcttaaccttcggtattagtgtgattatggtttt

SEQ ID NO: 252934 - DNA, 781 bp, Cannabis indica
aattttaaacttatattcaaaagccttagatgtccaaaaaattaagtttgttgccaaaaaaaaaaaataatcactatagaatttttctcccttttgattcattaaaaaggatggcaaaggaattctcaaaataaaagacaaataaaaagatagaacaaagcgtactattcaccataaaaaaattcaaatacatattatccaaaataataataaaaaaataataaactaacacataaaagtcaaaaggcactaagcctttgcaatcatactaaaaaataaacatgagaaaagatgctaaaaacaaataaaagagagctaatttggtggaggtccaaaacgattcatgtatgccctccatcgtgccatctcctcttgagcatcgacaaatacatgctccatgtaactcctcatagtggcaatgtcacctctcatggtggtcatctcattttgaagagtagaaaaatgagtgttcaccttattaatatttgaagcaatggaggtgtgaaggtgagcaaagcctcttcgatgttgaagtgaggggcttgtggcattggaggaacttcttcttcggctttctttttgccttgagcttgggcttcttggtcttcctcttcactttcacataagaccaaagttgcttcctcatgggcatgtggaccttgttttgtggaaatccacttcttttcaacttcattaaacatgtagcacatagacttgaatgttatctaacccagattgtcagaatccttcagttcattaatgccagtttcattttcaattg

SEQ ID NO: 252935 - DNA, 778 bp, Cannabis indica
taatctggattacattgaaacagagttttatttagggcataaaacccaacagtatttatatgcattaatgtcatgcagtacgattgtggccccaagggagtagatgacattcataagttggaggttgtaggtatagtttgtgccttgtaagtttttcttatgtcaggtggtgccaagttgcaaaggtagttgttatgtgcacccttggtcgagatgtcaagacttgcaggtgtggtgcctcctctacttgtaccatatgggcaatagaacttgtaggaggactggttgtactccccttgcaagcacttcttgtcgtttgtatgcacaccttgtctttacgatcatacctttgctacattcatcctcaacactttggaaaactttaataagcatagttgtatcgtcaagaagagcattgccgagtgacatgcatgcaagtctttgttgtgtgactttcatgctatctctactaagcgacatgcattaaagtcttggttgagtgagttgtatgcttatcataactgagcgacttgcattgtgcatgtccgattaacttggaagcttggtgcatggtcaagtgaatttcaagcttggtgcatggccgagtggcttgcatggtcgatggccaagtgactttcaagcttggtgcatggccgagtgagttgcatggtggatggctgagtgacttgcaaactttgtgcatggccgagtgacttgtatggtgcatggctaagtgacttgcatagtgcatggttaagtgacttgcaagcttggtgca

SEQ ID NO: 252936 - DNA, 1946 bp, Cannabis indica
actaaagtatttatggaaattattatgagttaaaggtaaaaatttattattttttgtattagatgtattattaaattaacattttatttatagctattatatgtatgtattaaatattaatgataaaagaagtatgacctcttgtattttttacttcaaaatgtataaagagaaacaaaaaaatctttctcaaattaaaattatttggatctgtaaaatatttttttttgttaattatgcatagttaaatgactatttctatccttacaaaataaataaataaataaataaaagagtatttctattcaggagtgtgttatttttatacctattaaatattgacatttatataatttaaatttgatcaaattaaatgatagtgtaaattaaatttttgtcaatggctatacaacttggaggatttttccaggaaaatagtatttggttcttcacaatattatagttctgcagaattttcatctatatatatatatatatcaatagatagtttacttttgtgcagattgaaggagcttttgtacaaggagttgggtttttcttgtatgaagaatatttaacaaattccgatggactagtgactgctaatgggacatggacatacaagattccttcattagacaccattcctaaacagttcaatgttgaagtattgaacagtggacgtcacaaaaaacgtattctctcgtccaaaggtatcattcacttcatctttctcaattcaacatttgtctttagtgtaaaaatattgcactgaattgtgaaaatttctggatcatcgagctcttatattggaagacctcttagcaattctacacaataaaattgttagaaagaaaaatgatctggtgtttacataattaaatcaatgttagtttggattaaaatgatttaagcttctggcaattcaaaatttatgtggtagacagatagaaaagacagccaccgggatgagaaatttaactgtattctgccataatcatagcttgcaacttccagtgggacttcatacagattggggttgactcctgatttcatgctttgtctagtagcttagtgacagcatttgtttgctttttttattttctccccttcagctaacttattttctcatagttcaattgatgggctaaatcacttcttgttctttcctggccaaatgaaagtgtagtccatctttcagggtggaaaatataccacctgaaaatattagctcctatgtaaagaaaaagcctttgctactttattctgtttacataatttaatcaatgaggtctttctatttcccaaaggctactctagtgacaagcttaaacaaatgttatcattttgtgcaggttctggcgagccaccattgtttctatcggcttccgttcactctgctgcaagagctgccatcagagcagcaagaaaacaaatcaattcatggggaagcccgggaggatccgactccatattccaattggatgttcctgctactatgccagttgtgaaggagttttgtggactggacattgtggagaggtacttggaatggaaaaaatgcagaaactgaagacactacagatgattctgaagcattgtttatagttcatacataaggttcatgcctcgtctctaagataaatactcattagttttaagtataaccatttcgtttttcttctttttcattcttggttataaattcttacactataaaaaacagaataagtgtatactctgtacacaaacaaataagcattctgcaaaagggaaacgtagtagtagtgctttaagtttgatgatattttcatcgttcaataaaatgttgctataaattcccaaataatatcatgtcatcgtgttgttttaagaggactcgtttgtcatgcttgaagcagttaatattattctccagtttttaccaactttatcttcttcttctt
